United States Patent Application Publication US 2005/0228172 A9 - sequence listing, part 209

SEQ ID NO: 946882 - DNA, 550 bp, Homo sapiens
atgctgacactttcacaatttaacccatgttaacgcctctggtctcaaacgcagatacagcataacctggagagaagctacagctattatccagcaatgtccaacttgccaaatggtacattcctcatcttttacaggaggattggaacctaattctctttggcaaatggatgtcacacgtgttccctcgtttgggagactagcttatgtacatgtgtggacaccttttctcactttgggctacatgccaatcaggagagtcttctgcctgtgttaaacgtcacttttgcagtgttttgtggggatgggcatcccaacttctattaaaacagataatgccccaagctatactagccaagctctaactacatttttctgtatgtggaatattaaacacattactggtatcccatacaatgctcaaggacaagccatagtggaaagaattaatctctccctgaaacagcagttgygaaagcggtggggggaggggggaaatagagaatatggaacactgcagatataattgaatctagcattattaacttta

SEQ ID NO: 946883 - DNA, 550 bp, Homo sapiens
atgctgacactttcacaatttaacccatgttaacgcctctggtctcaaacgcagatacagcataacctggagagaagctacagctattatccagcaatgtccaacttgccaaatggtacattcctcatcttttacaggaggattggaacctaattctctttggcaaatggatgtcacacgtgttccctcgtttgggagactagcttatgtacatgtgtggacaccttttctcactttgggctacatgccaatcaggagagtcttctgcctgtgttaaacgtcacttttgcagtgttttgtggggatgggcatcccaacttctattaaaacagataatgccccaagctatactagccaagctctaactacatttttctgtatgtggaatattaaacacattactggtatcccatacaatgctcaaggacaagccatagtggaaagaattaatctctccctgaaacagcagttgcgaaagcggtggggggaggggggaaatagagaatatggaacactgcagatataaytgaatctagcattattaacttta

SEQ ID NO: 946884 - DNA, 711 bp, Homo sapiens
tgggaggctgaggcaggagaatcctttgaacctgggaggcagaggttgcagtgagcygagatcacaccatcacactccagcctgggctacaaaagtcaaattccatctcaaaaataataatgataataataatgttttctacaagcaaggagttactttgtactgtgaactggtgtgaagggatctgccatgtgtaagcttttggattgatgacagttatttctaattttaaaaatagcaacccaacagaaaattgggaaaatgcattaatagggatttcacaaaagagaaagcctgcaaaacataaaaattttctcaacctcattagtaatcagggaaatgcacaagatactacacatctattctctccacaaatattaagaagtttgacaatacaaaatgtattagtccatattcacactgctgataaagacataaccgagacagggaagaaaaagaggcttaattgcattaagggttccacatggctgaggaggcctcagagttatggtggtggatgaacagcacttcttacatggcagtggcaagagaatatgagaaggaggcaaaagaagcaaaagacaaaaccactgataaacccatcagatcttgtgagatttattcactatcacgagaatagcatgggaaagaccggctctaaagattcaactacctcccccggttccctccccgaacacatgggaatcctga

SEQ ID NO: 946885 - DNA, 711 bp, Homo sapiens
tgggaggctgaggcaggagaatcctttgaacctgggaggcagaggttgcagtgagccgagatcacaccatcrcactccagcctgggctacaaaagtcaaattccatctcaaaaataataatgataataataatgttttctacaagcaaggagttactttgtactgtgaactggtgtgaagggatctgccatgtgtaagcttttggattgatgacagttatttctaattttaaaaatagcaacccaacagaaaattgggaaaatgcattaatagggatttcacaaaagagaaagcctgcaaaacataaaaattttctcaacctcattagtaatcagggaaatgcacaagatactacacatctattctctccacaaatattaagaagtttgacaatacaaaatgtattagtccatattcacactgctgataaagacataaccgagacagggaagaaaaagaggcttaattgcattaagggttccacatggctgaggaggcctcagagttatggtggtggatgaacagcacttcttacatggcagtggcaagagaatatgagaaggaggcaaaagaagcaaaagacaaaaccactgataaacccatcagatcttgtgagatttattcactatcacgagaatagcatgggaaagaccggctctaaagattcaactacctcccccggttccctccccgaacacatgggaatcctga

SEQ ID NO: 946886 - DNA, 463 bp, Homo sapiens
ataagctaccaatttactttgccagggtgaaattcaacagaactgttttagggtaaagatcttgaggcccacaagaaatttccttgtggataaattgtgaggraggtgtgtagcttttttttttttttttaaatctttgtggctatcttatttgggaataaaatgggaggcaagtttgcctaacacagttcccagcttgacttttccctttggcttactgattttggggtcatgagacttatttttctttcaaatttccacccttttctttttaaaaatctttcagagaaagcattttagaagaaaatgagtctctgttctcaagttttgtctaccccaaaccttatgaatggaaccttatttgcaaatagtctttgcagttacaattagttaaggggaggtcatcaaggtgggccttaatccaatatgacttatgtgttttataagaagagggaaattttga

SEQ ID NO: 946887 - DNA, 411 bp, Homo sapiens
caggaggctgaggcaggagagtcatttgaacccaggaagcagaggttgcagtgagctgagatagcaccgttgcactccagcctttgatagaaggagactctgtcaaaaaaaaaaaaaaaagggaaggggaggggaggggatcgtggtcccatgaacagtgagccctgtgggtggagttggctccagttctcagtgtgatcaagccctgctcctacccgctgctcctaacagggtagggggcaaagaacatgcacagacacatgttccctgcagttttcccatcacgaagctgcaggggagctaacctgcgtgggtgcagagggtggcactggaggacacatcccttctggaagkacacgggagacctctttccaacgtacaacgcttggcgctgtttgtgcctccacttcc

SEQ ID NO: 946888 - DNA, 767 bp, Homo sapiens
aatggaagcaaacaccgtttacaatagcaacaaagacaataaaatacctgagwataaacatagcaaaaatgtgcaaaaaagaaaactttccatctctactggaggacacgaaagagtaactgaataattagaaaggcacaccatgttcttgataggaatacacacttcataaagactgatcaatctggccaatttagtccatcaattaaacatcatcctattaaaaacaccaataaattttttgaggcagataagctgattttaaagttcatatgaaagaaataaacaagcagaaatagccagaaaatttccgatgaagaagaaaaaaaaaaaaaaaaggagaaacaagccctaccaaatagcaaaatatagagctataattattttaaaaagagagtatttgtgcattaataaatgtatcagtgaacagaataaaaagtctagaaaaaactcaagtatatacaggaatttaatatgtgctaatggtggcatttcaaaacaggatatgattgattattcaataagtaattttggataactgagtagtgatctgaaacataataaagttggatttcaatccaacttattctaatccatatcttatattaagttacttctataatttagcaaaaaatttagtgaaaaaaatggcccataaaaatgctaaaagaaaacatggaaaaaaattttttaaataattttagagtttcagagtagtttcttctaagcacaacacaaaactcagaagatatttttaaaatttgata

SEQ ID NO: 946889 - DNA, 582 bp, Homo sapiens
gagttcgctggaggtccactgcagaccctgtttgcctgggtatcaccagcggaggctgcagcaaatattgcagaacagcaaatgttgccgcctgatccttcctctggaagcttcatctcagaagagcacctggctgtatgaggtgttagtcggcccctactgggaggtatctcccagttaggctactcgggggtgagggactcacttgagaaagcagtctgtccattctcagatctcaaactccgtgctgggagaacctctactctcttcaaagctgtcagatagggacatttaatctgcagaggtttctgctgccttttgttcagctatgccctgccaccagaggtggaatctacagaagcaggcaggcctccttgagctgcagtgggctccacccagttcaagattcctggctgttttgtttacctactcaagcctcagcaatggcaggcgcccctcccccagcctcgctgccgccttgcagttcgatctmggactgctgtgctagcagtgagccaggctctgtgggcatggaaccctccaagccaggtgtggggtataatctcctggtgtgccgtttgc

SEQ ID NO: 946890 - DNA, 582 bp, Homo sapiens
gagttcgctggaggtccactgcagaccctgtttgcctgggtatcaccagcggaggctgcagcaaatattgcagaacagcaaatgttgccgcctgatccttcctctggaagcttcatctcagaagagcacctggctgtatgaggtgttagtcggcccctactgggaggtatctcccagttaggctactcgggggtgagggactcacttgagaaagcagtctgtccattctcagatctcaaactccgtgctgggagaacctctactctcttcaaagctgtcagatagggacatttaatctgcagaggtttctgctgccttttgttcagctatgccctgccaccagaggtggaatctacagaagcaggcaggcctccttgagctgcagtgggctccacccagttcaagattcctggctgttttgtttacctactcaagcctcagcaatggcaggcgcccctcccccagcctcgctgccgccttgcagttcgatctcggactgctgtgctagcagtgagccaggctctgtgggcatggaaccctccaagccaggtgtgggrtataatctcctggtgtgccgtttgc

SEQ ID NO: 946891 - DNA, 749 bp, Homo sapiens
aagcctttcccaaccctaggcagcacagctctgggggcaattctttccctctacttgaggaaagtagaggggagagtaaaaaggactttgtcttgcaacttggatacaagcttagccacagtggaatggggttccaggcagggtgctgaggctcccccattctagggcctaactcttggacatttctagacacctggggccagaaaggaacccattctcttgaaagaaaggaacaaatactgacatgattcatcacctgctgcttaaagagcccttgggcactgaataatcagcaaatggtagtgaggcagtactcatcatgggccttgggtgagactcagagctgtgctagccccaggtgtaacccagcacattcccagctaggtggctatggggagagactcttattgcttgaggaaaggacagggaagagtaaaggagactttaccttggagtttgggtaccagctcagccacagtggggtagagaaccaagctgtctcctgcagtccctgattctaggcctttgcactctcgacctgcccagggacagaggagagcctgctgtcctgaagtgagagacacaggcttggcagcatttaacataaactgattgcagagcccttgagcctttaktgaatattggcagtagccaggcagtatttgctgtggtcctggggctgtggtggccacagagagagactcctctgccgtcaagagggagggaaaagtgggaagaaccttgtcttg

SEQ ID NO: 946892 - DNA, 578 bp, Homo sapiens
cttggctcactgaaacctctgcctcctgggttcaagcgattctcctgcatcagccttctgagtagctgggattacaggcrccgccccccaaccacacccagctcatttttgtattttaagtagagatggggtttcaccatgctgtccagactggtctcgaactcctgacctcaaatgatccacccacctcagccttccagtgtgctgggattacaggtgtgagccactgcgtctggcccccttcgtcttcctggctccccatagctgatctagtatccaatgcccttcacacttatttcttttctcccgttctatgtttaaaaattcatctttctgagttcttctctatttatccccctaaaaattctgagaacaaaacaacaaaactagattcttaaaacaataccagctcactatttctttgccctaaggccttcaaaaactcttaccgtcaatataaagtcaatctccttactgaattatataaataactccacaaatggcctttaccttccattctactttcatcttccacgcatctcccaatttaaccatcttcattttaacacctctctgtg

SEQ ID NO: 946893 - DNA, 583 bp, Homo sapiens
tgggtagtaacaagataataagggaacaagtggggaagcatggagaccacttgggaggctcctgcaataatctaagtgagacttgatggtagcttggaccaggggtttttgtggtaaaagtgatgagaagtggttgaattccagatgtattatgaaggctgagccagaagaatttgttgacagatcagttgtggggtaggaaaggaaaagaattgagtaatttcaaagtttgtagaactgaaggttgaaattgccattaactgagatggagaacatctgtggggagaacatagcgaggagaaaagttatcaggaatgtttaccgaaccgaacttgggttcacctgcccaatgcaggtaagccaaacactggcatcgagattgcagcaaaagaaaatgaggcatttattgcagggtgcccagcagggaaaatcaggcagctcgtgcttcagacccggaytctccaatggcttataggtaaggatttctaaaggcaggaaagcagaagttacaggcaaagtcctaagtcaatacatggagcttatacattggtttgactgaaagaggctgggtatcttgaaccag

SEQ ID NO: 946894 - DNA, 649 bp, Homo sapiens
attaaagactattataatcaggtataactaaaaaactggaaagtctagaagaaatagataaatctgtggacacatacagcctaccaagattgaatcaggaagaaattgaaaaccagaacaagccaatataagcaataagacttaatcagtaataaaacatctcccaacaaagaaaagcccaggattggatgtattcactgccaaattctaccaaaattataaagaagaactaactccaattctcctcaaactattcccaaaaattgaaaaggaaagtactgtccttaatgcattctacaaaaccagacaaggacaaaacaacaaaaaagaactacaggccaatattcctgatgaatatagacgtaaaaatccccaacaaaatagtagcaaactgaatccaacagcacatcagaaagataacacaccacaatcaaatgagatttatcccagagatacaaggatagttcaacatatgcaaatccagaagcattatacatcacatcagcagaatgaaggatgaaaaccatatgatcatctcaatagatgcaggaaaagcatttgataaaatccatyatcccttcatgaaaaatccctccacaaactatgcatagaaggaacatacctcgacattaaaaatgccatgtatgac

SEQ ID NO: 946895 - DNA, 600 bp, Homo sapiens
tcagaatgaagtaaaattgttcctgtttgcagaaaacgtgatcccacagacagaaacacctaaacactctgttagaactaagaaaccaagtcaataaagttgcaggatacaaaatcaacacacaaaaatcggtatacactaacaacaaaatatctgagtagaaaattaggaaaatattttatttacaaaagcatcataaaaatgaaatacttacataaaaacataacttcaggaggtaaaagacttgtctactgaaaactataaaacattgatgaaggaaactcagcaggacagaaataagtggaaaatttctgtgtttgtgattagaaaacttaatattgtcaaaatttccatactactgaaagtgatttacagagttaatgcaatccctatcaaaatcccaatagcatttttttcaaaaatagaaaaaaaaacacaaacagtaaaaacgatcttgataaagaacaaagtagaagacatcatacttcctggttttagaatctactacaaagctacactaatcamaacagtatggtgttgacataaaaacagacatatgcagaaatcaaactggatagagagcttagaaataaatgtgca

SEQ ID NO: 946896 - DNA, 565 bp, Homo sapiens
agtgggagtgtgtgtgtgtgtgagtgggagtgactgtgtgtgtgtgtgtgtgggagtgtgtgggagtgggagtgtgtgkgggtgagtgtgtgtgagtgtgtgtgtgttgttcactcctatattcttagtgcctagaacagtctctggggcataaaagaggttcaatcatcatttgttgaataaataacctaggacgatacaggaacacatgttacagacagaggagaggaaaaataggaaggaaaataggaaactcttatgaaagaggccgtgcttgagctgaccctgtgacctggtgaaggcccagcagagcacgtggcattccaggtgcagaagaagcaccaggtggtgacactccaggggacaggatgtgtggctgacatgaggtttccaccaaagccaatgaggaattgtggtgatggctgcaatcaggacacaattcaagcaatatcggtctgcgctgggcatgctccggggtccccgcattctgtcagttccccgtatgtattctcttaccctacaagacaggagtatgaggactgagaagccacctcccagaggcata

SEQ ID NO: 946897 - DNA, 565 bp, Homo sapiens
agtgggagtgtgtgtgtgtgtgagtgggagtgactgtgtgtgtgtgtgtgtgggagtgtgtgggagtgggagtgtgtgtgggtgagtgtgtgtgagtgtgtgtgtgttgttcactcctatattcttagtgcctagaacagtctctggggcataaaagaggttcaatcatcatttgttgaataaataacctaggacgatacaggaacacatgttacagacagaggagaggaaaaataggaaggaaaataggaaactcttatgaaagaggccgtgcttgagctgaccctgtgacctggtgaaggcccagcagagcacgtggcattccaggtgcagaagaagcaccaggtggtgacactccaggggacaggatgtgtggctgacatgaggtttccaccaaagccaatgaggaattgtggtgatggctgcaatcaggacacaattcaagcaatatcggtctgcgctgggcatgctccggggtccccrcattctgtcagttccccgtatgtattctcttaccctacaagacaggagtatgaggactgagaagccacctcccagaggcata

SEQ ID NO: 946898 - DNA, 565 bp, Homo sapiens
agtgggagtgtgtgtgtgtgtgagtgggagtgactgtgtgtgtgtgtgtgtgggagtgtgtgggagtgggagtgtgtgtgggtgagtgtgtgtgagtgtgtgtgtgttgttcactcctatattcttagtgcctagaacagtctctggggcataaaagaggttcaatcatcatttgttgaataaataacctaggacgatacaggaacacatgttacagacagaggagaggaaaaataggaaggaaaataggaaactcttatgaaagaggccgtgcttgagctgaccctgtgacctggtgaaggcccagcagagcacgtggcattccaggtgcagaagaagcaccaggtggtgacactccaggggacaggatgtgtggctgacatgaggtttccaccaaagccaatgaggaattgtggtgatggctgcaatcaggacacaattcaagcaatatcggtctgcgctgggcatgctccggggtccccgcattctgtcagttccccgtatgtattctcttaccctacaagacaggrgtatgaggactgagaagccacctcccagaggcata

SEQ ID NO: 946899 - DNA, 558 bp, Homo sapiens
gtcattgatgaaattgttgtgaccagaatcttgcaggaatctaactgtgagggttaattttctgtgtcaagttggctgagccacggcrcccagatatttggtcaaacatgactctgagtgtttctttgagggtgttcccggatgcaattaacatttaagtcagcagactctgagtaaaagcagacccctccctgccatgcgtgggcctcatccaggctgctgaaggcctaaaagaacaaggacagaggccccggagctgggggtttccctgcagatgctctctgccctgaaccaaagcaccagctcttccaccagcccaccctgggcactttggacttgccagcccccataatcacataagccaatttcttaaaatctctcactgtctgtacacacacacacacacacacacacacacacacacacacccctttgtttctgcttctctggagaatgctgactgataaacttcctgtatttcccctgagagcaatggttcagaattcactaatacagtgtttgtggcgactttacagaacagagcctcctcgagtgaca

SEQ ID NO: 946900 - DNA, 596 bp, Homo sapiens
gtgacctgaatgcattaacaaatttggattctttcctattccttacwgcctagcaaatgaggctcagtgttaaatatcactctgtgcatgtatgtgaaatgaaaaggttctaccttataactttctccatcaagggagagaaacacagttgagacagtatacgacagaggttgacaaggcagatgtggcataaggacaagagataagaacaattttaggtgctggtaatagccttgttgatagagttgattgtggatctgagaaaggaatcaagggagctaatgggttagaatatgggtgttgagaaatcagaaaccacaaaaaaggttaagtacaggttcagtaagagtgagtgaagagaaaacagaattatgatgaacagacaaatgagataagagagattcaaagttctcaattttgaagctggaacattagttcccagagattatatgaccctttgagagacagtgtttagaggtgctgatgggggatggcaattttgaggaataagatcgtgaataagaataataaaactaaagagtgtgagagagtcctggaggtcagtggaaaacattaatgtggatgagaaaagtcag

SEQ ID NO: 946901 - DNA, 573 bp, Homo sapiens
aaaacagtctggtagttcctcaaaaggttaaacactagagttattttatgacccaacaattcaattcctakgtatatatccaagagaagtgaaaaaactatgttcacacaaaaacttgtaaataaatgttcatagaagcattattcataatagtcaagaagtggaaacagcaacaaatatccatcaactgatggatgaacaaataaaatgaggtatatccacatggtggcacattactgggccataaaaagaaatgatgtactgatacatgctacaacatggatgagtcttgaaaacgttatgctaagggaaagaagtcagtcaccaaggattacatattatatggctctatttatatgaattgtccaaaactggcaaacccacagagatagaaggtagactggtagactagaaggtaccactcctagactggtattaggagtaggagagctgggggaaatggggagtgactgctaatgggtatagggtttcttctggggtgatggaaatgttctaaaattgagtgtggtgatggtttacacaactctgcaaatatactaaaaaccactgaat

SEQ ID NO: 946902 - DNA, 581 bp, Homo sapiens
agcacccgccccactggcaagctgsgtagtgaatggcgggcggggtccacagtgcccctctctaagggtgaacggctgggtccagggctttgtggccggcatgtgaagacctgtcctgcttaatcatgccctgatcagacatgacacacggctgctagaagagcaattatttgaaagatactctgtcttgcttctgtcttctcactttaagtagcttcaggtcttttaacccagaacaaaacagaaactgctaagaattaacctattttgttagttctggatgatctctttttacctttgacaggaaatgtttctacaatgtgtcaggtctctctacaataaaaacatctacagagactggagaaaaaaattaccttgctaaaactaatttctaaactgcgtatgttaagactaaagtccaaaaccaaaagcccttcaataatgtaccctaattaggtaacttgcagctacacttcttacttaaactaacaagataactactgttccaacgggcagttttccaaaaaaaaaaaaaaaaagaagaagaatctttttctaaaatctaatccctctaaggtggg

SEQ ID NO: 946903 - DNA, 581 bp, Homo sapiens
agcacccgccccactggcaagctgcgtagtgaatggcgggcggggtccacagtgcccctctctaagggtgaacggctgggtccagggctttgtggccggcatgtgaagwcctgtcctgcttaatcatgccctgatcagacatgacacacggctgctagaagagcaattatttgaaagatactctgtcttgcttctgtcttctcactttaagtagcttcaggtcttttaacccagaacaaaacagaaactgctaagaattaacctattttgttagttctggatgatctctttttacctttgacaggaaatgtttctacaatgtgtcaggtctctctacaataaaaacatctacagagactggagaaaaaaattaccttgctaaaactaatttctaaactgcgtatgttaagactaaagtccaaaaccaaaagcccttcaataatgtaccctaattaggtaacttgcagctacacttcttacttaaactaacaagataactactgttccaacgggcagttttccaaaaaaaaaaaaaaaaagaagaagaatctttttctaaaatctaatccctctaaggtggg

SEQ ID NO: 946904 - DNA, 563 bp, Homo sapiens
gccctacctccgggttgctgacttggtctgaatgactgatttcagcaaaggtgtatggttagaaacttggtggggtggctaagttagaggactgtggtcccagaagcccttggggcagaacctgccctgacttgctgaaccagtatggagaaaattcccagagccagggttgggtcaccattagcaactgaagaggagcaaaacagacaaggaccttgaatagataaaggtttgaataatgaagagtccagaaaactattgaataaggttcaacatgaggataagagttgaccagttccttgacaaatcaaacgtgatacttgtgttttcagaatttaccatatcccaagtgtttaacacagtgtccagcatatagcaaatatgcaaatacctaaataaaaaataattggtgctgccactcatttttgcatttactcttttgttgccrtgtttcactttggtgttcttaataaatgcatcactggcatgatgataaggaagataattttgatgataatgatgatggaaggcactatcttttttttttttttttgagacggagt

SEQ ID NO: 946905 - DNA, 613 bp, Homo sapiens
acttaatgattttttagaacaatttacaaatctgccctaattcaattagtactataataatctaccttaaaatatggtggggcattctgttacgtatttactgcgtctggttctggtctgtggaacattataacacttgttatcagtggtatgctggtaaactggctctatgttttgttttgctttttaaagccttgatttctagtgttttcctatttccatgatataaatacagtactctcgtaaggggctggttttaaaataccaaaagtttaacacccagcttttgaggtttctgaatatgtgacagtttgctttttggagatggttaagagtggcctccagcacaccactgaaagctattgtaaataataaagatagtctgctaacaatttaaaatcctgaaagtttaggactaaaagcactcagaatattgtagtcctacccctaactttgtaggaaaaaaagattaaactgaaaaatagtgacgtcctaaaagtcatgcagaaagttactagctatgatattgtgatgtaagaaatatttggtcttkgttccaggttgctggtacaaaactcctaaaacccttgtaatttcctgagtgatagggatt

SEQ ID NO: 946906 - DNA, 582 bp, Homo sapiens
ccagacttttttgatcaccactctaactggcatgagatggtatctcattgtggttttgatttgcattgytctaattaacagtggtgatgagctttttatcatatgttttttggccacataaatgtcttcttctgagaagcgtctgttcatatcctttgcccactttttgatgggttttttttttcttgtaatttgtctaagttcctttagattctggatactagacttttgtcagatggatagattgcaaaaattttctcccattctctaggctgcctgttcacttggatgatagtttcttttgctgtgcagaagctctttagtttaattagaggccatttgtcaattttgacttttgttgccattgcttttggtgttttagtcatgaagtctttgcccatgcctatatcctgaatggtattgcctaggttttcctctcaggtttttatggttttaggttttacatttaagtctttagtccatcttgagctaatttttgtataaggtgtaaggaaggggtacagtttctgttttctgtatatggctagccagttttatccctgatgaacatcaatgtgaaaa

SEQ ID NO: 946907 - DNA, 582 bp, Homo sapiens
ccagacttttttgatcaccactctaactggcatgagatggtatctcattgtggttttgatttgcattgttctaatkaacagtggtgatgagctttttatcatatgttttttggccacataaatgtcttcttctgagaagcgtctgttcatatcctttgcccactttttgatgggttttttttttcttgtaatttgtctaagttcctttagattctggatactagacttttgtcagatggatagattgcaaaaattttctcccattctctaggctgcctgttcacttggatgatagtttcttttgctgtgcagaagctctttagtttaattagaggccatttgtcaattttgacttttgttgccattgcttttggtgttttagtcatgaagtctttgcccatgcctatatcctgaatggtattgcctaggttttcctctcaggtttttatggttttaggttttacatttaagtctttagtccatcttgagctaatttttgtataaggtgtaaggaaggggtacagtttctgttttctgtatatggctagccagttttatccctgatgaacatcaatgtgaaaa

SEQ ID NO: 946908 - DNA, 622 bp, Homo sapiens
ctcaacaccatgtggaaacttccaaggcttggagcttacaccctctgaagcaatggcctgagctgaatgttggccccttttagccatggctaggttgtagagtaccaagtcccaaggctgcacagagcagtagcagggccctgggcttggcccatgaaagcattttttctacctaggcctctgggtctgtgatgggaggggctgccatgaaggttactgacatgtcctgtagacattttccccattgtcttggtgactaacattcagctccattttacttatgcaaatttctgcagctagcttgaatttctccccagaaaatgggtttttcttttctttcttttttattttgagatggagtttcactcttgttgcccaggctggaatgcagtggcatgatctcagcttactgcaacctccgcctcctgagttcaagcaattctcctgcctcagcctcccaagtagctgggattacaggcatgtgccaccatgcctggctaattttgtacttttagtagaracggggtttcaccatgttggtcaggctggtctcaaactcctgaccccaggtgacccacctgccttggcctcccaaagtgctgggattacaggcatgagccac

SEQ ID NO: 946909 - DNA, 756 bp, Homo sapiens
aactgatgacttagaatgagggcagtttttttctgcttttttttttttttttttttttttgagacggagtctcgctctcttgcccaggctggagtgcagtggcgcgatctcggctcactgcaagctccgcctcctgggttcacgccattctcctgcctcagccccccgagtagctgggactacaggcaccagccaccacacccagctaattttttgtacttagtagagacggggtttcaccgtgttagccaggatggtctcaatcaatgtgttattctgacataacatgtattagttatctattgctgttgtaacttagcagcttaaaacaacatttgttatgtcacaatttctgttgattaggaatcaggagcagtttaggtgggtagttctgactcagggcctctctgtaggctgcaatgaagttatcagttgaggctttagtcatctcaagtcttgactggtggagaatccacttccaagttccttcacacagctattggctagtctcaaaaatctgcttctaagctcattcaggtggacctctccacagtgctgctttacatcatggtagctctttccccgaagtaagccatcatgtgtgagagaacacctaagacagaagccatgctctttaatttaattaatttatttatttttgagacggagtcttactctgtcacccagactggagtgcagtggcrcgatctcagctcactgcaagctctacctcccaggttcatgccattctcctgc

SEQ ID NO: 946910 - DNA, 609 bp, Homo sapiens
cagggcccttagcctctttgtttttcagtttcttcatctgtgaaatgggaatcataraggccttcaggtcctgagagtgccataaaattccattatttaatccatataaagctcctacaggatggcggcttgagtatggccttacagtgcaggccaggccaatcactatgtgagagagggaaggggagctccacgaggagaaaggaaaggttcctgacctgttttggatcaaggccctcggatgaaaacactccaaaaaaaaaaaaaaaaaaaaaagtgcacagactcacaattttatacacaattttggaagggggcagagctggaacagttcagtgattcttgaaactcaatcccaggtccctttagaatctacatgccgcaggtgaaaggcctctgaactgaaatgaatactgaatttatgcaaatttaccatctgatttctggctgatatttagagaattcatctcagggaaaggttctatccttcccaggatcaaccggtgacatgaacaaccgtctctgaccaagtgtgccttcctttccaaagcaagctcccctcccacctcactgtcctgcccagcagcgccatgatgggaaagttagact

SEQ ID NO: 946911 - DNA, 621 bp, Homo sapiens
acaaactcccagggctggctagaaactgttccaccaagatgcaagagtaagagcatttacaacctgcaagtgctttagaaccaaacaaccttttgctcaatttaaatcttacacggatgcccaacatgtgaagcggcagccatgtggacgtctgccccagccattttatttctaaaaggtcactagcagatgatggctcttacagtgttttaaaagggagggcgatgaaaaacaaaacacaccagaatcctcgaaaacagcattttcaggtaacctggcaaacagatgcatgctctgatacgacagaatcaggccaacttggccccattgtcaattgtactctcggctgctgcttgtcctctatcataattattccaactgctataatttattcatccccagacaagcttccatgttataaggtacccagattgaaatggctggaagctcaagtcactcctgccctttcccatctgctgaaaatactgactgcagaaggaatattttctatgcatatatatatatatatatatatwttttttttttttttttttcaaaaccaaaccaaagttatctcaaaactcaagttctctgacaaacatgttgttaagctttcaagtt

SEQ ID NO: 946912 - DNA, 624 bp, Homo sapiens
gcccggtgaaaattctagtgcagtgccggtgggccggcagtgctgggggcccggcgcacgctctgcagttgctggcccaggtgctaagcccctcactgcccagggccgggagcacyggccggctgctccaagtgtggggccactgagcccacacccacccggaactcgcgctggcctgtgagcactgcacacagccccggtttccacccacgcctctccctccacacctcccacaagcagagggagctggctcccgcctcagccagtccggagaggggctcccacagtgcagcggtaggctgaagggctcctcaatcatggccagagtgggcaccaaggccaaggaggcgccaagagtgagcgagggacgcgagggctgccagcacgctgtcacctctcaaggtcatctaaatatatatggacccaacactggagcaccccgattcataaaacaagctcttagagacctgcaaatagacttagataaccacacagtaatagtgggagatttcaacaccacactgaccatattaggcagattatcaaggtagaaagctaacaaagatatttggaacctaaacttgacaattgaccaaatggacctaacagacatctacagaacac

SEQ ID NO: 946913 - DNA, 613 bp, Homo sapiens
cacgttgtgcacatgtaccctagaacttaaaatgaaagaaaaaagaaacatcacactgtacctcataaatatgtacaattatatgtcartttaaaataaaatttaaaaagaaaaaaaaccctcaacaaaccaagcatcaaaggaatatacctcaaaataagagccatctatgacaaacccacaaccaacatcatactgaatgggcaaaagctggaagaattcccccttagaactggaacaagacaagaatgcctactctcaactctcctattcaacatagcactggaagtcctagccagagcaatcaagcaagaaaaagaaataaaaggcagccacatagaaaggagaggaagtcaaactatctctttttacaatgatgtgattctatacctagaaaaccccatagtctctgtccaaaggctcctggattttataaataactttagcaaagtttgaggatacaaaatcaatgtacaaaaatcagtagcatttctatacaccaatagcgtccaagcagagagccaaatcaagaatgcaatctcattcacgagagaataaaatacctaggaaggcagctaaccagtgagatgaaagatctctacaacaacaatta

SEQ ID NO: 946914 - DNA, 596 bp, Homo sapiens
gtaaatgacagggcccgtgttagttgtctattgctgctataacaaattacgacaaacttggtggygtaaaacaacacaaatgtgttatagttcttgaggtcagaagtctaaaatgattctcagtagactaaaatcaaggtgtggacaaggctgtgttcctttctggaggttccggggagaatcattttcttacctttttcagattctagagccccacctactttccttggctcatggtccccttcttctatcttcaaatccagcaacatctggccaagcccttctcacctccttccacatttaaggatcctcgtgattacactgggcccacacagataatccagaatgacctcatttccagatcagttgaacagcatccatcagcaacgttaattcccctttgccataggaggtaatatattcacaggttctggggattaggaagtggggaatcccatttgtggggggcccttattctgattaccacaagaccctactggatctagtcccccattatctctctgaccacatcttctgtttttccccttagtcattctgctgtcaccataatgacctcctcaatgtttcttgaatag

SEQ ID NO: 946915 - DNA, 674 bp, Homo sapiens
gggcttggaaccgtgatagagacaggatgagtggggttgccaagatagggcagtgggatggaaaaacatgaggccgggtgcagtgggtcacacctgtaatcccagtactttgggaggccgaggcgagtggatcacctgaggtcaggagtttgagaccagcctggccaacatggcaaaaccctatctctaccaaaaataccaaaaataccaaaaattagctgggtgtggtggcgggcacctgtattcccagctactcaggaggctgaggcaggagaattgcttgaacctgggaggcggaggttgcagtgagccaagccaagatcgcaccactgcactctggcctgggtgaaagagtgagacgtgagactccgtctcaaaaaaaaaaaaaaggaaagaaagaaagaaaaaggaacaggggcagggggggcacctcagggccagggggccatggaattagccaccagttgggacccggacataggtaagaagggccccaggaaatggagacatgggcctgctggaagcccaaggatgagaacaggacccagggaagacctggtgccgccgctggttatcccacacctgcctcccaccctcaggggaatgaggagtggttcctggtgggccgagtgctggaccgygtctgcttcctggccatgctctcgctcttcatc

SEQ ID NO: 946916 - DNA, 828 bp, Homo sapiens
agccactgggaacaagggtacgggtccagctctttgccctcaaggagctcagagtttagtgatgaaggcagacagcaaacaagcacctaaaaagagccccaaaacacatgaagcaaaacctgacaactgacggasagacatacaacccaataatcatggctgacaggtcaatacgcctctctcaacaatagacaaaaagtgaggatgcagaagactcaacaggatccgtcagctcgacctatgcagcatccacagaacaccccactcaacaagagcagagggcccatccttctcaaatacacatggaacattctccaggtaggctagggcgtatgctgggccataaaatacatttaagtaaatttaaaaggactgaaaccataaaaaatatgttttccaaccacaatgggattagcagaaggataaattagaaatcagcagcaggagatgtgggaaacacacaaatacttggaagttacacgacgcagttttaaataatccatgggtcaaagaagaaatcacaaaggggattattaatagaaagtattgtgagccgcatgaaaatgaaaacacaacataaccagtcacaaatacataaattaggtaatttcaaacagggaaaggtggtgtgaagaaaacgaggtgtgagagggagtgcagaggagggaagtacacctacagtgtgtcaccctccccgtgtccacacccttgccacagcctcatcggaggggagagcacgtccctgccccttacgcctttgggtctggccatggcacctgctgctgccactggggtgtgtgtggaaaggatgatgtgccagttgtgaac

SEQ ID NO: 946917 - DNA, 666 bp, Homo sapiens
gagggctgcccctgagacctaaaaacaaaatcctaaactcctcaactgactgaacaagccccctcttgatcaaggggaycccagaaaaaccttaaagattgagttcccagtcatgatgtgatgggaggttggacacacatcattacactccttccctctttcagtttagacacaacatctgaccagcactaatgttaaaatagagatcataagacttgacagaatggaatctgtggcaatacgatgccaaattataaacaagacctaaggctgtgccaggcaagggttaagccatgcaccccacacttaaagaatgaattctgttctcactgccatgaggtttttctttttcaccagcagctaaacaagcactggcctcaagataagcaatgtcgaaacaattgcagctcagccaccgtcagacactgactaactaagccccctgttctaccagccaagctacagctttgattggattgactggacaagagactgatttctatgactttctcctaataagagaccacccaccatggactggctctggctggtttgaggaggctgtgcactgagtgccttcatgccgccccagcttcatcttttgacatataaggcctaactgtaatacatttaagtctccaccccaaggtgaacatgggacacatg

SEQ ID NO: 946918 - DNA, 596 bp, Homo sapiens
agctaacccatccttcccgcacagacattataatgaagcagcatcctctctgctccatgtccaggcagatctctaggcatttagtgtgaccacttgcttgaatcagcagcctgagctggcccatccttcctttgcatactgtggtaaagtgccgccttccctgccccaagttcaggtgtatttacctgtataaaaataattcaaagcacacatttgcatggatttgcagactgaataacctcaccctccatgtgtggagattgtggtgcatcagggccctctacactccacacacagacagatctccaggcatctggagcactccctcccctgagttaggagtctaggttgcctccattccccatgcagagaacttgaggccaagagattcctcaactctgtggctaggcacactaccaggtgcttgatggccacctgctagattctgccttggtgctggggcttgtgtctggcattaggggacctctatgygggcctgctcaatctggccctgcccatcttgctccctgaactgccctgccccccggcagggctgagcaggtaactcagatcactgtgcaatctatggatcagac

SEQ ID NO: 946919 - DNA, 604 bp, Homo sapiens
atctgaaaatgaaattagagaaacaatttcactgggcaacaagagcaaaacttcatctcaaaataataataataataataataatmatcatcatcatcatcatctacaatgtcatttcccatccaagcttgacttctacctttactttctgatatggttttgccatgcccccacccaaatctcatcatgaattataatccccataatcctgatgtgtcgagggaggggcctagggggaggtgattggatcacgggggcagttatcctcatgctgttcttgtgatattcagtaagtcctcatgagatcttatagggttttgttttgttttgttttttgggatggagtcttgctctgttgtccaggcaggagtgccatggcacgatcttggctcactgcagtctctgcctcttgagttccagtgattctcctgcctcagcctcctgagtagctgggattacaggcatgcacaaccacacccagctaatttttgtatttttagtagagacaggatttcactacattagctaggctggtctcaaactcctgacctcagttgatccacctgccttggcctcccaaagtactagggttacaagtgtgagc

SEQ ID NO: 946920 - DNA, 719 bp, Homo sapiens
ctttaacaacagcagcagcagcagcagcagcagcagcagcagcagcagcagcagcagcagctactcctgtttacgtgttcttatgttctaggcactgtgccaagtgtttcacatccactctccactcattttccagtagtcttgcagtaggtactatttttcatcccattttagtgatgaggcatctgaggctcagattcattaaataactcaagtaacttgcctaaggccatgcagcaagtaagtgacagagctgggattcaaactcaggactatgtgacactgttgcctcaaggccttaagccatgtgcagttctcatatgccatcattgtctttttttccactgtgtaaggagacacagaaatcataatgacctgctggacaggtgaggcctgtgcccttgtccttttttttttttttttgggacggagttttgctcttgtggctcaagctggagtgcaatggcatgatctccactcactgcaacctccacctcctgggttcaagcgattctcctgcctcagcctcccaagtagctgggattacaggcacctgccaccacgcctggctaattttttgtatttttaatagaaacagggtttcaccatgttagccaggctggtctcgaattcctgacctcaggtgatccaccygccttggcctcccaaagtgctgggattacaggtgtgagccatcatgcctggcggccctcatcctt

SEQ ID NO: 946921 - DNA, 565 bp, Homo sapiens
aaggagacagggtggggcaggggaagacaggaagaacagttgggaagaaacaccaatgttccaagcagaggaaaagggcaggtgcaaggacaggaagtgaaagagctcatcgtcctctcatggaactcttgaaatgatgcccagacttaaacaggaaggtttgatgattctcagggttggttattgactcaacaaagcctgctcccaattttctcctagaaggtagataaagaagacttgatgtgtccaccatctatttttgaaagcctggtatttgtgagcattcccttctgtggatcaaccagaactctcctagtcaccctttctgtgatgactgtcatctcctctaagtgtaaaaggagccagaatttctgcctattattttcagattgcttcctctacaggaaattgtgtcaattcatttggacatttgtggtttcactgtactcycgggccattacatcattatgtggtaactcagaactccagtggcacattatcagagctgactatttctggaagccaggagataacaaacaaagcggtttcatttggcctataagca

SEQ ID NO: 946922 - DNA, 640 bp, Homo sapiens
gagtttagagtctgaggcaggactaattaacttcctgwtaaaacaatcaagactatttgatagaatagaacagaatctgaaatctctacaatgtataatttacaatgtcatgaataaaatcaaaaattactagacttaggaagaaaaagaaattgtaactcataagcaatcattgcaggctgaccagaagatttcacctatactgagttagcaaagatttttaagatggctattaaaactatgttcaagagcataaaggacaatatcctataattaataaacaaataggacatatcaacacagaaatcacaagtatttttaaaaatcaaacagaaattctagagctgaggctaggcatggtggctcatgcctataatcccagcccagcactttgggaggtgaaggaggaaagatcacttctatgaaagaaggaaaggaaggggaaggggaaggggaaggagaaggaaattctagagctaaaaaatgaagaaccaaaacaaaatatttaatggatggtcttaatagaagactagagagggtataagaataagtgaacataaagacagatcattagaaattatcaaatttcaagaacagagagaaaaaagtttgggaagtgggaaaagaaagccaatagaaa

SEQ ID NO: 946923 - DNA, 500 bp, Homo sapiens
cttagcttgggctcagaggcctgacactgatgacatgtgcccactgtggtcaggccacagcttggttttatacattttagggagacacgagacatcawtcaatatgtgtaagaagtacattggttctctccagaaaggtaggacaacttgaagcagggagggaggcttccaggtcacaggtaggtgagagaaaaatggttgcattcttttgagtttctgattagcctttccaaagaaggcaatcagatatgtatctatctcagtgagcagagggaagactttgaatagaatgggaggcaggtttgctctaagcagttcccaccttgactttttccctttaccttagtggttctggggccccaagatttattttcctttcagttatttctttcggataaattttccagaaggggaaatattatgtgaaacaggggagaaaatgaagacagacgaaagaagaacaaggaagtcctcagaggaggaggtctacaccagtctca

SEQ ID NO: 946924 - DNA, 500 bp, Homo sapiens
cttagcttgggctcagaggcctgacactgatgacatgtgcccactgtggtcaggccacagcttggttttatacattttagggagacacgagacatcattcaatatgtgtaagaagtacattggttctctccagaaaggtaggacaacttgaagcagggagggaggcttccaggtcacaggtaggtgagagaaaaatggttgcattcttttgagtttctgattagcctttccaaagaaggcaatcagatatgtatctatctcagtgagcagagggaagactttgaatagaatgggaggcaggtttgctctaagcagttcccaccttgactttttccctttaccttagtggttctggggccccaagatttattttcctttcagttatttctttcggataaattttccagaaggggaaatattatgtgaaacaggggagaaaatgaagacagaygaaagaagaacaaggaagtcctcagaggaggaggtctacaccagtctca

SEQ ID NO: 946925 - DNA, 757 bp, Homo sapiens
agtatacacttggcatggaatattttagctattttctctctcaggactcatgttttattacatagcatttagtctcaacatatgtggatacatattttctttctgatagttattatgcttttgtttcttcatatttgttttattcttgatttgaaaaaattaatttcagagaaacctccagactacacgcaagccagtgcaggcatttgatatcatgaagctatgagaattcccagttatgggaagccctgatgtcataagaaaattagaccagcttagctcagaacagtttcaatgaaatacattcatttcacactgtattaatataatccttgtattacttctttttatcagtctcacaagtcttaatttttccagtcagatataaataagacacaatgcaaaagaaagcttaaagagggagaggtgaggagattctttgaggccaggagttctagaccagcagggcaatatagtgagactctgtctcttaaaaaaaaaagaagtaaaaataacaagaaagcttaaagaatggtaaatatccctttaaagtacatttcttcctatgtcagtctccaggttttctatcctagttgtcacttattaactcagagtgttcatatttgtgttaaattgaggaaaggtgaaattcattctgagaataactattcagacattgataaaaagatttgttctctctgggcaacattctaggtcagtgaatttagcattgaataaratgttattttgtattcaa

SEQ ID NO: 946926 - DNA, 487 bp, Homo sapiens
gtttgggtggctgcagcccygtccaggagggtggggctcctgcctgctccttagagagcaggaggcctgggtctgcagtcacagtttgggtggttgcagcagcactggggagctccatgaagtgtgcagccccagccacaccaccctgctgcatctgctgccatcactatcatgaactgtgcatttgagggatctaggttgtgtgcttcttatgaaaatctaatgcctgatgacctgtcattgtctcccatcatccccagatgggaccatctagttgcaggaaaacaagctcagggctcccaatgattctacattatggtgagttgtataattatttcattatgtattacaatgtaataataatagatataaagtgcacaataaatgtaatgcacttgaatcatcctgaaaccatcctcccctcccccaaccctgatctgtggacaaattgtcttccatgaaactggtgtttggtaccaaaaaggtt

SEQ ID NO: 946927 - DNA, 716 bp, Homo sapiens
gataacattcaacatttcttcatgtcaaaaacactaacaacctaagcactggagatacatacctcaaaataataagagccatctatgacaaatccacagccaacatcatactgaatgggcaaaagctggaagtattccctttgagaaccagaacaagacaaggatgcccactctcaccactgctattacacatagtactgaaagccctagccagagcaatcaggcaagagaaagaaataaaggcatctaaataaggagagaggaactcaaactatctctgttttcaggtgatataattcaatacctacaaaaccccattgtctgtgaccagaagctcctagatctaattaacaacttcagcaaagttgcaggatacaaaatcaatgcacaaaaaccagtatttctatacagcaatattgtccaagctgagtgctgtatcaagtcatacaaaatagtcataccaaaaaaaaaaataccttgaagtacaactaaccaagaaggtgaaaaatctgtacaatgaaaattacaaaacactgctgaaggaaatcagagatgacacaaacaagtagaaactcaatctgtgctcatggatatgaagaatcaatattgttaaaatggccacagtgccaaaagcaawttacagattcaatgctgttcctatcaaaataccaatgaaatttgtcacagaattagctaacactcttctaaaacttata

SEQ ID NO: 946928 - DNA, 620 bp, Homo sapiens
cattccaaatgggagaaattggccaaatgaaggggctacgggccctgtgcaagtccacaatctgatagggcagtcgttaaacctgaaagctccaaaatgatctatgttgactccatgtctcacatccagatcatgctgatgcaagaggtgggtacccatggtcttggacagctccgcccctgtggcttggcagggtacctcctagtcctagctgctttcacaagctgacattgagtgtctgcagcttttccaggtgcacggcttaagctgttggtggatctaccattctggggtctggaggacattgggcctcttctgaaagctccactaggcagtgcccaagtgggtctctgtgtggggactcccaccccacatttcccttctgcactgccctagcagagattctccatgagggctccacccctgcagcagacttctgcctggacattcaggtgttttcataagtcctctgaaatgtaggtggaggtttccaaacctcagtttttgtcttttgcatacmcacaggaccaacaccacatggaatctaccaaggcttggggcttgcaccctctgaagcaacagcttgatctgtaccttgacccattttagccatgtctgga

SEQ ID NO: 946929 - DNA, 520 bp, Homo sapiens
gcatttacaaacctttaactagacacagagggckgattggtgtgtttacaaacctttagctagaaacagaatgctaattggtgtgtttacaatcctttagctaaacagaaaagttctccaagtccccacccatcccagaagcccagcaggcttcacttctcattggcactcaccatgggactttgcagcacctagcccaggcactctggcagcccagagggagctcatcccagacaaccaagaggaaaagaggggaagcaagaaagagacggagacccaccatcatggccaatgatcctgtgaagagggaaaggcagtccccgcatgggattcagcctctgatcaagcccagcaggctccggcaggctgtgcacagtgcagggcttactgagcctgcgctcacctggaacatgcgctggctcgcgagtgctgcacgcagccccggctgccacccgcgcctctctcttcacacttcccagcaactagaaggagccggctccagcctcagacagccccagag

SEQ ID NO: 946930 - DNA, 466 bp, Homo sapiens
gaccccgctgagatctgtttcattgttcaaaaaaattcttctccgccctcttcacccttcaactttcagggagatctcattcttcttggatgcaggacaagaactcaggactcatcaaatgcaggtacaaagaagacggtaacaccgtggccctctgcccttgaccgggtaagggtagccgccccacttgatgagaagcagaggcgtagctgagccagcccaggagccccaggctggagaggggtaacgggctgacagaacagtgagtgcaccgccacccatcaggctgcagacagtgggctaaaagagctaattagcatgctgtaacacaccctctggggcctcagggttgcaggcacctctctctgggcaccactgcattcccctcktctgaacactggaatccactgcaggagttgcttgcaacacgcctagtccagccgcaagccctgcatggaactcactc

SEQ ID NO: 946931 - DNA, 653 bp, Homo sapiens
taagcgggacacatgatgcatggtcctaatgcgcatgtttgmgggtgacaaggagccttgatgtattagtataccgggacaacacgtataaatcatgactgtccctgggaatctgagattccaacgcaggactgcctgacaccaaaacctatgctattagggttgacagaagggaaaggaagccagagagagcagggagagctctccagggaggggtcccagggaaaggacctggaggaacagttccatgtgaggacactgctgcttttgccttctatgtccccccacccagcctcctcccttccaggcctaacttctggtgagccagacccactggggccaggagagttggtgcaaagatccttcagcggaaggtcaggggttctggagtgagtcttgggtccatgtaagcagagccagccacttcccctacctggcctttgtcaacccttctgcacactgggcataatccccgccctccgtgggatgatgtgggtgatgggctgtgggccctgtgagacacggtagctcttctcgcttggggtctggatgggggctctccttgaatatctcctggagggacaaataagctctcaatcaaatacttcctgttgggcacctattcctgagcacatctctctgggaagaggggg

SEQ ID NO: 946932 - DNA, 653 bp, Homo sapiens
taagcgggacacatgatgcatggtcctaatgcgcatgtttgagggtgacaaggagccttgatgtattagtataccgggacaacacgtataaatcatgamtgtccctgggaatctgagattccaacgcaggactgcctgacaccaaaacctatgctattagggttgacagaagggaaaggaagccagagagagcagggagagctctccagggaggggtcccagggaaaggacctggaggaacagttccatgtgaggacactgctgcttttgccttctatgtccccccacccagcctcctcccttccaggcctaacttctggtgagccagacccactggggccaggagagttggtgcaaagatccttcagcggaaggtcaggggttctggagtgagtcttgggtccatgtaagcagagccagccacttcccctacctggcctttgtcaacccttctgcacactgggcataatccccgccctccgtgggatgatgtgggtgatgggctgtgggccctgtgagacacggtagctcttctcgcttggggtctggatgggggctctccttgaatatctcctggagggacaaataagctctcaatcaaatacttcctgttgggcacctattcctgagcacatctctctgggaagaggggg

SEQ ID NO: 946933 - DNA, 610 bp, Homo sapiens
agctaatgagaggccatcaggcctgggggagtagagggccctgactcctgctaaggcgcagacataaaagactgtcagccacgatgccagaggtcagaagacaggcaacttccctaattactcctgcaaataatgccaatgttgtgaacctaaggtcggccttccgagataccttttcaggccttttgcatgtctgacacccatggctccacctggacccgccaaccttgcccctgtggccccacccagaagtgactcagcacccaggaggacagcttcgaccccctaagatttcatctctgccaacagcaagcacctgttacctggccacccccaactcttcccccaaactgcctttgaaaaacccctaacctacaagctttgaagataatttcagtactaactctgtctcccacatggcacggcgggccttgggtctgttcaattctttctttactgcaattccacgacctttyttcatgcagtgggcaggaagaactcctccagtgattacagcctggggtgcagggtctggatggacggagcagcacctggagagggccgttaaccctctgttgtccatgtgtggctaggcgagggctgcagccag

SEQ ID NO: 946934 - DNA, 463 bp, Homo sapiens
tgtaggctagaacagaattcccgatgactcatcattaggacatttgacaccccccmcctatcacctttttaaaacatttccactcttggtaaaggttggggcttagaagtcattatgaagacaatcatttccagaggggtgagaatcagaaagctggctacttcgggtctctgccttgtaggagttccagagtgtctttatgagtagagtgaagctccagtatttatatgagtgttggggttgtttggtggtacagagtaatgcagaaggagagaactggggaactgttcaccaccacccaaataggctacagagaagaagtccaggagacttatactgcaacggagacaggagcactgtggccggaagagtgacatccgggttttctgtgagtgctaatttcttctgctagaatgagcacagaaacatgttctctggagtgaaagtggaacattgtgtggtt

SEQ ID NO: 946935 - DNA, 697 bp, Homo sapiens
atgtggatgcagtcatgaagcatcttagccgtgtaacgtcagtgaagtttctgcagaaacagtctcttgcgaagctgtacccctggccatttaggcctataggcctttccaggctgccagtgactcttagttatcttaggcatctttttcattagtccttttttcagacctttttctgtccctcatttatttctctgaaatgtaatcgatgggcctctttttggttgacgtaattgaagggtcagtaaacaccacctttggaactgcagtcatcctctacttcgttttgttcctcacccctcttagagtgactttgcagccctcctgactgggcccttgcagagaaacccactgtgtaacttgctgtcatttacttacaaactggatccagggggtcagtccttcccgttctgtgctagattgctgtataaggacctcacagcaactcttcccactgacgtcaccgtgacatgtcaaggtaagaagggtgcctcagtgcagaaattctcatatcccagtttatttgagtgaaacagggaaaataggtagaatccatgaagtagacctcttgagacactttctctgtttatatactrtacattactcagaccggtaagatagaacattcttgtttctaccagtcttttccttcctctttgtaaatggtaaacatgattgtccccattttcccttctcc

SEQ ID NO: 946936 - DNA, 597 bp, Homo sapiens
aacaaaaacaaacaaaaaaacccaactgatcggaagctctgagaatgatagtggacttgttggttttcaagtctacataggctgacctgaataagtcattttgaccccattttggtactgatgttggtattggcatccttaaacctttcctcttagactcattcgattctccagagaaggaaatggttgtctggctgccagtattcttagagcccaatcggggaatagcctgagagactggacatcagcatttaaaataaccttcccggccggcgcggtggctcatgcctgtaatcccagcactttgggaggctgacgtgggcagatcacctgagattgggagttcgagaccagcctgaccaacatggagaaaccccatctctactaaaagtacaaaattagccaggcttggtggtacatgcctgtaatcccagctactcgggaggctgaggcaggagaatcgcttgaacccgcgaggcggaggttgcggtgagccgagatcgcggcrttgcactccagcctgggcaacaggagtgaaactccatctcagaaaataaataaataaataaccttcctctccttggtttgatatatcat

SEQ ID NO: 946937 - DNA, 591 bp, Homo sapiens
tgagtcgggtggggacttggagaacttttatgtctagctagaagattgtaaatrcaccaatcagcactctgtgtctagctaaaagattgtaaatgcaccaatcagcactctgtgtctagctaaaggtttgtaaatgcaccaatcagtgctctgtctagctaatctagtggggacttggaaacctttagtgtctagcaaaaggattgtaaatgcaccaatcagcactctgtgtctagctcaaggttcgtaaatgcaccaatcagcaccctgtcaaaatggaccaatcagctctctgtaaaatgggccaatcagctctctgtaaaatggaccaatcagcaggatgttggtggggtcagataagggaataaaagcaggctgtgcaaaccagcagcggcaacgcgctggggtcctcttccacactgtggaagattggttctttcgctctttgcaataaatcttgttgctgctcactctttgggtcggcactgcctttatgaactgtaacactcactgcgaaagtctgcagcttcactcctgaggccagtgagaccacaaacccactgggaggaatgaacaactccagacgggatg

SEQ ID NO: 946938 - DNA, 591 bp, Homo sapiens
tgagtcgggtggggacttggagaacttttatgtctagctagaagattgtaaatacaccaatcagcactctgtgtctagctaaaagattgtaaatgcaccaatcagcactctgtgtctasctaaaggtttgtaaatgcaccaatcagtgctctgtctagctaatctagtggggacttggaaacctttagtgtctagcaaaaggattgtaaatgcaccaatcagcactctgtgtctagctcaaggttcgtaaatgcaccaatcagcaccctgtcaaaatggaccaatcagctctctgtaaaatgggccaatcagctctctgtaaaatggaccaatcagcaggatgttggtggggtcagataagggaataaaagcaggctgtgcaaaccagcagcggcaacgcgctggggtcctcttccacactgtggaagattggttctttcgctctttgcaataaatcttgttgctgctcactctttgggtcggcactgcctttatgaactgtaacactcactgcgaaagtctgcagcttcactcctgaggccagtgagaccacaaacccactgggaggaatgaacaactccagacgggatg

SEQ ID NO: 946939 - DNA, 591 bp, Homo sapiens
tgagtcgggtggggacttggagaacttttatgtctagctagaagattgtaaatacaccaatcagcactctgtgtctagctaaaagattgtaaatgcaccaatcagcactctgtgtctagctaaaggtttgtaaatgcaccaatcagtgctctgtctagctaatctagtggggacttggaaacctttagtgtctagcaaaaggattgtaaatgcaccaatcagcactctgtgtctagctcaaggttcgtaaatgcaccaatcagcaccctgtcaaaatggaccaatcagctctctgtaaaatgggccaatcagctctctgtaaaatggaccaatcagcaggatgttggtggggtcagataagggaataaaagcaggctgtgcaaaccagcagcggcaacgcgctggggtcctcttccacactgtggaagattggttctttcgctctttgcaataaatcttgytgctgctcactctttgggtcggcactgcctttatgaactgtaacactcactgcgaaagtctgcagcttcactcctgaggccagtgagaccacaaacccactgggaggaatgaacaactccagacgggatg

SEQ ID NO: 946940 - DNA, 704 bp, Homo sapiens
gaactactgtagtcattttgaggaaaggaaacactttggcattttgagttgccagttattgtgttggtatttttctcatctgcmcttgtgggtgtttctttaactgcagtgtaaattgagtagtcagtacactccttttcttggtgttttcagatggttgaagctctgtacatggcctttatcagaaactgaattcttgtctttggtttcaaaggaaggtatgcttagaatgtagttttggtgtttaagttttggtgtgtgatccagtaggtgctgcttaggcataatggttagtaagtaagtgctggttctgttatgtgactcctgtttttctttttctttttttttttttctcttgattgcagctacattctctcttaatgctctgaaaatgtggtctcctctcccatttgagtgctggttacagatctcagcttagcagtttcgggctgcacacccaagccctggaataatctcaggcttcatttttcctccccagcttggaagcagcagggaaagggagcttagcagcagttgtggtcaatgctactccacttgttctggggctccaaccaagagagatgtaaagcttcagtcaatcagtgtgattggctaagaatggggtggctgcactgtgggcccaaactggggtcacttcctggtgataagcagtggagtgtgtgtgatctgtgggagacagcctg

SEQ ID NO: 946941 - DNA, 583 bp, Homo sapiens
caaaatttacatctcaaagtacagagagagtcttgtggtgctagagaaagattaaagatagatgccaaatcaaacatgaaattatagaaatataggattgtataaggagacccatttgtttttagatagggactatctatcttttcattggatccctaagctctaggcagagcccacattgaatcctggggctccaaaaagggagaattattatgagggtagaccacatgttgcttttacagtgcactgaaaaaaattattttaaacaaaaacttttaagtgtctaaactacactcttctttaaaaactcaagaatagcttctgttgtaataactattttagtcaaaaatcagctaacacaagcagtttaatatctgagccaaacttgtctgtttacacacttggagtaccataaagaaaaacagaggttacgccccaaaagggagtctggcacaatctccccccattttttttttctttaagaaattycaggctattataaactattttaggtccctcatgcagcagagggtggcaagagaaaggagagacagcagaagtaaatggagaaacataattcagt

SEQ ID NO: 946942 - DNA, 583 bp, Homo sapiens
caaaatttacatctcaaagtacagagagagtcttgtggtgctagagaaagattaaagatagatgccaaatcaaacatgaaattatagaaatataggattgtataaggagacccatttgtttttagatagggactatctatcttttcattggatccctaagctctaggcagagcccacattgaatcctggggctccaaaaagggagaattattatgagggtagaccacatgttgcttttacagtgcactgaaaaaaattattttaaacaaaaacttttaagtgtctaaactacactcttctttaaaaactcaagaatagcttctgttgtaataactattttagtcaaaaatcagctaacacaagcagtttaatatctgagccaaacttgtctgtttacacacttggagtaccataaagaaaaacagaggttacgccccaaaagggagtctggcacaatctccccccattttttttttctttaagaaattccaggctattataaactattttaggtcyctcatgcagcagagggtggcaagagaaaggagagacagcagaagtaaatggagaaacataattcagt

SEQ ID NO: 946943 - DNA, 583 bp, Homo sapiens
caaaatttacatctcaaagtacagagagagtcttgtggtgctagagaaagattaaagatagatgccaaatcaaacatgaaattatagaaatataggattgtataaggagacccatttgtttttagatagggactatctatcttttcattggatccctaagctctaggcagagcccacattgaatcctggggctccaaaaagggagaattattatgagggtagaccacatgttgcttttacagtgcactgaaaaaaattattttaaacaaaaacttttaagtgtctaaactacactcttctttaaaaactcaagaatagcttctgttgtaataactattttagtcaaaaatcagctaacacaagcagtttaatatctgagccaaacttgtctgtttacacacttggagtaccataaagaaaaacagaggttacgccccaaaagggagtctggcacaatctccccccattttttttttctttaagaaattccaggctattataaactattttaggtccmtcatgcagcagagggtggcaagagaaaggagagacagcagaagtaaatggagaaacataattcagt

SEQ ID NO: 946944 - DNA, 627 bp, Homo sapiens
tgcatcatctctctagcaagggttcagaactgggctgaggctgagatggctggaatgatacccaatacaargagctaaaaaccataataaaacaatgcaagatctgacagacaaaatagccagtctagagaagaaaataactgacctgatagagccaaaaaacacactacaagaatttcttaatgcaatcacaagaattaatagcagaatagaccaagcagaggaaagaatctctgagttcaaagactggatttctgaaataagatcggcaaacaagaatagggaaaaaataaataaaaagaaagaacaagacctccaaggaatatagaattatgtaaaaagaaaataatctgtaactgattggtgtcccagaaaaagatggggaaaatggaaccaacttggaaaacatagtcaggatatcatccatgaggactttccaaaactcgctagaaaggccaacattcaaattcaggaaatgcagagaacccaagtaagatacttcacaaaaagatcatcctcaagacacataatcattagattccccaagggtgaaattaaagaaaaaatgttaaagacagctagaaataatagttaggtcacctacacaggaagctcatcagactaaca

SEQ ID NO: 946945 - DNA, 627 bp, Homo sapiens
tgcatcatctctctagcaagggttcagaactgggctgaggctgagatggctggaatgatacccaatacaaggagctaaaaaccataataaaacaatgcaagatctgacagamaaaatagccagtctagagaagaaaataactgacctgatagagccaaaaaacacactacaagaatttcttaatgcaatcacaagaattaatagcagaatagaccaagcagaggaaagaatctctgagttcaaagactggatttctgaaataagatcggcaaacaagaatagggaaaaaataaataaaaagaaagaacaagacctccaaggaatatagaattatgtaaaaagaaaataatctgtaactgattggtgtcccagaaaaagatggggaaaatggaaccaacttggaaaacatagtcaggatatcatccatgaggactttccaaaactcgctagaaaggccaacattcaaattcaggaaatgcagagaacccaagtaagatacttcacaaaaagatcatcctcaagacacataatcattagattccccaagggtgaaattaaagaaaaaatgttaaagacagctagaaataatagttaggtcacctacacaggaagctcatcagactaaca

SEQ ID NO: 946946 - DNA, 463 bp, Homo sapiens
aatctcatcgtgaattgtaatccccacatgctgaaggagggacctgctggtaggcgattagatcatgggaacagtttccccttgctgttctcatgatagtaaaggagttctcacaagatctgatggttttaagtgtggcacttcctcgctcttctctctctctctcctgccaccttctgaagaaggtacttgcttctccttcaccttccaccacaattgtaagtttcctgaggccccccagctgtatggaactgtgagtcaattaagcctctttcttttataagttacccagtctcaggtagtatctttatagaagtgtgagaatggactaatacagagaattggtattggcaaagtggagtactgccacaaagataacctgaaatgtggaagtgattttggaactgggtaacaggcagaggttggaaycgtttgtagggctcagcagaaggcaggaggatat

SEQ ID NO: 946947 - DNA, 631 bp, Homo sapiens
aaagtaacttcaaaagcaagaagtgtcagcttccctagatgataaggatccagcataagaattctggtaccatgtaaaatctgaatgctgtgaaaccatcaaaggatcacactagctctctagcaatggaccctaaccaaaatgaaaattcggaaattacataaaaattcaaagtatagattgtaagaaaattcaatgagatcaaagaaaaggttgaaaaccaacacacagaaaccctaaaagcaacccaggaaatgaaggaagagatagatgtcttaaaaacaaaaacaaacagaacgtttggaaatgaaaaatccacttaaatgagttcaaaatacagttgaaagctttaagagtagactagaccaagcagaagaaatcatttcagagctcgaagattggtctttcaaattaacccagttagacaaaagtaaagagaaaatatgttttaaaaaataaacaaagccttggagaaatatggaattatgtgaagtgaccaaacctatgaattatagttactcctgagagagaagaagaaaaactaagaaatgtggaaaacatatttgaaggaayaatgcaggaaaatttccttgatcttgctagagatgcagaaattcagatacaataaact

SEQ ID NO: 946948 - DNA, 726 bp, Homo sapiens
tggtggcaaaagcaccaagttttatagtccagtttgaggacgtggtgtctgatttacgtagggctcacagattggtaagatcaggtatttcctttacatagygtgtggggaaggctggtcaccccaccctaatcttcttatgcaaatgggctttctagttgatcagcaccatcttgtctgcttgttataatacacgtggctgacagagaagggaagatggagccaccattttgaaaatgtctagtccttagtttctgccggcattcatccatgcaagctcccagcttgcaggctgctctttgttagaaaatgatttggggctgcttttcattaacaaaaaaaaaaaaaagccttatcaaggactcccatgcccttgctatctgcctaagtaattccttcttaactcctatatcagtgggaggtgattaaatcatgtgggcagtttgccccatgctgttctcatgatagtgagtgagttctcatgagatctgatgggtttaaagtgttgcacttctcttctccccctttgctctctttttctctctcctgctgccacataagacatgccttgcttcccctttttcttctgacatgattgtaagtttcctgaggtctgccaagcctgctgaactgtgagtcaagaaaagaggtttaaacctcttttctttataaattacccagtcttaggtagttctttacagcagtgtgaaaatggactaatgcaga

SEQ ID NO: 946949 - DNA, 791 bp, Homo sapiens
tttcttaagtcaacttttataattttaatataatgaaccacggaaagcatactttgacaagctcggataaatgtaaacacctatgcatctcccactamaattagaattcagaacatttcctgcacccctctccccgaagctccctccttcccccttgcattcaatctctctctccacctctggcccagacaaccacattctgctttctgtcactatggattagattggacttttctagtttcgtgtacatggaattatatgatattgcttctagtctttggggcctggtttcttaggctcagaattctgtttctgagattcctccttgtggactgtatcagttatgcactctttttcattgctgagtaatattatattgtgcagccatactacaatttgtttattaattcacctgttgatagacaatctggttgtttatagctttttggatttttaaaaataaagtggctatatgaacatttacaaacaaggctttgtgtgaacacacattttaatttttcttgagtaaatatacagagtggaatttctggatcacatggtacatggatgtttaaacctataagaaactgccagtctgttttccaaagtggttgtaccattctacatccccacaagcagtgtatgagagctccatttcctacacattcttgccaatatgtgacatagtcagtatttttaatttgagtcattctatggggagtgtttcattgtggttttgacttgcatttccctggtgactagtgatgttcagtgtcttctcacgtcccaat

SEQ ID NO: 946950 - DNA, 565 bp, Homo sapiens
ctccctttctttcttttcttcatttctgcctttctgtcttccttctttcttccttccattttccttcctccctttccttctttccttttctcactttgcttgtttatatttgctttaaaarttttttacaatttgctttaagttaaaggagtcagggagtgggaaatcactcttgggtttcttggggtttctggtttcaataggggtttggaatgagaattattccaggctcccagcccttcccatggctccttgctgactgtacctgagctgccagactgctgtggtattccacgtttgcagcagatgcatgtgcaccgtgagaagagaaaggttagctactctgcccttctctcttggtgactgtccagaattttgtatagactctagaagggctattcccttgctgctgcaaccctaatcctgtgttaccacactacctgccaaggcagctttggggctgagacggataggatgggagataagtcgaaggagactgctcaaatgacgctaagccacacttgagagtaccccagagggtgcactggagggaagaaatcagata

SEQ ID NO: 946951 - DNA, 446 bp, Homo sapiens
tttctggatcagcttccattgattaatattactctatatgatggctaatctttacctatttctttgcatgcttggtaattttttatttgatgctatatattgagaattttactatatsggatgctgaaagttttatctattcttctataaatatttgaactttgttctagaatgcagttaagttacttagaaacagttgttcctttcaaggcttgctttcaacttttgttaggcagaactagagaggcctttaaggctaattttaccccactactgaaaccataccattccatatactctacttaaatgctctgtgaaattacaaggttttccactctggctggtttgaatacatactagttttagccttatgtgagctttaagcatcgttccctcggcttctttggatagttttttcctcatcattagctaatttcctcacatgt

SEQ ID NO: 946952 - DNA, 660 bp, Homo sapiens
ggggagctataccctgaaaagtcataaggagkagctgctcaaggttgtgggagcctatctcttgcatcagtgtgacatggatgtgagacatggaatcaaagtagatcatttgaaactttaaggtttaatgactgccctattggatttcagatgtgcatggggcctgtagtcactttgttttggccaatttctcccatttggaatgggtgtatttacccaatgcctgtacatacattgtatctaagaagtaattaagttgcttttgattttacaggctcatagtttgaagggacttgccttgtctcaagtgagactttggatttgaacttttgggttaatgttggaatgacttcagactttgggggactgttgggaaggcatgattgtgttttgaaatgtgaggacatgggatttgagaggggtaaggatcagaatgatatggtttggctttgtgtccccatccaaatctcatcttgaattgtagttcccataatcccaatgtgttgtgggagggactcagtgggaggtaattgaatcatggaggtggctatccccatgctgctgttctcatgatagtgagtgagttctcacaagatctgatagttttataagaggctattttccctttgcttggcacttctccttcctgccatcatgtga

SEQ ID NO: 946953 - DNA, 619 bp, Homo sapiens
actacagagtccaacaaagatcatttaagtcaacccaaaccagaaaggacacaaagtcaaatctcagggaaaaaactattrctttaagctgctaattttaggctggcttgttacacggtatcagctaaatgatacagaattcaacatcaaactgaattacaaaattctactccactatttaaataaagaagtcacttgaacaagactgccccatacagtcaggcaaaccctttttgattagcttctgcagccaaatccagcctcgcaaaccctcctctttatccccttaaactaccctccatccgccaccctcatgagtaaacaaaactctgcctgaaaccaaacctcctttcctttttttttttttttttttgagatagagtcttgctttgtcgcccaggctggagtgcagtggagtgctttcagctcactgcaatctccgcctcccaggttcacgccattctcctgcttcagcctcccgagtagctgggactacaggcgcccgccaccacacctggctaattttttgtatttttagtagagatggggtttcacggtgttggtctcaatctcctgacctcgtgatctgcccgcttcggcctcccaaagtgctgggatt

SEQ ID NO: 946954 - DNA, 621 bp, Homo sapiens
gaggaatgcaccaacaggcactgcaagccggcaggcaatccaccagcagaacaatgtggagtttggcaggggcagtcagaagagagcccaggtgactcagcaacctgactcyaggggaaaaccttcccactccatccccatctggcttcccctatctgctaagagctagctcaactcaataaaaccttgcactcattctccaagaccaggtgtgatctgattcttccagtacaccaaggcaagaacccaagatacagaaagccctctgtccttgtgacagggtagagggactaactgagctggttaacacaagccacctatagacaggaaaagtgaaagagcaccctgtaacgcacacccactggggcttcaggcactgtcaacatccacccctagacgttgccatggggttggagccccacaacctgcctgtctgtatgctcccctagaggtctgagcagcagggcactgaagaagcaagccactccgcctgtcatacaccctgtgagggggacagaggaacttttcccatttcaactggatcatgggagcagatttcccccttgctgttctcgggatagtgagttctctcatgagatccggtagtttgaaagtgtgtca

SEQ ID NO: 946955 - DNA, 567 bp, Homo sapiens
ctggggcctgttggaaggtgaagagtgggaaaaggcagaggatcaggaaaaataactaatgggtactgggattaatatctgggtgatgaaataatctgtacaacaaaccccatgacacacatttacctagtgacatacacttgtacccctgaacttaaatgtattttaaaaaaataaatgaaggccacagccccctctgcctgcctctcatgagtttggtccagctcacccaatacactgaggtttgaggaaagttacgatcaaacctttcactcttaactggttgaatcaatgcacacatctaggctttagaccttgaaaagtaagacctaatggtgggggaaaagcaaggtagaattcattggcctagacaccagatcattcaaacaaatcccacctcagattcaaagctacgcattactctctcctctatagttcccccccgrcttaattgttatacaaggtccacctccatttgctaattccttcctatcttcaagccagatctgagacactgtcattcattcctccttggatcatattagcaggggaccaatacgctttagt

SEQ ID NO: 946956 - DNA, 452 bp, Homo sapiens
tattgttagtagagatggggtttcaccaagttgctcaggctggtctcaaactcctgacctcaggccatctacccgccccggcctcccatagtgctgggattacaggcrtgagccatcgcgtccagactgttgaaatttttattgagtcaattgtacattcacaggcagttctgatcagaaactatgtacactttacccagtttctcccagtgtcaacattttgcaaaactatggtacaatatcttaagatatcgaatcattccattactgtaagtgtccctttcatacccacattcacctccctctcacccctgcctcctgtcacgtgttaccactgattcgttgtctgtatctaaaatgttgtcattcctaaaatgttatatacatagaatcacatagtaggcagtcttttaggatgggctttttttcacttagcataattccctgaagat

SEQ ID NO: 946957 - DNA, 653 bp, Homo sapiens
tggggtttcaccaagttgctcaggctggtctcaaactcctgacctcaggccatctacccgccccggcctcccatagtgctgggattacaggcgtgagccatcgcgtccagactgttgmaatttttattgagtcaattgtacattcacaggcagttctgatcagaaactatgtacactttacccagtttctcccagtgtcaacattttgcaaaactatggtacaatatcttaagatatcgaatcattccattactgtaagtgtccctttcatacccacattcacctccctctcacccctgcctcctgtcacgtgttaccactgattcgttgtctgtatctaaaatgttgtcattcctaaaatgttatatacatagaatcacatagtaggcagtcttttaggatgggctttttttcacttagcataattccctgaagattcccccaagttgtgtgtatcaatatttcactccctttcattgctgaatagtgtcccatggtatgaatatacacagttgcactgttcacttgttgaaggacatgtgggttgtttgggggtactgtgagtgaagttgctgtaacattggtgtcagggtgttgtgtgaatataaagttgtaatttctttagacagatgccgaacgtacaactgccggat

SEQ ID NO: 946958 - DNA, 640 bp, Homo sapiens
ggctttttttcacttagcataattccctgaagattcccccaagttgtgtgtatcaatatttcactccctttcattgctgaatagtgtcccatggtatgaatatacacagttgcactgttcacttgttgaaggacatgtgggttgtttgggggtactgtgagtgaagttgctgtaacattggtgtcagggtgttgtgtgaatataaagttgtaatttctttagacagatgccgaacgtacaactgccggatcgtgtggtaattggatgtttagtttatgtgtcactgatacactgtttcctagagtggctaagcggttttacattcctaggggcattgtatgaacaatccagtttatttgcatcctcaccagcttttgggattgtcattatttttaatttttttgctattcttacaggttgtagtgatattgccttttgaatttatagttcattccctgatggctaatgatgtcgaatacgttcttatgttctcatttaccaactgyatctactttttattgaattgtttgttcacatattttgcctcctgtctaattggattggtttttttctttgtttattactgagttttgaaagttatttttatattctggatattattcattcgttattgtggggt

SEQ ID NO: 946959 - DNA, 576 bp, Homo sapiens
aaaaaaaacaaaaaagaaaaattcgccgggcatggtgatgtactcttgtggtctcagctacttgggaggctgaagtaggaggatcacttgagtccaggaggtcgaggctgcagtgagctctgatcgcaccactgcattccagcctaggcaacacagcaagaccctgtctcgacaaagaaacaaacccccaaaccctagctctctatgtgaactcagagcgagaactcactcatcaccaaggggatggtgttaatccattcatgagggatccatccccatgattcaacacctgccatctccaacactgggatcacattttgacttgagagctgagatgtaaaggggacaaacatctaaaccatatagggatggacggaaggaagggaagaagaaaaagggacacaaggagatgtggcaaggagggtgtctcagctatggatagcccttgttcacccccttgtcttgctggagcaaggctaacacactggaagttcctgcccagctcagggcagaggagagcccaggcacagcaygtacttctgaatggtcaccatctccctgctggacccagaaccc

SEQ ID NO: 946960 - DNA, 597 bp, Homo sapiens
ctgacttttctcatccacattaatgttttccactgacctccaggactctctcacactctttagttttattattcttattcacgatcttattcctcaaaattgccatcccccatcagcacctctaaacactgtctctcaaagggtcatataatctctgggaactaatgttccagcttcaaaattgagaactttgaatctctcttatctcatttgtctgttcatcataattctgttttctcttcactcactcttactgaacctgtacttaaccttttttgtggtttctgatttctcaacacccatattctaacccattagctcccttgattcctttctcagatccacaatcaactctatcaacaaggctattaccagcacctaaaattgttcttatctcttgtccttatgccacatctgccttgtcaacctctgtcgtatactgtctcaactgtatttctctcccttgatggagaaagttataaggtagaaccttttcatttcacatacatgcacagagtgatatttaacactgagcctcatttgctaggcwgtaaggaataggaaagaatccaaatttgttaatgcattcaggtcact

SEQ ID NO: 946961 - DNA, 633 bp, Homo sapiens
agctatacttatatcagacaaaaaccaacttcaagttaaaagttttaaaaagagacaaagaaggacatttatataataatatagggatcaattccgcaagagaatataacaatgtaatacatatgtacccaacaaaaagcacccagatatataaagcaagtcttatttgatctaaagagagagggagaaaccccaataaaatagtggttggggacttcaacaccccactctcagcattggacagattatctagaaagaaaataaacaggccgggcacagtggctcacacctgtagtgccagcactttgggaggccgaggtgggcagatcacaaggtcaggagttcgagaccggcctgaccaatatggtgaaaccccgtctctactaaaaatacaaaaattggccaggcgtggtggcatgcaactgtaatcccagctaccgaggaggctgaggcaggagaattgcttgaacctgggaggcggaggttgcagtgagccgagatcatgccattgcactttagcctgggtgacagagcragattccttctcaaaaagaaaaaaagaaaagaaacaaagaaacatggatttaaactgcaccataggccaaacagacctaacagccatttagagaacat

SEQ ID NO: 946962 - DNA, 760 bp, Homo sapiens
ctttaggcaggctccaaaaatttaaagtcaatmatgctagattcaattgtatatggggtgtcctgtagtccctgtttctccccttttgcttttgccactactgtttcagggagagattcatcctttctactatggcttgtccttgagaattatatggaatgtcagtaatgtgtttaatattccatagagagaaaaatgtagctagagcttggctagtacagcctggggcattatctgttttaatagaagctggaatatccatcactgcaaaacactgcaaaaggtgacatttaacacaggcagaagactctcctgattggcatgtagcccaaagtaagaaaaggtgtccacgcatacatgtacataagctagtctcccaaacgacggaacatgtgtgacatccatttgccaaagagaattaggttccaatccttgaggattaattcctcctgtaaaagatgaggaatgcaccatttggcaagttgggcatcgctggatgatagctttagcttctttccaggtaatgctgtatctgcgtttgagaccagaggcattaacaagggttaaattgtgaaaatgtttggcattagatattgcagtagcaactaggcaatcagccatttgatttccttcagttaaaggtcctggaagaggcatatgagccctaatatgagtaatgtaaaaagggtgcattctactcctaactgctgtttgcaattgggcaaatgaagtcatcagttgttcatctgtatgaaatcat

SEQ ID NO: 946963 - DNA, 701 bp, Homo sapiens
tatagtaagatataaaaccttcggtggattagtatagcacttagcacagaataggctytgaaaaaatatttgctgaatgaataagtggattttttaagtgggattaatcactactagtgtctagtgaataggagtactttctcttaattgatatcttagtacctacctgatgtttactatccatttttaaggaatatcaaaacagtgtccacaaaaatgacaggacaatgcactgagcttggggttactacattattctcaaatgagtagggaggttttttcttcctaaaacccatatcgtattgaacatctactattaaagcactatgtattcctgatagtgtaggggaaaaaggagcacaggctaaggcagaatatatggaataaaatatgccaaaagtatgaaatagtagacaagtacaaataacatatgctcagattaaataagagcaaaaattagttaagactgtcataacctttatgacagtcatagggcaatgtgacattatttaccaaaatgtataatatactttaagccccaggaattccatctcttacttacagatatattaaaaatgagtcaagatgtgtgttcaaaagtgcagccctatttatgtaacacaatttccaaaagcacctaaatatccttcactgtggtttggataaataaatttgatgcctcctcacaacagactacaatg

SEQ ID NO: 946964 - DNA, 599 bp, Homo sapiens
agctaacccatccttcccgcacagacattataatgaagcagcatcctctctgctccatgtccaggcagatctctaggcatttagtgtgaccacttgcttgaatcagcagcctgagctggcccatccttcctttgcatactgtggtaaagtgccgccttccctgccccaagttcaggtgtatttacctgtataaaaataattcaaagcacacatttgcatggatttgcagactgaataacctcaccctccatgtgtggagattgtggtgcatcagggccctctacactccacacacagacagatctccaggcatctggagcactccctcccctgagttaggagtctaggttgcctccattccccatgcagagaacttgaggccaagagattcctcaactctgtggctaggcacactaccaggtgcttgatggccacctgctagattctgccttggtgctggggcttgtgtctggcattaggggacctctatgygggcctgctcaatctggccctgcccatcttgctccctgaactgccctgccccccggcagggctgagcaggtaactcagatcactgtgcaatctatggatcagactgg

SEQ ID NO: 946965 - DNA, 662 bp, Homo sapiens
aatcattttctttctttttttttttgagatggagttttgctcagttgcccaggccggagtgcaatggcgcaatctcagctcactgcaacctctgcctcctgggcctcccgggttcaagcgattctcccgcctcagcctcctgagtagctaggattacaggcacccgccatcatgcccagctaatttttgtatttttagtacagacggggtttcaccatgttggccaggctggtcttgaactcctgacctcaggtgatccacccaccttggcctcctaaagtgctgggattacaggcgtgacctacctcacctggccagcctttattttcttagaagatgctcagatgcagtcgcattgccgggcctggctgtgcatttgaaagcaatagaatgtgttctcctaatatacctctgaaactggtccaattgtcccatagaactgatatttatggcttcttttgaataaacatagaaactgatcctcccagtcttgaaacttgaggaagttacatttgtctttgctcagtttctttctcaggcatccaaccatcaggcttcctagatagtgtcaataaactgaaayttaccagatcactgcatctaggcaataagacatcagactcctcacctaccatggttgcctaagtggctacctgcttcct

SEQ ID NO: 946966 - DNA, 620 bp, Homo sapiens
ccctagttattttattgtttcataagaatggttaatgtcattaatccctgttgccttttttgtgtgcaatttaattccaggacatctgactaggggcattttgtcactgtctcacattaaaaagaactttcagggaggagtttggtaccaaagtacctctctgataattgacctctctcaccagtatccacagttgtttcagctttgggcaccaaaaccgggttccttcagtcatgatggaagtggcagtatcacattatctaaggctttgcaactttacaaagactcacctagggcaactgttatccaaagggagccctggcgctagtagacactcggaggtttacagtctcttgtaccatgcaggtttccaaagcttcacattgatctcattgcccaacctgactccttcgagatgaaagactgagtttgctgcctggccatattgagaggagaagcagaggggcttctccgtccggtggggacttggagaacttttctgtctrgctaaaggtttgtaaacgcaccaatcagcactctgtaaaaacggaccaatcagcactctgtaaaatggaccaatcagcaagatgtgggtggggccaaataagggaataaaagct

SEQ ID NO: 946967 - DNA, 470 bp, Homo sapiens
gaggttgctggaggtccactccagaccctatttgcctgggtatcaccaacagaggctgcagaacagcacatgttgctgcttgatccttcccctggaagcttcatccctgargggcacctgcctgtatgagctgtcagtcagcccctactgaatggtgtctcagagttaggctacacgggggtcagggaccacttgaggaggcagtctgtccattctcagagctcaaacaccatgccgggagaaccactgctctcttcagagctgtcagacagggacgtttaagtctgcagaagtttctgctgccttttgttcagctatgccctgcccccagaggtggagtctacaaaggcaggtgggcctagttgagctgtggtgggctctgcccaattcgagctttcccagccgctttgtttacctactcaagcctcagcaatggtggacacccctccccctgccaggctgctgccctg

SEQ ID NO: 946968 - DNA, 554 bp, Homo sapiens
tattttgtggagctgggtttgaaaacaagtgtcataataggatctacaaaaatccgaggcaaataaatatcttagattagtttatttgcacactcacagacacctcctccactcacatgtgtacacacgatatatatatatatatatgtatatatatatgtatataagttatgcataaagaaagacctggctatttaaaaatagcactatagaaaccaaatagaaaatattatttctgatgcatttggaaatgttaatggagaataaatttcaatggtttacgaggtttatggtacatagcatggtctggtttacacaaattgacactggcttcttttgaccaagagctggattttatttatattctggttggaacttttgactcatatgatcagacacccacattacccctttagtctaaaaaaaatccacttggatacacaagagtgaagaaggtagcatgttgctgtctcctttgtggattgtggttagtgtaacacgatcgtgaacaaaaggatcatgaaaccacayggtgtgggcatggaatacttcaa

SEQ ID NO: 946969 - DNA, 563 bp, Homo sapiens
tgggtccacaccacctttaagagctgtgacactcatcacgaacgtccacggcttcattcttgaagtcagcgagaccacraacccaccaaaaggaagaaactctggacacatctgaaggaacaaactccagacacaccatccttaagagctgtaacactcaccgcgaaggtccgcggcttcattcttgaagtcagcaaaaccaagaacccactggaaggaaccaattctggacacaagatgaatactaaattatgattattggtagtttgaattactttctgttcatttctttctgagcctgttctttagaaatgagcttttgaaacatctgaacatgcaccaaatgaggatgcctcacagggcctagtctgtcagtaagcacactgctctccatccccagaaatgagctgaccagaaatatcatcagggtaatttgacatttgctaagaatataaggtcccccacgtaccctcacagtatcataaatctcagtaatttctgtcagcaaaggcaaaggttcatctaattgcaggcttcccttttatggagcgagaaccaaagtt

SEQ ID NO: 946970 - DNA, 577 bp, Homo sapiens
tttcataacttataaaatatttaatatatacatacacactcttcttttttctctgtacaaagkggttttaatatcagctttcaaaactgatcttataaaatgtaaatctaaattgtaaaatagttaagttttaacagtccctcccaaactttgtgttgattattcacttgctaaagagatgtgaggaatcagccttcagttttttggcagtagtatattttggaagtgaagaaattggaacacctgtttctaatttggtcttcatcattagagacaaaaccaaaacactccaggcagtactgtttatagtgctgagccaggtagcacacagacatagtagcctaaaggctcacataattcgcatgctcaggccagggcagggtaaaaatagccttctgcttctttcaacccagtatcaggaagcactaccccagtgttattatttgttttgtcaaggtaagtctaaataaacaagaaaaacttcttcggaaggcatggcgaagggagtattttaaatgaaaatgattacagaatttgaattagcatgcatctctttgtgtgcaacagtaatccaaga

SEQ ID NO: 946971 - DNA, 581 bp, Homo sapiens
aaaatggtaaaaaaaaaaaaaaaagcaaacaaaacaccccaytagaccagaagcttttgtattatgcaatcttgggttatgatccctaagaggcgggtcataatatatcctgtactttgtagatacagacaattctcatcctaaaaatggcctttgtcccaaaggtaatttacacttcagtggcttggaacatgaaatggatttttcccctgtagaatcaattttgcacaggtggtctaattcctttacaaatctctaagtaactcaagaaaaaacattcacatgtctatgaagaaaaatgctaataaatctgaaggtcttagcacatattagccatgtttcagtggaagaaaagtatttctaggttccagtatggaatgctaggacaacacctccctctctatattgccataatcaagatgggcaagggaggtcatctcttttctctctctctcactgatggcaataggaacgtttccaagacctccagcttccttgaggtgatgctttccgaccagagcagatagctcaagaatcagggcggagaatctggaatagtatgagagaataagaggtaggac

SEQ ID NO: 946972 - DNA, 581 bp, Homo sapiens
aaaatggtaaaaaaaaaaaaaaaagcaaacaaaacaccccattagaccagaagcttttgtattatgcaatcttgggttatgatccctaagaggcgggtcataatatatcctgtactttgtagatacagacaattctcatcctaaaaatggcctttgtcccaaaggtaatttacacttcagtggcttggaacatgaaatggatttttcccctgtagaatcaattttgcacaggtggtctaattcctttacaaatctctaagtaactcaagaaaaaacattcacatgtctatgaagaaaaatgctaataaatctgaaggtcttagcacatattagccatgtttcagtggaagaaaagtatttctaggttccagtatggaatgctaggacaacacctccctctctatattgccataatcaagatgggcaagggaggtcatctcttttctctckctctcactgatggcaataggaacgtttccaagacctccagcttccttgaggtgatgctttccgaccagagcagatagctcaagaatcagggcggagaatctggaatagtatgagagaataagaggtaggac

SEQ ID NO: 946973 - DNA, 607 bp, Homo sapiens
agaaaacacttaagtctttaaactctacttcctgagatttmtttattttcatattttcactatggcttaatttctccttaacttatttactttaggctgcctcatttctccttattgatttgatatggagataaaagcctatagagctaacacttagtggaggcaaaaaaaaaattgaaaaaataagaaagtatataaggtttttgtttttttatttttactcagatttgaagacttgaataaaagaatgatacgaaaggcaaataaatttccataaatcttcccaggttggtgatccaagaaatcagtaggaatttatactctttcactagcacactgataagtgtttataccaaaatttattgtgaatattgtccagcaagaataacagaaagaaagcactaaaggagttgggaaatattataagacccatgtgctgttatgtcttttaattttccacctcattaacatcttagatggggatatgctgaatatgcagaagttgtactcctttattattaaatacttcactgcaagctatgtttttacattggcctcagggtgtgtgtgtgtgtgtgtgtgtgtgtgtgtgtaaatgttttacagt

SEQ ID NO: 946974 - DNA, 745 bp, Homo sapiens
ctggtaaagcataatttctgggtatgtctggggatgtttctggaagagacttgcatttgaatcagtaagctgagtaaggaacatccayccttactcagtgtgcagggagcaccatccacttggctgaaggccaggacagacaaaaaggcttgggagggctcaatttgctcgctctctttctcctggaactgggacatccttcttctcctgcccttgaacatcacaactctaggttctctgacctttggactctgagacttgcaccagcagatccccgtttctcaggcctctggctcctactgaaagttaccccattggccccctggttctcagacctttgtgcctggactgagtcacgctaccagcttccctgcttctcctgtttgcagatggcatattgcagggcttctcaacttttgattacctgagccagttcccctaataacgctcctctcatatctatctatctatctatcatctatctatctatttttatccatctatccctctatatatattatgtacacatctatcatctatctatatcccattggttctgtttctctggaaaatcctgattaatatagacatagacatagacgcagacatagacactgacacagacacagatagacacagacacagacacagacagacacagacacagacatagacacagacacagacctagatgcagacgcagatgcagacaaacgcagacgcagacacagacacagacgcagac

SEQ ID NO: 946975 - DNA, 605 bp, Homo sapiens
tcaagtcctttttataaaatggcacagtgtttgaatataacctacacaaatccttccacatattttcaatcacctctagattgctggtaataactaatacaattaaatgctatatacatagttgttatatgacatttttattgatattatttttattgctgtattgtttttatttttaaatatttcaatttgtagttggttgaatctgaggatgtgaatcctgctgatatgaagggctgattatattttgtaccaaatattatttcttgtgaggagtttgcagatacattgcggaaaattcaccagcctgtactgactagaggccagtaggatccttgccttcagttgtgacaatcaaaaatctatccaaacattgccaattatattgtaaggagcaaaatcgtctcacattgagatccattggtatagatatggcactgttttgttatttatttatttatttatttttgagaaagggtctgattcccatcacttaggatggagtgaaggcgatctcggctcactgcagcctcaacttcctgggcccaggtgattctcctwcctcagcctcttgagtagctaggactacaggcccgcaccaccat

SEQ ID NO: 946976 - DNA, 661 bp, Homo sapiens
aaaatttttgtccaaaaataacaaaaaaagtatcaaaccacagatctaagaagctgagagagctttaaggtcaataaatacttgtccccccaaaaatgcacctaaacacatcctatgcaaacacctggaaaccaaatgtaaagaaggataccatggaaaaattgataaaactctagctaagacaaccaagaaaaaggagaaacaacactaattaccaacctcagtcacgaaagaggggacataaacacaaatctaattttatttaataaggggattttatgaaatttaataaggaatattactaaaaagttatgctgataaatgtgacaacacagattaaatgaactatatataggtatatgtgtatgacctcaataattccatacatttaaagatatcaaatttatagttgaaaattgtcaaacaacaacatcaatactctaggcccgtatgacttacttcgcaaagtctaacaaacatttaaagatgaaatgaaaccaattttatacaaactctttcggaaaattaaagaaggaacacawcccaactcctgtaataagagaaaaattataatgtcaaaacaaaacagaaaaaaaagagaccaccagaaaaaaaacctgcagtccaaaatacatattcagcaaacacgcagaagtcctca

SEQ ID NO: 946977 - DNA, 593 bp, Homo sapiens
caaggagaggcgtgatagtctacagtgggaggtaatatcatagaaacaacactgggtatcaccagccaaaaagtcttctgtctttttcagaataaatctgaagtgttatcttattctactaaaggtctcattacccaaatgatgagttttatgattagtcctctgtgctcacaaccagtgttatcctcacacgtagacaagtggatgacagtagatgaatgtttggaacttcgcctgttgtatgttaatatttcaggatttgaggtctctttattacaaaagtacaaattgattgaaacataatttgttctactgttttctgaatgtattctttgcttttttccccttttcattaagtactcattaagtaatacaatgaaaatacagatttatacagttgaaactcaataatgccgaaacatagaaatatgcaaactacgtagaaccatcacagttttggggttgctgatgggaccatcatgatacttccttggccacttgccataatatgcacagctctgtccctagggctcaagtgggkccagtaacatcagagatgggtcattttcagtccagaggatatactgtcactc

SEQ ID NO: 946978 - DNA, 582 bp, Homo sapiens
aaaccagcatgtagacaagccgataaatgtcagaatgacctgggtcatagattttaattgkgagttcaaattctttggtaaagcaaatccgatcttcataagggtcaggaaattccttaactatggcccataatttggccttcgactagggttgatagagaatcaggactccaggcaggccgggcacacacgctgctggtactggaagtgaaccactgggaccgagcatgagcaagccagtgagtgggtcccgcagccccctggacccagggccaagcatggcggctgccaaggtggctttaactgagagagcagatccaactgagcttataacaatatttttgaagtatgcaagcattgagaaaaatggtgaatttttcatgtctcccagtgactttatcactccatacttgaacatttctggagaaagccagcctaacccaaagactgtggaacttttaagtggggtggtgggtcagaccaaagatgggaggaatgttgtcccagcgttgatgatgctaagtttgatcacttgatgaaggtggcatccaccagctatttccattttaatgactagtatct

SEQ ID NO: 946979 - DNA, 562 bp, Homo sapiens
ctcctgttacaattcacaaggtgtcaaaaaatattggactaggagaaattttcaaagcaagatatatattccttttattctttatgcagaaaaaaatcttttttgttcccatttgtaggcaaaaaaatcatcatcatcatcaagaatgagaaaagtttttgaaaaaaacatttgcgtggtttagaggaaaaagaactttcaaaacaaagcaagaaacttgtattcccagcattctctaatcaggagttctaaaagcacattctatctgaaactcaattttttcagcaccaagggctcccaggttttctataagatgcccgaaactcatgacccactgcaagaaaggtacccaagtacatacaaaactgaaacaaaatacagttgcatctcatttcctcaccatttcagccactggagaacacctagtctccaaattaggtcagaaggataacagtttgccamgggacatgtgaagaagaaatctttccggcccagacatagtgaggaagaataaccactcgacccaaggaatgaacttagttttgttttcttttgttcttgt

SEQ ID NO: 946980 - DNA, 625 bp, Homo sapiens
tccctcacctggggcagcgtaggtgtgcatgacattgtgctccaccagcacctgggccaccgaggggtctggaaccgggaaggactcgttgtacggaggctggaactggtggagggcctgctccccatccccaaaggtccacctgccggggcggtgggacgcagtgagtgaaccgggacaggggtgggcggtggcggggcagggggtgcttgggacccagccgaggctccactctgcagtcacgccccgggcctccattcagggcccacccggctgtgctgaggcctctcccggctcccgtgcagcctcagggctcctgtgcacccagttacctcccaacagacagggaaaccgaggctcagaaaagcaaccccgtgatgtgggggtccctcggctgaggctggggctgggacaagagcctggtgcccaccccaaaccggcccccgagtcactcacaggaaggccacctccacggccgagtccaccagcacgcccgccgtcagtgcyagcgtggcattgggggacagcacggccggcactgtggagacctgcagaccctgcatcctgttcatccgctccacggttacgttgtagttcacggtgacgttgctcacgtggttggagg

SEQ ID NO: 946981 - DNA, 562 bp, Homo sapiens
gtttgctggaggtccattccagaccctgtttgcctgggtatcagcagcagaggctgcagaacagcgaatatttctgaacagcaaatgttgctgcccgatcattcctttggaagcttcgtctcagaggggcacccgactgcatgagatgtcagtctgcccctactgtgggggtgcctcccagttaggctactcgggggtcaggaacgtacttgaggaggcagactgtccattctcagatgtcaaactccatgctgggagaactagtactctcttcaaagctgtcagacagggacatttaagtctgcagaggtttctgctaccttttgtttggctatgccgtgcccccagaggtggagtctacagaggcaggcaggcctccttgagctgtggtgggctccacacagttggagcttcccatctgctttgtttacctactcaagcctcagcaatggcaggcgcccctcccccagcctcgctgccgtcttgcagttygatctcagacggctgtgctagcaatgagtgaggctttgtgggcgtgggaccctctgagccaggcatggga

SEQ ID NO: 946982 - DNA, 474 bp, Homo sapiens
aaggatgaggaacaacagaaacactcataccttcctactaaaaattcaatatgttaataatagtcattaaaaaaattcagcaattttttatcaagttaaaatatgctttccatgtgactcagcaatcccactcctaggtctttacccaagaaatgtaaatgtatgtcacaagaagacatgtgtttttgtttgtaacttacacctgttaaataatgctaatggaacttcattcataatggccccaaaccacaaataactcacatgcccatcaattggtgaatgttccaaaagtttataatatatattcacagaatagagtattacttagtaataaaaagaatgagttactaatacacgctaaaacattaatamattttaaatatgttgtactaaatgaaagatgctagacagaaaagactgcgcactacatgcctccatttatatgaaaccacgagagcaggcagatcaatgttt

SEQ ID NO: 946983 - DNA, 643 bp, Homo sapiens
aaaatcacccccgcccccacaccagtcaatgacgtgctctattcctgctcacaggatgtgcatgccttgagctactaatcttcagaaataaarctgttccagaacaaaggaacattttttcagaattacatctcttagccacaaagaaaggcaacttcagatctaacctagatgtgaaagacagccctgcatcagaaccacagtcacaggctccagatgcaattcccacttcctgtctgcaagaccctggccaagttgcttaacttctctgaagctgcttcctcatctctaaagtgggagtgagggggtgattataatagagttttgaggccaggcacagtggctcatgcctgtaatcccagcactttgggaggccaaggcaggtggattgcttgagctcaggagttggagaccagcctgggccaacatggtaaaaccctgtctccataaaaaaatacaaaaaactagccaggcctggtggtatgtgcctgtagtcccagctactcgggaggctgaggtaggaggattgtttgagtcccgggaggtgggggttgcagtgagctgagatctcactactgctctctagcctgggtgacagagtaagaccccgccaccaaaacaaagaaaattataggaccaaaga

SEQ ID NO: 946984 - DNA, 618 bp, Homo sapiens
cactttcaaacctacaaaaaattaaaagaatagttcaatgaatgcacataaccttttacctagattcaccaatttttaacatttctttatgttttctctctacacatacacataacatttttctcccctcaaaccccttgaaaatatgttataaaaatcaggggctactttatccataaataccatatggctctgaagaactaggaccttctcctgcctaacctcagtatcattatgataccaagaaacttaacattaatttattattatcaaaaatataacccacatttcttaatagtgtcctttacagtttttaaatccagaatctcatcaagaaaatataattgtcaagccactttcccttaatctaagataattccattaattctaccactatttttgtctttcatgacaatgatcttttttttttttttttttttaagaggcagggtcttgttgtggttcccaggctgggatgcagtgcctattaacaagtgcccttatttttttttgagatggattctcactctagtcgcccaggctgaagtgcastggcatgatcttggctcactgcaacctctgcctcctgggttttcaagcatttctcttgtctcagcc

SEQ ID NO: 946985 - DNA, 669 bp, Homo sapiens
ctgcctcctgggttcaagcaactcttgtgcctcagcctcccaagtagctgggattacaggcatgmgccaccatgcctggctaatttttatattttcagtagagagggggtttcaccatgttggccagtcttgtctcaaactcctgacctcaggtgatccacccaccttggcctcccaaaaagctgggattacaggcatgagccactgtgcctagcctgcttttttttttctttatttcttattagaaaataggggacgcttcatgaatttgcatgtcatcctcacactggggccatgctaatcttctctgtatcattccaactttagcgtatatgctgccaaagtgagcacaatagttatcatttaacagtgtcttcaaaatatgaacattctggcctaaaactgttcccttctacaccaacgcagtgggctataatgctcaaattttcagatgacaatctttcctaggaattttaaaacaaaatgtacaaaatatattaatttaactaactctacttttgcttttgtcatacactgggaacctctctaacatctagaaagagtagctgttgtaaattaggactcgtttatcttttatgtacacgatatatacagataagtaaaacaaaatgcacagacagaagggctagtggttaatcttgcttcatt

SEQ ID NO: 946986 - DNA, 567 bp, Homo sapiens
tagttttagtattttttcgtaaagataggattttgccatgttggccaggctagtcttgaacttctgagctcaagcaatccaccaaccttggcctttgaaagtgctgggattacagatgtgaactacaatgcctggctgcttatgtatttttattttttatttcttaaaatatttatttgagatggagtcttgctctgttgctcagactggagtgcacggtggcacgatcttggctcactgcaacctctgcctcccaggttcaagagattctgctgcctcagcctcccgagcagctgggattctaggtgcctgccaacatgcctggctcacttttgtatttttagtggagatgggtttcaccatcttggccaggctggtgtcgaactcctgaccttaggcaatccacccaccttggcctctgaaagtgctgggattacaggcgtgagccaccacatccggccttyttttttttttttttttttttttttttgaaacaggggtcttgctctgtcacccaggctggagagcagtggcacgatcatggctcactgaggggattcagacaaa

SEQ ID NO: 946987 - DNA, 566 bp, Homo sapiens
aaacttttccagaaaattgaagaagatagaacacttctcaactcattctatgagtccagcattaccctgatactctgataaaggatccaagaaaactactgaataatacaccctatgaatacagacacgaaaattatcaccaaaatattagtgaataaaatcaacaataaaccaaaagtataatcgattatgaccaacaggaatttatctcttgaacacagaactgatttaatatttgaaaatcagtgtaattcaccataacaacagactaaagaagaacaatacaatcatcttgatagatgcagaaaaagcctttggcaaaattcaaaaccactcatgatacaagctctcaggaaactaggaatagaagggaacttccttcacctggtaacaggtaatgtctaatggtgaaaggagaaatgccttccagactgggagcaaggcaagaactacactctttyttttttttcttttttcttttttttctttttgagacggagtctcgctctgccacccaggctggagagcagtggcgcgattttggctcactgcaaactccgccttct

SEQ ID NO: 946988 - DNA, 661 bp, Homo sapiens
agctcccggccgccagaagctgctgctcctgtgcagccaggtaggaggagcatgaggggggtcsaggcccagggctgccccagctctcctcccaagccaagcatccaggggcaaagcgtccaggcctactgctcccctgccctgcagcaccctagactcctctctggacctgccttggccccagcctgagacctatttccatcccacctgtccaactacgcccaaccttgccaccctgggggccacctctgaaccctacctgtccccttcctcagcagcacggcactgacccaggcccaccactgtcaccccaggcagaccccaaataaaggtctcctttagcttctcaatcaggcaagctcaatgcagaatcctgagttggccacttactggctctgtggccttaggcaagttacttagcctctctgagcctccagcacttcatgtgtaaaccagggtaacacctgcactcgggtcatctgttccaagtgccggctattttcttcccgggaatccacatcccacctgaccccagacaaccagcaggcaccggaggggcagggaggtctcacctccacctgggagtgcacaatctgggccccaggagccccggggagtgtgaggctgagcaggaactcactggctgaggaggtcatgtagc

SEQ ID NO: 946989 - DNA, 605 bp, Homo sapiens
tcttcaaagcaataagtggaaatgtttccccrcattaagactgcacagacgaactgtcatgaccaggctcttggtcccctgtggacgcatcccacttggtgtcctggttacctgggctatcttgggctgacctcatcattctagtagtgatggcctggcagagacattaaaaggcttcttcatggagtctggctggtttcacatcctggctttgctgggttagattggagaagtgacttaacttcttagtgactccatttgctcatttgtaaaatgggtatagtaatagctcccgtctcataggatcattgtgaagattaaacagaacaatccaggtaacgcatgcaggagggtatcttgcacacaatatgcagtaaatgttagccattatgatggagattatagttgtctttgattaatgcaaattaacaaatttacttactaaatttaatttgacattctttgaaaatatgctctctctctctctctctctctctgtgtgtgtgtgtgtgtgtgtgtgtgtattgaaagacagagagagactggtgtttggtggtgaaagttttgggcccacgtaggccagcatccttttcagttgaagttgt

SEQ ID NO: 946990 - DNA, 600 bp, Homo sapiens
ttatataacaatgaatatttaaaaatgaaatttaaaayccataccacttacgataacatcaaaaacatcaaattcctaagagcaaatataacaaaaatttttaagacctctaccgtggaaactataaaatattattaaggaaattaaagactttaataaatgatagtatattaccatgtttggggattaaaagactcaaaattgtttagatggtagttctcctcaatttgctctacttatttaaggcagtccatgctaaagtcacagagttttgttgtttatttttgttctttttttttttatggaaatccacaagctagttataaaatctatatggaaaggcacagaacctggaacagcaaaagaaacatcaagtaagaagataaaaagctaaaaaatttacattaccagagattaagacttactctacatctacagtaattaaaaccacatgtatttcacaagtatagaccaactgaccagtgggacagaatgaagatgtgagaaacagagccacatatgtacaatcaactgatttctaagaaactatttattaatatgtatttcagggaaaatatttataataaattgtgccaagtc

SEQ ID NO: 946991 - DNA, 715 bp, Homo sapiens
aggaggatggtgctaaaccattagaaaccactcccatgatacaatcacctaccaccaggccccacctccaacagtgggaattagaattcatcacgagatttgggtggtgacacagagccaaattatatcaataaccctttccttatcctatctgttttataaaaataattgcataaaccaataattataaaacaccattaataggtttataatgtataaagatagtttgtaggacaatcacagtttaaagaaggagagagaaataagcatattggagcaaagatttgtatacctttgaggtttagtagtaacttgaactggattgtttaaagttatgagctaactgtaatcaccaggaaaatcactaagatgataactcaaaaaatataggaaacagtaaagcagtgaaaatagtacactaggaagtatctgtttaacatcaaaaaggcagtaattgagaaatggacaaaaaagacataaggcatatatagaatacaaataggaaactgccagatgtaaatcctataacttctactttataaataattacattaaatataaattgtttaaatactctgctcaaaaggcaaagattggcagagtggacaaaaatgtgtgatccaactaaagcagtcygcaagagacatgctttagattcaaagacagaaataggttgaaagtaaaagaattgaaagacatgccatgcaaacagtac

SEQ ID NO: 946992 - DNA, 560 bp, Homo sapiens
ttggagtttgctggaggtccactccaggccctgtttgcctgggtatcaacagcggaggctgcagaacagcaaatattgctgaacagcaaatgttgyttcctgattgttgctccggaagcttcatctcagagggtacccggcagtgtgaggtgtcagtatgcccttcctggggggtgcctcccagttaggctactcgggggtcagggacccacttgaggaagcagtctgtccattctcagatctcaaactctgtgctgggagaaccactactctcttcaaagctgtcagacagggacatttaagtctgcagaggtttctgctgccttttgttcagctatgccctgcccccagaggtggagtctacagaggcaggcaggcctccttgagctgtggtgggctccacccagttcgagctttcctgccgctttgtttacctactcaagcctcagcaattgcgggcgcccctcccccagcctcactgctgccttgcagttcaatatcagactgctgtgctagcaatgagcgaggctccgtaggtttgggaccctccgagccaggca

SEQ ID NO: 946993 - DNA, 584 bp, Homo sapiens
tgtaatcccagctactaggaggctgaggcaggagaatcgcttgaaaccaggaggcaaaagttgcagtgagccgagwttgctccactgcactccagcctgggcgacagaactagactccgtcttgaaaaataaataaataaataaataaataaataaataaataaataaataaatattaaattaaattctccttccccaggagaattggccctaaatgatctggtcatgtctactaccaactcatcccccgccagtcttattcactccaccagtgccactggctttcttctgttccctgacctaggggacaggcacccccagtctctctgcctggaatggatttccctatctctaagcctctgatctttgcctggctaaccattgcttgaacttcagggctctcagctttaatgtgacaacctgtcaatctaaatgaaatccctacccacacctgctagtatctaacaccagtaccatagtttgccggattttttccttcataatcctcatcacagttgatagttatatttttatttgtgtgatgatatgtttcacatctgctggcctcactgaactgtaagctc

SEQ ID NO: 946994 - DNA, 591 bp, Homo sapiens
ccgcccctaggcagccccgcgcccggccgggcagacacgcctccccgccggcgcccatcgcgggaggaacaaatggcgccctccagaaaccgctcccctccatgccgggggccaaggctgtcaccacataaaagctccggcagagaagtgctcgctgtgtccccgccgcggggggtacaagcagccgctccgcgccgcgactacccggcccgccgcccccggacgtcatgcgtcagcgcgccccgctccagtttccgcccctcctcccaccggcccaggggacacgcccactggcgcgcgcagggcccgggaccgggcacgcccctctaacggctcggattggcctggccgtgcactcacggaccaatggcgtctgtcccggccctcggtcacgcccccttgcccaggcgcgggcacgcgaccgctccgttccgccggtgcgcgctctggggtccccgccccctccgcgcgcgcagctccccgcagcmgccgccgcctgtaacctgcgccgccaggatgtggctgggggctgacgtcgggtccagatgtggccccggccccgcccacccccggggccgggccgcccacacg

SEQ ID NO: 946995 - DNA, 659 bp, Homo sapiens
agcaggcaggagaagatggaagagcagacttgctgagtcttctggccttcatctttctcctgtgctggatgctttctgccctyaaacatcagactccgtgttcttcagctttcggactcttggactcatgccagtgatttgcccaaggctcttgggccttcgacaacagactgaaggctgcgctgtcggcttccctacttttgagattttaggacttggactggctttcttgctcctcagcttgcagacggcctattttgggacttcgcttgtgattgtgtgagtcaatactccttaattaactccacttcatatatacatctaccctattagttctgtccctctagataaccctgactaatacagccacttaaaagaaaaatacacaaagcactagcagacactctcctgttctgttgtccttgaagaagcaaactacctgttacagagtgggctgcatggcaggaaattctaggtccccctaggagctgacagcctcaatcttacaaccacaaggaactgaaatttgccaacaatctgaataagcttagaagagaatctgagctccaaagagagtgcaagttggcagacatcttgattttgacttaataagacagtgagcagagaattcagctcactgtcttattcaagacagtgaa

SEQ ID NO: 946996 - DNA, 594 bp, Homo sapiens
gaagatgtggaggaataggaatgcttttacactgttgatgggactataaatcagtttaaccattgtggaatacagtgtggtgattcctcaaggatctagaaccagaaatatcatttgacccagcaatcccatcactgggtatatacctaaaggattataaatcattctactataaagacacatgcatatgtatgcttattgcagcactattcacaatagcaaagacttggaaccaacccaaatgcccatcaatgatagactggataaagaaaatgtggcacatgtacaccatagaatactatgcagccataaaaatgatgagttcatgtcctttgcagggacacggatgaagctggaaaccatcattctcagcaaagtaacacaggaacagaaaaccagacactgcatgttctcactcacaagtaggagctgaacaatgagaacacatggacacagggaggggaacatcacacacyggggcctgtcagggagtgggagtgctaggggaagaatagcattaagagaaatatctaatgtagatgacgagttgatgcatgcagcaaaccaccatggcatgtgtatacctatgtaaca

SEQ ID NO: 946997 - DNA, 597 bp, Homo sapiens
tgcaatggtgtgatctcagctcactgcaacctccacctcctgagttcaagcaattcttgtgcctcagcctcccaagtagctgggattacaggtgccygccactacgcccggctaatttttgtatttttagtagagacagggtttcaccatgttagtcaggctggtctcaaactcctgacctcaggtgatccgcccaccttggcctctcaaagagctgggattacaggcatgagccactgcacttggcctggatcattataattcttagtgactctcaaccttggctgtgtatgagagtgagctggggagtttcttaaaggcagactcttggacctcacaccacaccacatgaatccatctcagggggtgagacatctctttaagaagctcctaagatgagtctgatgtggaccccaggatgaaccatggttctatagattatgaaacaggaatgcggtggggtcttgctcacatagggagtaccagggaagacttccccaaggacaggaccaaaggatgcacagaaacctgccaagtgaagggtgtcagaatgttcccagcagaaggaacagtgtgagcaagctccctgtggtcaga

SEQ ID NO: 946998 - DNA, 617 bp, Homo sapiens
taatgagtattttttctttcctttttattctcctctgtattaaattttctaaaatacatatatagaccttttatgaaaaaaaagtaatcatctctattaaatctcctcacatcacctcttctcttgtcttcccttaatcctgaagaaatgtctactccttaaagtgacattgttagcaatactagcactgggtagccaaagggcatccagaaatttctcaagataatctgaccattttgcattgctgtgctggactggtgtcttagtcggctcaggctagtataacaaaataccaaaggctaggtggcttagtagaaatttatttcttacagttctgcaggctgggaatcccaagataaggtcctagctggttcagttcctggtaggggctctcttcattccttgcagatggccgccttctagctgtgtcctcatttggcctttcaggctgagtgcgtggggagaaagagagagagctctttttccctctgcttataaggccaccaatcctactggattagtactccacccttataatctcgtgtaaccttaattacgtccaaaaagccctatcaccaaataccatcacactgggyttcagcgtatacattttgagg

SEQ ID NO: 946999 - DNA, 546 bp, Homo sapiens
cattggcaccagcaggaccataactctcactgctaagcgataatgcattttgcattaatgcctaacattgagaaatcctgacatgccacaccaagggagtttgaagtcaagtaagtagattccctttgaattgaagtcctgtgggccacagtgggtgcagaaagcccaagctgaaagatcagggggcagggacttgatttaagggaaggaaactcatcaccgtagataggttaagaggcctactgcatatggctccaaactctgtgcactcagggtttccacttaacagaggggaagagcattggcctagagaacttgcaacttagaagtccttcacagtgatttgggaattccttgaacacagagggcatagccttttactgctttccttatcctctatcccagcagctattagtatggkttaccaaaagttagcacttgacgggtgactgaaaattaagattttgcagactgttagctccactcggctatttctctcactataggagagcctgactcccaccacgccccttccagggaacaagc

SEQ ID NO: 947000 - DNA, 683 bp, Homo sapiens
gggtctgtagcccctttgttttggccaatttctcccatttggaatgaatgtatttacccaatgcctgtacccccattgtatcttggaaggaactgacttgtttttgattttactggttgataggtggaagggacttgccttgtctcagatgagactttggactgtggattttttgattaatactgaaatgagttaagactttgggggactgttgggaaggcaagattgtgtgttgaaatatgaggatgtgagatttgggaagggccaggggcagaataatatggtttggctctgtgtccctactcaactcttatctcaaatggtaaccccataatctgcacctgttgagggaaggaccaggtgggaggtgattggatcatgggggaggtttccccgcatgctgttctcgtgatagtgagttctcatgagatctgatggttttataatgcagtttcctctactcttgctcactctctcttgcctgctgccatgtaagatgtgcctgcttccccttcctccatgattgtgaattttgcctccccagccatgcagagctgtgggtcaattaaacctccgttgtttataaatcacccagcctcaggtagtatctttacagcagtgtgaaaacagaccctgtctctacaaaaaaattaaaaacttagccagscatggtggtagctatc

SEQ ID NO: 947001 - DNA, 638 bp, Homo sapiens
acaacagggatttactccttcccagttctggaggccagaaatccaggtgtcaggaccgtgctccctctgaaggccctaggggaggacccttccttgcccttctcagtgtcccgtggtgtctggcatcctctgtgtccctcggcttgggacagcccctctctaatctctgcctccacctgcacatggccatcttccctgaatgtgcctccaaaactctctcctttataaagacaccagtcattggacataagccccaccctactccagtgtgacctcatcttaactccatgacatctgcaaaggtccttatccaaatggcccttatcccaataaggtcacattcacagggatcaggggttaggcctggaacgtatctttttcagaacactattcagccagcccacaccagcgcccccaacaggcgctaccgtgcatccttttcatgctgttgtgtaatgatctgttcctgagtgtctccccaagttggcccaggtctttagagatacctggttcatctcctttcccctggggcctcayacagtactgggcccagaagatactcagcgtggacagaatgaacagattactttatattttaataagggttatatctgtggaaaaaaattagaacatacctt

SEQ ID NO: 947002 - DNA, 638 bp, Homo sapiens
acaacagggatttactccttcccagttctggaggccagaaatccaggtgtcaggaccgtgctccctctgaaggccctaggggaggacccttccttgcccttctcagtgtcccgtggtgtctggcatcctctgtgtccctcggcttgggacagcccctctctaatctctgcctccacctgcacatggccatcttccctgaatgtgcctccaaaactctctcctttataaagacaccagtcattggacataagccccaccctactccagtgtgacctcatcttaactccatgacatctgcaaaggtccttatccaaatggcccttatcccaataaggtcacattcacagggatcaggggttaggcctggaacgtatctttttcagaacactattcagccagcccacaccagcgcccccaacaggcgctaccgtgcatccttttcatgctgttgtgtaatgatctgttcctgagtgtctccccaagttggcccaggtctttagagatacctggttcatctcctttcccctggggcctcatacagtactgggcccagaagatactcagygtggacagaatgaacagattactttatattttaataagggttatatctgtggaaaaaaattagaacatacctt

SEQ ID NO: 947003 - DNA, 700 bp, Homo sapiens
tctccttttatgggagtatcattgttgtcattgagcaagatccaaaaagcacatcctccatttccatgatgtctacagaaaaagctctcccatatccttcttccacttccaaaggaagagaakatgatatcaccattgggtccgggccaccttcatttttctactccgtatgtcagaattctagaaatggactctgggtttgtgtgtttcttctgctttccctacaccctcagcaaattgaaggaatggggagcaagcggtggctttggaatctcttgtttccgcgtagtgggaagatggtgctgcctttcaacagacctgcgagctctgcactcgcatttgtttcccgtgatggcctccatggaggtcacactcactccattagcacccgcctcctggcagcagtgggccacttcccacctcactccttcaggagctgagacctaggtggtttgctcagagcatctgagaccacattcatgaaagagccacatattatcaccccaggaaattttaaaacagatctttgaatatattgtgagattgtgagagaagtattcacaatgtaaacccctggtagcagggattctgataaatatatatacatacacacacacatacatatatatacatatatgtgtgtgtatgtttagagagagagagagattcacacaaaattgtatttttttttcatttttaa

SEQ ID NO: 947004 - DNA, 590 bp, Homo sapiens
gccatttacatttaaggttaatattgttatgtgtgaatttgatcctgtcattatgatgttagctggttattttgcctgttaattgatgcagtttcttcctagcattgatggtctttaaaatttggcatgtttttgcagtggctggtactggttgttgctttccatgtttactatttccttcaggagctcttataaagggaggcctggtggtgacaaaacctctcagcatttatttgtctgtaaaggattttatttctccttcacttatgaagcttagtttggctgaatatgaaattctgggttgaaaattcttttctcgaagaatgttgaatatcggcccccactctcttctggcttgtagagtttctgccgagagatctgctgttagtctgatgggcttccctttgtgggtaacctgatctttctctctggctgcccttaacattttttccttcatttcaaccttggtaagtctgacaattgtgtgtctkggtgttgctctcctcaaggagtatctttgtggcgttctctgtatttccttaatttgaatgttggcctaccttgctaggttgtggaagttctcctggata

SEQ ID NO: 947005 - DNA, 597 bp, Homo sapiens
tggctgtttgtacttctttttttgagaaacatctgttcatctcctttgcccagtttttagtggggttgtttkttttttcttgtttacttgtttgagctacttgtagattctggatataagtcctttgtcagaggaataatttgcaaatatcttctcccattctgtgggttgtctgattattctgttgattatgtctcttgctgtgcaggagcattttagtttaattgagtctgtttgtctgtttttgcttttgttgcttgtgcttttgggtttcatcataaattctttccttagaacaatatccagaagagttttttctagattttcttctagaatttttatagtttctagtcttatgtttaggtcttcaatccatcttgagttaatttttttatatagtaagagagagggatccagctttatccttccacagatagctagccagttttcccagcatcatttattgaaaaagatgtcctttccccattgtttatttttgtaaactttatcaaagatccattggttataggtatatgactttatttttcggttctctgttttacttcactgatccatgtaccatttttgtgccagtac

SEQ ID NO: 947006 - DNA, 558 bp, Homo sapiens
tgaacattcacattcaaacttgggagaccagtgtggttttttttccagtatttttttttaactgtggtgagaaaattaactactttagccatttctaagtgtacatacagttcagtggcattaagtgcattcccattcttgttcatcatccatctctagatatttttcatcatctcaaattgaaactctgtacctattcaacaataattcccatttccgctctcctcctatccctagcatcccccattctttctgtctctatgaatttgactactctgggtgcctcaaatacgtaaaatcatacaatgtttgtccttttgtatctggcttatttcactcagagtagtgtcttcaaggttcatcctggctgtagcatgtatcagaatcctaatcttttccaaggcttaataatattcactgtatgtagcgaccacattttgtttttccatttgttygttgattaatatttggattgtttccataggagaccattgttttaaatcctaaaatacataatcctccatgtaatctagtaacctgggtgatggtcagtggcat

SEQ ID NO: 947007 - DNA, 577 bp, Homo sapiens
ttcattcccatttggaggccaggagatggtaggagtcagtgcctctctttcactgggaaggtgtcagtggggccaaatggggagctgagcttcctcccacccaccccactgcagtgaggcagtatgagtcagcactccctttttgccaggatggtgtcaggaagctaaacatacacatctacctagtcttcaatatctcaacagggggctgcctgctaataaaagaagattaaatatgatccagaatataatataaaaactgtcaggatacaattgaaaatcgcaacatgaatgagaaaagacaattgacagataccaacaacaagatgaattagatgctggaattatctgacaagaattttaaagcaaccatcataaaaatacttcaataagcaatcacaaattctcttgaaacaaatgcgaaaaatactgagaaaatctcagcaaagaaatagaagttataaaaaagaaccaratggaaattatagaagtgaaaaatacaataagctaaataaaatacttaatggatgggctcaataatacagtggagatgacagaggatagaatcagtgaactt

SEQ ID NO: 947008 - DNA, 251 bp, Homo sapiens
ccattttaattcagtaacttgcaccattaawttttttgtttgattttcagcaacatcagccctgtggctacaaaaatgagacattctttgagggctgtcatggaggctgtgtgatcctcagatcatgactcaaggtgggaattaatggacctgagcttgtcattttctctctgtaagtgctcaaggacgcgaaaagaaatccatttcataccacatcccttatggtcatcattcctgccatacagcaggag

SEQ ID NO: 947009 - DNA, 498 bp, Homo sapiens
taggcaattttcctaactctgcttctgtaagagtttccttatcacttactgaatatccattgtgtctttttccttaatcgcctgggaggaaccatctatcatcctgtcctgaagggagctcctcctatgtctggttggaccttaagatttaggtcccttgttaggaaacctgcttggttaaggatttttgataggaaggctactggttgtcagtggcctcagtgctttcgggctatgcccttgtttacactgtcaacaaggtggtattggagtgttacagggtcacagagaagaccttcagttatcaattataggttttaaacttaccatggcttttaaaggaataggatacacggtgtttttctttactacttccatctctctttctctttgacttcttctttrtctctctctttctgactccctctttgtctctgtctcttcctctctctgtctgactttctctttctctctttcctttctgctggtctttccctg

SEQ ID NO: 947010 - DNA, 411 bp, Homo sapiens
atggaacacaacaacaaagaacacctttacagtacagcaggaaaactggcaaacagcacttcagacaagtgatcaacgttagcatcaaaactcaaaaatcatggagatcctcaggcctgcaatcccagcactttgggaggccgaagcgggaggatcacgaggtcaggagatcgagaccatcctggcttacatggtgaaaccccgtctctactaaaaatgcaaaaaattagccaggtgttgtggcgggagcctgtagtcccagctactcgggagtctgaggcaggagaatggcktgaacccgggaggcggagcttgcagagaacggagatcgcgccactgcgctccagcctgggcgacagagggagactccctctcaaaaaaaataaataaaataaaaaataatggagatcg

SEQ ID NO: 947011 - DNA, 806 bp, Homo sapiens
atctactgttgagccactctagtaacttttgtaaattttggttattgtattcttcatctacaaaatttaaatttaaattaatttatatatcttttctcatgttattttgtgagatattaccatacttttctttaattctttgaatatattttctttttgttatttgaaaatattcttattagctgagttaaagtttctgggccctgaatagatagtttctatttattggttttatatatgtgtatgggttatagtttactattcctttctgttttataatttcttcttcaaaactaaacattttagatgacagaatatgacaattttaaaataagatatccttttctcttctggttagattttgttgatgtttttattatttctttaaattatggttttggctttttttatttaataaattttctggactaattcggtaaagtttatttcctatagtacatggtcattaaatgttctccccgaatgtcttagtagtcagctagtaattagtcagagatttcctgaaatgccttgaactaataaaccttcaatcatttgctaaggaacttcatgtatatgtgaagggattccttcaatgcttaagattacaactctacttcaaggtctgtcagaagtgagtgattgaggctctcttatgtcatgtctttattttggtaggtacctaatcatgcacatgtgcatagttttctaaatttttatgygtatttcagagcaattccaaactcatgatcaacacctgattatccagatatttattttaaatttttgtcaaggcacttatgtgc

SEQ ID NO: 947012 - DNA, 547 bp, Homo sapiens
caaactggaaaagaggaatttaagttgttccatttgcagatgaaaggattttatgtatagaaaactcgaaagacttcatcaaaaaactgtcagatactgtgaacaaattcagtaaaaatgcaggattcgaaatcaacatccaaaaatcagtagtgtttctataaactcatagaaaactatctttaaaagtagtccagaatgtaatcttatttataatagctataaaaatacctagaagtaaatttaagtgtgaagggaaatatctctcttatgcaaattataaaacgttgattaaataaaccaaagacacaaataaatggaaagatatctcttgtttatagcatctcttgtatctctgttacactggtttggacatggatttttgggataagacctgaacacacaggtgataaaacaaaaaaggactaatgggattccatcaaactaaaaacwtctgcacaacaaaggaagcaatcaacagagcatagagacaacctccagaatgggacaacatatttgcaaaatgtgtatctgataaggggttaat

SEQ ID NO: 947013 - DNA, 553 bp, Homo sapiens
agtgttaaattcagtggcagtatcagagattcttcccttcttcctgactaaaggtgaaaacgtttggtctttcaccactgaaagtgagttagtgtcgtttcyccatagatgttctttatcaggatgttcccttttattcctaggttgctgaaagttttttattataattttgtgtttaattttctcaaatgctttctctgtattttgtttttctcttttaattcattagtatggtgaattacattgatttttgaatgttaaaaaaatccctttgattcctaggataaactctgcttgttcgtaatgcatttgcctttccatatattgctgattctgatttgctaaaattttgtttaagattattgttccatatttctaagggttattgatctgtcctttcttttcctgtaatgctcttgcttgtttttttcagaataatggtaggctaataaaatgattgggaagtgtttgctctgcttctattttctggataagtttttgtaggaatgttactatatcctccataaatgtttgataaactatatcagtgaag

SEQ ID NO: 947014 - DNA, 577 bp, Homo sapiens
ctttttatggctgaatagtactccattgtgcatatgtaccacattttctttatccattaattcrgtgatggccacttgggttgcttccaaaagttagctattgtaaagagtgctgcaacaaagaggagtgtggatatccctttcatatactgttttcctttctttggagtatgtatgaagcagtaggattgctggatcttatggactgctcaatttctagttttttgagaaacctccaaactgctccccatagtggttgtaccaccaacagtgtacaggattcccttttctccacatctattgcctgtcttttggatataagctattttaaatggaatgagatgatagagtccagtacttttgctttggcgtttctctgatgatccatgtcgttgagcactttttcttttctgtttttttttttgggtttttttttttttttttttgagatggagtctcgcactgttgcccaggctggagtgcaatggagcaatctcggcccactgcaacttctgcctcctgggttcaagagattataatgcctcagcctcccgagtagctgggattacaggcgctt

SEQ ID NO: 947015 - DNA, 575 bp, Homo sapiens
ttgatccatttgagttaatttttggaaggtgagagatgggaatccagtttcattcttctatatgtggctggccagttttcccagcacaatgtactgaatagagtgtcctttcctcaatctatgtttttgtatgctttgtcaaagatcaattgactgagagtatttggctttatttcttggttctgtattctgttccattggtctaagtgcctatttttataccagaaccatgctgttttggcaacgatagccttgtagtttaatgtgaagtcggataatgtgatccctccaaatttgttctttttgcttaatattcctttttatatgcaggctctgttttggttccatatgaattttataattgcttttttctagttctgtgaaaactgatgatggtattttgatggaaattgcattgaatcagtagattgctttgggcggtatggtcattttcacaatattgattcttcccatccacgagcatggggtktgtttccattgttttgcatcatcgatgatttctttcagccattttctgtagttttccttgtacagatctttcacctccttggtta

SEQ ID NO: 947016 - DNA, 609 bp, Homo sapiens
gtccttcaacgaggtcactwctggtgaggagcagcggcgcgggccctggaggtttcagagcgcttttccctgcatgactccttctgttccagtgcatgccatggggtgaatctggtgtagacgtagctttgaatttattaagtattttgtaaaagataagttgtggtcataagagagttggagctaagcaagacttcttagataatttaattggacaaaaacttaacctatatgccaactctagacacatttaattggttaattgttggtaatggctacaggaaacggaataaaattgaagcggcttcattgttctgaagccattactgcactgggatatccagagagctgaaggagggtcccgggggcccctgggctccaggtccatgggtttgcctcgcataggcctgggcttgtgcttgagaactgccatgcagtgagctccagtatgcccccgggttctagatttccaaataaaagagcatttcggaaagttttaagactctcttaaggaacagtggtgaggtgccaacgtcctcactgtccagcttcacggtgggtcctcgggaggaaggggatggaggtggtgctgcctcagtgctctgaccg

SEQ ID NO: 947017 - DNA, 573 bp, Homo sapiens
ggaacactggggcctgttggaaggtgaagagtgggaaaaggcagaggatcaggaaaaataactaatgggtactgggattaatatctgggtgatgaaataatctgtacaacaaaccccatgacacacatttacctagtgacatacacttgtacccctgaacttaaatgtattttaaaaaaataaatgaaggccacagccccctctgcctgcctctcatgagtttggtccagctcacccaatacactgaggtttgaggaaagttacgatcaaacctttcactcttaactggttgaatcaatgcacacatctaggctttagaccttgaaaagtaagacctaatggtgggggaaaagcaaggtagaattcattggcctagacaccagatcattcaaacaaatcccacctcagattcaaagctacgcattactctctcctctatagttcccccccgrcttaattgttatacaaggtccacctccatttgctaattccttcctatcttcaagccagatctgagacactgtcattcattcctccttggatcatattagcaggggaccaatacgctttagt

SEQ ID NO: 947018 - DNA, 667 bp, Homo sapiens
ttgtgtgtcctgtgtgatgttggagagcaagcttggagtcttaaggaaaagacgagcactcagacaaargatttctcagcaaagcaaatttacctctgcacagaggagtgcttctctttggcccgtcgccacgagagcacatagaacaaaggagaatgaaagtttttatccctgatgcaaatcctgaccccgtgccctttccccattggctggggtcggaccacacaatctcaactagacctgattggctaaacgtttgaactttttcttagataatgtgggcacttaagggagagaagggagagtaagggagagaggggagagggggaaaagtcgtctgcgatgagctggagagctagttttcttcccaaataaggaaaggaaggtgagctaatactgataagccactggtgctgttagcatgcctgggcacgtagtaaaggcagaaagaaagagaaggaaagggaaggggagcggtactgtggattgaagaagaaaggattgatcaggctatttgaagagaaaccttgtcatatcccacatgtgattgcacggggagagggctcctgggagcttatgtctggtttcctctggactctgtcccaagcccctttccctttgctgatctgccttgtgtcctttcaccctgatgaagtgtagcatgaat

SEQ ID NO: 947019 - DNA, 469 bp, Homo sapiens
catgcattctttgcacaaacctgtgtccagaagagttgttcccaggttttatcctaggatttcagtatgttacaggtcttatatttaagtggtataagtccatctagcattgattttggtctatggtgatagcaatgggctcagaattaatttttctgcatctggtggcccaattttcctggcaccatttattgaaaggttgtcctttcccaagtgtatgctcttgtttatttcatcaaagatcagttggctatagatatgtggggttttttttctgtgttatctattgtggtccattaatgtatgtgcctatttttataccagtaccaatatgttttgattacaacagccttttagtagaatatgtcagaaaatgtgwtatcttcagctttttttctttttgctaaggactttttttgctatttgggctgttttgtggttctatatgaattttaggatttttttttct

SEQ ID NO: 947020 - DNA, 583 bp, Homo sapiens
gtccatgctttgcttttctgtagtcaataatcctttygcaatttcagccttcttttagttggagacaatattcccaagagatataagggtggagggaccctgctcttcactgtatcacttcatcttaagtggacaaaggccaattgattgaccaccacacaactaactctagagcatcactttaaatgacagtttccagatagaacaaacacaagattgggtgttttatgtacttcatttcctctaatctgcacaaccacttggtgaggcagctatttcgtgactcctggattgattgatcaatcgattgattttactattttcactactttaaggcaaactgctttttgagaacatcagattcttagctgccttcatatatccatggcttaccctccagcatgagccacttttgcaagctttaagtcttacctgcttcaatctttgtaggtaagaattggaggaatggcagctttgcctggcgattagatctttacaacagaatggatttgatttttgacatcaatgaacaaacccatttgtctgctccttcatttcagtactagaaatccatcatagttta

SEQ ID NO: 947021 - DNA, 481 bp, Homo sapiens
tttgggtggctgcagcccygtccaggagggtggggctcctgcctgctccttagagagcaggaggcctgggtctgcagtcacagtttgggtggttgcagcagcactggggagctccatgaagtgtgcagccccagccacaccaccctgctgcatctgctgccatcactatcatgaactgtgcatttgagggatctaggttgtgtgcttcttatgaaaatctaatgcctgatgacctgtcattgtctcccatcatccccagatgggaccatctagttgcaggaaaacaagctcagggctcccaatgattctacattatggtgagttgtataattatttcattatgtattacaatgtaataataatagatataaagtgcacaataaatgtaatgcacttgaatcatcctgaaaccatcctcccctcccccaaccctgatctgtggacaaattgtcttccatgaaactggtgtttggtaccaaaa

SEQ ID NO: 947022 - DNA, 652 bp, Homo sapiens
accatcgatctgaagacaacatcggaccacaggctgaggaggrgacagagcagagacccctccctcttaaggggacaccagcactgccaccctaccccacacaaggagataaaggaaaatcttgagtcctttcaggggaacttccaggtacccagctaggcctgagaagtaaatgagcagcttgataagcaagaaggtaatagtaacataaaacaatagccaaggaagttagagtcagatgtttggttccctatagaaactgaagataagatcttcacgtatgtccctgagttgtttttcagcaccacactctaaccaactgagctaaccggccaccgaccctgagcttttcaaaaacctggacccccaccacatggagtctgctggcacatagactccagagaacggggagctgagcactgaactctgacctcttgctgttctttgatctacatttcttcctgaggggcctgaaagaagccacatccacaggccagaccttaacattcctttctgctgaccccaaggttttagacaaagtctagattccttaatcaatggcaaatcagagagtctttgaatctacctatgacccagaagtgcacccacttcaagacatcccacgtttttaggccaaaccaatgtgtagccc

SEQ ID NO: 947023 - DNA, 652 bp, Homo sapiens
accatcgatctgaagacaacatcggaccacaggctgaggaggggacasagcagagacccctccctcttaaggggacaccagcactgccaccctaccccacacaaggagataaaggaaaatcttgagtcctttcaggggaacttccaggtacccagctaggcctgagaagtaaatgagcagcttgataagcaagaaggtaatagtaacataaaacaatagccaaggaagttagagtcagatgtttggttccctatagaaactgaagataagatcttcacgtatgtccctgagttgtttttcagcaccacactctaaccaactgagctaaccggccaccgaccctgagcttttcaaaaacctggacccccaccacatggagtctgctggcacatagactccagagaacggggagctgagcactgaactctgacctcttgctgttctttgatctacatttcttcctgaggggcctgaaagaagccacatccacaggccagaccttaacattcctttctgctgaccccaaggttttagacaaagtctagattccttaatcaatggcaaatcagagagtctttgaatctacctatgacccagaagtgcacccacttcaagacatcccacgtttttaggccaaaccaatgtgtagccc

SEQ ID NO: 947024 - DNA, 809 bp, Homo sapiens
aacatcggaccacaggctgaggaggggacagagcagagacccctccctcttaaggggacaccagcactgccaccctaccccacacaaggagataraggaaaatcttgagtcctttcaggggaacttccaggtacccagctaggcctgagaagtaaatgagcagcttgataagcaagaaggtaatagtaacataaaacaatagccaaggaagttagagtcagatgtttggttccctatagaaactgaagataagatcttcacgtatgtccctgagttgtttttcagcaccacactctaaccaactgagctaaccggccaccgaccctgagcttttcaaaaacctggacccccaccacatggagtctgctggcacatagactccagagaacggggagctgagcactgaactctgacctcttgctgttctttgatctacatttcttcctgaggggcctgaaagaagccacatccacaggccagaccttaacattcctttctgctgaccccaaggttttagacaaagtctagattccttaatcaatggcaaatcagagagtctttgaatctacctatgacccagaagtgcacccacttcaagacatcccacgtttttaggccaaaccaatgtgtagcccctgtatattgatttatgattgtacttgtaacttctgctttcctgaaatgtacccctgtctttaagaggccttgtttgtaagccactggggaggttgggtctcaagtatgagctgtccccattctccttgcttggtgccctgcaaataaatgccctctcttctcctgctgcaaaa

SEQ ID NO: 947025 - DNA, 809 bp, Homo sapiens
aacatcggaccacaggctgaggaggggacagagcagagacccctccctcttaaggggacaccagcactgccaccctaccccacacaaggagataaaggaaaatcttgagtcctttcaggggaacttccrggtacccagctaggcctgagaagtaaatgagcagcttgataagcaagaaggtaatagtaacataaaacaatagccaaggaagttagagtcagatgtttggttccctatagaaactgaagataagatcttcacgtatgtccctgagttgtttttcagcaccacactctaaccaactgagctaaccggccaccgaccctgagcttttcaaaaacctggacccccaccacatggagtctgctggcacatagactccagagaacggggagctgagcactgaactctgacctcttgctgttctttgatctacatttcttcctgaggggcctgaaagaagccacatccacaggccagaccttaacattcctttctgctgaccccaaggttttagacaaagtctagattccttaatcaatggcaaatcagagagtctttgaatctacctatgacccagaagtgcacccacttcaagacatcccacgtttttaggccaaaccaatgtgtagcccctgtatattgatttatgattgtacttgtaacttctgctttcctgaaatgtacccctgtctttaagaggccttgtttgtaagccactggggaggttgggtctcaagtatgagctgtccccattctccttgcttggtgccctgcaaataaatgccctctcttctcctgctgcaaaa

SEQ ID NO: 947026 - DNA, 740 bp, Homo sapiens
gaccctgagcttttcaaaaacctggacccccaccacatggagtctgctggcacatagactccagagaacggggagctgagcactgaactctgacctcttgctgttctttgatctacatttcttcctgaggggcctgaaagaagccacatccacaggccagaccttaacattcctttctgctgaccccaaggttttagacaaagtctagattccttaatcaatggcaaatcagagagtctttgaatctacctatgacccagaagtgcacccacttcaagacatcccacgtttttaggccaaaccaatgtgtagcccctgtatattgatttatgattgtacttgtaacttctgctttcctgaaatgtacccctgtctttaagaggccttgtttgtaagccactggggaggttgggtctcaagtatgagctgtccccattctccttgcttggtgccctgcaaataaatgccctctcttctcctgctgcaaaacctcagtgtggatgtttggctttactgcacttggcaagcagaccccagtccagtgtggtagcaagggctcagtccccaagactgctccccaacttccaatgtcaatcaaaagccccaggttgtttcacctctgcttctggccaactagcttgaaattggggttcccatggccacatccttgggtttaacttgctrgagtggctcacggaacttagggagacacttacttatatttactggtttatcacaag

SEQ ID NO: 947027 - DNA, 653 bp, Homo sapiens
agggtaagttatggggaaggggtgtggaacttccatgccctccctgggragcaccaccctctaggaaccttcatgtgttcagccccctgaatctgtccctttatgttgttacggaggcttcattatggagatacgattgattgtaatatgatatgattgcgatgtcactggtgatcaacttaaccgtcagttctctctcctcttcccaggactgatcctgccttggtctttcctctgaccagccctatcctgaagctacttaggtgctgccagccctcagtgaatcattcacatgcaagaagacatcactttggagattccaaggatttcaggagttgtatgcctgaagggatgccaggaaaagggaagaagaccaaatgtatatttaacaatatcacagttccacatagcatttaagcaaatttttaattgtggtaagatacacataatataaaatctaccatcttaaccatttttaagtgcacagttcagcggcattaagtgcgttcacattgttgtgcgtgcagtcatcaccaccatccatctccagaattctttccatcttgcaaaactgaaactctgtcctcattaaacaacttctcatctctcccccatccccgggcaaccaccattctactctctgtctctctgaa

SEQ ID NO: 947028 - DNA, 566 bp, Homo sapiens
taaagaatttctataaatcaataagaaaaagttaaatgactgaacagaaaaatgtgctgagaatatgagcaagccactcaaggaaaatgaaattcagttgacccttgaacaacacggatttgaactgcacgggtccacttacacgaagattttttttgaaaaatttacataaaggccaggagcgggtggctcatgcctgtaatcccagcactttcagaggccgacgtgggcagatcacctgaggttaggagttcgagaccagcctggccaacatgatgaaaccccttatctactaaaaatacaaaaattagccaggcatgatggcgggtgcctgtaattccagctacttgggaggctgaggtaggagaatcgcttgaaccctggaggcagaagttgcagtgaactgagatcacaccactgcacttcagcctgggtgacagagcaagactccatctcaaaattwaaaaaaaaaatgttacatgaactgtgcttgcctaaaaggcagacacttccacttaatgaatagtaaatacattttcttttcttaatgattttcttttctctag

SEQ ID NO: 947029 - DNA, 603 bp, Homo sapiens
tttgacgtctgacacaatcacatgcatataatgtgacagttaccaattctgtacttttccagacatcagtccgtactcccttgcyttcacctcagttttagtacagcaggaagcccacagccatgctgttaatggctgacgttgtggttgttgtccctcggcaccccagtgtgtggtttcctagcttgatttgcccagtaatgtgtcagagactgagttgtagctgatgtacagggtccaactcacatcagactgatttggatgaaaacccaaataggcaatcacactttctagtagaaaatcttgttggggcatcaacattaagatctgaaaatatggccgggtgcggtggctcacacctgtaatccgagcactttgggaggccgagacggggggatcacgaggtcaggagtttgagatcagcccggccaacatggtgaaaaaccgtttctactaaaaatgcaaaaattagctgggcatggtagtgggcacctgtaatcccagctacttgggaggctaaggcgggagaatcatttgaacttgggaggtggagattgcagtgagccgagatcgtgccactgcactccagcctgggtgacatga

SEQ ID NO: 947030 - DNA, 501 bp, Homo sapiens
ggcaataaaaccaaaaactgacaagtgaaacctaattaaagaacttccatacagcaaaagaaactcagcagagtaaacagaccacctatacaatgggagaaaatactcagcatagtatgcatccaacaaaggtataataacaagaaactataaggtacttcaacaaatttatgagagaaaaatgaacaacaccattgaaaagtgggcagaggtcatgaacaaacacttttcaaaagaagacatacatgcggccaaccagcatattaaaaaaaggctgaatatcactgatcattagagaaatgcaaatcaaaaccacaatgtaatataacctcacaccagtcagaatggctattactaaaaaatcaaaaattaacagatgctggcaagtttgmagagaaaagggaatgcttgtacactgctggtggaaatgtaaattagttcagccactgtggaaagcagtctggagatttctcaaagcacttaaaatagaactaccatttg

SEQ ID NO: 947031 - DNA, 575 bp, Homo sapiens
acgtaccagaatccctgggacacagctaaagcagtgttaagagggaaatttaaagcactaaatgcccacattagaaagctagaaagatctcaaatcaacaccttaaaatcacaattaaaagagctagagaggcaagagcaagctaatccaaaagctagcagaagacaagaaataactaagatcagagcagaactgaaagagatagagacatgaaaaaccctccaaaaaatcaacaaacccaggagatggtttttttgaaaaaaataaatcaatagatagaccactagatagaccaataaggaagaagagagagaagactctctcaataaaaaatgataaaggggatatcaccactgaccccacagaaatacgaactacaatcatagaatactataaacactctgcaaataaactagaaaatctagaagaaatggataagcttctggaygcatacactgtaccaatactaaagtaggaagaagttgaatccctgaatagcccaataacaagttctggaattgaggcaggaattaatagcctaccagccaaaaaaagcccaggaccagaaggattca

SEQ ID NO: 947032 - DNA, 582 bp, Homo sapiens
ctctcccctctctccttttgcccagcccctctccccctcctaaattactacatcattagctttatttggkggggggacagctcagccaaacgcacctccctatagcagggtgaaaagccgctgctccccgaggcagccccaactccacccctacccctgcctcacccatctccatgtccctacccagttttgtttatttttcttctctctttccatcttcacttccgtcctgtaccgacccaactcccttaccattcctcccttcctcgtcgctgccaatacggatcccagacggggtcggggcagggagatgccaagtgagtaggtccaatatgccaaggtcgggactccaccctgccatgggcgtgggggtagtcctccaggtccccctttcccacgtaggctttccaccctgaccctaagtgggtaccggggcagcttgggccttgggatcagagcaccagggcgcacagcaagggcctcagccctccaggcctcagcgacctggagcctgggtcctttgacccggtctgggagactgcatggcggaggggaggtggcttcactttgtacgaatgctca

SEQ ID NO: 947033 - DNA, 550 bp, Homo sapiens
acacgaccaaattcacatataacggtattaactttgaatgtagatgggctaaatgctccaattaaaagacacagactggcaaattggataaagactcaagacccatcagtgtgctgtattcaggaaacccatctcacatgcagagacacacatagactcaaaataaagggatggaggaagatctaccaagcaaatggaaaacagaaaaaggaaggggttgcaattctagtttctgataaaacagactttaaaccaacaaagatcaaagaagacaaagaaggccattacttaatggtaaagggatcaattcaacaagaagagctaactatcctaaatatatatgcacccaatacaggagcgcccagattcataaagcaagtccttagtgatctacaaagagacttagactcccacacaataataatgggagactttaacaccccactgtcaacattagacagatcaaagagacagaaagttaacaaggatacccaggaattkaactcagctccactccaagcggacctaatagacatctacagaactctcc

SEQ ID NO: 947034 - DNA, 653 bp, Homo sapiens
ctggaaccctaaataatacayacatccagaacacttataaatctgcaaaaaaaggaaaagtaatttaaaataaaatttggctcaacctcaccacttattaacaaaattcgaattgaacacctatgagatttacaaaaattgatgtggtaagcaaatattacaacactgatttttttttttagaaaatacatagattttgatcttatatgtaacattgtatttcagatggatttatattgtataaacatctctttaaagtactagaaagttaaaaaccatataatttcaactgatgctgaaaaagcatttgatgaaattcgacatctcttcatgattaaaagccctcaaaaaactatgtatagaaggaacataactcaacataataaaagccgtatacgaccagatgcacagctagtatcatactgaatgaagaaatattgaaagccttttctctaagatctagaacacaacaaggacgcctactgtcaccactgttattcaacatagtactagaagtcccagctagagcaatcagacaagaggaagacataaagggcatacaaattgaaaaggaagaagtcaatttatccttgtttgcggatgatataatcttatatttggaaaaacctaaaactccacatgaaaactattag

SEQ ID NO: 947035 - DNA, 594 bp, Homo sapiens
ccttttcatatgcctgtttgccatttgtatctcttcttctgagaaatgtttattcaaatcttttgcccatttttaaattgtattattagatttttccctatagcattgtttgagttccttrtatattctggttattaatcccctgtctgatgggtagtttgcagatattttcttccattctgtgggttgtctcttcactttgttgattgctttctttgtcatgtggaagctttttaacttgatgggatcccatttgtccatttttgctttggttgcctgtgcttgaagggtattactcaagaaatgtttgcccagaccaatgtcctggagactttcccctaatgttttcttgtagaagtttcatagtttgaggtcttagatttaagtctttaatccattttgatacgattattctatgtagtgagagatacgggtctagttttattcttctgcatatggatatccagtttttccagcaccatttattgaagagactgtcttttccccagtggatgttcttggcacctttgttaaaaatgagttcacagtaggtgtgtggatttgtttctgggttctctattctgttccatatgt

SEQ ID NO: 947036 - DNA, 765 bp, Homo sapiens
ggagtgcagtggcccaatctcagctcactgcaacctccacctcccgggttcaagctattctcctgcctcagcctcccaagtagctgagactacaggtgcgtgccaccacacctggctaatttttgtattgttagtagagacaggtttcattatgttggccaggctggctcaaactcctgatctcaggtgatccacctgccttggcctcccaaagtgctgagattacaggtgtgagccagtgtgcccggccagctcttgtgatttttaaaatcttcatctttacttttaggacaaggaaaattaggctcagagatcttaaggaatttgcccaaggttcacacagcctgtaagagtggagtagatgttgaaatttcacctcagtttcctctgggacacattctccattccattacagcctgacgagcgtggccttgcccaaggtcacagagcaaataagcagcagagtggggaattgaacccaagtcctctagctgggttccatacctttttaatcaaactgttgctgccactgaaataacagactacagaatcaaggacctgagctgaagtcgcacttgataacaaattgcccagacttggaattctttgcttctacccgacgaactaaagagaagacagcttccgtgtagggaaaactctctctaamcatgtttttcctctgttctcacatcacaataatcatcagcacaggagaagacttctgtgactatatgtgtgggttttttttcctcacacaccaagcag

SEQ ID NO: 947037 - DNA, 765 bp, Homo sapiens
ggagtgcagtggcccaatctcagctcactgcaacctccacctcccgggttcaagctattctcctgcctcagcctcccaagtagctgagactacaggtgcgtgccaccacacctggctaatttttgtattgttagtagagacaggtttcattatgttggccaggctggctcaaactcctgatctcaggtgatccacctgccttggcctcccaaagtgctgagattacaggtgtgagccagtgtgcccggccagctcttgtgatttttaaaatcttcatctttacttttaggacaaggaaaattaggctcagagatcttaaggaatttgcccaaggttcacacagcctgtaagagtggagtagatgttgaaatttcacctcagtttcctctgggacacattctccattccattacagcctgacgagcgtggccttgcccaaggtcacagagcaaataagcagcagagtggggaattgaacccaagtcctctagctgggttccatacctttttaatcaaactgttgctgccactgaaataacagactacagaatcaaggacctgagctgaagtcgcacttgataacaaattgcccagacttggaattctttgcttctacccgacgaactaaagagaagacagcttccgtgtagggaaaactctctctaaccatgtttttcctctgttctcacatcacaataatcatcarcacaggagaagacttctgtgactatatgtgtgggttttttttcctcacacaccaagcag

SEQ ID NO: 947038 - DNA, 765 bp, Homo sapiens
ggagtgcagtggcccaatctcagctcactgcaacctccacctcccgggttcaagctattctcctgcctcagcctcccaagtagctgagactacaggtgcgtgccaccacacctggctaatttttgtattgttagtagagacaggtttcattatgttggccaggctggctcaaactcctgatctcaggtgatccacctgccttggcctcccaaagtgctgagattacaggtgtgagccagtgtgcccggccagctcttgtgatttttaaaatcttcatctttacttttaggacaaggaaaattaggctcagagatcttaaggaatttgcccaaggttcacacagcctgtaagagtggagtagatgttgaaatttcacctcagtttcctctgggacacattctccattccattacagcctgacgagcgtggccttgcccaaggtcacagagcaaataagcagcagagtggggaattgaacccaagtcctctagctgggttccatacctttttaatcaaactgttgctgccactgaaataacagactacagaatcaaggacctgagctgaagtcgcacttgataacaaattgcccagacttggaattctttgcttctacccgacgaactaaagagaagacagcttccgtgtagggaaaactctctctaaccatgtttttcctctgttctcacatcacaataatcatcagcacaggagaagacttctgtgactatatgtgtgggktttttttcctcacacaccaagcag

SEQ ID NO: 947039 - DNA, 613 bp, Homo sapiens
attttttgcatttttagtagagtcrgggtttcaccatgttagccaggatggtctcgatctcctgacctcgtgatccaccagcctcggcctcccaaagtgccgggattacaggcgtgacgactgtgcccgacccggtttggatttatttatgctcccttattttgtgcttttcatttgtccttccaattctgtttcctttttttcctctttccttgccttttttaaggttttaatcatatttctcttttgctcattctctttttattctcttctaagttggaagttgtatactctatgtatatacttttagtaaccacctgaacattttaatataaataattattttttaaaatacaaagttaatattttacccttctcaaaaataatataaggaacttagactattttaattttgatcatttcaaccctagcttatttcctattttcttcctatattttaatttgtttaatttaaagaaaaaaatttttttactgaaaaaaaataggggcagggtctcattatgttttccaggctggttttgaactcctggactcaagcaattctcctgcctcacttacattttaattttatcttattttttactgatcccac

SEQ ID NO: 947040 - DNA, 613 bp, Homo sapiens
attttttgcatttttagtagagtcggggtttcaccatgttagccaggatggtctcgatctcctgacctcgtgatccaccagcctcggcctcccaaagtgccgggattacaggcgtgacgactgtgcccgacccggtttggatttatttatgctcccttattttgtgcttttcatttgtccttccaattctgtttcctttttttcctctttccttgccttttttaaggttttaatcatatttctcttttgctcattctctttttattctcttctaagttggaagttgtatactctatgtatatacttttagtaaccacctgaacattttaatataaataattattttttaaaatacaaagttaatattttacccttctcaaaaataatataaggaacttagactattttaattttgatcatttcaaccctagcttatttcctattttcttcctatattttaatttgtttaatttaaagaaaaaaawttttttactgaaaaaaaataggggcagggtctcattatgttttccaggctggttttgaactcctggactcaagcaattctcctgcctcacttacattttaattttatcttattttttactgatcccac

SEQ ID NO: 947041 - DNA, 772 bp, Homo sapiens
actggtagcagctgcttggccccaggaggtgtgtgggtttgtgagggcttggccaactctctgaggtctgacaccgtcctcctcactgtggctctgttgttagtcatgggttctgtttccggcgatgtggcttctgatttgcatctgcgaggtaggcccctactcacctcagttgacaggcccgggacccaggcctctcagaaactgcatccttacagagacctcagcctcacacctagacttccctggttctgggcttcctcaggtcacctgtctccacactgaccctttttgtgttctgctgatgtgtccctttgtgtagggccccgtcagcacgaactgcctgtagtgcagtgggccacaagctttttggcatcagggactggttttgtggaagacagtttttccacagaccaggctggggatggcttcgggatgattcaagcgcattatgtgtatcactaggttctcataaggagcacatacgcagttcacaatagggttgactctcctatgagaatcgaatgccactgcggttggacgggagatggagctcagggggaaatgcttacttgttcactgctcacctgctgtgcgacctggcttctaacacaccgttgactggtcctcgtctgtggcaggsggttggggaccgctgctgtagaggacccatattaagctgtcagactggactctctcccagggcttgactctgttatgccagagtctgcctcatccagagcttagggccacagagtggccttggtcccac

SEQ ID NO: 947042 - DNA, 670 bp, Homo sapiens
ctgccccttcccagtcttcctgggggcacttccttaataaaccaatccttccctcagggccttctttgggggaacccgactgaggacagctactctctagctgagtgacgctggcaaggctcttaaccttctctgtgcctctgagccatgcttcctaatagggggcacttatggagtgtgtgccaggaagctggcatgaaggcacttgccacactttgtctcacttaatcctctcagcaaccccaagaggaagctacttccattgtccccatttgacagatgaggaggtggggagcagaggagttaagccctttgtccatattcacgcagccggtgcaagggctgagtgttttgtgtccctcccaaaattcacgtgttgaaatcctaaccctcaatgtgatggtattaggaggtgatgcctttggaaggtgattaggtcatgaagatggaacgctcatgaatgggatcagtgctcttacaaaagggacctcagagagctagccagccctcttgccatcatgtgaggacaccacaagaggatggccatctgtaagccaagaagagggacctcaccacatacctggcaccctgatctcagacttccaggctccagaactgtgagagagaaagaaacaaaccacagggtstacggtactcagcagcccaaact

SEQ ID NO: 947043 - DNA, 630 bp, Homo sapiens
tggtgtgcaggggctggtgcgcaggtccaagctcctggaccataaggatcaggaggaagttgcagggactgcggaggctggagcaggatcttggagagcctgcrtgccagactgagagacctagatgtgatgtgatctgggcaacatgagcaacagaaggtggctaagtggatcagagtcagatgagaggctgctgaaccagtggccaccagtgtgccctggagaaactcagatggctcctctgtccccctgtgaggctgacatgtgcaggggccacagggggtcctgagggacagagggggcgacctgggagaacactcactcccattacggaaggacagcacaaactgcaagcccagtgagtggcagatcagcagggccctaggaaggaggtagcccagcatccagggaccagagtcggtcttggaatcaggtatcattactgctgtgtgacctcagacaagtcgcttaacccctctgggctttgggtttctctccctctctctctctctctctctttttttttcttttgaggcaggttcttgctctgtaacctaggctggagtatagtggcaggatcatagctcactgcagcctccacctctcaggctcaatcgatccccctgcctc

SEQ ID NO: 947044 - DNA, 736 bp, Homo sapiens
agaagtacatgtaacatattttcatggatatcctcctgaaaaatatatcacacaaaaacaagcactgttgccttgttgtcaacatcggtagacttgtcaatctggattgcctaccayggtgactcactaatcctctctaacgattgtgcctcaggatcctctgctatttcctcaattcatctagttatggtgctagccaaaagaggaacacatgccaccctttgaactgcagcctctcttgaaagttcatgacagttgtccttaacagcaaacaggatcactcttcaccagtattaaagggtttctcagctttagcaatgccgttagctactaagaatgatgctctcagtgcagacacatttgatgaagtggtggccttcagtaattgcttctgtacttgatattcacatttttttcatttaaagaactccaaaggcttgtgttttaacgcagggcgcttggtctccatgtggcgaagcagtgttgaaggtttgatggcttcgtttgatagctagtcatcaaatattgtacaaagtggcttggagaatgtgaatcacctgttgcaatgaactcataatttaagtaggactcttggtattttaagtgtagatttctttttgttggcagtcttagagtcccctgctgtttcaccattgggtcttttcctgttttcaaagaagctctccagtaatgtttattttttactcatttttgctagagttagcttgtgggctta

SEQ ID NO: 947045 - DNA, 572 bp, Homo sapiens
tatttaatcgtagatgataccaggtgtgatcaagggggaatatattaatacagggggtgtggtgggggcaaggaaagggtagtgaggggagaaagataaggagagagaacaamcaaatgattttagaaggacagcacattacgggtgccctaccggattcaggctcctaatgaagaagacatgtttaggggaactgaagaattgtggattcagtcatttgccatttaccttgaaagacacgtccagataaatgattacatcttcagaaacttgaagcgtttccttcattctcgactatgggtacctagatagggttatgaacgtgaaaggcagaaactgttttgcccatactgcccttccatccaaagccatgaccctctgtctaggtggcactggctacagggaacagaaaacagatgcctgcaactgagaagcctactgccaactacaagctgtttgtaaacacttctctccatgtttacctaagaaagatgcaggctttccaaggaaagcctccttttgaaaaatgtgcctttttatttctctgtgctgttaggtccctaaaataaaaa

SEQ ID NO: 947046 - DNA, 436 bp, Homo sapiens
tcacaatgcaggagacgaatgtgtggggtatgaggctggaggcagacaaattagttaggagactattgcaatattcccagggagagataacgagggattaaactaagaagagccattgggaatagmaaggagatgatgaggttatctaataaaaacccacagaaagtaacaaacataatggggaaagattagatgcattctgtttaaagttggaacaaggcacgggtgcctgctatcaggtatacttttcgatatagcacaggaattctgtccaattcagaaaattttgaagaataaataaggtgtatacagattggaagcaataataaatatgtgattgtttgcagatatgatgagatacaggaacacacacgcaaacacacacacacgtaaaaatctatagacaaactattaaaattcaaaccaaatctatcaa

SEQ ID NO: 947047 - DNA, 792 bp, Homo sapiens
ggcagttcctcaaaagattaaacacaagaccaacaatctcactcctacatagccaacagaattaaagatctgktcacataaaaacctgtaacgggccgggtgtggtggctcacacctgtaatcccagcactttgggaggctgaagcacgtggatcacctgaggtcaggggttcaagaccagcctggccaacatggtaaaaccgaaaccgcatctctactaaaaatagaaaaattagccggtgtggtggcaaatgtctgtgatcccagctacttgggaggctgaggcaggagaattgcttgaacctgggaggcggaggttgcagtgagctgagattgtgccactacactgcagcctaagcgacagagcaaaactcaaaaacaaacaaacaaacaaacaaaaaaacacgacctgtaatgaatgttcatagcaacattattcataatcgccaaaaggcttgaggaagccaacatccatcaactgatgaatagatgtggtatctccatacaaagaaatatgattcagccacaaaaaggaatggagtgctgcacatgcaagaacacagaaagaccttaaaaccacactaagagaaaaaagcccaccacaaaagtgcatatataatatgattcaatttatatgaaatgaccagattggaaaatctagagacaggtctttaattcttacctgtgggttgggtaagaactgagaatgaactataagcaggcaggagggacctcaatgggaaaacggccctgttctcacactggattgtggtgaaggctgcataactcagg

SEQ ID NO: 947048 - DNA, 559 bp, Homo sapiens
gtgaaacaccatctctacaaaaaatataaaaattagccaggtgtggtggtacacaactgtagtcccagctacttgggaggctgaggtggaaggatcacttgatccaggaggttgagactgcagtgagccaacatcttgccactgcactccaccctgggtaaaaaattgagaccctgtctcaaaaaaaaaaaaaaaaaaaattagctgggtatggtggcacacgactacagtcccagccacttggatagctttagcccaggaggttgaggctacaataagctgtgatcacaccactgcactccatcctggctgacagagcaagaccctatacatacatgtatatattttatataatttttgttgttatctctgttaaaaatgtccatgaactgctggagtttatttttaatccaagattctattagtaacaaaatatttccatcaatgtataattatatttttaatacagtattggctttggaaatttgttaagagccttttgaaaaacctaaataaattayattgactagctctcctttgtctacatttctaattaacc

SEQ ID NO: 947049 - DNA, 649 bp, Homo sapiens
cccttttgctcagcacttccaccgcatgaaggactgcttttttcccctttcaccattattatattaataagtttcctgaggcctccacagccctgcggaacggtgagtcaattaaacctctttcctttrtaaattacccaggcttgggtatgactttattagcagtgtgagcagagattaatacagtaagttgataccaggtattggggtgctgctgtaaagacacctgaaaatgtggaagcaactttggaactgggtaacaggcagaggttggaacagtttagagggctcagaagaagaaagaaaaatgtgtgaatgtttggagcttcctagagacttgttgagtagctttgaccaaaatgctgctagtgatatggacaataaagtccaggctgaggtggtctcagatggagatgaggaacttgttaggaactggagtaaaggtcattcttgctatgcagagactggtggcattttgtccctgccctagagatctttggaactttaaatttgagggagataatttagggtatctggcagaagaaatttctaagtgccaaaggtttcaagaagaaccagagcataaaagtttggaaaatttgcagcctgccctgcaatagaaaagaaaatctcattttctggggagaaa

SEQ ID NO: 947050 - DNA, 597 bp, Homo sapiens
atctagtaacaagtttctcagtgtgaaggtatcattgtaaacagtaagagccaaaaaaagaagagaatataaatgcacttttatgcatacataatgttttcttttatactgctaaataaaattgaataaagccatctaaaggatgaaatcttattgactttcaaagaataaaaaatctctcccaaatcattcatgatatgatttgttctagataaagagtgtgataaatccaaattgggaagggctgtagataaacccatattacaggcatgaattcgcatccaggaattcaggagagtaagaaccaacctgccaggctgcaggataaggcaatcaatcatcactgagaaatcttcaccaagtttctaatggtcttatgtagggctggataaaaaccggtaaaaatcttcatcactgaaaatttaacagacccccttttaatgcaatttctagttaaaaaaaatccatgaaattaacaaatgaaaatctggtaaggtcctcatttaatccaatgatgacattttaatgctagttttcttgtggttgctgctgctgttgtcagaatrtgttaccgtgccatttttcaaattttcattt

SEQ ID NO: 947051 - DNA, 616 bp, Homo sapiens
tgtgacaagagagataaccctccaacagtgagtctttcagagccccgtttaaaaatcctatacatgtaatatataagmcagtattgtccacatttcaaaatacactaaagtaaatgaagaatgagatttacacctaaatataagtagaaattctaatattttcttcttcaacttgagtgttttgcatgccgtgctctaggtctgacatattcattcactgtgtactttacacagtttattatagagcgaccatatttcaggcactattctttggagggccaattgtgaaacagcttcgctaattatcagtcccaaaaaaggactcccattccatgaggaaaacagcaaaagatcaatcatcactatgccagccaccagaaacaggagtccatatgtacttatgcccactgcatcctgggctactgtgtaggtccaccatgcactgggtacctatttgccaaaatccagtgaaagaaaacatattcacaagttatgtgaaatgggtttacttcttatagataattagcaagggacagaagtcttggatccattgtgtgtggttcctccaaggctgaagaaagctgaacaggaaagatgtagtcttgatatgaatgct

SEQ ID NO: 947052 - DNA, 813 bp, Homo sapiens
ataccccacacggcagagggctaggcttgagcacagacactacctttgtcctgagatttctacatggcaatgaaacttcgagctaattttctcctgactggtggtcagttcctgaatttcatgggcatatcaatcattcctttagctcaacgtttttactccattcattcacccgattgtaagtgagcgcctatcttgtacagaggtgcactgcagacagagggaaaacaactggctcttgccttcaggagccctcgctgcctcccctgctatagagttaatgaagttagatgaaggggtccaggaggctgtgtgaacacaaagccttgccagctaagtcagagaggagggtcctgcagtaatatccccaaatgtaaaatgaaaaataaataccttcaacagggttctcaggaggtgagctgagctactgctggcaaaatcccttgtacagagtggatgtcaacaaatattccctcccctccctaatgtgctctcagttatgtacctggatgttaataagggagctgagagaaaagtttgctaggagggcggagaaagtttccaccctcctcgggggaagaggtcggggacagaaaggggaggcctggggctcagagaccaacgtctcatgtcttctaccacatggccacgtggctcgccccttgactcactctggtctctgctcgaatgtccccttacatgagaggcctttctggaccacccaccccatcactctctatctccttaccctgctttatttccattccttgcacttatctccactagacatatcatmcatttgtttgttcagct

SEQ ID NO: 947053 - DNA, 690 bp, Homo sapiens
ggtttgtgagtgcaccaatcgacactctgtatctagctgctctggtggggccttggagaacctttgtgtcgatactctgtgtctaactaatctgatggggccatggagaacctttgtgtctagctcagggattgtaaatgcaccaatcagcgccctgtcaaaacagaccacttggctctaccaatcagcaggatgtgggtggggccagataagagaataaaagcaggctgcccgagctagcagtggcaacccgctcgggtccccttccacactgtggaagctttgttctttcgctctttgcgataaatcttgctactgctcactctttgggtccacgctgcttttataaactgtaacactcacagcaaaggtctgcagcttcactcttgaagccagcgagaccatgagcccaccgggaggaacaaacaactccagacgtgctgccttaagagctgtaacactcaccgcgaaagtctgcagcttcactcctgagccagcgagaccacgaacccaccagaaggaagaaactccgaacacatccgaacatcagaaggaacaaactccagacgcgccaccttaagagctgtaacactcacygcgagggcccatggcgtcattcttgaagtcagtgagaccaagaacccaccaattccggacacagtatgattccatttatgtgacattctggaa

SEQ ID NO: 947054 - DNA, 833 bp, Homo sapiens
ctggagggctcccaccctggcaasgagggctctccaagaagccatgagcacactcccaccacccaatccccacaatatacaagttggcaaaacaaggcaaggaggctccaatagaaagggacattcaccagctcctgcccccatctgaaactgtccccgcctttcctctctgaatttgggccgtcacttctcacatgcctgacatttgacaggcttgtctccccaccccagtctcagagcaccacccagcccagcgtctttcagggagtcagtccagtgtggccacactacggagcagcatgtagacggtgcatgctgggcaaggcagggaggggtggccagggcttggcactcccctgtgctcacagagtgacactcagtcccccacccttcccttaatgctagggtgagtgctctccctgagcaggaagcacagaacagctcaggtgtgggacgtggcagggctcagcacacaccctgtgcagagggaatgcaaattgtttccatccatttccccagtatctgcaactccttttttttttttttttttttgagacggagtcttgctctgtcgcccaggctcgagtgcagtggcgtgatctcagctcactgcaagcttcgcctcccaggttcacgccattatcctgcctcagcctcccgagtaggtgggactacaggcgcccaccaccacgcccagctaattttttttttgtatttttagtagagacggagtttcaccatgttagccaggatggtcttgatctcctgacctcgtgatccaccttcctcggcctcccaaagtgctgggattacaggcatgagcaccacatccg

SEQ ID NO: 947055 - DNA, 590 bp, Homo sapiens
cagagggaacaaccctgcaaaagccccaagatgggccatgcctgagtgctccaggaagagccaggagcccagcgtggttggaacagagcgcttgcaggaagagctgtagcgggggcaagggaagccatgctgtggggggctttgaagtcaccatgaagacttaggcttttcctccaaaatgggagccagggagggttggagcagaggagcattataatcaggactttattttaaaaaggtcacatgactgctgtgtatggaggcaagggtggggcaggtagaatccttgggtggctactacaataatccaggtgagaggtggtggtagctcatgccagggccttagcagtggagggatgtggccagattctggatatattttgcatagtgagctctcaagattttctgatccattagagcagatgagtcaaccatgaccttaaaggttttgacctgagtgatgggaaggatggagtggagtcaggcaaggttcaggccaagtgggtgggggaagattgaggagctgaagtcctgggtggttgagtttgagatgcccatttgatatctacgytggacttttgagtaggtga

SEQ ID NO: 947056 - DNA, 604 bp, Homo sapiens
aaaggctgagggctggaatcatctgaacactcacgttctttgtgactggtggttgattctggctcttggctgggctcttygctgaggctttggtcataccaactacccatggcctctccacgtggccagggcaccccacaacacagtggcagtggtgaggtgagcatcttgagagggaggaagacaggcagatgctggagcttatggcctagccttgcaagccacatggcgtcacgtctgctgtgctctactggttggggccatcacaagctgcctgggctcaaggggaggagaaataggcttttcttggtggtgtcaatggaagaaggataaagttcataaatttggagaggagaactaggttgctgcctgcagggtggccaattctgacaggctgggaagtgtagcctcctgccagaagcagaaacagacactttgaggaaggggcaaagagaccagggatttgtgctgtctggggtcacagaatctacatatttaataagccacaggagaggtcgtgagtgttcaggagaggaaaacatgcacacgtgcaactgagcttctgcctgtccatgggacccatgttcaaaacgtgatggcacta

SEQ ID NO: 947057 - DNA, 395 bp, Homo sapiens
agacggtgaaaccccatccctactaaaaatacaaaaaattagctgggcgtggtggcgggtgcctgtagtcccagctactccggagactgaggcaggagaatggygtgaacccgggaggcggagcttgcagtgagccgagatcgcgccactgcactccagcctgggtgtcagagcgaggctctgtctcaaaaaacaaaaaaaaagaaaccaaaaaaacccaaaaaaaaccaacttgggttgtttccaccttgtagccgttgtaaacaacatggctgtgaacatttgtatacaagtttttgtgtggacacgtgtgtttgatttttcttggttacatacctaggaatggcattgctgggccatgtggtaactttacatttaacatttgaggaactgcc

SEQ ID NO: 947058 - DNA, 724 bp, Homo sapiens
gcagctgtgctgggctgtccacacacayagcatcattttggtctaggaacccagaggctgcctctgaatgccattgactgccctttccagtaacacccttgggtccagcagtgggcctgtgcatgcaagtgtgtgtgtgtgtgtgtgtgtgtgtgtgtgtgtgtgtgtgtgtgtgtgtgtgtgattcctcagggtcagtggatcagtattatctgatctttccttggattcagagacttcatggggcccttggtcatgggtagatctccactgtgcccattaagaggagcagtagggccgggcgcagtggctcacgcctgtaatcccagcactttgggaggccgagcggggcggatcacaaggtcaggagattgagatggagaccatcctggctaacacggtgaaaccctatttagtctctactaaaaatacaaaaaaaattagccaggcgtggtggcgggcacctgtaatcccagctactcgggaggctgaggcaggagaattgtgtaaacccggaggcagagcttgcagtgagccgagatagtgccactgcactccagcctgggcaacacagcgagactctgtctcaaaaaaaaaaaaaaaaaaaaaaaaaggggcagtaagggccaggtgtggtggctaaagcctatatggccagcactttgggaggctgaggcaggcagattacttaaggtcaggagttcaagaccagcctggtcaacat

SEQ ID NO: 947059 - DNA, 687 bp, Homo sapiens
attccaaaacaaatatctttatagttcagaaatattatcttggacaaatataggggtgaagtgtatctggcaggtcttggtggcatgcagaaataaggtgtattttcacagaggtaattcattgtttttctaaactttctgcagttataagcaaagaaaatttgaagcctctattaaaaaatcattccttcaacacatcactgaccaggaacgtaaatggatgagcagtaaggacgcaatggattaagctcctttacaagggaaagatttctgaactcctcaaggtcagtaatagccaacactcattgagtgcttaccatgcactgaatggggtttctcaccatgcactacctcatttaacatcagaatcaccctttaagttagttgctattatgtgcttcgttttatagatgaggataaggagtttcagggacttgcccaaggtctatctacagttgggaaatggtggagctattcccgctttatatactatctcctgacaagactcttaagttgtaacataaacataaaccttttttgaaaatcaaacctcttaagaaaacatgaaattttatgagttacaaatatataaggttcttcatttgtgcactgtgactggatggtayaggtttagggcagaccaacccccaataattcagagcctagagcaagagtacaaatgtaggt

SEQ ID NO: 947060 - DNA, 535 bp, Homo sapiens
ttaagtaaaaaccgtccttagctcccagtgggatgatgktgttttgtctggaagactgacggatgttatgataataagataatggatactcacttctctcctatctaacccctatttaaaagacattacaccgtaacagtgcttgttacgcaatattatagttgcaaatgttgttatggaagattgtttcaaccaggggaaaagagactggtaataacagtacacttatacaattagtttctgaaactgttgcattgctttggggtttttttttttagcttagaaaagacatttatctttttatttccctttaaagttggctttcaaataaattcaatttcctctttctgtaacttctgaaacagattaaaccagagcatcagtttgcactttgctattgtcgtcactagttttcaccaagagcttcagagaaaagacattactaagtgctgggctgggtattattttctacttatatgtgaccaaataggatgtaacagccaggttctgagagtcgttgtgatactgacccctt

SEQ ID NO: 947061 - DNA, 593 bp, Homo sapiens
gaattgctcagagaacacaattgactatttcatccatgtgagatttatttaaatgactcgtggggcatttgcagtttagccaataattgaaaatattgttgcaatgtggcaggtaaamctaggaaatcatttcgcattcctgcagaggtgttccaagctcagcagcatattatattagttgaagaggggcaaacggagtgagatcagtgttgagtcctagtctttcacatttcattcctgggttttgccccaccatggaaatatatgggatggtgctttccagaaggacctgaaacgctaaggtgttatcttgtttctattctgtttttatatgccaaacacaaatgaatggtcagaccagatatggaaagacccatctatcccccaactctcttctgactcctatacctttctttctattcttcgtaccatttcacttcagacgtcacctggaatactgatgcaggaggctaagctgagtctctcagggtagacagttcaacctttccatggttgttcataaatattactagggatttggaatgcatgttcccactaaaatgatgtaaatgtggttaagtgataccatatta

SEQ ID NO: 947062 - DNA, 593 bp, Homo sapiens
gaattgctcagagaacacaattgactatttcatccatgtgagatttatttaaatgactcgtggggcatttgcagtttagccaataattgaaaatattgttgcaatgtggcaggtaaaactaggaaatcatttcgcattcctgcagaggtgttccaagctcagcagcatattatattagttgaagaggggcaaacggagtgagatcagtgttgagtcctagtctttcacatttcattcctgggttttgccccaccatggaaatatatgggatggtgctttccagaaggacctgaaacgctaaggtgttatcttgtttctattctgtttttatatgccaaacacaaatgaatggtcagaccagatatggaaagacccatctatcccccaactctcttctgactcctatacctttctttctattcttcgtaccatttcacttcagacgtcacctggaatactgatgcaggaggctaagctgagtctctcagggtagacagttcaacctttcyatggttgttcataaatattactagggatttggaatgcatgttcccactaaaatgatgtaaatgtggttaagtgataccatatta

SEQ ID NO: 947063 - DNA, 400 bp, Homo sapiens
gggttcacttgagcccaggatgttgagatgcagtgagccctgatcacatcactgctttccagcctggggaacagagcaagaccctgtctcagtaaataaatatatgtattgcccttgcccatttagttctcaacccatcgttccttagcagcaaatggcaccaatactcacccagttacttacgccacccctccttccccagctactgtccccgaactccctttggactccagcctagaatgtagagtattgcacacgatggagcattttgctgttgtttttccaaaatatccatttcaatttctactaaagtrcagtctaaaaagtttcttaagtcctcaggaaatccatatttacttgtagtagaaggtaattagagggactttcatctataaaggtt

SEQ ID NO: 947064 - DNA, 453 bp, Homo sapiens
atccagattctaaccatccaatgatgacatgagcagtccaccccatagttttaagtcttaaattatagcagaatagacttaggacacacgaattcttttccaaacttagcaactagtattaatcatgctgtgatttctttgtatttcccatgacttacatggtcttatttttttctctctactgaatgcatgcgcttttaacactctatctttcccaaagtaaaacgctcagatgatagaagcaaatgacatagtcatcatacaatgacggagaaaagaaaccagaattttatatttaaatttatgatattttagacagggtctcactttgtcgcccagattgtagtgcagtggcaagatcttggctcactgcaaactccacctctcaggctcaggcaatcctcctacctcagcctcckgagtaggtgggattataggaggtgtacaccacca

SEQ ID NO: 947065 - DNA, 718 bp, Homo sapiens
gggaaatagaacaggaggattatgagaaatataccagagtactaagccagaatctgatttctacatcaaatttaataggcttgagataaaaagtttccaataagtagcaacttaaaaaataataatcttcaaataaaaagaagcaatgaaactgaccaaataacaagttaacatgaaacttacagagaaaccaaaaaaatgaaaatcactgaagtaggccacagagttctggcaagccaatccttgcagacaaatgggaagggcagccaggagtctcacaatggtaaagtcagggaaagactaaagaatgagccggatcttggcaggtgctacagccaaatatatctgaattctgcagaggttaaataaatgattacagaagatttcatgagtgcagcaatcaaagctgagaacagatcaacccagatttggggagcactgttaacaaacaacttcctttagaaaatatgaagatgcttattgccaggatgtctgtatgaagaatcaaatggctacaccaaagaagttgagccaacagcccagaaatcatcagcagaggctattgcctggaacaaggagaggatcataacccaattccactgttcaaattactgggagaagtatctaayatgtaattcacaaaaagaggaaaaaggagctattttggggactttaaaatgaactcctcaatggaaatgaaatgagcttaaagggttga

SEQ ID NO: 947066 - DNA, 629 bp, Homo sapiens
gatcttggacatcgaagccttcagaactgtgagaaataaatttcaattgtttaagctaccaagtctgtggtattttgtcatggaagacagagtgaattaatatatttatcttcaatgtttagaagagtttaagaaggattagtgtaaaatcttttaaaactctttggtgaccagtgaagccttctgatccaggacttctccttgttgggaagttgttttaaaattatttacttaatattcttagtagttataggtctaatcagattttctatttcttcatgattcagtctttgtaaaaattgtgtctacttcatctatgttatccaatttgtttgtagtagtctcttctattcatttctgaaaaattggttgtagtgtcctcattttcatttccaattttagtaatttgagcactctgtctttttttccataaccactctaactaaatttgccaatttcgttgatccttttaagtaatcaactttttggttcattaattttctctrttttatctctggtctaatctttattattttctttattttgatagctttgggttcatagtagtggcactttcccacttgagatctgaattaagtgaaatagagaccagttcttcatggactcct

SEQ ID NO: 947067 - DNA, 595 bp, Homo sapiens
cttccagatgtacaaataagagttggtaccaatcctactgaaactattccaaaaaatcaaggaggagggactcttccctaactcattctatgaggccagcatcattctgataccaaaacttggcagagacacaatgtaaaaagaacacgtcaggccaatacccctgatgaacacagatgcaaaatcttcaacaaaatactagcaaaatgaatccagcagcacattaaagctaatgcaccatgatcaagtaggctttattctcatgatgcaaggttagttcaacatatgcatcagtaaatgtgattcatcacacaagtagaactgaaaacaaaaacaacatgatcttctcaataaacacagaaaaggatttccataaaattcaacatcccttcatgttaaaaatctcaacaaactaagcattgaaggaacatatctcaaaataagaagatccatttacaaaaaacccacagccaacawcataccaaacaggaaaaaagctggaaggattccctttgagaaccagaacaagacatggatgcccactttcaccactcctattcaatgtagtgttgaaagtctgagccagagcaatcag

SEQ ID NO: 947068 - DNA, 630 bp, Homo sapiens
gattctcctgcctcagcctcctgagtagctgggattacaggtgtgcaccaccacgcctggctattatttgtawttttagtagatctggggtttcaccatgttggtcaggctggtctcaaactcctgacctcatgatctgcctgcctcggcttcccaaagtgttgggattacaggcgtgagccactgcactcatcccaattaacagatttttaagtgcacaatatagtattgttacctattgttattatgttgtacagcagctctttagaacttattcatcttgtgtaaccgaaatttcatactcattgaacaacgaacttcccatttccctctcctaagcccctggtgagcacctttctattctctgcttctgtgagtttgactattttagatacctcatgaaagtggtatcatgcagtgtttgttcttctgtgactggttcatttcacttagcatactgtcctccaggttcactcatgttattgcatatggcaccgttttcttatttaagaccgaataatattgcattgtatgtatataccacatttccttttcctgtttatccgtcaatggacatttaggttgctatcttctgcttttctgataccatgttgaaactgagtcaagtca

SEQ ID NO: 947069 - DNA, 551 bp, Homo sapiens
ccctaaaaaaccaaggtgtaggtcaagttggctaagacccactggatccaccatggcactggatttgacctaggtttctcctaagacctcagtaacatacaagtcacacacccaccagtgtcttagttccaggcacattcatatttggtgtaaaaatggtggcaccacaagtccaagaaatcacccttttccaggaatgtttataaatattctaccctttagttaaagacacccatagaggtagcagccccaaacccccttgcatgaatctttcttgagtatacccacactcctctttcttgagtgtgtacttttcatttttcaataaatctctatactttcactcttttctaactcattcttgaattcgttctcacaatggtgtcaagagcctggatactggctgaggtcaagttcccaccagcgtttggggacctcccataccccactggyatcactgtggctcttgatttgtactttacctactctatgtattccattctagtttacctaattgtaatttgtctgcctcttctctctcctgctgattg

SEQ ID NO: 947070 - DNA, 515 bp, Homo sapiens
caaagcccttcatctaaggccaccctttggttggcagccttagccagacatctgcttctggtcaaatcaatgtcttgtctacagggaggcccagtgctgtttctagttttagctggatgcagggtgtcagacatggcaggtactacggtctacctggtgggtatcaaagagttggtcgatgttctctcgacaacctaatagggaccaatcgtgtaaggccagtagtaaaggagtttgaagttccctttcagaaaccaattaacaaccccaaagagacagtgtgtaacataaaagagcagccataaaaatatacagttaaacatatttaatagaaatattaaaataatcattacacttcctctcattgcagaaaccatgaaagaatatgccttttgtaatcaaagtaattttttatcatgcaaaaaaktattttgttatgacattcgtaagcagagactatatttcaaaacaagtttatacagacttcaaaaggtctaaagtcaaagagaaagtga

SEQ ID NO: 947071 - DNA, 544 bp, Homo sapiens
aagttcttacttatcaataacaacactgaatgtaaataaattctccaatcaaaagacgtagagtggctgaatggattaaaaaaaacaagacccaacaatctgttacctacaagaaacacacttcacctataaagacacacacagactgaaaaataaagggatagaaaaagatattccatgacaatggaaaccaaaaaagagcaggaatagctatgcctatatcagacaaaatagattttaagacaaaatctacaaaaagagacaaagaaggtcattaaataatgataagggagtcaattcagcaagagcatataagaattgtaaatatatatgcattcaacactggagcacccagatgtatagatatataaagaaaatattgttagaactaaagagagatacaccccaatacaataatagctggagacttcaacagcccactttcggcattgaagagatcatctagacaaatcaacagagaaataccagacttaactggcwctatagaccaaatgaatctaatgggtatgtacagaacatttca

SEQ ID NO: 947072 - DNA, 587 bp, Homo sapiens
cccccatccatgcttcctgttcagcctgaggaatcatgagccaattaaacctcatttctttatgattacccagtctcaggtagttctttatagcagtgtgagagtggactaatacagtgatgcacaaggatmtctggtggaagaaatatctaagcagcaaagcattcaggttgctgtgtggttactttcaactacatatagtggaatgctagagaaaagaaattacttaaatatgcaatttataattcaaaggaaacagaacaaaaagatttgaaaattcacagcctgactatgtaaagaataaaaagcatgtcagagagacaatgctaagggtatagccacgtgatcctttgttaaagagattaatatgaacaaaaagaagccaagtgctattcatcaagacaatgaaagaccccacaatcattctgaaaattttctaggctgcccctctcatcacagtctcagcgctctagaagggctgaacagttttgggagataggcctggggcaccctccaccctccacaggctcactgcccaggacaaccaagggactctgctccccacttctcagtgcagcactctttgc

SEQ ID NO: 947073 - DNA, 589 bp, Homo sapiens
tgatggctacacacagcttgttggctgggtagcagatggggaaatttgcttggcaaagtactttttagacgagttattctgtaattgatgcattttgctgggcttttacagtgtagcagaagtgatctcaggttctgtaaatgtaaattttaaagtctaccagggtttagggatttattccagtgagtttaccaaaatttccaactatagtacctgccatcaatgtcaactgccaataatgagaaatagccactctatattttttaataacacatctcaactgaagaattgtgccagtcatggcaaatcatatcacactcagacacatacatgcatattacataggaaatattgtgttcaataactcaaaggctaggttatctaataaataagagtaacaataatattttcttttgtgggcaaaaatgtaggatcctcccccaaagagaaaggacttagaggggagcaacccttgtgccttgacattccctrcatcttgccttttgcaacattactatttctctccttatcaaaaagtatactgagatcaagttaattagttatatcacaaatagttatataatcccct

SEQ ID NO: 947074 - DNA, 592 bp, Homo sapiens
aatgccttgtttcccagcggcatctggtaaatgaggtctcattctcctttgatgtatcaagtttygtgctgaatgttttcagtgtagacactgatcctggaagctaagcaggggtaggcccggttagaaaaaaagcaagtgtaggcgcagaacagggttttgtgaagcggagaaaaggagtggtaaggagtgttaggagataaaacctatgaagaaagatgaagggctttcggattttacacctggagaggagcaccgcagcggtccttaatactgcctgtgagatctttccagccggctgccttcaggcgagtgaaagggggcactttccctgccctgtgagatctggtgtggtgtgtgggtgctgggtcactgagatgggagtgctgcccctgaccccgaggcaggggctgctggtggtgaggatgctgttggccgcacagtgtgcagtgaactcagtgagaatcttctgttgtgggcccactcccgttgcggggtgaccaccacagcactacccagcctgcctcactcgcgtgagatgttacctaattgtcccaagggacctggttaggttaggatcctgaaggtggat

SEQ ID NO: 947075 - DNA, 635 bp, Homo sapiens
caaaaacagagtcagaagatctaaatgtaggtcaagtaatttttaattccaattggaggatattgcatatgcatagccaggagcttctttttttctttccatcaagaattacatatttggagatttgggtggcttacaggaaagttattagcagcaacatctagggtcttctaggttcacctcaagaggcacatgtcagcctcttctctctgtctctctgttaatgaccacccttcatccactcccccaacctacccctttccacacccaaatacgtgcatgcacgcacatgatatatgcttacacatgtgttgctgtgtgcttattttagcactgttctttatttttaatttttatttttttttgagacagagtcatgctctgttgcccctagagtgcagtggtgtgatcgtggctcactgcagcaacctctgcctcctgggttcaagtgatctcatgccttagcctccagagtagctgggactacaggcatgtggcccccataccyggctaacttttgtatttttagtagagatggggttttaccatgttggtcaggctggtcttgaactcgtggcttcaagagatccacctgccttggcctcccaaagtgctaggactacaggcatgggctg

SEQ ID NO: 947076 - DNA, 621 bp, Homo sapiens
gcctccgaggacgccctcagaaaaggatgaggagggaaagaggtgcctgtgtccgtagggagaaattgtcggtcactcgcctgcccccagcactgtctgagcccgtctgctyctgtctgcattggcgcaaataccatccccctgcctccccctcctcccttcccgaccggctgtctccaggtcttcaggagtgaaagacctatcgcagcccaagggtttctctttcatatgaggctacagtcttttcaccgccgtccccaccctctccctcaccccctgcttccccacctacccacaacatctaccggtctgtacctcttgttcacactttgataagtcagaaacagttcccgtacttggcaagattttgttgtagcttcttccattttggtctattaggaaataatttaaacatgcagaaaaatgtagagaataacataagcatcatttgtggagccaccacccatttctcccaaaacgtaactgtacacacatacacgtacatgcacacacgcacacacacggtgtgtatatacgtatctgtgtatttattttaaaaagaaatcaagcattccagatacatctgaaggactctcctacctccttctctggtcccaatca

SEQ ID NO: 947077 - DNA, 610 bp, Homo sapiens
ttaggggactttgtgcagctcctgttcccatttgggtctcgctttccctatctgtgtaatgagagggttggactggatgggtgagaagtccccttcccacactgagccgagaagattccatagaaacccaraaaccttccagtagggggttaggggtccagcgccccagcacggttccttgcatggtgctggagcccctttcccctttcctcaggggaaagttcattgcctctgaacagcacaggctcttggcagctatctcctgagtagatttttggatgtgcctttccaactcctcccttcctgacgtcagcagtgcctggtccaagtgggcccccagtggtcttgattccatcctattttccaccttgcacaatctaaaacttgaccaaggtgtgcacctcttgatgctggccaagtactctccccatagatgccctggctggttaatgtatcacactgagggcacggaatgctgcatgaactcattttgatgggctgtgcagagtttcggaaccctctggctccagggccaagtctggttactgcggcagccatgaacgtgcactgctcaggtctcctaccgtggggagcatgattgactgacggc

SEQ ID NO: 947078 - DNA, 561 bp, Homo sapiens
cctgatactggccctacgtcctaccaaaaacccagagggagatggaaacagtggcactgatggattctagagttgaacaggaggtaggtgggacctttacctcttttttcttaaaaacagcttaaaaatacatttatgccaagagctatcagggctcaatcctctctcaaaagtctcctgaattttggccgggcatggtggctcaggcctgtaattccagcactttgggaggcagaggcaggcagaacacttgaggtcaggagttcaagaccagcctggccaacatggtgaaacctcatctctactaaaaataaaaataaaaattcgccagcgtggtggcacacacctgtagtctcagctacatcggaggctgaggcaggagaaatctcttgaactggaaggtagaggttgtagtgagccaagatcatgccattgcactccagyctgggtgatagagtgagactctgtctcaaaaaaaaaaagtctcctgaattttatcattagtgaacatgcttcagtgagtgaaaaaacactctaaaattcaaactaaattttccttgc

SEQ ID NO: 947079 - DNA, 614 bp, Homo sapiens
tttagatttctctttacgtcctcttctaaaaagcctgtattttaagcccaaataaagagttggcactttccaactcttgattaatggcctccagtttttatatttccatgtggctgagtttccamaaatgtgatgttttccccctagaaggatagaaatggcagtggccagtctgtctctacttgcataaagtaggctctcaactaaactctgactatgaccaaaaccaccctcttgcccaacagtccttggggagctgggcctggtcctgggcattgctcccactgcctggtgtgggatctctaggaccagtgtgacacagagcatcatggccatagcagaccctacatgggcctgatgccactgtgaagtccctcaggttgtcaggaccctgccagttacaacaaactgagaaaaacacaaagactgaaccaaaccagccttggcaaccagggcagactccagtggaggtggggcaggggacaagttagtagacctggctaaagttctttcttctcgtaaacttttcattctgaggccctgaaggcttcatcttacccataaaaagttacacaaaactcctgatgctcagtccctccttggtctgggtctgg

SEQ ID NO: 947080 - DNA, 315 bp, Homo sapiens
gtgatatgtaaagtgaggacacaagccctgtgactatgtgggcacaactctcctaggaaaagggagcagcaaagtgcatggaccccaaagcaggaatgaatatgctcagtgcrtccaaggaagagccgggaccagcagagctcaagtggagtgagcgtggggaaagagcggacccggtcagaggggtgctggggaccagacaacgtcacgcgtcatggccatcgctaaggatttggggttttactttgcatgagatgaaaagccacaggagggttttgaatagaggagtagaatgatttgacttgagtttttaaa

SEQ ID NO: 947081 - DNA, 315 bp, Homo sapiens
gtgatatgtaaagtgaggacacaagccctgtgactatgtgggcacaactctcctaggaaaagggagcagcaaagtgcatggaccccaaagcaggaatgaatatgctcagtgcgtccaaggaagagccgggaccagcagagctcaagtggagtgagcgtggggaaagagcggacccggtcagaggggtgctggggaccagacaacgtcacgcgtcrtggccatcgctaaggatttggggttttactttgcatgagatgaaaagccacaggagggttttgaatagaggagtagaatgatttgacttgagtttttaaa

SEQ ID NO: 947082 - DNA, 315 bp, Homo sapiens
gtgatatgtaaagtgaggacacaagccctgtgactatgtgggcacaactctcctaggaaaagggagcagcaaagtgcatggaccccaaagcaggaatgaatatgctcagtgcgtccaaggaagagccgggaccagcagagctcaagtggagtgagcgtggggaaagagcggacccggtcagaggggtgctggggaccagacaacgtcacgcgtcatggccatcgctaaggatttggggttttactttgcatgagatgaaaagccacaggagggttttgaatagargagtagaatgatttgacttgagtttttaaa

SEQ ID NO: 947083 - DNA, 655 bp, Homo sapiens
atgtacacccaagcagagaaacaggcagtgaatatgaagaggtaattcccaaatgaaatccattgatgagggacgggggaacagaaagagtatagcaagggtaatagcaattgctggtcctggcctttgataccttatgagcagcctctggggttctcttttctggcaattttgggaggctttagggctatttacatttttcctcagaagactaatttagcctgtggtcttcctaaattctctggatgattatttttaacctgtgtctttaaagctgtctaccaggcctggcaagaagatacaatttgaagcacaggaaggaagcctgcagagctacctctgggatggacactattctctgaggtgctgcttcctcttccccgctgctaaaagtgaattattaaagggagattaaaataagctaaaaatttaattaacaaagtaatgagatcatcagaaccagcagacataataaaaacaggacagatccacccacagacagtcctaagtcagaaataactgaagataataacttgttctgagtagcagatgtgacgttgagggcagggacgtttcttaaccaaagacttgtaaattctccactggactaccccggaggcttaygtgccctgatgtgtctatgggcttttaggct

SEQ ID NO: 947084 - DNA, 514 bp, Homo sapiens
tcttacctggagctggtctacagtggttacccaataacatgtattacctaattttaaattttaattgttcttgtgcctatactgtttacataaataatatgccaggcgcggtggctcacgcctgtaatcccagcactttgggaggccgaggagggcggatcacgaggtcaggagatggagaccatcctggctaacacagtgaaaccccgtctctactaaaaatacaaaaaattagccgggtgtcgtggcgggcgcctgtagtcccagctactcgggaggctgaggcaggagaatggcgtgaacccgggaggcggagcttgcagtgagccgagatagcgccactgcactccggcctgggtgaaagagcaagactccgtctcagaaataaataaataaataaataaataaataaataaataaataaawaaaataataataatacattactttggtcattaacagtcagtatattagtattttggactggaatggaacagaatactacctgaaacaa

SEQ ID NO: 947085 - DNA, 569 bp, Homo sapiens
ccagtgtttgaagcaatggatgtcttatcttgatatgtttgggggtggattcttcttgttctttttttttttttttyttcttcaaccagggtcttgctctgttgcccagagtacaggggcgcaatcatggatcactgcagccttgacctccctgggctcaagcaatcctctcctgaaccacccccctgccccccactgctgggactacaggcatgcgccaccattcctggctaatatttttattttttgtagagacgaagtctcaccatattgcctacactggtcttggactcctgggctcaagtaatcctcctgcctcagcctcccaaagtgctgggattacagtgtgccactgcacctggcctggatggattcttaatgtcttcaaataaagatttcaagtactccatagcaaataaatccatgctcatttaggttcattaaaaaaaatcagaacagtatataacaattcttatatagcttttgcaaaaatgcaactcatcacctgcccctgccccccactgtcatctctcatctccctaacccactgccatctctaatctccctaa

SEQ ID NO: 947086 - DNA, 597 bp, Homo sapiens
ccctgatagaagtagttgctctgtcttctggggccccactacatcttcattacacatttgctttagcctttaacatgtttggtaattcatctgcctttctctgtttagcctacatcattggcgtctttttacamccagaatctggtatcaggcctacacatagtcaaagcttgctaaccagtagaaaacagtctaataattgacttttcatgcttcccattagaaactaagaaaattgacacttttcttgaaatcgcaaaatggtagcataggtttggttttgttttgttttgttttgtcttcagacgaagttttgctcttgttgcccaggctgaagtgcaaatgcacgatctgggctctctgcaacctccacctcttgggtgcaagcaattttcctgcctcagtctccggagtagttgggattacaggcatgtgccaccacgcccgactaattttgtatttttagtagagacagggtttctccatgttggtcaggctggtctcgatctcccgacctcaggtgatcctcccgcctcagcctcccaaagtgctggaattacaggtgtgagccaccacacccaaccagtttttttgttg

SEQ ID NO: 947087 - DNA, 597 bp, Homo sapiens
ccctgatagaagtagttgctctgtcttctggggccccactacatcttcattacacatttgctttagcctttaacatgtttggtaattcatctgcctttctctgtttagcctacatcattggcgtctttttacacccagaatctggtatcaggcctacacatagtcaaagcttgctaaccagtagaaaacagtctaataattgacttttcatgcttcccattagaaactaagaaaattgacacttttcttgaaatcgcaaaatggtagcataggtttggttttgttttgttttgttttgtcttcagacgaagttttgctcttgttgcccaggctgaagtgcaaatgcacgatctgggctctctgcaacctccacctcttgggtgcaagcaattttcctgcctcagtctccggagtagttgggattacaggcatgtgccaccacgcccgactaattttgtatttttagtagagacagggtttctccatgttggtcaggctggtctcgawctcccgacctcaggtgatcctcccgcctcagcctcccaaagtgctggaattacaggtgtgagccaccacacccaaccagtttttttgttg

SEQ ID NO: 947088 - DNA, 465 bp, Homo sapiens
cgccattgactcccacccctctggatctggcaggttgtgctcctgatccagcaaggcacccatttccactcctgatcgggctaaagtctcacctttgttcctgcacaaccaagtgccgaggttcatcctaatcaagctgaacactagtcagtggtttccatggttctcttccatgtcccacggcttctgatagagctataacactcaccacatggcccaagtttccattccttggaatctgtgaggccaagaagcccaggtcagagaacaaaaggcttgctgccatcttgggagtggcctgccccatcttgggagcagcccaccatcatcttgggagctctaagaacaaagatcygctggtaacatttggtggcctcgtatggggattctccaaagcagtgagtaatatcagaccacttttgcttgctattctgtcctctaccttagaattggaggaaaataccg

SEQ ID NO: 947089 - DNA, 575 bp, Homo sapiens
aggagattatatcccgcgcatggcttggagggtcccaygcccatggagcctcgctcagtgctagcaaagcagtctgagatcaaacttcaaggcggcagccaagctgggggaggggcgcccgccattgctgaggcttgagtaggtaaacaaagcagcccgctgggaagcttgaactaggtggagcccaccgcagctcaaggaggcctgcctgcctctgtaggctccatctctgagggcagggcatagctgaacaaaaggcagcagaaacctctgcagacttaaatgtccctgtctgacagctttgaagagagtagtggttctcccagcacggagtttgagatctgagaacggacagactgcctcctcaagtgggtccctgacccccaagtagcctttctgggaggcaccccccagtaggggcagactgacaccacacagggctgggtttccctctgagatgaaacttccagaggaacaatcagacagcaacattcgctgttcagcaatattccctgttctgcagcctctgctgctgatacccaggcaaacagcgtctggagtggacctccagcaaa

SEQ ID NO: 947090 - DNA, 668 bp, Homo sapiens
ttgttggtgtacagagatttttgcacattgattttgtgtcctgagactttgccgaagttgcttatcagcagaagaagcttttgggctgagacaatggggttttmtagatacagggtcatgtcatctgcagacaaagataatttgacttcctctcttcctatttgagtatcctttatttctttctcttgtctgattgccctggccagaacttccaatactatgttgaataggagtagtgagagagggcatacttgtcttgtgctggttttcaaagggaatccttccagcttttgcccattcagtatgatattggctgtgggtttgtcataaattgctgttattattttgaggtgtgttccttttttgtctttatttctgtttatgtgttgaatcacattgattgatttgtgcatgttgaaactcccttgcatcccggggatgaaatgaacttgatcatggtggataaactttttgatgtgatactggattcagtttgccagtattttattgatgatttttgtacctatgttcatcagggatattggcctgaaattttcttttttggggtatcaaaaaaagtgaagcctttggtatcaggatgatgctgggcttttagaatagtttcagtagaattggtaccagctcttctttttacctctggtggaatt

SEQ ID NO: 947091 - DNA, 608 bp, Homo sapiens
ttgccgaagttgcttatcagcagaagaagcttttgggctgagacaatggggttttatagatacagggtcatgtcatctgcagacaaagataatttgacttcctctcttcctatttgagtatcctttatttctttctcttgtctgattgccctggccagaacttccaatactatgttgaataggagtagtgagagagggcatacttgtcttgtgctggttttcaaagggaatccttccagcttttgcccattcagtatgatattggctgtgggtttgtcataaattgctgttattattttgaggtgtgttccttttttgtctttatttctgtttatgtgttgaatcacattgattgatttgtgcatgttgaaactcccttgcatcccggggatgaaatgaacttgatcatggtggataaactttttgatgtgatactggattcagtttgccagtattttattgatgatttttgtacctatgttcatcagggatattgrcctgaaattttcttttttggggtatcaaaaaaagtgaagcctttggtatcaggatgatgctgggcttttagaatagtttcagtagaattggtaccagctcttctttttacc

SEQ ID NO: 947092 - DNA, 569 bp, Homo sapiens
accttctgaagactacttctgtcaatttagccatcttagcctcagcccatttctgtgcccttgctgtagaagtgttgtggtcatctggaggagaagcagcactctggcttttttagttttcagcatttttgtgtcatatttttctcatctttgtgggcttatctaccttcgatctttgaggttgctgaccattaaatagaatttttgtgagatcttttctgttgatattgttgttgttgctttctgtttgtttggtttttgggttttgggttttgggttttttttggagatggagtctcactctgtcaccagtgtggagtgcagtggcacaatctcggctcactgcaacctctgcctccccagttcaagcaattctcctacctcagcctcctgagtagctgggactacaggcacgtgccaccatgcccagctaatttttgtatttttatatactccagaccctagttgccttggtccctcccacacctgaaggtatcactagtraaggctgcaaaagagcaaagattgaagactgctccttcctctggcagctccatccgaggggggca

SEQ ID NO: 947093 - DNA, 637 bp, Homo sapiens
tcccttatggaagcccctctatggaagtccctctatgaaagtcccctatggaagtccstctatggaagcccctctatggaaatctctctatgaaagtccctctatggaactccctctatggaagatcctctatggaagtctctctacggaagtccttctatggaagtcccacagtggaagtctttctatgaaagtctctctatggaagtccctctatggaagtccctgtatgaaatttcctctatgggattccttctgtggaagtacctctatggaatctatctatggaagttcctctatgggattccctctgtggaagtccatctatgaaaattcctctatggaagtcctctatggaagtcctctatggaaggtcctctatggaactccctctattgaagtactctatggaagtccctctatggaagtccctctatagaatatcctctatggaattccctctatggaagtccctctatagaggatcctctatcgaagtctgtttatggaagatcctccatggaagtccttctatggacattcctctatgacgatggtttattccacgtgtcagcttgaccagcaccgggtgcccaggtcaaacattgttctgggtgtgtctgtgagggtgttcctg

SEQ ID NO: 947094 - DNA, 605 bp, Homo sapiens
catacagccatgcactgcatcgtgacgtttgatcagtgacagacagcatatatgayggtggttccataaggttatgatactgtatttttactgtacctttttatgtttagatatgtttacatgcacaaattcttaccattgtattacctttgcttacagtattcagtacagtaacatgctgtacatgtctgtagcctaggagcaatagggcataccatgtagcctaggtgtgtagtagactacatccatctaagtttgtgtaagtagctctatgatgtttgcacagcaatgaaattgcctaacattgcatctctcagaacatattcttgtccctaaggatgcatgactgtttttggatgacaacttgggaatatttgtcaaaattaaaactgagcatatcctttgacacagctattctgtgtttggcaatgtgccctagaagtgcacaaatacacaatgtattgacttgggaacatatcttcaatttggtcagagactggttcaagctgcaaagcatgttatagatgaaacccattgtataaaacagcactataagttacctatataatgtttttcatttgaacactttaacatacagaatatat

SEQ ID NO: 947095 - DNA, 604 bp, Homo sapiens
gattggaatttgggaaacattggctttcttaatgctgattctgcatttcctgctgaaattgagctctcagctttgagcagtcccactgaaaccaggggcagccagccggattctctgcaagtcaggaaatgagagccagactcccttgcttgtctctatggacactggagtcggtttcccttcctgggcagatgaaagggtgaggtcattgcacatgattgagtggtggagaaactcagccttctagaaactaagaccaagcaatcatctcacaagaaaacattttggaagctaggttttcatcaacaacattaaataaatcactggtttttaaagaccggtaaaccccaatggcagtctgtctggatttgttctaaaacttaaagcatgagttttgcttgtaaatgagagttccctgaaatgccagcaaaaaaaaaaaaaaaaaaaagcaaacccaatcctttgggtaataggaaccrcaacaaggaaaaataggaaccgcaacaaggaaaaacatttttttaaataaataaaacatttcatgtttatcctcagcaatttcgtgtttaaaagaaacaaactctacaactgctcagcattcttc

SEQ ID NO: 947096 - DNA, 582 bp, Homo sapiens
acaggcgccggccaccacacccggctgatattttgtattttttagtagagacagggtttcaccgtgttagccaggatggtctggatctcctgacctcctgatctgcctgcctcawcctcccaaagtgctgggattacaggtgtgagccaccgcgcccagcccggatgtttctttaataagggggtggaatgctcattaggtattctggaaaaggaggggatttcagggactcctcccccctcctgttattgcctcctttctcccttatttgggtttacctggaagagtcatggacatgtcaccctgaccagggttttggtcattttctctgccttattttgggctttctctaccctgtggattatttgcctagcccctgcttcaggggttctttgggtttgtccatactcctgcaactacccgtgctattcctatctccttagaggaggagagattgccgatatcgaagagaaattactctgctctgtggatctcattggcacaggttcctgctgaagtctgaggggaaaaggggattctggaaggcggggaaatggatggatcctgtggagaggccagaca

SEQ ID NO: 947097 - DNA, 639 bp, Homo sapiens
gtgactcagctatcccactcctggatatttatccaagtatttgaaatcagcatgttgaagagttatctgcactcttgtgttcgttgcagcactattcacaatagtcaagatatggaatcaaactaagggtccatcgatggctgaatagataagaaaaaatgcggtatatacacagtggaatactattcactttttttttttttttgagacggagtcttgctctgtcgcccaggctggagtgcaatggcgcagtctctgctcactgcaagctccatctcccaggttcatgccattctcctgcctcagcctcccgagtaactgggactacaggcgcccgccaccacacccggctaatttttttgtatttttagtagagacagggtttcaccatgttagccaggatggtttcgatctcctgacctcgtgatccgcccgtctcagcctcccaaagtgctgggattacaggcgtgagccaccgcgcctggccaccattcacctttaaacaaggaagaaatggttatttgtgacaayagccatgaaactgaagaacatttatgctgagtgaaataagccaaacacagaaaaacaaacaccgcatattctcacttctgtgtagagtctgatacaattgaactcata

SEQ ID NO: 947098 - DNA, 576 bp, Homo sapiens
cttttcttgagtgtgtacttttccctttaccataaatctctactttcactattttctaacccagccttgaagtcattctccaaacaatgttaagagcctggacatcrgctggggttcctcatctggtcccaccagtgtttggggacctcccccagcccactggtatcaaattcagtagaaattgtactttgagtacccctacaatcattctgtttttcactttcaatacagtattcaataaattacatgagatattcaactattacaaaacaagctttgtgttagataactttgcccaattgtaagctaatggaagtgttccgagcatgtttaaggtaggctaggctaagctatgatgctcagtatgttattgtttgaaacatatttttttttttttgagatggagtctcactctgtcacccaggctggagtgcagtggcgtgatctcagctcactgcaacctccacctcccaggttcaagcaattctcatgcctcagcctcccacatagctgggattacaggtgcacaccaccgtgcctggctaatttcttgcatttttagtggagatgggtttc

SEQ ID NO: 947099 - DNA, 614 bp, Homo sapiens
aaagccctccataccagtcagcgagggatcccactaccaagtagttggctcctggcacatccaacctcaggtagaaaatgcgtctccagcagctctgcgtgtacacatcggwcacgatggaaactctcctgctactcgctgattctaagttgtgaacgggaagcccaggagctccaggcaccgagcaagcctcagcatcaaacaaggaaatggcagcaacaggtgcacaagtgtccatcagcctctcgcctcacagaggaggctgtgggccctcttagcaggatcaacacagtgtcctcaaagggactgagaaggtcctttagacatgaggcaagaacaaaatggcaccaaagtcactattacaaaacacaaataaactctagaaagtcatgtatacatacacataatatacatcctactatatttacaggttagctgggattactgtagagattacggcaggctgaggtgggaggatcacctgagcctggggaggttgaggctgcagtgggccatgatgatgccaccacactccagcctgggtgacagagcgagaccctatctcaaaacatagagacatatagatgtacatatagataaaaatatagataata

SEQ ID NO: 947100 - DNA, 623 bp, Homo sapiens
ccattttgaacccggcagtctgtgggcaaagtctgtgctctcagtaatgacatgatgtcactcattcaacaacaattttaaacgatagactagaaggtggctctggacaaatgttttccacacacaagtatttttctgacttcttccagatggtgtaatttacagcacttttttggatgtgcttctccatagctttctctggaactggggacctgtgacgattccagcaggacaagaggcagagcctgaaccggccaccacaagcctgccagtctctgaaggcttgtctgtgatggtaaaatcagtctgttcttacataacacaaaagaagtgtttctccccccaactctctaaggaaaagtgcagattcagaatgatttatctgttcatcctacaacttcagaaaccagtcggaaccgggcacccaacccggtttgagaaaccaaccccacagtttaatctcctagtaagcaggtgcttcctcttgactaggagtaactaaccaccagcattttactctcccaccctcakctcattatggtcacgtggatgcagaccttcaggtgggaccagaccgaccctctcaggacagacgcactgtgggatacccgctgtgccgggag

SEQ ID NO: 947101 - DNA, 623 bp, Homo sapiens
ccattttgaacccggcagtctgtgggcaaagtctgtgctctcagtaatgacatgatgtcactcattcaacaacaattttaaacgatagactagaaggtggctctggacaaatgttttccacacacaagtatttttctgacttcttccagatggtgtaatttacagcacttttttggatgtgcttctccatagctttctctggaactggggacctgtgacgattccagcaggacaagaggcagagcctgaaccggccaccacaagcctgccagtctctgaaggcttgtctgtgatggtaaaatcagtctgttcttacataacacaaaagaagtgtttctccccccaactctctaaggaaaagtgcagattcagaatgatttatctgttcatcctacaacttcagaaaccagtcggaaccgggcacccaacccggtttgagaaaccaaccccacagtttaatctcctagtaagcaggtgcttcctcttgactaggagtaactaaccaccagcattttactctcccaccctcatctcattatggtcacgtggwtgcagaccttcaggtgggaccagaccgaccctctcaggacagacgcactgtgggatacccgctgtgccgggag

SEQ ID NO: 947102 - DNA, 568 bp, Homo sapiens
ttgtatctgtatggaaattatgattttgycattttgaaaattatgctttaaaacaactttgttctgaaaattttgtttaaaatctattaactgaggctcatgcctgtaatcccaccactttgggagactgaggcaggtggatcacgaggtcaggagatcaagaccatcctggctaacacggtgaaaccgtctctactaaaaatacaaaaaattagccgggcatggtggcgggcacctgtagtcccagctagtcaggaggctgaggcaggagaatggcatggaacctgggaagccgaaattgcagtgagccatgatcacgccattgcactccagcctgggtgacagagcgagactccaaaaaaaaaaaaaaaaatctattaactgattttctgtctttagtaaacagtatactttaatatggtaaacattattatatcttaaggaatttgtaatatttcagagtttttatgataggcaccaatttatagctatgtaactatctcggagacgtggtagcaaaatgactaagcagatgggtttagaaccagagtgctcagtaaaaatccca

SEQ ID NO: 947103 - DNA, 613 bp, Homo sapiens
tatttctttctcttgcttatttgctctggctagcaattccartaccacgttgcatagaagtggtgagaatgggcatacttgtcttattctagttctcaaagggaaggcttccagcttttgtccattcagtatgatgctggctgtgggtttgtcatagatggctcttgctattttgaggtatgttcctttgatgcctaatttgttgaagattttttttaacatgaagggatgctgaattttatcaaaggcctcttctgcatctatagagatgatcaaaggtttttattattctgtttatgtggtgaatcacgtttattgattggcatatgttaaaccaactttgcatatcaggaataaagcctacttgattgtggtgaattaactttttgatgtgctgctggatttggttagctagtactttgctgaggattcttgcatctaccttcatcagagatattagcctgaatttttctctttttttcttgtgtctctgccagtctttggtatcagggtgatgctggttttagagagttagggaggagtcccttctctttgaatttttggaataatttcagtaggattggtactagctcttcttcatatatctggtaga

SEQ ID NO: 947104 - DNA, 521 bp, Homo sapiens
ttcgagaccagcctgaccaacatggtgaaaccccatctctactaaaaatacaaaaatcagccaggcgtggtgatggacacctgtaatcccacctactcgggaggctgaggcaggagaattacatgaacctggaaggtggagtttccagtgagctgaaattgcgccactgcactccagtgtgggtgacagagtgagactccatctcaaaaataaaaaaataaaaaataaagaataacttgggggccaaagattgctgttctgtgggagtcgagaaccactgtcctccaggactgccattcagagcttatgttccaagtctcctccagggattggagccaagacaggagcattcttcccatggtgcagcaccaatgcaggcgtgagtgacaagccctgagtgaatgctgagggagttgcttctctaacccctacttgagagggaaaaagagagctccayaggacacactaccttcatgctccccatgactccccattaattgggttgtccaaccaatctgtct

SEQ ID NO: 947105 - DNA, 736 bp, Homo sapiens
aaatgcctatgggtccagaggtgtggggcatgttaagacatcccttccaagatgaagtacaagttgttatatttggcccctcctaccatcaaaaagtgcaatgactagtggacccatctggattttggaggcaacatattctgcatttgggcgtgttactctagcccacttactgagtgacccaaagagctgctagttttgaatgaggcccagaatgggataaagctctgcaatagatccaggcttccgtgcaagttgctcttccactggggccatatgatccagcagattccaacattgcctgaagtgtctatcagtggcagacatagatgccatttagactcttcagcaggatcctacaaatgaattgcagcaccggcttttaggattttacaataaggtgttgccatcacctacagatggctaccctccttctgagagacagctcttgggctgggccttggtagaaaatgagcacttaatcatgggctaccaagttaccatatgacccaaactgcccatcatgaattgggtattatatgatcaaccaagccacaaagctgggcatgcacagcagcactccatcatcaaatggaagtggtatatacackatcaggcaaaagcagatcctgaaggcacaagtaagtttaatgtcatcatggctcaaatgcccacagtccccactcctgctacactgtcttctctagtcccagcctgcacctatggcctcatgggc

SEQ ID NO: 947106 - DNA, 552 bp, Homo sapiens
tattttaaaatatacgataaattattattggctgtagtcaccmtcttgtgctatcaaatactagatattatttgttctatctaactagatttttgtaccaattaaccatccttatatccccttccaccctccagctaaccttcccagcctctggaaagtatcattctactctatatccataagttcaattgtttcacttttctttttttaggttccacaaataagtgaggacacgtgaggtttgtctttctgtgcctggcttattgtacttaacataacgtcctccagttccatccatgttccaaatgacaggatctcattcatttttagagctgaatagtatatgctgtgtatacgtaccatattttctttatccatttctctgctgatggacacttagcttgcttccaaatattggatattgtgaatagtgctacaataaacatgggaatgtagatctatttttgatatacttattttctttattttgggtatatacccagaagtggaattgctggatcatatgatggttctattttcattttttgagga

SEQ ID NO: 947107 - DNA, 623 bp, Homo sapiens
taatctttctgacttttgtcacataagataacctccagttctatccatgttgctgcaaaacacatgatttcatccttttttatggccaaatactattcccttgtgcatatgtatcacgtttcttcagccaaccrtttgttgatggcaatttagggtgattttatatctccactattgtgaatagtgctgtgataaaaatatgcgtgcaaataccgtttttatatagcagtttcttttcctttgagtagatacccagtagtgtgatggctagatcaaatgctaattctatttttagtcctttgagaaatcttcatgctgtttaccgtaaagattatactaatttacattctcaccaacagtgtatgagagttctcttttctccacaattttaatttgttgttgtcattgctcagattgttctattgttaaccattgggtgagttttcaattggttcctgtgtctttgtgacataaccttattaatatgggtattttatttatcattttcttacattctggtactacaaggtgctctagtttcatcttatatatttccagtgctgtcttataatcagccatttctctaaggagccctatttccttttattagaaaatggtattag

SEQ ID NO: 947108 - DNA, 480 bp, Homo sapiens
aagtttgggaggggaggggcgtccaccattgctgaggcttgagtaggtggttctatgctcacagcgtaaacaaagcagcagggaagctcgaattaggcagagcccaccgcagctcaacaagtcctactgcctctctagattccacctctgagggcagggcatatctgaacaaaaggcagcagacagcttctccagacataaacatccctgcctgacagctctgaagagagcagtggttctcccagcatggcgtttgagctccaataacagacagactgcctcatcaagtgggcccctgacccccagtagcctgactgggagacacctcccagtaggggctgacagacacctcatacaggtgggtgcacctctgggatgaagcttccagaggaatgatcaggcagcaatrtttgctgttctgcagcctcccctggtgatacccaggcaaacagggtctggagcggacctccagcaaactcc

SEQ ID NO: 947109 - DNA, 616 bp, Homo sapiens
ctggtcagcggccaggcattggatgtgaccccaagcagcctgggcccagatgttgtcctcaactactgcgctacatcaacgctaagtcaggcccacgtaggatggcgtgccctgcccatgggcacagatcaaaaaacttcagaaggatcagtgagctggaggccagcaccctctgctccggatgagcctgggggcctcactcagcgtggatgcctcaggcatgcaggaggcaccccaaatggctgccacagcattccccgcccactgcctccacagctcccttgggcctgcaaggcaggtgtttgacagagctgggctagaatgagttcatccagatgacgcccccatggctcccacaaaatggtcccggggcagccagacatggcccggtagagtagcccagccggcacaggaaaggcaccactttataggaaactgccttcagaggcagcacagaagcttgcagagacctgctttcttccttcaaagctacatggtgcttggaccccaaacggtgtcatccattcactgcttctcccataggctccaccaaycccatatgctccactatggcacgactgctcccaattttcccaaatcaaatccaccctccttg

SEQ ID NO: 947110 - DNA, 564 bp, Homo sapiens
ctattactttcttctttccttgctctattgctgaccacctagttattaacataaccaagtcaattttgcctcaaactattgcatttaatggttgccttgttacaccctgtagggacttgccaagtcaaagacagctctctacttcagaaaagcccctctgtccctcctgactctcctcagactgggcattagtgaattgggaccatttaaccagggagatttcgataaagaccccagtgtcagccaggagtcttggcacccccgaagtagagcttttatgctgtaattggtccaacgttctgtggaccactaaagggcaagaatggacttccccaaccagtttttgtaatttcctaaaaccattcattcattttactaaagggacagccatccccactaactgtcagctaaaccagtgtaattctacacaggtkattatctcaaaccctcgaagttcttccccttttctaaggcagttcccttctttaagccagctttatggtgtaggggctgaggtttcagggacaaaccctattagatgctttgaaatgcatttctttgatt

SEQ ID NO: 947111 - DNA, 656 bp, Homo sapiens
cttcctctatgccttcttccaaaacctctcacaatgaaacaattgctcctcatccatctaacgacaagaccaagataaatatcttagaagttaaagacttaaaacaaacctttggcaattaagacaggacaccaagatgcaagcgcctggttggaatggatcaaatattccatctgcatgttaaacaaaagcaattgttatgcttgtgcgcatggcaggccagaggcccagatagtcccctttccactagggttgtcctccagtcgattgggggtggattgcatggtaactgttttccaggattctacagcctggggtaacaagtcgtgccacactctctgtctgctatatcttgaagtccggcaccctgcgggtcagcccctgagggccatccagcttctgtctcccgacactaagttcacttcgtatctctctcatgacagggaggaaacttagcattccttggagacctgaagggatgcagtgagcttaagaattttctagatcttatcaatcagtcagcccttgttcatccctgagtggatgtgtggtggtatwgtggtggacctttactggacactctgccaaataactggcgtggcacttgtgttttagtccaattggctatcccttgcctctcaccctggcatttcatc

SEQ ID NO: 947112 - DNA, 612 bp, Homo sapiens
gacttcactgtacacatggaaaaccagggtatagagagattaagtgattgatccaaagccaggtggcttgtgagtgccaaagttgtgactcaaacccacatgcatctggcatggaagctcatcttctctctctgtcccctgagtaccactgagtcaaacaccctggctgactcagggttgcactcttctcagtcccctggcctgggatctttgaaggtggatgtaccagaatcttaaggagaaacaacatgttctccccaggcccaggggtaccattcactagtcatatgatgtaaatggtgtacactggagttaggcaactgaattgtactatgttctggggtctttctagcctatgaaatccccagctctctctgggcctaagtctagaccctctcattcatccaggtaacactttgaggcccctgaccaatgaactgtcacttatttccatggtcagtctagcttgctcttgaagctctccagagacaaagaagcctgyagcaaatcacaatgaggattctggtccctgaggtggagagggtgggagccccactgtttgccctagtctctactttctgtagattaggagatttcaaagactaatcaaag

SEQ ID NO: 947113 - DNA, 558 bp, Homo sapiens
cagtgctaagcccctcactgcccggggctggccrgcccgccactccaagtgtggggtgccaagcccatgcccatccggaattctagctggcctgcaagcgccacgcgcagccccggttctcgcccgtgcctctccctccacacctcctcgcgagctgagggagccggctctggccctggccatcccaggaaggggctcccacagtgcagtggtggctgaagggctcctcaagtgcagccagagtgggtgccgaggccctctaggaggcgccaagagcgagcgagggctgcgagggctgccagcacgctgtcacctctcaatttcaaagtttttgaatttattgagacttgttttatggccaatcatgtgttcaatcttaggttgtgttctgtgcacagatgagaaggatgtatatcctgtggttggtgggtggagtattctgtagatgtctattaagtccaattgatcgagtgttgaatttaagtccagaatttccctatttttctgcctttataatttgtctaatgctgtcagtggcatgttgaagtccccaactat

SEQ ID NO: 947114 - DNA, 558 bp, Homo sapiens
cagtgctaagcccctcactgcccggggctggccggcccgccactccaagtgtggggtgccaagcccatgcccatccggaattctagctggcctgcaagcgccacgcgcagcccyggttctcgcccgtgcctctccctccacacctcctcgcgagctgagggagccggctctggccctggccatcccaggaaggggctcccacagtgcagtggtggctgaagggctcctcaagtgcagccagagtgggtgccgaggccctctaggaggcgccaagagcgagcgagggctgcgagggctgccagcacgctgtcacctctcaatttcaaagtttttgaatttattgagacttgttttatggccaatcatgtgttcaatcttaggttgtgttctgtgcacagatgagaaggatgtatatcctgtggttggtgggtggagtattctgtagatgtctattaagtccaattgatcgagtgttgaatttaagtccagaatttccctatttttctgcctttataatttgtctaatgctgtcagtggcatgttgaagtccccaactat

SEQ ID NO: 947115 - DNA, 510 bp, Homo sapiens
attcaatgtctttactaattcaatgtccattctgagcaaagcttcayagaagctcagagatgactctttggtgctgggcacagtggctcacgcccgtaatcccagcactttgggaggccaagttgggaagatcacttgagcccaggaaattgagaccagcctggacaacatagcacttcttctctacaaaaaaatttttaaaaattatctgggcatgatagtgtatgcctgtagtcccagctacatgcaagcctgaggcaggaggatcccttgagcctggggacttgaggctgcaacaagccatgatcacaccactgcactctagcctgggtgagagtgagcccctgtctcaaaaatttaaaaatttaataaaaggatgactcgttcgctactctcaaagaagtcttcatttagaaaagaaggtaagacacaaatacgactataaccaagtgggcagtgatccatccccacaggagaggagtgttcagagaccacaaaggcagcagagac

SEQ ID NO: 947116 - DNA, 615 bp, Homo sapiens
aaaggaaaaaaacaaaacaaaaggtaaagtcctgaaaatctatgtgtataaaaatcaatccaaatgatctaaatttatacgaccacgaagctttatcctctaagtacccaaatgttgaaccaatccctaccatytcctttttccacaaaatacaagatactacacaattcctgttatagagaccgctaggaagaaacatgtagttgaaacccatagttaaaaggattttggattcaaatttatcacagtaccaattttcctaaacatgttttgataaaggccattggaacacctgtcacactgttcaaatgcccaatggtaagacttctgatgagaccaaacaggtcacattaaatcaatagaatatcttagaaataaagccatatgactaaatccaaaacatatcacatgaagtacctcatgtacaatacaaacctagtttaataaataaaagaaacataggtgactgcgctctgggagaacatccagttcctgatggcctcttcacagtcttctctgagactccactgccacttccactcgggcaagcctaatggtgcggccatgaagtttgtagccatcttgtcttactaatgccacggtgccaggctgcac

SEQ ID NO: 947117 - DNA, 752 bp, Homo sapiens
gcggccactggtttctggaaggaagggagggaggggaggagggtgtgaagtagctggctcagacccctgccccgcctgctctcccacccaccctgccctcctcagacctctgcctcaactccccctttctgggacagcaccccactgaccccgggttccagcctgacccgaacaggagaggcagacatgcggtgagccagggacgcagggcagccgccagctctgcaggccccagagctgcacggaggccccacacccaaagtcttcgtcccctcccctcaagcgaagggggaagggcggggagaacagcacgggggatctaatggctttcgagggctttgagccttcatgggccacccagcctgcgacgccaacccagggcccctccgagtgctaatgcaggcggggacgggggcaggggccggtgatagcttaatgcagcctggagaggctgcaatgaaacgcccaggtctccgctttcttcctccccagagcttaatgcatggagctcgcccagccctgggcctcctgctttgaagaagctgccgcagctccattagcaggcggcccctcggctcggcttggagaccccactcagcggaggaaggcggctgacagcraggacaccagggccaggtccgtcctacacagaagcctgggaaccaggcagcaggcagcccccccacagcaccgcgctttccttttgtctgagactgtggctgagctcagggctgtgaaggtcccagcgaggg

SEQ ID NO: 947118 - DNA, 524 bp, Homo sapiens
aggccagccagagccctggagcctgcaggtgggctgggacagggcttgcgaccgcaggggtggtgtgcgtttgcgctggcgtctgcacaggtgtgtgcgtgctgtgccatcacgctggtcaggcctgtacgccgtggagaggggcgctgtgtggggctcgctgcctgagccctgggtggaccgtggctgccccatgagttgtcggggacctccgctgccccttggacctcgcccgcggccctgggcaatgggtgtggtgacgtcctggggcccccatgagtcagctcgtcctcgtgcccgggcactggcctctccttcctgtgggcgcacagccccggttcctctgaaagcttcgtgggccgggacccgggatgagctggttaaaccctggccctgtgagcaggaggtgtggcttyggggggcggccccgccctgggctcagacttgatcctgcaccggagggagccattctggaaggccgctgccccgggccctgtccctccccctctcatccccagggtgct

SEQ ID NO: 947119 - DNA, 627 bp, Homo sapiens
tgtgtgtgtgtggtttttttagggttttttttctttttttagacggagtattgctctatcrcccaggctggagtgcagtggcgcgatctcggctcactgcaacctccgcctcccgggttcaagtgactcttctgcctcagcctcccaaatagctgggaatacaggcacttgccaccatgcctggctaatttttgcatttttaataaagacagggtttcaccatattgcacaggctggtcttgaactcctgaccttgtgatccgcccacctcagcctcccaaaatgctgggatcacaggtgtgagccaccatgcctggcaattctgtgtttttttctccccttatacaagagataactttggttggtacccagatgagagtttctcaagtttcctgatacttggatgaaagcaataggaggtctggtgactcaaacagataaagtaattgttttcattttatatggccattcaaaaaacagatgaagcagtcatgatccttactatccaggaacatgtctagactaacaactggatacatgggtgaattaagcattatatggttggtacaatgaatagatgtgtccaaaaaaaattggggccactgttttatattgttacttctgata

SEQ ID NO: 947120 - DNA, 587 bp, Homo sapiens
ctcagctgaaaccagaagaatggccccactgagcccaacctaaatggctgaccatctcrattatgaactaataagttttggatgatttgttatgctgcaatagctaactaatacatgcacccagtgcagataggatgccaggattcaatgacaggttgattactagttatgttctaacagtgggcaccctataggtactgattttttcccctgatttaaagttgggtgacttgtaagagaatgttgagtaatgcagaaatacaggtagacatgtatgcatgtgattggtgcttatacccacacagtcccacacaccacaggagaaaacaggtaactacagcctgactagtagggccaaggccaatagcaaaataagttttgcctttaatctgttttctccatatctaaacatttgaggtcaagagtgtggacagatctgaagacacagagttttattatcctgtggccccaacattctttcttcactgtctgatctctggaagaaaagtgggcaacaggtggccagcagtggtctacctgtggttattttactcctgctgccatctgctctttttatggccactatc

SEQ ID NO: 947121 - DNA, 587 bp, Homo sapiens
ctcagctgaaaccagaagaatggccccactgagcccaacctaaatggctgaccatctcgattatgaactaataagttttggatgatttgttatgctgcaatagctaactaatacatgcacccagtgcagataggatgccaggattcaatgacaggttgattactagttatgttctaacagtgggcaccctataggtactgattttttcccctgatttaaagttgggtgacttgtaagagaatgttgagtaatgcagaaatacaggtagacatgtatgcatgtgattggtgcttatacccacacagtcccacacaccacaggagaaaacaggtaactacagcctgactagtagggccaaggccaatagcaaaataagttttgcctttaatctgttttctccatatctaaacatttgaggtcaagagtgtggacagatctgaagacacagagttttattatcctgtggccccaacattctttsttcactgtctgatctctggaagaaaagtgggcaacaggtggccagcagtggtctacctgtggttattttactcctgctgccatctgctctttttatggccactatc

SEQ ID NO: 947122 - DNA, 591 bp, Homo sapiens
ttaaatgagaaaaagaaaatgtgcagagttcttatcggaaaggggtcacaatccacaccccaagagagggttcttggatttcgctcaagaaagaattcagggtgagtctacagagtaaagtaaaagcaagtttattaggaaacagaaggaataaaagaatggcttactctataggcagagcagccctgagggctgctggttgcccatttttatggttatttcttgattatatgctaaacaaggggtggattatttttgcctcccaattagacaatataaagtcattttctgatgtttccatgatgtctccatggcattttgtaaactgtcatggcactggtgggagtgtagcagtgaggaccaccaaaggtcactctcatcccatcttggttttggtgagttttatccaccttctttactgcaacctgttttatcacccagatctttataacctgtatcttgtgctgaactcttgtctcatcctgtgacttagaatgcctaaccatctgggagtgcagccccrtaggtctcagcctcattttacccagcccctattcgaaatggatttgccctgattcaatacacctctga

SEQ ID NO: 947123 - DNA, 614 bp, Homo sapiens
gctgggtgaccagaccaggtggcagctatcattaattagcgccctactatgtgccagaggactggccctttacatcattttatcatttaattctatgatgatcaggctgtgtaggcmttgtcatctgcatttagaaatgaggacatgatgtctaagtatggataagtcttgctggtctagagtcatgtgactattcagggtagatctgcagttgaacctctatcagtctgacccttattctaagctattttccactagggtgtaatggaagcagctctttttagaatagaccagaaacacccttctccatatgctttgttggacttggtggagaagtaactgacctaaggaggtggaggtagaactatttatctatttatttatttatgagacagagtctcactctgtcactcaggctaaagtgccgtagtgcgatcttggctcactgcaacctcctccgcctcccaggttcaagggattctcctgcttcagccttctgagtagctgggattacaggcacatgccaccgtgcccagctaatttttgaatttttttttttagtagaaacggggtttcaccgtgttggccaggctggtcaaaatcctgacctcaga

SEQ ID NO: 947124 - DNA, 645 bp, Homo sapiens
attctccagtgaccaatttcattgaaaaagaaatgtataaaattccggcatgaaaacagacacataaaccaatgcaacaggatagatagagaacctagaaataaattcacatatttagagccagctgattttcaaaagaagcacctagaacatacattggggaaaggatatcctcttcaataaatggccctaggaaagcagaatattcataggcagaagaaagaaactgggccattatctcttaccacatacaaaatcaacccaaaatggattaaagactaaattttaagacctcagactacaaaattactagtagaaaacataggcaaaaattcttcagaacattgggttaggcaaagacgtcaaaagttttagcaacaaaaacaaaaaacagacaaatggaaccatattaaactaaaaagctactgcagagtgaaggaaacaatcaacaaagaaaaaagacaactcacaaaatggaagaaaatatttgcaaattattaattaggcaggggattaatatgcagaatatataaggaactcaaacaagtcgagtaaaacaaacaaataaataattccmtgaaaaaaggaacaaagactatggatagacactcctcaaaagaagacatacaaatggctaagaggtac

SEQ ID NO: 947125 - DNA, 472 bp, Homo sapiens
ctctcacaagtacagttctgcttcctctggcttcccactgttgggactcagaaaagagtactctaaaatgaaagcctcagaagttaaaagtttttctctgcatacctgccctcctttctctcaggcgcgttctcccctagtctagccttagaaactagaatccctcttccccatagaaaccagaacctcttttccccaaagccagccataaatcctaaaaatattactcttattttccctctgcctttctgtgtaaaaactggccataaagaaatgatccgacttaccttgtttgactgtaggtcataattcccccattcccgagagggtcctgccccacacacagaagaaagggatgctgtgcagagaggccaagaatctacacaggcctcactgaatctcccagctcagtctatyagcattagatcataccctttttttgtccagtcgcatttgtacatagctgttcata

SEQ ID NO: 947126 - DNA, 430 bp, Homo sapiens
ctggggtcaattatcttctgaatgaataaacctccaactactctctggtctggaccaccatcccctccttgcccccgcaaaaaagttcctggccagtgsctcacctctgtaatcgcagcactttgggggactgggatgagcggaccacctgaactcaggagttcaagaccagcctgggcaacatggtgaaaccctatctctacaaaaaattaaaaaattagccaggcgtggtggcatgtgcctgtagtcccagctactcaggaggctgagctgggaggattgcttgagcccagaagcttgaggctgcagtgagccgtgatcatgccattgcactccagcctggatgacagagcaagaccctgtctgaaaaaataaataaataaaaattaaaaatcaggtagttgccaggcacagtggctcacatctataa

SEQ ID NO: 947127 - DNA, 585 bp, Homo sapiens
acttaaaacagattattataggcaaatgaatcaaagcatagtactacaaaaaactgttgaatcacaaaggaaaacagcaagaagacactacatatatatataatatatgttcaacagtggacattaatatatattatacataacactatattatttgtgtgtatagatataatataaccactatattacatatacatatataaaaataaccactatatatatagcggttataggtttttgatgttatgatattgatgtttttgtttttggtgttacattttttgttttgatgttacaatttgcatctttttatactatgtatcacttagcacattattgtagctatagttatttttaacagttttgtcctttaacaaaacttacattcagtagcaactacgtggtctgaatataggatgcacagtattgtcaatcctggaaatagtctttttattttcataagatatataaatgaagtgttggtgtctttacctagaggtgacactaaaggcttctaagggaataaatgtrtatagacctcctaataaataactcttgcatatacatatagaagatctttcttga

SEQ ID NO: 947128 - DNA, 585 bp, Homo sapiens
acttaaaacagattattataggcaaatgaatcaaagcatagtactacaaaaaactgttgaatcacaaaggaaaacagcaagaagacactacatatatatataatatatgttcaacagtggacattaatatatattatacataacactatattatttgtgtgtatagatataatataaccactatattacatatacatatataaaaataaccactatatatatagcggttataggtttttgatgttatgatattgatgtttttgtttttggtgttacattttttgttttgatgttacaatttgcatctttttatactatgtatcacttagcacattattgtagctatagttatttttaacagttttgtcctttaacaaaacttacattcagtagcaactacgtggtctgaatataggatgcacagtattgtcaatcctggaaatagtctttttattttcataagatatataaatgaagtgttggtgtctttacctagaggtgacactaaaggcttctaagggaataaatgtgtatagayctcctaataaataactcttgcatatacatatagaagatctttcttga

SEQ ID NO: 947129 - DNA, 584 bp, Homo sapiens
tcatccttcaagtttccaatttgtcactggatttttatttttatttttgccaaaaacaagatgtaattatgataattcataagcttgtaacaatagccagaaaacacattatgacaataaaaacaaaatcaaacaaaattcccacttttaacaccatctacccacccactcaaaataatttgggttgtgaccgtggcataacttgattatttgaatcacaattgtgatttagaatttaacttaggcaagataaataagacgtgatttcaccaaagtgtagcatttttaattggtaaacatgagaggcatcccactataaggaaaagagtgtgatctttggagatagaaggcctacattagggacttcacttggcaatctgctagctttgtgatcttctgcaagaaactacctttccaagctctctgccctgatgagcaaaattgggagataaacacatttcaaggttttgtggcaatcacaaaagtaggtcaaagtacctggaaaagagtaaataaatgttcccatctgcagtataatcataaaattatttamtactattaggaatacgatagggagcaataaa

SEQ ID NO: 947130 - DNA, 592 bp, Homo sapiens
gcagctggccagttttcaagtgaaattcttggtaacaaacaggtcgagaaagaacaaaaaacatgcatcactagtgcacctagaattctacctagaaacacattcttcagcactaaacatgctgacagcacagtgtgaacatgaccttaatcacaaaggacagcaggctaagctacccacattgcaggataggaaataagaataagaaccgtctctgatcccctgccacctagtttgagattatccatagaaactataaaagtgaagagaggagagaaatcacatactgcattagttttggataatggccagacaactccttaagtatatatatatacttccctttcccaataagaccacctattttccatttttcttaacacatgactaagctaacaatatatatatatatatatatatatatacacacacacacacacacacatatgtgtgtatatatatatttgtgtgtgtgtatacatakgtacatatatattcattcaatccctggtaagacaaaaagattcttatttctcaggaataacatggaaatttctattgtttatattcccgttttcttagcccagcagtc

SEQ ID NO: 947131 - DNA, 765 bp, Homo sapiens
gtttctgattcagtaggtcttgggtggggcccaagaatttccatttctaatcagtttccaggcaaagggatgctgctgatccagggactacacttaagaaccactgctctggccaggcgcggtggctcacgcctgtaatcccagcactttgggaggccaaggcgggcggatcacgaggtcaggagattgagaacatcctggctagcgcagtgaaaccctgtctctacttaaaaaaaaaaaaattagccaggtgtggtggcacgtgcctgtagtcccagctactcaagaggctgaggcaggagaattgcttgaacccgggaggcggaggttgcagtgagccgagattgtgccactgcactctagcctgggctacagaacgagactccatctcaaaaaaaaaaaaaaaagatccactgctctacaagtctttcatggtagtgtttgacctgcctcaactgcacataagtacccatctacacacagacacacacacagacacacacacacggcagtcaagagcccctgcctcaatcactggtccctcaaacagccagatcaaccagatctgcccaaccaactacagactgaacgctcaggggtagctgcccctgagaaagctggtcccactgaagtcctatatgagcctgtcactgcaagaggctctaaagtcacacccaaaacccttgaaatccaaagtcacagcrtttctcttttctgagagcagtcatgagcaatcccaccctgctgcacccttcacacatgggt

SEQ ID NO: 947132 - DNA, 692 bp, Homo sapiens
cccagtgggtcccaagttcttgtcctgtgtccacaaagaatgaagtatgcagacaactggagggtgagcaaggcagaaaggagcctcattgagtggcagaactgttctcagtgggtatctcctttcctcaggcaggttgtcccgatgagtgtccagctctcagtggagaagagacccacagtgggtagctgccttccacaggcaggttgccccgatgtctctgcagccttcagcagagagacccagagtgggtagctcctatctgcaggcaggtcatcccattgtctgcctgagtctggctgagtctggttttttttatggacttcagaagggaggaagtgtgtgctgattggtccaccggcagccataggcaggcccaggaaaagcaccataaattctcactccagtctgcaggactgatagctcagcccctaggtttcaggctgtccctgtcttgaagggggcttcactggggacccatcccatttcacccaggagcctgattgccccctgctgccatcaacctgctggccatggcacccatggcacccaggctgttcatgctgaggggtgcctgcaggtacatgccraactgccctcagcctcaccctggcctccctcccatgctcatcggcacccaaagtctggagggggccgaggcggcaggggactggtgtgtcagtgctgccctg

SEQ ID NO: 947133 - DNA, 587 bp, Homo sapiens
ggtatcacttaaccacatttacatcattttagtgggaacatgcattccaaatccctagtaatatttatgaacaaccatrgaaaggttgaactgtctaccctgagagactcagcttagcctcctgcatcagtattccaggtgacgtctgaagtgaaatggtacgaagaatagaaagaaaggtataggagtcagaagagagttgggggatagatgggtctttccatatctggtctgaccattcatttgtgtttggcatataaaaacagaatagaaacaagataacaccttagcgtttcaggtccttctggaaagcaccatcccatatatttccatggtggggcaaaacccaggaatgaaatgtgaaagactaggactcaacactgatctcactccgtttgcccctcttcaactaatataatatgctgctgagcttggaacacctctgcaggaatgcgaaatgatttcctagttttacctgccacattgcaacaatattttcaattattggctaaactgcaaatgccccacgagtcatttaaataaatctcacatggatgaaatagtcaattgtgttctctgagcaattc

SEQ ID NO: 947134 - DNA, 587 bp, Homo sapiens
ggtatcacttaaccacatttacatcattttagtgggaacatgcattccaaatccctagtaatatttatgaacaaccatggaaaggttgaactgtctaccctgagagactcagcttagcctcctgcatcagtattccaggtgacgtctgaagtgaaatggtacgaagaatagaaagaaaggtataggagtcagaagagagttgggggatagatgggtctttccatatctggtctgaccattcatttgtgtttggcatataaaaacagaatagaaacaagataacaccttagcgtttcaggtccttctggaaagcaccatcccatatatttccatggtggggcaaaacccaggaatgaaatgtgaaagactaggactcaacactgatctcactccgtttgcccctcttcaactaatataatatgctgctgagcttggaacacctctgcaggaatgcgaaatgatttcctagktttacctgccacattgcaacaatattttcaattattggctaaactgcaaatgccccacgagtcatttaaataaatctcacatggatgaaatagtcaattgtgttctctgagcaattc

SEQ ID NO: 947135 - DNA, 537 bp, Homo sapiens
gtttaagtaaaaaccgtccttagctcccagtgggatgatgktgttttgtctggaagactgacggatgttatgataataagataatggatactcacttctctcctatctaacccctatttaaaagacattacaccgtaacagtgcttgttacgcaatattatagttgcaaatgttgttatggaagattgtttcaaccaggggaaaagagactggtaataacagtacacttatacaattagtttctgaaactgttgcattgctttggggtttttttttttagcttagaaaagacatttatctttttatttccctttaaagttggctttcaaataaattcaatttcctctttctgtaacttctgaaacagattaaaccagagcatcagtttgcactttgctattgtcgtcactagttttcaccaagagcttcagagaaaagacattactaagtgctgggctgggtattattttctacttatatgtgaccaaataggatgtaacagccaggttctgagagtcgttgtgatactgacccctt

SEQ ID NO: 947136 - DNA, 575 bp, Homo sapiens
acaacgtaacagaatctccaggacacatctaaagcagtgtttaaaggaaatttatagcactaaatgcccacaggagatagtggaaaaratagaaaatcaacactctaacatcacaattgaaagaactagagaagcaagagcaaacaaatttaaaagctatcaggagacaagaaataactaagattagagcagaactgaaggagatagagacatgaaaaacccttcaaataatcaatgaatccaggagctggttttttgaaaagattaacaaaatggatagaccactgactagactaataaagaagaaaagagagaataatcaaatagacacaataaaaaatgataaaggggatatcaccattgatcccacaaaaatacaacctaccatcagagaatactataaacacctctacacaaataaagtagaaaatgtagaagaaatggataaatttctggacacatacaccctcccaagactaaaccaggaagaagctgaatccctgaatagaccaataacaagttctgaaattgaggcagtaattaatagactactaactaaaaagagcctgggacca

SEQ ID NO: 947137 - DNA, 575 bp, Homo sapiens
acaacgtaacagaatctccaggacacatctaaagcagtgtttaaaggaaatttatagcactaaatgcccacaggagatagtggaaaagatagaaaatcaacaytctaacatcacaattgaaagaactagagaagcaagagcaaacaaatttaaaagctatcaggagacaagaaataactaagattagagcagaactgaaggagatagagacatgaaaaacccttcaaataatcaatgaatccaggagctggttttttgaaaagattaacaaaatggatagaccactgactagactaataaagaagaaaagagagaataatcaaatagacacaataaaaaatgataaaggggatatcaccattgatcccacaaaaatacaacctaccatcagagaatactataaacacctctacacaaataaagtagaaaatgtagaagaaatggataaatttctggacacatacaccctcccaagactaaaccaggaagaagctgaatccctgaatagaccaataacaagttctgaaattgaggcagtaattaatagactactaactaaaaagagcctgggacca

SEQ ID NO: 947138 - DNA, 575 bp, Homo sapiens
acaacgtaacagaatctccaggacacatctaaagcagtgtttaaaggaaatttatagcactaaatgcccacaggagatagtggaaaagatagaaaatcaacacyctaacatcacaattgaaagaactagagaagcaagagcaaacaaatttaaaagctatcaggagacaagaaataactaagattagagcagaactgaaggagatagagacatgaaaaacccttcaaataatcaatgaatccaggagctggttttttgaaaagattaacaaaatggatagaccactgactagactaataaagaagaaaagagagaataatcaaatagacacaataaaaaatgataaaggggatatcaccattgatcccacaaaaatacaacctaccatcagagaatactataaacacctctacacaaataaagtagaaaatgtagaagaaatggataaatttctggacacatacaccctcccaagactaaaccaggaagaagctgaatccctgaatagaccaataacaagttctgaaattgaggcagtaattaatagactactaactaaaaagagcctgggacca

SEQ ID NO: 947139 - DNA, 662 bp, Homo sapiens
ttgtcactggttctgtttatgtgatggattayatttattgatttgcatatattgaaccagccttgcatcccagggatgaagccgacttgatcgtggtggataagctttttgatgtgccgctagattcagtttgccagtattttattgaggatttctgctttgatgatcatcagggatattggccttttttgttgtgcctctgccaggttttggtatcaggatggtgctggcctcataaaataagttaaggaggagtccctccttttcgactgtttgaatagtttcagaaggaatggtacctgctcctctttgtacctctgatagaatttggctgtgaatccatctggtcctgggatttctttggttagtaggctactactgcctaaattttagaacttgttattggtctatttagagacgtaaattcttctggtttaatcatgagaaggtgtatgtgtccagatatttgtccatttcttctaaattttctagtttatttgcatagaggtgtttatagtattctctgatggtagtctgtatttctgtgagattggtggtgacatccttttatcattttttattgtgtctatttgattattctctcttttcttctttatttgtctagctagcagtctatgttgttaattttttcaaaaaaccag

SEQ ID NO: 947140 - DNA, 595 bp, Homo sapiens
atattagaataaatataaataatataagaaatcttcatttacctatcacccagcttcaacaattaacaatgcgctgccattttgtttgatccatgcccagtaacttcattttttttctcagtatttaaagcaaatcccaggcaccattctatttttcccatcaggatagatgtatctctcagtattaagaacttcctttttcaaaacataatcacaatactagcaacatgtccaacaataattccttgaaatcatttaatgtttagtctatgttaattttgcttttattgtttcaaatatgtcttttattgatttattttcatcaggatctaaacaaggaacacacattgaatttcacccttatgtctcctagaatcttatctataatattttccccttcctttattttactttgcccatgctgttaaaaggtaaactaaggcataaaataattttaaagagtatacttgaacaaacaacaattcataaatgasgcagcttcaaactgtaagtgctttggggtcttccatgaggggacacaagagaaaggcttttataggctgaacacagaaataaagcaaagaaaatatgtgat

SEQ ID NO: 947141 - DNA, 740 bp, Homo sapiens
tctatatgataagcacttgaaatatatcccctcgtatgcccaagggattggttccaggacatccatgtatacccaaagccgtgtatactcaagtcctctagtcagccctgcagaacmccaggatacaaaaagtcagccctcctttatattcggattccatatcctgcaaaaattgattgtattttctattggcatttggttgaaattacatgtaagtggacctgcgcagttcaaatccatgttgttcaagagtcaactgtatatgtgagaatatatatatatatataaatttagagagaggaatttatgtatataatatatggagaatataaaatacataggaattgttaagaggaatttcttaaaaaacaaaaaatcagtgatacataagctaaagtaataggagttagagcagtgttacaaagtttctaaacaggagccagcaactttcttctccagaggctacaatgatagcagtgatgggaaaggatgcaaggtgcaaatagtagtactaaataggacagaagaaaaaatatttactttcaaataaatttgtcttcaagatgttgtttcttcacctcctcaggctttccacttttcacattgaaaaagaggccatccccttcctcagcttcaggacctctgagaaactatgacttaagacaacctcaactgagtggttcatatagttcacaaagtgtctagtttgccatagtgcaccaaaagcatatgaatgagac

SEQ ID NO: 947142 - DNA, 587 bp, Homo sapiens
atttccattggaaattgaagggagtcctctataagtatcaaaacctaataaataaacaaacttacataagattatggacaaaatcatattaaacttttaaacagtctaattcyatattgctttaaaagttaaattgattatataatgccatcattagacttatgccctctttaagcaaactctactaatattgcttccaaagtaaaacatatttatagaacattgctgtcttcaaataagccaggtttataaatttactactgctaaatgcaaggtggggttgggaaagggtggtggtagggcagttaggtacttagggcctctgtctagggttgttttgttgttgtttgcttttttataggcagtgcctcgctctgttactcaggctggagcacagtagtgagatcacagctcactgtaacctcaaactgttggactcaagcattcttcccagttcagcctcccaagtagctgggactacaggtgcatatcaccatgcccagctaatattttttaattctttgtagaggtagggtctcactatgttgcccaggctggtcacaaactcctggcctcaatgatcctcc

SEQ ID NO: 947143 - DNA, 587 bp, Homo sapiens
atttccattggaaattgaagggagtcctctataagtatcaaaacctaataaataaacaaacttacataagattatggacaaaatcatattaaacttttaaacagtctaattctatattgctttaaaagttaaattgattatataatgccatcattagacttatgccctctttaagcaaactctactaatattgcttccaaagtaaaacatatttatagaacattgctgtcttcaaataagccaggtttataaatttactactgctaaatgcaaggtggggttgggaaagggtggtggtagggcagttaggtacttagggcctctgtctagggttgttttgttgttgtttgcttttttataggcagtgcctcgctctgttactcaggctggagcacagtagtgagatcacagctcactgtaacctcaaactgttggactcaagcattcttcccagttcagcctcccaagtagctgggactacargtgcatatcaccatgcccagctaatattttttaattctttgtagaggtagggtctcactatgttgcccaggctggtcacaaactcctggcctcaatgatcctcc

SEQ ID NO: 947144 - DNA, 653 bp, Homo sapiens
aaagaaaatattattgtacagttgtacaacatgttaatattttaaactaagtgttagtacaacagagtcaaaaagttaaaaattttaaagtttggccaggcgtggtggctcacgcctgtaatctcagcactttgggaggccaaggcaggcggaacatgaggtcaggagtttgagaccagcctggccaaaacagtgaaaccccgtctctactaagaatacaaaaaattagccaggcatggtggcaggcgcctgtaaatcgaggctgaggcaggagaactgcttgaacccgggaggcggaggtggcagtgagccgagattgtgccactgcactccagcccgggcgacagagggagactccatctcaaaaaaaaaaaaaaaaaaatttaaagtttatgaagtaaaaaagttacagtaagctaagctagggttaatttattattgcagataaattttataaatttagtgtagcctaaatgttcaacatttataagcatagactaacgtcctaggccttcacattcactcacyactacctcacccacagcaacttccagtcctgcaagttccattcatggtaagtaccctatacaggagtgctttttaaaaaatatcttatactgcatttttagcatatcttttctattacttaccat

SEQ ID NO: 947145 - DNA, 551 bp, Homo sapiens
ttgtaaagtccatttttagtaacttttatgacatttctgtactactccattctaaaatacatccttatcccttctatgttatttctaactctggttaaaagcactgaaataaatgcccttgacttccttcttcatctctaaatttctttctttctccattctctttttctccaagactaaacttccatgtgtatacctgatgctaaccttgttcccttagctgcaaagacctgatttatgacaatagaaaccttgtctgtctcatctccagctactggaatgattgtatagcacatggtctatattttttaaacatgtattgaatgctgtattaattaatgaattatcctctttctggtgcctttccagtttttcccctgtccttctacaatgggttcttctgtaaatctacaaataygtttaagtctttttccaatgaaaaaaaaaaaagactcatattttctcttgactatctttttaagatatttgctatgtctttctgtctaccatcaagcttcttttaagttttaagccacatcttcatcatttaa

SEQ ID NO: 947146 - DNA, 609 bp, Homo sapiens
catgaaaattatgtgaagttcaaatttcagaatccataggaaaagttttattggaacacatacatatctattcatttacatattatctatacattacttcagcagagttgagttattgcttgctatagaatgaatgtttgtgtcccctaaatatgttgaaacctaattcccaatgtgatggtatttgaaggcagggtttttgggaactgattaggccatgaaggtggagtcttaataaacgagattaatgaccttataaagggacctcaaagagctccctcaccccatctgccatgtgaggacacagtgagaagatagctatctatgaaccatgaagcaggcactaataagacattgaatctgccagcatcttgatcttgaacttcccagcctccagaactgtgagaaataaatttctgttgtttataagctacacagaccatagtctttgttacaacagcctgaatagagtaagacattgctacagaaatcatatggcctacaaagcytaaattacttacaatctagctatttacagaaaaattttgccaatccttgctatagaacatttagggacttattaattcactattttgaataatgctgaaa

SEQ ID NO: 947147 - DNA, 650 bp, Homo sapiens
agcctaagggctgctctgcctatggagtagacattcttttgttcccttactttcttagtaaacttgctttcactttactctatggacttgccctgaattctctttttttttaattattatactttaatttctagggtacatgtgcacaatgtacaggtttgatacataggtatacatgtgccatgttggtttgctgcatccatcgactcatcatttacattaggtacttctcctaatgctatcccacccgcagccctccaccccctgacaggccccggtgtgtgggggtttgttccccgccctgtgtccaagtgatctcattgttcaattcccacctatgagtgagaacatacactgtttggttttctgtccttatgacagtttgctgagaatgatggtttccagcttcattcaggtccctataaagacacatgcacaggtatgtttattgaggcactattcacaatagcaaagacttggaaccaacccaaatgtccatcaatgatagactggattaagaaaatgtggcacatatacaccatggaayactatgcagccctgaattctttcttgtgcgagatccaagagtcctctcttggggtctggatctggacccctttctggtaacactcacgttcagaaactgattc

SEQ ID NO: 947148 - DNA, 521 bp, Homo sapiens
gcagcagaagaacataaattgtcaagatttcatggacatttatcagttcccaaaattaatacttttataatttcttatgcctgtctttactgcaatctctggacataaattrtgaagatttcatggacatttttgtaacttccccaatcaatactgttataatttcctatgcctgtctttacttatctcttaatcccgtgatcttcctaagctgaggacgtatgtcacctcaggaccctgtgatgattgcattaactgtacaagttgtttgttaaacatgtgtgtttgaatgatatgaaatctgggcatcctgaaaaagaacaagataacagcgattttcagggaacaagggagataaccataaggtctgactgcctgtgaggccgggcagaacagagtcatattttccttcttgcagaaagcaaataggagaaatatcgctgaattcttttccctgcaaggaataaccctggggaaggaatgcattcccaggggtaggcctacagatgactgctctcgga

SEQ ID NO: 947149 - DNA, 589 bp, Homo sapiens
ttcgtccttcagagaagggactgtcatggccatggttcctacgagccactgtgtgattgataaattccaaggcacctgtgaatctcactgcctgtgggctgggagagcctccccaaggactctgtgtgtgtgaacaccagctcctgtgtttctgaagctgatgcacgtggcccgtggggaatcagtagaacaaaatcagacctgccatagggcccgggaaagcagagggcatttgctaaggaaattatgtatgggggagtttgggaaggtccctcaagaccatgtgcttacaccttactgccctactgagtaacctgcatgctctggagctatgtggggcacagcacaacctgacctttaccaacagggtctctgtgccatggcagagcactgacctgtgaggtcccactggctgggggctcactgggaatgtgtcaggcacagtactgggtctttacayaccttggttcttaacccacacaaaatcagtaagaggaagatattgcctcacaggtgaggaaactgaggcttggaagagcctaggaagaattgcccatctgggaggggtctgggctagatcccagccaga

SEQ ID NO: 947150 - DNA, 574 bp, Homo sapiens
tagacattttatcaatgtttatcttaaaacatacattcaagttagcaaaaaaaattggtttggatttcctcatagagaagatgggaaaatgtcttatactacatttgtgtcttagttcattttgtgttgctataagagaatacctgagactaagtaatttataaagaaaagaggttcatttagttctgcaggttgggaagttcaagatcatggccttggcttctggcaagggctttagtgctgcatcataacatggtagagaaggtcaaaggggaagtggacatgtgccaagaggcaaactccaaggcgcgttgggctttataacaaaccactctctcaggatcaccttctactcaacagtatatggtttatcactgtttggcccttatttctgagttcgttaatatattgaatctggttaaaatgagaattaaatagcagctttgaaagaaaaacaaagggmcaataatataataaaagggaaacggggcatgaaggatgtacacggcaacagcccgtattttcaggtaaccagtcccagtcctatgtgtgttattctggaaacagatttcta

SEQ ID NO: 947151 - DNA, 653 bp, Homo sapiens
ggagtggtaccctgcagagccacagggatggagctgcccaaggccttgggagcccacccctttcatcagtgtgacctggatgtgagacatgaattcaaaggagattattttgaagtttgaaatttggggctggcaggcatcctgtagcccctttgttttggtcaatttctcccttttggaatgggagcatttacccaatgctatatccccatggtatcctgaaagtaactagcttgtttttcattttacaggcacataggcagaagggacttgccttgtctcaaacgagactttggacttggacttttgagttaatgctggaatgagttaagagtttgtgggactgttgagaaggctcgactgtgttttaaaacgtgagaaagacataagatttgggagaggccaggggcagaatgatatgatttggctctgtgcccctacccaaatctcatgttgaattataatccccaatgttgtaggtggaccaggtgctaggtgattgggccagttgtgaggtgactggaccatgaggagctgtttctratggtttagcaccatccccacagtcctgtctcataatagagttctcatgacatccggttatttaaaagtgtgtagcacctcccttttcagtctcttcctcctgctcccgc

SEQ ID NO: 947152 - DNA, 582 bp, Homo sapiens
aaagaactagagaagcaagggcaaagaaattcaaaagccaacagaaggcaagaaatgactaagatcagagcagaactgaaggagatagagacgcaaaaaacccttcaaaaaatcaatgaatccaggagatggtttttagaaaagatcaacaaaattgatagactgctagcaagactggtaaagaagaaaagagagaagaatcaaatagacacaataaaaaatgataaaagggatatcaccaccgatcccacagaaatacaaactaccatcagagagtactataaacacctctatgcaaataaactagaaactctagaagaaatggataaattcctagacacatacaccctcccaagactaaaccaaaaagaagttgaatctctgaatagaccaataacaggctctgaaattgaggcaataattcatagcctagcaaccaaaaaaagtccaggacccagatggattcacagccgaattctaccasaggtacaaagaggacctggtaccgttgcttctgaaactattccaatcaatagagaaagagggaatcatccctaactcattttatgaggccagcatcat

SEQ ID NO: 947153 - DNA, 525 bp, Homo sapiens
ctcactctgttgcccaggctggagtgcagtggtgcaagcacagctcactgtagcctcaacctcccaggctcaagtgatcctcacacctcaacctctcaagtatttgggactacagccatgcatcactacgcttggctaatttttaaactttttgtagagacagggtcttgccatgttgcctaggctagtctcaaactcctgagctcaagggatcttccccctcacttaggcctcccaaagtgctgggattacaggcgtgagccaccaaacctggcctcgagttgccttcttagaactaaccacatcattcaccatcacttctgacacattctgctcatgggaagcaagtcactacagccaacctatatcaaagaggagaggaattgaagtccaccttttgatgggatgagtgtcaaagaatgcggagaactggtttttgttttttttgttgtgtgtgtttgtttgtttgtttttgagatggagtcttgcrctttggcccaggctgcagtgcagtggcatgatctc

SEQ ID NO: 947154 - DNA, 608 bp, Homo sapiens
aaggggagatacaggcacaacaagtccagtcagtgagcttgatgtagagcccccacagctggctagacaaatgcctgatttgaacctgaagaaaacaaagcttgctgcctgccctggtggtgggagtgacagaggggctgctggtgccctgggcatgtcctcctagaatttgtggtggtgaagggtacatgagtgtcctcaggaccaggtgtagccacaccagagacagggctggcattttagaccttgtccaagagggccattaaaaaaggaaacagactaattgttgatttaggtggtagtcacagaggcttactcacttgagacatttctagtagcatgcttatgatttctgcatttattaagtttgttatatttcagcaaaatttgctattaagaaaatagtgaagaagtctcatcagagagaagttaaaagcatactagtggattccttggggctgcagaaagagtagcaaaaagttggagaaracatcaactacaccaaaggaattttaggagcttggtccccagcaaagctcatggaatctctctctgcaaggaagagtcagttttaaaagccctcagcctgctctcaatgggtcctgcct

SEQ ID NO: 947155 - DNA, 555 bp, Homo sapiens
actaaaaggggccaagatacaggctgtgccatggcttcasagggtgcaagccccaagccttggcagcttccatgtggtgttggtcctgcaggtatatagaagacagaattgaggtttaggaacctctgcctagatttcagaggatgtatgggaaagcctggatgtccaggcagaggtgtggtataggggcggacgtctcatgcataacctctgctagggcagtgcggaaaggaaaggtcgagttggagcccccacacagagtccccactggggcactaccttgtggagctgtgagaagagggctattgtcctccagaccccagaatggtagatccactgacagcttgtactgtgcacctggaaaaggtgcggacactcaatgccagcctgtgaaagcagccaggatggggccgtactctgcaaagccacaggatcagagctgcccaacgtcgtgggagcctacctcttacattggcatgacttggatgtaagtcatagagtaaaaggagattatttcagagctttaagatttaactactgctctgttggattctg

SEQ ID NO: 947156 - DNA, 552 bp, Homo sapiens
taccaaagaatggggcatttctataaagatatctgaaaatgtgaagcaactttggaactgggtaacaagcagaagttggaagagtgtggagggctcagaagacaggaagatgagggaaaatttggaacttcctagagactcgttaaattgttgtgaccaaaatggtggtagtgatatggacaatgaaggccaggctgagagggtttcagatggagatgaggaattaactgggaactggagctaaggtcatgtttgttatgccttagcaaagaacctggcaacattgttcccgtgcccaagagatctatggaagtttgtccttgagagtgatgatttagggtatctggcagaagaaatttctaagtggcagtgttcaagatgttgcctggttgcttctaacagcctatgctcatatgcatgarcaaagaaatggcataaaacagaaactatatttaaggaagaagcagaatataaaagtttggaaagtttgaagcctggccatgtgatagaaaaaaaagtccatttccagggaagcaattcaagccagctgca

SEQ ID NO: 947157 - DNA, 577 bp, Homo sapiens
ctatgaagctccgggagtggggtccccgctttcgtcaccagttccaggctctcagcttctccctctgcgtgttggcagttgtggacgtgggtggctgttactcagtgcttggccatctggcccttcctttctgttctctttccccaccaccctggctccagcccttattttcttttcttatctttatctttttgagacaagattttgctctgtcacccaggctggagtgcagtggtgtgatctcggctcactgcaacctctgcctcccaggttcaagtgatcctccaacctcagcctcctgaatagctggaattacaggtgcatgctaccacactgggctaatttttgcattttttggtagagacagaatttcactatgttgcctgcgctggtcttgaactcctgggcccaagcgatcctcccacctcagcctcccaaagtgctaggattacaggcgtgagccactgcacccagcatccttattttcttatgccttgacttctgcttcytctctagatggtctcccttcttcttagctctctaaactcaaattcaaccatagccagacccatggcta

SEQ ID NO: 947158 - DNA, 247 bp, Homo sapiens
cacacggcacacttgtgaaccttaaaaacattgattttcagctttggttgagtgattgctcctctgggaggcctgaactccagaaccggttctttcaacttccacttgggactggggaccttggggtcttcttttatttctgtttcctcctcattgatggcgtctrtcatttctttcaggtcagggtccttgatgccatgcgtcagctggacatgcttctccaacatcaactgtttggtaaaggtac

SEQ ID NO: 947159 - DNA, 724 bp, Homo sapiens
ggccctcaccagcaggtgggaacaagtgaagtctcatgggaatgatcggcagaatctcttggtcttgaagccctctgacactaatgcagaggtttcctttccaactcagagccttccttccctccttcctggtgaggtgccactgagccagacacctatgcccagcacggtatctggctttacaagctcagcagtgtctggaagcgagaagaaagcatttcctctcctgatggcaaactcagttatggggctgcagagtgggactgctgggccctgaggtgggaattagcacttgatcagttcagatttagagcattagccaccgctgttgccagaactgccactttccctctgcccatggtggccccatgctggctgggctggagttccctcacgtggtgacttgtgctttgtccatcagcaggcatgttcctacgtgaagcatggagttacgcaatggcctgcctgtccatgaagttcctctggcctcctccgattctgtggctgcaaatccacacctaggagctccgcaggcctgctggagcacagcgcctgtaggtttctgcgcctggaacccacctcaggaccacaagccgcattcagtctctttttatagatctggaacccgaagcccagcgtggttargaacttgtctaaggtcacttggtagtaaatactggaacagggattcaaacccacatctccagagagagctcagaagcct

SEQ ID NO: 947160 - DNA, 666 bp, Homo sapiens
ttcttttctattgcatcgtgaggctgcaaattttccaaacttttatgctctgyttcccttttaagcctaatttccaatttcaaaccatctctttgagaatgcataaaactgaatgctttcagaataatccaggtgacatcttgaatgctttgctgcttagaaatttcttccaccagataccctaaatcatctctctcaagttcaaattcccacagatctctagggcaggggcaaaatgccaccagtctctttgctaaagcatggcaagagtgacctttgctctagttcccaagaagttcctcatttccatctgagaccacctcagcctggacttcattgtccacatcattatcagcattttggtcaaaaccattcaatgagtctctagaaagttccaaactttcccacatcttcctgtctccttgtgagccctccaaactgttccaacctctgcctcttacccaattccaaagtcacttccacattttcaaatatctttacagcagtaccctactctctgtgttaccaatttattgtattagcctgttttctcactgctttaaagaaatacctgagactgggtaatttataaaggaatgagatttaactgactcacagttctgcatggccagggaggcctcaggaagcttaccattatggcagaag

SEQ ID NO: 947161 - DNA, 640 bp, Homo sapiens
tctccccagaaaatgaatttttcttttctattgcatcgtgaggctgcaaattttccaaacttttatgctctgtttcccttttawgcctaatttccaatttcaaaccatctctttgagaatgcataaaactgaatgctttcagaataatccaggtgacatcttgaatgctttgctgcttagaaatttcttccaccagataccctaaatcatctctctcaagttcaaattcccacagatctctagggcaggggcaaaatgccaccagtctctttgctaaagcatggcaagagtgacctttgctctagttcccaagaagttcctcatttccatctgagaccacctcagcctggacttcattgtccacatcattatcagcattttggtcaaaaccattcaatgagtctctagaaagttccaaactttcccacatcttcctgtctccttgtgagccctccaaactgttccaacctctgcctcttacccaattccaaagtcacttccacattttcaaatatctttacagcagtaccctactctctgtgttaccaatttattgtattagcctgttttctcactgctttaaagaaatacctgagactgggtaatttataaaggaatgagatttaactgactcacagtt

SEQ ID NO: 947162 - DNA, 470 bp, Homo sapiens
gtgagagaaaagtggaggaggtgagccaatagtgcgggtcagatggaaagccaggacttgcgtctaaaagggattactctgctgggctgagatgagactctgggggatcagggcaggggctggcaacaacctcagcaagagacgataagcctgggtgtcagagtggaggggatgaggcgtggacagactctgggcaaacctggcagggagggccagtagggtttctggtggagtggatgcggatgtggaggaggaggtcagagaggactcgtggggttttgcctgtaaatggaaggatggagcggccatttactgggttggggagaatgtgggaggagcaggctattcagagaaracaggagctcagcgctgggaatgtttggggggagtttatgagacactgaggtggagatacaggccaagcagctagatgtgcggaatttggggcaaaaacccaggtttgaggcaca

SEQ ID NO: 947163 - DNA, 608 bp, Homo sapiens
tttgaaatagatgcagacttgaggtggggctctccttctagctgccagctccagaagccctaaacaaatggaatgcctcaccaaagaatagtattttgcaatgaccattattcctatcactatttttcattctgattttgcttgtcaatgcttacttggcatgatggggggttttggccaagcaaatgagcagcagcagaggttccacaaaattaggcacagtctatgagagcctggggttggtaatcagacattttagggggtacttggtggggaaatgccaccccctttacaccacagatactattctactcctgaaatattcactgccatctagaggctactgacatggtggtgtggtagggcagggtgaagcaggatcactgaatgagaaaataaactaacaggtgcatgaaggcctgcaagcaacgccccagggctgacagtgtgggtccattcattaagaatttcaaagaataaagttaagggtcagcaaactttttttgtaaagaaacagagagtaaatatttaaggctctgtgagccacaaggtccctttctcagctactcaactctgctgytgtcatgaaaaagcagccacagataaca

SEQ ID NO: 947164 - DNA, 649 bp, Homo sapiens
attatgcagctttcatatgtggactgggatcagactgttggtccaaatttctcttgaaccgggcctccccatgactgtgggaccrtcccgccagtggagctctggaccgggtgatcctctggctcagagtagtgggaacagctaacaaaaccaacagcccccatgggtgcccatgctttgttagagttgggagaaaatgagggacccagcaatgtgatttgggcagtggttcattcattccctaattcattcttgcatacattaattcattgcagccatgcacttacccttttagccacctgtgagctcataatctagggaagggagggccccactagtgaacacactggtgttcagagggagggaggagcacctaaggggtgctgcctggggcagtcagagaaggcttcctggaggacgaggcatttgaactactcctggagactaaatgtgccttctgggtggacaaaccatgggtgggtggcattccagcctccaggctggcacatgcagaggcagtttgatgctgctggactgcaggaaggtgtggagggagtagaggggaggaggccacgtggctctgtggcctcacaaaggtgctctgtgtagtcctagaggctctgagtagtcactgagagtcctgatgggc

SEQ ID NO: 947165 - DNA, 704 bp, Homo sapiens
cccaagcaaatcacaatcctcccacttggccttcgggtatgaggagggaaagctcacccccacacctcacctggacccttcctgctagatctttatgggctctcctgggaggagctattctccaggatggaartaccacttttttccctgggatttcctagatatttcaacaaaaacacagggtcccagcaccttggcctgaatttgtgtgtgtgaaatttggccctctctcacctggttcggtttcttaacacaattgctgctgtctaccttcttttccaacccagcaacttttggatatctttcccatagctcttccctccctagaggctatgtcaaatgacctcttggagtctaagcatcaacaggatctgggacatcaagtcctttatgttgtcctagtgatggtgtcaccctcaggcacaataagtgatcacttttatccacatcctagagatgaggaatcatggggcctagagaggacaggcaactgcccaaggcccatgcagcacagcaggtacaggtgatccaggtacccgcccagatccccctccaggactgagattcgcatcctactgcctcatctcccctcccctggggcagcccacaccccagcgctggttagggcaacaagcaaaggcacaggttctcttgtcccaattcatggcagctccaaggggccatctctgctccagggctccctc

SEQ ID NO: 947166 - DNA, 460 bp, Homo sapiens
tttgggtggtgcctgcatatcatgcaaagccatctgtaaaccaggcccttgtcttccctttctttgtcaactgatcatagggaactccccatgaggccatgggtgcaaactcagggagagaaggcagagtggcaggaatggggaccatgggcatttgaaccacttcgtcgtgcaacttaccaaaatcttaactattataaacagtgctacaacaaacatgagagtgcaaatatcccttcaatataataattttatttgtttgggcatatacccagtaatgcaattactggagtatgtggaagctcgacttttacttttttgaggaaactccaaactattctccatagcagttgtaccaatttacattcccaccaacagtgtttgagagattccttttctycacatccttgacagcatttgctattgcctgtcttttggatataagtcattttaactaggt

SEQ ID NO: 947167 - DNA, 617 bp, Homo sapiens
ggaaataaaacagtatgctactggtacaaaaaacagaaatatagaccaaaggaacagcttagagtaacatgaaataaagtcacacacctacaatcatctgagctttgacaaagatgacaaaaataagcaacgagaaaaaaactccatatttaataaatggtgctgggataactgactagccagatgcagatattaaaactggactatttcatttcatcatatacaaaaatcatctccagatgaattgaagacttaaatataaaacctaaatctataaaaacattggaagaaaacctaggatattattattctgtacataggccctggcaaaggttttgtgacaaacactccaaaagcaatcacaaaaaaagtaattagcaagagggaactaattacattcaagagattctgcacaggaaaaaaaactatcaacagagtagatagactatctcaaaatgagtgaaagtatttgcaaactaggcattggacaaaggtctaaatctaaaagaaacttaaataaacaagcaaaaaaawaataataataagcccattaagaaatgggaaaatgacatgaaaagctacttctttaaagatgacttagatgtggccaacaagga

SEQ ID NO: 947168 - DNA, 617 bp, Homo sapiens
ggaaataaaacagtatgctactggtacaaaaaacagaaatatagaccaaaggaacagcttagagtaacatgaaataaagtcacacacctacaatcatctgagctttgacaaagatgacaaaaataagcaacgagaaaaaaactccatatttaataaatggtgctgggataactgactagccagatgcagatattaaaactggactatttcatttcatcatatacaaaaatcatctccagatgaattgaagacttaaatataaaacctaaatctataaaaacattggaagaaaacctaggatattattattctgtacataggccctggcaaaggttttgtgacaaacactccaaaagcaatcacaaaaaaagtaattagcaagagggaactaattacattcaagagattctgcacaggaaaaaaaactatcaacagagtagatagactatctcaaaatgagtgaaagtatttgcaaactaggcattggacaaaggtctaaatctaaaagaaacttaaataaacaagcaaaaaaaaaataataataagcccattaagaaatggraaaatgacatgaaaagctacttctttaaagatgacttagatgtggccaacaagga

SEQ ID NO: 947169 - DNA, 623 bp, Homo sapiens
atctgggacaacttgagcatcaaaataaatgatagcaaagattatagctcatgaaatacgaatccatgaatctacactgatgttttaaaagatgaatgaatgaatgaacatataagtaaatggcacaaggaagagctctttcttattgtaaagacatctgtgaaatatgaattgattcacacaaacatcagcatggaggctaaaactaatgggtgaaagtttcaggaaaactggatatttatataatctggatgtatcacttcacaagatacttattaattacaaaggggtaactagataatagcattgcaaaggaaaatcctgtagtacaccactttgatcaagtaatcaatgttaatgtcaccgaaaatgggtcaaatcaacagcatgtgatttgatgtgatatcctgatgtgataggcccaggagactacatcacttcaatgatatccttagaaaaatgtgacctggcgcagtagctcatgcctgtaatcctaacactttgggaggctggggcggatggatcacttgaggtcaggagttggagaccagcctggccaacatggtgaaacctcatctctactaaacatayaaaaattagctaggtgtggtggtgcctgcctg

SEQ ID NO: 947170 - DNA, 496 bp, Homo sapiens
caaatctttgcatggtgagaagtgggatggaatgtaggtgctagagatggtgcmccagtagggactgtcactggattggggaaaaaaatccggggctgtccttatctgctcccttaggcaaaatcgttctgtgttagtctggagggtgaacctattttaatgcaggagggcatagacttttgggtggaagcggaccctggagatgtactggcaggtgaatagagtgtggaaaagtggggaaaggagaagcacgattcatgagcctgagttcgggcttccatggatggaaaagcatcaggagtggaatttaaagacggtgtgtttcaggtgatgtgaggtcctggatgcccgaagcttcaagaaaatactggttgggcacttagctttccctgtggttgccaatcccacgcaggccgcctctagcgtctcgattcgcttttctctgacctggaacctccgccaagcccccagctctcttcttcgacccagccttgca

SEQ ID NO: 947171 - DNA, 590 bp, Homo sapiens
cagagcatcaagtccctaggctgcacacagcacrgggaccctgggcccagcccattaaaccattttctcctaagtctctgggcctgtgatgggaggggctgtcatgaagacctctgatatgccctggagacattttccctgttgttttggggattaacattctgttcctcattacttatgcaaatttctgctgccagcttgaatttcatgtcagaaaatgggtttttcttttctatcacattgtcaggctgcaaattttctgaacttttatgctcagtttcccttataaaactgaatacctttagcagcacccaagatgctgctaaatttcacccaagatgcttagaaatttcttccaccagatacgctaaatcatctctctcaagttcaaagatccacaaatctctagggcaggggcaaaatgccaccagtctctttgctaaaacctaacaagagtcatctttgctccagttcccaacaagttcctcatatccatctgagaccacctcagcctggaccttattgtccatgttgctatcaggtttctggtcaaagccattcgacaagtctctaggaagttccaaactttc

SEQ ID NO: 947172 - DNA, 437 bp, Homo sapiens
aggataaaaggcagtgttgaccgatcgaaaagtctttctctaagaattcaaacataattgctggttggttcaaatcaggaggaaaagtaaggacggaaaacacatrttgtcaggagtgggattcgaacccacgcctccaggggagactgcgacctgaacgcagcgccttagaccgctcggccatcctgacacatgttttaccatgcttcctaatttctcctaattttatcatatactgatggtgcacgctatcaggtcacattaatgtgtctatttactgtttcaaataaaattgtaactctctctagaccttgtcgcaaagcgggaaaaatgaaacaggctccgacagctctttcctctttcctcactacccaaactaatccttaaggctccattttccctggcgactcttcgagcgcccctctgcttctgtagag

SEQ ID NO: 947173 - DNA, 696 bp, Homo sapiens
gccctccaaaaaccaacccagctcatggaggaataactccctcagccttgaaaggggatctgattgacagagttcataacacttactctagatcaactttatattttccactctctagctcaaactcagtaaggctcaaatacaggtaatctattagtatttatttgttaggcaaggctttctagttaaatgcaatctcatcatgtttagcagaagtattacagaaggtttatttcagccttgaattccatctaccccaattcattttgaagttagaaagtgtagtgttaaggtaaaatgaaaataggaaaataagaaaaaagaaaatcacgaaggataaagaccaaaaaaggaaaaaaaaaataaaagaaaccaatgccttaaggctctttgacagtgtaagtaaagctccttcgttgatacccaagaccaaatatgcctttcatagcccaagctcaagaaaggaaaactttctgcttcatatataacagaacaagcaagtttggtttttaatgtgtattctgatacttcagggaaagctgcaataagagaagaaggcagcgcagcaggcttctactgtatcccttaggatagccttcgtcagaaactcaaactttttggtttcagaatacttttayactctggaaagttattaatgacctcaaaaagcttttgcttttgtgtgtttcatcattg

SEQ ID NO: 947174 - DNA, 582 bp, Homo sapiens
agattatgggtgggttttacctttcccatcccactgactcaaatgttaatctcctttggcaacatcctcacagacacayccagggtcaatactgtgaatccttcaatccaatcaagttgacactcagtattaaccatcacatggcaagagaatagatagagaggagaaaggaaagaagaaaggagggaaggagagaggcaggaaagcaagaaaaaaaagccccacaaaaactcaacacaaaaatccagagaattttgctagtctgatcaggagcatgaagagatgaagagtttcaagaagtatattgtcagaggatttgtaaattgtccaataatgagtctattccatacatctgtaataggaaaacattaaagaaacaaggcaataatacctcttcaagtcatcaaaattcctgggtcaggcagtaagatgaggctatcaggatattaaaattgtgtgggtatatttcagaaggaatggtaccagctcctccttgtacctctggcagaattcggctgtgaatccatctggtcctggactctttttggttggtaagctattgattattgccacagtttcaga

SEQ ID NO: 947175 - DNA, 553 bp, Homo sapiens
atggaaggggaaaagaggccaaataccatgtgtatccacgtgtgaggctggggcaggggagagctgctctgcatctctggattcattctagtttgcatccagyccagctttggagctgtgttttgtactcccagagagcaaagttttttcatcctcaaacatagtagactaggaatagaaaacctgagaattctagcatcttagaactggtgtggagctcagagaagggcatcttctccctccctcccatatcacaagcacaaaaaatgagatccacaagagccaacctcaaaatcataggtgggaattgaacaatgagaacacatggacacaggaaggggaacatcacacaccagggactgttgtggggtggggggagtggggagggatagcattaggagatatacctaatgctaaatgacgagttaatgggtgcagcacaccaacatggcacatgtatacatatgtaacaaacctgcacgttgtgcacatgtaccctaaaacttaaagtataataataataaaataaaaaatagaaaaaaaatcttaaaaa

SEQ ID NO: 947176 - DNA, 811 bp, Homo sapiens; identical to SEQ ID NO: 945150

SEQ ID NO: 947177 - DNA, 649 bp, Homo sapiens
aatcttgaatgtgaaggtagttggaagtaattaggtttagatgaggtcacaaggatggggcccccatgatgggattaatgtccttttaaagaagaggaaggcaccagagttctctctctctttctgccatgccaggtcacaactagacatggcagtctgcacgccaggaggcgggcccctaccaagaattcagccatactgataccctcatcatgtgctacccagcctccataactgtgagaacaattgtctgttgcttaagccacccagtctatggtattttgtcatagcaaccaagtagactaatataagaaagaacctataagcctgctctgtccagtatggtagtcatcagcctgccaattgtgattattgagtgtttgacatatggctgatctaaattgagatgggctgtgggtgtaaagtacagagcagatctcaaagacttatatgaaaaaagaatgtaaaatatctgtttaattttctacattgattacatgttgaaatagtaatcgtttataatattgaataaattaaaataatttactaaaatcaatttcattagtttttttttgytgtataatgtgacttagaaaatatagagtcatatacatgactcatgctatagttttatagaagaacacagctc

SEQ ID NO: 947178 - DNA, 612 bp, Homo sapiens
aatgggcaaacgtgcccatttcaatcattagggaaatgcaaattaaaaccacaatgaaatactaccatgtacctgtgagaatattagtatgaaacacacacacatgacaaaagcaaaagtgagtaaggatttggagcaactaaatatcttgtacattgctgttgggaatctaaattgataaaatttattgggaaactcatttaggttttatactagctctaagtacgacgtggaaattttactcttagtaaatacccaaataagcgtatgtatactcataccagctttatttgtgctagccatttaaacaaatgctaaacctagcctaaataactcaagatgatagaaatcagaatattgatgattttggggagagtgcataatatcagggagggacatgagagatatccccgtgatgctgataattttctatgtcttctgctgagtgatgtttatgctagtgtatttacctaatagttaattttagatctatatatcttatgcaattatactttaataataaaawtcgatgcccccctgccccaacaaaatgagatagcaacttaaaactgtccttaaggaatcacagttttacttatcatcaatacttgg

SEQ ID NO: 947179 - DNA, 612 bp, Homo sapiens
aatgggcaaacgtgcccatttcaatcattagggaaatgcaaattaaaaccacaatgaaatactaccatgtacctgtgagaatattagtatgaaacacacacacatgacaaaagcaaaagtgagtaaggatttggagcaactaaatatcttgtacattgctgttgggaatctaaattgataaaatttattgggaaactcatttaggttttatactagctctaagtacgacgtggaaattttactcttagtaaatacccaaataagcgtatgtatactcataccagctttatttgtgctagccatttaaacaaatgctaaacctagcctaaataactcaagatgatagaaatcagaatattgatgattttggggagagtgcataatatcagggagggacatgagagatatccccgtgatgctgataattttctatgtcttctgctgagtgatgtttatgctagtgtatttacctaatagttaattttagatctatatatcttatgcaattatactttaataataaaaatcgatgccccccygccccaacaaaatgagatagcaacttaaaactgtccttaaggaatcacagttttacttatcatcaatacttgg

SEQ ID NO: 947180 - DNA, 581 bp, Homo sapiens
tgtacacatgctcaggatgtgtacacatgctcgggatgcctttggccaccttggcctcctctagattttggatgctgacaagcgtgagaggaaggccaaggaggggttgagggtagctcakcatgggcctgcaggtgcccctagtcatgaagatcccaggtgccatgaatgcagcaggaggcagacaggctcctgggcagaaatgggtgggtccctggtgaaattccacatttaagccagggatggcctgaagcctgggggcctgactgccagtttcatggatcagagagagaacttatggtgctttatccaggcctgcccatgggtgcccctggaccaatgagcccagactgcctcccctctgaagctcataaacaccctggactcagccagactccaacagacaaatgggatgacctgcctgcagagaagagctacccactgtgggtctcctttctgctgagagctgtacactcatcaggatgacctgcctgtggacagaactatccactctgggtctcctctctgctgagttctgcagagatgtcaggatgacctgcctgtggttaggagtcacccac

SEQ ID NO: 947181 - DNA, 672 bp, Homo sapiens
agcatatgctactatctaaaatctgtgtcttttttatgggttatcattgaaaccacctttgcaaaaattataacagaaaattatggcagtggagaagatctgatctcaccaacccccatcttgcatttggccttcaagctgtccttaattattcctggggttgggccaagctgacttcaggagacatttagtttatagcttaaatgataaagcccttcccacaaactctatcacctttgtaaagctaatgagacaccaccaggctaggaggatagagaagcctgaattctgctaatctgtataaataaacaacttccagccattattgcagaggtcacaagatatgcaaattccccaattactcctgtacatgacatctctaatgtagaacctaagactggccctttgagatatcttttcagtttttatgtctgatgagtgatggctccacttggacctgccaactgctcctgtggctccacccagaagagattcagtgcacaggaggaccatttcccacattcctacgattgcacccccaaccaatcagtagcaagcatccaatgtctagccactcccaccccttcccccaaattaccattaaaaaacattagcctcaaaattacctgggagactgatttgygtagaaataaaactctggtattctattca

SEQ ID NO: 947182 - DNA, 643 bp, Homo sapiens
gtggctcacgcctataatcttagcactctgggaagctaaagtgagcagatcacttgaggtcaggagttcaagaccagcctggccaacatggtgaaaccctgtctctattaaaaatacaaaaattagccgagtgtggtggtgcatgcctgtaatcctagctacttgggaggctgaggtgggagaatctcttgacctgggaggcggaggttgcagtgagctgaaatcatgccactgaactccagcctgggtgacagactgagattccacctcaaaaataaataaatacataagcagactatctgccccttggcagggtgggtgtgctgtgctcaggggaatccccatcatctaggatgccctgaccctccagagccagcaggcagaaaagactaagattgctcatccatgataccacagccacccctcctcctatgggctcctctcaggattatcagtgtactatccataaacccctggctggggatgctgagattcccacagggaggccccacccagtaaggaggagtggatctcgtcctgcttaaagaagcagtctggtcacaaagtggtccagtcactrtgctgcactgtggggaactgctgtcggtccagaccatcctgcctggctgacactggctgcagg

SEQ ID NO: 947183 - DNA, 622 bp, Homo sapiens
agctcatctttccacttaggcaaaatagatcttaaatttattttastatccactttttctttgtatgctttatgctcaaaccatcatctaatatttacactcaaaaacatacaaaatatgtcctcttggcactcactgccttcaccaataacaatctggttcaggccgccatgtttttcttttctccctgcattatcattataacctcccaagaggtctccctgtgttcggaattggtgggttcttggtctcactgacttaaagaatgaagccgcggaccctcgcagtgagtgttacagtaaaggcggcgtgtccggagtttgttctttctgatgtttggatgtgttcagagttttttccttcttgtggggttcctggtctcgctggctcaggagtgaagctgcggacattcgcggtgagtgttacagctcttaaggcggcgtgtctggagttgttcattcctcccagtgggttcgtggtctcgctggcttcaggagtgaagctgcagactttcgcggtgagtgttacagctcataaaggcagtgtggacccaaagagtgaacagcagcaagatttattgcaaagagcaaaagaacaaagcttccacagtgtggaaagggac

SEQ ID NO: 947184 - DNA, 612 bp, Homo sapiens
gagaccacatactgaagctcctggttggaggttgaaataaagatgacagggccgaaccaggggcacatttgacccttgccagtttgatattgggtgctaaatgaagtggctaatgtctatgttttgtcatatgtattttgctctggccagaatgaaaaatgtttatttggttaccacaggcaaccccttgggtggcatcttggtgatgtggcttggcccccaggaatgtggtgtgttgcacagggtcactaaggctgctcagggaaaaagaacccagaaacctcatatgccagtaaaactgtctgtgcaaactggttgaatgaatggtaaaaatcactgtttatctcctctgtaaagttttgattaatgggaaaaggatttgtgaagcttatcttaagctgtaacaaatctggtgtgctttgtgctatacatttgtctctctgtatcattctgccataaagaggaataccttagggtagaatatgggcttaggacccagtaagtctgctcttcaagatggcccagcaagctggtcagttgcaaagtttgctgygggtccctaaaaaactagacaaagtttccttctaatcttgttttatgtcttcagagctt

SEQ ID NO: 947185 - DNA, 744 bp, Homo sapiens
ggtctgtttgcggagaagtttccgactttacctggagcagagtcaagttggagagcccagcgaaaaacagggggagaggaagcagcagtaaggccctgggagcttgctgggtcccctagcagcccattcctgtctggcaccacagggatcctttgggagggtggcctgaggagcagggggtaaaactccacagggagaaggaattctgtagctgaactttgtaacaatttgaaccccgcgagaagcctcctggccagaactcaggagggggctcgaatccagcgtgcagactccacaggcgggggaagaactaaagcccttttctttctcagctaggaggtggaaagcctgcgacaagttttcaaaaccatcttgctcttcacctggaaacagatgcagggctattgtggagggcacagtgggagtgagaccagcccttcagtttgcatgggagctgggtgaggcctgtgagtgccagctttcccgcacttccctgacccctgcatgactcagcagagggaaccataatcctactatttacgcaattccagtgacctgggaatctcacccccattccccacagcagccacagcaagacctgccctaggagagtctgagctcagacaygactaaccccgcccccacctgctggtccttccctacccaccctgttagtggaagacacaggacatataatcttgggagttctagggccctgcccaccactggtccctttccacacta

SEQ ID NO: 947186 - DNA, 578 bp, Homo sapiens
ctgtatttcctgaatgtgcacattggcctgtcttggtagtttggggaagttctcccgggtaatatcctaaagagtgttttccagcttgtttccactctcctggtctccttctggtgctccaaccaatcgtaggttcggtcttgttatgaaatcccatatttcttggaggctttgtttattccttctcattcttttttctctattcttatttgcatgtcttatttcagtaaggtggtcttcagactctgatatcctttcttccacttggtctattcagctgctgatacttgtgtatgcttcatgaaattctcatgctgtgtttttcagctccatccagtcgtttatgttcctctctaaactggttattctaattagcaattcctgtaaccttttatcaaggttcttagcttctttgcattgtgttagaacatgctcctttagctaattgtagttttttattacccatcttctgaagcctactactgtcaattcgtccatctgatcctctgtccagttctctgccccartggagagacattgtgatcatttggagaagaggtactctggccttttgggtt

SEQ ID NO: 947187 - DNA, 608 bp, Homo sapiens
aaggcagaaataacaatgttctttgaaaccaataagaacaaagacccaatgtgccagaatctctgggacatagctaaagcagtgtttagagggaaatttatagcactaactgcccacaggagaaagggggaaggatccaaaacgacaccctaacatcacaattaagagaactagagaagcaagagcaaacacattcaaaagctagcagaagacaagaaataactaagatctgggcagaactgaaggagatagagacagaaaaaaaccctccaaaaaatcaatcaatccaggagctggttttttttaaaagattaacaaagtagacctctagccaaactaatatagaagaaaaaagaatcaaatagacaccataagaagtgataaaagggttatcatcgctgatcccacagaaatataaactaccatcagagaagatgataaacacctctacacaaataaactagaaaatctagaaattcctggacacatacatcctcccaagactaaaccaggaagaagccgaatccctgaatagaccaataacaagttctgaaattkaggcagtaattaatagcctacaaaccaaaaaaaagcccaggaccggatgg

SEQ ID NO: 947188 - DNA, 578 bp, Homo sapiens
aaagcacgtgtgtttttatgagaattatgccgagataggtaacagatgaggatgaaatttgggcttgactgaagtaatgggggctgtctgtgaagccttgtggcagtacagcccaggtaatttgctgagcctaatgggtgtcagggtcagtctaagtgaaagcaaagagaggctgggatgaagggtgcaaaggaatagtaaagaaagcatgtttgagatctagaacagaataacgggtagtagagggaggtattgaggataggagagtatatgggtttggcaccatggggtggataggcaaaacaatttggttgataaggcgcagatcctgaactaacctgtaagtcttgtctggttttaggacaggtaaaatgggggaatggtaaggagagtttataggctttgaaagaccatgctgtagcaggcgagtgataacaggctttaatccttttaaagcgtgctgtgcgatgggatcttgrcattgagcagggtaagggtgattaggttttaatgagatggaaaggggtgcatgatcggtcgccaaggagggagtagaggtatcttatacttgtgggtta

SEQ ID NO: 947189 - DNA, 590 bp, Homo sapiens
tttccttcttttgcctgattgccctggccagaaattctaatactatgttgaataggaatgttgagaaaggacaaccttgtcttgtgccagttgtcaaggtgctttcagcttttgcctattcagcattatattgactgtcagtttgtcatagatggctcttattattttgaggtatattccttcaatacctagtttattaagagcctttaacatgaagggatgttgaattttatcagaggctttttctgcatctattgagataatcatgtggttttgcctttagttctgtttatgtgatgcattgcgtttattgatttgtatatgttgaatcaaccttacatcccagggatatgcctgcttgatcatggtggataagctttttgatgtgctgctggattcggtttgacagtattttgttgaggatttttgcatgggtgttcatcaaggatattggcctgaagttttcttttktgtgtgtgtgtttctgccacgttttggcatcaggatgatgctggcctcatagaatgaattagggaggagtccttccttttcagtttttaaaaatagttttagtaggaatcataccagca

SEQ ID NO: 947190 - DNA, 630 bp, Homo sapiens
aggacattgagatttagagagttcaagtaacttactgagcagtctgcttcctggccaaaaacctgtgagtgattttcagggccaactatagtcagtgacgaaagctttgcccagcaggtgtcacggggaaactgccctccccacgccgggcttggtgtgcagccagcgcggcacagtttctaaagggagttgcagtcaaggcctcaggcctccctggcagaccatagtttatgcatatttgcattcctacccccagtgccatcattcagagctctctttgtttggagcctttggcaggggccaccttcaggtgcctctgctgaaaccaccttacagggaagaaagggaaaaacttgacatttgtccctactctgactcagtactcagtacttttccactcctggctcttttccgttgttttcttgtcaaccccctgccctgcttaagccttttgtttggggctccctcagcaataagatgaccccaatatctgtgctgatctacctcatcttgaccaatgtgatcttccatgggcaagtgcaatgggattggggggagccaatgctctcttggctctccagttcagyctgttgattacactactgcaggaagagattaaaggcttgattg

SEQ ID NO: 947191 - DNA, 630 bp, Homo sapiens
aggacattgagatttagagagttcaagtaacttactgagcagtctgcttcctggccaaaaacctgtgagtgattttcagggccaactatagtcagtgacgaaagctttgcccagcaggtgtcacggggaaactgccctccccacgccgggcttggtgtgcagccagcgcggcacagtttctaaagggagttgcagtcaaggcctcaggcctccctggcagaccatagtttatgcatatttgcattcctacccccagtgccatcattcagagctctctttgtttggagcctttggcaggggccaccttcaggtgcctctgctgaaaccaccttacagggaagaaagggaaaaacttgacatttgtccctactctgactcagtactcagtacttttccactcctggctcttttccgttgttttcttgtcaaccccctgccctgcttaagccttttgtttggggctccctcagcaataagatgaccccaatatctgtgctgatctacctcatcttgaccaatgtgatcttccatgggcaagtgcaatgggattggggggagccaatgctctcttggctctccagttcagcctgttgattayactactgcaggaagagattaaaggcttgattg

SEQ ID NO: 947192 - DNA, 625 bp, Homo sapiens
cttttattgatttattttccctagagggcactttgaaaatttattttgggccaggcacagtggctcatgcctgtaatcctagcactttgggaggccaagatgggtggatcacctgaggtcaggagttagagaccagcctggccaatatggcaaaatcctgtctctactaaaaatacaaaaattagccaggtgtggtggtgcatgcctgtaatcccagctacttgggaggctgaggaaggagaatcacttgaacctgggaggtggaggttgcagtgaaccgagatcacaccactgccctccagcctacatgacgggagtgacactccttctcaaaaaaaataattagaaaaaaaggaaaagaaaatttaatctgaacaataagcactgtttatggatagttgataagacatgaccagactcgcttagacccaatgatgatgaaggaaatagaacacagaaatatgtaagcaggtacatcaagaacttctttttatggtattacgtcctcctctagagtagtaaacccayagctcaagactcctaagactggtgatttatttactccttctgggctccattgaccaaagaacttttgagtgtgtttttctgtaagtaatgaagaaag

SEQ ID NO: 947193 - DNA, 625 bp, Homo sapiens
cttttattgatttattttccctagagggcactttgaaaatttattttgggccaggcacagtggctcatgcctgtaatcctagcactttgggaggccaagatgggtggatcacctgaggtcaggagttagagaccagcctggccaatatggcaaaatcctgtctctactaaaaatacaaaaattagccaggtgtggtggtgcatgcctgtaatcccagctacttgggaggctgaggaaggagaatcacttgaacctgggaggtggaggttgcagtgaaccgagatcacaccactgccctccagcctacatgacgggagtgacactccttctcaaaaaaaataattagaaaaaaaggaaaagaaaatttaatctgaacaataagcactgtttatggatagttgataagacatgaccagactcgcttagacccaatgatgatgaaggaaatagaacacagaaatatgtaagcaggtacatcaagaacttctttttatggtattacgtcctcctctagagtagtaaacccacagctcaagactcctaagactggtkatttatttactccttctgggctccattgaccaaagaacttttgagtgtgtttttctgtaagtaatgaagaaag

SEQ ID NO: 947194 - DNA, 741 bp, Homo sapiens
cagggggcttgtgtgggtcgtttccccactccaggaaacgggccttgccttccgggagtgagcaaagctgatgaagagggggccttctgctctttcatccatgacacacaggtgactgaaygcaatgcggtgccctggactggatcctagaacaaagcacattcccggaaaaactggtgaaatcctaataagtatggagtttagtccatggtgttataacaatgttaatttcttagttatggcaaatgtaccatggcgatataagaggttaatgttaggggaatctcactgtaccatctgcaatgtttctgcaaatctaaagtcatttcaaaattaaaaggcaggtggatgctgtagcacgagtgtttaccacccccatctctttaccctcaacatactctgcttactaagattgctggaaaccgtagcccaacactgcttctgaatacagctaacgtgcagttaatgaccattccatattcacacggggcctaaggaacataactactatttagagaccagatcgtcatgaatgtcaggggcttgatcccaggcacctcgtttaatgcactccccatcctacaagcagtagctctaacttgtatgagagatggagaaaccttggatcagtggggttgtgaagcttgctgaggtcccacagccagaactgcagagcccagtcttgttgaattccgagttggggtgctttgggggtgcttgctggagtactgtgcctgtatc

SEQ ID NO: 947195 - DNA, 626 bp, Homo sapiens
tattgaatttatgataagaagagtccataccttttagaagtacatattaaaatatttaagaaacaaatgaaagaattaagagctgggaatataggcttaaaaaaaagaattggctgtgagttgtaatttttaaatctaggcgatgagtaaaatgggggttcactgaactattgacttctttattaactgcttaaaactttctataacaacaaaatattttaaagaaggtacagaaattcacataaaatatttcttgagcttattttagctggttctcataatcacatcaccatttcaaactttaatatagccaacacttgaaagtatgaatgggcttgacatttcttattttcttccttcagacataaattttccttgtcctttctaatcttatatctaatgaactcttcagttacatttatcattcaatattttaaaaccagagttcccttcaggatgacccttcaaaatgacctttataatcacaaatttgcttctcagccctactccagcactatgaatatctggaactaaacakacaataggttgtatcaaaatatcacatgtactgcataaatatgtacaattataatatatccacaaaattaaaaattaaaaaaatttaa

SEQ ID NO: 947196 - DNA, 626 bp, Homo sapiens
tattgaatttatgataagaagagtccataccttttagaagtacatattaaaatatttaagaaacaaatgaaagaattaagagctgggaatataggcttaaaaaaaagaattggctgtgagttgtaatttttaaatctaggcgatgagtaaaatgggggttcactgaactattgacttctttattaactgcttaaaactttctataacaacaaaatattttaaagaaggtacagaaattcacataaaatatttcttgagcttattttagctggttctcataatcacatcaccatttcaaactttaatatagccaacacttgaaagtatgaatgggcttgacatttcttattttcttccttcagacataaattttccttgtcctttctaatcttatatctaatgaactcttcagttacatttatcattcaatattttaaaaccagagttcccttcaggatgacccttcaaaatgacctttataatcacaaatttgcttctcagccctactccagcactatgaatatctggaactaaacagacaataggttgtatcaaaatatcacatgtactgcataaatatgtacaattataatatatccacaaaaytaaaaattaaaaaaatttaa

SEQ ID NO: 947197 - DNA, 541 bp, Homo sapiens
gaatggctttgcccaaaatgctgatagtgatatgsacaaaaaggtccaggctgaggtggtctcaggtggggatgaggaactcgggaactggagcaaaggtgactcttgttatgtttcagcaaagagactagtggcattttgcccctgccctagagatttgtggaactttgaacttgagaaagatgatttagcatatctggcagaaaaaatttctaagcagcaaagcattcaagaggtcacttgggtactgcattcagttttaaaagggaaacagcataaaagttcagaatatttgcagcctgactatgcgatagaaaagaaaaacccattttctggggagaaattaatgctggctgtagaaatttgcataagtagcaagaagcctaatgttaatccccaagaccatggggaaaatgtctctaggccatgtcagaggtcttcacagcagtcccttccataacaggcctggaggctcaggaagaaaaagtggtttcataggccaggcccagggtccctgtgctgtgtgcagcctagggacttg

SEQ ID NO: 947198 - DNA, 486 bp, Homo sapiens
gacctagccagagggtaatcacctatcctatcggttggaacttgagtttctcaacaagcctcatgaccatgggctgaagtgctctgaggacctacgtaaacttagaagacagcctaggtacacaaggacttcaactcctaaacaactcctagtgctgggctggactcagagccagaggacttcgggtggcatgtgacctagggagacacccagggtggctaaaggagtgattgcaccacccctctcccaaacctaggcagtacagctcaggggcaaaaatgtctccttccttctgcttaagggatggaaagtgaagagtaaagaggactttgtcttgcatcttggatacctgctcagccacagtaggacagggcaccaggcagagtcgtgaggcccccattccaggcccyagctcctatacacatttctagacaccatctggacaaaacagaacctgctgccttaaaggaaggacccagtccctgc

SEQ ID NO: 947199 - DNA, 532 bp, Homo sapiens
tcatgaggtcaggagtttgagaccagcctggccaacatggtgaaaccctgtctctaccaaaaatacaaaaatttggcctgrcgcagtggctcacacctgtaatcccagcactttgggaggctgaggcaggtgggtcacctgaggtcaggagctcaagaccagcttggccaacatggtaaaaccctgtctctactaaaaatacaaaaagttagccaggcgtggtggctcatctctgtaatcccagctactcagaggctgaggtaggagaatcgcttgaacctgtgaggcagaggttgtggtgagccgagattgtgcctgggcaacaagagcaaaactccatctcgaaaaaaaaaaaaaaagaaaagaattagccaggcatggtggtgggcacctgtaatcccagctactcaggaggttaaggcaggagaattgctggaacctgggaggcagaggttgcagtgagccgagattgcgccattgcagtccagcctgggcgacaagagagaaactccatctcaaaaaaaaaaaaaaa

SEQ ID NO: 947200 - DNA, 664 bp, Homo sapiens
ttttgtcactggttctgtttatgtgatggattayatttattgatttgcatatattgaaccagccttgcatcccagggatgaagccgacttgatcgtggtggataagctttttgatgtgccgctagattcagtttgccagtattttattgaggatttctgctttgatgatcatcagggatattggccttttttgttgtgcctctgccaggttttggtatcaggatggtgctggcctcataaaataagttaaggaggagtccctccttttcgactgtttgaatagtttcagaaggaatggtacctgctcctctttgtacctctgatagaatttggctgtgaatccatctggtcctgggatttctttggttagtaggctactactgcctaaattttagaacttgttattggtctatttagagacgtaaattcttctggtttaatcatgagaaggtgtatgtgtccagatatttgtccatttcttctaaattttctagtttatttgcatagaggtgtttatagtattctctgatggtagtctgtatttctgtgagattggtggtgacatccttttatcattttttattgtgtctatttgattattctctcttttcttctttatttgtctagctagcagtctatgttgttaattttttcaaaaaaccag

SEQ ID NO: 947201 - DNA, 673 bp, Homo sapiens
cttttagggaatgagaagtcgaagctaaagcaggtgccacattggtttgcaaacaggatttttttamagcctctataattagcctctcttccactactgcattaccttcagcagtccttgttttgagattttctaatttcaagagacacttaatttataaaactaggtgttaatttacacatagctgcagtgctagacaatatgacttttgacataattaccaccataacggaaagcttgtctgaagactggcatatagttattcctgtttttaaaccatatttgacttcaccaataagatttgagtattatcaaaattgcccaaagaccattaacaagatttaatagttaaagccaaaactataaagaattaactgttcaaaagtgtgttaatccttaataccaattttatagggccaccattaacttctgaagaaaggtcagcatatgcaactaaatttctaaagtccagtgtttttaaataccggaatataagctgcaaaatcacagatatatgcttaagaaatattgccagtatcatagatggaaaggacagaaaatgaggctttgctgaaatgatgccacactttggtttccccaggaagcagactttgaaatggagatttgcctgaagtaaatgtactgaggagagctttcagaattaacacctgtg

SEQ ID NO: 947202 - DNA, 622 bp, Homo sapiens
agcaaaagaaacaatcagcagagtaaacagacaacccacaaagtgggaaaaaatcttcacaatctatacatttgacaataaactaatatccagaatctacaaaaaactcaaacaaatcagcaagaaaaaaaaatcccatcaaaaagtgggctaaggacatgaataaacaattatcaaaagaagatatacaaatggccaacaaacatgaaaaaatgctcaacgtcactaatgatcagggaaatgcaaatcaaaaccacaatgcaataccacctcactactgcaagaatggccataatcaaaaaaaaaaaaaaatgttgacatggatgtagtaaaaaaggaacacttttacactactggtaggaatgtaaactagtacagccactatggaaaacagtgtagagattccataaagaactaaaagtagatctaccatttgatccagcaatcccactactgggtatctaccccaaggaaaagaagtaattatacaaaaaagatacttgcacatgcatatttataaaatagcagcataatttgtaattgtaaaaatayggaaccagcccaaatgcccatcaatcaatgagtggatatagaaaatatgttatatataccatggaatact

SEQ ID NO: 947203 - DNA, 569 bp, Homo sapiens
cagtgatgattcagtaccacgcagatggacagggaggcatggtgccctcgggatgggctcccttcctttttttctttttttttttttaataytttaagttctagggtacatgtgcacaacatgcaggtttgttacatatgtatatatgtgccatggtggtgtgctgcacccattaattcgtcatctacattaggtatttcttttaatgctatccctccccggccgtcccaccccatgacaggccccggtgtgtgatgttccccatcctgtgtccaagtgttctcattgttcaattcccacctatgagtgagaacatgcagtgtttggttttctgtccttgcgacagtttgctcagaattatggtttccagtttcatccatgtccctacaaacgacatgaactcatcctttttatggctgcatagtattccatggtgtacatgtgccatattttcttaatccagtctatcattgatggacatttgggttggttccaagtctttgctattgtgaatagtgccgccataatcatacatgtgtatgtgtctttatagtagaattatttatagt

SEQ ID NO: 947204 - DNA, 610 bp, Homo sapiens
tcctttcatgggtgaagcaaaactccttggtagactttttttttgagacagagtctcgctctgtcgctctgtygcccaggctggagtgcagtggtgcgatgtcgactcactgcaacctccgcctcccccgggttcacaccattctcctgcctcagcctccccagtagctcggactacaggcacccacccaccatgtccacctaatttttttgtatttttagtagagacagggtttcaccgttttagccaggatggtctcgtatcctgacctcgtgatccgcccgcctcggcctcccaaagtgctgggattacacgtgtgagccaccgcaccaggccaatgtgatgattatctatggatataccctgatcatcagcaggaggaaatgaagaggtattggttaaaaatacaaagttgcagttacgcaggatgaataagtactaatttgtaacaattcagtatgaaacagtgtgaccgtggttaacaaggctctgctctatgcctgacatctgagaacagaggaattgaagtctgaactttgtccagaagaggatggctttgtaggctttgctgagcatgctgaattcacggtttccggtcagcccctgggct

SEQ ID NO: 947205 - DNA, 454 bp, Homo sapiens
gtgtagtaggctatatcatttgtgtttgtataaatacattttttgatgtttacacaaccacaaaatcagctaaagatgcttatttcagaacgtattcctgtcactacatgacatatgactgtatctcacattataatttataaagtactctcattgtccattatctatatcacagaattatgaaatgttaaatttgaagggatattagagatatcgctaatctagtggttgccagttggggtgattttatcccccagtggcatttgacaaagtctggatacatttttaaattgtcctaacttaggagtgggtgctgctagcatctagtgggtggaggctaaatatcctatgcaattcacagcatagtccctacaacaaagaagacttctgtgctcactkggatggagaaggcttgggaagaagccatatagcaatcttcccagagaacagcagc

SEQ ID NO: 947206 - DNA, 550 bp, Homo sapiens
aactatcacaaggacaaaaaaccaagcacggcatattctcactcataggtgggaattgaacaatgagaacacatggacacaggaaggggaacgtcacacaccggagactgttgtggggtgrggggcggggagagggatagccttaggagatatacgtaatgctaaatgacaagttaatgggtgcagcacaccagcatggcacatgtatacatatgtaacaaacctgcaggttgtgcacatgtaccctaaaacttaaagtataataatgataaaatttaaaaaaattactattaaaaaaagcaatactatttttctcattaaaaatagtttgtatttttctgttgttgaatgtgtagggtcagtaaggtgtgacaactctcctatcccatcataggggttacgcccaacagtcctataaaaaagactggttaacaaaaggagaccataacaggcttgtttaatcaaagttttacatgacacagaagacttcaaaaatgaaaacctcaaacactcagagaatactgtctatttttatacttaagtgtgatga

SEQ ID NO: 947207 - DNA, 675 bp, Homo sapiens
gcaatatatctttactgtcctacctcaggggtatataaactycctggctttgtgtcataatcttgctcgcagagatcttgatcgcttttcccttccacaagatatcatgatggtccattacattgatgacattatgccgactggacccagtgagcgagaagtagcaaacacactggacttactggtgagacatttgggtgccaggggatgggaaataaatcagactaaaattcagggaccttctacctcagtgaaatttctaggggcccagtgctgaggggcctgtcaagatattccttctaaggtgaaggataagttgttgcatttggcctctcctacaaccaagaaagagtcacaacgcctagtgggcctatttggattttgggggcaacacattcctcatttgagtatgttactccggcccatttattgagtcacctgaaaggctgccagttttgagtggggtttagaacaggagaaggctctgcaataggtccaggctgttgtgcaagctgctctgccacttgggctatatgacccagcagatccagtggtgcttgaggtatcagtggcagatagggatgctgtttagagcctttggtaggcccccataggtgaatcacagaggaggtccgtaggattttggagcaaggccctgccatcttctgcagataa

SEQ ID NO: 947208 - DNA, 586 bp, Homo sapiens
gctgactgagcagaatggtggytgctgcaagttgggatggctgttgcaatttcttaaaataagaaaatgaagtttgcagaatcagttgactcttcttttcgtgaaagaatcctctgcagcctgtgatgttgtttgatggcattttacccacaatagaacttctttcaaaattagagataatcctctcaaaacctatcactgttttatcaaccaagttcatgaaatattcaaaatcctttgttgtcatttcaatgatcacagcatagtcatcagaggaagattccacctcaaaaaacaaaacaacaaaataaaacaaaacaaaccaaaaaccacattctttgctcatccataagaaacaactcatcatctgttaaagttttatcaggagactgaagcaattcagtcacatcttcaggctacacttctaatcctagttcttttactatttctacaacatctgcatatactccctccactgaagtcttgaactcctcaaagccatccatgaggattggaatcaacttctaatctcctagtatccgtgatatttttacctcctcacatgaatcatgaaatattcctagtg

SEQ ID NO: 947209 - DNA, 456 bp, Homo sapiens
cggtattttcctccaattctaaggtagaggacagaatagcaagcaaaagtggtctgatattactcactgctttggagaatccccatacgaggccaccaaatgttaccagcrgatctttgttcttagagctcccaagatgatggtgggctgctcccaagatggggcaggccactcccaagatggcagcaagccttttgttctctgacctgggcttcttggcctcacagattccaaggaatggaaacttgggccatgtggtgagtgttatagctctatcagaagccgtgggacatggaagagaaccatggaaaccactgactagtgttcagcttgattaggatgaacctcggcacttggttgtgcaggaacaaaggtgagactttagcccgatcaggagtggaaatgggtgccttgctggatcaggagcacaacctgccagatccagaggggtgggag

SEQ ID NO: 947210 - DNA, 569 bp, Homo sapiens
ggcccaggggaccactaccaccaagatgcggagactgatagtgaccccaaatgccaggctgtgctgttatttattggatacaagacaagggggcagggtaaggagtgtgagccatctccaatgataggtaaggtcacgtgggtcacatgtccactggacaggcggcccttccctgtttgacagccaaggcggagagagaggacacagcttacgccattatttctgcatatcagagacttttagtactttcactaattctgctactgctatctagaaggcagagccaggtatacagggtggaacatgaaagtggaccaggagcgtgaccgctgaagcacagcatcacagggagacgtttaggcctctggatggctgcgggcaggcctgtctgatgtcaggccttccacaagaggtggtggagcagagtcttctctaactcccctggggaaagggagactccctttccyggtttgctaagtaacgggtgccttccctaggcactgacattactgctagaccaaggtcagctaagtaacggttgccttcccaggcactggtgttaccgctag

SEQ ID NO: 947211 - DNA, 692 bp, Homo sapiens
ttagccaccacctcattaagttcatagtagtcttcagtcattcttcaagacccatgcaacttttgcacagcccaactgatgagttcrgtggagatgtgataactatcgccacttctttcaagtctttgatggcagcatggatttttgcaatcccctcagggatgcaatattgcttctgatttattctcttggtagaaatgaaagttctaggagcttctgcttagtccttccaacaataaaagccatcacccatgggtcagagagaaaatgtgggggtttgtcagttgtcaactttggtccctttggagaagtcttagaggaggatttatggtgtgtgcatgtggcaatggtgcagggtccttcctcaagggcacctggcttacctttcagtcaaaaggctctgtgtctataaatttacttatgtctaaaagctgggtaaggggcttcagttcctctctgtgggaattcaagtcaggttttcagctaccagagtttttgctgttatatagatcaggcactacactcacaggttgcccacatatttactttcaagagacatcatgatcaactatccactgtcaaagatctctgccaatcgaaacattctgattactagtatgcccctcccgacctttacggtagaggtacttaccttccctttggcagttaagtgctgccgtttgacccctttt

SEQ ID NO: 947212 - DNA, 587 bp, Homo sapiens
agggcagctgcctgtcctgggtttctcatctgctagggtctaaatgtttgtgtcctcccaaaatccatagattgaaatcctcaccrgcaggtgagggtattaggaggtgttattagtcagggttctctagagggacagaagtaaaaggacagatgcatatattgaagggagtttattaaggagaattggctcacacgatcacagggtgaagtcccatgacaggctgtctggaagctgaggagcaaggaagccagtagtggctcagtccaagtcccaaagcctcaaaagtagggaagctgacagtgcagccttcagtctgtggccaaaagcctgagagcccccagcaaaccactgcagtaagtcctagagtccaagggccgaagaacttggagtctgatgttcaagggcaggaagcatccagcacaggagaaagatgaaggctggaagactcagcaagtctgcccttccaccttcttctgcctgctttttctagcctcactggcaaccaactggatggtgcccacccagattgagggtgggcctgcctctcccagtccactgaagcaaatcttaatatcctctggcaa

SEQ ID NO: 947213 - DNA, 578 bp, Homo sapiens
aacaatccttcaagcctaggaaagaatttacatttctacgccttcttatcatcttttgstaaaaacacatcttactgttcttatacacctcacatgtaaatctatttccagtagtttcagttacatgttataatggtaactcccagcaatttttaacttttatgtagaacctagtaagttgttataattatgtacaagtcgcagccaaggtttgactccttccagcataattaagggtgtggtttattccatatgtctgtaggcctcaccagttgtgaagcaggcaagtcaaactgttcacaaaaaccaaaaaaggcagtttataaccttaaaacatttagcaaacctaatatctgacctgcataatttagatcacctatttacattttgatgacatctacattttaccaataatctttaaggctgcttttattcctcgaggattaaagtcatgtgaactgaaaggtaccacagcttttatcttcccttttaaaaaatatttgattcaagtgcttatcctcttttaagtcaatgaagtagagctcttttttatagacatcacatacacgacacatatt

SEQ ID NO: 947214 - DNA, 578 bp, Homo sapiens
aacaatccttcaagcctaggaaagaatttacatttctacgccttcttatcatcttttgctaaaaacacatcttactgttcttatacacctcacatgtaaatctatttccagtagtttcarttacatgttataatggtaactcccagcaatttttaacttttatgtagaacctagtaagttgttataattatgtacaagtcgcagccaaggtttgactccttccagcataattaagggtgtggtttattccatatgtctgtaggcctcaccagttgtgaagcaggcaagtcaaactgttcacaaaaaccaaaaaaggcagtttataaccttaaaacatttagcaaacctaatatctgacctgcataatttagatcacctatttacattttgatgacatctacattttaccaataatctttaaggctgcttttattcctcgaggattaaagtcatgtgaactgaaaggtaccacagcttttatcttcccttttaaaaaatatttgattcaagtgcttatcctcttttaagtcaatgaagtagagctcttttttatagacatcacatacacgacacatatt

SEQ ID NO: 947215 - DNA, 489 bp, Homo sapiens
tgcccctaacattaggagaaagctatgaaaagcagtaatgggacctcaaacccctatggtcaacttttaaacacagcctttaaagtttacaacaataaaaggccaggcgcagtggctcacacctgtaatcccagcacctttttcccagccaagccggtggatcacttggggtcagaagttcgagaccagcctggtgaaacctgtctctactaaaaatacaaaaattagctgggcatggtaacatgtgcctgtaatcccagctactcgggaggctgaggcaggagagtcacttgaactcaggaggcagaggttgcagtgagccaagatcgtgccactgcacaccaacctgggcaacacagtgagactctatctcaaaaaacattaaaaaaaagtttacaacaatacatacagggcaaaaaagtgaaaaaaagayaaaaacaagtagacaaaaagtacaattgttagcagttgcattaaaccccctgccac

SEQ ID NO: 947216 - DNA, 569 bp, Homo sapiens
tggatccattgctggtgaagtagtgtgatttttggggggtattgacgagcttgttttgtcatattaccagggttggtgttctggttccttctcatttgggtaggctctgtcagaaggaaggtctatggctgaaggctgttgtccagattttttttgtcccacggggtgttcccttgatgtagtactctccctttttttctgtggatgtggcctcctgtgagccgaactgcagtgattgttgtctcttttctctcttctgggtctaaccacccagcaagtctacccagctctggactggtactgggggttgtctgcacaaagtcctgtgatgtgaactgtttatgggtctctcagctgtggataccagcgcctcttccagtggagttggcagagggtgcaatggactccatgagtgtccttagctttggtggtttaatgctctatttttgtgctkgttggcctcctgccaggagatggcgcttttcataaaggatcagctgtagcagtgtggagagggactggtggtgggcatggctctagaactcccaagattatatgccctttgtctt

SEQ ID NO: 947217 - DNA, 702 bp, Homo sapiens
ggaaggaagtttgagtttagagtctgaggcaggactaattaacttcctgwtaaaacaatcaagactatttgatagaatagaacagaatctgaaatctctacaatgtataatttacaatgtcatgaataaaatcaaaaattactagacttaggaagaaaaagaaattgtaactcataagcaatcattgcaggctgaccagaagatttcacctatactgagttagcaaagatttttaagatggctattaaaactatgttcaagagcataaaggacaatatcctataattaataaacaaataggacatatcaacacagaaatcacaagtatttttaaaaatcaaacagaaattctagagctgaggctaggcatggtggctcatgcctataatcccagcccagcactttgggaggtgaaggaggaaagatcacttctatgaaagaaggaaaggaaggggaaggggaaggggaaggagaaggaaattctagagctaaaaaatgaagaaccaaaacaaaatatttaatggatggtcttaatagaagactagagaggttataagaataagtgaacataaagacagatcattagaaattatcaaatttcaagaacagagagaaaaaagattgggaagtgggaaaagaaagacaatagaaatggggcttagtgacctaaggggcaatataaacatttctaacatatgacta

SEQ ID NO: 947218 - DNA, 577 bp, Homo sapiens
agatagagcacacagcccaagagtactgagctaagccttggcccccaaaaatcttccagaaacgcaaccaattgaytgaacccaccatataaaacaaacaaacccccaagaacatcaaagataaaagaaaaataaaatacacccaaaggacagcaatttcaaagattgaaggatcatgagccagagagagagggagagagacagagagacagagagagagagagagagaatcagagaaagaactctggctacacaaaaagccaaactggcttcttacctccaaaccaccatgctagttcccagtgtggttcttagccaggctgaaatggctgagatgacagaaatagaattcagaacatgaatagaacaaagatcatcgagattcaggaaaaattcttccttacccaactttccactctgtgtcctttaattgggacatttagcccatttatattcaaggttagtattgacaggtgtagatttgatcctgtcatcatttagttagcttgttattatgcacacttgtttgtgtggttgctttatagtgtcactgacccatgcacttaagtgtgttttt

SEQ ID NO: 947219 - DNA, 487 bp, Homo sapiens
tgtagcaaagaggaagaaaacccaatccaggttggagaagtcggttagtaagggtattccaggtagacaatcaatcaatcaatcaatgttttaagctgaaattgaacggattatgtgaycagtttgaccacatttgagggtttaagttgctgagtttaagtaagcaagtagtaacacaacatacaagcaaaccaaaaaataaagcaattattcagtccaggaaaaacaaaactgcacaacaagggcaattcaaatgcaaaatatttaccttatatttatataaatgttaaatattcatttaaacaaaaactgcaataacagtactgaaagaatgaggggcaaaccaaagtgtctgaggacagttttggaggagcataatagccagtacagaatgtctaaaatggggcccggcgcggtggctcacgcctgtaatcccggcactttgggaggctgaggcgggcggatcatgaggtcaggagatcgagac

SEQ ID NO: 947220 - DNA, 602 bp, Homo sapiens
gccagagacctgctatggccacgtctatactcggggtaagtcgcaagcgcggcaacgcatttgcttgttttaaccggagtaatttttcrttatggcttctggggtctgcggctccggagaaactgttgctgctagactgcagcttcagcttctattagcactttccacatttctgggactgatttttccccaagtttttggaacccagaaagatgcctttgcaagaaaaggccttcttaatcaagtcctttttcatttggtttcaaaaaaaagctagaggtttcttttcttcccctcgtgatttataccccatcccccgcattgctttggggattttgttgcaattatgcgacaatggtgtttccagaaaacagtcttaatcgttttgcagtccatctagtcacgctaataaacatttacatttccgcggctccccaattcgcccatgactttgaaatctgtctctggccgcttatcctcggattattgttttcataatcgctgtttttgtgtgtatgtaaactttaaaaccaaacgttttctattaaaaaagaaaagtcaagtcgtagccaccctgggagagctgcaagtttcgcccgtcc

SEQ ID NO: 947221 - DNA, 600 bp, Homo sapiens
tacacgtgcgtaccaccacccctggctaatatctgtattttttgtagagacagggtttcaccctgttgcacaggctggtcttcatctcctaaactcaagcaatctgccagcttcagcctcrtaaagtgctgggattatgggtatgagtcaccatgcccagccctcaactgtaccttaaggagaaaaaaaaaaattatttgaaattatgtggtgatacagcaatacagactagattagaattctgaaaaagaaactcatttaaaattttaaaactaggcggggcatggtagcccaagcctgtaatcccagcattttggaaggcagaggcgggcagatcacttgaggtcaggagtttaagaccaacctggtcagtatgatgaaagcccatctctactaaaaatacaaaaattagccaggcatggtggcacatgcctgtaatcgcagctacgtgggaggctgcggtaggagaattgcttgaacccaggaggcagaggttgcagtgagtggagatcgcaccactgcactccagcccgggcaacagagcgagactttgtcttgggaaaaaaataaataaataaaacgtaaaacccattaatctat

SEQ ID NO: 947222 - DNA, 475 bp, Homo sapiens
ctcactttttccagcgtagaaactgtgagtcagggggacattttccgtgtcctttgtgctgggcagttttggggagagggatgtcgtgaatatggaagtccaattctcttactgtcggcttggagtttttttcacttttctgtggttgcacgatctttttcctcctcatatttgagttcttgggtattgccggtgatactcttggtgctatgtatttgttgttcattctgtatgggggcaggggcaggtggagaagccagcttctatgccatcattaaagaactggaattcccccccatgtgtctcttataaggatgctcatcaatgcatttagggcccacctggataatccacactgatctccccatctccagatccttaatttagttacatctgcaaagaccctttttccaaataaagttgtattcacaggttccagagayttgacatagacctatattttggggccattttt

SEQ ID NO: 947223 - DNA, 603 bp, Homo sapiens
caacccatcatctacattaggtatttctcctaattctatccctcccagagtcccccaccccccaagaggcccacacacacagtgggtgatgttcccctccttatgtccatgtgttctcattgttcaactcccacttatgagtgggaacatgtggtgtttggtttactgttcctgtgttagtttgctgagtgatggtttccagcttcattcatgtccctgcaaaggacacgaactcatccttttttatggctgcatagtataccatggtgtatatgtgccacattttctttaaccagtctatcattgatgggcatttgggtaggttccaagtctttgctattgtgaacagtgctgcaataaacatacgtgtacatgtgtctttatagtagaatgatttataatattttgggtatatacccagtaatgggattgctagctcattatggtgggtgtgacgtttgtggtcctcrtctcctgtggctacaccccagctactatcctgaggatgtactccgcagttaggggatgcaaaatcttctctacctgtggttctcacattactacagtgcctctctttcccgggactgtgtttgtcatgtatgc

SEQ ID NO: 947224 - DNA, 603 bp, Homo sapiens
caacccatcatctacattaggtatttctcctaattctatccctcccagagtcccccaccccccaagaggcccacacacacagtgggtgatgttcccctccttatgtccatgtgttctcattgttcaactcccacttatgagtgggaacatgtggtgtttggtttactgttcctgtgttagtttgctgagtgatggtttccagcttcattcatgtccctgcaaaggacacgaactcatccttttttatggctgcatagtataccatggtgtatatgtgccacattttctttaaccagtctatcattgatgggcatttgggtaggttccaagtctttgctattgtgaacagtgctgcaataaacatacgtgtacatgtgtctttatagtagaatgatttataatattttgggtatatacccagtaatgggattgctagctcattatggtgggtgtgacgtttgtggtcctcatctcctgtggctacaccccagctactatcctgaggatgtactccgcagttaggggrtgcaaaatcttctctacctgtggttctcacattactacagtgcctctctttcccgggactgtgtttgtcatgtatgc

SEQ ID NO: 947225 - DNA, 573 bp, Homo sapiens
cagtttcattcttctaagtgtggcatgacagttttcccagctccatttattaaatagggtgtccattccccaatttatgttttgggtgctttgttgaggatcagttgtctgtatgtatttggctttatttctggcttctctattctgttaaattggtatatgtacctacttacctacttttataccagtaccatgctgttttagtaactatagtcttgtagtgtaatttgaagtctggtaatgtgatgcctccagatttgttctttttgcttaggattgctttggctatttgggctctcttatggttccatatgaatttttggattttttttctaattctgtgaagaatgatgatgatattttgatgagaattgcattgaatctgtggattgctttgggcagtttggtcattttcacaatactcattcttccaatccaggagcatgggatgygtttccttttgtttgtgtgatctatgatttctttcagcagtgttttgtagttctccttgtcgaggtctttcacctccttggttaggatattcctatgtattttattttatgttactttatt

SEQ ID NO: 947226 - DNA, 654 bp, Homo sapiens
tcaagtaagaggttttaatcccatgagttcatctgagttggcccggccccacgtggctggacttaatgaacaaggaccatcagtgtgcagagggcaaaagctacattgcaaaggattagctgtgagagggtggtaagaaatgggagctgctgaccacttgttcagtgagattagttcaaaggcacagaagagctaaggggcagttgtcagaagccagagctgagtgtgtgtgtgtgtgtgtgtgtgtgtgtgtgtgagagataggacaagcttagctgtgcgttgatgtgtgttcacgtgcacctcccagcccaagtgtgcacagcaccagtcttgggcgttcaagctgaagcctggctccttgtaagtgttggctgactccctgaggccaggaggcttcattacttgaggcctgggcaggctgaggaccctcaaaagtaagtgtgagtaaatcccacttccataagcccagctcccgcaggtcctggaagaaggacagacaggtgtacacatgggagacaaggactcctgactcccgattggggctttagctggggaaggacaagcgtctgtgaccagaggaggcaccacaccaccaccagcacctsgcccacccggcaccgactcctggcagataactcagccctgctgtgc

SEQ ID NO: 947227 - DNA, 618 bp, Homo sapiens
atctcaagtaactgtcaaaagtgccttacaatcaatgcatccataaccaaattcttgattgttctccctgaacgaatttattctttcatccccgaacaaagagaactgtgagaaagccaagagtgagtgatgaaaagagtagttggaaaggagctgggagaagtggcccagcacctgatcatgtctagccttggaggtcatggcaaggacttcggatgttaccttgagatgcaaagcgatttgaaacttttgaatagggaaataacgatatttgtgtttgaaagggttccttcgtcaatagtgtgggtgagagtggagaagagaagccagtagaaaatctatcacagaagcttaggtaatagataacagaggcttgaaagaaagtggtagaaatggaagtgattaggtgtggtcagattctgataccttttcaaggtaaagtaagcaatatttgttgatgggttagatgtagagtatgagataaagagaaaactccaagacagctcatgagatttttgttatcagtctctagtgagggaaacttagagrgaaggacacattggggaaggaactggaatcaagagttgagtttaaaatctgctgatttcagatgcttat

SEQ ID NO: 947228 - DNA, 593 bp, Homo sapiens
gccttagtcttctcttcctctgtcaactgatcctagggaactccttatgaggccatcggtgcaggctcggggagagaaggcagggtggcaggagtaragaccgtggacatttgagccacttcctcatgtaactcacttgtgccttcaggacctgctcgagcctgatcacgtatatgtcagttccaattgatgatggaatgttgctgtgcatgacccactttatggctagatgggtcagaaatcactcaggccatggtaggcagttaaggtcacatggtgactcaatgacccatagtcaaacattcagtttccaccaaagcccagtaacaggccaagtgctgtctctcaaaaggagagtagctatctgcaggagatgacagggccttgatccaaaatcctagaggcttccactgtgattcgcctatggagcttcccaaaggctaacacctcaagcaccactggatctgatgggtcatatggcccaagtggcagagcagcttgcacagcagcctggacctgttgcagagccttctgctgttctggaccccactcaaaactgtcaggctttcaggtcacttaataaatgggccaga

SEQ ID NO: 947229 - DNA, 619 bp, Homo sapiens
tatcatgcagaaccatctgtgaaccaggccttagtcttctcttcctctgtcaactgatcctagggaactccttatgaggccatcggtgcaggctcggggagagaaggcagggtggcaggagtaaagaccrtggacatttgagccacttcctcatgtaactcacttgtgccttcaggacctgctcgagcctgatcacgtatatgtcagttccaattgatgatggaatgttgctgtgcatgacccactttatggctagatgggtcagaaatcactcaggccatggtaggcagttaaggtcacatggtgactcaatgacccatagtcaaacattcagtttccaccaaagcccagtaacaggccaagtgctgtctctcaaaaggagagtagctatctgcaggagatgacagggccttgatccaaaatcctagaggcttccactgtgattcgcctatggagcttcccaaaggctaacacctcaagcaccactggatctgatgggtcatatggcccaagtggcagagcagcttgcacagcagcctggacctgttgcagagccttctgctgttctggaccccactcaaaactgtcaggctttcaggtcacttaataaatgggccag

SEQ ID NO: 947230 - DNA, 639 bp, Homo sapiens
atgcttaatttcccaacaacaaggccaaggagactgcagtctcaggagctatggagcagaagggtgtgtgcatggaccagaccccggcacaagggccccaaatcccygaacccagcaccaggcatgggggtagacaggggacacgcagaaggaatagattctccgagtcctccactgtgcccggtcctcatctctgtcagggtggggttcttgagagcctggttgccgctcactctcagatggtatctcccgcttctcccctcagcttcagttccctcttaaggactctgttctccttccacttccgctgtgaagatccctcagcgtgatgaagatgcaggggcaagtcagaggttacacagtgggggctgccctgctagtgtgctgaagccacgccaactgttcagggcagctttctgcttccaggaagaacacattgacctggctcctttcaacagtctgggcgttgtcttaagcctgagcttcttcagttgcctgctgaccccagacaccccctccagtccctacccatctccagcagccagatgctgaccaagccccaggagcttcccagacgtaagagccactagaatcgcctcctccccactcttcctgcctctttcaaatttgatttcccta

SEQ ID NO: 947231 - DNA, 604 bp, Homo sapiens
gcatcacatactatttcaacctgtactactagaatatagtaactaaaacagcatggtatgatataaaatagacwcataaatcaatggaacagaatagagaatccagaaatcaagcctcatacctatagacaaccaatcttcaacaaagccaacaaaaacatactctcaagaaagaaaaccccgttcaataaatggtgctgggaaatttggatagccatatccagaaaaatgaaaccggtcacatgtctctcaggatatacaaaaattatctcaagacggatcaatgacttagatgtaagacctgaaactgttaaaattatagaagaaaatctagagaaaattcttctggacatagggctacattaagaattcatgacttagaccctaaaagcaaatgcaacaaaaccaaaaacatttaattaaactaaaaaaccttctgcagtgtaaaagacataatcaacagagtgaacaggagcctacagactgggagaaactatttgcaaactatgcctttaacaaaggactaatatccagattctacaaggaacacaaacaactaaacaagaaaaaaaaataaccccatcaaaaagtgggcaaagtactg

SEQ ID NO: 947232 - DNA, 448 bp, Homo sapiens
gcttctgtaccagatgtggtttaactgattgaggaaattaacatattcccgggtacctggtatgtagcattaatctggaaawtgttttgttgggtttttttcctccatacctgtcaataaagtctaccagaagtagttgctttcagggggaaaggccataaatccaccttcactgttcccctacctcaggggtaggtcaactctccagtcatgtaccataatttcatccatagggatcctgattgccttttcattccacaatatatcatactggtctactacattgatgacattatgctgattgaacctagcgactgagaagtagcaatgactctagacttactgcatatgtatttgaatgtcaaagtgtagaaagtaaatccaaataaaatccagggtcttctatttcagtgaaatttctagggtcctagcggtatgggacatatcg

SEQ ID NO: 947233 - DNA, 571 bp, Homo sapiens
gttactgcaaaggacataatttcattattttttatggctgcatagttttccaaggtgtacacagaccgcattttctttatgcagtccaccaccgaygggcatctaggttgattccatgtcttttctattgtgaattgtgctgcaatgaacatacatagttcatatgtctttttggtagaacaatctatattctactaaaaagtagaatagtaataagtatatagtatgtagtaataagcttgctgggtcatatagtagttctgttttaagttctttctgaaatctccaaattgctttccacagtggctaaactaatttacattcccaccagcagtatgtaagcactcctttttctctgaaactttgccaacatgttaattttttactttttataattgccatctgactgaggtgagatggtaccttgttgtggttttgatttgcatttctctaatgattaatgatgttgaacatttttcatatgcttgttgcctccatgtgtgtcattttaagaaatgtcctttcatgtcctttttccatgttttaatgagattgtttgtttttcacttat

SEQ ID NO: 947234 - DNA, 562 bp, Homo sapiens
tgctggcacccatccatctccccagcatccatttctcttcatgggagcaccccagatttcacagctttgtgagttgaaaccctgtccttgctgagtctccactcccagggtaggtcygacaataagagaaatatttcactcagtggatcgttaactcaaggatgggcatatcacttaactcagggtagacagcaccaaggaaagtcaatttgggggacttctgacttcttccttcctactgaacatgaaggtctatatgtgattttcactattggaaaaagcctactgcaaactataaatctaaccaatagtatatttagccaaaatgtcatttctttttgcctaaaactggtatgtatggttattgaatacaagaagctctgatgggttgctgccaacagaacagaaatttttcttttctttttttttttttttttgagacagagtcttgctatgttgtccaggctggagtgcagtggtgtgatcttggctcactataatctctgcctcccacactcaagccatactcccccctcagcctactgagtagctgggactacag

SEQ ID NO: 947235 - DNA, 856 bp, Homo sapiens
accagacatggaaagaagaactgatgccaattctactgaaactattctaaaagatggagaaagagggaatcctccctaattctttctatgaacccrgtatcaccctaataccaaagccaggaaaagacacaacaaacaaggaaaactgcagaccaatattcctaatgaacataggtgcaaaaatcctcaacaaaattctagcaaaccagattcagcagtatatcaacaagataattcagcatcaagtgggtttcataccaggaatgcaaggatgatttgacatatgcaaatcaacaaatgtgattcaccacataaatataattaaaaacaaaaaaaaatcatttcagtagatgaagaaaaagcatttgataaaattgagcatcccttcatgataaaactcctcaacaaactaggcacagaaagaacataccttaaaataataaaagccatatatgacaaactcacagccaacatactgaatgaggaaaaactgaaagcattcttcctaagaactggaacaagacaagaatgcccacttctgccacttttattcaacgtagtactggaagttctagctagaacagtcaggcaagagaagaaataaagggcatctaagttagaaaagagaaatcaagctatctctgtttgctgatgatgtgatcttataccttgaaaattctaaagactcctccaaaatctcctagattggataaatgaatctgtaaagtgtcaggttacaaaatcaccatacacacatcagtactactgctatataccaataatgaccaagcagaatcaaatcaagaactcagtcccatttacaattgttgcaaaaaaaggaaaaaaaaaaacccta

SEQ ID NO: 947236 - DNA, 481 bp, Homo sapiens
ccagatccacactttgcaaatattttctccccattctgtaggttgtctgtttactctgttgatagtttcttttgctgtacagaagctcttaattttaattagatcctatttgtcaatgtttgcttttgctgtgattgtttttggtgtcttcatcatgaaatctttgacagttcctatgacagaatgctattgcctacattgtcttccagggtttttatagttttgagatttacatttaagtgtttaatctatcttgagttgatttttggatatgatataaggaaggggtccagcttcaatcttctgcatatggctagccagttatcccagcaccatttattaaataggcagtcctttctacattgtttatttttgttagctttgtcgaagatcaggtggttgcagatatgtggccttatttctgtgctctctaytctgttctattggtctacgcacctatttctgtaccagtaccatgctg

SEQ ID NO: 947237 - DNA, 232 bp, Homo sapiens
gtgggatgcctctcattgtttcttcaccatggaacttaagtttcactgtcctgggaaatcagttgtttcccatctgctttccaggttcaaagattatgtgatatttctcatttactatagtctctacttccatgatctttgtctttgtgaatttatattttaaaaataatttgtagtcattttagaaatttgrcattttgagaagaaatagatataaccatgtgcatttatt

SEQ ID NO: 947238 - DNA, 625 bp, Homo sapiens
tcttgagcggggtccagaacaggagaaggctctgcaacaggtccaggctgctgtgcaagttgctctgccacttgggccatgtgacccaggagatccgatggtgcttgaggtgtcagtggcagatagggatgctgtttgcagcctttgacatgtccctctaggtgaatcacagcggaggcctctaggattttggagcaaggccctgccatcttctgcagatgactactctccttttgagagacagctcttggcctgttactgggctttggtggaaactgaacatttgattatgggtcatcaagtcaccatgcaacctgaactgcttaacatgaattgggtgctttctgacccatctagccataaagtgggtcatgcgcagtagcattcaatcatcaaaatggaagtggtatgtacgtgatcaggctcgagcaggtcctgaaggcgcaagtaagttacatgaggaagtggctcaaatgcccctggtctccactcctgccaccctgccttgtcttcctcggcctacatcratggccccatggtgagttccttatgatcagttgacagtggaagagaagactatggcctggtccacagatggttctgcacaatatgcaggcaccaccag

SEQ ID NO: 947239 - DNA, 748 bp, Homo sapiens
gcctttctaaaaatgactgctacacaataaagttcagtaaaatgttctatgtgtctgtacattgtctatcaattttgctatgtgttgtctacattcagacattacgtgtgtctcaattgtgarttactgtgcctttttttctgtcactgaaacctagaaatactatgtacaacatatgttatcaatagaataaaaaaaaattcgtttacactctcaactaagcatccactgtgtgccagcattatgccaagcactggtaaacaaagttgaataaaatgccaccacctttgctcttgtgcaaggaaaattaatcttgggacccccaaatcactaagccaagagaaaagtcaaggtggggtttatgtcaggcaaacctgcctcccattttattcctaaataagttaaactacaaaggtaagaagttacatccctccctcactatttgcccacaaggaaattccttgtggacaaaagacagacagaacccaaagtcatccctttgaggattacctgagacaaatgcatatctgattgctgcctttgcctattgcttatgtaaaaatgcagatttagtgagccagactaaatggtgtgttcagtggaaggctgatcaaggattcaaaagaatgcaaccttttgtctcttacctacttctgacctggaaaaccccacttcaagttgtccccccttagtggaccaaacctatgtacatcttacacatattgattgatgtttcatgtctccctaa

SEQ ID NO: 947240 - DNA, 596 bp, Homo sapiens
tttttttaatctctttgtcttgtgcctttatttctacactctctcatctctgcacacgaggagaaaacccaccgaccctgtggggctggaccctacacttttcttttaaaaaatcctttggagaaagcattttagaagaaaatgcgtctctagtctgaggttttgtccgatctctcatggctaggatggtttattcctagatgggtaggtcccaagttatttaggaaggctcacttttagcaggctgtaaagtctcatgtcctataaagagaaaataggaggaggaagggagaaaaacaagaacaaacaaaggaacaatcctggaaaatgcatataggccacactactctgaagtccacatatcaatagacaggcagtaagtggcttatgtatgtaaataggttgttgttattttcttctgaagtttaagttgtctagcttctgttcacagggctttatgaatgcacagcttagttttcagtgactccaaattaggataaatgrgggagtgggggtgggggtaaagaaggaaaagaaactgaaagcaatattttgaaggcttgtagccaagaaaaattagaactcagtccaaactg

SEQ ID NO: 947241 - DNA, 611 bp, Homo sapiens
acccaagcacatggaaaatagatcatgctttgaactagaagactcaaaattattaaaatgtcaattctcctcactcttttatatagcttcaatcaaaactagtcgagtttttcaaagtgttctrtgaaattggacaagctgattttaaaatgtatgtagaaatgcaaagaacatagactaatataaaattttgaaaaagaagaataaagttagaagactctctctggtttcaagacttactatatatagctaaattataataataatgctgtgttggtgttaagataggcacattgatcaagagaacagaatagaaatttcagaaatagacacatttatggtcaattgattttgacaaaattgctatggtaatagcagaaataagaggtttttaaaataaatgtttagaaactaaatatttgcacagagaaagaaaatttgaagcttttaacttcacaacatacagaataacaaaaaaaattaagatagtgtctagctctgtcacccaggctggagtgcagtggatcacagctcactgcaccctcgacctcctgggttcaagcaatcttcctacctcagcctcacaagcagtgtgggaccatagacacatg

SEQ ID NO: 947242 - DNA, 634 bp, Homo sapiens
acattaaatattcagaaacttttctttatgccagtttcttattttcacccatcatgacttaaagcttttttttgttttagcattttaatgtttaaataaatgtaaataatttagttacaaggtctttatggtagtgccgccattgtttttaagaagacaaattttaatccaaggttaaaaacttcacatttgcttatctctttttcctcttaagaactaagagtccagagattagagtaaaatcaccttttcctcatagttttttctttcaacgtgttagaaattcctgtttgaaaaggaaagccagttcctccccctttttatgtttgaggggatgatggtaaaatcacattattcagtcagtttccacatgtgatttgttgcctatattttttaatccagggattaaattgttgccaccaccagcatcaaatcattggggggcaggggtggggaaggtgcgagacagttggttatagacatccaaatatgacgacagaaaaatctccacarcaatatggcagtggagcatttgctgacttcagagtgccagatcaaccccaatatttttttcagggatgctaaacctcttgtaactgctaaattggatttgttactgaatgaagtatcagct

SEQ ID NO: 947243 - DNA, 595 bp, Homo sapiens
tttggatttacactgagtgcaccttcatgtgcttctgcacaattgccaagggagcacggactcacacctgtgaactgtcctcatgccggccttatgcatccacatggtgcacctgggtgacattctctgtccctgccaaagggcacaagggacaagcagcctctttggacttcacttaaattcccggagctgggatgaaaataaagttacatgcttcaagattttgtaagcatcagagaggaaacagaattgctttgcccagtgtatacttcatttgtgctttaaaatgacgggcaaagtcccctggctgctgcagctttgctgatgttccagagcctctgagaggagctttgccaccctttggcactagtcagccttgggccaggggaatgctaatgggtcagaatgggcataagtataatgtgtgtgtgctaagggattggggcaccagataacctgctagcgctgcgagtttatgattcctcagcctttacacacatttttttttaaaactgttttaartgtttgtgccccttagcatggcattaaaggccctaagcgacctggttccagggtagcttcctcttgtgtcctg

SEQ ID NO: 947244 - DNA, 652 bp, Homo sapiens
ttggggcagattaccgcagctcagcctcagtttccagtctgtcttaagtggayataacaggatcgctgccatgcttactgtgatgattacatttagtaatatccctgaacatactgagcactccacaaatgcttctgaacctgaatgtcttacagtaatgtgaaaggaaattgagccagagctctggacagggatcaagcttgcgagaatgtgctcactaagtgctttggactctactgaaattctaacaggagtcagaatatttttcaattacttttgagatggagttttgcttcgtcgcccaggctggagtacagtggcacaaccttggctcactgcaacctccacctcctgggttcaagcaattcccctgcctcagcctcccacatagctgggattacaggcatgtaccatcatgcctggctaatttttgtatttttagtagagacaaggttttgtcatgttggccaggctggtctcaaactcctgacctcaaatgatttgcctgcctcagcctcccaaagtgctgggattacagatgtgaaccaccatgcacggcctcaattagtttttaaaatcaattaaacttttcataaaggtagtaaattaatgtggtcaaaaaatctccaagcataagagaatggaagggaga

SEQ ID NO: 947245 - DNA, 589 bp, Homo sapiens
accctcaaagaagcaagagcatggaatcacgttcacctcttggagcaggagcatctacctctgttatktgcaattcttctggaagaaagattgtctcctctccctatttatttatttatcccatcatttactgacatctgtatggactcttgtgctgtatttcagctctgggatgtgacccatgtttcgccatgcattttctttcttttctttctttttttttttttttgagacacagtctccctttgttgctcaggctggagtgcagtggcacgatctcggctcactgcaacctctgcttcccaggttcaagcagttcttctgcctcaggctcctgagtacctgggattacaggcacctgccaccatgcccagctaatttttgtatatttagtagagatggggtttcaccatgttggccaggctgttcttgaactcctgacctcaggtgatccacctgccttggcctcccaaagtgctgggattacaggcgtgagccaccgcgcccagcctactttcttgctcaggtttttccagtgttggccacagggagccctttctgccggcctccggggtctgttcacagctgc

SEQ ID NO: 947246 - DNA, 650 bp, Homo sapiens
gatgctgcaacttatcttgttccttctgtagccattcttctacttttgtttctctagcagctctatcaacgggctttgcccctccaaagacaaaakaagctcgactggactgggaggtactagcagaagaatcatctcccttaggagtattatgaggctttagattcagtttgggtctttgagggggacgtctatcattatacctacaatcatcccgagagaaatcatctctggagctgcacgacccatcatcccatctgttgtatcggtcttcatagcggtccctgcctcctctgtagtcattgtccctgggtacccactgccaaatgcccttctgccactgcctatccaggaatgatagcctctagcatagtctctgctgcctcggtcatcatagcgatccctaccgccagccatatcgatccatatcccggcatgggccatcccgatactcataccaatacccacggccatactggtctgaatcataacgatctcgatacttgtctccaaacctatcatcaccccttctaggcgggtagtcatcaaagctgtctgtggcagaacgagccctccagtctgtatctgttttgtcagaatcccgatttctatcacggccaaaagaacgatcgtccctgtctgtatcctgt

SEQ ID NO: 947247 - DNA, 650 bp, Homo sapiens
gatgctgcaacttatcttgttccttctgtagccattcttctacttttgtttctctagcagctctatcaacgggctttgcccctccaaagacaaaagaagctcgacyggactgggaggtactagcagaagaatcatctcccttaggagtattatgaggctttagattcagtttgggtctttgagggggacgtctatcattatacctacaatcatcccgagagaaatcatctctggagctgcacgacccatcatcccatctgttgtatcggtcttcatagcggtccctgcctcctctgtagtcattgtccctgggtacccactgccaaatgcccttctgccactgcctatccaggaatgatagcctctagcatagtctctgctgcctcggtcatcatagcgatccctaccgccagccatatcgatccatatcccggcatgggccatcccgatactcataccaatacccacggccatactggtctgaatcataacgatctcgatacttgtctccaaacctatcatcaccccttctaggcgggtagtcatcaaagctgtctgtggcagaacgagccctccagtctgtatctgttttgtcagaatcccgatttctatcacggccaaaagaacgatcgtccctgtctgtatcctgt

SEQ ID NO: 947248 - DNA, 435 bp, Homo sapiens
gtggctggaacagtttggagggctcagaaaaagacaggaaaatgtgggaaaatttggaacttcctagagacttgttaaatggttttgaccaaaatgctaatagtgctattggcaatgaagtccagactgaggtcrtacagatagaggtgaagaacttcttgggaactggagcaaaggtgacccttgctgtgctttagcagagagactggtggccttttgctcctgccctagggatctggggaactttgaaattcagagtgatgatttaggatatctggtggaagaaatttgtgagtggcaaagtgtttaagaggaaaagttggcaaaatctgcagcctgaagatgtgatagaaaagaaaaacccattttctggggaaaactttgcataagtaatgaggagcagaatgttaatcactaagaaaatgggggaaatgt

SEQ ID NO: 947249 - DNA, 642 bp, Homo sapiens
tgcaaagtcacagaggtggagctgcccaagaccatrggagcccacctcttgcatcagaatgacctggatgtgaaacatggagtcaaaggagattattttggaacttgaagctttaatgactgctctattgaattttggatttgcatggggcctgtagccccttcattttggtcaatttctcccatgtggaatgggtatatttacactatgcctgtacccccattgtatttatgaagtacctaacttgcttttaattttacaggctcatgagtggaagagatttactttgtcttaggtaagactttagagttggacttttgggttaattctggaatgagttaaggctttgggggactgttgaaaaagcatgattgtgttttgaaatgtgaagacgtgagagttggaagggacctgtagtaaaatgatatcatttggctctgtgttgctacctgaatctcaccttgaattgtaacaatccccatgtgtcaaggggattattctcatgagatccgatggttttataagggacttctcccttcactaagcactcattctctctcctgctgctctgtgaagaggtgccttccaccatgattctaagtttcctgaggcctcatcagccatgcatactgtatgtcattt

SEQ ID NO: 947250 - DNA, 641 bp, Homo sapiens
tatttgtcttttaattgttgagttttaagagttctttattcccaataacagtctcttatcatctgtatgatttgcaagtatttcccccattctgtgggttttcacttttttgatggtgttcttygcagcgcaagttttaaattttgatagagtccagtttatctaatttttcttttatgcttatgcttttgctttgatgtaatactgatttggcgtcactttggttgcttatggttttggtgtcatatctaagaaactattgcctaatccaaggtcatgaagatttactcttaagttttcttctaagggtttcagagtttttagctcttatgtttacatttgtgatctattatttcatattttaaatatttgtgtgaagtaggagttcattctcattctttttgcatgtagatattcagatgttccagcctcatttgttgaaaagactgttctttccctactgaatgtcatgacactgtcattggaaatcaactgaccataaatgtaaagactgggtgttgactgacaccgactgattctctgacaccaacttggcatctaacaatttaaatcaatttgaaacttaactcctggaattagcgtcagaccccacaggttgaaggctcagttctgtaagactg

SEQ ID NO: 947251 - DNA, 641 bp, Homo sapiens
tatttgtcttttaattgttgagttttaagagttctttattcccaataacagtctcttatcatctgtatgatttgcaagtatttcccccattctgtgggttttcacttttttgatggtgttcttcgcagcrcaagttttaaattttgatagagtccagtttatctaatttttcttttatgcttatgcttttgctttgatgtaatactgatttggcgtcactttggttgcttatggttttggtgtcatatctaagaaactattgcctaatccaaggtcatgaagatttactcttaagttttcttctaagggtttcagagtttttagctcttatgtttacatttgtgatctattatttcatattttaaatatttgtgtgaagtaggagttcattctcattctttttgcatgtagatattcagatgttccagcctcatttgttgaaaagactgttctttccctactgaatgtcatgacactgtcattggaaatcaactgaccataaatgtaaagactgggtgttgactgacaccgactgattctctgacaccaacttggcatctaacaatttaaatcaatttgaaacttaactcctggaattagcgtcagaccccacaggttgaaggctcagttctgtaagactg

SEQ ID NO: 947252 - DNA, 662 bp, Homo sapiens
gccacaccagacagacagaccccgctccatgcccagcccgaggcgtcggctgtgtggctcctagcgggccgcctgcgctctggggccagccctcctgtggagtggggcacagggctcactgctcagggccgcctccgctggagccaggcgcctgtgctgccgttctggatgggcctggtttgctgggtgcggaggcgcccgctgggaaagagccgtttgccagtgctgacccagccccgggacccagccccgggaaggtgctgaatgacaccgcagccccccgggggaggcactgacccagatctgctccggccctgccagctctgcctcccgagagtcccggctgtggcctgcgtggggctccggggtaaagtctcagggaagtgaagagtgtttcattccagacgttgtcagggaggcgagagtcctttccttttgatccttaaactccgttatcaccacatttaggttcgtgaaactcctggaaacttctaaaactgtttttaatctaaacagtgggctccccagtctcccattttctaagcytgtatttgaagctaaactgagactcggcccccggaggtctgcactgcggtgtgggactcagcacaggacttggctgcaagcgacggtgggatttgctttgcaaaccacaagtttag

SEQ ID NO: 947253 - DNA, 599 bp, Homo sapiens
gtcaggagtttgagagcagcctggccaacatggtgaaacctcgtctctgctaaaaatacaaaaattagctgagcgtggtggcatgcacctgtaatcccrgctacttgggaggctgaggcaagagactggcttgaacccaggaggcagaggttgcagtgagctgagatcgtgccactatactccagcctgggtgacaagcaagactccgtctcaaaaaataaaataaaataaaaatttagaaaataaaataatttcacttaacaaggtaatatccataatgcctggaatctaatcaaaattatcaggcattcaaaggagaaggaaaataaggcacacaatgaaaagagggtcattaatacataataaataaaaggcattaaaacagcttttataactggatcccataaattcaggaagctaaaggaacgactgaacatgttaaagtggagatatagaaaacattaaaaaattcaaaggaaacttctagagatgaaaactacaatatctgagattaaaaatatactgaataaatgacggataacctatgcttgaggaaaagttacagtgaggaagctgggtcatttatctgacgtccagga

SEQ ID NO: 947254 - DNA, 561 bp, Homo sapiens
aggggacagtcaattatgtaattatgtattcatctggcactcagtaatcaggacttcacataaggtgaacacagtagctacctgtggagattcctttctttctttctttctttytttttttttttttttttgagacggaatcttgctctgtcaccaggctggagtacagtagaacgatctcagctcactgcaacctccacctcccaggttcaaacaattctcatacctcagcctcctgagtagctgggactacaggcgtgtgccaccaccacacctggctaattttttgtatttttcgtagagacggggtttcaccatgttagccaggatggtctccatctcctgacctcgtgattcacctgcctcagcctcccaaattgagggacaggcgagagccaccgcgcctggccacctgtggagatttctaaccttttacctgtagctacctgcttaggaacaaaaggaaaggcagtggattgcatgatgcagctttcagcttaatttttttccctttcagcacagtgaactggggtccggagtttctattttcctttcacaagc

SEQ ID NO: 947255 - DNA, 615 bp, Homo sapiens
ccactgcaaaaacatgccaaattgtaaagaccatcaatgctaagaagaaactgcatcaactaacaagcaaaataaccagctaacatcataatgacaggatcaaattcacacataataatattaaccttaaatgtaaatgggctaaatgccccaattaaaagacacagactggcaaattggataaagagtcaagacccatcagtgtgctgtattcaggaaatccatctcacatgcacagacactaggctcaaaataaagggatggaagaagatctaccaagaaaatggaaagcaaaaaaaaaaaagcaggggttgcaaccctagtttctgataaaacagactttaaaccaacttccgagaccagctcggtcatagggaccctaacccagcggcgctagaggaattaaagacacacacacagaaatatacaatgtggagtgggatatgggggctgacagccttcaaagctgagagcccagaagagaaatttacccatatatttattgacagcaagccagtgataagcattatttctatagattatagattaactaaaagtattcctaayggaaaacaaagggatgggctctggctaattatctgcagcaggaacatg

SEQ ID NO: 947256 - DNA, 583 bp, Homo sapiens
gtcagaatggtggttacctgtgggaagaaaggaagtagcagtgattgggaggagtataaaggaggctktgaagtgttgacagtgttccaatttctttactgaatgtggttattcacgtttgctttgtgttaatgaactgtatacttgttttgggtattttcctatatgtatgatatacttcataattttaaaaaaaatttgaaatattatgaggtccaagataaaagatatgaaaatccattttaatcactcaaatctccatgtacaggatggttgttgctgttacccaactctttcactcctctctcagctctggaaccaaactgtctgggttcagtctcagctctaccatttagtagctgaggaccttgtgcaaatctgtttgtttcttcaagtataaaacgagaacactgtcattttagaacatttcttccagttttcactcagatagttggtacctatcatatgtgatatattcatatgatggatatgatagtacagacatctactgagtgactgaaaactggaggaagttaagaaatataaagtgcttagaacacagcctggaatatagtaagtaata

SEQ ID NO: 947257 - DNA, 583 bp, Homo sapiens
gtcagaatggtggttacctgtgggaagaaaggaagtagcagtgattgggaggagtataaaggaggctttgaagtgttgacagtgttccaatttctttactgaatgtggttattcacgtttgctttgtgttaatgaactgtatacttgttttgggtattttcctatatgtatgatatacttcataattttaaaaaaaatttgaaatattatgaggtccaagataaaagatatgaaaatccattttaatcactcaaatctccatgtacaggatggttgttgctgttacccaactctttcactcctctctcagctctggaaccaaactgtctgggttcagtctcagctctaccatttagtagctgaggaccttgtgcaaatctgtttgtttcttcaagtataaaacgagaacactgtcattttagaacatttcttccagttttcactcagatagttggtacctatcatatgtgatatattcatatgatggatatgatagtacagacayctactgagtgactgaaaactggaggaagttaagaaatataaagtgcttagaacacagcctggaatatagtaagtaata

SEQ ID NO: 947258 - DNA, 538 bp, Homo sapiens
aaccccatctctactgaaaatacaaaaattagccaggtgtgctggtccatatctgtaatcccagctactcagaaggctgaggcaagagaattgcttgaacccaggagacagaggttgcggtgagccragattgcgccactgcagtccgcagtccggcctgggcgacagagcgagactccgtctcaaaaaaaaaaaaaaaaaaaaaattgtgtcagtagtgagaagagtcagaaatatttggaactggttagtattgatattctgcatagcagccatttttttaagagttcagaaaatctttaaaattatcttttttttccttaaccctcacagcattttgaataagtaataaaaatttttggcattatttctagacctagctataggtaagaatgtggagggctaaaaagaaaaatgacttgtcaaacaaagtgctccaggggaaatctaaacatctaaaacaacaacaacaacaaactcaagataatatttgtccgcatggtagaaaagaaccaaatatgtggacaatggcaaatga

SEQ ID NO: 947259 - DNA, 785 bp, Homo sapiens
gtgtttttttaatgtgcatccccttgacctagcaattcaatcttagaaattaatcctaaggaaataatcatgactgtgtatgagtaattcactccaaggatattcatgttagcattgtttgttttaaaaattggaagcaatgggccgggcacggtggctcacgcctgtaatcccagcactttggactttgggaggccgaggtaggaggatcacttgaggtcaggagttcaagaccagcctggccaacatggtgaaatcccgtctctactaaaaatacaaaaattatccgggtgtggtggcatgtgcctgtaatcccaactacttggaaggctgaggcaggagaatcacttgaactcgggaggcggaggttgcagtgagccgagatcacgtcatcgcactccagcctgggacacaggagagaaacgccgtctcaaaaataaataaataaataaataaataaataaataaataaaaatagaaaacaatggaagcgtttctaatgaggggctgtttactaggtggccgttcattttcattcattcaggtatttattgagcaggcatcatgtgccaggcagtgtattagacattaggcatacagcagccggtgaatgaatgaacaaaatctctgtcctctgggaggggagacaaccagggaaccagtaagcaagtgcaatatccgttgtgggtcagcrggtggtgggggtaagaggagaaggcagcaaaggcaatgctggaggtgagtgccgatggagactagagggaaggtgaggaagtgagtgagct

SEQ ID NO: 947260 - DNA, 789 bp, Homo sapiens
gatcaattccagcacctttttataattccacaaatttacagattggtagaactatctaactgggtctccaaaagaagcttaccttagatggagatatggttcggctgtgtccccacccaaatatcatcttgaattataattcccacaattcccatgtgtcatgggaggaacctggtgggaggtaattgaatcacggggtcaggtctttctcctgctcttcttgcgatagtgaataagtctcatgagatctgatggttttaaaaagaggagttccccatacaagctttctctccttgtccgctgtcatccatgtaagatgtgatttgcacctccttgccttctgccatgattgtgaggcctccctagtcatgtggaactgtaagtccattaaacctctttttcttccgagtctcagttatgtctatcagcagcgtgaaaatgaactaatacagatggtgtcagcttgaggggaaagagcagccagccacagagctaggcctggaatgcagtgcttttagtgttttggcctccgtttcttcatctgtaaatgacaatgaatgatgtctgccatctacatctacaatccatcatggcttcatgagcatgaaggattgttataaggaacaaatgcagaactaggaagaacgaggtaaaaatgaatcctgagcaaactcagcctgaggcttcttgttcatttcctgacaaacacgatccagtggaaagaaactgtactaaggatggacaagtttgggccagatgaacaaaagccstgccagctcagagaatctg

SEQ ID NO: 947261 - DNA, 515 bp, Homo sapiens
cgtggctatacgatgagtcagtagttttgtattcataatcattgtcctttaagatgctacaggttaattcaaaaagacatttaatgttacatgaaggctgtttgctaacatttttcatgcccccaaacaaaaggaaattcacattagagaactgaattcatttgccaacaagaggtctcatccaaaactaaactatatttaataacaacaacaaacattaggacaatttgcaatttagaaagaactaaaacttaggttcaagttctggggtttgctagtaatccatcctgagaggtcaagggagttcatcatggctctttgacttagtttcctcttctgcaaaatgaggagtttgaaaggggtggctttataattatttgttagcaacacccmatttttccccagaactttaatattaaaaagcagatgtaaatataaaatatatgtttatatatataaacaacctcaaatacatattggattataaaataatgaaacaaggctgtttgtgtatc

SEQ ID NO: 947262 - DNA, 515 bp, Homo sapiens
cgtggctatacgatgagtcagtagttttgtattcataatcattgtcctttaagatgctacaggttaattcaaaaagacatttaatgttacatgaaggctgtttgctaacatttttcatgcccccaaacaaaaggaaattcacattagagaactgaattcatttgccaacaagaggtctcatccaaaactaaactatatttaataacaacaacaaacattaggacaatttgcaatttagaaagaactaaaacttaggttcaagttctggggtttgctagtaatccatcctgagaggtcaagggagttcatcatggctctttgacttagtttcctcttctgcaaaatgaggagtttgaaaggggtggctttataattatttgttagcaacacccaatttttccccagamctttaatattaaaaagcagatgtaaatataaaatatatgtttatatatataaacaacctcaaatacatattggattataaaataatgaaacaaggctgtttgtgtatc

SEQ ID NO: 947263 - DNA, 668 bp, Homo sapiens
ccctgagctctgcctcctgtcagatcagtggaggcatcagattctgatagaagcacaaactctattgtgagctgtgcaygtgagggatctaggctgtgcactccttatgagaatctaatgcctgatgatttgtcactgtctcccatcatccccagagaggaccatctagttgcaggaaaacaagctcagctcccactgattctaaatgtaatgtgcctgaatcatcctgaaaccatcactcctccccaacctctccaacctccccaaccacaaccccttccaaattgtcttccacaaaactggtccctagtgccaaaaaggctgggggctgctgttctaaggtgtcttgtggtctgactgtctgtgatcactgccttttccctgcaacctcacctcccacccccaccccttcattcactctacaaatatttattgagtcctcctgtgaatcaggcgcagtttaggcccttgagacacttcagtgaagctacccaaatatgtacacaagccctgcacaggaacttttattttttatttatttattttgttttgttttgttttttgagacggagtttcactcttgtcacccaggctagagtgcagtggggcattcctggctcactgcattcaacctctcaggttgaagtgattctccttcctcagcctcc

SEQ ID NO: 947264 - DNA, 698 bp, Homo sapiens
tgtccttctccagataggaagaaaggggaggtggtgatgagcccatggacccaagtttatgcctattaggaaaagcgaagggctccccagactctcagcagatttgcactgatgtctcttctgccaaggcagtgtacaaggccacccctggctacagggcaggctaggacaggggtatttgtgtggggctagacataggtttcccagaacaaaactgagattataccagcagaaacacaggagaggggatgggcattaggaaggtgggtgggatatcgcaaaggggttaaatctatctgatctgtttccttccagggtggttgtgaggattagacatttgtgaaatgtgctatggggttgtattagtccattctcacactgctataaaaagctgcctgagactgagtcatttataaacaaaagagggttaattgactcatagctctgcatggctggggaggtttcagaaaacttacaatcatggtggaaggcaaaggggaagcaagtactttcttcacaaggcagcaggagagacaggaagtaccacactttaaaaccaccagctctggtgagaactcactcactatcacgagaccagcatggggaaaatcacccccatgatccaatcacttcccaccaggtccctccgtcaacatrtggggattacaatttgagatgagatttcggtggggaagcag

SEQ ID NO: 947265 - DNA, 574 bp, Homo sapiens
ttaaatattccctccaacaatgtatgaaggcttcatttttttwatgtcctcactaatacttgttcttttttattttattccaataattgtaaagtcaatataatgttcatatcgtctaccactgtttggctcttcgttttatacctcatcttggagtctctcagtcactgtgtagatataaatatataccctcctgtggtggagttctcccagaatgaggcaggggctcatcttcactccagcctcattgctcacctctgcatgggcataaccttctccatctctaccttccttgagcccttttgccatcagcaaggaattactccatactgtagtgactctatagtttggctactgggttccaaactttatacctctaggcaataccctcaaacttaggacctgattttttttttttaactttcttttcttctggtcttgcactactgacctctgattatttcctggctcacttagtaggataatgcatatgatattccaaaccaagaacttattgctaagtgtaacatttaacaatagtgggcagatcatgaggtcaggagatcaagactat

SEQ ID NO: 947266 - DNA, 574 bp, Homo sapiens
ttaaatattccctccaacaatgtatgaaggcttcatttttttaatgtcctcactaatacttgttcttttttattttattccaataattgtaaagtcaatataatgttcatatygtctaccactgtttggctcttcgttttatacctcatcttggagtctctcagtcactgtgtagatataaatatataccctcctgtggtggagttctcccagaatgaggcaggggctcatcttcactccagcctcattgctcacctctgcatgggcataaccttctccatctctaccttccttgagcccttttgccatcagcaaggaattactccatactgtagtgactctatagtttggctactgggttccaaactttatacctctaggcaataccctcaaacttaggacctgattttttttttttaactttcttttcttctggtcttgcactactgacctctgattatttcctggctcacttagtaggataatgcatatgatattccaaaccaagaacttattgctaagtgtaacatttaacaatagtgggcagatcatgaggtcaggagatcaagactat

SEQ ID NO: 947267 - DNA, 614 bp, Homo sapiens
gcctagggacaatcaagagaacggacgcagagaagagtaggggctgggcgctggccatatccggggggagagaagccacccttagcaggtgggcagagcctatgaggactctcatagtgttcccagactgaaccaagggtcaggctgcttattctcatggcccaataacaagatgcaggtgaaatgggaaagaagggagtttatttctgtaactgggtacagggagaaggccaggaaaatatcaccagaccaactcaaaattacaaagttttccaaagcttatacaccttctaagctatatgtctacgtgtaagtgtgcattcatctaaagacatatgtgattaacttcttttaatctataactgagatctgagtcctgaagaccttcctctggagcctcagtaaatttacttaatctaatgggtccaggtgctgcggtgattacccttatcatgtctcctgctaaatcatggaggtttgaggagttcctttagtccccaataaagctwgtttgtggaggtctggggagttccttcagacccccaataaaacttgtttaatcctaaagaggtcctgttaagaattccttcattatcttgtcatgcttcaaggtc

SEQ ID NO: 947268 - DNA, 631 bp, Homo sapiens
gatctataagcccctaactggggctgctgcctttttttcagagatgccctgcctggagaggaagaatctagagacgcagtctggctacagtggctttgccaagctgtggtgggctccatgcagttcgaacttccctgaggctttgtttacactgtgaggggaaaaccgcctactcaagcctcagtaatggcggacgcccctcccccaccaagcttgagtgtcccaggtggacttcagactgctgtgctggcagtgagaattttaagccagtggatcttagctcactgggctccgtgggggatctgctaagctagaccacttggctccctggcttcagtctcccttccaggggagtaaatggttctgtctcactggcattccaggcaccactggggtatgaaaaaaaaaaaacaaaaaactcctgcagctaacttggtatctgcccaattggccacccagttttgtgcttgaaacccagggccctggtggcataggcaccctagggaatctcctggtctgtaggttgtgaagaccatggaaaaarccatgggttggaatgcaccattcctcatggcactgtccctcatggattcccttagctaagggagggagttccttgaccccttgcact

SEQ ID NO: 947269 - DNA, 536 bp, Homo sapiens
cctcctcagattttgagcaatttcagcaaaatgagattaagtgtctcttaagtcaatattttgcaggacaactggcatatacatgtattgcattgtgttatttctaagaattgtgtcaaatttcaggctttaccctataaagtataaagtactaataccaaaaatttatttggatttttgttattttttttctagataattgtttcatagatatagcccaagtgatacatgtgtatacaaataagtatgtgtatatgcaaatatatagaaaactcccataaatctaatatgcatatgtttgaggtaagaatatattgacagaggagttttattcccctaaattagaacaatcacttacacatcacaaagcttagagcctttgaaatgctacatttgtgttttattattccatttgttacccaaaactagatattttagaaaatgcttgttctatcgtttttgtarccataaatcctctagcaaattatcttgtcattataaattttattttaaatgattctctgaaagacacatga

SEQ ID NO: 947270 - DNA, 634 bp, Homo sapiens
aaaacttccccaactgaaattaaaagacaaaaaataaatttttacagaaaaacatccaagaactgtaagataatttcaaatgatataaatacatgtaaatagaatcctaggagaggaaaaagagaatagagcaaataaagaaaagaaaggtttgaagtaataatggctaagaattttctaaaattagtgacagacactgttttggtgtctttgttttactataaaagaatacctaaggtatgtgcagagatcacatggtgacacagaaagtaagagagagagggaagggagatgccagccgtttttcaaacaactaactctcatggaaatgaacatgagtgagtactcactcaactgccccactgcaagcccagggagggcattaatttattcataagggctccaactccatgacccaaacacctcctattaggcctcaccactggggatcaaattttaacgtgaggttttgagtagtcaaatattctgcattctactcctggcccctcaatactcatgttcttctcatattgtaaaatataatcatctcttcccaatagtcccaactcttaactgcttgtagcattaacttaaaagtccaaagtytcatttgagtccaaggcaggtttcttac

SEQ ID NO: 947271 - DNA, 553 bp, Homo sapiens
tataaacccaagcattcaagcagggagcggcaaccccctttgggtcccctcccaaagctctgttttcactctattaaattgtatgagagctctgttttcactctattaaatcttgcaaatgcacactmttctggtccgtgtttgttatggctcgagctgagcttttgctcaccatccaccactgctgttctctgccgtcccagactcgctgttgacttccacctctccagatccggcagggtgtccactgtgctcctgatccagagaggcgcccattgctgctcccgattgggctaaaggctcgccattgttcctgcatggctaagtgcccaggtttatcctaattgagctgaacactagttgctgggttccacagttctcttctgtaacccacagcttctaatagagctataacactcaccgcatggcccaaggttccattccttggaatccttgaggccaagaaccccaggtcagagaacaaaaggcttgctgccatttggggagtggcccttccccatcttgggagcggtccgccatatcttgggagctc

SEQ ID NO: 947272 - DNA, 613 bp, Homo sapiens
attttccaaatagacaacggacatttatgaaaaactgacagttaatatcatacataatggttaaagatttaaaactttrcccctaagatcaagaacaagacaagaatgtcttctattgacactttcattcaaccgtgtactgaaggttctagccaggacaattaggcagaaaaataaaattaaaagcatctaaattgaaaatgaagaagtaaaactatctctgtttgcagataacataatcttgaatagagaaaatcctaaggggcttactaaaaaactattagaattaattatcaagttttgaaaggttgcaggatacaagatcaatatataaaaatcagttgtatttttatacactagcaatgtgcattccaaaaatgaaattaagaagacaagtccatttacaataacagttacaaagaatacaatatttaggtataaatttaacaaaagatatacaaggcttgtacacaaaagctataaaatatttttgaaagagattgacaaagagaaataaatggaaagatatttcatgttcttggaccagaagagttaagattattaggatggcagtaccgtcaaaattgagctgcagcttcaatacaatctttat

SEQ ID NO: 947273 - DNA, 613 bp, Homo sapiens
attttccaaatagacaacggacatttatgaaaaactgacagttaatatcatacataatggttaaagatttaaaactttacccctaagatcaagaacaagacaagaatgtcttctattgacactttcattcaaccgtgtactgaaggttctagccaggacaattaggcagaaaaataaaattaaaagcatctaaattgaaaatgaagaagtaaaactatctctgtttgcagataacataatcttgaatagagaaaatcctaaggggcttactaaaaaactattagaattaattatcaagttttgaaaggttgcaggatacaagatcaatatataaaaatcagttgtatttttatacactagcaatgtgcattccaaaaatgaaattaagaagacaagtccatttacaataacagttacaaagaatacaatatttaggtataaatttaacaaaagatatacaaggcttgtacacaaaagctayaaaatatttttgaaagagattgacaaagagaaataaatggaaagatatttcatgttcttggaccagaagagttaagattattaggatggcagtaccgtcaaaattgagctgcagcttcaatacaatctttat

SEQ ID NO: 947274 - DNA, 725 bp, Homo sapiens
ggggtgtcacctcacccaggaagcacaaggggtcagggaactacctcctctacccaagggaagccatgagggactgtacctgaggaacggtgcactccrgcccagatactgcacttttcccatggtctttgaaacctgcagaccaggagattccctccggtgcctacgccactggggccctgggtgtcaagcacaaaactgggcagccatttgggcagacactgaactagctgcaggagttttattttccataccccagtggtgcctggaatgccagcaaggcagaaccattcactcccctggaaggggggctgaagccagggagccaagtggtctagcttggcgggtcccacccccacggagcccagcaagctaagattcactggcttgaaatcctcattgcaagcacagcagtctgaggtcgacctgggacactcgagcttggagggaggagggccgtctgccattgctgaagcttgagtaggcattttaccctcacagtctaaacaaagctgcctgggagttcgaattgggtagagcccaccacctcagctcagcaaggccactctggccagactgcctctctagattcctcctctctgggcagggcaactctaaaaaaaaggcagtcagggactaatagataaaaccccatctccctgggacagagcacctgtgggaaggggtggatatgggagcagcttcagcagacttaaatatctctg

SEQ ID NO: 947275 - DNA, 565 bp, Homo sapiens
tgcatatatatgtgtgtgttgtgtgtgttatgcgtgtatatatatgtgttatgtgtgtatatatatatgtgtgtrtgtgtcatatgtgttagagagttaaattatcatcttccagaggaagaaggtaacaataatgtcaaagttggggggtggaaatcaacaattagaagcagaattttcttttagaaaatatggagttaaatgctgtaagtaaaaattaattttaaaagggtgataaggagccctgggttaggataatggctgccggagatgaaaatcaggagatggagttcagacatgctcaggaagctggatttgggggctgattacgtggacagcaagggaaagggaagcataaaacacacataaacaaaagaaatcactctatcgttttcagcctgtgtttgaataatgacagtggttggggaaaaaagcaaagcttgagaatgttagaggcttgcacggaagatctagataaaggtcacctcagcagtgcccggtggcgggggcgcccctctgcccgcccctctcctgggcctctggggttctgaagtagggtattctg

SEQ ID NO: 947276 - DNA, 580 bp, Homo sapiens
aaggatggcagtttttgcatgactcaagttccaagcttaattttcctttgtcatagtgagtttggggtcctgagattttattttcctttcacactttctaccaatataaagcttcctcatagatgccttcttttttcaaacattaacaaccctcgtgggttttctctcattttaagtacagaaaacataatactgtacaataattttatctgtcttaaatacaagactgcttatgattcacttaaaataaaaaaaatggctccacatttctggcttttagttggattatgatttcaaccaaaaatcagagctttttaaccttgagtttgagtttcacacacccagtaaagtggaaatatagactttttcttaggacagtgttatgacactcaaaagaatcgtggccaaacttaattacctgttgcaaacatcattgcagttttttactgaactatcagagactttcttgtgcctatcacagtgtatatgctaaatacatattacagggccaggcacggtggcccatgcctataatcccaatgcttmgacaggccaaagcaggagcattgcttgaggccaa

SEQ ID NO: 947277 - DNA, 588 bp, Homo sapiens
gggcaagagggaggacttcccagattgaatcaataatattaacagtatcaatctgccactaataattatttaagaaaagtatttttctgctttcagttttatttattaaatagtttctrctagcctaatgttaaagtctgccaactagttccttcaagttaatcacattcacttttgattccctcttaacacattaagatattttataattctgtgagtttaaaatccaatgcaaattcattgtggtcaggcaagatgcaagaccagtcaggcaaatacacttcccttattttttatgggtctgaaatatcttttgtcttgggagatgtattattatacaaaagatctatttggcaatttatagtttgctttttatctattcaattgttccctggtattcttagaacagaaatgcgaaccttttaagaataataacatgccaattacctttaattactctctagctctttcagttaaacaaaaaaaacctctcattttcggtttagtttgtaactgaatagaacattttatatctaaacccttaatggaaaggctttcctatttcccacaattttcttttctatttaa

SEQ ID NO: 947278 - DNA, 588 bp, Homo sapiens
gggcaagagggaggacttcccagattgaatcaataatattaacagtatcaatctgccactaataattatttaagaaaagtatttttctgctttcagttttatttattaaatagtttctgctagcctaatgttaaagtctgccaactagttccttcaagttaatcacattcacttttgattccctcttaacacattaagatattttataattctgtgagtttaaaatccaatgcaaattcattgtggtcaggcaagatgcaagaccagtcaggcaaatacacttcccttattttttatgggtctgaaatatcttttgtcttgggagatgtattattatacaaaagatctatttggcaatttatagtttgctttttatctattcaattgttccctggtattcttagaacagaaatgcgaaccttttaagaataataacatgccaattacctttaattactctctagctctttcagttaaacaaaaaaaacctctcattttmggtttagtttgtaactgaatagaacattttatatctaaacccttaatggaaaggctttcctatttcccacaattttcttttctatttaa

SEQ ID NO: 947279 - DNA, 637 bp, Homo sapiens
agaattttactaacaatatatcgttaacattctaaaatatttttgtataatctagactttggtgggaacaaaccttggaacaaactggttccaaggtttcttggaggggagtggtgaaaaagaaatggggaaatttatgttttttgaatttgtcaacttattgaggaggggtaagtagagaaattgactaatttgctaagacaatagaaggcatctttatttcaaatagtacttgaaaattatgcatctaattgtgaggtcaaaaaattgaagataccccttaataaagaaataaaggatagatcttccaaaataacaaggatgtagtggaatgaataaaaatgtatcaagtcagcagcaataaggtaaaaatattagaaaagtaatgttaaatagttgtcagatggaaggatatatttgagcaaatattttgttaaatagatgacaaaaaggtaatatttatacattacatatatgtgtttgtatgtatgtatgtatgtatgtatgtatttattttgagatatagtcttgcctgtcacccaggctggtatgcagtggcacgatctcggctcactgcaacctccgcctcctgggttcasacaattctcctgcctcaacctcccgagtagttggaact

SEQ ID NO: 947280 - DNA, 590 bp, Homo sapiens
tgcacagctagggaaacagcatcttcacaatgcctgggaaaggaggagagatgaagctcactagccacagaaaaacaggcagttaatttttaaagggctccagctctttctctttctcagggggaattgggttttctcacatacaactgagtttctgcttacacattctttaatttcttttaattcctgttccacttggaccagggccagggcatcactgtcctgtaccacccccaggagggtgttccttgcatcctggcccttctagctccagccttggttcaaagggctgcagatagagctcaggtcatggcttcagagggtgcaaactataagccttggtgccatgtggtgttaagcctgcaggtgagcaaagtgcaagagtgaaggaggcttggcattccctgcctaaatttcagaggatgtatgagaaaggctggatgcccagggagaagactatgcacgactggagctctcaaagaggacctcttctagsacagtgccaagtggaaatgtggggttggaggccccactcggggtcctgactaggggggctgcctagtggagctgtgggaggggggctgctgccc

SEQ ID NO: 947281 - DNA, 593 bp, Homo sapiens
caaaatatactaaactgagtggcttacaaatgacagaaatttatttctcacagctctggaggctgggaagtccaagatcaaggcaccagcagattcagtgtctggtgtgggctctctgcttcacagaccacacttcttgttccatcctcacatggtggaagggggtgaacgctgtgtatccttatataagggtactaatcccattcatgatggtggagctttcataacctaatcccttgctaaaggtcccatctcttaaaactattgcattggggattaagtttcaacatttgaatttgaacattcaaaccatagcaagctccaaactggaaataattcaagttttccttcaacaagtgaatgaataaagcaaattgtggtatattcacataatggaatactactccatgataaagaagaatgaactcttggtatacgcaacaagagggacgaacttcaaaataattatggtgagtgtaccaaaaagagtacatattgcattattccaattatataagatgttagaaaattcaatccaatgtctagtaacaaaaaagcrtattagtgacttcctgggcatgagggaggctgag

SEQ ID NO: 947282 - DNA, 710 bp, Homo sapiens
agataatcattgttaaatttttttcactctccgtatatataaatgtacacacacacacacacacacacacamacacacacaaacacacacacacacatgaaacacatccatagagggaaagatgtacacaatacggtgttggtttttaaaagccagtttacatgacagtctgcgtctgcattattttatatctgattttggttaaaacgaaatggactatctaatagaacgtccaacctttggatgggctgccgcccaggaggaagtgagctccctgtcgcaggaggaatgttagccaagactgagcagtcaggtacagaactggaaggtggacctgagccgcagctcttgtctgtttagcacaattgttctcggggtccagcagctaacaggatcaagcattttaagctgtggtcggccttatggaaggaggtgaaggagaggcacactggctcagctctgaggggcctggccctgggtccctccatggtgtggtttgactgtttccccacccaaatctcaccttgaattgtaataatccccacatgtcaagggcggagccaggcggagataattgaatcatggggtcaatttcctccataccgttctcgtggtagtgaataagtctcacaagatctgatggcttcataaataggagttcccctgcccaagctgtcttgcctaccaccatgtaagacatccctttgttc

SEQ ID NO: 947283 - DNA, 580 bp, Homo sapiens
ggatgaggtttttgtgaggacttttctgtagatgatgttgctgttgctttctgtttgtttgtttttctctcaatggtcagttccctcttctgcaaggctgctgcagtttgctggggattcacttcaggccctattcatctggttgcttcactcctgcacctggagatgtcactcaagggggctagaaaacagcaaagatgggtgcctactcctgcccctgggatctctgaccttgaggggcactgacctgatgccagtaagaacattcctatacaggatgtctgacagcccctgttagagggtctcacccagttgggtggcatgggtagtaggacccatttaatgaagcactttgttccttggtggaggggttgtgatttgctaggtggaaacccgctcgtctgggctacacagatttctcaggactagcaggaggaaagactaagtctgctggtctgsagagactgcagccaccctacctctaagggttctggtccagcgagatcagagtccagctcgagcccctggctggagttgttggagttcatgcagggaggccccgcccagtgaagagggatgg

SEQ ID NO: 947284 - DNA, 589 bp, Homo sapiens
ttctaatgtttgttttgttttaarttttctgtaattttataatcaagttaatttttcttaaagaagtaaaatatttctttaaagtttcagccagttctttttaatgtttaagtattattaggtgaattgattatctgaaacatctgaactattggttgctttgttttgtcagtgttagttttattatcttcatatagaaataatatctgagctttagattagaagtattatataaatttataaaaattataaagttcatattgttcaattatgaaaattattattttttctgtattttcaagcatcaaggcctccgaattactcttcttcattgagggagagagaaatttgtgggaggagctgacatttctcccattcttataaaccctggcatatcttcatttgacagtttttgtttctttcgtttctcatatctcattgcagatgaagatctgatcaagcatggctggcctgaagatatctggtaagtaacaattttggttctgccctctgtagatcatcatttcctttcttagacttggccaagcattcaaactagaatcatgctttgtactgtggtttatgggtc

SEQ ID NO: 947285 - DNA, 657 bp, Homo sapiens
agactctcctaaaagcaattccagttttgaaatgttatgtaagcctcactgatgcagagtacataaaataaaataygaacttcagagtttggaagggacattacatgaagaccagggcttcacagtggaagacgattctggcaaggctaggctggttccagggcactgcacggtaccccgaatattttctctttttcagtctgtggttttcatctgctgaccctgcattgtgtcttcaccaagggtcaaaaagcttcaagtctgacagatcagcctttaccacctgaaagatcccggttctcttctgaaatcataagcaaatgttagccttgtctatggatagcaaactgctgatgcagaaaccaaaacaccagcaggagcccaggcagctaaggcctcatccaggcaggatgtgaaatgtcaggccatttgtcttatattttcactgcagtggttacaagatgggattgatgttggaacaaaacacaacactgactttggagaattccttgtgtttttttttcagcgttaaatattgacacccactcaccaggcttgagaactagaaaagctacatggatttctagagtgagcaatgatttcctctggccgccattccttgccaggtcggtgccactcagcacatgccaagggcag

SEQ ID NO: 947286 - DNA, 657 bp, Homo sapiens
agactctcctaaaagcaattccagttttgaaatgttatgtaagcctcactgatgcagagtacataaaataaaatatgaacttcagagtttggaagggayattacatgaagaccagggcttcacagtggaagacgattctggcaaggctaggctggttccagggcactgcacggtaccccgaatattttctctttttcagtctgtggttttcatctgctgaccctgcattgtgtcttcaccaagggtcaaaaagcttcaagtctgacagatcagcctttaccacctgaaagatcccggttctcttctgaaatcataagcaaatgttagccttgtctatggatagcaaactgctgatgcagaaaccaaaacaccagcaggagcccaggcagctaaggcctcatccaggcaggatgtgaaatgtcaggccatttgtcttatattttcactgcagtggttacaagatgggattgatgttggaacaaaacacaacactgactttggagaattccttgtgtttttttttcagcgttaaatattgacacccactcaccaggcttgagaactagaaaagctacatggatttctagagtgagcaatgatttcctctggccgccattccttgccaggtcggtgccactcagcacatgccaagggcag

SEQ ID NO: 947287 - DNA, 636 bp, Homo sapiens
ttcttgtttttgtcaggtttgtcaagatggccgatacacaacagctccagtctacgcatcccagcatgagcgatgcagaagacgggtgatttctgcatttccaactgaggtaccgggttcatctcactgargcttgtcggacagtgggctcaggacagtgggtgaagcccactgagcatgagccgaagcagggcgaggcatcgcctcacccaggaagtgcaagggatcagagaattccctttcctagccaaggaaagctgtgacagatggcacctggaaaattaggtcactcccaccttaatattgcgcttttccagtggtcttagcaaacaacacaccaggagtttatatcccgcgcctggcccagagggtcccacacccacagagtctagctcattgctagcagagcagcctgagatcgaactgcaaggcagcagcaaggctgggagaggagcacccaccattgctgaggcttgagtaggtaaacaaagcggctaggaaacttgaactgggtggagcccactgcagctcaaggaggcctgcctgcctctgtagactccacctctgcagccagggcacagctgaacaaaaggcagcagaaacctctgcagacttaaatgtccctgtctgacagtt

SEQ ID NO: 947288 - DNA, 790 bp, Homo sapiens
ccagcaccttgggaggcagaggtaggtggatcacctgaggtgaagagattgagaccagcctggccaacatggtgaaactccacctctactaaaamtacaaaaattagctggatgtggtggcagacacctgtaattccagctactcgggaggctgaggcaggtgaatcgcttgaacctgggagatagagtttgcaatgagctgaaattgcaccactgcactccaacctgggtgacaagagcgaaactctgtgtcaaaaaaaaaatgtagataacttttttcactgttaggaaaatcaattgtagatattagccatgaatcttttaatctgaatatgagtgtattggggtaggagtaagtctcgttctaattaatttcactaagtaactgtaaataactaggcaaatattaagttccaggcactgggaggtgccaggagtaaaatggaaagcaaagcagacacatggctgcttcactagggagggaagttaacttcaattagcggtcacctaatcaagtgtaataaactgaagcaggtgctacaagggaagaaatgttatctctgagatggaataacaaaggaacatactctaggctacaggcaaggccacaattaattttctgttgttgttcaacaagttccctccagcttaggcaagacccatgacagtcgggtggttgcaaggcaattctgagagacttcacagatgaagggcatgttcccccacaagatctctctcacttcagatgccagccacaactgcaggggctcccagccacctgcattttgga

SEQ ID NO: 947289 - DNA, 603 bp, Homo sapiens
ctcatgtcacccaggctggagtgcagtggcacgatctcggctcactgcaatctccacctcccaagttcaaatgattctcccgccttagcctcccaagtagctgggattacaggtgcccactaccatgcccagctaatttttgcatttttagtagaaacggtttttcaccatgttggccgggctgatctcaaactcctgacctcgtgatccccccgtctcggcctcccaaagtgctcggattacaggtgtgagccaccgcacccggccatattttcagatcttaatgttgatgccccaacaagattttctactagaaagtgtgattgcctatttgggttttcatccaaatcagtctgatgtgagttggaccctgtacatcagctacaactcagtctctgacacattactgggcaaatcaagctaggaaaccacacactggggtgccgagggacaacaaccacaacgtcagccattaacagcatggctgtgggcttcctgctgtactaaaactgaggtgaargcaagggagtacggactgatgtctggaaaagtacagaattggtaactgtcacattatatgcatgtgattgtgtcagacgtcaa

SEQ ID NO: 947290 - DNA, 441 bp, Homo sapiens
ctgggcccacctgctgccctcccatccccatcaactggctcccaccctcaggcttaccaggcttttccaggagatctgacaagctccttcctttttcccatgcactgcctgcactagcatttattatgcacctactgtgtgccaggctctgagtgcttggtgagcaaagtgttctggggaccagggagccggcagtgtccagaagccatggcagggtggccaagctcagtctgtgaatttgcccagcagagaagacagcctgggaaagcccagagagagagcgcctgtggcccaggcaggcacagtgagggctggagaggctggggatgtcggctagggctagagcaggcacggagaggctgccaggccagtctgaccgatggayggcaccagggagctacgaaaggttgtttcgggagagggtgatgtgaatagcctcac

SEQ ID NO: 947291 - DNA, 783 bp, Homo sapiens
ccccgccctgtctggtgaccctgcgggtgctgccccatccagttgcaggtcctgggagcgctggctgtgctgtggctgggctccgtggctcttatctgcctcctgtggcaagtgccccgtcctcccacctggggccaggtgcagcccaaggacgtgcccaggtcctgggagcatggctccagcccagcttgggagcccctggaagcagaggccaggcagcagagggactcctgccagtaagtgagcccatggaggcctgcgggggcaggtctcagtttggggctgctgcctgtgtttctgcccttggatctgcccgtgagataaggggggccctctaccagctcctccaggaaggtgcaggtcaccagggagggccacgaccatatgagctggagtgggggctggggacggggcaggcgtgtggtgctttttgcagcaaacagaggctgccacctgggggctctgacaggctggagaacactgcctgtgctgaggctcaccccctcagtccttccacccctgggggtaatgtcactgtcccctgccgcccctcatccttccctcccacccttctttccctgcggttggggtcctggaatcccaggactgccccggaggaacctgttgggccatcctgcacacatcccctggaaacgggagcttacctgcccctggcccaacctttcccttccaggmcagctctggccaccaccaagggcttccacaccacgaggccaccccagaccccagactccacagctctgctctactctgcccggcttc

SEQ ID NO: 947292 - DNA, 646 bp, Homo sapiens
ggcagtattgctaaccgaagccctgccaagcagttaccagccatgcccccaggatgtccaacaagatggaggcttgatttcacaaccaaaactttgcagggaatatagtgatagtttgtgtatagtcggggagacctagcctaataaaagatcttctaaatgaaaaaacattaaacgttaacttgctgatggggtacagaaggggaaagaaaataaacagtttaaaaatgcctggagaagaacctcttatttttatgcaagtggttcctccaccagggagacaagtttaagcttaattactatcccatagagttaaaccccttggccaggtaagaggaaggctgtgtcagcagcatgtggctgggaaccatccagccagctatgcaggacccttgggccatgcatcccagccgctgcacagaggggaggggtagcaaggagtccctgcttgcctgtccttcttaaaaaaggaaggaaagtgcctttcctccaaccccaacagggtttggggcatgtttcctccatgctcagatgtccaaaratgaaaatgcttaggagcaacagtggagaggttttgagtccccatttcactcactgctattagggccccatgttggacgccaaacatgttgcaggactcttccct

SEQ ID NO: 947293 - DNA, 643 bp, Homo sapiens
aggtgttccagggctttatttgcttcatgggtttttattactgatttaatttggaacttgttattggtctgttcaggttttcactttctttyagttaatttttgagaggttgtgtgtttccaggaatttatccaattcctttagattttctcattcgtggacaaagaggtgttcatattagtctttgaggatattttgcatttctgtgagattggttatactgctatctttcacaacacccacagactcaaagtaaaggaatggagaaagatctaccaagcaaaccaaacacaaaaaaatagaaggagtcactattgttatattagataaaacagactttaaaccaacaacaatcagtaagaacaaagaaaggcattatataatgataaagtgttcaattcaagaagaagacttaactatccaaaatatatacatgcctaacagtgtagcacccagattcctaaaacaagtttttcttgacctatgaaaatatttagacagcacacaataatagtgagggactttaataattgagacagaaaactaacaaagaaattgtgaacttaaacttgtcagttgacaaatgggacctaatagacatctacagaataccacacctaacaaccacagagtatacagactt

SEQ ID NO: 947294 - DNA, 626 bp, Homo sapiens
agtttctcagatatcttccttctaggttttatcttcggatattcacttttaaccattgacctcaatgagctaaaaaaaatccacttgtggaatggacaaaaacagtgtttccaaactcttgaatccaaagaaagttttgtctctgtgagatgaatgtgcaaatcacaaagcagtttctcagaaagcttctttctagtttttatctgaagatatttccttttttcactatagttctcaacatgctcccaaatatgccatcaaatattctgcaaaaacagtgtttctaactgatgaatgaaaaaaagtttacctctatgagttgaatgcattacatcacaaagcggtttctcaggtagctttcttcttgtttttaccctgggatattcattttttcacctgtggcctccatgagctcccaaatgtccattccaagaatttccaaaaagagtttccaaactcctgaatccaaagaaagatttaattctgtgagatgaatgcacacacaatgaaatagtttctcagaaagcttctttgtagtttttayctgaagatatttcttttttcaccataggcctcaatgcactcccacatatcccttcgaagattctaccaaaacagtgtttcca

SEQ ID NO: 947295 - DNA, 563 bp, Homo sapiens
gattctcctgcctcagcctccckagtagctgggatcacaggcgcccgccaccatgctcagctaatttttatatttttattagagacggggtttcaccatgttggccaggatagtcttgaactcttgacctcaggtgatccacccgccttggcctcccaaagtgctgggattacaggtgtgagccaccacaccctgcctagctagaagctttacaagaatacaaaaatatccagcactcaacagggtaaaatgtacaatgcttggcattgaatcaaagaccaaaagggatagaaatatgaccggtataatgaggagaataatcaatcacaaccaactgagaagtgatatagatgttggaattagcaggggacattaaaatatttattataactgtattctatatgttcaggaagttaagtagttacagggaggatattaaaaagacccaagtggagcttcaagaagtgaaagctacaatgtgtgagatgaaaaatacattgcatgaaattgatgaaagatcagacattgagaaaaaaatcaaaaaccttaaaggcttagaaata

SEQ ID NO: 947296 - DNA, 471 bp, Homo sapiens
ttgttactgagggttcaccagggctttacaggccacggtaagggctttggttttgccctaagtgacttgagccattggagggtttttttgttttgttttgttttgttttgtttctgagacagagtctcactctgttgcccaggctggagtgcagtagtgccatctcagctcactgcaacctccacctcccaggttcaagcaattcccctgcctcagcctcctgagtagctgggattacaggcacacgccaccatgcccagcgaattttttgtattttagtagagacggggtttcaccatgctggccaggatagtctccatctcctgaccttgtaatccacccgccttggcctcccaaagtgctgagattacaggtgtgasccaccacgcctggcccattggaggttttgagcagggaagagacatgatgtgacatgttctaaaaggatcactccttatggctattctgtgg

SEQ ID NO: 947297 - DNA, 610 bp, Homo sapiens
aagtgcttgagcccgggaggcgaaggctgcagtgagccgagatcatgccactgcactccagcctaggcaacagagttagaccctatctcaaaacaaacaaacagacaaaaacacccaccaagtattagtatgaattaattttctcaaaaacatatatataaattaataaatttattgttttaaaataaattttataattaaaacttttaatatttaaataaattaattttaaaatatgtatctgttttatgtagataaaatgtaaaaagaaagtaaatgtatgtaaatgtgtgatgaattaggacacatacgtatatttcccagctctatccaatgagacacaccaaaatcagtgacatcctaagagcaataaacacacccagagcccagatcctggtttctaaatattctccaataaaaggaaccaggggctccttggagaacaagtccatcttggctggaacagggaaaatacaagctgatcctggaacaccttgtagtactagcaataggaagtacttaaaaaawttttttttaagtcagagctatgtaacaaaccggaacgttctgcacatgtatcccagaacttaaagtaaaattttacaaatat

SEQ ID NO: 947298 - DNA, 608 bp, Homo sapiens
cctctcaccatgattctgagccctccccagccatgtggaactgtaagtccaattaaacctctttttcttcccagtctcaggtacatctytatcagcagtgtgaaaacagactaattcagtaaattggtaccagtagagtggggtgttgctgaaaacatacccaaaactttggaaggcagttacccagtttgaacagttggaacagtttggaaggctcagaagaagacaggaaaatgtgaccaagtttggaacctcctagagacttgttgaatggctttgacaaaaatgttgatagcgatatgaacaataaggtccaggctgaggtggtctcagatggagatggggagctgttgggaactggagcaaaggtggcttttgttatgttttaacaaagagactggtgacactttgcccctgccctagaaatttgtgaaactttgaacttgagagatatgatttagggtatctggcagaagaaatttctaagcagcaaagcattcaagaggtgacttgggtgctgtgaaacgcattccattttaaaagggaaacagcataaaagttcaaaaatttgcagcctgaccatgtattagaatagaaaaacccatttt

SEQ ID NO: 947299 - DNA, 608 bp, Homo sapiens
cctctcaccatgattctgagccctccccagccatgtggaactgtaagtccaattaaacctctttttcttcccagtctcaggtacatctctatcagcagtgtgaaaacagactaattcagtaaattggtaccagtagagtggggtgttgctgaaaacatacccaaaactttggaaggcagttacccagtttgaacagttggaacagtttggaaggctcagaagaagacaggaaaatgtgaccaagtttggaacctcctagagacttgttgaatggctttgacaaaaatgttgatagcgatatgaacaataaggtccaggctgaggtggtctcagatggagatggggagctgttgggaactggagcaaaggtggcttttgttatgttttaacaaagagactggtgacactttgcccctgccctagaaatttgtgaaactttgaacttgagagatatgatttagggtatctggcagaagaaatttctaagcagcaaagcattcaagaggtgacttgggtgctgtgaaacrcattccattttaaaagggaaacagcataaaagttcaaaaatttgcagcctgaccatgtattagaatagaaaaacccatttt

SEQ ID NO: 947300 - DNA, 748 bp, Homo sapiens
acatattttaaatctctatgtgagacccaaaaaaccattattacttagaatttttacagtcaatttttattcagatttacctccagcaatactccttgccaccgctccttattccctgcacgatcatgctttacctaggatcattttcttttgccaaaagaactccttttagtgtttcctttggtgcaattctgctggtaattaattgcctcagtttttttttttgtttttttgtttgttgttggtataaaaataattttatttctccttcattagaagtagaattctgggttggtggatatttcctttctgtaccttgcagatgtcaatccactgtcttgtagcttccattatttctgctgagaggctgctttcagtcttatattgctcctttgaaggtggaatgtctttcttctctggctgcttttaagactttctcttgtctttggttcccagcagtttgatgacagcatatataagttttctttgtgtttatcacatttgggtccataactcttctttacatctgtggcttgatgtcagttttggaaaacctccagtgactatctactaaaatattgcttcaattcctctgccttttgactttcctgaagatactcyaattatgtatgctagacctgccatgtcatacagcttgtacattctttctggtgttttccgttcttttgttcttctctgtatatccagttaaatacttttttctgtagaaattttggttaatttatta

SEQ ID NO: 947301 - DNA, 590 bp, Homo sapiens
accaccatgcccagctaatttttgcattttttgtagagacagggttwtactgtgttgcctaggctggtctagaactcctgggctcaagcagcacgcccccatcagcctcctaaagtgctgggattacaggtatgagccgagaaggctgactgttttaaaaaatatttcctggatataagtcctttgtcagatacgtgccttgcaaatatttttttctagtctgtacttattttttcatcttctaattagagcttttcacagaggaaaagttttttattttgatgatgttcaatgtatatacttttaaagttttatggataatggttttggtattagtcctaaaaacccttctccacgcactagttcctaaagaatcccttacattttttcttaagttttatacttttacatttacatttaaacctgtgacccattttgagttaattttttagtaaggtatgaaatttatttttccttttctttttgcctatggttatctcatggctcctgcaccattggttgaaaaaactattttattacattgaattgtttttgctgcagcattgtgtagttttcaacgtatctatctt

SEQ ID NO: 947302 - DNA, 665 bp, Homo sapiens
tcctttattttcctctgcagttgtcccttgtgtgtgaccctccttcaaggcccttggcttccgcagcttgattctgcactccragtccattcaccttctcccatccaatagcatccaaccccgctgctactgctgccaacctggccttgggagcaatgaggacgaggaagggacaagaccccttttaggccagaactgccttcagatcagccacgctccatgggactgtacctctgccctggaggctggagaggtcagtggctgcagactgtctcaaggagcccctggccctgcccacctagccaggggtgcagccttgccagagaagcagagaagcgtctgtggctgggtgggtgatattgaaagattcctttcaccagggtggaagccaggatctgaggcgtgatggaatgtggacagtgaggcagtgacagcgccacaaggcaggagtcatctccaggcacgtccttggcctggagcccatagggacaagctcctggtggtgcctcactttgccatcctctctaagccgcagaccttgaatggaatcagtgctcaagagtctaattgggcccactctgaggatgcctgcgggaatatcagcttttaccgcaccacactgcactttacagtgtgggagggcctgccccacgcaccacctcacc

SEQ ID NO: 947303 - DNA, 598 bp, Homo sapiens
tgggttggcactgtcctgtaaggaagagccttcccttctcttcagtcagcacagaatcatggacgcctatattatgcagtagtttgtagtctctctctcttttttttttgttttttgagacagagtcttgctctattgcaacctctatctcctggggtctggtgattttcgtgcctcagcctcctgagtaactgggactacaagcacatgccaccacacccgtctaattttttaaaaagtatttcttgtagagacaggatatccctatgttgcccaggctggtcttgaactcctggctcaagcgatcctcctgtcttggcctcccaaagtactgggagcacaggtgtgggccactgcacctggccatctggtcatttttatttggatgctccgattgtcccagacttggccaatgggagccccttcaggctggctcccacatctttatatacacacgtatgaagagcccacactgacatctccagtgcctcggggctcttttcagcctttcctctttccatatttgtaattctcatctccagcagtgagaaacctggctcccattatcctcaatrtatttgcttgattttttatccac

SEQ ID NO: 947304 - DNA, 621 bp, Homo sapiens
ctacattcccaagaaggtccatttccccacagtctcaccaggctgcaggattcttcctgtcaggtaagaagcctgtcttggggcaattgttaagtttgcttttctgttayagagtgagtttgagcgtgttttcaaaagctgaagatcatttacacagcctttcctgcaaacactgtttttttcctttgcctgtttttcttatcagtttataggttccttgtatatgtgaaggaggttggttccttgtctgtgatgatttgcaaatgtttttccatgcatcttttatttttgtttatgggcttttgccacatggaggctttgtgtttttctgtagttgagtagtctttttgtggcttctggtttggaaagcacatagagacaccaggacttgatgattgtaacagtcaggggcagctacattccttggcctttcactgcggctcacggtctggtatgggccccctgtacgtcctctccccattgtacagaggagaaaactgaggctcagtcacttgcccagagcacaccgccaaagtcacagatagtctctgccactcccctgcctccaccaccgtgggggaatttggcacctgctccctagtgggctctcctccccaggat

SEQ ID NO: 947305 - DNA, 749 bp, Homo sapiens
tcagcatcatcacggaacttgttagaaatgcagaaagccagacccaccccagacctacagacagaatctgcagttcaccaagaccccaggggctcccaaggcacattcaagtttaagaagccctgttccaaygcaatgccctaaagagtctgcaatgggcctccactctcctaaaaacctcttctcaggaagcagtgtgctctgggactcttagtctttggtgagactctgcatcacagcgccactctctgaggagaatgcacattaaaacacttgtagaactataatacctaacatttaccaacttctgtgccagacactggtctaaggatttcacgtctgtttctgtagctcatccttctaaccactctgtgaagtgggagctcgtactctcatcccctcccctggggtacaaataaggacatggtgctgagttacccagccagccagccagcaataggtccaagcagatgctgcctctctggaatgttttgcccagatggagagattttaaggctcagagaaagatgggtcagtgtttccgaatgagggagcagcttggtgaaatacactctggacaggcagcggggatgactgggttccagagcttgctcagctactgggaccttgtataaataactcactagaccacctggaacctcacttttcttatctgtgtatggagtgatctgcaagctcccctccagctctgacgtccctcgggtccggacgtgccttacgtatgatcg

SEQ ID NO: 947306 - DNA, 579 bp, Homo sapiens
aatcattattctactttctacctccatgagatcaattttttaagttcccacataygagtgagaacatgcaatatttgtctttctgtgcctggtttatttcacttaacataatgacccccagttccatctatattgctgcaaatgacaggatatccctttttatggctgaataatattccactgtgtgttaagtaccacattttctttatccattcttctgtcgatggacacttcagttgattccacatcttggctattgtgatgtttgctgcaatacacacgggagtgcagctatttcttccacatagtgatttcctttcttttggatatatacacacagccgtaggattgctggatcgtatggtagctctattttcagtgttttgaggaaccttcagactgctttccatagtggttgcactaaatatacattcctctcaacagtgtaccactgttatccttcttccgcagccttgccattatctgctattttttgtcattttgataacagacattttaactaaggtgagatagtatctcattgtggttttgacttgcatttccctgataattagtgat

SEQ ID NO: 947307 - DNA, 625 bp, Homo sapiens
tttaacattgtcaagaaacctctggttctcgcaactttcctttttctaactttttagtgtgyacccacttaaacatttctacttgtaatggttttaaaggaaagtaggatatttatatatttctttagtataacatttgtttaggtattgagattgtgtaagcataatagttcttccttttctgtgtatttgcttttatctagtaggggcctttatacaagagagaggttggtttgtttcctgtttgttttgaaattgtgatgttactgactgtaccttgcttaggcccatttgcattttcaaagctgtcatttactaattgagcttgccttgaagaatctggggttaggaggaagataaagtagtgatacatgacagtgaaaatgctttatgctaataaattttattttcctttattaaaaaaataggataaaaagtcagtagaaagcacttgcctttgttttgcacgcctagtggacaacttccagcatgaggaggtaagtgtttagtctttggtagtatttttatgaggttgttgaattgctgaatcttgatgtaataattcctttattcttgtgtttgtgaagaatttactccagcaggttgcttccaaagatctgcttac

SEQ ID NO: 947308 - DNA, 704 bp, Homo sapiens
actgataccctttcttccagttgatcgaatcggctactgaggcttgtacatgcatcacgtagttcttgtgccttggttttcagctccatcaggtcctttaaggacttctctgcattggttattctagttagccattcgtctcattttttttcaaggtttttaactttgccatggttcctacttcctcctttagctcagagtagtttgatcgtctgaagccttcttctctcaactcatcaaagtcattctctgtccagctttgttccattgctggtgaggagctgtgttcctttggaggaagagaggtgctctgatttttagagttttgtttttctgctctgttttttccctatctttatggttttatctacctttggtctttgatgatggtgatgtacagatggggttttggtttggatgtcctttctgtttgttagttttccttctaacagtcaggaccatcatctgcaggtctgttggagtttgctggaggtcctctctagaccctgtttgcttgggtatcagcagcagaggctgcagaacagcagatattggtgaacagcaaaagttgctgcctgatcgttcctttggaagttttgtctcagaggagtacccggccgtgtgaggtgtcagtctgtcrctactgggtgcctcccagttaggctctcgggggtcaggcacccacttgaggaggcagtctgtct

SEQ ID NO: 947309 - DNA, 608 bp, Homo sapiens
ctctttgtactctttctctttatttctcagactggccaamacttagggaaaatagaaagaacctatgttgaaatattgggggatggttcccccaataattcttctcaaggtgacttataatcagctacagcccagggcttacttcttttaaggagttcatgaaaaggacttttgaacactggtttcttataactttatagattatgccattggattagagagaaaacttccgggactctaattaaaaggctaatgtgttcataaggattgctaacccaacatgaagcagagcagcagttgattttatggattaaactgatggagaactaaaatcattttaatggctttgttgttattgttgttgtttgaaccactgctgactcttcagactctggagaactgttttcctgctgagctatttacaacctttaatgcttgagtagagtatactcttgtaaacagaatttgggacatatttctctctctctgcctaatttatccagaatttgtaaactgtttgtgaatattcttaattcatggcaatgtttttggctgtaagagttcagtaagaatccgtttttgttttgttttgttttgttaaacaatgg

SEQ ID NO: 947310 - DNA, 603 bp, Homo sapiens
aagctatggtgaaaggaagatgagaatgtgctaatggatttgccagcatggtggtcattggtgacattgacaaagatagttttggtggattgggggaagaacctcagcttggatggggttcaggagagattgcagggtgaaatagtagagacagaatggacactttggggagtttaaccacaaaatcctctgagagaggctcagaaggaacaactctcagggccccacagtgataaggtaagttcttaacacatcccttgaggccacctccagagactcgttccttcccttgaaaatgccaatctaagccatcgtaagccacctgtcccatgggagagcattaaagcaaaaaccctaattatcaaaggagaaagaattttagtcggtgcaaacaggataaataccattacttttcccaagtgtgcattttctgaacccggaatattggggcccaccaaaaggctgcaacaattttctaggttccaggtcagggtttttctcttctgtcaactccttgctgcctccatcttccagtgcccaagtgcccttctttcsctactctccctccttcccctaaagctgctcagcactggctcagaacca

SEQ ID NO: 947311 - DNA, 760 bp, Homo sapiens
agctgctcactgtcaatccctaaaggggacccagaggatgccaggaatggggatgggggcagcctggggagcagcccctccctctctgcactgcagatgctaaaccctgctgggaatcaagggggtctcacaccccactgtcactctggttaatgagcaatttgctggaaatcaactcctctgcctttgctctagcctattatctagcaaatgaataatttttgatcattattgacaaatttctgaagcagcattattggagtgtttagtgactcggagcttacactgtatgatggcctgttactcaacggcagctctggggtagctttctgctgcaaagtcaactttaatgggcctcaaagcatctgccacaggaaatgacaatacagcctttgtgtatgtgcctccacctgccccaccaaaccaggtaaattgatgccacagtggaggacccatgtgcttatttggaatgagaataaggtggactggtagaattatctgggcgggaaaagtagggtttagtaaagcctttaattaggtagtgctctgtgccaccaagtccattatgatgagtcaaacacacccctgtccacagagtgaagccaaggagatagttggtgtcagggctccctgacagcatcyctttctgaagacatgcaccttaactcctaaactttgacccctgagcagcaggtggtcttaaagaagacactcggccagacgcggtggctcacgcctgtaatcccagcactttgggagg

SEQ ID NO: 947312 - DNA, 764 bp, Homo sapiens
gccagccttgctcaaccctgagggctcctggattcacaagctgtaagttaatggaggattggaagataagttcctgggaagtggagaattaagttctatatatgcagaaatggatccccatccccacaccattgttagaggagttcttgtcctgcatccaggaagaatgacaaaagcagacaagtgaagggtgaagaacatgagttttaatgttagaacgactcacagaaatgggtagttcctctctgtaggccggtcatccagtccagtgttcagcgtcttagcaaagagacctccctggagaaagtgactcatctctgcaagaaagtcattctgacctctctgcaggtctctgaagttctcagcaaaaaaggactgctctgcagcttgtcgtcccaccgctggaatcccactcccatcatctcgccacctttgtcgtcctcttgctgtcttctgccttgcgctggctgagcccagggcttttatggaactcaaaggggaggaagtgcgtgctgattggtccacgggcagccatgggcgggccagaagaggcactacgagttcccactccagtccgtgggactggaagcccagcccccagccttcaggccctccctggcctgagggtggggcmtttctggggaccccgcccgctttctgcccaggaatcaatccgcctcctgctgtggttcatggacccggggcttggcccaacccttctctgagatgggagtgggtgctgggagctgagagagaccaggcag

SEQ ID NO: 947313 - DNA, 598 bp, Homo sapiens
agatacttttctgtttagccaattctattatttagcataactctcacaagataatttaaagtctattgtgtatctatagcctttaaagtagaatttgctgtagaacctattgtgagggtracatttcttattattgcgtcctttattctaaacgatggaaaaaggacctaacaaatgatgtactttagaagagtgaaggcctcctgacaatgttctctttaatccatgatgtgggttgagaggatttttgactgattatgaggcaatgcttgtgccacctgtttctcacccatattgggccttcatcctttatctattaaaatataagtttaagccaggcatggtagctcaggtctgtaatcccaacactttgggaggccaaggtgggcagatcatgaggtcaagagatcaagaccatcctagccaacatggtgaaatcctgtctttactaaaaatacaaaaattagctgggcgtggtggtgtgtgtctgtagtcccagctacttgggaggctgaggcaggagaatcgcttgaacccgggtgacggagcttgcagtgagctgagatcatgctgctgcactccagtctgggtgacagag

SEQ ID NO: 947314 - DNA, 607 bp, Homo sapiens
atgtgggaaagtttggaacttcctagggacttggagggctcagaagaagacaggaagatgtgggaaagtttggagcttcctagaaatttgttgaattgctttgactaaaatgttgatagtgatatggacaataaagtccaggctgaggtggactcaaatggagatgaggaacttcttgggaactggagtaaaggtcactcttgttatgcaaagagactggcagcattttgcccctgccctagagatatgtggaaccttgaacttgagagagatgatttagggtatctggcagaagaaatttctaagcagcaaagtgttcaagagaaagcagagcataaaattttggaaaatttgcagcctgctgacatgatagaaaagaaaaccccattttctggggagacattcaagcctgctgtagaaatttgcataagtaatgagaagccaaatgttaatcaccaagacaatgtggaaaatgtctccaaggcaagtcagagaccttcacagcagcccctcccatcacaggcctggaggccttggagggaaaaatggtttcataggcctgacccagggctcycctgctgtgtgcagtctggggtatatggtgcct

SEQ ID NO: 947315 - DNA, 594 bp, Homo sapiens
cctggctaatttttgtatttttagtagacttggggtttcaccatgttggccaggctggacttgaactcctgatctcaggtgatccacccgcctcggcctcccaaaatgttgggattacaggcgtgagccactgtgcccggtcctaggatttttaaagaataaacccattttcaatataaaacacagaagaaacaaacctctaacccttccaatatggatacataattagggaaggaaataggaaatgtcccatttgccacttgtctctactattatgatggaaatggctacaacaatctgcatgaagtcacttacattttcttagaaggaaaacagagtagaacccttctagtttcctgatggaggttcctactcataacctaccatggattcagtgaatacctggactaatgtattttggtattgcacaccaccataaaaatgaattttgtcactttcacaaatcaagctttcagatcacttttcacctctaagatctgtcaccttaatgcataccgagtgcacatttcagatctcctcaacctccattatttttcgcttctctggaagggataycccgtgtgctcaaacact

SEQ ID NO: 947316 - DNA, 765 bp, Homo sapiens
gtttggctctctgtctattatttgtgtataggaatgcttgtgattatcagcttaaaaagactttgggctgagacaatggggttttctagatatacaaaaatgtcatctgcaaacagagataatttgacttcctctcttcctattagaatatgctttacttctttttcttgcctgatttccctgtccagaatttcgaatactatattgaataggagtggtgacagagggcatccttgtcttctgccagttttcaaaaggagtgctcctagcttctgcccattcagtacgatattggctgggggtttgtcataaatagctcttattattttgagatacgttccatcaatacctagtttattgagtgtttttagcatgaaggggtgttgaattttatcggaggccctttcggcatcaattgagataatcatgtgtttttggcattggttctgtttatgtgatgaattacatttactaacttgcatatgtttaaccagtcttgcatcccaggaattaagccaacttggtcatggtggataagctttttgatgtgctgctggattcggtttgccagtattttattgaggattttcccatcaatgttcatcagatatttgcttgaatttttcttttttattgtgtctctgccaggttttcgtaacaggatgatgctggcctcataaaawgagttagggaggaggccatctttttcttttgtttggaatagttgcagaaagaatggtaccagctcctctttgtacctctggt

SEQ ID NO: 947317 - DNA, 572 bp, Homo sapiens
atttgtagatctctatttctataggattgattactggagcctttctagtttcatttggttgttttattgtccataaagcctcacattattgcctgtgcaactaaaggagcaaacacctctttcagtttttataagctggttttagcatataaagactttctcttttggagtccttgcaaagacatgactaccttcaggatcacagatgaatggggttgaagccaggtcacctaactgctgccgggtttgcagtggagcctgtagttggcagatctattaccaagtgcttgaatgggcatggattctatctagtctcttggtgcacttaactgcctccacagccttggtcagtaggggttgcacctggaccagcgtcttattcagtgtctgccaacagaaagactgttaccaaatatacagatgctcagatgggtatcacttcctctgggtttcgggacggcttcctgctgtgtcactggttaaayacctgggcaggcaatactggcccatgactgcaactgagctagaatggagttctagctgggaaagaactgagttacagggttctgtca

SEQ ID NO: 947318 - DNA, 422 bp, Homo sapiens
aagtacagatgggcttggctgggtctatgctcagggaatcataaggctgaaataaaggtataaaccagcctgagtttttattcrgaggctctgagaaagaattcccttctcagctccttctggttgttggaagaattaatttctttggggtggtaagacagaggttcccatttgcttgctggctgtcagttgtaggtgctctcagtttctagaggctacctgtatttcttgccatggggacccgtccgtcttccaggcatcaatagcttgtcaaatcctgcttgtatttcgaatctctctgacttaattttatgccaccagccagaaaaaagtctgaatttaaaggactcatgtgattatatttgtataatatatgtaatttacatattacatgtaataatccatgtaatttccctattttc

SEQ ID NO: 947319 - DNA, 637 bp, Homo sapiens
tctcaaaaaataataataattattattattacactctccaattccatccaagctgctgaaaatgccattattttgttccttttcatggctgagtagtattccattgtgtgtgtgtgtgtgtgtgtgtgtgtgtgtgtgtgtgtgtgtgtatacatatatatatatatatatatatgccatggaatatatataagttgtgatatatatcacactttatttactcattgattgacaagcatttgggttggttccatatttttgcaacagcaaattgtgctgctataaacatgcatgcgcaagtacctttttgctataatgacttcttttcctccgggtagatacctagtagtgggattgctggatcaaatggtagatctacttttacttctttaaggaatctccaaactgttttccatagtgattgtactagtttacattcccaccaacagtgtaagtgttcctttttaaccacacccatgccaacatctattattttttcattttttgattatggccattattgcaggagtgaggtggtattgcattgtrgttttgatttgcatttccctgataattagtgatgttgagaatttttccatatgcttgttggccatttgtatatcttcttttgagaatt

SEQ ID NO: 947320 - DNA, 571 bp, Homo sapiens
ctcactatatgcaaagattaactcaagatggattgaagatttaaatgtaagacctcaaactataagaatcctggaagtaaacctaggaaacatcattctggatgtcagmcctgggaaaaaagtttgactaaattctcaaaagcaattgcaacaaaaacaaaaattgacaagtgggacctaactaaactaaagagcttctgtaaagcaacagaaactatcaacagagtaaactgacaacctacagaatgagataaaatattgggactttatgcatcttacaaaggtttagtatccagaatctgtaaggaacttaaacaactgaacaagcaaataaataaataaatttattttcttaataaataattaagaaatgggcaaaaggctgaacaagaacataaacttctttttcaaaagaagacatacaagtggccagcaaacatatgaaaaaactccacatcactaatcatcagagaaatgcaaatcaaaaccacagttagataccgtctcaaatcagtcaaaatggtgattattagaaagtgaaaaaacaacagatgctggagaggctgtggag

SEQ ID NO: 947321 - DNA, 366 bp, Homo sapiens
aggcacaggtacatgtaccatacaggcatccrcatacacatgtgtacacataccacatgggcatgtagacatacatacacagaacattcaaattggctttttttttagagagggtcttgctctgtcacccaggctggagcacagtgacatgatcatggctcactgctcctcgaccttctgggctcgagcaaccctccacctcagcctcctgagtagctgggaccacaggcaggcaccaccacccctgcctaatcttttcaaatttaatagagacgaggtcttaacctaggtctcactatgatgcctgggctggtctggaactcctgtgctccattgatcctcctgccttggcctcccaaagtgctg

SEQ ID NO: 947322 - DNA, 366 bp, Homo sapiens
aggcacaggtacatgtaccatacaggcatccgcatacacatgtgtacacataccacatgggcatgtagacatacatacacagaacattcaaattggctttttttttagagagggtcttgctctgtcacccaggctggagcacagtgacatgatcatggctcactgctcctcgaccttctgggctcgagcaaccctccacctcagcctcctgagtagctgggaccacaggcaggcaccaccacccctgcctaatcttttcaaatttaatagagacraggtcttaacctaggtctcactatgatgcctgggctggtctggaactcctgtgctccattgatcctcctgccttggcctcccaaagtgctg

SEQ ID NO: 947323 - DNA, 597 bp, Homo sapiens
atgagcacttagaaactcaccagttactttcctgttaggtaatgagtaatgattcttgaatcatttaaaccacccagacctagtagtaawttcaacaacacagtcaagtcaaaccttctctttcatcactgcaaacaactttttgctttggtcatgattatcatggtgctaagaggagtacacttctgtgtctggccttcagtctacatgattagaagtttctccatatctgatataggcccttcccaaatttttgttagtctcattgccttcagtgaaggagattatctcagagcttctattagttagttcttgtactttaagatcatagttatagtggaatgagatctgtctgacaggtgagcagtaatcatcattgatgttctacctttgtagttcttaatcacttctaattttgttttcaggtcaatcacttgttgtagcttcttactggcaatattagcagtaggctttttatactcagaggccctgatgaacaaaacaaaatgagattaaatcaagcacaaaagaaaatgatgtaattaagagacacagtaaataggagaaatatgatcctgctgctagaataacatagca

SEQ ID NO: 947324 - DNA, 635 bp, Homo sapiens
ggctcacgcctgtaatcccagcactttgggaggcctaggtaggcagatcacgaggtcaggagttcsagaccagcctgaccaacatggtgaaaccccgtctctactaaaaatacaaaaattagcctggtgtagtggtgggtacctgtagtcccagcttctcagggggctgaggcaggagaattgcttgaacatgggaggcagaggctgcagtgaccagagattgtgccactgcactctagcctgggtgacagagcaagactctgtctcaaaaataaaaaaaaaaaattaaaaaaagatcccatcaacagttttgaagaccatattacactgaaaactcatatttgagtttactgtcaatccaactttctaggttatttacaagtagttatctactaataaaatgtgttcctttccataatgaacaatttaaatgtatctaatattatttattaagtctcagttcctacagtggaccaaagattcatccagcagggacaatggcacaaaagtgattgaaatatccagaaaagtaaacccaagaaaggccagttttgcctcaggagggtctgaggaaccgtgattaccaaggaggtttggattggacgtgttctgagcctctagtacacagcgcaagc

SEQ ID NO: 947325 - DNA, 679 bp, Homo sapiens
gtagttatctgcagaagatggcagggccttgctccaaaatcctacggacctcctctgtgattcacctatgggggcctaccaaaggctctaaacagcatccctatctgccactgatacctcaagcaccactggatctgctgggtcatatagcccaagtggcagagcagcttgcacaacagcctggacctattgcagagccttctcctgttctaaaccccactcaaaactggcagcctttcaggtgactcaataaatgggccggagtaacatactcaaatgaggaatgtgttgcccccaaaatccaaataggcccactaggcgttgtgactctttcttggttgtaggagaggccaaatgcaacaacttatctttcaccttagaaggaatatcttgacaggcccctcagcactgggcccctagaaatttcactgaggtagaaggtccctgaattttagtctgatttatttcccatcccctggcacccaaatgtctcaccagtaagtccagtgtgtttgctacttctcgctcactgggtccagtcggcataatgtcatcaatgtaatggaccatcatgatatcttgtggaagggaaaagcgatcaagatctctgcgagcaagattatgacacaaagccaggragtttatatacccctgaggtaggacagtaaagacatactgc

SEQ ID NO: 947326 - DNA, 584 bp, Homo sapiens
cttgagctgaaggggctctctactccccctgtaaacagctcaccttaactagtgacttgcasgggtggaaggaatttgttccacactgtgtaggtctggggtgctaaggttctctgtgacacgagataaacaaggatggcaggggtgctggccccacatcatgcagtggctgaaaggctcacaagccctcctataaagcttaatcttttcctctgcattcctttcttttctttttctctttttctgttcaatccaggagctcagacttaaagggaaaaacaggccgggcatgttggctcatccctgtaatcctagcactttgggaggccaaggtaggtggatcgcttgagcccaggaatttgagaccagcctgggcaacatagtgaaaccccatctctgtatttaaaaaaaaaaaaagaaaagaaaagaaaaaacggtttcgaacatcctatcttctaattttgttgttccctttgaaactatagctgattacatattatggctcatttttgtgtacattttaaactgataggcaaattacaagaaaaattcagagctcaaatggttaacctatgccatagact

SEQ ID NO: 947327 - DNA, 602 bp, Homo sapiens
catgcttctttagctcagaggagtttcttattacccaccttctgaagcctacttttgtcaattcatcaatctcattctctatccagttttgtgcccttgctggagaggagttgcgatcatttggaggagaagagscattatggcttttggaattttcagtatttttgtgctggtttttcctcattttcatggatttatctgcctttgatctctgaggctgataacttttggatgggttttttgtatgggggttctttttgatgatattgatgttgctttctgtttgttagtttttcttctaacactcaggcccctcttctgcaggtctgctgcagtttactggaggtccactccagaccctgtttgtctggatatccccagtggaggctgcagaacgacaaagattgctggctgctccttcctcagaaagcttcatccagtggggcactggcctgatgccagccagagctctcttgtatgaggtgtctttgacccctgttgggaggtctctcccagtcagggagcatgggggtcagggacccacttgaggaggcaatctgccccttagtagagctcgagaactgtgctgggagaatactcct

SEQ ID NO: 947328 - DNA, 602 bp, Homo sapiens
catgcttctttagctcagaggagtttcttattacccaccttctgaagcctacttttgtcaattcatcaatctcattctctatccagttttgtgcccttgctggagaggagttgcgatcatttggaggagaagaggcattatggcttttggaattttcagtatttttgtgctggtttttcctcattttcatggatttatctgcctttgatctctgaggctgataacttttggatgggttttttgtatgggggttctttttgatgatattgatgttgctttctgtttgttagtttttcttctaacactcaggcccctcttctgcaggtctgctgcagtttactggaggtccactccagaccctgtttgtctggatatccccagtggaggctgcagaacgacaaagattgctggctgctccttcctcagaaagcttcatccagtggggcactggcctgatgccagccagagctctcttgtatgaggtgtctttgacccctgttgggaggtctctcccagtcagggagcatgggggtcagggacccacttgaggaggcaatctgccccttagtagagctcgagmactgtgctgggagaatactcct

SEQ ID NO: 947329 - DNA, 625 bp, Homo sapiens
gggtgaggcaggagaattgcttgaacccgggaggtggagattgcagtgagccaagagcacaccactgcactccagcctaggcaacagagcaagactctgtctcaaaaaaaaaaaaaaaraaaaaaagaaaaaaaaaagaaagaaataacgtaagttttcagattagtggaaaacatgagaagaaaactgaatatacataaaggaataaggggtgataaatatggtacgtatatagcagaagatataaaagacatttttataatttttgtgattttcaagtcataattattttaaaaagttaataataataacatgttacctgatttatgacataggtagaagtggcagacaggagaagaaaattaaactggaataacatttctgttttatacttttatatagtatagcaatattaaaatagactctcttaagttaaagatgcatcttgcagatcctttggagagaattagaataaaaaatcaaagatggataaaaataaactaatctggctccataatggaatgctaaaattactcaatctaaaagatgttagaaaaagaataaaaggtatcaaaaacagatagggcaaatagaaaacatttagcaagattttggaattgaactc

SEQ ID NO: 947330 - DNA, 625 bp, Homo sapiens
agagcaaaactccgtctcaraaaaagaaaaaaaaaaaaaaaccatcatatctcctgagacttattcaatatcatgggaacagcatgagaaagacccgcccctatgattcaattacctccccaccaggtccctcccatgacacatgggaattatggaagctacacttcagatgagatttgggtggggacacagccaaaccatatcacctttctcctgctcttcttccctgaagcaagtcatcacacccaggaaggattttctgacccttccttgaagcaggtcatatgaccctcatatggaggtgacctccctatactcagagaagagaagcatccttatctctgaagacacagggacaagaaaagaatctgaacaaacaggccttgcttgctgagattcccccagtttatcaccattagattgcactcttttgctctatcatatttctccatgactgtccactcttcatcaaacctggcataaaaatacacagatttaatcatttcttcaggtattcatttccttatgaaggctccagtgtcacataaaacttatattaaataaatttgcacttctcttgtcaatctgtcttttgttatggagtgctcagccgtgaaccgaggat

SEQ ID NO: 947331 - DNA, 566 bp, Homo sapiens
tctccctttagcctttgcayagcatctctggccaccctcccaaaggacccctgtgaggctaggcaaaaacaacttgctagggggcccagcaagctcccagggcttttcccactgcctcttctactcctgcatttttcttggctctccaaattgactcagctccaggtaagatcagaatcttctcccgtaatgtaagccttcagtgttccgagtggaggtgtgtgtttggggccagatgttctccctttctcacttccacagtttgagcactcacagtatttgtggtgtctcccaggttctgcagaagccatccgcttccttcagggggtctgtgggtcctcttgggtttcctgatttattcctgcagttgttctggagcaaaaattcacaatgcaagcctccacacactgctctgaccatctgagttggagctgcaatctagtcctgcctcccatccatatgatccatgatcacaaggtaaagtcccacgataggctgtctgcaagttgaggagcaaggaagccggtggatcagtccaagtcccaaaaccttaaaagtggggaagc

SEQ ID NO: 947332 - DNA, 619 bp, Homo sapiens
caaccactgattacttctctatccctcttattttgtttttttgcagactgtcctataccttatgagtccagcttctttcacttagcataatgtattggagattcccccgtgttgttgcatgtttagtatttcctgtctatttactgcattatacggatgtacgattgtttgttacccattcactggttgaaaaatatttgggtgttttcagtttggggtgattattaataaatccattataaatatttgtgtacagttttttgagtgggtatatgtcttcatttctcttgagtaaataccttggaatgggatttttgggtcatacggtaagtgtatatttaactttataagaaactgccaatcacatatcttaaatgatgagcatcttttcatgtacttatttgccatctatgtatttaatttgttgaagtgtctgttcaaatttttgcctatttctaaatgggattttaaaaacctactgagttgagagagctctttatgtattttggaaatatgycttttaatgaatatgtattttataaatattttctcacagtctgtagcttatatttttaacagtgtcttttcaagagtagaagttttaagttttaatgaagtc

SEQ ID NO: 947333 - DNA, 608 bp, Homo sapiens
ctctttctaaagtgcatttacatacattcttcactctactcatttttcttctgtatttcttccctggttaagawgatcatcctcttaaagccaaaacgtgcaggtgcacatgtaccctaaaacttaaagtataataataataataaataaataaataaaaaacaaaaaaaaaacatgtagtttcagaagcaaatgaaaaactatcattccatacatttaaaattcatatccgaacatacttgccaataatcaccgaatcagaaaactcattttgttacatctaaatgtttctaagaagttatctaaataagaatttgtctagcaaatagcgtatcgattctcttaacttttttggcattctgaggtaaactgaatgaaagttcttacgtttaaatctctaatccatcttcagttaatttttgtataacgtgtaaggaaggggtccagtttcagttttctgcatatggctagccactttcccaacatcatttactaaatagggaatcctttctccatttcttgtttttgtcaggtttgtcaaagatcagatggttgtagatgtgtagtgttatttctgaggtctctgttctgttccattggtctatatg

SEQ ID NO: 947334 - DNA, 608 bp, Homo sapiens
ctctttctaaagtgcatttacatacattcttcactctactcatttttcttctgtatttcttccctggttaagaagatcatcctcttaaagccaaaacgtgcaggtgcacatgtaccctaaaacttaaagtataataataataataaataaataaataaaaaacaaaaaaaaaacatgtagtttcagaagcaaatgaaaaactatcattccatacatttaaaattcatatccgaacatacttgccaataatcaccgaatcagaaaactcattttgttacatctaaatgtttctaagaagttatctaaataagaatttgtctagcaaatagcgtatcgattctcttaacttttttggcattctgaggtaaactgaatgaaagttcttacgtttaaatctctaatccatcttcagttaatttttgtataacgtgtaaggaaggggtccagtttcagttttctgcatatggctagccastttcccaacatcatttactaaatagggaatcctttctccatttcttgtttttgtcaggtttgtcaaagatcagatggttgtagatgtgtagtgttatttctgaggtctctgttctgttccattggtctatatg

SEQ ID NO: 947335 - DNA, 545 bp, Homo sapiens
tctattcttcctccaaatagagcacttaatgctcatgcaatatatttaggagttatattgcttcatttcatgctcatggataggaagaatcaatatcgtgaaaatggccatactgcccaaacttatttatagattcaatgctgtccccatcaggctaccattgactttcttcacagaattagaaaaaactactttaaacttcatatggaaccaaaaaagagcccacatagccaaggcaatcctaagcaaaaagaacaaagctggaggcctcaaggctacctgactttaaactatactacaaggctacagtaacaaaaacagcatggtactggtaccaacacagatatatagaccaatggaacggaacagaggcctcagaaacaacactgcacatctaaaaccatttgatctttgacaaacctgacaaaaacaagcaatggggaaaggattccctatttwaaaaaatgtgttgggaaaactggctagccatatgcagaaaactgaaactggaccccttccttacaccttatacaaaaattaactca

SEQ ID NO: 947336 - DNA, 462 bp, Homo sapiens
catctcaaatgtaagtaatttcctaatttttcaatttgtggcagacacagctacttgcctatccaatatccattctctcctttttttcttacttacagagatctgtccccagttaaaaaaatgctgagcttctcagattctcttatgattaggaatggtcaatgacatgtgagttgaagttactccatgaagcccctaagaatgtgcagaaaagggattgattcaaatggatcattctttcttttccattaccttttttttttccttcctggaatacagatctaatgtctagatgggaggcagcaatattgcaactacaagaacaaaagtcacacgttaaggatrgagaatctggaaagtaggaacctgaatttttcacttttttttttggagtatcagcccttaattgcctatttatggagttcatgtcacatgaaaaaaataaatctctgtttggttaag

SEQ ID NO: 947337 - DNA, 437 bp, Homo sapiens
ctgtctctcccggaacacattcttctctggagtacttgcaaatcacatgctcttggttctcctcctgcatcataggctgttctctctcagtcatttttttttcctatttcttctttgtttctccagtctctaaccatttaaccattggaatgcccccttctcttttctatataatgcatttgtggagtgagctcaagcattcttcttttatgtatgacactgatggtttccagttttttttttttttttttgagactgagtctggctctgtcacccaggctggagtgcaatgaggtgatctcagctcactgcagcctctgcctcctgggttsaagtgattctccagcctcagcctcccaagtagctggaactgcaggtgcatgccaccatgcccggctaatttttgtatttttagtagagatggggtttcactatgt

SEQ ID NO: 947338 - DNA, 762 bp, Homo sapiens
gaggtaaattgacctttagtgtgtgtgtggttttatgttaacctggcaaggagttggattatgtttaatgtttgccatagctatgggtgtcagcagcttccatttcctctaatgtccttgtctttttctcttctgctgtctttgggtttccctaaaaactacttttcaaagagaggctgagccttgcagctctttcaaatgtaatatattatattattattacactctggttatagtaacaagaggccagtgatttagtggtaaggtttgggggaatgtaaagtatcctagaattctgtgaccaaacctcagttatcagtgggcttctgtcccaggtctgtgaccttcacaagttttcctcagcttcccaactccttaggtgagacactaaggctagaggagaaggagctgggtaattgcccttctccagcatttgatagggctctagtaaagttatttgctgagtaagttctttgtaattgagaattctgagtttattttttaaacgcttacttttccctttcccctgccagaaacatgagggttttttttcttaattcttcactgtgagaacgtggtgacgttcctagaagtaaagcacacaaaaatgtgcagctctcctaagaccgcaagttgaaagagtttctcactcttactmaagtctactgtccatctccagcaattcatccaagttgcttttcaaatgctccttcccatttgtagctatgatggtttgttctcctggtgagctgatctcagctg

SEQ ID NO: 947339 - DNA, 535 bp, Homo sapiens
cagctgaggaaagaatctctgagcttgagaatatccatagaaaccttcaaaatggaaaagtaaagagaacagagactgaaaaacagccctagaacatccaagmactgtgggacagctaccaaaggtgtatatatctgcaatgggaagatcagaaggaaaagaaagacaaaggaatagagacatatcttgagaaacagtgactgagaatttcccccaaattaatgtcagacaccaaaccacagatctaggaaactcagagaacaacaagccagaaaaatgtcccaaaaaactacttagatggatcattttcaaactacagaaaatccaagataaagaaaaattctcataaagaagctggataaaaaacaccttaccgaggcagagcaagatggcagcatagaaagctctatcaatcatccccccggagggataccaagttaactactatctacacagaaaagaacacctcataagaaccaagaatcaggtgagcactgacagtgcctggttttagcctcatattgctaaaaggggc

SEQ ID NO: 947340 - DNA, 463 bp, Homo sapiens
gtgagcactgacagtgcctggttttagcctcatattgctaaaaggggcactgaagagatagaaaaaaacagtattgaattactgaccccacccttcttgcatccccagtagcagcaggttggtgtgcagagtatctcagggcactgggggagggaaaacacagcaattgtgaggcattaaacccagttctgtcctgttagaatagaaagaaaaaatggaccaaactctgctgtcagccactcatggagggagaatttaaaccagctctagccagaaggggatcactgatcccacttgtccaaacttgagtgcctgcaaatcttgccactgacggctacagcagcctgtgtctccacataaagttgaaaggcaatygagtccataaggactgcaactcttaggcaagacctagtggtgaactgggccgagacagtggactgagggtgcatacaacgtgttaaga

SEQ ID NO: 947341 - DNA, 463 bp, Homo sapiens
gtgagcactgacagtgcctggttttagcctcatattgctaaaaggggcactgaagagatagaaaaaaacagtattgaattactgaccccacccttcttgcatccccagtagcagcaggttggtgtgcagagtatctcagggcactgggggagggaaaacacagcaattgtgaggcattaaacccagttctgtcctgttagaatagaaagaaaaaatggaccaaactctgctgtcagccactcatggagggagaatttaaaccagctctagccagaaggggatcactgatcccacttgtccaaacttgagtgcctgcaaatcttgccactgacggctacagcagcctgtgtctccacataaagttgaaaggcaattgagtccataaggactgcamctcttaggcaagacctagtggtgaactgggccgagacagtggactgagggtgcatacaacgtgttaaga

SEQ ID NO: 947342 - DNA, 482 bp, Homo sapiens
tgtcctgtggtccttggctctttcttttttttttttttttggttggtaggctatttattatggcctcaatttttgaactcgttattggtctgttcagggattgaayttcttcctggttcagtcttggaagggtgtatatatccaggaatgtatccatttcttctagattttctagtttatgtgcatagaggtgttcataatattctctgatggttgttggtatttctgtgggattagtgatgatatcttattgtttctgattgtgtttatatgaatcttcttctcttattagtctagctagcagtctattttattatttttttttcaaaaagccagctcctggagtcattgatattttgaatttgtgtgtgtgtgtgtgtgtgtgtgtgtgtgtgtgtgtgtgtgtgtgtgtctatctccttcagttctgctctgattttggttatttcttgacttttgatagctttgggatttgtttgatc

SEQ ID NO: 947343 - DNA, 556 bp, Homo sapiens
taggtgtcaaaaaatgattctaaagtttatagggaaaaccaaaaaggccaggatgaccaatgaaatattgacagagaagaacattgcaggactgatactacccaacttccagacttaccataaagctaccataataaaatacagtggggtattaacaaatagatcagtggaacagaacagaaagcccacgaatagacccacgtaaatataatcagttgatttttgagacagagcaagataaatacaatgaagaaaagagaatcttttttcagcaaatggtgctggaacaactggactgccacctgtaaaaatggattcagacacagaccttaaactcttcacaaaaaattaactcaaaatggatcacagatttaaatgtaacatgcaaaactataaaaccctagaagaaatataggagaaaacctagattaccttggatggtgataactttttttgatatatgccaaaggcataatccttgagaaaartaattgataagctaggcttcaataaaatgtaaaagttctgctctatgaaagacaatgtcaggagaatg

SEQ ID NO: 947344 - DNA, 635 bp, Homo sapiens
cgcctcggcctcccaaagtgctgggattacaggcttgagccaccgcgcctggcctctgtctttatttttagaaatgtgtgtggaaaagattagattctgcaaagtggcaratggctgaaagatgttctttggagatcacttttccagtcctgggaagcatgcggagagggatgggacccacagcctcaactgctccagggcaagggcaatgcggaaagacatggcagggtacatcaccataactcacaaagggtaaagaccatgaggctagttgaggactgtaccacatctgcctctcactgaagcaagaggaagatcatctcttttcctttttctcacttagaggggagtgcactcccaaatctgcaattctttggctgctattggttgttgttgctgctgcttgcattctctggattaaaatgaaacacatgttccaaaccgtgaaaggtcagcaagaaagagagaagtgtccacaagctgcagtctgaggatttgatgagctggttcttgaacttttgtaggaaaatctgagaagggaaagccggttaaagggccagggttcagcaagcctggcttcttggggcagcatctctccacttgcagggtgccctgttctggacagcagaggaata

SEQ ID NO: 947345 - DNA, 634 bp, Homo sapiens
gtctggacaggggccattagaccagttcagtgctctgtgggctgtggccagaggcaccttgactggggctgctgtccccatcctcatcctcctccacttgctaggcccacttcgtgaggtgccgaaggtgaaacagccagagaacttcacttgcccgcaacaaccttagagtcagatgcaggtgggggaaaagccatatatcatcaggtaacttcatagagttataaacttaagaaatgcttggggccaaagagagagatcacctttcattcattcaactaatatgtactccatgagatctgagccggaagcggaattccttggacagtttttgctattctccatgccagtgttccctctgggcctagaggtttctttttagtctgccctcatcccccgtttctgtcttctctctcttcatgcaaatatttcttggaaatttcaacaagggttacatgccttctagcatctgcctagacactcccaaaatatagtagaaagctgtttgaatrcatggctagatgtgcaatttcagaagtgcaccattcactaagtcttctgagggactgtgaagtgtgtgagccagccttgattcttcatttacatcttttctacctgcaaaaggacaccctaa

SEQ ID NO: 947346 - DNA, 595 bp, Homo sapiens
tgcataccttaaagctaaggataaaaagaactgtacacaaacagtgtactctaggtggtaaatttatttctcacaaaaatactggttagcaattctgaaatgaatttacatgtatactaatgttaaacaggtaaggaaataaattgtggaaattgttgccagatttattatattcagaaaacaggttataaataagcaaggttgagaggttgctagaatggaccctgtgtggccatatttgagtggaatttatcagtaggaattcatgatggagagagagagatggatagatacatacatatgataataaatatagacatgtgcatgcatgggtcagtgtacatgcatatatttcttagctttgtctcctgaggggggctaaaagcagtgacatacagtagcaatgagcacatcttgcctccaggtcaggttttctaaatatagttctctaagtaaagaaaccagggctccctgaagaaatgaaaattctaggtctgtagcaggtgaaataacatgaagaatcytgtagttccagaaaatatggaagtgctaaaaaggggagagtggggtgcagcatgtcaaaactacacaggag

SEQ ID NO: 947347 - DNA, 836 bp, Homo sapiens
tccaggagttgggagctaaggaatgaccacctaaagtctctcagaaagaaagccagatggctgaatccaccttctactacaatcaaaccctcaaggtcaccaaacaggataaaagaaataaaacccatttgaaggtcaacaacctccaagattgaaggtagataagctctcaaagataaaaaagaatcagcaagataactctgaaaactcaaaatgctggagtgccttctttcctccaaatgactgcatcacctctccagcaagggttttgaactgagctgagatggctgaaatgacagtaatagaaatcagaatatgaataagaaaaaaggtcattgagctacaggagtatgttgaaacctaatgcaaggaaagtaaaaattacgataaaacaatgcaggaactgacagacaaaataaccagtatagaaaagaatataacagacccagcagagctgaaaaacagtacaaaagtttcataatgtaatcacaagtattaatagcagaatagaacaagcagagaaaagaatcccagagcttgaatactggctttctgaaataagacagcctgacaaaaataaataaaaaaggatgaaaaggaaccaacaaaacctccaagaaatatgagattatgtaaagagaccaaatcttcaactcattggtgtccctgaaagagatgggggagaatgccaacttggaaaacatatttcaggatatcatccatgagaacttccccagcctagctagagaggccaatattcaacttcaggaaatacagagaactccagtaagttacttcacaaraagatcatcccaagacacataattatcagagtt

SEQ ID NO: 947348 - DNA, 625 bp, Homo sapiens
gtataaattgaagaaatgcttggcagtatctactaaagctaagctgtgcatatctttgacccagctattctacttttagatacaaacttaacaaaatgcataagcatattccccaaaagacatgtccaagaattttcatagcagcactatttataatatccccatataggaagctactcaaatatctaacaacagtagactgaataaataaatagtggcatatttagacaataagtactatttagcagtgagaatgaactgtaactatacacaaaaatacagatataagtcacaaatatacagcaaaagaagccaggctcaaaagattgcaaaattaatctatggtgtcacaattcaagatagtggttactcttagaaagttaccaaatgtaaggagacagaagagaccttctgggatccaggtgatgttctgtttttaatcctggtgctgatcacataagtttgttcactttgtaaaagtttattctgccatacactattgatctctgtgctttttgtagatatatttcaattaaaagtttacatcaaaacrtgtatgtgtttataaagcagagttgccattagctagcccaagataacaactcccatagattaagagctgtaa

SEQ ID NO: 947349 - DNA, 602 bp, Homo sapiens
cctgggctgcccagccaactccttgtgagaaaaagggaccaggatcatactttctgagcttggggactctagccaagatggccraataggaacagctccagtctacagctcccagcgtcagcgacgcagaagacgaatgatttctgcattttcaactgaggtaccaggttaatctcactggggattgtcggacagtgggtgcaggacagtgggtgcagcgcaccgagtgtaagccgaagcagggcaaggcatgacctcacctgggaagtgcaaggggtcagggaattccctttccaaaccaaggaaaggggtgacagacagcacctggaaaattgggtcactcccaccctaatactgcgcttttccaatggtcttagcaaatggtaccccaggagattatatcccacgcctcgctcggagggtcctacacccatggagcctcgctcattgatagcacagcagtctgagatcaaactgcaaggcggcagcgaggctgggggaggggcgcccgccattgctgaggcttgagtaggtaaacaaagccgctgggaagctcgaactgggaggagcccactgcagctcaaggaggcctccctgcctct

SEQ ID NO: 947350 - DNA, 573 bp, Homo sapiens
agcatcccctgtgcaagcttccagcttccttatctrtgtttgcagttcggtcttccaggctgttctttgctagaaggaaatgatttctagggctgctttttgttagaagggaagttctgctgcgcactcttttgccctcactctctgcctaaacagttttttttttttttttttttttttgagacagagttttgctctgtcacccaggctggagtgcagtggcatgatctcggctcactgcaacctccacctcccaggttcaagtgattctcatgcctcagcttccctagtagctgggattacaggcatgcaccaccactcctggctagtttttgtatttttagtagagacggggttttaccatgttggccaagctgatctcgaactgctgacttcaagtgatccacccaccttggcctcccaaagtgctggggttacaggtgtgagccactgtgcccggcctaaataatttttctatctcctgtatcaataagaaatcttttcaaaactctagatgtgctttttctcaagacaaagaccagtagttctcaatggaggcaaatctactacata

SEQ ID NO: 947351 - DNA, 552 bp, Homo sapiens
gctcactgcaacctccgcctcctgggttcaagcgattctcctgcctcagcctcccgagtagctgggattacaggcacccgccaccacacctggctaatttttgtattttttagtacagacgggttttcaccatgttggtcaggctagtctggaactcctgacctcgtgatctgcccaccttggcctcccaaagtgctgggattattgtttttaaattctgtgcaaagaccccttactcagtgaccttattgcagacatcagggatggaccccttgcataaccctgtccttacttagtccacgctgcttgtggggtttattacggcaagttttcctagcctggctccaacagaaagaatatgtctggcctggcatttgcctccaagctcccattaactaacttaatacacttctaatagggcctgattatagaataatctatctgctattaactgtagccatattatgtccctaagaataaattccagtggcatgaccctcatgttctcaaagtcactaataamcactgtgaccaggagaaggctggagacag

SEQ ID NO: 947352 - DNA, 643 bp, Homo sapiens
aggtgttccagggctttatttgcttcatgggtttttattactgatttaatttggaacttgttattggtctgttcaggttttcactttctttyagttaatttttgagaggttgtgtgtttccaggaacttatccaattcctttagattttctcattcgtggacaaagaggtgttcatattagtctttgaggatattttgcatttctgtgagattggttatactgctatctttcacaacacccacagactcaaagtaaaggaatggagaaagatctaccaagcaaaccaaacacaaaaaaatagaaggagtcactattgttatattagataaaacagactttaaaccaacaacaatcagtaagaacaaagaaaggcattacataatgataaagtgttcaattcaagaagaagacttaactatccaaaatatatacatgcctaacagtgtagcacccagattcctaaaacaagtttttcttgacctatgaaaatatttagacagcacacaataatagtgagggactttaataattgagacagaaaactaacaaagaaattgtgaacttaaacttgtcagttgacaaattggacctaatagacatctacagaataccacacctaacaaccacagagtatacagactt

SEQ ID NO: 947353 - DNA, 559 bp, Homo sapiens
cactttaaagttggagactgccagtgctttctgtaatgactcttttcttgttcttcctctttccatttcagcagttaaccatttttgtcctgcttctcataacttcatacatggatcatttcaacagactcctatctgttgtccctcagttcagttttacgccagtccatccttgatagtgcttacaaaatcttcctgaaacagtggttcatcatctctcttttcttttccagaataatgtgattcctggtttcttgctgaatcaaatataaggctatccacttttctccttttaaatcttgcttttatcagcctaaagtatcttcatgaacgcttaagatttgcagttttatggcttacacgctttcaacatattcacttccatgtctgtgcctttcactctttcactctttcttttctttttgttttttgagatggagtctsgctctgtcacccaggctggagtgcagtggcatgatctaggcttactgcaaactctgcctcctggattcacaccattctcctgcctcagcctctcgagtagctgggactacaggtg

SEQ ID NO: 947354 - DNA, 580 bp, Homo sapiens
aatattttctagaagtgggaataatggatattattgtgctgtatttmagatcttagggaaaaataattagttattcacctgtacatgtgatgaaagttatagagttgtgctttatgtagttggataagaaatgttttctttttcaaaaatatgtgtgttgaattttgataattgccatttacaaatctattctgaatctattgtgatgcttatatatttttatattttagtctcttactagagtgaattacaatgattgatttatgaatgttaaaccaccttgtattcccaggacaaattcaacctggttatgatgtgttacctttttatgtggttaacttcaataagctaaatttgagatattatttttgaatccatgtttagagatatttgtaatttatttgtaattttgttgcaataaccattctaagcatcttattaatactccatcatacaaggagtagagatgtgtaccctcttgttttattttccagaagagcttgtctagacttgtatttttttaagtgtttgctagaatttaccactacaatcttatgggcttagagtttctttgtgaaaa

SEQ ID NO: 947355 - DNA, 634 bp, Homo sapiens
aattcctccccagaaaatgagtttttcttttctaccacatgggcaggctgcaaattttccaaacctttatactctgtttcacttttaaacataagttccaatttcaaaccatctytttgtgaatgcgtataactgaatgcttttcagaataagccaggtcacctcttgaatgctttgctgtttagaaacttcttccatcaaataccctatatcatctctctcaagttcaaagttccacagatctctagggcaggggcaaaatgctactagtatctttgctaaagcatagcaagggtgacctttgcttcagttcccaataagttcctcatctccttctgagaccacttcagcctggacttcattgtccatattactatcagtattttggtcaacaagcctctaggaagttccaaactttccctcatctttctgtcttcttctgagccctccaaactgttccaacctctgctggttacccagttccaaagtcgcttccacattctcaggtatcttatagaaatgccccactaccttggtatcagttctctgtattagtctgttctcatactgctataaagatactacctgagactgggtaatttataaacaaaagaggtttaattgactcacactt

SEQ ID NO: 947356 - DNA, 554 bp, Homo sapiens
cagaatgtccagtatattgttgagtagacgtagtgagagaaatcatcctccttttttcctaatctatactgggaaagtgttcattgtctaaccwtaaaaatgaagttagttcatttttgtagatttttaagaatcaagttgaagaactttttttattttcctttaactaagaaattttaacatacatgggcattagatgttgtcaatttcttttgcatcaattactataatcatatgacctttttttaatccttgatgtgaattacattgattgattttaatatattgaaacatttctgtatacctagaataaatccctcttggccatggtgtatacttatttttatacattgttggatttgatttctaatatttccttgagtatttttgctttcatgttcacgagagatattagcctgtagttttcctttcttgtgaagtcttcatctgttttgatgttaggataacactggactaacagaatacgttatagagtattttctctgctcctagttactgggagtgatttcttaaaattaagctcattttctcct

SEQ ID NO: 947357 - DNA, 601 bp, Homo sapiens
tgttggagatttgggctatttccagattttggctgttgcaaaaaagcaacctcacagatccttttaaaggatgtcaggtgctttcaggtaaccctagactatagtaccactgctctctatcctagcaggcacactgaaagttaaaccttgtaatagtgcgaaatcattttcttttttaaaaatatattttcttacttttatatattttactcaatctcatgacagattacattttcttttttaaatagaaagtcttactgtaaagcccacatctgtataaaaaaatgaaagaatgatctggttgatgtggatgtgtggaacctaggaaccttctcttggattttctcttattccccaaaaaacttcatttcctctaaagagctgctcagaagtttgaaaaccagtggacaagccatcctagctgtcttgatgctagagaagcaaagacgctttacagagatgtagcattcctgtaacaggtaaggcaggtggatgctaaactttttacatttcttttttttttttttttttttttgagacagagtcaygctgtcgcccaagctggagtgcagtggcatgatcttggttcactgcatcctct

SEQ ID NO: 947358 - DNA, 605 bp, Homo sapiens
gctgagtcttgaagggaaagcactgtatttttatatacatatacatatgtatatatatatgtatatatatgtattttttttcccccttaggtatttgattccaaatgcaggggatgcaactaaagccataaaacagcagatcatgaaagttttggatgctttggaaagttaatataaaagaaaattatataaaaagaaattaagacaaccaagagaaacatggacatatacctcctgactgaatactaactggagacctttcatttgctcatggggctgcttaaatagcaggtctaagaaagtgtaaattattataatcaatctgtggacagtaaactttttaaaaatttttcttctgcattttggttttataaaatgatgtattataaaggtcagttattaaattactttgaagtaactgaccctgtgcccttatggactaagtaagggtacagaatgcagttctgttttgaagagctgttttaagggaacatgcatcactttcgggwtcaaaaacaactgtacacatacatatctgcagtgtcttcactgaaaattagagatagaattagttgaagagacttccttaattgctacattgtttt

SEQ ID NO: 947359 - DNA, 756 bp, Homo sapiens
tttgggcatatccacaatttaggattttcagtaaacagaattctaaaattgacattggaggaatgaaactctcaaatcaatttcctcatgtgtaaataataataataataataatacagtcatatgttgcttaatgatggggatacgttctaagaaattcaacgttagacaatttcaacaccttttgaacaccgcagagtgtacttacacaaacctagagagtatagcctactgcacacctaggctgtatgatatcctctattgcttctcggccacatacctctacagcaggttactagactgaataggtagttgtaacacagtggtaagtattgttgcgggagtccttgctcccagagctcccaagatggtggtgggctgcttccaaaatggcggcgggctgcttccaagatggtggcaagcctcttgttctctgacgtggggttcttggcctcacggattccaaggaatggaatcttgggccatgccgtgcgtgttatagctctattagaagccgtgggtcacggaagagaaccgtggaacccaatgactagtgttcagctccattaggacgaagctgggcacttagccgtgcaggaacaatggcaagcctttagccggatggggagcagcaatgggcgcctcagtggatcaggagcacagcggacaccctgacggatccsgagggatggatgtcagtggcgggtctgccacgttgaccagcagcagtggtggatggcaagcaaaagctcagtt

SEQ ID NO: 947360 - DNA, 607 bp, Homo sapiens
cactactcagagggaagcttgtagctttaagtgcctataacaaataagagaaaaaacttcaaaaaacacctaattctaaaccttaaasaactataaaagcaagagcaaaccaaacccaaaattagaagaaaataaataataaagatcagagcggaaataaatgaaactgaaataaaaaacaacaaaaatcaatgaaacaaaaagttgtttttttaaaaattaaacaaaattgacaaactttagccagacaaagaaaaaatgagaaaaggtccaaataaataaaatcagaaatgaaaatggagacgttacaactgctatcccagaaattcaaaggattatttgtggcctctatgagcaacgtaagtccacaaagtgaaaaatctagaagaaatggtaaaattcctagacacatacaacgtacaaagactgaaccataaaaaaaaatccaaaaggtgaacacaccaataacaagtaacaatatcaaaacgtaataaaaattctcccagtaaacaaaatcccaggacttagtttcaatgctgaattctatgaaacgtttaaagaaaaactaatacaaatcctacttaaactattccaaaatatagaggag

SEQ ID NO: 947361 - DNA, 619 bp, Homo sapiens
cagctgcagaagttcaaccccaatcaggagtatctcaaaaaatagtagtcaagagagaccctcctagaccattgagcagcacattttgtcayctactttgtctggataagattatcaggaactcgggtctacaatgattcacaggcagtggctaatggtttggctacacagatggtgtttgaaaagaacaagaaaaatatgtctttccccagggaggtctgcagggagagtatgtgggtgtacccctacaaatggggatgagttgtgtacatttgtgtcctatgtgattgctcactcatcccactcaggaatggaggctatgtatgaactcaaaaagggcctccacccatcaatcctaatctgcctaccacctctgctgagtagtaacttgccagcagcagggatcaatgctgaaagcccaatgtggtgccattttctggaaaaccatctagtcacatggtggcacattaattacagtggatctcttccatcacagaggagcaacagtttctctccactattaaataggcctttctacagaatgcaaatcagcctactctgccctttgccatctgcggatgtatgaaatgcttattcactgtcttaccactcacaatat

SEQ ID NO: 947362 - DNA, 567 bp, Homo sapiens
ttatcctgatggagttccctttgtatgtgaccagtcctttctctctagttgcctgtaacatatttttttcattttgatcttggaaaatctgataattatgtgtcttggggatgatcttgtgtagagtcttgcaggagttctctgtatttcctgaatttgactgttggcctctctagcaaggctgaagaagttttcatggatgatattctgaaatatgttttccaagttgtttgctttctcctcctctctttcagggatgccagtgattcatagatttggcctctttacataatcccatacttcttggaggttttgcttattctttttttctttatttttgtctggctgccttatttcagagcaccagtcttcaagttctgagattctttcctcagtttagtttattctactgttaatacttgtgaatgcattgtgaaattcttgtattgtgttattcagctctgtcagacctgttagtttcttttttrtactgactacttcattcttcagctcctgtattgctttattgtgattcttattttccttgaattgggttttcctatcgtc

SEQ ID NO: 947363 - DNA, 633 bp, Homo sapiens
agattttgttacagctcttaatctatgggagttgttatcttgggctagctaatggcaactctgctttataaacacatacaygttttgatgtaaacttttaattgaaatatatctacaaaaagcacagagatcaatagtgtatggcagaataaacttttacaaagtgaacaaacttatgtgatcagcaccaggattaaaaacagaacatcacctggatcccagaaggtctcttctgtctccttacatttggtaactttctaagagtaaccactatcttgaattgtgacaccatagattaattttgcaatcttttgagcctggcttcttttgctgtatatttgtgacttatatctgtatttttgtgtatagttacagttcattctcactgctaaatagtacttattgtctaaatatgccactatttatttattcagtctactgttgttagatatttgagtagcttcctatatggggatattataaatagtgctgctatgaaaattcttggacatgtcttttggggaatatgcttatgcattttgttaagtttgtatctaaaagtagaatagctgggtcaaagatatgcacagcttagctttagtagatactgccaagcatttcttcaatttatac

SEQ ID NO: 947364 - DNA, 480 bp, Homo sapiens
gaaatatatcctttatatccttattctataagcctttttaattttttatttacttatttatttttgagatggagtctcgctttgtcgcccaggctggagtgtgccgtggagtgatcttggctcactccaacctccacttcctgggttcaagcaatcctcccacctcagccttctgagtagctaggattgaaggcatgcaccgccacacccagctaaatttttttgtatttttagtagagatggggtttcaccatattggccaggctggtttcaaatgcttaacctcaagtgatctgcctgccttggcctcccaaagtgctaggattacaggcataagctgccatgccaagcctaatytttttttcatcttttactttttaagcttttttgttacaaactaataccccaacacacacattagcctagccccacacaaggttaggattattaatagcattgtatttttctccttcatgtctt

SEQ ID NO: 947365 - DNA, 626 bp, Homo sapiens
aatcacttaatcacaaaggaagacagtaagaaaggaacaaaagaagataagatctacaaaacgaccagataacaggtaacctatcttttaataaacttttacctatcaatactaatcttgattgtaaatggattacattctccaattaaaagacatagagtacatgaatggattttttttaaaagcccaaactatatgctgtctacatgaaactcacttcacctataaagacatacagactgaaagtgaaaggatagtaaaagctattccatttaaatggaaacagaaaaggtgtaggaatatctatatttatatcagataaacgagactttatatcaagaacaagaaaagacaaacaagaccattatataataataaaggtgccaatgcagcaaaaggatataacaattgtaaatatatatgcaacaaacactggaacacccaaatatataaaacaaatattaataggcctaaagggagagattgcctgcaatacaataatagtagtggatttcaacacccccactttcagcaatgaacagattatccagacgacyaagaaatatcagagttaaatggcactcaacaaaatagacctaacagacacttagagaacatctcatcca

SEQ ID NO: 947366 - DNA, 577 bp, Homo sapiens
ctgtggatggggattgattaactgtcctcagaggactcagtatggaagctgagggatcgtgatcaagtgctattttgtgtactgatgctagtttatgtcaaagtttagggcccaccaaagagaagataccctgataagcaatgcatgtcttcactgaagacctctaaaatgttctgccttaggtttaaaggcaattgagaataaatgagccctctaaaacaggaaaccaaactttgaaacatttttagccactattaggtaaaggtgaccttcccctaacttaattatttcacagaagagaaattttaatcctctgtggaggaagataatgtcgaacagaacttctgtaatttctcatatacattttccagcattccataaaatataaccaggcatgacaggagtcaggatgaaattttcaaaacccaagaggaaaaaaagacaaagaaacaagcctacaggttaacacttagaaactattagattcagatttttaaataatwaaattaataattagtaattaaatttaatatttaaaataatattaagatgtacaagaaaatagatatcaaatgga

SEQ ID NO: 947367 - DNA, 771 bp, Homo sapiens
tactatttcaatataccatgtatattcatgattttattttacagttgacccttgaacaacatgggtttgaactacgcgggtccacttataggtggattattttcaataatttgaaaaaaaaattcaaaaaattatttctaataattgaaataattttttcaatgtgttagaaaaatttttggacatctgtgacaatttgaaaaaacagatgacccaagtagcctagaaatactgaaaaatttaagaaaaacttaggtatatcatgaatgcagaacatatatgtagatactaggctgttttatcatttactgtaaaatatacacaagtctattataaaaatgtaaaatttattaaaacatacatacaaacatagactacatggcaccgtttgtagttgagagaaatataaacaacaaagatgcagtattaaatcgtaactgcataaaactaactgtagtacatactgtattgtagtaattttgtagccacctcctgctgctattgccatgagctcaagtgttgtgcatagccacttaaaatgtcatgtgatgctaatcatctctgcaggagcagtcaatctctccagaaaattgtgtatcacagtaaaaagtgatcttttgaggttctcatgtatttttcattgtgtttagtgcaatacttccattgtgttcagygcaataccttgcgtcacaccatgggacccatgcaatgctggaagtgctcccaagaagcagagaaaagtcatgacattagaagaaaaagttgaattgc

SEQ ID NO: 947368 - DNA, 615 bp, Homo sapiens
caaaaagaacaaagctgaaggcatcacattacctgacttcaaascatactataaggctaccatagccaaaacatcatgatactgatataaaaacagacacataaaccaatgggaaagagtagagaacccagaaataaagccatacacctacagccatctaatctttgatgaagtcagcagaaataagcaatgggggaaaagactccctattcagtaaaatggtgctgggatgcctagatagccatatgcagaagaatgaaactggacctactacttttcaccatatacaaaaactcaaggtggattaaagagttaaatgtaagacctcaaactataataattctagaagaaaacctagaacacaccattctggacatgggccttgggaaagaatttataactaaatagtcaaaagcaatcacaacaaaaacaaaaattgacaagtgggaccctataaagggcttctgcacagcaaaagaaactaccaacagaataaaaagacaacctaccgaatgggagaaaatattggcaaactatgcatccaacaaagtctaatgtcgaagatatgtaagaaagttaaacaattcaacaagcaaaagacaatttaaaaaaaat

SEQ ID NO: 947369 - DNA, 848 bp, Homo sapiens
ctgtctcagggagattggggttttatctctaagcccctgactgggactgctgcctttttttcagagatgccttgcccagagagggggaatctaaagaggcagtctttccacagcagtgttgctccacccagttcgaacttcccggtggctttgtttacactgtgagggtaaaactgcctactcaagtctcagaattgtggacgctcttccccccaccaagtttgagtgtcccggcttgccttctgactgctgtgctggcagtgagaatttcaagccagtggatctgagcttcttgggctccgtgggggtgggaccttccaagccaaccacttggctccctggcttcagccccctttccaggggagtgaacggttttgtctcactggcattccaagcgccactggggtatgaaaaaaaactcccgcagctagcttggtgtctgcccaaacaactgctcagttttgtgcttaaaacccagggccctggtggcataggcactggagggaatctcctggtttgcaggttgcaaagaccatggggaaagcacagtatctaggccagagtgcactgttcacagtccctcatggcttcccttggctagggcagggaattcctcgactccttgcacttcctgggtgaggcaataccccaccctgctttggctcaccctccatgggctgcacccactgtccaaccagccccagtaagatgaactgggtacctcagttggaaatgcagaaatcacctgccttctgcgtcgatctcrctgggagctatagactggagctgttcctactcaattattttgccagcgatctcattcaccggtttttaagttgtctttaaag

SEQ ID NO: 947370 - DNA, 453 bp, Homo sapiens
agaaacacgctaacagagtgtgattttagtatgttgccaatcacagaagagcatatgtgagacctttaccaagtgtcttttttgtggacctcccctttctcctcagtcacatgtccttcctacggcacacgtgtcctaacccacgtgcacccccggtacttgtcagaatttgactctctcctagccacacagggtgatcctgctattagcagctttttctgggtgatttcactgcttatcaactctctgaccgaacctgtgccccagtttcttcatctacaaactgggaataatagtagcacctgccaccactttgacagcctggttgttacaggctcctagtatatgggttctcttaaagaaatttgtggccagacgtggtggctcaygcctgtaatcccagcactttgggaggctgaggcaggcacatcacgaggtcaggagatcaagacc

SEQ ID NO: 947371 - DNA, 750 bp, Homo sapiens
gctactataaggtcatttattccccttccgttttgtgtacagctaggcacamgcactgcacttcacattcttacctgtttgaatcaatccaacttcctgaggaaagctctgcctctcagtctggccatgagttcctgctgtgggctggctccaggccagcctttggcagtgacgccagagtggccagacttctgtggaattcggcatcccaggatgctctgggtgactggaaacagatcccatggtagccaagccccacagggaataggcccggagcccctagtagacagcaggcttgtaggtggagccagggtgtctcagcctggcaagggacagtccttgggaattctcctccccgcctcccgtagcccctgagaagtcttccatacacaatctcagtggagccggggccaagagaagcttcctaggcgccatcaagggtggccaaagcatattcccaggctgcagcccaaaggactgcctccgggagctcttcctctcaagcctggaaaagggcacttctgggcttagttcatccgtgggtgtcttacatgtatattcctatggctgaggaaagacaaggccagcctacatggtgtgatcacccctgtgagctcatcctgtgtctggagttctaccattaaagcttaatctatgggatttaaaacgttttcttggaatcatagtttcactggattggaaggaaccttagcattcatccagtcaatctcatgtttaaaaaaggaatat

SEQ ID NO: 947372 - DNA, 750 bp, Homo sapiens
gctactataaggtcatttattccccttccgttttgtgtacagctaggcacaagcactgcacttcacattmttacctgtttgaatcaatccaacttcctgaggaaagctctgcctctcagtctggccatgagttcctgctgtgggctggctccaggccagcctttggcagtgacgccagagtggccagacttctgtggaattcggcatcccaggatgctctgggtgactggaaacagatcccatggtagccaagccccacagggaataggcccggagcccctagtagacagcaggcttgtaggtggagccagggtgtctcagcctggcaagggacagtccttgggaattctcctccccgcctcccgtagcccctgagaagtcttccatacacaatctcagtggagccggggccaagagaagcttcctaggcgccatcaagggtggccaaagcatattcccaggctgcagcccaaaggactgcctccgggagctcttcctctcaagcctggaaaagggcacttctgggcttagttcatccgtgggtgtcttacatgtatattcctatggctgaggaaagacaaggccagcctacatggtgtgatcacccctgtgagctcatcctgtgtctggagttctaccattaaagcttaatctatgggatttaaaacgttttcttggaatcatagtttcactggattggaaggaaccttagcattcatccagtcaatctcatgtttaaaaaaggaatat

SEQ ID NO: 947373 - DNA, 773 bp, Homo sapiens
agggaatatttttgccatccctcytcccatcccaggcagtgcagcttgcagcagtgaaagtaattctctccttctgcttaaagagaggagagcaaagagtgaagaggactttgtcttgcaccttggataccagcttagccacagtaggatagggaattggacaaagatgtaaggccttcattgaagccctggcacctggacatttctagacacatcctgggcctaaacagaaccctgctgccttgaaggcaaggacccactcttggcaagatttatcacctgttgattaaagagcccgtggggcctgaataactactagtgacacacagggagtatgccacgggccttgggctctgacatgtgttggctttggggtgatccagcacattcccagctataatggctacagggaaagactccatctgtttgagaaaagcagagggaaaagtaaaggggactctgtgttccactttaagtaccagctcaaccacagtgggatagagctcttagaggtcccaagttcaggcctaggctcttagacagcatttctggacctgctctgggctagagaggagcccactgccctgaagggtgagccccaggcctggcagcattcgccacaagctgacagaagaaactttgggctttaagtaagcattagcggtggcctggcagaacacccccatggaccagtggtggtggtggccacagggagagatttctctgcctgtggaaatgggagggaagagcaggaaggactttgtatggtggtt

SEQ ID NO: 947374 - DNA, 594 bp, Homo sapiens
gcggccccacgatcaaggtcgtccgccctttagacttcagatcccctggtctccggctgcctccctcccaytgcagagcctccagagtctctgggctcctctctccaactctaggcctaagaatgtgattgtgttggcaaaggtggaaggtgccatctcgtgggagagaaagaggaggagtaagatggggccctgacccgcacagggagatgaaaggaaagaaacagcatctccccaaggagacggaggctgtcttggagcagatgaagcagagtttgtgagggaggctgccccctagcccttcaccattctcccattctgcctcctcccccactatccacctcctactcagaaccagtgactaattgcatcgcatttctctttgacttgcgtcacccagcagagagcgtgtggttgtttttacagcttattctttcagggattctaagtgacattttttaagtgctcttcccctgacttggagcagcacacccttcttttctctctccccctcatctcctttctttccccttacttaatttcctcttccacggcctgttggaaaaaaacagctcagggggagagggcaggctt

SEQ ID NO: 947375 - DNA, 654 bp, Homo sapiens
ccagagccttgaggttagtagagaagggctgaatcagcagctgtcactgtttagcaggagaaaatgggaggttgctgcatagcagacagcctgctgccacttctggggacctaatccagasagactcatgcctgttttcctgtcatgtttctttggccctatttctatctactatttgggtcttgaaaagaggatattgtcgtgcttcccaggaaactagctcagggacccaaacccaggaagcttccacccccaaaacatacaacccttattttggggggagtcctgtagagagtccagcatcccacctgtcctgattctgctagagaaagagatttcttcacaatggaagccattctttcccttaagttctttgcttctggggctcactttgccttcagtaatctctctccactccatcctacacaccaaagacctacactagtcccagcctctccctctgaggtgactcatggtaatcctacccagcacccaaggccagactcaaggcaaattgtactcaatgcccagttcaatctctcctttctgcctctaaaccaagcttggcaaactttttctgtaaaggtccacacagtacataatttaggccttctgggccatatggtctctgtcacaactaacttctcaactctg

SEQ ID NO: 947376 - DNA, 586 bp, Homo sapiens
ctagaagtgaaatagactattctgattgctgctgtgactttgctgttcatcatgataaccacatcctccttgcctgtggcarctgaatatataccttgtcccctgccaccctgagatccagttactccatttgatgtaggtttcccaatcagtgaccacagttcccactgtaaggtctggcctacaaagaagagtgatcacagagctcttcaaagacacttgggctctcctcataaatttacttctcacagtcatggtgaaaggtatatgttttggaccgtttcagggtctgtgagcaggccttacatgacaaatttattctaacgttccaatctctctaagcctttgagtatagcaagacagttctggtatttctagctcactcactctgggccaccttttagtcctcattttagccaaccaaccaaccaaactttaaagccctttctaactccctgagctgaaatattaaatgcagaatctcttcttagtgggcccatatcaataaatttgtcctcatccaactttatgttccttcaagcattatcccacaaccttaatgtctgtttccatacatatgccccag

SEQ ID NO: 947377 - DNA, 730 bp, Homo sapiens
ctggtgggccttatggacaggaattacaaaaaaggcatttgccaagtcaatggctgcataccaggtactgggaaatgtgataatttgctcaagcaataaaccacatcwggtacagtaactgcaattggagtcaccactttgttaagcttatgataatctactgtcattctccaagatccatctgtcttctgcacaggccaaatgggagagttgaatggggatgtggtgggaatcaccactactgcatctttcaagtccttgatggcggcactaatctccacaatccctccagggttgtgatcgtgtcttttatttggtatttttctaggtagaggcagttctaatggcttctgtttggcctttcccaccatagtagccctcaccctaccagtcttatactggacccactgtaagttgtacctgagcaaaactccattaattacctgacccttcataagtccctattttaagtggaagaccacaatgacattttgggtcccctgaactcaatgtcagctcagagccagtatccagtagtcctgaaatgtctgatcatttccctctccccagtgcacagttatcctactaaaaagctggagttccctttggggaagtgtgagagaaagattaagagcataaattgtcagtagtgcagtggggtccttcctcaaggggacccagcctccccttcattcaaggggttctgggtacgcaaactggttcaagtctc

SEQ ID NO: 947378 - DNA, 714 bp, Homo sapiens
agtctcccacaattaccattgttcctggcccggacttcaatccrgcctcccacattattctggataccacacctgacccctatgactataactctctgatccatctgacattcaccccatttccccatgtttccttctttcctgttcctcgccctcatcacgcttggtttattgagggcagttccaccaggcctaatcgccccacgccagcaaaggcaggctatgctatagtactagccactagcccgcctcttagaacctctcatttcctttccatcatagaaatctatcctcaaggaaataacttctcagtattccatctgctattctactacttctcagagattattcaggcccccacccttccctacacatcaagctccaggatttgcccctgcccaagactggcaaattagctttactcaacatgccccgagtcagcaaactaaaatacctcttggtctaggtagacactttcactggataagtagaggcctttcccacagggtctaagaaggccaccatagtcatttcttcccttctgtcagacataattcttcagtttagccttgtcatttctttccttctgtcagacataatttctcggtttggccttcccacctctatacagtccaatagcagaccggcctttattagtcaaatcagccaagcattttttcaggctcttggtattcagtgaaacctttatatccc

SEQ ID NO: 947379 - DNA, 660 bp, Homo sapiens
atacttctataatagtgcttagcccattgtgggttaccattttattaatacagtggattaagttacttgagggcagatggtctttgttttcctagaacatgacatataatcwatatccaacaagtgtctgctaattagatatgcgtgaaaattttccacgtgcataaatgttgaaaatattagtatgactttgcataatgaatacctcttcatctactgtaaacaatatgctttgtaattgagctgagcttaattcaaaattttcatagtaaagcctttaataaatatgtaactgctattttaataatgatacggtttggctgtgtccccacccaaaacttatcttgaattgtagctcccacaattcccacgtatcatgggagggacccagtgggaggtaatcgaatcatgggagcaggtctttcttctgctgttctcatgatagtgaataagactcatgagatctcatggttttataaatgggagtttccctgcacaagctctctcttctctgccaccatgtaagatgtgacttgcagtcggagaagccaagatgaacgaataggaacagctccggtctacagctcccagcgtgaacgacacagaagatgggtgatttctgcatttccatctgagctttgaagagagcagtggttctcc

SEQ ID NO: 947380 - DNA, 660 bp, Homo sapiens
atacttctataatagtgcttagcccattgtgggttaccattttattaatacagtggattaagttacttgagggcagatggtctttgttttcctagaacatgacatataatcaatatccaacaagtgtctgctaattagatatgcgtgaaaattttccacgtgcataaatgttgaaaatattagtatgactttgcataatgaatacctcttcatctactgtaaacaatatgctttgtaattgagctgagcttaattcaaaattttcatagtaaagcctttaataaatatgtaactgctattttaataatgatacggtttggctgtgtccccacccaaaacttatcttgaattgtagctcccacaattcccacgtatcatgggagggacccagtgggaggtaatcgaatcatgggagcaggtctttcttctgctgttctcatgatagtgaataagactcatgagatctcatggttttataaatgggagtttccctgcacaagctctctcttctctgccaccatgtaagatgtgacttgcagtcrgagaagccaagatgaacgaataggaacagctccggtctacagctcccagcgtgaacgacacagaagatgggtgatttctgcatttccatctgagctttgaagagagcagtggttctcc

SEQ ID NO: 947381 - DNA, 731 bp, Homo sapiens
ctagttgcatgcaaactttttaaaatgaaatgtttatggaagtcagtgtggcgattcctcagggatctagaactagaaataccatttgacccagccatcccattactgggtatatacccaaaggactctaaatcatgctgctataaagacacatgcacacgtatgtgtcttgcggcattattcacaatagcaaagacttggaaccaacccacatgtccaacaatgatagactggattaagaaaatgtggcacatatacaccctgtaatactatgcagccataaaaaatgatgagttcatgtcctttgtagggacatggatgaaattggaaatcatcattctcagtaaactatcgcaagaacaaaaagccaaacactgcatattctcactcataggtgggaattgaacaatgagatcacatggacacaggaaggggaatatcacactctggggactgttgtgggttggggggaggggggagggttagcattgggagatatacctaatgctagatgacgagttagtgggtgcagtgcaccagcatggcacatgtatacatatgtaactaacctgcacaatgtgcacatgtaccctaaaacttaaagtataatttttaaaaaaagcaaaaaaaataaataaaaaataaataaataaataaataaataaaawaaatgtttatgctaaaatgtcacacttacaatggctttacatgaggatttaatttcaatttga

SEQ ID NO: 947382 - DNA, 633 bp, Homo sapiens
gaagggtaagcaagtacatcttcacataacatcaggagagagagagtgacgggggaagtactacacagtttttaacaaccaggtctcatgagaactccatcatgagaacagcaaaaaggaagtccagccccaygatttaatcactttccgacaggctcctccttgaacatgtggggattacaattcaacgtgggagatgagtggggacacagtgccaaaccatatcattccaccctggctcgtccaaaatctcatgttcttctcacatttgaaaacacagtgatgccttcccaacagtcccctagagtcttaacttattccagcattaactaaaaagtccaagttgaaagtttcatctgagacaaggcaagtcccttctgcctatgagcctgtaaaatcaaaaacaagttaattactcccaaggtacaatggaggtacaggcatagggtaaatgctccctttccaaaaaagagaaatcagccaagagataggggctacaggcaccatgcaagtccaaaacccagttggacagtcattaaatcttaaagctccaaaatgatctcttttgactccactaatcatgttcagggaatgctgatgcaaggagcagctctgcttctgtgccgctgcctg

SEQ ID NO: 947383 - DNA, 578 bp, Homo sapiens
agaggtgggctcccacagccttgggcagccccacccctgtggctcttcaaggtacaggtacagcccctgcagctgctttcatgggctggcattgagcatccatggcttttccaggcacrtggtgcaagctgtcagtggatctataattctgaaatctggaggacagtggccttcttctcatagctccactaggcagtgccccagtggggactctatgtgggggctccaaccccacattttccctttgcactgctctagcagaggttctccatgagggctttgcccctgcaatagacatttgcctggacatccaggtgttttcatacatcctatgaaatctcttgaagctcccaagcttcaactcttgcctcctgtggaacttcaggctcaataccacatgggagctgccaaggtttggggcttggatcctctgaagccattgcctgatctgtaccttggcccctgttaaccacagcatgagttggagaggctgggacacagggcctcatgtcccaaggctgcacaaagcagcagggccttgggcctagcacatgaaaccatttttccctcctagagct

SEQ ID NO: 947384 - DNA, 748 bp, Homo sapiens
tacccagcagctccgaagagagcgaccatcgagaacgagccatgatgacaacggtggttttgtcgaaaaraagggggaaatgtggggaaaagaaagagatatcagactgttactgtgtctatgtagaaagaagtaaacataagagactccattttgttctgtaccaagtaaaattttgtcttgagatgctgttaatctgtaaccctacccccaaccctgtgctcgcagaaacatgtgctgtgtcaagatttaatggatttagggctgtgcaggatgtgctttgttaaacaaatgcttgaaggcagtatgctcgttaaaagtcatcaccactccctaatctcaagtacccagggacacaaaacacagtggaaggccgaagggacctctgcctaggaaagccaggtattgtccaaggtttctctccatgtgatagtctgaaatatggcctcctgggaaggaaaagacctgaccgtccccaagcccaacacccgtaaagggtctgtgctgaggaggattagtaaaagaggaagacatctgtctcctgctcatcccctgggcaatggaatgtctcagtgtaaaacccgattgtatgttccatctactgagataggagaaaaccgccttagggctggaggtgagacatgctggcagcaatattgctctttaatgcaccgagatgtttatgtatgtgcgtatcaaagcacagcacctttttcttaaccttgtttatgacacagagacatttgtt

SEQ ID NO: 947385 - DNA, 748 bp, Homo sapiens
tacccagcagctccgaagagagcgaccatcgagaacgagccatgatgacaacggtggttttgtcgaaaagaagggggaaatgtggggaaaagaaagagatatcagactgttactgtgtctatgtagaaagaagtaaacataagagactccattttgttctgtaccaagtaaaattttgtcttgagatgctgttaatctgtaaccctacccccaaccctgtgctcgcagaaacatgtgctgtgtcaagatttaatggatttagggctgtgcaggatgtgctttgttaaacaaatgcttgaaggcagtatgctcgttaaaagtcatcaccactccctaatctcaagtacccagggacacaaaacacagtggaaggccgaagggacctctgcctaggaaagccaggtattgtccaaggtttctctccatgtgatagtctgaaatatggcctcctgggaaggaaaagacctgaccgtccccaagcccaacacccgtaaagggtctgtgctgaggaggattagtaaaagaggaagacatctgtctcctgctcatcccctgggcaatggaatgtctcagtgtaaaacccgattgtatgttccatctactgagataggagaaaaccgccttagggctggaggtgagacatgctggcagcaatattgctctttaatgcaccgagatgtttatgtatgtgcgyatcaaagcacagcacctttttcttaaccttgtttatgacacagagacatttgtt

SEQ ID NO: 947386 - DNA, 750 bp, Homo sapiens
gaaatccctaactattattatttttggattgtgtctctccctttaaatctaataatattcgccytatatgtctggatgctccagtgttgggtgcatatatgtttagaattgttatattcctcttattgaattgatctctttattagtatataatgacctttttcatctcttttactgtttttaacttaaaattcattttgttagattgaagtagaggtacttctgcttgcttttggtttcatttgcatataataccttttttcatattttcactttgagtctatttgtgtctttacattgacatgagtttcttaaaggtagcatatagttgggttacacgcttgtatcaatttagccagtctatatcttttatgtggaaagtttaatccatttacataaagttcattattgatatgcgagggcttattactgtcactttattaattgatttctggttgttttgtatgtttgctcctttctctaattgtttttcattgtggtttggtggttttctataatagtaacatttacatttgactcctttccttacttgcatgtttgctctaacagtgggttttatagtattgtgtgttttcatgacggccaatattgtccttttgcttctagatgtagggatcccttaagcatttcttgtagggccagtctagtggtgaagaattccctcaggctttgcttctctgggaaagactatttctcctttttatgaaggataattttgctgagtatagt

SEQ ID NO: 947387 - DNA, 598 bp, Homo sapiens
aaggggccaaggtacagctcaggctgtcgcttcagagggtggaaaccccaagtcttggcagcttccatgtggtgttgagcctgtgagtgcacagaagtcaagaattgagstttgggaatgtctgcttagatttcagaggatgtatggaaatgcctggatgcccaggcagaagtttgctgcaggagtgggccttcatggagaacctctgctaggcagcgcagaagggaaatgtggggtcagagcccccacacagagtccctactggggcactgactagtggggctgtaagaagagggccactgtcctccagaccccagaatggtaaatccactggcagcttgcactgtggacctggaaaagccacatacacccccactgtatctaggaagtaactaacctgcttttaattttacaggctcataggtggaagggacttgccttgtctctgatgagactttggactgtggatttttaaattaggtgctgaaatgggttaagactttgggggactttggggaaggtatgattggttttgaaatgtgaggacatgagatttgggaggggtcaggggtagaatgacatgatttggctgtgtccc

SEQ ID NO: 947388 - DNA, 614 bp, Homo sapiens
atgtaatttaatgttgtgtttaatttaattcggttcatgactttgaaataatgtgtctcatatttaaaaataaaagtcattactacatagtaatgttactgacttttatataactgtgtaagaacataaacatcaaaatgaattttcctcttctaaatggacaactcaggaggggagctgcttatttcaacaatagtgcccttgctaagccactcttagatctatcttctgggtgtatagtaaacacatcttttcaatactcttcaaaatattaaatcaacttcactattcgatggtggattctatctggaggagtggcagatggttataaagattacatggaatcacagatagatttaacttattttcttttttttatttttgaatacccaagattcattcagagtcacttaggtaagaaaagctggatgataaaactgggtagcacaacttaggccaaaatcttcatgtcatttaatcttcccagcaaccacacaacataagtgtaaaggtgtttctgaaacacaaggggttctgtctacgaactgctgctcaccgtaaggaaagccaatcactgagacaacargtattgccaaggaagaagggggattcta

SEQ ID NO: 947389 - DNA, 572 bp, Homo sapiens
atacttatcatgcatttaattaggtaattacaaataatccaatattrccagcaactcactagagacgtttaaagttgagtattctaaatttttaagctaataaatgtgaagaaagtataaatcaggtaggagatttgaacccaaaacttttcagctcccagacatcatttatgaaagatagaggtgcaaaaaagaacatcagtattccacacaaatcatgtttcttttcttcttaccatcgcttattggaacacactatatacataagaattaattaatttagtaatgagggataggtgttaataaatgtttaacaactggctgtcttgggagaaaagcctgatttgcagtatttgtggtttctgtggtacaaatatcaccaaaatgggcagtttcaaaacacaaactcaacatcacagaatgtggaagctggaaagagacgcaggaaaagggctctctggagtgagtcttagcacactactgggtgaaagggctgcaagaatattttcagttttagggacactattctattccacaagttattttgaaaattttatttactttaaaagata

SEQ ID NO: 947390 - DNA, 793 bp, Homo sapiens
agcacttccccttttgttctctctcttcctcctgctctgcaatgtgaagaaggtgatagcttccccttcccccatgattgtaagtttcctgaggcctccacaaccatgtttcctgtacatggctgtgagtcaattaaacctcttttcttcataaattacccagtctcaggtagttactcatagcagtgggagaatagactaatacaataaggctatcattgtcatagacagtgatttctctgatagatctaggcaaggtaaattgaaaaccttctggaaaggattcaacattctagaagccattgacaacgtttatgattcatggaagaagctgattctaagccttatggattacttggtggggtttgaagacgtcagtggaggaacttcctgcaaatgtggtggaaacaggaagagagctagaattagaagtggagcctgaagacaagactgaattgctgcaatctcatgtcaaacttaaaggatgaggagttgcttcttacggatgagcaaagaaactagtttcttgagatagaatctattccttgtgaatactgttgaaatgacaacaaaggatttggaatattccatatacttacgtgataaggcagaagcagtgtttgagggaattgactacaattttaaaagatgttttcttataggtaaaatgctatcaaaaagcaatatcgcacactccagaaaatactttcatgaaagaaagagtcaacctatgaggcaaacttcactgtagtcttcttttcagaaacygccacagccaccccagccttcagca

SEQ ID NO: 947391 - DNA, 640 bp, Homo sapiens
taaagactcaaatgctttgcttgtrtatcacattgttgaaccatctgtacacacatattttgctattgattctagcactggtgctattcatacagtactaagtctggactatgaagaaacaagtatttttcactttaccgtccaagtgcatgacatgggaaccccacgtttatttgctgagtatgcagcgaatgtaacagtacatgtaattgacattaatgactgcccccctgtgtttgccaagccattatatgaagcatctcttttgttaccaacatacaaaggagtaaaagtcatcacagtaaatgctacagatgctgattcaagtgcattctcacagttgatttactccatcaccgaaggcaacatcggggagaagttttctatggactacaagactggtgctctcactgtccaaaacacaactcagttaagaagccgctacgagctaaccgttagagcttccgatggcagatttgccggccttacctctgtcaaaattaatgtgaaagaaagcaaagaaagtcacctaaagtttacccaggatgtctactctgcggtagtgaaagagaattccaccgaggccgaaacattagctgtcattactgctattgggaatccaatcaatgagcctttgttt

SEQ ID NO: 947392 - DNA, 603 bp, Homo sapiens
tcccctttgtcttggcaaattcctgctcattttttagggtttagttttatcttcamtcctccagaatatctcctctgatctcaatgtgtctgctgtctctttgtaacctggtataagtctcttttcgtgtatcatgttatcatttaattttctgtttatgtgtttgttctttcacaggtctattcatctacctccagccgctggcagagaagctaacaagaatagagatccaccagtgtttcttttcttttctttccttttttttttttgaggttctcgatactcgatttttaaaaaataatttttctctttctttttctttttcctttttttaatttcaatagatttgtgggaaacaggtggtgtttggttacatgaataagttctttagtggtgagttctgagatcttggagcacccatcacttgagcggtgtacactgtaccacccttctcccaccctttcccctgagtccccaaagttcactgtaccattgttatgcttttgcgtcctcatttgcgttcccacttatgagtgagaacatacagtgtttggttttccattcctgagttacttcacttagaataatggtctctaattccat

SEQ ID NO: 947393 - DNA, 595 bp, Homo sapiens
ccccaaattcatgttgaagtatcctaacccttaatgtgactatatttggaaacaagactttcaggaggtaattaaagttgatgaggtcatagggtggcctcaaaagaacaggaagagaaaaagatctctccctctccacacgcatgcaagaaggaaaggctatgtgaagtcacaacaggcaggtggccatctgtatgctagggagagagcctcgccagaaactgaaccatgctggcaccttgatctcagagttccagccttcagatctctgagaaaataaatgtctgttgttaaaaccacccagactggtattttgttatggcagtctaagctgactaatacagacggtaggtctgctctaaccaggtaagcccttaaaagggactggcccttcctgaaagaagagatttgaagcatgagagggcctataaagtgggccacatggcaagaaactgcaggtggcctcaatggggctgacagcrgccctcagaccactatcagcaagagaacaagaggctgagtcctataaaccacaaggaagtgaactctgccaaaaaccatgggagcttaaacaaggaccctgagctccagaaaa

SEQ ID NO: 947394 - DNA, 776 bp, Homo sapiens
gacatggcaggtgttactttctgctgtatggacaggaaagcaggataagggaaacgggagcaacaggagtgagggcgggtgtggaaggagggttactatttataaggaaggttcaggaaggcctctctgatgaggtgacatttggacctgagatctcaatgaagtgatgagtgagtcacatgacatctgaaaaaagagagtttcagaaagaaagagcagtaggtataaaggcttgaaggtataacagcttgaaggtcagggcttgccaagcatgtttgaggaggagcccggaggccaaggtagctggaccagagtaagggggatgaggagaggaggtaagaggatttcataggccactgcaagagtgagattttactcagtgatacagagagccactggagggttttgggggccgagtaatgaccacaatttgacttccattaaaaaaaaaaagactaatgggcctggcgcggtggctcatgcctgtaattccagcactttgggaggccgagatgggtggatcatgaggtcaggagatcgagaccatcctggctaacatggtgaaaccctgtctctactaaacatacaaaaacattagccaggcatggtggcacgcgcctgtaacaccacttgggaggctgaggtaggagaatcacttgaagccaggrggtggaggttgcagtgagccgagattgcgccactgcactccagactgggtgacagagcgagactccatgtcaaacaacaacaacaaaaaaagagaacaacagagtgca

SEQ ID NO: 947395 - DNA, 552 bp, Homo sapiens
tactcaattattgaacaccttaaaacaaaatggtgtcatattatagtacatggtgggaagagaatgtttctatacttttggtgagtagtaaatagcaacatttttctttgcaattggctctatgtatcagttccaaaatgttctaaaaaattatgaacatacatttctaagattattaatcacagcaataattgtgacagataaagtttggaaacaatataaatacccatcaagaaagatttgattaaaattatctgttcatataacataatactaagcaaacattgaaatgatattttggatatttaaagagataggtttaaagagatatttaaagagatagaaaaaaatcttcacagtgtatttttggtaaaaaatttgatgaataaaaaatatccagtctctgtataaaaagtctatataataataaatgcatcatgatcatatttaaaatgtattcaacatctgatttttttggtgctctctgctaartgtattatgtgagtttgctaatttaattatcataaaaatcctatgaaaaaaaatactctt

SEQ ID NO: 947396 - DNA, 602 bp, Homo sapiens
aattaaataaatagaacatctaaaagtcagctttgtaatttattaaaaaatctaggggagaasgtacagcaagatggccaaatagaagactttatgctgtgggaactccaaatttaagaactacctacacacacaaaaaaaacacctacataagaatcagaaatcaggtgagcactcacagtacctggttttaacttcaaatgactgaaagaggcactgaagagggtaggaaagacagtcttaaattaccagtgccacccttcccctatctcctggcagtggccatgtgacatggagagagaattgtgcacttaggggagggagaatgcagtgactgttggactttgcattgaactcggtcttgccctgtcatagcagagagcaaaaccgggccaaatgcatctcatgcctgcccacagaaagagcatttagaccagacctgtccagaggacaatcacccatcccagtggttggaacctgagttctggcaagcctcattaccacaggactttggggctctatataaacttaaaagactgtctaggccacaatgacttcaactcctaggcaagccctagtgcagagttgggctcagaccagtg

SEQ ID NO: 947397 - DNA, 602 bp, Homo sapiens
aattaaataaatagaacatctaaaagtcagctttgtaatttattaaaaaatctaggggagaacgtacagcaagatggccaaatagaagactttaygctgtgggaactccaaatttaagaactacctacacacacaaaaaaaacacctacataagaatcagaaatcaggtgagcactcacagtacctggttttaacttcaaatgactgaaagaggcactgaagagggtaggaaagacagtcttaaattaccagtgccacccttcccctatctcctggcagtggccatgtgacatggagagagaattgtgcacttaggggagggagaatgcagtgactgttggactttgcattgaactcggtcttgccctgtcatagcagagagcaaaaccgggccaaatgcatctcatgcctgcccacagaaagagcatttagaccagacctgtccagaggacaatcacccatcccagtggttggaacctgagttctggcaagcctcattaccacaggactttggggctctatataaacttaaaagactgtctaggccacaatgacttcaactcctaggcaagccctagtgcagagttgggctcagaccagtg

SEQ ID NO: 947398 - DNA, 444 bp, Homo sapiens
ttgcagacagcctattgtgggaccttgtgatcatgtaagttaatacttaataaactcctatatatataatatatatatggatatatataaamatatatgatatatataaatatatatggagatatatatttatatatatcacctattagttctgtgtctctaagagaaccctgactgcagcactgcaacccctttctaggacatccctgaaggacagtggtgaagtgaagggaaatcttctctgtgggcagaactttgagcagtgcacctagttgtgcactttccatggaaggagaaatggccagatgtgtgattatatactgattcatgggctgtagccaatggttaggctggatggtcagggatttggaagaagcatgattggaaaattggtgacaaagaaatctggggaagaggtatgtggatggacctctctgaatggtg

SEQ ID NO: 947399 - DNA, 465 bp, Homo sapiens
actctgggaggcatgggcttgggtggtgtggtgggatgacccatcctgttggcaggtcctttcaggttttaaaatgtcttaggccgggcgcggtggctcacgcctgtaatcccagcactttgggaggccgagacgggcggatcacgaggtcaggagatcgagaccatcctggctaacacggtgaaaccccgtctctactaaaaatacaaaaattagccgggcatggtggcgcgtgcctgtagtcccagctacacaggaggctgaggcaggagaatggcgtgaacccgggaggcggagcttgcagtgagtcgagatcgcgccactgcactccagcctgggcgacagagcgagactccgtctcaaaaaaaaaaaaaaataaaaaataaaaaaaaataaaatrtcttaggccagaaatgccctgacaacgctgttgcaggcctggggactgggggctggggacaaggg

SEQ ID NO: 947400 - DNA, 556 bp, Homo sapiens
aaaacactcaggaactacaaaaggatctcatgaccactgctactgccatcacccaccacaccacaggttcmaaggatgccaaaagcccacccacctccttaccgcaccactgctactactggcatctgagaaagccactcagaagcccaggaaccagcctgcctggaactgccacctcaggtgccagcatacattaccccaggtcacaatgataaacatgctgagcccaccactactaccaacgaaacctgaagaacttattaggcattccagtcctcagcacaacttccccacatctcccacccatggctgcaccctaactcgctgagcaatccacagataccaaggctatgtatagccaaagaaatcttacacagttttcatcactgcaaagaaccagagccaaatgccataccaagtaaatatcatagtaatatgttcaagaaaaaaaaaatcccctcccatgaaagtaattttaaattaaaaagaagcaactattactccagagcaaaaatcaaagtaatatgacaccttcagagaaacacaatagttctcc

SEQ ID NO: 947401 - DNA, 556 bp, Homo sapiens
accaaacctgctgagatacaacaaaagtagtgcaaagagtgaagtttacagccttaaatgcttacataagaagtagaaagattaaaaataaacaatgaaacatcacamctcaatgaactagaaaagcaagaataaaccaaacccaaaatttgctaaagaaaataaatcagaaacataaaagatataaagatataaagaaaaaattacaaaggattaaagaaataaacagttggttcatcaaaaagatgaaaacaattgataaactcctagctagtctaaccaagaaaataagaataaagatctaaataaacaaaatcaaatataacaaaagacattacaactgataccacataaatacaaagatcatcagagactattaccaactctatgctcacaaactggaaaacctagaggaaacagaaaaattccccaaacataccactttttaagatttatcaaaaagaaatagaaaacctgaatagaccaataataatgagtggtgagactgtatcagtttttaaaaatctccatacaaagaaaagcccaggaagagatg

SEQ ID NO: 947402 - DNA, 556 bp, Homo sapiens
accaaacctgctgagatacaacaaaagtagtgcaaagagtgaagtttacagccttaaatgcttacataagaagtagaaagattaaaaataaacaatgaaacatcacaactcaatgaactagaaaagmaagaataaaccaaacccaaaatttgctaaagaaaataaatcagaaacataaaagatataaagatataaagaaaaaattacaaaggattaaagaaataaacagttggttcatcaaaaagatgaaaacaattgataaactcctagctagtctaaccaagaaaataagaataaagatctaaataaacaaaatcaaatataacaaaagacattacaactgataccacataaatacaaagatcatcagagactattaccaactctatgctcacaaactggaaaacctagaggaaacagaaaaattccccaaacataccactttttaagatttatcaaaaagaaatagaaaacctgaatagaccaataataatgagtggtgagactgtatcagtttttaaaaatctccatacaaagaaaagcccaggaagagatg

SEQ ID NO: 947403 - DNA, 405 bp, Homo sapiens
ctgctccagggacccttatagttccacggtgatggggaacagaaagaggctcttccaggaaacagccttggggacaaggagaccacacttytgggtgattcgaagatcagacaaggctcctgtaaaatgaacgaatgaagtgaatgaatgagacggtaagtcaagtgaaatgaaaggtgtgggtgtgggctttgggctctccaccctcttaccattccacagtgtgccttccttacagggaagggggacgatgtccccggggctttactctttggcaaatatcaccatttccagccaaggcgccctgggcgagctgtggttaagtaactgaacatggcgtggtcagggcacacaggacacctgtgttcacaactggaaaatgagaaagcagagatatgactttgt

SEQ ID NO: 947404 - DNA, 740 bp, Homo sapiens
gctgggtgagaagaaagctcaggctggcggggatggcaaaggagctgctctcggacccccaatcctgtgtatgggtgggtgtatgttgggcagggagtgtggagtggggagggcccctgacagaagaggaaagcaaagaaacgtggttaaacagggaagcactgagggtcagaccaaagtaatgagaggcgtctggtgttgtggctaaattatgtccccccagttcctccactgaagtcctaacccctggtacctcagaatgggattgtgttggagatgggtttgttttgtttttgtttttttgagacagggcctcactctgtcccccaggccggagtgcagtgacatgatacggccctccccagcctctacctcctgggctcaagagatcctcctgccgcggacttcctggtagctgggatgaggggtaggtaccaccatgcctggctaatttttgtatttttttgtagatatggggtttcaccatgtcgcccaggctcgtctcaaactcctggcctcagcctcccaaagcaatggggttacaggcatgagtcactgtgcctggcccagagatggggtttttaaagagaggtagtgaagttaaagtgaggccatatcggtgggccctgatccaacatgacagatgtccttaaaagaagaggagattagggcacagataagacacagaccaggggcaaccrtgcgaggccgcggcaggaaggtggccgtctgcaagcccc

SEQ ID NO: 947405 - DNA, 740 bp, Homo sapiens
gctgggtgagaagaaagctcaggctggcggggatggcaaaggagctgctctcggacccccaatcctgtgtatgggtgggtgtatgttgggcagggagtgtggagtggggagggcccctgacagaagaggaaagcaaagaaacgtggttaaacagggaagcactgagggtcagaccaaagtaatgagaggcgtctggtgttgtggctaaattatgtccccccagttcctccactgaagtcctaacccctggtacctcagaatgggattgtgttggagatgggtttgttttgtttttgtttttttgagacagggcctcactctgtcccccaggccggagtgcagtgacatgatacggccctccccagcctctacctcctgggctcaagagatcctcctgccgcggacttcctggtagctgggatgaggggtaggtaccaccatgcctggctaatttttgtatttttttgtagatatggggtttcaccatgtcgcccaggctcgtctcaaactcctggcctcagcctcccaaagcaatggggttacaggcatgagtcactgtgcctggcccagagatggggtttttaaagagaggtagtgaagttaaagtgaggccatatcggtgggccctgatccaacatgacagatgtccttaaaagaagaggagattagggcacagataagacacagaccaggggcaaccgtgcraggccgcggcaggaaggtggccgtctgcaagcccc

SEQ ID NO: 947406 - DNA, 619 bp, Homo sapiens
aattcctaggaatatacaactctcctagcttcaatcaggaagaattagaaactctgaacagaacaataacaagcagtgagattgaaatggtaataaaaaaaattaccaacaaaaaaagtccaggactggacrgattcacagccgaactctatcagacttcaaagaagaattggtaccaatcctagtgacattattccacaatacaaaaaaagagggaatcctctctgcatgattctatgaagccagtatcaccctaataccaaaaccaggaaaggacataacaaaaaaagatattgatctgtagttcagtatccctgatgaacatagatagaaaaatccttaacagaatactggctaactgaatccaatggcatatcagaaagataatccaccatggtcaagcgggtttcataccagtaatgcaaggatggtttaacatacgcaagtcaataaatgtgatacactatataaacagaattaaaaacaaaaatcacatgatcatctcaatagatgcagaataagcatttgacaaaatccagcattcatttgtgattaaaactctcaacaaaattggcatacgagggacataccccaatgtaaataaaagccatctatgaca

SEQ ID NO: 947407 - DNA, 587 bp, Homo sapiens
agaaccactactctcttcaaagctgtcagacagggacatttacgtctgcagaggtttctgctgccttttgtttggctatgccctgcccccagaggtggagtctacagaggcaggcaggccaccttgagctgtggtgggctccacccagttcgagcttcccggccgctttgtttacctactcaagccttggcaatggcaggcacccctcccccagcctcactgccaccttgcagtttgatctcagactgctgtgctagcaataagtgaggctccgtgggcgtaggaccctccgagccaggcgcgggatacaatctcctggtgtgccgttttataagaccattggaaaagctcagtattagggtgggagtgacccaattttccaggtgctgtctgtcacccctttccttggctagaaaagggaattccctgaccccttgtgcttcccggttgaggtgatgccttgctgtgcttcrgctcatgctcagtgcactgcacccactgtcctgcacccactttctgacactccccagtgagatgaaccaagtacctcagttggaaatgcagaaatcattcatcttctgcgttgc

SEQ ID NO: 947408 - DNA, 415 bp, Homo sapiens
gagaacccaggagagggaggcccagggacagacaggtaacagctcttatttgcatgcagtggctgtgcccccatgaaggttttaggatctgtaaggyggctttgaaggagcccaagctccaaagcagtgtcaggaagtgggagttgtgtctgcaccactccctgggctcctgtcctcatcctgctcaccccctgcataggggagggggaacctcaccccactctgcttcacacacctctctcctcaggggggctgtgattctgacctacagtccttcgtctctgtttagggtagctgtggcccaggcagggccggctcagccataaacatacacacacacacacacacacacacacacacacacgcactgaataggcaactcactgaaatagaactagttgattaattaaagcac

SEQ ID NO: 947409 - DNA, 749 bp, Homo sapiens
tctgtggccgctgtccttatccagccacctgcaagggaactgcagccatgtggaaatcacctatagctggagaggagcctgtccaaggggcttctgggataagcaacagcaggaagggagattagccatcaaaacagaactgtgtagctccaaatgagaacaaaaaacttaactttaaaaaaaagttacctaatagcagaataaagcgtgaagaagcctgtctgcaatgagtataggggggttagaagagcaaagtcatccagctttagtgcttggcaagctgtccattttccagcccccctgaatgacttgagcagctctgtgggccccacatgtgcagccagtaacaggatctcacccaccccaacccaagggtcctgagcgtctgtctgcaatccccacatccctgctatagaggggcagacagaacacatatgctgcccatttgtggaacctattgattcataagagggactagttctgaggcaggcactggctgtgctagaaattaattcactaatcaattactctcacatccccagtctgcgggatatttctgtgcgatggattcctcctgccccactgagctgcggctttggtttttataataagatggtggcggygggaggagccaagatggccgaataggaacagctcctgtctacagctcccagcgtgagcgacgcagaagacgggtgatttctgcatttccatctgaggtaccaggttcatctcactatggagtgcca

SEQ ID NO: 947410 - DNA, 621 bp, Homo sapiens
tgcccaccttcttctctccaggatctgggatgtcctttgctattttggtgaattcccattttccttcttgaactaaagctcatcargttgatcgttatgcactattttgctccttccaagtcatttaggcacacaaagagcctctcatctgccatcttagggaaaaaaactgaacttttattaacattttaccaatattagctcatcaattgcaacaagtgtaccatagtaagccaagatgttaacaataggggaatcttgaggaaggagaggtgaatgagggaatttctcctaaatttaaatgaaaacttaaagttactaaaaaataaagacatctaaaaagctaatgggaccaggcatggtggctcatgcctgtaatcccagcactttgggaggccgaggcagatggatcacctgaggtcaggagttcaagaccagcctggccaacatggtgaaatctttccctactaaaaatacaaaaattagccaggcatggcagcgggcgcctatagtcccagctactcagggggctgaggcacaagaattgcttgaacctgggaggcagaggttgcagtgatttgagatcacgccactgcactccagcctgggtgacagagcaag

SEQ ID NO: 947411 - DNA, 597 bp, Homo sapiens
gcagctggaggttgttatcctaagtaaattaacacagaaacagaaaaccaagtttcacatgttctcacttataagtggaagttaaatttggggttcacatggacatacagatgggaaccatagacactagggattccaaaaggagggagtagggcaaggattgaaaaactttctattaaataatatgttcactaccatggtgataggtttaatagaagcctaaacctcagcatcacacaatatacccttgtaacaaaccctgcacaggtaccccctgaaactaaaagaaaaatggaaattaaaagcctcataagtccatagtttatggtacatttttttgtgttgcattctatgagctttgacaaatgtataatatatcctctattatagtatcatacagaatagtttcactgccttaaaatgaacctgagttccatctattcatccctgaatctatcagtcactagtctttttattgtctccatagttttgtctttcccagaaggtcatacrttttgaattatacaaccacttgttttttaaaaattgttgcaacacagtcatatccattcatttatgtattgcctatggctgctt

SEQ ID NO: 947412 - DNA, 597 bp, Homo sapiens
gcagctggaggttgttatcctaagtaaattaacacagaaacagaaaaccaagtttcacatgttctcacttataagtggaagttaaatttggggttcacatggacatacagatgggaaccatagacactagggattccaaaaggagggagtagggcaaggattgaaaaactttctattaaataatatgttcactaccatggtgataggtttaatagaagcctaaacctcagcatcacacaatatacccttgtaacaaaccctgcacaggtaccccctgaaactaaaagaaaaatggaaattaaaagcctcataagtccatagtttatggtacatttttttgtgttgcattctatgagctttgacaaatgtataatatatcctctattatagtatcatacagaatagtttcactgccttaaaatgaacctgagttccatctattcatccctgaatctatcagtcactagtctttttattgtctccatagttttgtctttcccagaaggtcatacgttttgaattatacaaccacttgttttttaaaaattgttgsaacacagtcatatccattcatttatgtattgcctatggctgctt

SEQ ID NO: 947413 - DNA, 580 bp, Homo sapiens
gggcagccaccagtgagtggatgccagggttgttgacaatctggaagccacagaggatctcgatctgttgccagcggtgcaggcgctcccgcaatgctgctgtcacctcgctcagtgcttgcctgaagacagaggaaagagaactgcaggcatggacttggtgtgagccccaataggaatgaagcctcttctcagaggaacaagttttgagaatatgtgtgaataaaacacacaataaactcaaacttaagagcaaggcaggagataaataaaggctgaggcaggagaccagagctgtccctccaccaatgaggaaatggaattggtgttggaggccctgtatgccctcaaattctgaggatgatatggacattgccagagtagataactggtgttacttacttagctgttagaattttatgatctacatcatccagggaagagctgtgggccacgtggaaggtgccaaagagtgtgtttctcttcttttttatcttctcagcctgcaaagatgaggcccccagctcaaaaagagcagggattcgagaatggaakaaatgagaaaggccttcccctatgg

SEQ ID NO: 947414 - DNA, 646 bp, Homo sapiens
tcggctcactgcaacctccacctcttgggttcaagcaattctcctgcctcagcctcccgagtggctgggattacaggtgcctgccaccatgcccagctaatttttgtatttttagtaaagacagggtttcatcatgttggccaggctggtcttgaactcctgacctgaagtgatccacctgcctcagcctcccaaagtgctgggattacaggtgtgagccactgtgccaggccctgtactaacatttttttctctatggctcttggcatttttcacagagcaatcacttctgctaagggatttcccctcttttacagatgagccattagaggctcaggaagagcaagtgaggtttcagaacaagtcccatcccaggggcataaacaggcataatctgtatatcactgactaggatgacctggggctaagctgagggaaggggctcttgcaatttgaaggttaaatggacacttagggggtacccaaagtcaggaaagagctctggggtgacmataggagagcccagtggtcaagacatggatctgatttagggtctgtgtgtgtgtgtgtgtgtatgtgcatgcaagctgcggttggtgaggaatttacttctgggtggttcagaaattagggcagagagtgcagt

SEQ ID NO: 947415 - DNA, 646 bp, Homo sapiens
tcggctcactgcaacctccacctcttgggttcaagcaattctcctgcctcagcctcccgagtggctgggattacaggtgcctgccaccatgcccagctaatttttgtatttttagtaaagacagggtttcatcatgttggccaggctggtcttgaactcctgacctgaagtgatccacctgcctcagcctcccaaagtgctgggattacaggtgtgagccactgtgccaggccctgtactaacatttttttctctatggctcttggcatttttcacagagcaatcacttctgctaagggatttcccctcttttacagatgagccattagaggctcaggaagagcaagtgaggtttcagaacaagtcccatcccaggggcataaacaggcataatctgtatatcactgactaggatgacctggggctaagctgagggaaggggctcttgcaatttgaaggttaaatggacacttagggggtacccaaagtcaggaaagagctctggggtgacaataggagagcccagtggtcaagacatggatctgatttagggtctgtgtgtgtgtgtgtgtgtatgtgcatgcaagctgcrgttggtgaggaatttacttctgggtggttcagaaattagggcagagagtgcagt

SEQ ID NO: 947416 - DNA, 568 bp, Homo sapiens
tacaattcaaggtgagatttgggtggggacatagccaaaccatatcaggtggtaagtgccctctttactctcagttcttgttcttttgctttcaagagtttagataaaggaaagaccagatgtgttttagaaatcaggggttcaaactttatcatgtgtagaatgtgacatttagttcatggctggtctttttcatactttgattcttgaaattagagactacatctttctgtgattcagagtaacttatgtcattcaaatttgatgtctaaatacagcttataactgctttcctctgaaataggagattttgcccttgatagaattttttaaatagtgaaacaaaacatctctaacagaactctaagttaattttttttggtttttttgagactgagtctcactgtgtcacccaggctggagtgaagtggtgtgaactcagctcactgcaatttctgtctcccgggttcaagcgattctcctgtctcagcctccygagtagctgggattacaggcgtgcgccaccgcgcccagctaatttttcatatttttagtagagatgcggttt

SEQ ID NO: 947417 - DNA, 559 bp, Homo sapiens
tttgttttttttttttttcccacataaagtctcctaaatacctacccaaacttaaagtgttagaatttatgtggaaagaatttcaaaactgtattttaaagagccctccagttaatgctgacatgtgatcacccaggaacccctaaacttaatctgaatggctgttatgctcttgacaagtttctgtaaaacagaaaggaatgtcttcatccctctttcaacttttctaactagtgaactacaaagttatatttattatttaataatcataaccacaacaacagcctaaccaattttaagcaccttccaaacaggcctatggaaattactttccatgtgctacttaattctattcacacaattatgaaaaagataggtactattgtttttctactttatataaaaaaaaattcaagagatcaagtacctgcccaaygtaaaacctgatacattttagatctttgattcattgtgtaatgtggcagacacggagatgccctccccagatccctcttcatagaaagatttgttgccccaagtgctgagagtgtggtcagca

SEQ ID NO: 947418 - DNA, 638 bp, Homo sapiens
caggctggagtgcaatggtgtaatctcagctcgccacaacctccacctcctgagttcaagcgattctcctgcctcagcctcctaagtagctgggattacaggcatgcgccaccacgcccggctaatttttgtatttttagtagagatggggtttcaccatgttggtcaggctggttttgaactcctgaccttgtgatctgctggtcttggcctcccaaagtgctggtgtgtctggaattggttacttctggtgcgttcttcgtctcgctgacttcaagaatgaagccacggaccctcgcggtgagtgttacagttcttaaagatggtgtgtccagagtttgctccttcagatgttcagatgtgtcccgagtttcttcttccagtgggttcgtggtctcgctaacttcaggagtgaagctgcagaccttagcagtgagtgttacaactcttaaaggtggcgcgtccagagttgtttgttcctcccgatgggtttgtggtctcgctgacttcaggagtgaagccacagaccttcacagtgagtgttacrataaagctagtggggacccaaagagtgagcagcagcaagatttattgtgaagagccaaagatcaaagcttccacatcctgcaaggggaccc

SEQ ID NO: 947419 - DNA, 563 bp, Homo sapiens
accaggcgccttgagggttgaacttaggtgcagcctccaggggcctttctggtgctgtgggaggtgggtgcctgtgcacggactggaccgcacagaggaaaaatggcaatcactgtctgttggagggagtccctgggaggactgctcttaaagaaggctttagggcaaatgatgctctagtgggctttggagggtgtgtaggagcttgcctcggagacaaaaccttggggaagagaagagagtccccagtagaaggtactaattgcacaaaggcgaggagataggacgtggcctgccccccgcccctcagtgccttttacttgtaccattctttattatttattattattattattttcagacggagtctcactctctcacccaggctggagtgcagtggtgcgatctcagtttactgcaacctccacctccygggttcaggcgattctcctgcctcagcctccggagtagctgggattacaggcgcctgccaccacgcccggctaatttttggatttttagtagagacagggtttcaccatgttggtcaggcgggtctctta

SEQ ID NO: 947420 - DNA, 563 bp, Homo sapiens
accaggcgccttgagggttgaacttaggtgcagcctccaggggcctttctggtgctgtgggaggtgggtgcctgtgcacggactggaccgcacagaggaaaaatggcaatcactgtctgttggagggagtccctgggaggactgctcttaaagaaggctttagggcaaatgatgctctagtgggctttggagggtgtgtaggagcttgcctcggagacaaaaccttggggaagagaagagagtccccagtagaaggtactaattgcacaaaggcgaggagataggacgtggcctgccccccgcccctcagtgccttttacttgtaccattctttattatttattattattattattttcagacggagtctcactctctcacccaggctggagtgcagtggtgcgatctcagtttactgcaacctccacctcctgggttcargcgattctcctgcctcagcctccggagtagctgggattacaggcgcctgccaccacgcccggctaatttttggatttttagtagagacagggtttcaccatgttggtcaggcgggtctctta

SEQ ID NO: 947421 - DNA, 703 bp, Homo sapiens
gtgaaagttgtgaaaaagtttaaagagccagcatcgtggcccttaaagaaccatgagcacacgctaaaagtaccctcagtaattcaatcaactatasaacaggggtaagacaaactggcctttgggccaaatctggcacaacgcctatttttgcaaataaatattgtctgaacatagccacgtttatctctttgagacagggtcccaccctgtcacccaggctggagtggcacgatcttggctcactccaacctgtctcctagactcaagcaatcctcccacctcaatctccggagtcgctggggttacaggcgtgcaccaccaagcttggctaagttttgttttgttttgtttttcttttagagacaggatttcactatgttgcccagaccggtcttgaactcctgggcctaggtgatccacgcgcctcagcctcccaaagtgttaggattataggcatgagccaccaacggtgcccagtccaggccacttctttacatattatctacagcctacagcttttgtcctaaaacagcagtgctgagtggctataacagagaccaccatttggtttacaaagccaagcatacttactatgtggccctttacagaaagtttgcctatccctgaaatagagcatgaacattcacttatgggcagggggtggggaatcaacagaaaatgcttagttttaaacttacca

SEQ ID NO: 947422 - DNA, 619 bp, Homo sapiens
ataaaaaataaaaataaactctartttaatccttccaacccttatggaaggaggcatttcacacccacaggtgcggcaactgagcctcagaaaggtgaagagacttgcccaaggccgcccaaagaatcagcctccatgtgggctctaagtctgccctgttcctgtctttgggactcccgcccggagagcccgagcccctcagcagcaaagtcccagggactgtggagggactgggatagctggactcctgtcggcagggatgctcatcactgggtgaccttggtgacatggcccgctctccttcctccctggaactcgatgatctcatctatcaaatagtgcctggcctgcgacccagggaagctgggagcatgtcttgtctatacctccagtccctctgggcccctctcccagcctccacacacttctccagctcagagggtgccaaacaagctcagcaccccctgctgctccccaccaggccccttccagtcccacagtcccccatttcctgggccagagtcctgagcaaacccttggagtcttccttttcttgcccccacatgcagtcaccaggtcctttagcttctcccaacaaagggccccagctggcatctgt

SEQ ID NO: 947423 - DNA, 711 bp, Homo sapiens
gacgaagtctcactttgttgcccaggctggagtgcagtggcacgatctcggctcactgcaacctctgcctcccaggttcaagcgatcctcctgcctcagccccccagtagytgggattacaggcacacgccaccatgcccggcctaatttttgtattttcagtagagacggggtttcttcatgttggtcaggctggtctcaaactcccaacctcaggtgatccacccgcctcggcctcccaaagtgctgggattacaggcgtgagccaccgcacccagtcagccccattttcaagatgaggaaactgaggttcagagtagtcaacagctcgcccaagtcacacagtggatctaggacttcaacccaggactgtaggagccagggagctctttgagaaccaggggaatagggagaagaactcggagtcagggtgggtgaccgcgggggaggaggtgggggcagggctcactctccctgggcccggagagggagtttctcttgggaagaggcaggctctgaggctgttgatctctaaattatagcgttggcgcgtaccggttgctgcggcaaccgagttgtcctgaaccggggaagtgtataaacattgccacagatgcacaattagatcaggaagaagaatagaacagaaaatagaaacttccagccttatgtaattctgggccaaaatgttattgggaacccaggcccagt

SEQ ID NO: 947424 - DNA, 644 bp, Homo sapiens
gcagaaattgatgagctgattcgaaaatttatacggaaatgcaagggatcccaaatagctaaaacaatcttgaaaacaaagaacaaagttggaggactcatactttcttggtttactacaaagctacaataattaaaaagtgtattcctggcatctgggcaaacatatatctcaataaaatagcaccaacaatccagaaataaactctcacatttatagtcaattggtttttgacaagggtgccaagacaattcagtagagaaagaatagtcttttcaaaaaatggtgctaggacaactggatattcacatgcaaagaaatgaatctggaccctttacaccatacaaaaaaaactaactcagactgggtgtggtggctcatgcttgtagtcccagctactcaggaggctgaagctagaggattacttaagcccaggagtttgaggttatagtgagctatgatggcaccactgctctccagcctgggtgacagagggagatcctgtctcagaacaaaacaaaaaaacaacaaacaaaccttaaaacaacaacaaaacaayaacaacaacaacaaagtcgaaatatgtagctactgtatgacccagcagtttcattcctagctgtatactcaggagaaatgaaaac

SEQ ID NO: 947425 - DNA, 591 bp, Homo sapiens
tttgacttttttttttcttccagaagcctttcccacgtcttccgaaattattctctcttcccagcctctatcttatctgaatctttgtttgcayttctaatgctaacacctaattcaggagcttatcgctcacacctggaccactccaatagtctcctaactgatttgtcaaaattagcccatgtgaaactggttttgtttctcctccaacaggagggttaatttgttccaacaccagaagattctcttactcaaagctgcccctttgtgcgatcactttccagaactttgttttcccatgtaaagcctcaatgccctagctaaaagagtgggagggggtcaggcctggagaaattgctgtctctcagcttgcatccttacatacagtgggcgctcaatgaatacttgtggacacattcttttttctttttgagatggagtcttgctctgtcacccaggctggagtgtagtggtgcgatctcggctcactgcagcctccgcctcccaggttcaagcaattcttctgcttcagtctcccaagtagctgggactacaggtgcgtgccaccacgcccagctaattttttgtatt

SEQ ID NO: 947426 - DNA, 565 bp, Homo sapiens
tcgtgtatatgtaccatcttttctttatccagtccaccactgatggacacccaggttggttccatgtgtttgctattgtgattagtgttgtgttggtatctgaatttctaacacaagcacagagcastttgtgcaagtcagtgaacagcatttctcttttggatcctccagccatcatccaaagtcacagtgcaactctggacaaaggcacaacatctctgagctgttgtttcctcatctgtgaaacaggggaaagagtctctacatgaggcattatagggaggattaaacaaaacaccataataaaaagcatgcagcacagttcctggcattctgcagaaactccatacatagttattaatgactcctccttgtcttaaataggagggatgagaacaaacaccttgctttgtcccagtcttaaccatgatgtcatttgcagattttccttagttagctagattcttctttgacaatgtgggagctaacatctcactatcttataagattgttgtaagatccaaacaaaacaatgtgtgagagaactttataagctatagattat

SEQ ID NO: 947427 - DNA, 775 bp, Homo sapiens
ttatgcaaatgggcacttgtggcttgggggaacaacatagtaaatgcaccacacacagatgtaaacttaaaccttgaactacargtgtaagtacaatttgaaacagtatggatgactctcatgagcataatattgactaaaataaactagacacaaaaaacacttacataaaattcaaaagcaggcacctttaaactgctgtggtaggagtcagggttctggtttccctctgaagaggaaaagggcggggcttctggggcactggttggtaatgagtgcaagggtcgttctgttggctcactttgagcaaaatcaataagccaaacacggatgatttgtgcctttttctgtatatgtatgttttacttcagtgaaacttttttttttttttttttgagacggagtctcgctctgtcgcccaggctggagtgcggtggcgccatctcggctcactgcaggctccgcctcccgggttcacgccattctcctgcctcagcctcccgagtagctgggactacaggcgcccgccaccacgcccggctaattttttgtatttttagtagagatggggtttcaccgtgttagccaggatggtctccatctcctgacctcgtgatccgcccgcctcggcttcccaaagtgctgggattacgggtgtgagccaccacgcctggccgaaactttttaaaaatactacactttgagcaatttagagctaaagatgatatgttctggaaatctgttttatttatgtgactctgaaggtggctccagt

SEQ ID NO: 947428 - DNA, 472 bp, Homo sapiens
tatggtcacacctcatggaactggagaaacaagaacgatccaaaaccaaacccagcagaagaaaagaaataatgacaatcagagcagaactaaatgaaattaaaacmaaaaaaatacaaaagataattgaaacaaaaagccggttcttcaaaaagataaataaaattgatagaccagtagtgagattaaccaagaaaagaagagagaagatccaaataagcttaattagaaacaaaatgttaaatattactactgatactacagaaatacaaaagattactcaaggctactatgaatgcccacacacataaactaaaaaacccagaggacatggataaattcctggaaatatacaaccctcctagattaaaccaggaagatatagaaaccctgaacagaccaataacaagcagcgagattgaaatagtaataaaaaaatgccaacaacaaaaaagtccaggaccagacagat

SEQ ID NO: 947429 - DNA, 630 bp, Homo sapiens
ctggtggtgcctgcatattgtgcagaaccatctgtggaccaggccatagtcttctcttccactgtcaactgatcataaggaactcaccatggggccatygatgtaggccgaggaagacaaggcagggtggcaggagtggagaccaggggcatttgagccacttcctcatgtaacttacttgcgccttcaggacctgctcgagcctgatcacgtacataccacttccattttgatgattgaatgctactgcgcatgacccactttatggctagatgggtcagaaagcacccaattcatgttaagcagttcaggttgcatggtgacttgatgacccataatcaaatgttcagtttccaccaaagcccagtaacaggccaagagctgtctctcaaaaggagagtagtcatctgcagaagatggcagggccttgctccaaaatcctagaggcctccgctgtgattcacctagagggacatgtcaaaggctgcaaacagcatccctatctgccactgacacctcaagcaccatcggatctcctgggtcacatggcccaagtggcagagcaacttgcacagcagcctggacctgttgcagagccttctcctgttctggaccccgctcaagactggc

SEQ ID NO: 947430 - DNA, 236 bp, Homo sapiens
acagaataaatgcacatggttatatctatttcttctcaaaatgycaaatttctaaaatgactacaaattatttttaaaatataaattcacaaagacaaagatcatggaagtagagactatagtaaatgagaaatatcacataatctttgaacctggaaagcagatgggaaacaactgatttcccaggacagtgaaatttaagttccatggtgaagaaacaatgagaggcatcccac

SEQ ID NO: 947431 - DNA, 686 bp, Homo sapiens
agaaaagtgccattttcttcttatctttcatcatatgcttcaaggatgcatattatcaatatgtattagtgtttatgtcaacctttgtcacctgagagacagaattcctcattgtaacattaccctttccctcyatttcctctttttttgtactatgcttgttggaagaaagtcacgatgcatagctcatatttaaggagtaaggagttatgtttcacctccttaaaggcaaaaatttttactttatgaagttatatttaagttatggatttcttctgcatggaagattagtacactctcttgcatgtattttttattcaataattcatatcagtatggactcatgcatatgtattttatacccaatacattttacttcctttgttgctaagattttttccagttttggccatgggagctcttccattgccttttgtagctctttgatataccacaatcattgtgggtatattgatgtattcatttattggctgaacttttctgagcacttctttattgtttagcacaagacactccaggatcatcttctatatttcctgttccagtcctaaaatcagccagttctccaagtagctttggtttcttcttattagagaaagttattagaaaccaaaatttaggcattaggtagactcattccactggagtgtgattgcttctagggc

SEQ ID NO: 947432 - DNA, 582 bp, Homo sapiens
tttcatctgacagttgaaaattagatgccattaaaattaaagcatattatagtatttgaatatagcgtcacgtttaatccagaatataattaatttatatatccttcaatttacaaaggatttgtaacagttgtttctatttggatgttgacagttatttgaaaactgtgatgggacactcagcctgtcaaccttgaattatgaaatttggaacataagattaagtatagcgtttattcaagtgcaacacttggggatagccacctgggaaacatagactccaaaagaatgggccagccttttaaagtggggaagttaaggttttacttatgtaggcagttaacagggttgcaacattttccttacaaggtgggtaaataccttatagtgattatcaatttgctacattccaaggaagattgctttaacattacattaggagaaacaatggtcttaaggggtcttctctctggcactatttggtcttttctaatcatttacaggacaggactgaggaagggatttaatctgtaatcagagaggcagaagttycagctacaagctacgtgactcaggccacat

SEQ ID NO: 947433 - DNA, 654 bp, Homo sapiens
ctttgtcacaaggtgacgggatggagtgagtgcagggaagagaaacgtcagaggcttataaaaccatcatatcttgtgagactcactaattatcacaagaacagcataggcgataccacccccatgattcagttacctccacatggtcctgcccttaatacatggggattatggggattacaagtcaaggtgacatttgggtggggactcagtgaaatcatatcaatctgcccctaggccctcccaaattttaggtcctcacatttcaaaacacaattatgcccttccaacagtcccacaaagtcttaactcattccagcattaacccaaaggtcaagtccaaagtctcatctgagacaaggcaagtccctttcacctatgatcctgtaaaatcaaaactaagttaattactttctggatagaatgggagtacaggcactgggtaaatacacttatttcaaatggcaaaaaatggtcaaaacaaaggaggtacaggccccatacaggtctgaaatctaacagggcagtcattaaaccttaaagttccaaaatgaactcctttgactccatgtctyacatgcagggcatgctgatgcaagaggtgggttctgatggccttgggcagctctgtccttgtggctttgcagggtaaaa

SEQ ID NO: 947434 - DNA, 590 bp, Homo sapiens
gtgaacagacaacatatagaatggaataaaatatttgcaaagtatatatctgaccaaagtctaatatccagaatctataaggaacwtaaatttacaagcaaaaaacaaacaaccccattaataagtgggcaaaaaacatgaacagacacttttcaaaagaagacgtatacacagccaacaagcatatgaaaaagtgcttaacaccactaatcattagaaaaatgcaaatcaaaaccacaatgaaatactatctcataccagtcagaatggctattataaaaagttaaaaaataacagatgctggtgaggttgtggagacaagggagcacttatacactgctggtgggaatgtaaatcagtccagccattgtggaaagcagtttggcaatttctcaaagaccttaaaaacattatcatttgacccagcaatgccactattgagtgtatacccaaaggaatataaattgttctactataaagaacatgtatgcacgcatatgttcatcacaacactattctcaatagcaaagacatagaatcaacctaaatgtccatcagtgatataatgaataaagaaaatatggtacata

SEQ ID NO: 947435 - DNA, 629 bp, Homo sapiens
agcagatgggtaaatgcaacacccaatcatcggcagaggtcccaatcttgacagaggtggctgggggagctctcagtgaaatgcactgagatcttaccagggggaaggatggcctctcccttgccaggmcagcaggaaagcaatccacctcccagtcacactcctgacccagtgctacagctattcaaatcagacaggcatctcttttcatctgcaggaatgaaattccaagtagagttgaatatttgatattccaagtagagacgaattgtgactctacccctcaggcaagcctgaacccagagggcactcctcttgtggggatccagtcaccctgaagtgttccagaaaggctgcctataggtgcactcatgctgaactcctatgggagaagccctagctgtgtctgcagtgattggcaggagggaaaagaattcctcttctccaggaccctttgtgagcacaagggctgcctgacagttggggcagagctgcagactttccccactgagcccagcactgtatctgtgcctctactgaaagacacttcccaccagcagaaagttctgggactcaaggcctgccatccagacttgtttatctcccaaggtgttctcttaatgtggtac

SEQ ID NO: 947436 - DNA, 492 bp, Homo sapiens
gtttgagactggtgtagacctcctcctctgaggacttccttgttcttctttcrtctgtcttcattttctcccctgtttcacataatatttccccttctggaaaatttatccgaaagaaataactgaaaggaaaataaatcttggggccccagaaccactaaggtaaagggaaaaagtcaaggtgggaactgcttagagcaaacctgcctcccattctattcaaagtcttccctctgctcactgagatagatacatatctgattgccttctttggaaaggctaatcagaaactcaaaagaatgcaaccatttttctctcacctacctgtgacctggaagcctccctccctgcttcaagttgtcctacctttctggagagaaccaatgtacttcttacacatattgaatgatgtctcgtgtctccctaaaatgtataaaaccaagctgtggcctgaccacagtgggcacatgtcatcagtgtcaggcctctgag

SEQ ID NO: 947437 - DNA, 492 bp, Homo sapiens
gtttgagactggtgtagacctcctcctctgaggacttccttgttcttctttcgtctgtcttcattttctcccctgtttcacataatatttccccttctggaaaatttatccgaaagaaataactgaaaggaaaataaatcttggggccccagaaccactaaggtaaagggaaaaagtcaaggtgggaactgcttagagcaaacctgcctcccattctattcaaagtcttccctctgctcactgagatagatacatatctgattgccttctttggaaaggctaatcagaaactcaaaagaatgcaaccatttttctctcacctacctgtgacctggaagcctccctccctgcttcaagttgtcctacctttctggagagaaccaatgtacttcttacacatattgawtgatgtctcgtgtctccctaaaatgtataaaaccaagctgtggcctgaccacagtgggcacatgtcatcagtgtcaggcctctgag

SEQ ID NO: 947438 - DNA, 616 bp, Homo sapiens
aaggaagtttgagtttagagtctgaggcaggactaattaacttcctgwtaaaacaatcaagactatttgatagaatagaacagaatctgaaatctctacaatgtataatttacaatgtcatgaataaaatcaaaaattactagacttaggaagaaaaagaaattgtaactcataagcaatcattgcaggctgaccagaagatttcacctatactgagttagcaaagatttttaagatggctattaaaactatgttcaagagcataaaggacaatatcctataattaataaacaaataggacatatcaacacagaaatcacaagtatttttaaaaatcaaacagaaattctagagctgaggctaggcatggtggctcatgcctataatcccagcccagcactttgggaggtgaaggaggaaagatcacttctatgaaagaaggaaaggaaggggaaggggaaggggaaggagaaggaaattctagagctaaaaaatgaagaaccaaaacaaaatatttaatggatggtcttaatagaagactagagaggttataagaataagtgaacataaagacagatcattagaaattatcaaatttcaagaacagagagaaaaa

SEQ ID NO: 947439 - DNA, 629 bp, Homo sapiens
tctcttttcttttttgaatatttttttgagattgagttttgctcttgttgcccaggctggagtgcaatggtgccatctcagctcactgcaacctctgcctcctgggttcaagcrattctcctgcctcagcctcctgaatagctgggattacagatgcctaccaccacgcctggctaatttttgtatttttagtagagactgggtttcaccatgttggccaggctggtctccaactcctgacatcaggtatccacccccttcagcctcccaaaatgctgggattacaggcgtgagccattgagccctgcctttttttttttcccccctctggagtctctgttttctccaagttgctttttctccatttttttgtgggttttttttctgtttttgttttttatattccatgcaatcctccaatgtcatcttttagactgaggaagagaagctgatggaagctcataacatatgaatgtggcttatcaatttttatctcaccacagagcagtggctttcaaaacgttttgatcaagtcaacagtaagaaatgtattttacatgataaccctgggtatgtgaatgtgtgtgcgtgcatcttagaaaaggttcaccatacttttttcacaatac

SEQ ID NO: 947440 - DNA, 554 bp, Homo sapiens
ggacaccttccttactggcctaaagcctgaactgttcaacctagtaaattaaatactggaggaaaaataagtaaataaaaatgtgcacagcactgaggaatgagataagcttcagracacttctgccactcaaactccacaggagacagtgaacctgctcacacactgagcacattgccactacaattatcatctgagaacgccatcatacgaatactgtctataaccaaggaactcatacagagtcttcacccatgaaagtatccacagccaaatcaggtacaataaacagtaaacattaaagttatatcctcaagggaaaaaaaatggaaataaagaaacacagttgaatcacaaataaattcaaaaataattaaaatagcctatccaaatgagaataaaccagaaaattaatttgaaaaatataataaaacaaggttttgtaacaccccccaaaaatcacaccagctcacgagcaatggatccaaatcaaaatggagtctttgtaataccacataaagaatttaaaaagttgattattaagttattcaaag

SEQ ID NO: 947441 - DNA, 598 bp, Homo sapiens
agaggaagataaacaaaagaacctcttggctaccagtctagctatagcccattgctctcaaccaccatccactggatcgyagcccaaattacacaaaaagcagggctaatttgcccctctgagaaaccaggagcaagaattcaacaacaaagactctgaacagagcctttggtctctgaaaacttctagaaatgaagccaactgactatactcaatttataccacaatctaaggtacacaagccatcccagataagaaagaatcagcacaaaaactctggcaactcaaaaagccagaacgtccctttacctctgacggagctcagtagctccccaaacaatgcttttttaactagtctgaattgtctgaaaatgacagacatgtaattcagaatctggatggcaaaaagcccattgagatgaaggagaaagttgaaactcaatctaagtaagccaagcaattctgtacagttattgaaagctgaaagacaaaacactcattttaagaaagactcaaattgaacttttgaggtaaaatattcactacaaaaatttcataatacaatcagaaatattaacaacagaatagaacaagctga

SEQ ID NO: 947442 - DNA, 598 bp, Homo sapiens
agaggaagataaacaaaagaacctcttggctaccagtctagctatagcccattgctctcaaccaccatccactggatcgtagcccaaattacacaaaaagcarggctaatttgcccctctgagaaaccaggagcaagaattcaacaacaaagactctgaacagagcctttggtctctgaaaacttctagaaatgaagccaactgactatactcaatttataccacaatctaaggtacacaagccatcccagataagaaagaatcagcacaaaaactctggcaactcaaaaagccagaacgtccctttacctctgacggagctcagtagctccccaaacaatgcttttttaactagtctgaattgtctgaaaatgacagacatgtaattcagaatctggatggcaaaaagcccattgagatgaaggagaaagttgaaactcaatctaagtaagccaagcaattctgtacagttattgaaagctgaaagacaaaacactcattttaagaaagactcaaattgaacttttgaggtaaaatattcactacaaaaatttcataatacaatcagaaatattaacaacagaatagaacaagctga

SEQ ID NO: 947443 - DNA, 572 bp, Homo sapiens
gatatttctcttgcatctctttgaataacttaataatcaactttttaaattctttatgtggtattacaaagactccattttgatttggatccattgctcgtgagctggtgtgatttttggggggtgttacaaaaccttgttttattatatttttcaaattaattttctggtttattctcatttggataggctattttaattatttttgaatttatttgtgattcaactgtgtttctttatttccattttttttcccttgaggatataactttaatgtttactgtttattgtacctgatttggctgtggatactttcatgggtgaagactctgtatgagttccttggttatagacagtattcgtatgatggcgttctcagatgataattgtagtggcaatgtgctcagtgtgtgagcaggttcactgtctcctgtggagtttgagtggcagaagtgtyctgaagcttatctcattcctcagtgctgtgcacatttttatttacttatttttcctccagtatttaatttactaggttgaacagttcaggctttaggccagtaaggaaggtgtcc

SEQ ID NO: 947444 - DNA, 640 bp, Homo sapiens
gtagaatttgggccgctttcttcaaacttaaaatggggatagctgggactcatatctgaaaagctctttcaaatcaacgctgcggtgaaaacccctgtatattttaggatggtaaaggatggggaacaggcaggttattgtacagtgaattccttccctcccttattgcagcaggcaaagcagaagctgcgggtggggactgacattatcacagcctccctcagaaattttaggtgagatgttgtttctgaaggttgatttctacttggtcttaaaaagaaatactatcattacaatcttcctctttctaggtttatgggagatgatggttttgagagtcaaggggagactccactggggcagtgtgacattataaacaatatatgtttgatctcagcccctggttcccggcagagagctcccaaagccatgttttttcctaagtaacatggatattaggagcattttttattctaatatttggtctttgacattttggtctttgagctcctacatcccttggaatttcctgggtgataggagtgccttttgtygaatgaagtaactcttggtgggctcctggaaagcttcgggatggagactggtcactagaaaatccaaaccatgattagaagcttga

SEQ ID NO: 947445 - DNA, 750 bp, Homo sapiens
cagttaattaagctattcaagtaattgatccagacgtgaaagcgctttgaaaagttgtataaatgtacctccagtgtgtcctaactggtacgcctcactcctcagtgtacttctccattcacagtatgatccatggagaagcagcatcattatcacctgggagcttgttagaaatacaggatcttggctgggcgcagtggctcacacctgttatcctagcactttgggaggctgaggcgggctgatcatgaggtcaggagatcaagaccatcctggctaacatggtgaaaccctgtctctactacaaatacaaaaaattagccaggtgtggtggcacgcgcctgtagacccagctcctctggaggctgaggcaggagaattgcttgaacctgggaggcggaggttgcagtgagccgagatcgtgccactgcactccagcctgagcaacagagcgaaactctgtctaaatacaggataggatctcaagcctctccccacacctactaaatcaaagcctgtattttaacaagacccttaggtgatctgaatgcacagcaaaatttgagaagctctgataaaaggtccacctctcgccccaacttgttcttgttatctattgctttattataaactaccacaaaagcttgtgctatataaaaacaatgacattgttctatctcatgatttgatggattaagaattaggtagtactcacytgagtgatttcttctgtcccgtgatgtcagctcc

SEQ ID NO: 947446 - DNA, 594 bp, Homo sapiens
accatgggagacacagaagagacatagcctattacctttttttttcctttttttctttttttttttttttctgagacacgttctcactctgtcacccaggctggagtgcagcgccatgacctcagctcacagtagcctcaacctccttggctcaagcaatctcacccatttcagcctccagagtagctgggaccacaggcatgggccaacacacctggctattttttttttttttttttttttttttttgtagagatggggtctctctgttacccaggctcctaacaccattttaaaaagataacaatatttgacaatatatcattaactgccacatgaaaggccttgataaatgctatggtcagaaggaaaagacacattttagctagaatgatcagaaaatcagagccaagatgggcatggggatagagtgggaatgttagctatgccagtaataagaaagaatayctgcataaactggaaataggaaagggaggagaaaggggcaggataaaaggctggcaagcaaaggtaaattccaaggatagtgattaggctaatctcagaaaaacataagaagagaattgcaatcca

SEQ ID NO: 947447 - DNA, 622 bp, Homo sapiens
  misc_feature 600, 601, 602, 603, 604, 605, 606, 607, 608, 609, 610, 611,612, 613, 614, 615, 616, 617, 618, 619, 620, 621, 622: n = A,T,C or G
cctgctacaaagaggtagcaaaggatgtaactggctaattggacatctgcactgtccttgctgtggtatggaagtttgagagacttctctgaccaattacatccttggacatttcagggtaaatttggaaaaaggcagatgttgttaatctattctgtggagtctccagataattttcattttatataaaaaagttttcaaggatatgtatttatcattgtaccacaatatttgggaataggtcataccagatacattggaaagaacctatgtccatccacaggggaattagttttttttttgttgttgtttgtttgtttgtttgtttgtttgtttttgagatggagtcttactctgttgcccaggctggagtgcaatggcgcgatctcggctcactgcaacctctgcctcccgggtttaagcgattttcctgcctcagcctcccgagtagctgggattgcaggtgcccgccaccacgcccagctaatttttgtatttttaatggagacggggtttgactatgttgkccaggctggtctcaaactcctgacctcaagtgacccacctgccttcgcctctcagagtgctgggattataggnnnnnnnnnnnnnnnnnnnnnnn

SEQ ID NO: 947448 - DNA, 622 bp, Homo sapiens
  misc_feature 600, 601, 602, 603, 604, 605, 606, 607, 608, 609, 610, 611,612, 613, 614, 615, 616, 617, 618, 619, 620, 621, 622: n = A,T,C or G
cctgctacaaagaggtagcaaaggatgtaactggctaattggacatctgcactgtccttgctgtggtatggaagtttgagagacttctctgaccaattacatccttggacatttcagggtaaatttggaaaaaggcagatgttgttaatctattctgtggagtctccagataattttcattttatataaaaaagttttcaaggatatgtatttatcattgtaccacaatatttgggaataggtcataccagatacattggaaagaacctatgtccatccacaggggaattagttttttttttgttgttgtttgtttgtttgtttgtttgtttgtttttgagatggagtcttactctgttgcccaggctggagtgcaatggcgcgatctcggctcactgcaacctctgcctcccgggtttaagcgattttcctgcctcagcctcccgagtagctgggattgcaggtgcccgccaccacgcccagctaatttttgtatttttaatggagacggggtttgactatgttggccaggctggtctcaaactcctgacctcaagtgacccacctgccttsgcctctcagagtgctgggattataggnnnnnnnnnnnnnnnnnnnnnnn

SEQ ID NO: 947449 - DNA, 682 bp, Homo sapiens
tgtttttgtttgagacagtctcactctgtcacccaggctggagtgcagtggcacgatctcagctcactgcaacctccgcctcctgggttcaagtgattctcctgcctcagcctcccatgtagctgggattacaggtactcgccactacccctggctaattttgtatttttagtagacacagggtttcgccatgttggccaagacaagctggtctcgaactcctgacctcaggtgatccgcctaccttggcctccaaaagtgctgggattacaagcgtgatccactgcacctggccaggtttgttacttttcacaaaggagaatgagactgaggcaacaggctatagcttccccattggacagacctggatttgaatcccacctctaccttctccagctttttgatatcaggccaatgactcaacctctctgagcctgaatttactgttgtgtaaaataggcttgataatcccctcttcagggagagaacctgggtccatcaagcccagtgcacctcagtgtggagctaatgctggttgtcttttcctgccttcatcttctcctttaagtcccaaactgagaggataacattgcattygggtctgccattcatttacatctttagtacaaaatgtgactcttgctggagaaagtttgccatttgtctcaaactactggtatct

SEQ ID NO: 947450 - DNA, 600 bp, Homo sapiens
acagagcaccaagtccctaggctgtacacagcaagggggccctgggcccagcccacaaaaccactttttcctcctaggcttccaggcctgtgatgggaggggctgccatgaagatctctgacatgccctggagacattttccccagtatctcagggattaactttcagctcctcattccttacccaaatttctgcagccagcttgaatttttccccagaaaatggggttttcttttctatcacattgtcaggctgcaaattttccaaacttttttatgctgtttccttttaaaactgaatgcctttaacagcacccaagtcacctcttgaatgatttgctgcttagaaatttcttctgccagataccctaagtatcatctcttaagttcaaagttccacaaatctctagggcaggggcaaaatgcgctagtctctttgctaaaacatagcaagagtcacctttactccaattcccaacaagttcctcgtctccatctgagaccacctcagcctgaatttcattgtccatatcrttatcagcattttggccaaagccattccacaagtctctagggagttccaaactttcccatattttcc

SEQ ID NO: 947451 - DNA, 615 bp, Homo sapiens
cacacactgataactactatatttatacctccagctcagacccctcctccaaacaccagatgtgcrtatacacctgcctacttgacacctccatttggatgtttggtaggcatctcaaattcatcatggccaaaatcacctcctaatctcatctcttccaaatctgcttttgccataatctttgacaccacagtacatggcaattccacccttccatttctcaggaaaaaatcttgatattatcctttgcatttctctttcttctcaacccatatccaatctgtcagcaaatcttaactattttaccttcagaatatctccagaacctgagcagttgttaatatttaccactgtcacgactctcatggctctcctggctaactgcagtacctcctaacagttttttgtttttcctgatttcatccttgctctttatattctattctttacacaacatactgagtgatcctttcaaaatttaagtcagattatgtcactcctccactcaaagctcccaggggcttctcattttacaggggccaggaggacctgggggatctggcccctgctgactccctgagcttgtctcctactgctctccatttggcccatctt

SEQ ID NO: 947452 - DNA, 615 bp, Homo sapiens
cacacactgataactactatatttatacctccagctcagacccctcctccaaacaccagatgtgcgtatacacctgcctacttgacacctccatttggatgtttggtaggcatctcaaattcatcatggccaaaatcacctcctaatctcatctcttccaaatctgcttttgccataatctttgacaccacagtacatggcaattccacccttccatttctcaggaaaaaatcttgatattatcctttgcatttctctttcttctcaacccatatccaatctgtcagcaaatcttaactattttaccttcagaatatctccagaacctgagcagttgttaatatttaccactgtcacgactctcatggctctcctggctaactgcagtacctcctaacagttttttgtttttcctgatttcatccttgctctttatattctattctttacacaacatactgagtgatcctttcaaaatttaagtcagattatgtcactcctccactcraagctcccaggggcttctcattttacaggggccaggaggacctgggggatctggcccctgctgactccctgagcttgtctcctactgctctccatttggcccatctt

SEQ ID NO: 947453 - DNA, 482 bp, Homo sapiens
ggactctcagggtgctgggatcacaggcatgagccactgcacccggtcttgatttcttatttttacaaagagactaaagatacttggatctgtaaataaacattttttttatcacactgaaaaattgtattatgaagaggcatatacgaattatgaaatgatgtattcataaactgctagcctgctacggaatgttggaatatgacagacaattcacaattgtctacttttcactactgtctagttttctctataaaaggaaggttactaatgataaaaattaattataactaatataagtaaattaaactactaaaaataataacagtgaagggaaacaaacacaaggaaggggctgggcatagtggytcatgcctgtaatcctagcactttgggaggctgaggccagagactcacttgagtccaggagttcaagaccagcctgggcaacacagcaagaccctacctcttaaaaaagaaaa

SEQ ID NO: 947454 - DNA, 477 bp, Homo sapiens
cccagtgacccactttcttcatttggcttccagattgccactctctgctgattttcatcttactttatggctgctccttcacagctttttgctgatatcttattttatcatgacctttaaagttcagtttccccagggccagttcttggacaatttctcttctcaagtcacactcattcctctggggagctcgtaaatttcacagctttacataacatcaatatgttgatggtacacaaatttatatattcagtctacacgtatttcttgaactcaagtctcttactatcagcctagtaaccctgaagtttctttaaaaatgcagatcagctaatgccctttctctgctaaaaattcacccatggattccccgtcwctcacaataaaagccaaacacctctcaatggcctctaaagcctcatctaagctggttctcccattgcctctgtcttgttttcttccactcttcctatccat

SEQ ID NO: 947455 - DNA, 477 bp, Homo sapiens
cccagtgacccactttcttcatttggcttccagattgccactctctgctgattttcatcttactttatggctgctccttcacagctttttgctgatatcttattttatcatgacctttaaagttcagtttccccagggccagttcttggacaatttctcttctcaagtcacactcattcctctggggagctcgtaaatttcacagctttacataacatcaatatgttgatggtacacaaatttatatattcagtctacacgtatttcttgaactcaagtctcttactatcagcctagtaaccctgaagtttctttaaaaatgcagatcagctaatgccctttctctgctaaaaattcacccatggattccccgtctctcacaataaaagccaaacacctstcaatggcctctaaagcctcatctaagctggttctcccattgcctctgtcttgttttcttccactcttcctatccat

SEQ ID NO: 947456 - DNA, 578 bp, Homo sapiens
acatggctgaaacacaaagtaactggctctagatcatgtagcaattaagtgacagagctgtgaatccagtttagataggcctgactggagcacttcattatattgtctttcaggagtctatacctgmtctggtggtctctgtattggggttgctaaccagtgcaataaggtaagaaaaaaggtaaagcaattgggaagaagcaagtattgccatattttcagcttacatgactatgcatatacaaaatccagaggaatctacaaattactagatttaagaaataaacttattgagtttactaaacatcgtaagactacacacaaaacttaactgtatttctgtgtacaacaatagaaaagaaaaaatatttaaaatatattattaaaatcactaaaaccaccaaaacaagatatacaaggtttttaaactaaaaatgtcaaaacatagcaattaagttaaagaaattctagttacatgaagcgatacatgatgaacattgattagagattcagtagtaagttgccagttctgcataagttgattgatagactcaatgtggtcccagtagaaacctcat

SEQ ID NO: 947457 - DNA, 578 bp, Homo sapiens
acatggctgaaacacaaagtaactggctctagatcatgtagcaattaagtgacagagctgtgaatccagtttagataggcctgactggagcacttcattatattgtctttcaggagtctatacctgatctggtggtctctgtattggggttgctaaccagtgcaataaggtaagaaaaaaggtaaagcaattgggaagaagcaagtattgccatattttcagcttacatgactatgcatatacaaaatccagaggaatctacaaattactagatttaagaaataaacttattgagtttactaaacatcgtaagactacacacaaaacttaactgtatttctgtgtacaacaatagaaaagaaaaaatatttaaaatatattattaaaatcactaaaaccaccaaaacaagatatacaaggtttttaaactaaaaatgtcaaaacatagcaattaagttaaagaaatyctagttacatgaagcgatacatgatgaacattgattagagattcagtagtaagttgccagttctgcataagttgattgatagactcaatgtggtcccagtagaaacctcat

SEQ ID NO: 947458 - DNA, 578 bp, Homo sapiens
acatggctgaaacacaaagtaactggctctagatcatgtagcaattaagtgacagagctgtgaatccagtttagataggcctgactggagcacttcattatattgtctttcaggagtctatacctgatctggtggtctctgtattggggttgctaaccagtgcaataaggtaagaaaaaaggtaaagcaattgggaagaagcaagtattgccatattttcagcttacatgactatgcatatacaaaatccagaggaatctacaaattactagatttaagaaataaacttattgagtttactaaacatcgtaagactacacacaaaacttaactgtatttctgtgtacaacaatagaaaagaaaaaatatttaaaatatattattaaaatcactaaaaccaccaaaacaagatatacaaggtttttaaactaaaaatgtcaaaacatagcaattaagttaaagaaattctagttamatgaagcgatacatgatgaacattgattagagattcagtagtaagttgccagttctgcataagttgattgatagactcaatgtggtcccagtagaaacctcat

SEQ ID NO: 947459 - DNA, 656 bp, Homo sapiens
aaataaaaaaccacgttcacggtgctggaatccaggtgctggtaggcggcactctctgcggaggctctaggggaggctcttgtttccttgcttttccagcttctagagctactacgttccttgcagtccttggcttgtggcctcttccttcatcttgaaagccagcagtgtagcatcttcaaatctttctgccaaagtcctcacatcaccttcttttacccttgtagtcaaatctccctctgactccctctcctaaggacacttgtgattacatttggggcccatccgggaaagccaggatcctctctccacctcaagccttaatcacttctgcccaggccctcttgccatagaaggttacattcacagcttccagggattaggagctggatatctttgggggccataattcaggctttcatgggtacaaaagtggacacttcctgtaatagttagctattgctgtgtaacaaattaccccaacatgtggcagcccaaaacaacaaactttttaaatctcatgcagttttcatgggtcagttatttcagagtagcttagctgtgtggttatatctcaagaggttgcaatcaagctgtcagccagggctgacatcaccagaaggtttgaccrggctggagaatccactccaagatgg

SEQ ID NO: 947460 - DNA, 599 bp, Homo sapiens
tgtggttatgttatatcatattttaatgggcatttcttgctttatgactttttgctaatgacttattacttgctgtttattttatgtttattttagactatggaagtgatgttaggcaaaaagcaaatttgagcaattttcttattcgaaaagcagcagaaacaacttgcaacatcaacaatgcatttggcccaggaacttctaatgaacatgcagtgcactgttggctcaagaggttttgcaaaggagacaacagccttgaagatgaggagtgtagtggccagccatcagaagttgacaacaaccaattaagagcaatcatagcagcggatccccttacaactacatgagaatttgctgaagaactcaacgttgaccatcctgtggtcatttggcatttgaagcaagttggaaaagtgaaaaagctcagtaagtggatgcctcatgagctgagtgaaaaaaaaaattgtcattttgaagtgtcatcttctcctattctacgcaataacaacaaaaaatttctcgattggattgtgaagtgcgatgaaaagattttatayaacaactggcaacacccagctcagtggttggattgagaa

SEQ ID NO: 947461 - DNA, 721 bp, Homo sapiens
tcatactgcattataacacagcagaaatggggaagggcaagtgagtgcacgcaaaagacacctcagggcactaactcagtcccttggaaatgatctcactcacaaacagcattaatccacttatggggctctacccttattacctaattcccttttaaaaggccccacctctcaatactgttacattagcaactaagtttccaacacatggacttctgagggacacactcaaacctatagaagcatcctgtgatcacagtcccttttcagctcctgtgcaattaggatctgtatgcttcacatgagacacatttttattctgtgctgtgtattggtcatctctctctatatactttaccacctcagctcccagaggacaaagattatgttgtttatttgtagcagtcatgccactggattcataaaaagtattcaattaaatctcactctttgcattaggttgtctaactgagtttttcttatgtgtctttactgtctggtccctagaaggcatattgtgacaatgataacatctatcactaccactcccaccctattgtcactgttcctatattgccttagggattatataactgtttcatattcattattttcatttgatcacaascacccttttaaatagatagggcagatattagatgtttttttccttagtggatgaaaatactaaggttcagagaggtcagttaactggtccagt

SEQ ID NO: 947462 - DNA, 496 bp, Homo sapiens
actaatctactctttgtttctatagattgtcctatttggaacatttcatgtgaatagaatgatacaatatatcatctttatgattgccttctttcacttagcatagtatttccaaggtaatccatgttatagcatgtgtcactactttgtttcttttaattccattacatggctatgtcacattttacttatccatttatcaatagatggccagtgaggccagtttcaactttttggctattaagtattatgctgctacaaacatttgtgtgaaaacttttgtgtagacatatgttgtcatttctcttgggtatatatctcagagtggaattgctggattgtgtagtaactctatgattaacctctagaggaacttccagaccttttccaaagtggctgtaccatttcacattgccactggccttgtatgaggtttctgatttctccacatcttctccaatgcttattattgtctgtktttttttttttttttgat

SEQ ID NO: 947463 - DNA, 544 bp, Homo sapiens
tctattcttcctccaaatagagcacttaatgctcatgcaatatatttaggagttatattgcttcatttcatgctcatggataggaagaatcaatatcgtgaaaatggccatactgcccaaacttatttatagattcaatgctgtccccatcaggctaccattgactttcttcacagaattagaaaaaactactttaaacttcatatggaaccaaaaaagagcccacatagccaaggcaatcctaagcaaaaagaacaaagctggaggcctcaaggctacctgactttaaactatactacaaggctacagtaacaaaaacagcatggtactggtaccaacacagatatatagaccaatggaacggaacagaggcctcagaaacaacactgcacatctaaaaccatttgatctttgacaaacctgacaaaaacaagcaatggggaaaggattccctatttwaaaaaatgtgttgggaaaactggctagccatatgcagaaaactgaaactggaccccttccttacaccttatacaaaaattaactc

SEQ ID NO: 947464 - DNA, 616 bp, Homo sapiens
agaccctaatgggcaagtgggtttgtggaatcgagggaagactacagtgctatagcaagtccaaggtggcagccaagggtaaaaacatcatctaaaaagggtgcacaaataagatatggagagggttaagrttagaatattacgtgccaaaaacctgcaggacgatagcagagagtgagtggcaggacgatagcagagagtgagtggcaggaagagaaggcacagaaagggagtagtaatctgttagtattactgttagtattactacaggatagtatctctttcattctaagtgttcagttaatatctggtagaaggataaatggatttctttcactagtagaagacaaaaaaacaagtatataagtgactataatattcttaagattaataacattaacttcagtaatattaacattttcatactattatatatcatgcattaacaatatgcaccagacaccatataaagcacttgagatacatccgtgagcgaagtccggatcccagactcagggatcaagcattagactcacatgtctttccccatatatttcttatgacataaatattactttcattcctcaattacggataagaaaacaacctgcccaag

SEQ ID NO: 947465 - DNA, 638 bp, Homo sapiens
tgtagccacagtagcagagctgcccaagaccatgggatcccacctcttgcattagtgtgacctggatgtgaggcatggartaaacataaatcattttggatctctaagatttgactgcctcactggatttcagacttgtatggggactttagcccctttgttttcttcaatttgtcccatttggaaaggtatgtttatccaatgcctgtacctccattgtatctagaaagtaactaacttgctttagattttacaggctcatagccagaagggacttgccttgtcttggataagactttgaactgtggacttttgagttaatgctgaaatgagttaagactttgggggaatattggaaaggcataattggtcttgaaatgtgaggacatgagatttgggaggggcaggggcagaatgatatggtttgactatgtccccaggcaaatcgcatcataaattgtagttcctataattcccatgtgttgtggaaggaaactggtgggagataactgaatcatggggtggtttcctctatactgttctcatggtagtgagtaagtctcatgagatctgatgatttcataagcggtttgtgctttcacttggctctcattctctctcttgcctgctgctaatgt

SEQ ID NO: 947466 - DNA, 638 bp, Homo sapiens
tgtagccacagtagcagagctgcccaagaccatgggatcccacctcttgcattagtgtgacctggatgtgaggcatggagtaaacataaatcattttggatctctaagatttgactgcctcactggatttcagacttgtatggggactttagcccctttgttttcttcaatttgtcccatttggaaaggtatgtttatccaatgcctgtacctccattgtatctagaaagtaactaacttgctttagattttacaggctcatagccagaagggacttgccttgtcttggataagactttgaactgtggacttttgagttaatgctgaaatgagttaagactttgggggaatattggaaaggcataattggtcttgaaatgtgaggacatgagatttgggaggggcaggggcagaatgatatggtttgactatgtccccaggcaaatcgcatcataaattgtagttcctataattcccatgtgttgtggaaggaaactggtgggagataactgaatcatggggtggtttcctctatactgytctcatggtagtgagtaagtctcatgagatctgatgatttcataagcggtttgtgctttcacttggctctcattctctctcttgcctgctgctaatgt

SEQ ID NO: 947467 - DNA, 645 bp, Homo sapiens
gtatgtgtcattgctgggtgtcccaakctactcccttgagatcatggtacagcagggccctgttggctccatgcccagttcaatctacaggcattcagagaatcccctcacctggaagagcctgatcttccccaaccttcctgtgcatagatcatggtagactgcagcccttatgactacaagacaagcagatcttgagccattcagagcacctgcttggatgaactagaggcctgagtcactttgcccttcctgtgcagacatcctgatacaagcaggtctcttccatttcatgcccaggcagatctccaggaacccactcatctggttcagcagcctgagctgtcccatccttccagggcatagattgtggtgcagtggtaccctccctgctccacaaccaagcatatcaccaggcatttggagaacctgcttgcctagaccagcaccctaagctaccccacccttcctatgcagagattacagcacagttgggccttcatcactcaatgctcaggcagatatccaagcagtctgagtacacattctcctgaatcaagagcctgcgctgacccacccttcctgtgcagaagtcatagtggagcaggaccttctccaatctgcagccaggcagatctccaggaa

SEQ ID NO: 947468 - DNA, 645 bp, Homo sapiens
gtatgtgtcattgctgggtgtcccaatctactcccttgagatcatggtacagcagggccctgttggctccatgcccagktcaatctacaggcattcagagaatcccctcacctggaagagcctgatcttccccaaccttcctgtgcatagatcatggtagactgcagcccttatgactacaagacaagcagatcttgagccattcagagcacctgcttggatgaactagaggcctgagtcactttgcccttcctgtgcagacatcctgatacaagcaggtctcttccatttcatgcccaggcagatctccaggaacccactcatctggttcagcagcctgagctgtcccatccttccagggcatagattgtggtgcagtggtaccctccctgctccacaaccaagcatatcaccaggcatttggagaacctgcttgcctagaccagcaccctaagctaccccacccttcctatgcagagattacagcacagttgggccttcatcactcaatgctcaggcagatatccaagcagtctgagtacacattctcctgaatcaagagcctgcgctgacccacccttcctgtgcagaagtcatagtggagcaggaccttctccaatctgcagccaggcagatctccaggaa

SEQ ID NO: 947469 - DNA, 611 bp, Homo sapiens
acaaggaatgtcaaagattgacagccaccaccagaagctgggaagaacaagaccagacctttccctggaaatgttgggggatcattgttctgtcaataccttgattttggacttttagcctgaaaaataccttsttttgttttaagccacccagttattggtacttggttataaaacctctaggaaattaatattcaagtgtaaaaaagataatttttctttctttcttctcaatctgtatgcctttgattttcttatgacattatagtggctagaacatctagtagaacatggaatagaagtgaggtgaatatatgttcttgccttgatcctgatctcagagactatttattcagactttgaccataacatatgatgttgcctgtgggtttttttctaggtgacttctatcagtttgagaaacgtccactgtctttttaatttgctaagaatttattgaattttatcaaatacatctatttagataatcgtatacattaatcccttagtatcctggggaattggttccaggatctctcaaggataccaaaatctgcagatgttcaagtgcctgatataaaatggtgtagtatttgcatataacctatgca

SEQ ID NO: 947470 - DNA, 586 bp, Homo sapiens
atgttatttacaattcaaagtaaatttactttataagcagctagggaattctttatttagtaatgtcctaacataaaagttcacataactgcttctgtcaaaccatgatactgagctttgtgacaacccagaaataactaagagaaggcaaacataataccttagagatcaagaaacatttacacagttcaactgtttaaaaatagctcaacattcagccagtgagtagagtgtgaatgccagcatacacagtatacaggtccttcagggaggcaagagacctttcgactggtctgcaggtgcctccaaatgctggtcctgtggaacttctttctgagtctcgttttcttccaacgcagtctgtggtctgacactcaagtgttcggatttccgggaaacgtgactacctccgtgttgcttaaaagaccagatttaagtatcacagagatgttatcattttcactcaattaattsgctaaagatatataactaggcacattctgtcactgagtgaaaaatttagcactaatatcttagatccaattctactataacaaatagtaaacatgattttaaaaagtctata

SEQ ID NO: 947471 - DNA, 707 bp, Homo sapiens
cgtggtggcaggcacctgtaatcccagctactcaggaggcggaggcagagaattgcttgaacctgggaggcagaagttgcagtgagctgagatcgcaccactgcactccagcctgggcgacagagcgatcgagactccatctccaaaaaaaaaaaaggaacaccacaactgacttgccctgtgttggagatggctgtgcagatttagtcttgctcaagggctttaccaagggttgtgctcagggcacaactggggctaaattccaaggcctgctgcctttgggtccgtaaatcttcattgcagatgttgatgtagtttccaggactgcatcatcttggagtttattttaggcagatgattgccttctaggtcattctcaaccatttaagtatccttggcaggagaacttatctgaatgggccaaggctctttgagttgggagcaaggcgtattttcccacccaatctccatgcacccgggtcctgtggtttcattggcacttcatttggaaagttgttggcttttgggaggagaaaggaaggagaagtttggcagcatcctgttccaaggcctagagttttaatgtgtggtcagactgtttattgattaattggttttcaagarggaaacatgttctttcaggacatagggtctctaggacaaaaataactttaaaagaagaggtggagatgttagagaacactcta

SEQ ID NO: 947472 - DNA, 632 bp, Homo sapiens
tactaaaaatacaaaaattagccagacgtggtggcgcacacctacaatcccagctacttgggaggttgaggcaggagaatcacctgaacccgggaggcggaggttgcagtgagtggagatcgtgccactgcactccagcctgggtgacagagagagactctgtctcaaaaagaaaaaaaaaaagctttatgtgcattatcttatgtaatcctcttaaccattacttggtgaatagtgagttccactactatccccatttcatagaggagtaaactgaggcacagggagatggactaacttgctcatagtcacgtagttacttaatggtgaggctgggatctgaatacaggcagcctgagaagtggctcttccgtccacctccaacctccttttagccgagggttttgagctcatttcaacacagccactgtgtccagggataccagcaaagaattagatcaatgtcaggctctgacgcacaggcaggctcagtaataacaacagtccacacacacatacgataagttaactcaccgcagcctcacaccgcgccaggaggcaggcactaatattatctcaattttacggatgaggaaaccgaagctcagakaggtcagatgactggcccaagg

SEQ ID NO: 947473 - DNA, 645 bp, Homo sapiens
gaagacggaagattgtcctgctrtaagaagacggaagattgtcctgctgtaagaagacggaagattgtcctgctgtaagaagacggaagattgtcctgctgtaagaagatggaagattgtcctgctataagaagatggaagattgtcccgcaggaattcagaggcagaaaggtcaccatgggctggaattagggaggcttcaaggaggaggtggaacgagagcgatttggaagccctgggttttttaattccaaaagcaatgtttgtatgagaaagaaaattgcagtagaagcaaagagacttgaaacctaatcagaaaccatccttcctccggctcctccgaagcagccagtttattctgtgccttttcccttcttgaggtatacacatttttatgtagatttaatcagggcctgttttgtctgtttttctgttttcatggattattataaacctccttttctctagagctgtatggagtcttcttaagcacctttttggatactttgttaaaagtactttatattctttgtagaaatcttggtatagagcggccagcgcaattgctatgctaaggctctgtgttattccagcaaggtgcgcaggctccgcttccgcagaagggagtagggtgggagttctgga

SEQ ID NO: 947474 - DNA, 614 bp, Homo sapiens
tacacatatgaatgttaattttaattttgtgggcagagtgtcatttgtccatctagtacctatctctttttttcttccttagccacagaacccttgttttattgaaataacaaygagtccagctacaaaattcaaatttctcagcccccattgcagacactcgtgactgtgctaaattctggccactgagatttaagtagcagatgttggctgaggcttccaggaaagcctcttaaaagagggaaaggcaactggcacattccccttagtcctctcgcctttatctttcttcctgtctggaatgcagacatgatggcttaggcttcagcagtccatgaagtagtcttgaggtcagaagtaactcgctgaggatggtgaaagaactttagaaggaacctgggacttccttctttggacttccttctttctttctttctctttctttctttctttctttctttctttctttctttctttctttctttctttctttctttctttctttctttctttttttttctggagatggagtttagctcttgtcgcccaggctggaatgcaatggtgcaatctcggttcactgcaatctctgcctcccagattcaagtgattct

SEQ ID NO: 947475 - DNA, 594 bp, Homo sapiens
actcaaagaaaattaagataacacggagaaggagttcagaattctatcagataaatgtaagaaagacattgaaataatttaaaagaatcaagaagaaattttcagtttaaaaatgcaattatcatactgaagaatgcatcagagtctttccacagcagaattgatcaaggagaagaaagaaattgtgaacttgaagacaggctatttgaaaacacacagaggagacaaaagaataaagaataaaaaacaatgtgtaactgcccaaatttgtaaccacccaaggggttcaccttgcccgctacctagatagaactgatttatcaagacaggggaattgcaataaagagtaattcacacagagctggctgtgctagagtctggagttttattactactcaaattagtctctccaagcacttgaggatccaaatttttaaggataatttcatgagtaggggccagtgagttgagagtgctgattgattgggtcagatatgaaatcayagagagtcaaagctgtcctcttgcattgagtcagttcctgggtggggaccacaagatcagatgagcacttatattgatctggctgggtgg

SEQ ID NO: 947476 - DNA, 570 bp, Homo sapiens
tgggcaaaaaagcccaaaagcattgagttcaagatggaaaaagaggtcagaaattggagaccattctgcaaaggagagcagagaaatgagtgggaactagaagtaggtaaagkgtgagcaaagggtttgtgttttgcattggatggaaaaggtcaagaagagagagaaaatttgatggtgcaggagacagcgtggctgaccgatcaatgaccttgttattgaaaaagagaatgaggacctagggttcaagcagaagggctggcattagagctttcagttcatctgtgatgttgagtgggaatgcagagcttctaggacaaatgccctgagggtggtagatgtcttggtggaagcctgcaacattttcttctgattgcttctattttcttagtccagagtgaggaggagaaagaagttacaaaataatagtttagtctcttaattggattttctccaatcacactaggcagaaaagcatataaatggatgacttgcgaaatggagtaggattggaaggtagcatttgggccccttgaggtaggatctcatgcatttgaaataggccagtca

SEQ ID NO: 947477 - DNA, 621 bp, Homo sapiens
gatgaaaggggccgggcgcggtggctcacrcctgtaatcccagcactttcggcggccgagacgggcagatcacgaggtcgggagatcgagaccatcctggctaacatggtgaaaccccgtctctcctaaaattatacaaaattagccgggtgtggtggcaggtgcctgtagtcccagctactcaggaggctgaggcaggagaatggcgtgaacccagaaggtggagcttgcagtgagccgagatcgcgccactgtactccagcctgggcgactcagtgagactccgtctccaaaaaaaaaaaaaaaaaaacagaaaggaaaaaacaaaggttatctttgacaatgaaagtttacataggaattaaatgataaacatggtttttctattgttaaccatgttcttcctgatggagcatatgtaataaactcattcattcccaggagtatctgtattaaacaaatcttacttttaatttccttacaacataatcattgtttagtaattacagtgaatccatctctataaatttagagccagatttgtaactctcgctcaaaaatgagctggcagaaaaacactgttcccataaacatagacactaagttgcctacccttcctac

SEQ ID NO: 947478 - DNA, 621 bp, Homo sapiens
gatgaaaggggccgggcgcggtggctcacgcctgtaatcccagcactttcggcggccgagacgggcagatcacgaggtcgggagatcgagaccatcctggctaacatggtgaaaccccgtctctcctaaaawtatacaaaattagccgggtgtggtggcaggtgcctgtagtcccagctactcaggaggctgaggcaggagaatggcgtgaacccagaaggtggagcttgcagtgagccgagatcgcgccactgtactccagcctgggcgactcagtgagactccgtctccaaaaaaaaaaaaaaaaaaacagaaaggaaaaaacaaaggttatctttgacaatgaaagtttacataggaattaaatgataaacatggtttttctattgttaaccatgttcttcctgatggagcatatgtaataaactcattcattcccaggagtatctgtattaaacaaatcttacttttaatttccttacaacataatcattgtttagtaattacagtgaatccatctctataaatttagagccagatttgtaactctcgctcaaaaatgagctggcagaaaaacactgttcccataaacatagacactaagttgcctacccttcctac

SEQ ID NO: 947479 - DNA, 621 bp, Homo sapiens
gatgaaaggggccgggcgcggtggctcacgcctgtaatcccagcactttcggcggccgagacgggcagatcacgaggtcgggagatcgagaccatcctggctaacatggtgaaaccccgtctctcctaaaattatacaaaattagccgggtgtggtggcaggtgcctgtagtcccagctactcaggaggctgaggcaggagaatggcgtgaacccagaaggtggagcttgcagtgagccgagatcgcgccactgtactccagcctgggcgactcagtgagactccgtctccaaaaaaaaaaaaaaaaaaacagaaaggaaaaaacaaaggttatctttgacaatgaaagtttacataggaattaaatgataaacatggtttttctattgttaaccatgttcttcctgatggagcatatgtaataaactcattcattcccaggagtatctgtattaaacaaatcttacttttaatttccttacaacataatcattgtttagtaattacagtgaatccatctctataaatttagagccagatttgtaactctygctcaaaaatgagctggcagaaaaacactgttcccataaacatagacactaagttgcctacccttcctac

SEQ ID NO: 947480 - DNA, 424 bp, Homo sapiens
catctagctgccttttttgtatttttagtagagacagggtttcaccatgtttgccaggctggtctccaactcctgacctcaggtgatccgcccgtgttggcctcccaaaatgctgggattacaggcgtaagccaccgtgcgcccggcctacccatttttaaaatgtgggaattggatggtctctgaggccatcaggctccagatgtccacagtttgtgctgaagaaggtggcgcctcagtccaagtcagagagtgtgagacaactgcagagacgcccccaacctggaggcatctcggccccgctccgagctcccagcctaagagaagcgtttgacctcaggggcaggcctcatgagggcaggagaagtcatgtcctggagaaaaggagtggcaagatgtggtargggagagaagacttggtgca

SEQ ID NO: 947481 - DNA, 577 bp, Homo sapiens
tttcacttaaactgctgtcatcatctccttgtagcagaccacaagttactaaattagccttctcaaacactggygtaatcagagattattttagagattattttgaggtacattttttattttcatttttctttacttccttcatatgtaacgcagaaccacaactttaaaaaatctacaaaaagccaatgttttataataattctactgataacaaataaaaaaaattttgtaaaattccaattcttccccatctcaattcattaattcaaaaaacacagttatgaattatcaacaacatataaagaaatatatatttcctgcctcaaaaaccaggtaatatgcaattatgatacaatgtgtagtttaagagttgatatatggaaagttatattttagcacaaggaagtcattacagaagaggcaaaatataagaggagctcaccagggaaaaaatagagaaaactactccacttggagaatggaatgacagcacaaagattagtcccatggagtctaggtgtttcctaggaacttgaaaggaaaagtgtaaaacacaaagaaagtaagaatggaa

SEQ ID NO: 947482 - DNA, 564 bp, Homo sapiens
tggtaggtcatgtgccactctagtccactgtctctgggcctagttcagcaataagactcacwgtgagttgcagtccttatggcctagactgcctttcaagtttatatagatcacagagcactttagcttgtggtggtgaggtctgtgggaactcaagtttggaccacggggtttggtgatttccctctggctagggctgattaaaatgccccctccatgggtgagcaatagctgagtttggttctattttcctttctactctaacaggacagcactaagtttaatgcctcacaattactgtgttctccctccccagcacccagagttgctctctgtaccatgcctctactgctaaggttggagggggctgaggttggggtgatgttgacaattcaagactgtttttctctatctcttcaatgcctcttttagtgataatggagttaaaactaggtactatgaaggctcacctgatttttggttctcatgaaagtgtttcttccgtgtagatagatcctccattggtggcctgtggagaggatatttggtggagttttctattct

SEQ ID NO: 947483 - DNA, 564 bp, Homo sapiens
tggtaggtcatgtgccactctagtccactgtctctgggcctagttcagcaataagactcactrtgagttgcagtccttatggcctagactgcctttcaagtttatatagatcacagagcactttagcttgtggtggtgaggtctgtgggaactcaagtttggaccacggggtttggtgatttccctctggctagggctgattaaaatgccccctccatgggtgagcaatagctgagtttggttctattttcctttctactctaacaggacagcactaagtttaatgcctcacaattactgtgttctccctccccagcacccagagttgctctctgtaccatgcctctactgctaaggttggagggggctgaggttggggtgatgttgacaattcaagactgtttttctctatctcttcaatgcctcttttagtgataatggagttaaaactaggtactatgaaggctcacctgatttttggttctcatgaaagtgtttcttccgtgtagatagatcctccattggtggcctgtggagaggatatttggtggagttttctattct

SEQ ID NO: 947484 - DNA, 532 bp, Homo sapiens
agtctcttagaacaggggaagcctgtgtggacagctcrtcaataacacattacttggaactatagttctagatgcaggaattgtggcataacttagggtatcctaagattatctgagatggctttctactagcctagtgagaaaggaggctaaggtcaaatgtggagaacatttaaaaatgggatttgatgtgtccctgtttgtaagtagaaatttatacctgtgattattacctagccataatgacaaaggaagaaagagaaagaaggaaagaaagaaaaagagaaagagtaaggcaggcttgtgtagttccacatttctcttgagttttaattgtcaagttgctcctcaaaattccacttaaaatctgatgctttctgtttcggaccgaaacctgtgggagcctaactatacaaaagtgaaaactcaaaatggagtccccaaatttaaaaagcagcccagtgaaatcagatcaaatagaagtccatctggtttgccactacatcatgcctgcagttcctctcaggtgtac

SEQ ID NO: 947485 - DNA, 550 bp, Homo sapiens; identical to SEQ ID NO: 946442

SEQ ID NO: 947486 - DNA, 583 bp, Homo sapiens
aagctgtgtgtcactaaatcctggaaaaaatgctaaatgggaaaatctggaatgtgttcagaaactgggctatatttgcaaaaagggcaacaccactttaaattcttttgttattccctcaggtaagtgatctatgggatctgaagtgcctcaactattagaattgaaagataagtaacattacagcttaggtgtaactgttggaatgccgccagaggttttgtggatagttgatggggtaaacttaatgatattactgcaatatttctgtgtgctggttgctagtatttcctgagtgtgcggcggtgtctgggcattgtggagatcctctgacctaaataaaaatgttaccttcccaatcagtcctctgaggtaggtgtcatgattcacatgctatagttgaggaaaaagatattcagaggatacagaaaccttgcagacatggcaaaaccgkaatccaagctagaaagtcaacatttggaagggatgtttatattaggtcctcacggctctatctgggcttccttgctattcagtgtagcgtcttatactaaagttttcataaaatagaataaaatatcta

SEQ ID NO: 947487 - DNA, 474 bp, Homo sapiens
agggtgctgggatcacaggcatgagccactgcacccggtcttgatttcttatttttacaaagagactaaagatacttggatctgtaaataaacattttttttatcacactgaaaaattgtattatgaagaggcatatacgaattatgaaatgatgtattcataaactgctagcctgctacggaatgttggaatatgacagacaattcacaattgtctacttttcactactgtctagttttctctataaaaggaaggttactaatgataaaaattaattataactaatataagtaaattaaactactaaaaataataacagtgaagggaaacaaacacaaggaaggggctgggcatagtggytcatgcctgtaatcctagcactttgggaggctgaggccagagactcacttgagtccaggagttcaagaccagcctgggcaacacagcaagaccctacctcttaaaaaagaaaa

SEQ ID NO: 947488 - DNA, 596 bp, Homo sapiens
agatatctgattccagatgaacagagattgatgcttcaaatctctttgtggatattatttgggggaggttttggttttagacaggcctgggtttaatttctggtacttctgatacctgtttgtgagcaagatactgaaactcattaaggccccatttccctctcagcatgatgaagttcataatacttatgaggttattgtgaagattaaattatgtatagtatctgtaaaggctgtagcatagtgcccggcaatagctgaaagtattattagctgttatggttggtgcctgatttctgctcttgaaattgagtccatgctaacaaagaaggcccttgctacttccctgtaataggaagaagtttttctaactggctgaatgttttttttcctttttcctttttttttttttttttctaatatctctcaccctgactgaatcagactattcttaccacaggaaaagatatttgttagttacgtgttaacttttttccctttaaagtctcctgtgtccatattcagatgaatcctctgattttaggctatttattaccrgggtcctgatagacctagtgtatctacatattttgttt

SEQ ID NO: 947489 - DNA, 572 bp, Homo sapiens
gaaagtacacttcccagcctcacttgcagctaggtgtggctatgccaataaaatattgccaatatattgtaaataaaaattatgcttyaccttccctgtcttgccttcaaacaattgctcccttcctgcaggctggatgcagaccttgcgaggaggaaccatatgaggacaatggctttgagaatggccaagatacaaaacagaaggatcttagtcctctgatgttatggagcagagtcacctaccagtcccagagtgcctgctacctctggacagcaagtaagagaaataaaagtctacctcattttggagtctctttgttacagcctgtgttatggactgaattttgtccccagtccttacccctgaattcctatattgaagccctaaccctaatgtgactgtatttggagatgcctataagaaggtaatgaaggttaagcgaggtcagaagggcagggctctaatctgatagaaatggtgaccttgttaagaggaggaagagacaccagaaatctctgtctctttttctctgcgcatacacaaagaggagaggcaatgtgaggacacag

SEQ ID NO: 947490 - DNA, 611 bp, Homo sapiens
ggcaggtgcccctctgggatgaagcttccagaggaaggaaaaggcagcaatctttgctgttctgcagcctcayctggtaatacaaaggcatacggggtctggagtgaacctccagcagacctgcaacagaggggcctgactgttagaaggaaaactaacaaacagaaaggaatagcatcaacatcaacaaaaaggacttccacccaaaaaccccatctgaaggtcaccaacatctaataccaaaggtagataaatccatgtaagtgaggaaaaaacagcacaaaaaggctgaaaattcccaaaacgaggaaaaataaaatcctttacagagaagcaaatgccgaaagattttgtcactacgaggactgccttacaagaacttctgaaggaagcactaaatatgggaaggaaaaactggtaccagccactgcaaaaacattgcaaattgtaaagaacatcgacactatgaagaaaccgcatcaactaatgggcaaaataagcagctatcatcataatgacaggatcaaattcacacataataatattaaccttaagtgtaaacaagctaaatgccccaattaaaagacacagagtggcaaattggatagagt

SEQ ID NO: 947491 - DNA, 467 bp, Homo sapiens
cagctgggccataagagcaaaacgccgtctcaaaaaaaaaaggccaggcacggtggcttatgcctgtaattccagcactttgggaggccaaggcgggcagatcacaaggtcaggagattgagaccatmctgaccaacatggtgaaccccatctctactaaaaatacaaaaattagctgggtgtggtggcgtgcacttgtaatcccagctactctggaggctgaggcaggagaatggcttgaacctgggaggcggagattgcagtgagctgagatcacaccaccgcactccagcctggtgacagagtgagactccgtctcaaacaaaaacaaaaacaaacaaaacaagaacatttacaatctattctctctaaagcctactaccagaggcttcctctacatcatgggaagttggtttccacaaccccttaacttaacccagacattcccatctattggttctaggtct

SEQ ID NO: 947492 - DNA, 753 bp, Homo sapiens
ctgtcacatattttaaatctctatgtgagacccaaaaaaccattattacttagaatttttacagtcaatttttattcagatttacctccagcaatactccttgccaccgctccttattccctgcacgatcatgctttacctaggatcattttcttttgccaaaagaactccttttagtgtttcctttggtgcaattctgctggtaattaattgcctcagtttttttttttgtttttttgtttgttgttggtataaaaataattttatttctccttcattagaagtagaattctgggttggtggatatttcctttctgtaccttgcagatgtcaatccactgtcttgtagcttccattatttctgctgagaggctgctttcagtcttatattgctcctttgaaggtggaatgtctttcttctctggctgcttttaagactttctcttgtctttggttcccagcagtttgatgacagcatatataagttttctttgtgtttatcacatttgggtccataactcttctttacatctgtggcttgatgtcagttttggaaaacctccagtgactatctactaaaatattgcttcaattcctctgccttttgactttcctgaagatactcyaattatgtatgctagacctgccatgtcatacagcttgtacattctttctggtgttttccgttcttttgttcttctctgtatatccagttaaatacttttttctgtagaaattttggttaatttatta

SEQ ID NO: 947493 - DNA, 504 bp, Homo sapiens
atggtaaataaccctactatagaaagtatccctacaatttaaaaaggaaaagattagaaagcatcctaaggacagaaatggacaatttgctgaggaagaaatatactgaatacatgcatggaaaagaggaaatgcgaattaaaacaagaacatataatttaaaaaccaataaattgattttttaagttttaaaagatcattaatattcaatgctcgaaagcatttgaggaccctgacattgtgacaccttgctggtagagcataacttgatagagccttgtagaaagtaatctgacagcacctactaaagtcttaaatgcatatatctttggccctgcaattctaccttaaaactgtaaacttaacttatagaaatcraaataattgtatactatatatatttatagatatttactgaaatattccctttattaatgaacaaaacctgactatccatcaagagaggaggggctaaataaattaggtcatccatattacaaaaga

SEQ ID NO: 947494 - DNA, 568 bp, Homo sapiens
ctcaagtcacacacaaaaaactgggagtcagaaaagttttggtgtttttttagcagcaatattggaagctagagaaaaactgagcactattgtcaaaattctgaaggaaagtgatttctgacctagatttctgaagctagaataaaaaatagtgttcatactataaagtggtaaaaagtttgcttcccatgtaattgtctcatgaagctactaaaggacatgctcaagcaaagcaaggggctaagccaagaaagagggagcaggggacacaggaaacagggaattcaacaggagaggggcaagttaagatcctcgggtgaagacaggaaaagaggatgtcccgtccaggtagggcaagtgagaaggctcaagggagacttcttcaagaagatgaaaatgctgtgtctgaacatatggaggggacatttagagagccagagaagagttgggttgaaatagcaataaaaagagagaaaactaagcaaaggaaaaacataagacaatgatttaactgtaaggaatcaaaaagctgygtaggaaagaaaatctattcatagtacaccacatg

SEQ ID NO: 947495 - DNA, 605 bp, Homo sapiens
caattatgcattctggcaccrgggaaatgaccacaggatgagtccagggacccactgaacccactgtaagtcagacctgagctaaaactccattaattacttggcctccataagctcctactttaactgggggaccacaatgatgttttgggtcccctggaatcaatgtcagctcagagccagcgtccagtggtcccccaaatgtctggtcatttccctttctgcaatgcacagtcacactggtaaaaggctggaggtctctctggggaaggatgggagaaagatccactgcataaattgttggtaatgtagtggggtcctccctcaaggagacccgacctcccctttattcaagggattctgggtccgtaaactggctcaagtctggaaattgaggggccgtgattctctgtttttataattcaaattagccttttgtctattcgacctagaagttttccacttgtataaattaagtaggaatgcagtaggctccctatcaatttcacttctaggaataccatgattaattagccaatgccagagctctacaccagactattctgattgtgactttgcctctgctgtccattacagtagatatt

SEQ ID NO: 947496 - DNA, 806 bp, Homo sapiens
agacagctgaacaaacaaatgkatgatatgtctagtggagataagtgcaaggaatggaaataaagcagggtaaggagatagagagtgatggggtgggtggtccagaaaggcctctcatgtaaggggacattcgagcagagaccagagtgagtcaaggggcgagccacgtggccatgtggtagaagacatgagacgttggtctctgagccccaggcctcccctttctgtccccgacctcttcccccgaggagggtggaaactttctccgccctcctagcaaacttttctctcagctcccttattaacatccaggtacataactgagagcacattagggaggggagggaatatttgttgacatccactctgtacaagggattttgccagcagtagctcagctcacctcctgagaaccctgttgaaggtatttatttttcattttacatttggggatattactgcaggaccctcctctctgacttagctggcaaggctttgtgttcacacagcctcctggaccccttcatctaacttcattaactctatagcaggggaggcagcgagggctcctgaaggcaagagccagttgttttccctctgtctgcagtgcacctctgtacaagataggcgctcacttacaatcgggtgaatgaatggagtaaaaacgttgagctaaaggaatgattgatatgcccatgaaattcaggaactgaccaccagtcaggagaaaattagctcgaagtttcattgccatgtagaaatctcaggacaaaggtagtgtctgtgctcaagcctagccctctgcc

SEQ ID NO: 947497 - DNA, 583 bp, Homo sapiens
agtctatggcataggttaaccatttgagctctgaatttttcttgtaatttgcctatcagtttaaaatgtacacaaaaatgagccataatatgtaatcagctatagtttcaaagggaacaacaaaattagaagataggatgttcgaaaccgttttttcttttcttttctttttttttttttaaatacagagatggggtttcactatgttgcccaggctggtctcaaattcctgggctcaagcgatccacctaccttggcctcccaaagtgctaggattacagggatgagccaacatgcccggcctgtttttccctttaagtctgagctcctggattgaacagaaaaagagaaaaagaaaagaaaggaatgcagaggaaaagattaagctttataggagggcttgtgagcctttcagccactgcatgatgtggggccagcacccctgccatccttgtttatctcgtgtcacagagaaccttagcaccccagacctacacagtgtggaacaaattccttccacccstgcaagtcactagttaaggtgagctgtttacagggggagtagagagccccttcagctcaa

SEQ ID NO: 947498 - DNA, 614 bp, Homo sapiens
atctcctcccacctacttcctctcaactcccagcgaggccaggcagggaggatgagtgagcacatagcatggcacccaggaggtcagtctctggccgcaggcctcttcctgggctggtttggggcccagagtgacgtatgtcttaggccttaaagactgggaatctggacagagacctgagacaggcactgagaacagggacaaagcagaggttctggtgcggccaccacggcccaggaagactcagacttgagaactcagaggcagagttgggcagaaagaagccaattggagctaggaaggaggtcacaaagtggggtcctgaccctgcatgaagccacatcaggagaggtagggggtatgagtagtcagggtggatgagttctttctggattggtgtgggggatctagtggggcatgggagaagctgatacttcctgctccgtggactgccttcctgctcaatggaagtattagcctctgctggccccacaagtgcaggaagtattccctgacttgggaataatgtgcttagtgaatcccccmctgtacaccacggcatgagcacgtgcagccagggctggaaggaaccagcgttggtgagcatgcactgc

SEQ ID NO: 947499 - DNA, 805 bp, Homo sapiens
gagataaaaccacaaatgagatggacacagccccggactcatggagcccactccctccccttcctaaggagatccccgggctcttctcactgttctccagcactctgggaacattcccctatggggcctttgctcaatttcctacacctgaaatgctgttgccatgtgctagatcccaccattccttccaggctcagtcaggcccagccccggccccatgtccacacctccccagccttggagccctctctgtctcacttggcactcagcccacacaccttgaccttcatttctctctgcaaagctccatcagccctgtgctcacactcatggtggcagacacgagcgggtcctatccaagtccctccctggggcccagctcctagtactggagaagggagtgggggtccccatggggtcagcattgggcttatccaggaatgcagacctgactggtcgggctgaagtgctttaggggcaattttgcatcagggtctgtggtgcttcttggccagcctcatctgaagggaagcaggcagaccacaagggaaataaaagcatagcagagcatagcactgaggtttgtatggttcctgccacacagcccagtcctcatgcactcaggagagagggctaagtcacagagagggggctgtgagtacaaatccaaagcgttttcactaaacccaccacgaaagtttggagcaccagacaacatgctctgaagttgcaggagggagtgtcacagtagktgggtggggtttgaggactgtgctcattggggcagactctgcagcctgagcag

SEQ ID NO: 947500 - DNA, 562 bp, Homo sapiens
gagtgttacagcatgctaacagacctttcagtcccaccatctgcagcctgatgatcagagggtgtgtggcacccagyagctccctctcccattgctcagcaactgggaaggagagtgctacagggttacaactttgtttgctcttgctgatcagcaggtcttgagttcttgtcccatgtccaagaagaatgaggttatgctgacagccaacaggtgagcaaggcaaaaagttttattgagtgacaaaacagctttcagtggagagcgggacccgagttggtctgcccccttacccaaaataaggtagtctccacccccactcaaaatcaggtagtcccaaagcttgcctgagtctggggcttttatgggcacagaatgggggagtgcatgctggttggtttgtgagtatgcaaaaaaggcaccactcaaagatgggcacaatagtgtaaaaaaccaattagggaagggtagtaatatgtaaaataggtgaagggtggggatcaatcagagaaaagcacaccaaatgggaagagaggttctcaatctagtctgtggatttatc

SEQ ID NO: 947501 - DNA, 577 bp, Homo sapiens
gccactacaaaaacacacttaagtgcatgggtcagtgacactataaagcaaccacacaaacaagtgtgcataataacaagctaactaaatgatgacaggatcaaatctacacctgtcaatactaaccttgaatataaatgggctaaatgtcccaattaaaggacacagagtggaaagttgggtaaggaagaatttttcctgaatctcgatgatctttgttctattcatgttctgaattctatttctgtcatctcagccatttcagcctggctaagaaccacactgggaactagcatggtggtttggaggtaagaagccagtttggctttttgtgtagccagagttctttctctgattctctctctctctctctctgtctctctgtctctctccctctctctctggctcatgatccttcaatctttgaaattgctgtcctttgggtgtattttatttttcttttatctttgatgttcttgggggtttgtttgttttatatggtgggttcartcaattggttgcgtttctggaagatttttgggggccaaggcttagctcagtactcttgggctgtgtg

SEQ ID NO: 947502 - DNA, 516 bp, Homo sapiens
ttcaatagtcaggtccatcttctgtagggctgctgtggtttgctaggggttcacttcaagycctattcatctggttctctcaaacacctggagatgtcacttaaggaggctgaagaacagcaaagatgggtgcctgcttattactctgggatctctgacttcaaggggcacagatctgatgccagtaggaatgctcctgcgtaggatgtctgacaacccctgttggggacgtctcaccaagctgagaagcatgcgaagtaggtcccatttaacaagacactttggctgtcccttggtggaggggttgtgctgtgctcagggaaactcacttgtctgggctgcccagattcctcagagctagcagggggaaagactacatctgctggtctgcagagactacagccacctctcccactaggggcttaggcccaggaagatcagagttctgtccctgagctaaagttggagtgcctgcaaggaggagctgccaccccttccccagggagttcagatggc

SEQ ID NO: 947503 - DNA, 597 bp, Homo sapiens
gaaaataataaaaaaaaaaacaaactgggcatggtggtctgcacctgtagtctcagctactggggaggccaaaacgagagaatcacttgagcccagcaggtcgaggctgcagtgaatcatgatcatgccactgcactttagcctgagccacagagcaagatcctgtctcaatcaatcaatcaaccagtcaacgacatctcatttttcatgctgtagtgtccttaattatccttccaaaactaatagttttgaaggtgttccttcccatgaaactttgatgtgagtgaatcacagttttcctggaggattctgtgattctagtatgtgtatttaaggcagttttctgtcccgactattttggctttgaggaacagaagcatcctcgaaccaactcaggaaaaacagggcttttcataaggacacaagaggaatggaagtggaacctgacagaaggcaggtcaggggctgatgcttggcctcatgaaggctcggcccctccttgccatccctgccttcccttgtctctcctggtgagcttcytccacctcatcacagccttatggtctcacagcgcatggcccaaactctcattcccga

SEQ ID NO: 947504 - DNA, 733 bp, Homo sapiens
atgagattgactggatgaatgctaaggttccttccaatccagtgaaactatgattccaagaaaacgttttaaatcccatagattaagctttaatggtagaactccagacacaggatgagctcacaggggtgatcacaccatgtaggctggccttgtctttcctcagccataggaatatacatgtaagacacccacggatgaactaagcccagaagtgcccttttccaggcttgagaggaagagctcccggaggcagtcctttgggctgcagcctgggaatatgctttggccacccttgatggcgcctaggaagcttctcttggccccggctccactgagattgtgtatggaagacttctcaggggctacgggaggcggggaggagaattcccaaggactgtcccttgccaggctgagacaccctggctccacctacaagcctgctgtctactaggggctccgggcctattccctgtggggcttggctaccatgggatctgtttccagtcacccagagcatcctgggatgccgaattccacagaagtctggccactctggcgtcactgccaaaggctggcctggagccagcccacagcaggaactcatggccagactgagaggcagagctttcctcaggaagttggattgattcaaacaggtaakaatgtgaagtgcagtgcttgtgcctagctgtacacaaaacggaaggggaataaatgaccttatagtagc

SEQ ID NO: 947505 - DNA, 733 bp, Homo sapiens
atgagattgactggatgaatgctaaggttccttccaatccagtgaaactatgattccaagaaaacgttttaaatcccatagattaagctttaatggtagaactccagacacaggatgagctcacaggggtgatcacaccatgtaggctggccttgtctttcctcagccataggaatatacatgtaagacacccacggatgaactaagcccagaagtgcccttttccaggcttgagaggaagagctcccggaggcagtcctttgggctgcagcctgggaatatgctttggccacccttgatggcgcctaggaagcttctcttggccccggctccactgagattgtgtatggaagacttctcaggggctacgggaggcggggaggagaattcccaaggactgtcccttgccaggctgagacaccctggctccacctacaagcctgctgtctactaggggctccgggcctattccctgtggggcttggctaccatgggatctgtttccagtcacccagagcatcctgggatgccgaattccacagaagtctggccactctggcgtcactgccaaaggctggcctggagccagcccacagcaggaactcatggccagactgagaggcagagctttcctcaggaagttggattgattcaaacaggtaagaatgtgaagtgcagtgcktgtgcctagctgtacacaaaacggaaggggaataaatgaccttatagtagc

SEQ ID NO: 947506 - DNA, 653 bp, Homo sapiens
actgaaaagtctgtaagataagaacaaaagtgaccactggactcagtgacatggagatgactttttctttttgagacacagtcctgctctgtcacccaggtgcastggtacgatctcggctcactgcaacctctgcttcccgggttcaggtgattctcctgcctcggcctcccaagtagctgggattacagacacctgccaccatgcccagctaatttttgtatttttagtagagacggggtttcaccatattggccaggctggtctcgaactcctgacctcgtgatctacctgcctcggcctcctaaagtgctgggattacaggcgtgagtcactgcgtctggcctcatggaggtgactttgacaagggccatttcagtgggatggttggagcgggatgctgactagagaggataggagagaaaatgtggtaaaagggagacggtggctaaaacaactttccaataatcttttggaaaaagagaaattgatggtggagaagaaagcagatacttgaaaacaaaaaggagatggaatctaggtcacaagtggagggtgagccttagagcagattcatgtgggtggaggtgcagataagtgggtggatgtgatagcagggacacaaaggtaatctagtttgacagctccatagt

SEQ ID NO: 947507 - DNA, 644 bp, Homo sapiens
atcttagctttcaaaagagttcgagcattactacccaaccacaaaagaaccctgaactgggaatgaatgtatccatgacccatttgtgagtaagtcaggtgaatcgattttgtcygtactagaagaggatcaattgcttgagatcacaaatgatggtggccttaaaagtatgtttgagacagcttcaaatcccatgttctggattaaactcaaggtgggatatcctgagattgccacaaaagcactgaagagtctgcttccatttccaacatgctatctttgtgaagcaggattttctgcagtgacagcaaccaaaacaagattacggagtagactggacataagcaacacacttctggtgtcactgtctcccaccgttcccagatgggaccttctaattgcaggaaaacaaggtcagggctcccactgattccacattatggtgagttgtataattattttattatatattacaatgtaataataatagaagtaaagtgcgcaatacacgtaatgtgcttgaatcatcctgaaaccgtctgccacccggccctggtccatggaaaaatcctcttccgtgaaactggtccctggtgccaaaaaggttggggaccactggtttatccagggtcatccaggttgga

SEQ ID NO: 947508 - DNA, 610 bp, Homo sapiens
gcagtgggatttgaatttgccttataatgctggcctagggaagtattctgatttctcaggcratgggcagggccataaagctccctcgagtttttcctttgtgttcagctaccagggcaagtagagatatggcattatgctggggcaggattagggaggtctaagctcagaatctgttgggtggggcttcacacggacactgtagggaagtggggagtagttctcaggccagtggggttatattccagaggggattatggctgcctctgctatgtagtatagttcacaagggctgtggggatagctggtagtgaaaaacctcacccagctcccacacagttggcgaggccagtctcactcctgcagttccctgctaaaagcactgagtttagatccaggcagcctgtgtgtgaaactcagacctgccccaggtcataagcttccccactaagaaagcaagcagagctttcaggctacatccctccccatctgcccacaatgtaggcagctactgcgctgctcatatctgcagcaattcctgctcaccccccagattctgctcaagaaaatttgtgcccacttgaaattatcacaaaattcagttggatac

SEQ ID NO: 947509 - DNA, 634 bp, Homo sapiens
actccaatcaatagaaaaagaggaaatcctccctaactcattttatgaggccagcatcatcctgataccaaagcgtggcagacamacaacaaaaaaagagaattttagaccaatatccctgatgaacattgacgcaaaaatcctcaataaaatactggcaaaccaaatacagcagcacattaaaagtttatccaccatgatcaagtgggcttcatccctgggatgcaaggctggttcaacatgagcaaatcagtaaatgtaatccagcatgtaaacagaaccaaagacaaaaaccacatgattatctcaatagatgcagaaaaggcctttgacaaaattcaacagcgcttcatgctaaaaactctcaataaattaggtattgatgggacgtatctcaaaataataagagctatttatgacaaacccacagccaatatcacattgaatgggcaaaaactggaggcattccctttgaaaactggcccaagacagggatgccctctctcaccactcctattcaacatagtgttgaaagggcaatcagacaggagaaagaaatgaagggtattcaatgaggaaaagaggaagtcaaattgtccctgtttgcagatgacatgattgtatatttagaaaa

SEQ ID NO: 947510 - DNA, 765 bp, Homo sapiens; identical to SEQ ID NO: 945560

SEQ ID NO: 947511 - DNA, 764 bp, Homo sapiens
cgaggtttctgaacccctgccccggaagcttcccctttcccacacaygtcactcgctgccttggaatctgggctgcctccctcccaggggctcacaggggagcgaggccacagaaaggctccttacccccagtggcctaacaggtgtgacatgtggagggggaatctgggcagtgtgcctgatgctcagagctgagaccctgaagtccaactccctcgggtgtgaccttggacaagttacttagcctctccttgcctcagttacaccatctggagaatggggatgctaccctcgtctgaccaccgtgatgtgagccagtcagcacacatcaagtgctccgtgagcgtccggcacacaggtgcttgtctctgtcctgtgcttcagctccatcagtgtcttcttcagacctgtcattggcttggggcaaggatatatgtggccgctgagggcggtccgccaggtatggcagccatggagctgctaattaggccctgtgagtgggaggccctgtggggtgggcaggggcagacgcccagctgctctcggggacactccaggcctgtgctgccctccacagccccagctggagaatggtgaccagatgtcaacgacaggaagcatttccagaggccacagctctgcagggaggtctctcatgggctgacagccagagccagcgctccgggtcccctgaaaaaacgggcacagtcctcggtcacgtcgaggacctgctcagcccctccacttggcaccggagagaggat

SEQ ID NO: 947512 - DNA, 431 bp, Homo sapiens
tacttagccaaggccttggaggaagctgtgtgtggcaggggaagcagactgcatccagagagmgccctggctgagaaccactgaaaagccaagagatgcctacactcactcacacacttattcccaccttccaacatcccataatatcctcatttaattcttacaaattaacactttctcaagccgatccttggagcagcattttctaagatgaaccccacatttcttctaccagctgcatttgctatgcacctcaatatgtcagtgacaatttcctggacaacttccagcctagagtgggaggtggaaatagatctcatgcctgagaagccccagccagcatcacagaactgctgaggattggaccgggaaaagatctgagagatctccgactccccactcagctgcatgtttgctccagctttcctaag

SEQ ID NO: 947513 - DNA, 431 bp, Homo sapiens
tacttagccaaggccttggaggaagctgtgtgtggcaggggaagcagactgcatccagagagagccctggctgagaaccactgaaaagccaagagatgcctacactcactcacacacttattcccaccttccaacatcccataatatcctcatttaattcttacaaattaacactttctcaagccgatccttggagcagcattttctaagatgaaccccacatttcttctaccagctgcatttgctatgcacctcaatatgtcagtgacaatttcctggacaacttccagcctagagtgggaggtggraatagatctcatgcctgagaagccccagccagcatcacagaactgctgaggattggaccgggaaaagatctgagagatctccgactccccactcagctgcatgtttgctccagctttcctaag

SEQ ID NO: 947514 - DNA, 431 bp, Homo sapiens
tacttagccaaggccttggaggaagctgtgtgtggcaggggaagcagactgcatccagagagagccctggctgagaaccactgaaaagccaagagatgcctacactcactcacacacttattcccaccttccaacatcccataatatcctcatttaattcttacaaattaacactttctcaagccgatccttggagcagcattttctaagatgaaccccacatttcttctaccagctgcatttgctatgcacctcaatatgtcagtgacaatttcctggacaacttccagcctagagtgggaggtggaaatagatctcatgcctgaraagccccagccagcatcacagaactgctgaggattggaccgggaaaagatctgagagatctccgactccccactcagctgcatgtttgctccagctttcctaag

SEQ ID NO: 947515 - DNA, 431 bp, Homo sapiens
tacttagccaaggccttggaggaagctgtgtgtggcaggggaagcagactgcatccagagagagccctggctgagaaccactgaaaagccaagagatgcctacactcactcacacacttattcccaccttccaacatcccataatatcctcatttaattcttacaaattaacactttctcaagccgatccttggagcagcattttctaagatgaaccccacatttcttctaccagctgcatttgctatgcacctcaatatgtcagtgacaatttcctggacaacttccagcctagagtgggaggtggaaatagatctcatgcctgagaagccccagccagcatcacagaactgctgaggattggaccgggaaaagatctgagagatctccsactccccactcagctgcatgtttgctccagctttcctaag

SEQ ID NO: 947516 - DNA, 444 bp, Homo sapiens
ttggggactttccatcctggaaggagcagtgattcattctcagaagaatagacatatatcccagatatgggttttctttttctgyccacagggccttacccagtaccattatcttaagatttaagtgtttgatccactggtgtaaaaccccacacaatgttgtattagaacaggcagcaaactttatatcaaaagggatatttgggctcataaccatgggatcaactgttcatgtcacattctgcactacccacaagctgacagcctgatagatcactgaatagcctgtggaaggcatagctgaagtgccagcttgggaagtggtagcctgcatgtatgacatgttatcctctaggatttcattcaaggcaatataggccttgaatggaaaagcttatacggcattgtatttccagtgggaaatgaaacaaagaggtagaaaaa

SEQ ID NO: 947517 - DNA, 615 bp, Homo sapiens
ataagttctcactctggtctgtggaactaacagcccagtccccaggcttcaggccatccctggcttttgaaggtggtgcttcactggggacccacccctgaccatccaggagcctgtctgcatcctgccaccattaacctcccatctacagtgcccatggcacccaggttgtttgtgccaagagatgcctgcaggcctgcaacgagtcacccttagctctctttcagccaccctcccatgcttgctggcacccaaagtccagagggggccgaggtggcagggggctggcatgtcagtgcttccccaagtgcacacacacaggctgggttgtgacagtgcctgggctcagccataactttcctccaaaactggagtgggttccatgagtggggagaggccaggtagtgggagcaggcccttctgagcctgcaggggaagggggacttcctaggtcctcaagagtgcagagatgcccaggtccacagttgcagccaggtggctgcagctttgcttgggagggtggagttcyctcctctccaacttggaaggtagcagggcttctgcctgctcctggctctcgccggctccatgggaagtacagccctggctgtacct

SEQ ID NO: 947518 - DNA, 635 bp, Homo sapiens
tgcaagaactgaaaaggtaaaaaccatttctaagtaatgtgacagcactccagaaaaagcccgagaayatttataagaatacaaaaatatacagcactcaacgaagtaaaattcctagtatttgacatccaataaaaaaattgccagtaactcaaagtagcaaaatatgacccccatactgagaagaaaaatcaattatttaaaatcaaccaagaactaatatagatgttagcattaacagaaaagggcattaagacagtaactatatcctgaatgctcaaaaaattaagtagagacaggtaagacattaaaaatactcaaacttctagagagcaaaaccacaatgtatgaaattaaaaatatactggttgacattaacagcagattggacattacagaaaaatagattggtgagtttgaagatgcagcaataaaaactaaccaaaatgaaatacatagaaggaaaaaaggacttttttttaagttaatagggtgttggtaaattgtaggacaatttcaagagacctaatgcacatgtaactggaatttctgaaggggaagagaaagacagataaaaatatctgaagaaataataactggaaatattccaaatttgatttgaaaaactataaacc

SEQ ID NO: 947519 - DNA, 658 bp, Homo sapiens
  misc_feature 349: n = A,T,C or G
tgagttggggggcactctggggagagagccttgacgtagagcttggaggccaagtggggggcatgcctttacctggctgtggtcttggccaagtcctmagtgggtattgggtacttgtactgtgaaggtacagaagagtacctttagtatgttaccatttctgtagagagaggaaacgtgtgtgtgtgtgtacatattatgataatatacataaaatatgtttgcaagtgttcataaaaactcaggagagagcaacagggtggctgggagatacttcccttctgtaccttctgagtctgggactatgtgaatgtattatcctttcaaaaagtgaacaaaagattaattntccccttcctagctgtgcccccacccccagcaagaaaaatgggcttagagaattggatagatctgggtgtttaaatcccagctctgcctaagtgatcttaggcaagcacttaacctcaaatactccatgttttttcatctacacaatagaggtcatcatagtaactgtctcccatggtggttgcgaggattaaatgggattgctagcatggtatctggtgaagcactccataaaagttcaaacagtggtaataatatcagtaatagcaatagcaatattatctgatctctctgggcctctgttagccag

SEQ ID NO: 947520 - DNA, 612 bp, Homo sapiens
tctgggcacctgtaaaatgggaatagtasagccagaggtggtcatgggtctgggctttgtggaggtgggggcagagagagagatggtagcatgtccagcctccagcccctctctccagggccctttccccctgtgctttgggcaggtttgctcgttgaagaaggagaagaagcatgataaatatcgggtagagaagctggagaggagcttgtccaaactcaaaaaccagatgggtaagatggggctggcgtgacctggcagcaggactggcatcagagggctgtgagggtggcttggagtgccccagcgaggtgggtggatggaagggctttgaggcagagggaaagaggtctgtgccaggagacggcaagtcttgtcatctcaatgagcctcagtgtccccatcagcaaagagggcccgttgtcagccacccgcagtgctctttctctgaaagtgctttggaagactggctacccatctgggtgcgaggaatcattagcagtgaggctaagtttgaggagccggagaggagctgtgcgccaagaggagggttttttcttttcttttcttttcttttttttttggaatccagaggctcttattatctgcttc

SEQ ID NO: 947521 - DNA, 605 bp, Homo sapiens
tttcttcactgctgccaagttctcatttttagagaggcagtgtggtaactgcccaaccatcacttgctggtcacctgaccttcctggtgggttgggggtagagccctctcctgcctggttcatctctgtctaactacctgtaacactcccatttggagtccaggagcaacttaagcgtcagtgataaagattctgtgttagcaggcccagcagtcagcaatgatcagtcagaagaaactgaacacttaccagtgacatgcagaggggaggggagaaagatgacaacttggacgaaaagtaaattctattaaaaaaaatgtgaggggccaacactttctgagaccaaaacacgatttctcttatcaacaatttagtgagtgaattgagatccaaatttgatttgactaatacttcaaaacaaaaagcagaaatataagaaaccacgaggaaaaagaagggacgtggcagataaatgaagaataacaaaatgtaaattactagaatttcacaaggagtaaaaggtattcgtggaagtaagacaataattaaagaatagtakattatttcttgaatgtaataaaggctcactgtttcaggttaaacca

SEQ ID NO: 947522 - DNA, 587 bp, Homo sapiens
tatttgtgtcaaagaaatgaatagatgtttgatgtgattattatgcattgtgtgcttgtttcaaaatatctcatgtaacccataaatatatacatctatgtgaccacaaaaattaaaaataaaaaaatttataaagcaaaacataaaaatggccaacagatgtatgaaaacatgctcaatattactagtcatcagggaaatgcaaattaaaactacaatgatctatgatctctcccctcacacctgttagaatggctgtaaaaaagacaaaagataacaagtattggtgaggatgtggaaaagagggagtacttgtacactgtttctgggaataatttttttttttttttaacaaaaatgagcagcagagtaggtatgaccccacaggacatagcttacccacccctaccttacagtattgtgactagaaatgcctaacctgaagctaatcatgaagcaatatcagacaaacttcaaataaagaatatgccatctaaaaagagggatggatagctttattcttcaaaaatatccatgttatgggagacagagaaaggytgaaaaattgttccagattaaaggaagct

SEQ ID NO: 947523 - DNA, 545 bp, Homo sapiens
gcatgggaaagaccggcccccatgattcaattacctccccctgggtccctcccacacatgtgggaattctgggagatacaattcaagttgagatttgggtggggacasagccacaccgtatcattccacccctggacccctccaaatctcatgtcctcaaatttcaaaaccaatcatgccttcctaacagtaccccaaagtcttaactcatgtcagtgttaactcaaaagtccacagtccaaagtctcatcggagaaaaggcaagtcccttatgcctatgagcctgtaaaatcaaaagcaagttagctaattcctagatacaacaggggtataagcattgggtaaatacagccattccaaatgagagaaattggcaaggggatgcaggcccatgcaagtccgaaatccagcaaggcagtcaaatcttaaagtttcaaaatgatctcctttgactccatgtttcacatccagttcacgctgatgcaaaaggtgggtttacatgggcttgcgcagctccgcccctgtggtctggcagggaactgcct

SEQ ID NO: 947524 - DNA, 696 bp, Homo sapiens
gggtgaagtggtatctcattgtrgttttgatctgcagcttgttagtgactagtgatgttgagtatcttttcatgtgcttattggacatttgtatatcttctttagagaaatgctgttcaagtcctttgcccactatttttcagatgaggtctcactctatcgcccaggctggattgcagtggcgtgatcacagctcactgcagccttgatctccctgggctgaggtgatcctcccagctcagactctcaggtagctgggacttcaagcacgcaccaccatgactggataatttttttgtatttttcgtagacacggggttttgccatctccaactactgggctcacgtgatcctcctgccttggcctcccagagggctgagattaaagtcatgagccaccgcacctggccctttgcccattttttaattgagttgtttgtcttttgtttgagttttagaaattctttctacaatttgcacattaatcccttaccagctatatgatttgcaaatattttctcccattctttgggttgtctttttattctcttgatattgcctgtctttgtctgtttgtgctgctatagcaaaatgtctgagactggataatttataaaaaacagaaatttattttcttacagttctgtaggctgctaagtcctaaatgaaggcactgccaggtttggtgtctggtga

SEQ ID NO: 947525 - DNA, 592 bp, Homo sapiens
gagactacaggtatgcaccaccatgcaagactaatttttaatttttttgtagagtcaaagtctcactctgttgcccaggctggtctcaaactcctgggcttaagcgatcttcccatgctggactcccaaagtgttgggattacaggcatcagccaccccagcaaagactcttttgtttctggtttaacatttaaaactagaaaattttgctctttaaggagccccatagcaataaggtgacatctttgtgcaactgcatattttccattgccctggtcatttgtatgagggggggcaaatgcagggctgccccaagagtgccttgagggcagggctgtgtcttagtcacctgggcattccctgtgcctcctgtggtgcctgtcacatgatgggtgggtgcttatgtgctcagtgaagtcaagctcctgacagagacaggtgtcccaagctccctacgcaattgccattgtgcatgatattctaaaagggaagaaaccctgcaagagcagtcatgactctsagactttcagaactttaggaaaactttattttcattgtgtgtataaaactcttgttttttcaaccaccagct

SEQ ID NO: 947526 - DNA, 582 bp, Homo sapiens
aaccactactctcttcaaagctgtcacacagggacgtttaagtctgcagaggttactgctgtctttttgtttgtctgtgccctgcccacagaagtggagcctacagaggcaggcaggcctccttgagctgtggtgggctccacccagtttgagcttcccggctgctttatttacctaagcaagccagggcaatggcaggtgcccctcccctagcctcgctgccgccttgcagtttgatctcatactgctgtgctagcaatcagcgagactccgtgggcgtaggaccctctgagtcatatgcaggatataatctcctggtgtgccgttttttaagcctgttggaaaagggcagtattagggtgggagtgacctgattttccaggtgctatctgtcacccctttctttcactaggaaagggaactccctgaccccttgcgcttcctgagtgaggcaatgccttgccctgctttrgctcacgcccggcgcgctgcacccactgtcctgcacccactgtctggcactccctagtgagatgaacccggtacctcagatggaaatgcagaaatcacccgtcttctgcg

SEQ ID NO: 947527 - DNA, 631 bp, Homo sapiens
cttctatttcaacaatcattttctaaaattgtattttcttttgaaaagtctgccctgtctctctctatctatcatctrtctgtctatctatctatctatctatctatctatctatctatctatctatctttcatgtgcgtccatgtgaagagaccaccaaacaggctttgtgtgagcaataaagcttttaatcacctgggtgcaggcgggctgagtctgaaaagagagtcagcgaagggagatggggtggggccgttttataggatctgggtaggtaaaggaaaaaggggggttgttctctggcgggcaggagtgggggtcacaaggtgctcagtaggggaggttttgagccaggatgaaccaggagaaggaatttcacaagacaatgtcatcagttaaggcaggaaccggccatctggatgtggacgtgcaggtcacaggggatatgatggcttagcttggactcagaggcctgacactatctatctatctatctatctatcatctatttatgggaatgtactgtgaacatactttaaggaacgtttatagtctcagttgtagggttctcttgcaatcttccacagaaaagaaagcaaaaatgactgacattaatagaaacatattttaa

SEQ ID NO: 947528 - DNA, 232 bp, Homo sapiens; identical to SEQ ID NO: 947237

SEQ ID NO: 947529 - DNA, 626 bp, Homo sapiens
gtcttgagcggggtccagaacaggagaaggctctgcaacaggtccaggctgctgtgcaagttgctctgccacttgggccatgtgacccaggagatccgatggtgcttgaggtgtcagtggcagatagggatgctgtttgcagcctttgacatgtccctctaggtgaatcacagcggaggcctctaggattttggagcaaggccctgccatcttctgcagatgactactctccttttgagagacagctcttggcctgttactgggctttggtggaaactgaacatttgattatgggtcatcaagtcaccatgcaacctgaactgcttaacatgaattgggtgctttctgacccatctagccataaagtgggtcatgcgcagtagcattcaatcatcaaaatggaagtggtatgtacgtgatcaggctcgagcaggtcctgaaggcgcaagtaagttacatgaggaagtggctcaaatgcccctggtctccactcctgccaccctgccttgtcttcctcggcctacatcratggccccatggtgagttccttatgatcagttgacagtggaagagaagactatggcctggtccacagatggttctgcacaatatgcaggcaccaccag

SEQ ID NO: 947530 - DNA, 751 bp, Homo sapiens
ctctttttccctgttaatacattcacctgaaaatgcacagccactcccatttcctctaggtctggggacacgggcccagatgtcatgtaggaagtttatcttcacaccccctcttcccattctgtgagcagccactgctgctccaggatgtctatgctcttcaactctttgtagcacaggactcagctcctgtgcatacagcaagaggacaagaatgactacaggtgcaggcaagataacattaatttttttttttagtcctactatgttctgggcactttgctgagtcctctacatgtggtatatatcttaaatttcaaacatcctcttcatatatatgttttatacaaacacatgcatatatatattttgtaaaataagcaaaatagacttcaaaagttaagcaacttgcccatggttacatagctaataactagccagagtgtgattgaaacccaactcatttgctaaggagatcaaagtatcaactaggggacaatttatccaaaattgccattttatagatgacaattccaagggttatagcagtgatattacttgcccaaggttacacagtgacactagatgggctagaagtggattctagatttctgaatggccaaattaataattttcctacggtgtgatcatgcagtcctgacggyagaatttcggatatcagttgaggaatgggaatggattctcagggcaaacaatgttacttgccctccaaaaatcagactgggaggcc

SEQ ID NO: 947531 - DNA, 711 bp, Homo sapiens
aagcccctactttaactggaggaccacaatgacgttttgtttcccctggaatcagcgtcagctcagagccagtgttcagtatttccccaaatgtctgattatttccctttcccaatgcacagttatcctggtaaacggctggaggtctccttggggaagcatggcagaaagattcactgtataaattttcagtattgtagtggtgtccttccttaagagaacccggcctccccttcattcaaggggttctgggtttgtaaactggctcaagtctgaaaattgattgaggggccatgattcactgcttttataattcaaattagtctttttttccatttgatctagaagttttctgcttatataaattaagtaggaatgcagtaggcttcttaccaatttcacttctaggaatgccatgattgattagccaatgccagaactctacattagtcagattattctgattgctgctttgcctctgctgtccattacagtaggtacacccactatgcctttgacagttgagtgctaccatttggcccctgccaccttgggatccaattcttcccattgtatttaaattttgtagttgagtgactgtcrttcccaccgttagatatgacatgcagagaagggcaattacagggctcttcaaagatgcaagtgctgccctcacgaatctgttttgcaaggcattggtcgagggtttat

SEQ ID NO: 947532 - DNA, 601 bp, Homo sapiens
gatattgttcttttttcttgttcctttgagttttctttctttgcctttgattttttaataatttgattatgatgtgctttggggaattcctctgtaagktgaatttggttggtgacctctgagctttctgtacctgaatgtcatcatccttctccacatttgggacatttttagctgttattttattaaatatactttctagggcttttactctctgatctccttcagtaactgctactatgtgaggttagtttgcctaataatgtctcataattttcttaatctttctttaatctttttaatttcttttatctttttgctcctttgattggatagttttataggtcccatctttaggctccctgattttttccctctgtttgattaagtctgcctttgaaaatttctggtagacattttcattttagttattgtattctgtatttctaggttttttatttgaacttaagttgttcctatttctttgtcaaagtctcatattgttcctgaatgtttatcaaatttcatttagtttttttcttacctgaattttcttatgattccttgaacttctttaagaaaattatactgagttttttgt

SEQ ID NO: 947533 - DNA, 567 bp, Homo sapiens
gatggatatatgcaataccccagtggtggacagaagtcccagccttgacagaagcaactgggggagctctccttgaaaggcactgaggtctttgcaggagaaagggagggagccacctcagctyctcttccagaccagcacgaaagcaatctgcctccctgtcacactcatgtcgcaatgttctggatattcagatcagacgaggcacttctgtggatctgcagaaatgctgacattcatgtagagagggattgtgaacctaccccaaagtgctccagaaaggccatccataggtgcacccaagccaagctcctgtggaggagtcccagccacgtctgcagtgataggcaaagggtagaagtccccttctccaggtcccttcacgagcactggggctgcccaactgctggggtagaatgacagtctttctaccacttagcccagcactgcatctgtgcctctgctgaaagaaacttcccacaagcagaaagttctaggactcaaaggctgcactctaattaattttgtcccacagggtgctcccttgatatggtaccctttcccttc

SEQ ID NO: 947534 - DNA, 674 bp, Homo sapiens
ctattttaaaaggagaaataaaaacattaaatgtaggattatcatatgatccagcaatgtcacttctgggtatatacccaaaagaagtgaaagcagggacttgmacagttatttgtagaccacattttagcagcattacttacaatagccaaacgatggaaacaactcaaatgtccattgacacatgaatggataaatacagtgtaatataaaccacattggaatatatgatgcaatatcattcaccgttaaaatgaaagcagattctgatacatgttacaacatggatgaatcttgaggacattatactaagtgaaaatgaaacagtcacaaaaaggcagatgctgtaggattccacttatataaggtacctagagtagccatagagacagaaagtagaatgttggctgccaggaggtcagggagaggagaatgaggggttattgtttaatgggtatggagttttaatttggggtgatgaaaaaattctgtagatggatggtggtgagggtggcagaacaatgtgaatgtacctaatgccactgaactgcatacttaaaaatggttaaaatgctaaatattctgttatgtgtattttatcccaataataataataataataaatctagctcataaaaaggaggaagagaacaagcccacactcaactcagagt

SEQ ID NO: 947535 - DNA, 532 bp, Homo sapiens
gtaaaatctggatattagccattcgtcagacgggtagattgcaaaaattttctcccgttctgtaggttgcccattcactctgatgataatttcctttgctgtgcagaagctctgtagtttaatcagatcctgyttatcaattttagcttttgttgcaattgcttttttcatttttgtcatgaagtctttgcccatgcctatgccatgaatgatattgcctaggttttcttctagggtttttatagctttgggttttacatttttaaatttaagtcttaatccatattgaattaatttttgtataaggtgtaaggaaggggtgcagtttcagttttctgcatatggctaatcagttttcccagcaccatttactgaataggagatcctttctccattgcttgtttttgtcaggtttgtcaaagatcagatggttgtagatgtatggtgctatttctgaggtctccattctgctccactggtctatttgcctgttttggtaccagtaccatggtgttttggttactgtagcctt

SEQ ID NO: 947536 - DNA, 547 bp, Homo sapiens
tctacgtctgattggtgtacctgaaagtgacagggaggatggaaccaagttggaaaacactctgcaggatattatccaggagaaattccccaacctagcaagccaggcaaacattcaaattcaggaaatacagagaatgccacaaagatactccttgagaagagcaactccaagaaagataattttcagattcaccaaagttgaaatgaaggaagaaatgttaagggcagccagagagaaaggttggcttacttacaaagggaagcccatcagaataacagctgatctctcggtagaaactctacaagccagaagagagtgggggccgatattcaacgttcttaaagaaaagaatattcaatccagaatttcctatccagccaaactaagcttcataagtgaaggagaaataaaatcctttacaggcaaacaaaagatgagagattttgwcaccaccaggcctgccctacaagagctcctgaaggaaacactaaacatggaaaggaaaaaccagtaccagccactgcaaaaacatgccaaattgtaa

SEQ ID NO: 947537 - DNA, 688 bp, Homo sapiens
gtgaaattaacctaagcacagagaacctctccttgctcaggtggtaagggytcagctcgcgccgccttctcctccagcgttctctcctttgctcaggtgttaagggctcagctcacacccaccttctccttcactcaggtggtaagggctcagctcgcgccgccttctcctccagcgttctctcacacttgtacagtaggacgtgttggattttaattgtttgctaatctagccccttgttaccacacaggtgtggaaagggaagggaccatatttcatccccgtgtgcgcccagccctggcccagaagtctctcaatcgctactgagtgaatgcacgaagccgctccattagcccagttctcagtgagctcttcaccatacagttgatagtttgcttctataccctagaatgctgttctccaattgcttctgctcatcaaatctcctctcccgacacttcagaaattccctgaggatccagattacatttccaacactttcattcacataacactgtctgggacccagcaaactctcaaatgtccgctctacttactcccagtgaaatacatttcgttttcccgccgctgaagatgtcactcagggtctgccaacacgatgccacaagtacccaagaggagcagctcaaaagcatgatcaggattcaaagcatcagtttaatcttag

SEQ ID NO: 947538 - DNA, 851 bp, Homo sapiens
aggtattgacatacacaacagaaaagtccagagataattctgacttcaagaaggcagatctgggggctcamatgacacccccggcactctgtgtccatctctgggagccttttctccatgttgttctatgctcagacagcctgtgttcatgtggtggcaaagatatacataacatctccagttcagagtcatctcaacttagccactccagcagaaaggcagctcctctctcctggaaagtccttcaaaagtggtaggaggagaccaggcatggtggcccaggcctgtaatcccagcacttcaggaggccaaggcaggtggatcacttgaggtcaggagtttgagaccagcctggccaacatgttgaaagcttgtctctactaaaaatacaataattagctgggcatgggggcggatgcctgtagtcccagctactggggaggctgaggcaggagaatcgcttgaactcgggaggcggaggttgcagtgagctgagatcgccactgcactccagcctgggcaacagagcaagattccatttcaaaaacaaacaaaaagtgctaggaaggctctggtcttcttggcttgggccaccagcccgtgtctgaccccatctctgcaacccagagatagatcatactcatctgctaagccaggaccacagagtcacccctggagccagagaagggagtaacccccaccaactgcctcggagggaggggttgattcccaaaggaaaattagggtggtcagcagaagaagggggaacagatgtccaccaccccaactccaactgcccctactttattacactactgttagcaaagtcacagatggcataccacataagt

SEQ ID NO: 947539 - DNA, 851 bp, Homo sapiens
aggtattgacatacacaacagaaaagtccagagataattctgacttcaagaaggcagatctgggggctcacatgacacccccrgcactctgtgtccatctctgggagccttttctccatgttgttctatgctcagacagcctgtgttcatgtggtggcaaagatatacataacatctccagttcagagtcatctcaacttagccactccagcagaaaggcagctcctctctcctggaaagtccttcaaaagtggtaggaggagaccaggcatggtggcccaggcctgtaatcccagcacttcaggaggccaaggcaggtggatcacttgaggtcaggagtttgagaccagcctggccaacatgttgaaagcttgtctctactaaaaatacaataattagctgggcatgggggcggatgcctgtagtcccagctactggggaggctgaggcaggagaatcgcttgaactcgggaggcggaggttgcagtgagctgagatcgccactgcactccagcctgggcaacagagcaagattccatttcaaaaacaaacaaaaagtgctaggaaggctctggtcttcttggcttgggccaccagcccgtgtctgaccccatctctgcaacccagagatagatcatactcatctgctaagccaggaccacagagtcacccctggagccagagaagggagtaacccccaccaactgcctcggagggaggggttgattcccaaaggaaaattagggtggtcagcagaagaagggggaacagatgtccaccaccccaactccaactgcccctactttattacactactgttagcaaagtcacagatggcataccacataagt

SEQ ID NO: 947540 - DNA, 655 bp, Homo sapiens
aattctggtgaaacttttttgccaggagtaacagcttccccatccccagtagtggcaacatcccctctacaacccgactcatgctgccatcagcctttccacctttgtctgaggagataaaccctgtgctgcctaaggcaacagtgatggcctcccctgaggcaactgccaggcaaaataatgttgactctcctcaggagacacccccaacacccctgtttgcttctaaacctataactagattgaagtcccagtgggccctagaggtgaggttgagagtgtgatccatgaggaggtgtgctacactcaaaaagaactgcttgagttttctaatttatataaacagaaatatggagaaccggcatgggaatggatattaagggtgtgggataatggtggaaggaacatagagttgaatcaggctgaatttattgatttggaaccgctaagtagggactctgcatttaatgttgcagctcagggagttaaaaaaggttctaacagttcatttgtttggttagctgaaatatggattaaaaaatggaccactatgagcaagctggaaatgcctgatttcccttgatttaatgtataggaagggatcaaaagccttagggatattgggatggtgaaytggattagtcactttagacct

SEQ ID NO: 947541 - DNA, 668 bp, Homo sapiens; identical to SEQ ID NO: 946659

SEQ ID NO: 947542 - DNA, 615 bp, Homo sapiens
attttggattaaggatgctcaacctgtaccatttgcattacattagagttacagtctatatgggctcagtaaattaaatgaaaacacatttctagcaatgcatttggtctgcacgttcatgatgttggggctgttgctgtgatgcttattgccgtaaatagcttcaagtattaacagatgacattcactatatttatttagacattgtgaaatgtttgtttttaaggttaaggtgagaattctggggtacaggggaaaaaaggaaatctccctgttttaaaataggcattctactatacagccataagaaagaaaagaatgagatcatgtcatttacagggacatggttggagctggagaccattatccttagcaaactaacacaggaacagaaaaccagataccgcatgttctcacttataagtgggagctaaatgatgagagcaaatagacacatagaggggaacaacacacactggttcctgttggaggctgaaggatgagaggaaggagatgatcaggaaaaataacaaatggatactaggcttacakacctggtgaagaaataattggtacaacaaacccccatgacacacatttacctatgtaacaaac

SEQ ID NO: 947543 - DNA, 554 bp, Homo sapiens
ggagtggtgagagagggcatacttgtcctgtatcagtcttcaaagggaatgcttccagcttttgcccatttagtgtgatattggctgtggatttgtcataaatatctcttattattttgagatacattccatcagtacctattttattgagagtttttagcatgaaggggtgttgaattttatcaaaggctttttctgcatctattgagttaatcatgtggtttttgtaattgattctgtttatgtcatggattgtttactgatttgcatatgttgaaccagtctcgcatcccagggatgaagctgacttgatcatggtggataagctttttgatgtgctgctggattttgtttgccactatttcattgaggatttttgcatcaatgttcatcagaaatattggccttacattttcttattttgttatttccctgccaggctttggtatcaggatgatgcaggmcccagaaaatgagttagagaggagtccctctttttgtcttgtttggaattgtttcagaaggaatggtaccagctcctctttgtacctctg

SEQ ID NO: 947544 - DNA, 505 bp, Homo sapiens
tctggtcctgagctttttgttggttggtaggctattaattactgcctcaatttcagaactcattattggtctagtcagggattcagcttcttcctggtttagtcttgggagggtttatgtgtccaggaatttatgcatttcttctagattttctagtttatttgtgtagaggtgtttatagtattctctgatggtagtttgtatttctgtgggatcaatggtgataccccctttatccttttttattgtgtctatttgattcttctctcttttcttcttaattattctggctagtggtctatctattttgatattcttttcaaaaaaccagctcctggattcactgagttttttttgaagggtttttcatgtctctatctcattcagttctgctctgatcttagttatttcttgtcttttgctagcttttgaatttgtttgctcttgyttctgtagttcttttaattgtgatgttagggtgtagattttagatctttcctgcttt

SEQ ID NO: 947545 - DNA, 388 bp, Homo sapiens
atgaaatattcagaagcccagcccagctctagaactcacccctagcrcaaaggcaatgttgggcacgctggtaaaggacctctagaatccagcagcccagacccgtttctctgtggtcaagaaaggtgggaaaaggcgtgcaggactactacatcggtgagcgtaactaatccgataagcagaggtccatgggtggttatgcaccctggaaaggaataagcattaggaccatagaggacgctctaggactaatgctcattggaaaatgactagggttgccggcatccctatgttctttttccagatgggaaacatttctcccaaggcaaaaatgccactaagatgtattctggagaattcagcccagagtgcatatacctttttctct

SEQ ID NO: 947546 - DNA, 388 bp, Homo sapiens
atgaaatattcagaagcccagcccagctctagaactcacccctagcgcaaaggcaatgttgggcacgctggtaaaggaccwctagaatccagcagcccagacccgtttctctgtggtcaagaaaggtgggaaaaggcgtgcaggactactacatcggtgagcgtaactaatccgataagcagaggtccatgggtggttatgcaccctggaaaggaataagcattaggaccatagaggacgctctaggactaatgctcattggaaaatgactagggttgccggcatccctatgttctttttccagatgggaaacatttctcccaaggcaaaaatgccactaagatgtattctggagaattcagcccagagtgcatatacctttttctct

SEQ ID NO: 947547 - DNA, 496 bp, Homo sapiens
aattctcagatacccctgatggctatattgatgttttacaagggttaggacaaccctattatctgacatggagaracataatgttactgctagatcagacactaaccccaaatgagagaagtgccgccataactgcagtccgagagtttggtgatctctggtatctcagtcaggtcaatgataggaagataacagaggaaagagaacaattccccacaggccagcaggcagttcccagtgtagaccctcattgggacacagaatcagaacatggagattggtgccacagatatttgctaactgacgtgctagaaggactaaggaaaactaggaagaagcctaataaattagtcaatgatatccactataacacagggaaaggaagaaaatcctactgcctttctggagagactaagagaggcattgaggaagcatacctcactgtcacctgactctattgaaggccaactaaggttaaaggataagtttatcactc

SEQ ID NO: 947548 - DNA, 588 bp, Homo sapiens
gtgatttctgcatttccaactgaggtacctggttcatctcattgggactggttggacagtgggtgcagcccacagggggcaagctgaagcagggcagggcatcamctcacccaggaagtgcaagggatcaggggatttccctttcctagccaagggaagccatgagtgactgtatctagagaagcagtacactcctgtccaaatactgcacttttcccatggtcttcacaaccagcagaccagaagattccctcctgtgcctggctcggcgggtcccaagcccacggagccttgctcactgctagcgcaacagtctgagatcaacctgggatgctgaagtttggtggggtgaggggcgtccaccattgctgaggcttgagtagctggttctatgctcagagtgtaaacaaagcagcagggaagctcaaactgggcagaggccactgcagctcagcaaggcctactgcctctctagatgtcacctctgggggcagggcatatctgaacaaaaggcagcagacagtttctccagatttaaatgtccctgcctgacagctctgaagagagaagcagttctcccagcatggc

SEQ ID NO: 947549 - DNA, 588 bp, Homo sapiens
tttttttatttatttccgggctatctattctgttccattgggccgtatatgtgttttaatgccagtaccacactattttgatgactacagctttgcaatacaattttacatcagaaattgtgatgcaacgaactttgtttttctttctcaagatcgttttggctatagcagatgttttgtggttccatatacattttagaattggttttatttttaatttttgtaaaaaatgtcattggagttttgatagggatttcattgaatttgtagattactttgcataaaaatggacatattaacaacattaactcttcaaattcacaacacaggatatctttctatttgtttctgtgttcttcaatttctttcaatgttttaagtgtacatatcttttactttcttggttaaatttattcttgggtatttgactttgatgctattgtaaattgaattgttttctttatttttttaataaatcttgattggcaaataaatgtgactgattttatatgttgatcctstatcgtgtgcctctattgaattaatttattggtactagcagttttgtctgaaattgttgaggtttcc

SEQ ID NO: 947550 - DNA, 691 bp, Homo sapiens
  misc_feature 452: n = A,T,C or G
aggataaaagaaactttttactgtgataaaggaaatctattgcacgtaaagcagctaatggkgaacactaaacattcctatcaaaatcaggaacaaacaagaattccactactgctgccgaagtttgcctttttctggaggttctagacgctaacagaataataaaaatatattagaggtgtaaatattagaaagggaagagcaaaactctaattcctgttaaatgatctgacttttctgtttgttttctgttgctgcataacacattaccagaaacttagtgccttaagacaattcccatttgttttctcacagttctgttgtccagagtctggccgggctgcactgggttccctgattgtggcctcgagagcctgaaatcaaggtgctggctgggctgaattcctgtctggagagtcagggaaaacccacttctaagctcttgggtgttngtggtcacagttcagttcctggggttgcccagctgagctccctgtttccttgacacatgtcactctccatctcagcgacagggagtccctcacatagaaccccctcgtgcttcacatctctgaattcctcttctctctgcagctgcagaaaatgctctgcttttaaagggctcatgtgatgaggttaggtcagcccagataatctctctgtcttaaggtcaactgattggcgaccttaa

SEQ ID NO: 947551 - DNA, 491 bp, Homo sapiens
caaaagccactgtgtaaagtttgagagaggtgactgctccaccagatgcacaaamgtcaatgcaggatacaagaaacacaaaaaacgaaggaaatatgataccatcaaaggaacacaacaattcttcagtaactgactccaagaaaatgaaaatttaccaactgcctaaaaaagaattcaaaataatgatttaaaggaaatccaggaagatacaaaagaatacagatagataattcaatgaaatcaggaaaacagtttatgatctgaatgagaaattcaataaagagatagatatcattttttttaaaaccacacataaatcttagaattaaagaatttgatcaatgaaatgaaaaatacaatcaagagcttcaacagcagactagatcaagcagaagaaagattctgtgaacttgaagataggctgtttgaaatgaatcaatcagaggaaaaaaatgaaagtgaaaaagaatgaagaaagcctgttggac

SEQ ID NO: 947552 - DNA, 503 bp, Homo sapiens
atcagaaagaaatagaaagcttgaacagaataataacaaagagattgaagaaataatcaaaaccctcccccaaattaagagcccaagaccagatgccttcgcagctgaattctaccaaacattcaaagaggaactaataccaatacttcctaaactcttccaaaaaatagggctacaggaaatactcccaaacatactttatgaggcaagcatcatcttgatacctaatccagacaaagacatcacaagaaaagaaaactataggtcaatttctctgatgagaattaatgcaaaaaattctcaattaaatattatcaaaccgaattcaacaacacaccaaaaagactgtacatcatgaccaagtgagatttatttctggcatataacactgatttracatatgcaaatcaatcaatataatatactacattaacagaatgaaatagtaaaaaccatctgatcctctgaattgacaaggaaaaagcatttaacgaagtccaaca

SEQ ID NO: 947553 - DNA, 583 bp, Homo sapiens
agaaaagtattaaatctttcggacgcttagttttctaggctaaaaaatgacaataacaattgtamctacctcctgcaattgttgtgaaaattaaatgactcaatagtcattaagtaattacagtggtacacagtgggtgctatgtaagtattggttattattatttattcagatattgatttttaaaccttattgctagtgtcactgtgatgattagttttctatatcaacttgactgggtgataggttgtccggacatctggttaaacattatttccaggtgcatctgcgagcgtgtatttggaagagattagcataagtatttgaataggtggacagagtaaagaaaatggtcctactcaatgtgtgtgagcatcatccaatctgttgagggcccaagtcaaacaaacaggtggaagaaaattgacttcactctgcctatttgagttgtgaaagaaaaataaatctcaggaccccaaaatcactaaaccaaaaaggaaaaagtcaagctgggaactgtgtcaggcaaacctgcctcccattttattactaaataaaatggctacaaagatttttttaaaaa

SEQ ID NO: 947554 - DNA, 623 bp, Homo sapiens
agcatcagggtggacagatgacgttggaagcactcacaaattctgccttttggtttgacccaagctattgcttttaagtttgtaacagcctacagttccccaaaagacacgtaataccacggaacaggtttatttcaccctggccactatatatcggcaaaacaactatatgatgggaagcagtagtggatagcatttggatgctattcaaatggtctgagatttattcaaggctccaaacatctctgagagaggacttggggaatatttggccagcaaatggcagaaacatggcggtccacgagcaaagccacccgattcaggcacatctgtgaaagaaaaaggggacaccaccaggcaagtaggaggagcaccgcgtggcatttatggagatgactcgttcaccaggttcccacagggctttcagcatgctgctgaattaatctccacccaggatctccgagacccggggacgcgtcacgtcgtcatttcctagggggatcaggaactcaggggagcccgagtcctggaaggttcctgattggaagtctcgccaagctggtcaggygactggactggagggaaacatcctctggtttactgattttgtggatttgggcttt

SEQ ID NO: 947555 - DNA, 643 bp, Homo sapiens
gagagtatctgcacttgcagagtacaccaactgggggacattacattgaactcattgctcccctgtcatagtggcragcaaagccaggctgggctcacccagcacccacacacacaggagcatttggaccagccctagccagagaatcacccatctcagtggtcagaactcgagtttgttggcaagcttcgtcacccgcggccaaagtcctctggggggtcctaggtaaatttgaaaggtggtctaggacacacggactgcaattcctaggcaacttctaatgctgggctgggctgacagccagaggactaggtggcacctgacctaggaagtcactggccaaggtggctaaaggagtgattgcaccatccctcccccaaccccaggcagcacagcagacagcaatgaaagtgtctctttccttctgcttaaggagaagagggcgaagagtagagaggactttgtcatgcatctaggataccagttcagccagccatagcaagataggatgctgggcagaattgtggggcccccattccaggccttagctcccagaaggcgtttgtgtgtttttgtttgtttgtttgtttgtttgtttgtttgttttttttgacatggagtctcactccgtcgcccagactgg

SEQ ID NO: 947556 - DNA, 643 bp, Homo sapiens
gagagtatctgcacttgcagagtacaccaactgggggacattacattgaactcattgctcccctgtcatagtggcgagcaaagccaggctgggctcacccagcacccacacacacaggagcatttggaccagccctagccagagaatcacccatctcagtggtcagaactcgagtttgttggcaagcttcgtcacccgcggccaaagtcctctggggggtcctaggtaaatttgaaaggtggtctaggacacacggactgcaattcctaggcaacttctaatgctgggctgggctgacagccagaggactaggtggcacctgacctaggaagtcactggccaaggtggctaaaggagtgattgcaccatccctcccccaaccccaggcagcacagcagacagcaatgaaagtgtctctttccttctgcttaaggagaagagggcgaagagtagagaggactttgtcatgcatctaggataccagttcagccagccatagcaagataggaygctgggcagaattgtggggcccccattccaggccttagctcccagaaggcgtttgtgtgtttttgtttgtttgtttgtttgtttgtttgtttgttttttttgacatggagtctcactccgtcgcccagactgg

SEQ ID NO: 947557 - DNA, 662 bp, Homo sapiens
cttctgcttaaggagaagagggcgaagagtagagaggactttgtcatgcatctaggataccagttcagccagccatagcaagataggatgctgggcagaattgtggggcccccattccaggccttagctcccagaaggcgtttgtgtgtttttgtttgtttgtttgtttgtttgtttgtttgttttttttgacatggagtctcactccgtcgcccagactggagagcagtagtgtgatcttggctcactgcaacctctctttcctgggtttgagcaattctcatgccttagcctcccgagtagctggaattacaggtgcacgctaccacgcccagctagttttataattttagtagagacggggttttgccatgttggccaggctggtctcgaactcctgacctcatgtgatccacccgcctcagcctcccaaagtcctgggattacaggcgtgagccactgcacccagcctcctgacgacatttctagacacatcctgggccagaagggaacctgctgcctagaaggaaaggacccagtcctggcagcatttatcacctgctaactgaagagcctttgggccctgaataaccagcagtgataccaggtactacactgagggccttgrgtgagcctcagagacttgctggcttcaggtgaca

SEQ ID NO: 947558 - DNA, 528 bp, Homo sapiens
tgccactactgggtcattatatgaaataaacacttgcacatgcatgtttatagcrgcacaattagcaaatgcaaaaatatggaaccagcccaaatgtccattaatcaatgagtggataaagaaaatgtagtgtgtgcgtgaatactattcagccatatgaaggaacaaaataatggcatttgtagcagcctagttggatttggagaccattattctaagtgacgtaactcaggaatggaatgccaaacatcaaatgttcatactcataagtgggaactaagctatgaggatgcaaaggcataagaatgatacaatggactttggggactgaagggaaagggtgagagtagggtgagggataaaatattagacactgagtacagtgtatactgctcaggtgatgggtacaccaaaatcccacaaatcagcactaaataacttatccttagaaccaaacaccacctgttccccaaaaacctattgaaataaaaaattaaaattaaaaagaagaaaaaaggtgattaggca

SEQ ID NO: 947559 - DNA, 601 bp, Homo sapiens
gtttttgttatatattttattttgagtaactttgtggtttctgattttcaaggatgtggttcgtattttcaacattgataagtttgtgtgcataatgttatctggattttttwaaatatttttattagctgtacaatctgtgctgatatctcttctttcaatcctgatattggcaatatgtgtcatctctccttttttcatcctgagtcttgctggaggtttaatcattgtattcttattccaaataaacttcatttaaaaaaattttctctattttgttctgttttcaatttcattattatccttttattttatattgttttcttcctcctgcttaatttttgcttattttgctcttgtttatctagtttattaggctatcccaaagagtaattgtgaatttgttccaattttttttgtctgtcagattttgctttatatattttgaagcactttttcaagttgaatgcacatgtaggattgtcatattttcctgcttaattggcctttttatcattatgtaatattctattttacatcttttaatttcatttgttctgaaacctacattttctgatattgacatagccactgcagcttt

SEQ ID NO: 947560 - DNA, 601 bp, Homo sapiens
gtttttgttatatattttattttgagtaactttgtggtttctgattttcaaggatgtggttcgtattttcaacattgataagtttgtgtgcataatgttatctggatttttttaaatatttttattagctgtacaatctgtgctgatatctcttctttcaatcctgatattggcaatatgtgtcatctctccttttttcatcctgagtcttgctggaggtttaatcattgtattcttattccaaataaacttcatttaaaaaaattttctctattttgttctgttttcaatttcattattatccttttattttatattgttttcttcctcctgcttaatttttgcttattttgctcttgtttatctagtttattaggctatcccaaagagtaattgtgaatttgttccaattttttttgtctgtcagattttgctttatatattttgaagcactttttcaagttgaatgcacatgtaggattgtcatattttcctgcttaattggcctttttatcattatgtaatattctattttacatcttttaatttcatttkttctgaaacctacattttctgatattgacatagccactgcagcttt

SEQ ID NO: 947561 - DNA, 617 bp, Homo sapiens
cagctaggataaaagtaggcagaggaatgtggaaggactagactgactgagtcttgtggcctccatctttctcccatgctgaatgcttcctgcccttgaacactggatccaagttcttcagcttttggactcttgaatctacaccagtggtttgtcaagggctatcaaggtatgtcaagggctatcaagccttcagccacagactaaagctgagtggtcagtttccctacatttgaggttttgggactcggactggcttaatgactcctcagcttgcatgcaagtggcgtattgtgggacttcacctggtgatcatgtgagtcaatactccttaataaactccatttcatatacacatctatcctattagtcctgttcctctggagaactctgactaataaaggagactttagccctagaggaactgctagacctaatctctgaagggcagacttgcccatcagatgaggctggtacaacctaagcacctcttggtctgcttgyctctcccaggcccctaccctagccacacctgcttgcagggcagtcttgagtgccctaggggtccacaccatagtttctgcactggtggatcatgcctgagaactccagtgtgg

SEQ ID NO: 947562 - DNA, 627 bp, Homo sapiens
agtctgataggcttccctttgtgggtaacctgacctttctctctggttgcccttaatattttttccttcattttaaccttggwgaatctgatgattatgtgtcttggggttgctcttcttaaggagtatctttgtggtgttctgtgtatttcctgaatatgaatgttggcctgtcttgctaggttggggaagttctcctggataatatcgtgaagagtgttttccagcttggttccattctgcctatcactttcagatacaccaatgtaacataggtttggtcttttcacatagtcccatatttcttggaggctttgttcatttcttttcattcttttttctctaaccttgtcttcatgctttatttcattaagttgatcttcagtctctgatatcctttcttctgcttgattgattcagctattgatacttctgtatgcttcacaaagttctcatgctgtgtttttcagctccatcaggtcatttatgttcttctataaactggttattctagttagcaattcctctaaccttttttcaaggttcttagcttccttgcattgggttagaacacattcctttagctcggaggagtttgttattacccaccttctgaagcttacttct

SEQ ID NO: 947563 - DNA, 597 bp, Homo sapiens
tgaagccagcaatagtttgccattctgagaatcctagggtccttaagtatcatgctaagtcttttctgtctgtgttctataaatagaataacaaaggctgggcgacagcatatccatttactggtttactaatagtaatggtttaccgaatagtataagcgcactgttgagacctactgctcagaaagtaaaattccttttcaaatattgctgcttattgtcaatgcacctagtcacccaagagctctgatagagatgtacaaggaggttcatgttgtgtttatgcctgctaatacaacatgcatttttcagcctataggtcaaggaataacttcaatttttaagtcttattatttaagaaatacgttttataaggctatagctgacatagatagtaattcttctggtatatctgggaaaagtaaattgaaaacccctagaaaggattcaccattctagatgccatcaagaacattcatgattcatgagaggaggtcaaaatatcaatattaacaaaattttggaagaagttaattccagctttctttgtgttataaacataccwattatactcttctggttacttttaaatgtatg

SEQ ID NO: 947564 - DNA, 654 bp, Homo sapiens
tccacaccaaatcaacagaatatacattcttctcagcaccacattacacttattttaaagttgaccacataattgaaagtgaaacactcttcagcaaatgaaaaagaatggaaagcataacaaacagtccatcakatcacagtgcaatcaaattagaactcaagattaagacactcactcaaaaatgcacaactacatggaaactgtacaatctgctcctgaatgactgctggataaataacaaaattaagacagaaataaataagttctttgaaaccaatgagaacaaagacacaatgtaccagaatttctgggacatagctaaaatggtatttagaggaaaatttatagcactaaatgcccacaagagaaagcgggaaagatctaaaatcaacaccctaacataacaattaaaaggactagagaagcaagaacaaagtcaaaagctagcagaaaacaagaaataactaagatcagaacagaactgaaggagatagagacatgaaaaccccttcagaaaaatcaatgaatccaggaactagttttttgaaaagattatcaaaatagatagaccactagccacactaacaaagaagaaaagagagaagaatcaaattgacacaataaaaaatgataaaggggatatcacctctg

SEQ ID NO: 947565 - DNA, 483 bp, Homo sapiens
tccctggcctattccatggaatgcaggccttacagaggactgagaccctttgttctgggttaaatgaaagttgccagaaaatgctatataaaycatgtgctttttacaaatggtaatggttctcctgttcagcccactgccattagattgtcctgcatgtaagtcctttcaataaaccctatgtctcattcactggctccaggtcttttctttggcctttgaaacatgatgccattccttttgaagtcaatatgggtctagcatgatgagtgggtaaacttgtccagcaggataggtggggaaagtctagacgttaagtccaggatgtgatatttagaagtcagggacatgagattacataggacaggggataaaatctcagaggtgaggccaggagctgggacccacggaatatggtcaggagtgtacagttaggaggcacagtgtcagaggtaagtcaggtgggaagttgaggctcgaagg

SEQ ID NO: 947566 - DNA, 679 bp, Homo sapiens
gcatcgttcccgttgttcctgtaaggggtgttttattttatatatttactcattaatttttttaatgctgaacaactatttggagaccgctgctcttctggctttatctaaatcatctgcagctacatgaattgttttgttttgttttgttttgttttgttttttgctacatcttcctggtaacagaatatcactgatcttcatcacctttggctgtttttcttcgtgcatataattttgggttacatcctcatttagtttacgatagtgtttgtgtttgtctcttcatctttggagggtgctcttttagtggagaatatagcagaaacgtcatgacggcatcttaaaatatgagtgataatttacttctttggttcaccttagttattttctcaatatttctttcatctgcacaagaaagtacataccatgaatgtgaaaatgttttttaatatcaattaaaattaaatttaataagtggcttgaaaatataaagtttaactctgtaaaaatatattttgattgttgattattgcttttaaaacttgtatttcatgattgtaatagcagatcaaataattcaacaygagtagtacagaagaaatgattgttgctgttttgacattagggcattatgactttaggacatcatgtttattaaagtattaaaatgttgaca

SEQ ID NO: 947567 - DNA, 601 bp, Homo sapiens
agtcattttccttccattaggaagttaaggtttgtactgcatgttgctgtgcaagccctgtgaagggggagcagatgaggaggttatctatatgctgtagaagacagcccccaacaaaagattgcttggctagacttttgctagggcttatctgaataagtatgggctatttctaaacccctgaggtaggacttcctaggttaaagttattggttaaagatttaggtaactttcccaggagaaatagagctattagagagaaaatgatcagaggttgggtaaatgttacacaggcatccatcttggaaagtatatttttgccccaaagagatgtagggtatttcaacattaccagagactggtaggagaatggaatttgatcccttgagtaatataaaggagtgttaatcttttcttttggagggagggggtgccatttgccccaattacccaacagtatttgaaggagagttgctaagagaaggagattagcacagagtagggagmttttgaaccccaaagggaaatttataattttatttgctgcctccaaagttgcccttggccttgtcttgtagattacaatgtctgatttggaagc

SEQ ID NO: 947568 - DNA, 555 bp, Homo sapiens
ttcccagaaaatgggtttttcttttctacygtactgtcacgttgcaaatttttcaaactttcatgctctgcttcttcttgaacactttgccacttagaaatttttttccaccagataccctaaatcatctctctcaagttcaaagttccacagatctctagggcaggggcaaaatgccaccagtctgtttgctaaaacatagcaagagtcacctttatttcagttcccaacaagttcttcatctccatctgggaccatctcaacctggacttcattctctatattactatcagcattttggtcaaagccattctaaatctctaggaagttccaaactttcccacatcttcctgtcctcttctgagccttccaaactgctccagcctctgcctgttacccagttgtaaagtcacttccacattttcaggtatctttacagcagcaccttactctactggtacaatttactgtgtcagtctgttctcatgctgctaacaagacatacctgtgactgcgtaatttataaagggaagaggtttaatggactcacagtta

SEQ ID NO: 947569 - DNA, 747 bp, Homo sapiens
ctagtaccaatagccaaacttctgagtgaagaagccttcaatgactccatccctcagacgtcatgtttttccacctgatgcccagacaacatgggccaaagacaacctgactctggtgtgccccatccaattcctgactgcagaaccagagcataataaaatgaatgttttacaccactaagttttgggatggtttgttacagcaatatatcattgcagcatgacctattagaatgaaatcacgcaattactacagtcaataattcatttttttcttaaaaaaaaaatttacactttctgttcctcccattcaacagccacatcttctcatgtaacacccatcacatccctgagacatcacaatgaaagtgaaagccaggtaaactgatttggccttattagacacctggtcaccaaggctgcttttaactctggcgaagtggatattgtctcatcaaggaccccctcattgccctcaactacacggtctatatgttccatgatgattctacccatggcaaattccgtggcacagtcaaggctgagaatggcaagcttgtcatcaatgaaaataccataaccattttctaggagcaaattcccaccaaaatcaaattgggtgatgccaccacaattacaytgtggagaccactggcatcttcactaccttgtagaaggctggggctcatttaaaaggagaaaccgaaagggtcatcatctctgccccctctgctgatgcccccatgt

SEQ ID NO: 947570 - DNA, 589 bp, Homo sapiens
attgcaaccagcaataggaaactaatttataatgttccacaaaattttatatcagcatttcttatatgtatatttgcaaggaagtttttagaaaaatcccttctattgggcatttgggggtggagccaagatggccgaataggaacagctctggtctacagctcccagcgtgagcgaggcaaaagacacgtgatttctgcatttccatctgaggtaccgggttcatctcactagggagtgccagacagtgggtgcaggacagtgggtgcagcgcaccgtgcgcgagctgaagcagggcgaggcattgcctcactcgggaagtgcaaggggtcagggagttccctttcctagtcaaagaaaggggtgacagatggcacctggaaaattgggtcactcccaccctaatactgcacttttccaaagggcttaaaaaacggcacaccaggagattatatcctgcacctggcttggagggtcctaygcccacgcagtctcactgattgctagcaaagcagtctgagatcaaactgcaaggcggcagcgaggctgggggaggggtgcctgccattgcccaggcttgattaggtaa

SEQ ID NO: 947571 - DNA, 600 bp, Homo sapiens
tcattttaaactcataatttattttatctttttttaaaaaacagcataaaagaaaccatttcttagccctgtgcccttaaaaggccacctggattgtgttctctaaataccattccccactgaaaagaaacaaggctctttaaaaaatggctgatcccaggtctgaggcaggaaatgcacaagatcatgaggaaacctccaaagacaactgcagtcatgtgaaaaggatgcagaagctgactgaaagagactcccactagccaaagaagggatactttgaggctcaatgagaataacaactgcaatgtattgaaacacatcaaatatgtttagattcatgagttcataataatattcaaaagaaaaagaaggaaaaaagtgctgaattgatttaagacatgccagtgaaaccaacttattatttttaaaaccagtaaagaattcaaccacttatcctgcttttcttatataaactgtaccactggattataaagtagaagatgarggaagttatctctttatagaaatattctataatacatttgaattcgaacatcaccattttgcaattcctaatgaaataatagactaagtaatgat

SEQ ID NO: 947572 - DNA, 526 bp, Homo sapiens
cacttctgagttcttctccactctttgtatgaataaattcttaagaagagaattttttaaatagtttaaatgtagctaagcctcataggccattgtggcacacatctgtagctcctgctactcaggaggctgaagcaggagaaactctggagcccaggagtttgagtccaacctgggcaacataacaagaccctgtatctattatagccaaaccccaatttcattcctcctaagctgactactctgtccccatcattacccttactattcagcattgtaattcctacttcatttgtctatttccacctctagactgtgagctgctccaagggaggggacttagccaggtctctctgtctccagaaccatcttatattcctagtacccagcatggtcccaggcatattggcagaggtccataaaatatttgttcaayaactggcaaagaagaatgcaggtagtacttgccatgggccctgggtaagactctgagatgtgctggcctcaggtgtaacccagcacattc

SEQ ID NO: 947573 - DNA, 585 bp, Homo sapiens
attcttatatgctgctggtgggaatgtaaaatggcacaactactcaaagtcaagttgaacatacacttaccagwatgacccagtaattctagatatttaaccaaaagaaatgaaaatacatgtcctcccaaagacttgtccactaatgttcatgcagctttattcataatagccccaaatgggagacaatctaaacatccatcaacaagtgaatgggtgaataagctgtggtaaagccattcaatagagtactacccaataataaaaagcaatgaagcatgctacacacaagaacatggatgaatctcaatacaattatgctgagttaaaaaaaaaaaaaaaaaaaaaaaaaagccaaacaaagcacaatatactgtatgattccacttaggtgaaatcctagaaaagacgaaacttatctatagtggcagaaagtaggaatggctgggggccttttgcgggtgatgaaaatgtcatttatctcggtgataattacgtggatagttatatttgcgaagattcactgaactatatgtatactttaactgagtgcatagtattatactacaggtaaatcatacatca

SEQ ID NO: 947574 - DNA, 501 bp, Homo sapiens
ggtgtagcccacataatctatttttaacaaccatcccagatcattcttatagtcaggcatatttgggttaagaatggggacttaggccgggcgttgtagctcatgcctgtaatcccagcatttggggaggccgaggtgggtggatcatgaggtcaggagatcgaggccatcttggctaacatggtaaaaccctgtctctactaaaaatacaaaaaattagccgggtgtggtggcgcgtgcctgtaatcccagctactcaggaggccaagaggcagaagaatcgcttgaacctgggaggcggaggttgcagtaagccgagatggcaccaccgcactccatcctgggggacagagagagactccgtctcaaaaaaaaatggggacttaagccagacaagcttggattttaytctggctaggcctcaagctgtgtgactttgggaagattacttaacatttgtaattctcagtttcttcaggtgtgtaatagaagtcatatctc

SEQ ID NO: 947575 - DNA, 620 bp, Homo sapiens
catggtggctcacacttataatcccagcactttgggaggctaaggtgagaggatcacttgagcccaggagtttgagaccagcctgggcaacatagagagacccaatctctacaaaacatacaaaarttagccgatatggtggcatgtccctgtggtcccagctactcaggagactgaggcaagaggattccttgagcacaggggttggagcctgcagtgagctgtgattgctccactgcactccagcttgggtgacagagtgagaccctgacacaagaaaaaaagggatctcagctaattctagaagaattccttaaagttgtttaaagatatttatatctcatgacagaagaaagatcagggagaaagctgtatcaggtaagttagttttatgattttcaaacttttcccctaccctgacaaaataacctttatgatattttatcttttgggatttttaagacaaattcaagagaaaattcaatttgtcctttgttttctccctatggccaaagaatttttactttataaatacttccacttacttcagttctgttctcttcctaataatttgtcagctattatcatcttgccatcacaatatcctttgccttcccacc

SEQ ID NO: 947576 - DNA, 626 bp, Homo sapiens
tatgcatcttggggttgctgttcttgaggagtatctttgtggtgttctctgtatttcctgaatttgaattttggcctgtcttgctaggttggggaaattctcctggataatatcctgaagtgtgttttccaacttggttccattctccccaacactttcaggtacaccaatcaaatgtaggtttggtcttttcacacagtcccatatttcttggaggctttgtttgttctttttcattcttttttctctaatcttgtcttcatgctttatttcattaagttgatcttcaatctctgatatcctttgttgcctttgatcggttcagctactgatacttgtgtatgcttcacaaagttctcgtgttgtgtttttcagctccatcaggccatttatgttcttctctaagctggttattctagttagcagttcctgtaaccttttatcaatgttcttagcttccttgcattgggttagaacctgcttttttagcttggaggagtttgttattacccaccttctgaagcctacttatttcaatttgtcaaactcattctccattcactkttgttcccttgctggcaaggagttgtgatcctttggaggagaagaggcattctggtttttgg

SEQ ID NO: 947577 - DNA, 625 bp, Homo sapiens; identical to SEQ ID NO: 947192

SEQ ID NO: 947578 - DNA, 625 bp, Homo sapiens; identical to SEQ ID NO: 947193

SEQ ID NO: 947579 - DNA, 584 bp, Homo sapiens
cgtgtgttagagtgtgctctttcagtttagccatttataggcagcttgtgttagtgaattcaattagaccctctgtcttattgcaaggtcagagagctttctgttccccaggatttcttgtcttggtgtaccagaagaatcaggccacacatgggcttggagaatgagcgcaaggttttgttgagtgaaagtagctctcagcagattgggaagccagaagggagatgcagtgggaaggtggtttttcccctggagtcgggctgctcagtggccgggctctccttagaacatcctggccaaactctgcattgttctgctggtcgatggcctgccggcatctgctggtgcctgttagtgtactcttccaccgatgtgttcttctcaatattcagctgcttatgcgttcctctgctgatgtgttcctctcagcatccagccgcctgtgtgtttctrcccgctagggtctcagtgtttttataagcacaggatgaaagcatggtgggccagggtggtcttaggaaatgcaacatttaggcacaaaaacagaaatgcctgtcgtcacctagatccatgggcataggccc

SEQ ID NO: 947580 - DNA, 633 bp, Homo sapiens
ggcaaattacctatttctgtatttttgccccattttctaattgttttttttttcttttttaaagttgcacattgaaaattatattctagatgttagccccttattgtatgtgtggtttgcaaatattttctcccagtcttcaaattctttcatccttttaacagtatcgtttgtacagcaaaacttttaatcttgatgaagcccaattatcaatttttccttttataaattatacttttgatatcaagtctaagaacactttgctttgctctattgcctaaaggatgttttctaagtttttattctaaaagttttataattttacattttagtccatgatccagtttgagttaatgttttactaacttttgagacttctgttgaaattcattttattatatatggatgttcaattgctccagcaaaatttattaaaaaggctatctttcctacattgaattgcttttgcacttttgtcaaaaagcagttggaaatttgcatggaactgtctgagttctctgttctgttttattgaactatatgtctatccttcagccaaaacagcactgtcttgattatcgtgmctagaaaattagacgaagttagtagaatgctatcttccactttattatt

SEQ ID NO: 947581 - DNA, 556 bp, Homo sapiens
ctatcctccaagttgtccttgttcattccwgggcaaaagccgaactaactttgggaggaatttagtttacagtttaactttgaaactaagatgataactgtctttgcccaaaataaacccccttcttgcctggggatcagtctgcctttgtagtagcaacaatttagctacaagactggaagttatggttaaggagtcatgcagccagaggctgcaagattctgaaacaccctaaactgctcttggggataacatcactgttgtagaacttaagatcactttgaagaccctgcgttccaatgcaccagcagacaccacctggaccagcaatctgcctcagccagttcggcaatcccacttagtaacaggagtcatcaagaataacccacttcagctccctatgatctcatctctgacccaaccaatcaacactccccactttcagacccctacccaccaacttatccttaaaaacccctggggagactgatttgagtaataataaaactccggtcttccgaagagctggctctgcgtgaattaaactcctttgcta

SEQ ID NO: 947582 - DNA, 623 bp, Homo sapiens
tccagccaaactaagcttcataagcaaaagagaaataagattcttttcagacaaacacatgctgagggagtttgtcactaccaggtttgccttgcaagagctcctgaaggatgtattaaatacagaaagaaaaaactgttaccagccactacaaaaacacaatgaagtacacagactagtgacactatgaagcaaccacataaacaagcctgcaaaataaccagctagcttcatgatgacaggatcaaattcatacataacaatactaactttaaatgtaaatgggctaaataccctaatttaaagacacagaatggcaagttggacaaacagccaagacccatcaatgtgctgtcttcaagagatccatctcgcctacagaaacacaaataggctcaaaataaaggaatggaggaaaatttaccaagtaaatggaaaaccaaaaaactcaggggttgcaatcctagtttctaacaaaacagactttaaaccaacaaagatcaaaaaacacaaagaagggcattacataatggtaaagggtttgattcaacragaaaatctaactgtgctaaacatatatgcacccaacaaaggggcatccagattcataaagcaatttatta

SEQ ID NO: 947583 - DNA, 605 bp, Homo sapiens
aagtggacttgatagatatctacaaaactcttcacctaaaaacaacagaatgtacatcttatgaccacacaacacttactctaaagttgatcacataatcggaagtaaaacacccctcagcaaattcaaaagaactaaagtcataaaaaacagtctctccaaccacagcacaatcaaattagaatttgggattaagaaatttactcaaaaccacacaaaactacatggatattgtacaacctgctcctgaatgactcttggataagtaatgaaattaggctggacatggtgactcacacctgtaatcctagcaatttgggaggtcaaggcaggcagatgacctgaagttaggagttcgagacgagcctggccaacatgatgaaactccatttctactaaaaacacaaaaattagccaggtgtggtggcacatgcctataatcccagctactagggaggctgaagcaggagaattgctggaatccaggaggcagaggttgcagtgagtcgagatcacgccactgcactccrgcctgggtgacagagcgaaactccatctcaaataataataataataataataataatgaaattaaggcagaaatg

SEQ ID NO: 947584 - DNA, 602 bp, Homo sapiens
gactggattaagaaaatgtggcacatatacaccatggaatactatacagccataaaaaatgatgagttcatgtcctttgtagggacatggatgaaactggaaaccatcattctcagcaaactatcacaaggacaaaaaaccaaacactgcgtgttctcactcataggtgggaattgaacaatgagaacacatgggcacaggaaggggaacatcacactccggggactgttgtggggtggggggaggggggagggatagcattaggagatatacctaatgctaaatgatgagttaatgggtgcagcacaccagcatggcacatgtatacatatgtaacaaacctgcacgttgtgcacatgtaccctaaaacttaaagtataataataataaaattaaaaaaaaagaaacacaaaaaaccatcagagactactatgaatacctctatgcacacattagaaaatctagaagwaatggacaaattcctagacacatacaccttcccacacctgaatcaggaagaaactgaatacctgtacagaccaataatgagctctgaacttgaataagtaataagtagccaaccaacaaaaaagcacaggacc

SEQ ID NO: 947585 - DNA, 465 bp, Homo sapiens
ttccctaaagggcctgccttaggaactgcagtgttaacagcgaccactggatcatatttatttttgtcagggggtgggggtktgctttttagtggctttgcttctgtctttaggatgagaatcccagaaacaaagatgtttgggatcagtggaacttgaaagatcatgcagtctggtagttcctggatgttagtgtgtatcgcctggggacactgtagagcatgtccatccttgaagaaaatcagtgctctcattcaccttctaattggtggttgttcagcatctgctggagccatgccttattgggctccctcaaaaataaaggccctaccttcctagctctgcatccttgatgctcaaatagtgttcagggttggtgacagacagtgtgaaatgcttaacatcatagttcattcaacaagcgctcatttaggcacctactaagtgccaggcattgttagaatt

SEQ ID NO: 947586 - DNA, 378 bp, Homo sapiens
gctgtgtgtattccatatcatgaaggtaatttcccaggcccacaacgttttcttcccaagctggtgccgtaactgagcctttaccaggctattccatcattttaggtgtttctagggtatagagtaaatgataagaccagtgactcccatgataaatgtgcaccatggtgaacttcctttgctgtaaaatgtcatcttggtcctagtctatatcgtaaggggcaccatactgatagaccaggtactggtgagcccttggatggtggtactggtagaggaactgcaggaagaaaaggtaaatccatactcagaatatgtgttgatyctggtaaggacacgttgcttttccctccaagacagatggttccgatagatggt

SEQ ID NO: 947587 - DNA, 575 bp, Homo sapiens
ttcgtcgccttaaatgaagttttcactattcatttttatgaagtttaaccatatggttcttgatatttgaaaagatgaattttgagaatcactgggacaatctgtcaatacttatacaaagctagattttagaaagagatgtaatttttcttcactttaaagggatatttttcctcttttcttacaaaaacacaaggtttctatacctggccagttaaaactattgccacttaaaaattctgcatgtctgagaacctgatataacttaaaacatgcaccacccacagtcataattttggctttgccagagaacttcaaatttgattcactaaatactatagaagttcactagatgtttatatagtaaaacttgaggatgaaaacaaaaatatgtgtaagtttttttttaacataaaagattctgtgtctgtcaacatctatacctacagtctattaactttggagttgacctgtaaagaytggatacaaagaagtatggatgatttctttttaatttttttatttttgcaaagatggtgatatggtttggctgtctcccaaaccaaatctcatct

SEQ ID NO: 947588 - DNA, 577 bp, Homo sapiens
ggccgcaacctagacctaactgaatcagacactctgttctcagagcccagcagtctgggttttaacaggccctctgggggaccctgaggcacactctgccccctcattactcaatgcgggactccgtccggtggcatcggcattgccagggagcttattagaaatgcagactctcaggctccaccccagacctcacgaactggaatttgcattctaccatctccaggtgatttgtatgcacattaaagtttaagaattaggccgggcacggtggctcacgcctgtaatcccagcactttgggaggccgaggtgggcagatcacaaggtcaggagtttgagaccagcctggccaacatagtgaaacctcatctctactaaaaatacaaaaaattagccgggtgtggtggcaggtgcctgtaatcccagctacttgggaggctgaggcaggagaatcacttgaacccagaaggtggaggttgcagtgagccaagatygcaccactgcactctagcccggatgacagtgtgagactctgtctcaaaaaaagaattaaaaagtactgctctgcactgtgag

SEQ ID NO: 947589 - DNA, 632 bp, Homo sapiens
taattttgagtggcaagctaatttatttcttctgaatgatttaccaggataacagtaaaaataaaaaggctatacaagtgccaagtaattaagcatgttaatggaattacatcaggctgccgtgtggggtctaggcttcagcacaagaatagaaaattgatttatattatctaggtgatcatatctttacacatcttctgctaacaatttataatacttcagtctgctttttttcctaagattacgccagctagaaggcatttcctttaacttctatatttgtagtctgtaaatgtacagaaactttcttgtctttcagagttacatagataatataaagtattaacttttctctaccctgaacaagtacttatgtatttgattgataagtgtttaaattgaaaatcaggcaatcaagttttattatctgccaatattctaaacagaagttataaaatatattattatggggataaaaaatagaatagggtcccagtttataaaagaacagtgatttactatatctctgtttatatatattttgaagaagagtgatttactatattactgttcatatttactatatcactgttccacatatatatatgtatgtgtrtatatatatatatata

SEQ ID NO: 947590 - DNA, 577 bp, Homo sapiens
gtaagtgtgtaactcatatatatatatacacacatatacacacacatacatgagtatatgtgtgaaactgtcactcaaatcaagacatagaacatttcagatgtattccagagatcatggtggatgggaggcaggactggattgcagctcccacttggacagacaaagcagcgtgtggaggcttgtatcatgaactttgactgcaggaataaatcaggaacactgagagaacccacagaccctcagaaagaagcggattgctcctgcaggtctcaggagacaccccaaatgctgtgggagcccaaactgcaaactgtggaagtgggaaaggggaatagtcagctcctgaacacacatcctcactggggaacctaaaggtctagatcacaggagaagattttgaccttacttggagctgagtcaatttagagagccaagtgacatacactgctagagaaagcagggcgtaaggccctgtgggctcactgggttccctagcyatccatttctgccttgcctcacgggggtccttgaggagggctaccagaggcactgggaaatggtcacaaagagaagg

SEQ ID NO: 947591 - DNA, 640 bp, Homo sapiens
aatgttgacttttttcttccatatacattttagaatttgtcgggcacggtagctcatgcctataatcccagcttttaggaaggcagaggtgggaggacagcttgagcctaggagtttgagacttgcctgggcaatatagcaagaccctgttcgccaaaaaaggaaaaagaaaaagccgggcacggtggctcactcctgtaatcccagcactttgggaggcagaggcaggtggatcatgaggtcaagagatcaagaccatcctggccaacatggtgaaaccccgtctcttctaaaaatataaaaattagctgggtgtggtggcatgtgcctgtagtcctacctactcaggaggctgaggcgggagaatcgcttgagcccgggacgcggagtttgcagtgagcacagatcgcgccactgcactccagcctagcgacagagcgagactctgtctcagaaaaaaaaggaaaaaaaattaaattttagaatttaatgtgtctcaaaaaatcaaatggtggctgggtgcggtggctcacccctgtaattccrgcattttgggaggctgaggtgggcgaatcacctgaggtcaggagtttgggaccagcccggcaacatggcaaaaccccatctctactaaaaatac

SEQ ID NO: 947592 - DNA, 679 bp, Homo sapiens
tggtttgccagctccacagacccgagtgagaacttaagagtgctttttcggagcctgcccatggccacccatggaccaatcagcacgcatttcctaccttctgaagccaataaaaacaccagattcaggcagacttgggcagatgacaggacaacctgcctgtggagaggagctactgactgtgggtctcctctctgctgagaggtggacactcgtcaagatgatctgcctgcggacaggagctacctactgcaggtctcctctgagctgttctgtcactcaataaagcaccttttcaccttgctcaccctccacttgtccatatgcttcattcttcctggacacaatacaagaactcaggacccaccaaatggtagggctaaaagagctgtaacacaaacggctgaaacacgtcccttacttgccatgttgggggtgacaagaaggaaaggagggagaaggagagaagacttatggcccttcagagagcccagaccaatgggctccctgaaggctgtgacaccctcttcgggatctgtggttcctggcatctccaagcttagggrcaacactgcattccccggtgccagccatggaagctgcttgcagtacgcttggtcaagccaaagcctctcagggagttggcacccatgccagtgcctggagctgcccaccccac

SEQ ID NO: 947593 - DNA, 679 bp, Homo sapiens
tggtttgccagctccacagacccgagtgagaacttaagagtgctttttcggagcctgcccatggccacccatggaccaatcagcacgcatttcctaccttctgaagccaataaaaacaccagattcaggcagacttgggcagatgacaggacaacctgcctgtggagaggagctactgactgtgggtctcctctctgctgagaggtggacactcgtcaagatgatctgcctgcggacaggagctacctactgcaggtctcctctgagctgttctgtcactcaataaagcaccttttcaccttgctcaccctccacttgtccatatgcttcattcttcctggacacaatacaagaactcaggacccaccaaatggtagggctaaaagagctgtaacacaaacggctgaaacacgtcccttacttgccatgttgggggtgacaagaaggaaaggagggagaaggagagaagacttatggcccttcagagagcccagaccaatgggctccctgaaggctgtgacaccctcttcgggatctgtggttcctggcatctccaagcttagggacaacactgcattccccggtgccagccatggaagctgcttgcrgtacgcttggtcaagccaaagcctctcagggagttggcacccatgccagtgcctggagctgcccaccccac

SEQ ID NO: 947594 - DNA, 797 bp, Homo sapiens
ctcacagttctggagactgagaaggtgatgattatggcactagcatctggtgggccttcttgcttgttaccacgtggcagaaggcagaaaggcaaaagagaattgtatcagtcctttcttatgctgctaataaagacatacctaacactaaataatttataaaggaaagaggtttaattgactcacagtttaacatagctgaagaggcctcaagaaacttacaatcatggtggaaggggaagcaaatatgtccttcctcacatggtggcagcaaagagaaatgctgagcagaagggtgaaaaccccttataaaaccatcagatctcataataattcactcacaatcatgacaaaagcataaaggtaactgcccccattattcaattacctcccactgggtccctcctatgacacgtgtggattacgggatgagatttgggtcaggacacagccaaaccatataaaaaatgaactcacttccataagccctttttaaagcagcattaatccttttatgagggcagatccctcaggacttaaacacttccctcaaggccctacctctcaataccattgcacggggatcaagttgccaacacataaatttgggggacatattcagatcataccattccaccctgggccctcaaatttcatttccttctcacatgcaaaatacrtttattccaacccagtagccctaagtcttaactcactccagcaccaactttaaagtttaagtccagagtctcatctacatcaaatatgtgtgtgaagtacttcatactgaggcaaaa

SEQ ID NO: 947595 - DNA, 753 bp, Homo sapiens
catttaggtgtgtttagacaggaggggagaatcttctccaggaactgtcctcatatcactaggagatccagccacaagaaaagagacgcactcctgtgtgactccagataggtggctgcatcagaaccttgggaaggagtggctgccttaggggctagggacagcctggacctcaggaagctaagagcaatggctttggaatcagacctggcttccacttctggctctgcaccctgctagctgttcaatcttggactggttatgcgacctttccaacaggtttccttatgtgaagaatggagacacaaattccgtgtcctgtaaagttgtcaggatgcactaaggcactgtaagaaaggcccttaacacagggctgggtgcacagtaggctttaatcaatggttgttaatgttgttgctactcaaggaggagggggcagagaatgacattaaaggacctctgaagacacaggatttgtgactcagagctccgcttatatggcgaaaaccactcctgagttatgtctggtcagttgcattcttgaaatatgggattcattaaacatatcaatcaatgttggaacaatgacatctgcttgcaaggagctgggggtggggccctagcgtgtgtgcartctgggtcctgcctgtaactgagaataagccaaggccagggaaagctaaacagaggcaccagggagtgaatggcttggggaaaccaagggctgggtgttcaaacaagagaagttcaatt

SEQ ID NO: 947596 - DNA, 526 bp, Homo sapiens
tccagaaaaaaagctgaggcatatttatagaaatacaaaaatatctgtaatcccagcactttgggaggcccaggagggcggatcacgaggtcaggagatcgagaccatgctggctaacacggtgaaaccccgtctctactaaaaacacaaaaaattagccgggcgtggtggcaggcacctgtagtcccagctcctcgggaggctgaggcaggagaatggcgtgaacccgggaggcggagcttgcagtgagccgagatgacgctactgcattccagcctgggcgacagagcgagaaaagaaagaaaaaagaaatacaagaatatctagcacccaagaaggcaaaattcataataattggcatccagttaaaaattgtcacacatgcaaaaagcagaaaaatgtgacccaraatatggaaaaaacaccagaatttaaaataacccaagtttaaaataacccagaattgatagaaatagtagaactgaattaaagacaaaaatattgagagaagtattcattctatatt

SEQ ID NO: 947597 - DNA, 464 bp, Homo sapiens
atgcttgaacaatttagttcaatgaatatatgacacatatgaaaatggatatatgaataaatgaaaataaatkaatgacgtgactctgtgcatgtcattcacacggaatcgtggggctcctgttggggaggactatcatagaattattaaacaacctcatcttaaggtgtttcttcctccatagcagcccaaagcctgcgtatggaaatggagcagtaagggacctcgcaggcaaggcctgcttctgtcccctctctaactgtgccacgtgccaaactgtgcccaggtctgctgggctgagctctttgttcaattagtcagtggcctcagccttttgcatcatagccttcaccggacactcgagtgtgccttctcctaaggaagcagatcaagttcatcccatgcctttgggccaatgctggcattattttcatttctacttcccttgtcctttgctgaaatag

SEQ ID NO: 947598 - DNA, 588 bp, Homo sapiens
agtatggtcattttcttaatattgattcttcctatccatgagcatgggatatgttcccatttgtgcatgtcatctctgatttctttcagcagtgtttggtagttttccttgcagagatcattcacttccttggttaagtatattcctaagtattttatttgttttgcagtctttgtaaaaagagttgcattcttgatttgattctcagcttggtcattcttggtgtgtagcagtgctactggtttgtgtacattgattatgtattctgagactttattgaatccatttattggatctaggagctttttggatgagtttttaggttttctgcgtatatgatcatatcacgatgtgttatctttttgatatgctgttggatttggttagctagtattttattgagaagttttccatctatattcatcagggttattaatctgtagttttctttttttgttatgtcctttcctggtttttgtattagggtgacagtggtttcctagaatgaattagggatgattccctctctctctatctttgggatagtttcagtagaatcaayaccaattcttcttagaatgcctagta

SEQ ID NO: 947599 - DNA, 663 bp, Homo sapiens
cagcattaacattacaacacaggtcttakgactgatctttgtaggaataagataccaaattccaacctgactctggtgtagcatcacacgacagatagcacgccctgaaaaaaatcaaagtattttaccccaaaatatattcctttgacatatttttaaaggccctgcaaagctgtctcttgtgggggaaatgcattttgcagagaatctccttccctttccaggtctttttctgatcctgaagagattaactgagagtctataaccttttaaaggtaggaatagaaagcatttgccatctattgcctctaagggcagccacctatgcaacttcatctacatgataagaaccttggtctccacaatcccatatcttaacccagacacttgtttccactgattccaggtcttagataatatcagttttaactaatcatcaatcagaaaatctatgaatcccacccacgccacttgcttcaagttgtcctacctttctggaccaaatcaatgtataccttacgtatgttgattgatgtcttaggtctccctaaaacatgtaaaaccaagctgtaacccaaccacccctaggcatatgttatcaggacctcctgaggcagtgtgacgggtcacggtcctcacatgtggctcagaacaaatctcttc

SEQ ID NO: 947600 - DNA, 523 bp, Homo sapiens
tggaagagtggccagactgttaaaagagaaacaacaaaaacacaaaaaccccatccaaaggtcagcaacctcaaagatygaaggcagataagctcacaaagatgagaaagaggccgggcgtggtggctcatgcctgtaatcccagcactttgggaggccgaggcaggcggatcatgaggtcaggagatcgagaccatcctggctaacatggtgaaaccccatctctactaaaaaatacaaaaaaattagctgggtgtggtggcgggtgcctgtagtcccagctactcgggaggctgaggcaggagagtggcatgaacccaggaggcggagcttgcagtgagccgagatcgcacaactgcactccagcctgggcaacagagcgagactccatctcaaaaaaaaaaaaaaagcgagagagaaagaatcagccaaaaacactgaaaattcaaaaagccagagtgccccttttcctccaaatgattgcaacacctctccagcaagagtacagaactgggctcaggct

SEQ ID NO: 947601 - DNA, 470 bp, Homo sapiens
cccacagaatagccataaggagtgatccttttagaacatgtcacatcatgtctcttccctgctcaaaacctccaatgggccaggcgtggtggstcacacctgtaatctcagcactttgggaggccaaggcgggtggattacaaggtcaggagatggagactatcctggccagcatggtgaaaccccgtctctactaaaatacaaaaaattcgctgggcatggtggcgtgtgcctgtaatcccagctactcaggaggctgaggcaggggaattgcttgaacctgggaggtggaggttgcagtgagctgagatggcactactgcactccagcctgggcaacagagtgagactctgtctcagaaacaaaacaaaacaaaacaaaacaaaaaaaccctccaatggctcaagtcacttagggcaaaaccaaagcccttaccgtggcctgtaaagccctggtgaaccctcagtaac

SEQ ID NO: 947602 - DNA, 588 bp, Homo sapiens
cataaagattctccacatccccaccagacgcaggaggccagctggcttcaccctgtggatcccgaagcagrgatggggtggagctgcctgccagtcccgcgctgtgcgcccgcactcctcagcccttgggtggtccatgggactgggcgccctggagcagggggcggtgctcatcggagaggctcgggccgcacaggagcccacggaggggctgggaggctcaggagtggcgggctgcaggtcccgagccctgccccgcgggaaggcagctaaggcccggctagaaattgagtgcagcgcgggtgggctggcactgctgggggacccagtacaccctccgcagctgctggcccgggtgctaagcccctcattgcctggggccggcagggccgccggctactcgcagtgcggggcccgccaagccgacgcccacccggaactccagctggcccgcaagcgccgcgcgcacccgtggttcccgctggcgcctctcgctccacacctccctgcaagctgagggagctggctcctgccttggccagcccagaaaggggctcccccagtgcagtggtgggctgaaggactcct

SEQ ID NO: 947603 - DNA, 470 bp, Homo sapiens
aaaaaactgaacacttttcctctaagattagtaacaaggcaagagcattcacttttgccacttttattcaacacagtactggactcctaaccaatgcaatgagattaaaaaaagaaaaaaaggcccaaatcagaaaggaagaattaatattgtccctgtttgaagatgacataattttatatgtagaaaaccctaaagactccacaataaaataaaataaaataataaaacctgtgagaactaataaattcagtaaaacagcagtatacaaaatcaataaagaaaaattagtcatatttctacactgccaggaaactatctgaaaaagcaattaggaaaasaatacaatttaaaatagaaccaaaatgaataaaatacccaggaataaacttaagagggtgaaagagtaatagactgaacactacaaaacactggtgaaagacattaaagaacacaaacaaatgaaaaga

SEQ ID NO: 947604 - DNA, 605 bp, Homo sapiens
aaagtaataaacacaaatgaaaaaataaacttttcaacagaactggtaaccaaagaaacacatattaaaataataaaagatataattttatttatcaaattggcaaaaattttwaaatgataatatctactattagcttcagtgtggagaagttggaactctcctatcttgcttgtaggagtgataaatgttattacctttttggagtataatttggcaatagatattataatttttgtaatttaatatgcaagcttgactgcatccagcaattcatcctaaggaattaatcatgattcatgcaaatatatagcctgaaggatgtttatcacaaggctgtttatacaggaaaaaaaaaaaaaacaaacaaaaaaaaacaaagaatcgacaatagccttttcgacaggtctaacaaattatgtttcatccataaaattaaaatttaaaataactatgcactaactaaacaaattgtaggaaaacattcacattatttaaaaatactcatggaagagtaagtaaaaaagagaacatagcactattaatgaacttataaaatatatattaatgcatagaaaagagactgggtagctgtatacccaaaa

SEQ ID NO: 947605 - DNA, 502 bp, Homo sapiens
ttatttatgatgtcaagccatacctactgtcttctaaaagggtctacggctggagaagagactgcctagtgtcaaccaaataagatgatcatggcaagagaaaacctcattagaactcagcaatgkgactttttaaagaatgttctaaattgcctataacagtataagggtttcaaagttctggggtgaaaacactgtctccagcatgagctctcttcaactacttgagaagaaatgcacctcaccttgagttgactcaagtacctacagccactggtaacacgttaaatgagcccttgccttgaagagagcaaaagcctagagatagttcactaccaataagctacagtaggtgagcatatgaggattacttatgcagggtgaatacactaaaattaaaattgttctaaatggagtctgacatacatatgcaaaatgaaaggggaaagggagagcagaatcattaacattactagtaacctgtaaaaaccaacagctaaat

SEQ ID NO: 947606 - DNA, 787 bp, Homo sapiens
ccgaggccccaggagcatgagtaagtcgtrcaaggacacccagctagctggacgttgggctccacccaactctctccactctgtgagcccgacatgctgttcctctggggcctcgcttggtgttggcagctatcgctgtttgtagctgcatcatgcccatgtgctttctttccgcccaggatgtgaagccggtagagaaataaagcatcgcccctctgcgcgcccctccccgtctgctagaatgtttctcatgaacgcttctccagtggttgctctccagtccaaatgggaggcctttggcccgccagggagctgtaggttccccaggtgcttctcggaggctgacgagggcgtggagagcgcgtcggtgagcgcccgggtgcagatgcttatcagcactctgcagcgcgacggggctgctcggggcaccagcgatgagcgcgccgcacagaggggccacagggcagagggatgccacgacgccaggccggctgccaagcccaccgtgcacaaggagccacccgcgttggctgtctgtggtctcgttgctgactttgaccccatgggggaggaggaaactacagactttggcccgttggtgctagattcagacagtgatgattccgtggacagggacattgaggaggccatccaggagtacctgaaggcaaagagtggagccgcacagcccggggccggcggggcccagccaggtgcagcccagccttccagggccgcaggcggaggcagtagatgtaagccggaaccggctcacggcagtgccccg

SEQ ID NO: 947607 - DNA, 558 bp, Homo sapiens
aaggatcagggcaaaccttaatgttgggggatgagacaggaagacakccaggggccaaaggggctagagctcacgtgtcgaccggtcaagagtcagcaacatgccgtggcgctggctgagcccagctcatcttatgaccacagccatggctgctgcgtgtgaacagcccacaggtgaccagcgctgcttccttcccctgcttgtccccggtgcctctgagcatgagactcgacagcattctccccaaagcaagcagcagtcagtcccgccctgggcatgcaggccttgggcctggccactcgtgtctgttctcgcagtgcaagctcccgcctcccttgggtcgcacgctgctggaccgtggcgtctctggggcacaggtgtggacttcccaggcccaaaagccacagatgagcattgggttgaaagagcgagtccctgagacctggggaggggaccgaggccatggaggaggtgggaatgcaggtgaggcagtggggagaggtcctcaggccccggggggaggagagtgtggccagaggccgagcggctctcagagaa

SEQ ID NO: 947608 - DNA, 482 bp, Homo sapiens
ataggacaaaaagtactttatatatttatgcttttaaagaagcaaaacacaccccattagagttgtggttactctttcaatataagctccgggctaastgttaaaatatagtgttccatttatcacaagtgcattacatagattttccccttctacgcttggatcttaatatatttagtgtaagcatttcaagtctttgtgggaaaaaagtagaatgtgaattatatatgatcatatttaaaatctgcaatattactatttcataagcacatcagctgcctctcccaaaccagcactttttttctgaagataagaaaataaactctaaggcaacgtgtagtaagcagcaggatgtatagtcagaatctttgtattgccaggaacccaggtctgccagccaccactcaggctgaccttggggaaaatcacttaaatttcttggagcctcacaatttttggtctctataagtgaatttattagc

SEQ ID NO: 947609 - DNA, 735 bp, Homo sapiens
gactgttttctttaagataaccattgtacttggatttgcagcagaagtgctttctgcattcttcctattttgtcacacagaatattagaaagatatgtactcaaagattaagwtttaatgaaatcaatcatttttattgctccatcaaaaactttttttttttttttttttaatttgagacagagcctcactcttgttgcccaggctggagtgcagtggcgcaatcttggctcactgccatctccccctcctgggttcaagcaattctagtgcctcagcctccatagtagctgggattacaggcatgcaccaccatgcccggctaatttttgtatttttattagagacgtgttttctccatgttgtccaggctggtctcgaactcctgacctcaggtgatctgcccacctcggcctcccaaagtgctgggattacagttgtgagccaccacccctggcctcatcaagaacattcttaagccaaattggtgtggttttgttttgttttgttttgttttaaaggggctgtaagtacacggtagtagagactatgattattcgtactgtttgaagccacagccttgattcttgctatagcccaccatttacatatcatttaatttattttgccattttatcaattttaccattttacccaccattgtttttaactgtgcaaatgttagcacagttaaaaagacaaagaatatcatggtatactatgaaaatagctttg

SEQ ID NO: 947610 - DNA, 617 bp, Homo sapiens
tatattcaggttttggaggaaagctatacatatttatgaggggagccaaatgcatgcacaatggctacacatatatgtaatatccatcccatgttcactttggggaagggttttggctttaaactgagatggaatttggctctttacgttaaaggtgacctacaggacacagagatggtttgtgtgtgcagtctctacaatttgctgaaactggcttgaggttggcagttacttatcaggaaagtgtttctaaggccaggtctctgtccaatcagggctgtagtggtctggattgtacatcagacttaggaagtgtctgacaatttgcctgataattcctactgttagggagtttagcaagagtgtggtttttcttgtagccacaggaatttaggaaattgccatgccagctgagccctgaacccttcattcgttggtaacttttgtttctgtaacctaaaggtttgtcttagttgataaagggatgccaacttggmtctcccagatcacagatgttatcatcatcttatggctggggaacctgaggctcagagagtttaattaatttgtccaaggtcacagagccaagaagggagaatgctggattcgaacccaag

SEQ ID NO: 947611 - DNA, 623 bp, Homo sapiens
acattaagagaacaccttgggagataaacaagtctggatggcaggccttgagtcccagaactttctgctggtgggaagtgtctttcagtagaggcacagatacagtgctgggctcagtggggaaagtctgcagctctgccccaactgtcaggcagcccttgtgctcacaaagggtcctggagaagaggaattcttttccctcctgccaatcactgcagacacagctagggcttctcccataggagttcagcatgagtgcacctataggcagcctttctggaacacttcagggtgactggatccccacaagaggagtgccctctgggttcaggcttgcctgaggggtagagtcacaattcgtctctacttggaatatcaaatattcaactctacttggaatttcattcctgcagatgaaaagagatgcctgtctgatttgaatagctgtagcactgggtcaggagtgtgactgggaggtggattgctttcctgctgkcctggcaagggagaggccatccttccccctggtaagatctcagtgcatttcactgagagctcccccagccacctctgtcaagattgggacctctgccgatgattgggtgttgcatttacccatctgc

SEQ ID NO: 947612 - DNA, 553 bp, Homo sapiens
ttttctttttcttttttttttttttttttttttgagacagtgttttgctcttatcatccaggctggagtgcaayggcacaatctcagctcactgcaacctcaaccttctgggttcaagtaattctcctgcctcggtttccagagtagctgggattacaggtgcccgccaccacgcccagctaatttttgtattttaagtagagacggggttttgccatgttggccaggctggtctcaaactcctgacctcgtgtgatcctcctgcctcagcctcccaaagtgctgggattacaggtgtctctggtttcttatatggaaatagagcaaaaatgtggtatcctttgggcatcttcagctctctgtgacagtgtagctgttggtgatgcctgtaaggaaatttgggttctctggtggcccgtgacatcccacatccccaacctcccaaaaaccagtgcatccacttcccagaggaagagccactacagactttaagcagtttaaagacttacgtgacagacttttagacagcctatgagcttaaatactgcttcca

SEQ ID NO: 947613 - DNA, 590 bp, Homo sapiens
tgcaggtctgttggagtttgctggaggtccactccaggccctgtttgcctgggtatcaacagcggaggctgcagaacagcaaatattgctgaacagcaaatgttgyttcctgattgttgctccggaagcttcatctcagagggtacccggcagtgtgaggtgtcagtatgcccttcctggggggtgcctcccagttaggctactcgggggtcagggacccacttgaggaagcagtctgtccattctcagatctcaaactctgtgctgggagaaccactactctcttcaaagctgtcagacagggacatttaagtctgcagaggtttctgctgccttttgttcagctatgccctgcccccagaggtggagtctacagaggcaggcaggcctccttgagctgtggtgggctccacccagttcgagctttcctgccgctttgtttacctactcaagcctcagcaattgcgggcgcccctcccccagcctcactgctgccttgcagttcaatatcagactgctgtgctagcaatgagcgaggctccgtaggtttgggaccctccgagccaggcacggggtataatctcctggtg

SEQ ID NO: 947614 - DNA, 590 bp, Homo sapiens
tgcaggtctgttggagtttgctggaggtccactccaggccctgtttgcctgggtatcaacagcggaggctgcagaacagcaaatattgctgaacagcaaatgttgcttcctgattgttgctccrgaagcttcatctcagagggtacccggcagtgtgaggtgtcagtatgcccttcctggggggtgcctcccagttaggctactcgggggtcagggacccacttgaggaagcagtctgtccattctcagatctcaaactctgtgctgggagaaccactactctcttcaaagctgtcagacagggacatttaagtctgcagaggtttctgctgccttttgttcagctatgccctgcccccagaggtggagtctacagaggcaggcaggcctccttgagctgtggtgggctccacccagttcgagctttcctgccgctttgtttacctactcaagcctcagcaattgcgggcgcccctcccccagcctcactgctgccttgcagttcaatatcagactgctgtgctagcaatgagcgaggctccgtaggtttgggaccctccgagccaggcacggggtataatctcctggtg

SEQ ID NO: 947615 - DNA, 733 bp, Homo sapiens
tttcttcttccaggtactctaaatcgtctctctcaagttcaaagtttcacagttctccagggcaggggcaaaatgctgccagtctctttgttaaagcataacaagagtgacctttattccagttcccaataagtttctcacttctatctgagaccacatcagcctggacttcctttttcatatccctatcagcattttggtcaaaaccattcaacaaatctctaagaagtttaaaactttcccacatttttctgtcttcttctgagccctccaaactgatccaacctctgctcattacccagttctgaagttgcttccacattttctggtgtctttataccagtgccccaaacttctggtaccaattttctatattaatccattttcatactgcctgagactaggtaatttataaagtaaagaggtttaatttacttacagttccccatgcctggggaggcctcaggaaccttaaaatcatggcagaaggtgaaagggaagcaaggcatgtcttatacggtggcagaggagagagcaagagtggaagtgccacacctttaaaccagcagatctcatgagaactcactcactatcatgagaacagcatgcrgtaaaccactcccctgatccaatcacctcccaccaggtccctctctctacatgtggggatgacaattccaaatgtgatttgggtgggcacacagcgccaacatatataaggggataatttttc

SEQ ID NO: 947616 - DNA, 733 bp, Homo sapiens
tttcttcttccaggtactctaaatcgtctctctcaagttcaaagtttcacagttctccagggcaggggcaaaatgctgccagtctctttgttaaagcataacaagagtgacctttattccagttcccaataagtttctcacttctatctgagaccacatcagcctggacttcctttttcatatccctatcagcattttggtcaaaaccattcaacaaatctctaagaagtttaaaactttcccacatttttctgtcttcttctgagccctccaaactgatccaacctctgctcattacccagttctgaagttgcttccacattttctggtgtctttataccagtgccccaaacttctggtaccaattttctatattaatccattttcatactgcctgagactaggtaatttataaagtaaagaggtttaatttacttacagttccccatgcctggggaggcctcaggaaccttaaaatcatggcagaaggtgaaagggaagcaaggcatgtcttatacggtggcagaggagagagcaagagtggaagtgccacacctttaaaccagcagatctcatgagaactcactcactatcatgagaacagcatgcggtaawccactcccctgatccaatcacctcccaccaggtccctctctctacatgtggggatgacaattccaaatgtgatttgggtgggcacacagcgccaacatatataaggggataatttttc

SEQ ID NO: 947617 - DNA, 810 bp, Homo sapiens
tgatctacagctgttggggagtaaaagktttttccaactactgtctgcttctggaacagtggaccttgtttagtctagaagtcactgagcaagcagggcaccatggttgtacccaagcgttagtcaaatgctttcaataattgtggtttgtgtaagagaagaattgtgcagagttggagtgatattagggttacatcaaaacttttttgagggttttcttcattttcttctcccacagtttagaaagggcaggagactctcatgtgggagaactatattaggtgtgcctttatttggaacagagtgaaagaccacagagactgagccatcttctgctcctgtgattttgttcagcgttttcacacgttaatgtttgtctgacttctccttaattgcaataagttacagccccctccccagcctttcagtagtttgtttctaaaaaactccttgcaggcaaacttcttgtaggttaaaaaaacacaaggaatttacattgaaattaacaacacatacttactttaaaaattaagtgtatatacatacatgtaattgaaccttggcagagagacctatctgtccacccaaaatacattcttccccctctataggggaggtctgagctctgacatacaataaagaagggaaagtgtccttgagggtcattgtccagacaaaaggctacattttccagcctttttgctgcaaatgtgagcatgtgactgcttcttgccacagaagtgagataatatgtatcacttctgggctgggaacatctgcattgaactgaataacaagaaaaaaacttta

SEQ ID NO: 947618 - DNA, 544 bp, Homo sapiens
gagttcgagacctccctgaccaacatggtgaaacctcatctctactaaaaatataaaaaaaaaaaattagccaggcatggyggtgggcacctgaaatcccatctactggggaggctgaggcaggagaatcacttgaacccaggaggcagacgttgcaatgagctgagatagtgtcattgcactccagcctgggcaacaagagtgaaactctgtctcaaaaaaaagaaaaaaaaaaacaggcaaatacaggctttgtcaatgtagtttagaaaatgaattcaaattttctgtgcctgttttcttatttataaatataggtattactattcatctcccataagattattgtaagaatttcatgagacaacatatatgaaaagatgtagcatgatgtctttctcacagtaaggactttggttaacaacactaactccagagtgagaatttctggttttaaattccatctacttcagacaccagttgtgtgactttggaaaacacacacaaagaatatactaagactcaagtgctggaagatttaaag

SEQ ID NO: 947619 - DNA, 613 bp, Homo sapiens
aggaagtatggtgctgccatctgcctgatttctgatgaagtctcagggaactttcaatggcagaagatgaagaggaaagccagtgtctcacacggctgaagcaggagcaaaagagagacagtgggaggggaggtgccacacacattgaaatcaccagatctcgtgagaactcattatcatgaagacagcaccaagccatgagtgatctgccccatgatccaaacacttcctgcctgaacccacctccagcattggggattacattcaacatgagatttgggtggggacaaatatacaaaatatatcgttatctctaggcgctttttctgcagtgataacaccattgtcttcatcatctctgttatcattatcaccttgattcagaagcattttggcaatttcaccatcagtcaatgaatgagcaaatggacacttgttattaattttaaaaacttcttcagcatccacttcttacagcttactgacaagctgtgaaggtatattttcacatatgtaaagatgtcggatgccattttwtcttctcacttgacatacaaaattctttaaagtcactatcttgttcatcatcatcactaaacatagtcacaggcca

SEQ ID NO: 947620 - DNA, 832 bp, Homo sapiens
agccagagtaggctcagagatgccagcacagccccgtggtggaagatttgtggacagaaaaaagagagtgacatacagaaaacggaagtgaggcacagaaacaggcagattggktataggttagtgtttgcgttatttgaatgcaatttaaacagttggccacatttgattggccaaaactcagtgattggcacaagagaagactacagtctatttacaactccattgaggttatagttcatgatgtgctttaggtcaaacttaaaatatgtaaggagagagctttaagccaaacttgacttaacagaactgatggtaataaacggaatggggaaacctagccaggcttgcctgttcagattcttcttggcctctcgtttgcagcatttcttcttccttggtgtagggcaggacccctctggaatgagggtctttatttatggccggctgatacattgacaggtgggggaaggtgagagtaatattttgttgttgtcgcctagactggagtgcagtggtgcgatctcggctcactgcaacctctgcctccctggttcaagccattctggtgcctcaacctcctgagtagctgggattacaggcacccgccaccatgcctggctaattttttgtatttttagtacagatggggttttgccatgttggccaggctggtcttgaattggcctcaagtgatcctctcccttctcagcttcccaaaaccctgggattacaggcatgagccactgtgcccgggaggaatatttttaagctttatagctagctttgagggaaaggggttctggtttctatgacctaccttggggaagag

SEQ ID NO: 947621 - DNA, 609 bp, Homo sapiens
cagctgactgcaacctccacctcctgggttcgagcagctctcctgcctcagcctcctgagtagctgggaatacaggtgtgtgtcaccacgcccggctaattttttgtattttagtagagacagggtttcatcatgttgcgcaggctggtttcaaactcctgagctcaggcaatccacctgcctcaggttccccaagtgctaggattacaggcgtgagccaccatgcccggccattctcacttaaaaaaaaaaaaaaaaaaaattaacactgcactgctggcttgaatactctttccttggagcattttcttcaggtataacttgttctgcttgatttttctccagccctactggattccccacttgcagttttctttgctggttcctcctttccttcccagcttccccgtatcagatgacccaggtctcaatcctagcccccgttctctgcttacatcctcttctctgcttacatcctttcgcttgatgatcttatctrgttccatagctttcagaagctgtctctttgctggtgactttcaaatacatatttccaacccgttccaaatccagattgcttatttgaaatctctgcttaagtgtctcaac

SEQ ID NO: 947622 - DNA, 609 bp, Homo sapiens
cagctgactgcaacctccacctcctgggttcgagcagctctcctgcctcagcctcctgagtagctgggaatacaggtgtgtgtcaccacgcccggctaattttttgtattttagtagagacagggtttcatcatgttgcgcaggctggtttcaaactcctgagctcaggcaatccacctgcctcaggttccccaagtgctaggattacaggcgtgagccaccatgcccggccattctcacttaaaaaaaaaaaaaaaaaaaattaacactgcactgctggcttgaatactctttccttggagcattttcttcaggtataacttgttctgcttgatttttctccagccctactggattccccacttgcagttttctttgctggttcctcctttccttcccagcttccccgtatcagatgacccaggtctcaatcctagcccccgttctctgcttacatcctcttctctgcttacatcctttcgcttgatgatcttatctagttccatagctttcagaagctrtctctttgctggtgactttcaaatacatatttccaacccgttccaaatccagattgcttatttgaaatctctgcttaagtgtctcaac

SEQ ID NO: 947623 - DNA, 569 bp, Homo sapiens
attagggagattagagatggcagtgggttagggagatgagagatggcagtggggggcaggggcaggtgatgagttgcatttttgcaaaagctatataagaattgttatatactgttctgattttttttaatgaacctaaatgagcatggatttatttgctatggagtacttgaaatctttatttgaagacattaagaatccatccaggccaggtgcagtggcacactgtaatcccagcactttgggaggctgaggcaggaggattacttgagcccaggagtccaagaccagtgtaggcaatatggtgagacttcgtctctacaaaaaataaaaatattagccaggaatggtggcgcatgcctgtagtcccagcagtggggggcaggggggtggttcaggagaggattgcttgagcccagggaggtcaaggctgcagtgatccatgattgcgcccctgtactctgggcaacagagcaagaccctggttgaagaaraaaaaaaaaaaaaaagaacaagaagaatccacccccaaacatatcaagataagacatccattgcttcaaacactg

SEQ ID NO: 947624 - DNA, 639 bp, Homo sapiens
ttttacaatgctacccaccagcaatgtatgagtggtggactttctctgtatccttgccaggatttcatgttgtcactagtatttattttagtcattcttataracatatagtgatatctcattgaggttttaatttatattttattaatggataattttaattatcttttaatgtacttattcggtatctgtgtatcttctggtaaaatgtttgctcatgtcatttgcatattcctaattggattttttatactgttgaggtttgagagttttaaaaaattctagatacaagtactctatcagatataaatttgcaaatattttatttcaatatatcatttgtaattatatcaacagcttgtttcatggaaacagactttttaattttgaagaaaaccaatttatcaatttttttccttttatggagtatatgttggtgtcaaatctcagaactcttttcctagtcccagttatcaaagattttctcattttttttctagaggttttataactttatgtttacatttaagcccacaatcctctttgaattagtttctgtataagttgtgacacttttgttaaggttaaatgtccaatttgaatttatgaatgtccaattactcatataaaatatccaat

SEQ ID NO: 947625 - DNA, 601 bp, Homo sapiens
ctacaggtgcaggcccccatgcccagctaacttttgtattttttgtagagaccragttttgccgtgttgcctggactggtcttgaactcctgagctcaagctatccaccagccttggcctctcaaagtgctaggattacaggcatgagccactgtgttccgcccagacaacttcttaattagaaataatttcaagcttacagaaaagttgcaagaaatggaatagtgcatagaacacccatataccctttacgtgattcacataataacattttaccctgtttgctttattgcttactgtctgtatatatctgcacacttttttcctgaaccatttgagagcaagttgcatattttggggtcttttttttttttccagtattctgggatgaatatcttcaaaatttagtggctaagagcacagtctctgaagctagactattcaaatcctggctccactacttaactgtgaccttggataaattacttaaccttcctaggcctcaatttgcccatgtataaaatggggataatatcatttacctaataaaatttttgtgaggattgcataagttaattcttctaagacctgcctaagagaa

SEQ ID NO: 947626 - DNA, 673 bp, Homo sapiens
tgagctaagatcacaccactgcactccagcctgggcgacagagcgagaccctgtctcaaaaacaaaaacaggctgggcrtggtggctcacgcctgtaatcccagcactttgggagacgaaggcggatggatcacttgagcccaggagttcgagaccagcctgggcaacatagtgagcccctgcctctataaaaacaaaaacaaaacctaacaataagactattcactgcttatttaataatttgctattatatatcttaatatagtctcagaatctgctcaataaatactataaaataattgaaagtattatataatcaaccacatcacattaacaaaaaaataaaggtcccaaatagaacaggaaagactaaaaacagagaagtcgatctcaatcaccttgtaggtctgtcacctttattttcatatcataagagcctgttagcaagtagtgagctccaggggagaatcgaacagagcgaacatcactggaatgaggatgataactttgtaccattcttcctcctcttatgtcatacaacatgcagctagaatcttcttgacctgtggctaagagacgaccactgggatctacagctacagatgccactgcactgcctgtagtggtaggaatgaaagtttaaatacagaaaatcaatatacccaaatggcaa

SEQ ID NO: 947627 - DNA, 655 bp, Homo sapiens
cggacgttatagcctacaccagaggatgcagsatcctatcatgatttttctctccctcattttatgaggccctcacactcttgctctcctgcataccaggttgtccagtacttagggtgggacgaggaatttttatacatacaaaggctaaagaatgcaaatccaataatttatttgtttattttttatttttttctgagacagggtctcactctgtcatctaggctggagtgcagtggtgtgatcacagctcactgcaacctccgcctcctgggctcaagtgatcctaccatcttagcctcctgagtagctgggaccatgggtgctcaccaccacactcggtttttgtttatatttttggtggagatggagtttcaccacgttgcccaggctggtcttgagctcctgagttcaagtgatctgccagcctcagcctcccaaagtgctgggattataggcgtgagccaccacccttggctccataatttaagtgtcaagttcctctctcgtaacctttaagccagatccaattttaatgcatgtgatttaaacccacattttttaaaggatattttctccatatgctttggattgttttttaggagtggaacttgatttgcctacaatcgatgctagtaaagacacacttgcgatg

SEQ ID NO: 947628 - DNA, 634 bp, Homo sapiens
ctccaaaatacatcacatgtgaagccacaagacaagttttaacaaatttaaggagatcaaaattgtatgaagtatcttttctgaccacaatgaagtggaactagaaatcaataaygaagaaaggtggacaattcacaaatacatggaaactaacataatcttaaaaactactggatcaaaaagagaattttaaatacatcttgaactgaataaaactgaaaaaacatactaaaagttatgggatgcaataaaagcagtagtatgaagaaagtttgtagtgataaatgcctaaatttaagaagtggaaagatatcaaataaacaacctaactgtacacatcaaggaactagaaaaagaagcagcagctaagccaaagctggcaaaaggaagaaaataatagggattagaatagaaaaaagtcaaacggaaagtagaaaaactatagaaaaataccaaaaataaaaattgccttttagagaagaataaaattggcaaactcttagctatactaagaaaaaaagtaaagaaacaaaagcagaattaaagaggagacattacaacagatccctcgaaataaaaaggatcataagagactattatgaacaattatatgccaacaaattggataacatag

SEQ ID NO: 947629 - DNA, 781 bp, Homo sapiens
gtgtccactttcacttgccaatactctctccaatccaaattctctgcatcatatgtagccagattaataatgattaaaaaaaaaaaaaaccaaaycaccaaacgaaaagcccccaaaccaaatcatacctctcacttgcttaactccagaggcctccttggaataaaatccactcctgtccacatggaaggccctgggagatctggccctgctggtgtgcagatctcatggaacctactctctcatttcctcattcccttctggtgccttttttttttctttcttttttttgagatggagtttcgctcttgttgcccaggctggagtgcagtggtgtgatcttggctcactacaacctctgcctcccgggttcaaatgattctcctgcctcagcctcctgagtagctgggattacaggcatgcactaccacgcccggctaaggttgcatttttttaaatttttttttttttgagatggagtctcgctctgtcgcccaggctggagtgcagtggcgtgatctcggctcactgcaagctccgcctcccgggttaacaccattctcctgcctcagcctccagactagctgggactacaggcgcccgccaccacgcccggctaattttttgtatttttggtagagatggggtttcaccatgttagctaggatagtctcaatctcctgacctcgtgatccgcccgccttggcctcccaaagtgctgggattataggcgtgagtcgctgtgcctggccctggtgccttttttctttactgcaaatta

SEQ ID NO: 947630 - DNA, 647 bp, Homo sapiens
tctcatgattagattgatgatgagcttcaaggtaggcactttcagccggaatattatataggtgatgagttcttctcaaggtactcactcacaatgtctgtctgcccctcgttggtgatgctaactttgatcatctgcttgaagtgttgtctgatttgtttaccatatagtcactgtttttttctttttacaacctcaaccaatatgcagtctgttggaggatactgaaggtcatgctaatagcctgctcctcatcaccatttctccccagatttagcatccgttgatgattcttgccagatccaaactttattgtgatggttgcaaaatgatgattttctagctgtaacatttcttccatgtgtaccagtgggcttggcattctgctgtaaggtagagttctcccttctctcttacgtatttgtttacccatttattatggactcaggggttctgatttttcaatggtctgtaatgttactatccttaattattgtggtgctcaaattgtccgatttttggccagtgggcccccrcttcccatgtccttaggggatgtcctcatcattttttttttggagaacctctttcctttttggcattaaaaaatgttccaggcccatcttgtatctgccctgccttcactc

SEQ ID NO: 947631 - DNA, 582 bp, Homo sapiens
ttagcattctcattctgtgccccaggaaccaccgctgagaagaaggcagcaaggcttggcctcacccatctgggacctaagtccaggtcaccaagctagagctgatcctgcctttggctccttgcgcctacatctgaattcaacccacccttcataaagcaccagtgttggttttaaaatatatactggctgcattctgagcactggatacatgcatgaatggacacattgctaaaatagcataatctgacagtatatacatccctcctctgcccatcagagaaaagaaggcccctttgcaccattaaattaattcaaaggaagaacacacacacaaaaaaatgattgttgcaaaagaaagatcccttcactgtgtagggatagttttttcccctagatttaatttatgggacacataagaaataccttgttacagctgggcgcggtggctcacggctgtaatcctagcactttgggaggcagaggcrgatggatcacctgaagtcgggagtttgagaccagcctgaccaacatgaagaaaccccatctctactaaaaagacaaaattagccaggcatggta

SEQ ID NO: 947632 - DNA, 800 bp, Homo sapiens
gaagccatctgttccttcaggcactcaagtgggcttggaaaagaaagtccaggctgggcgcagtggctcatgcttgtaataccagaacttgggaggctgaggcgggtggatcacctgaggtcaagagttggagaccagcgtggccattatggtgaaaccccagctccactaaaaatacaaaaattagctgggtgtggtggcgggcatctgtaattccagctacttgggaggctgaggcaggagaatctcttgaacctgagagatggaggttgcagtgagccaagatcatgccactgcactccagcctgggtgacagagtaagactccatttcaaaaaaaaagtctagttacgaagaaaaacagtgctacaaataatcatggtttttaggtaaaggactggtagcatcacaactaaaccaggctgagctagtttggtaagaagagccattggattctgggctgacaagtgggtgctgattgaccagacagaatcttccagtgtcggccgagcacagtgaattccagtactttcggaggctgaggcgggtgatcacctgaggtcaggtgttcgagatcagcctgaccaacatggtgaaaccttgtctctactaaaaatacaaaattcacaaggcatggtggtgtatgcctgtaatcccagctactcgggaggcygaggtaggagaattgctcgaacctgggagtcagaggttgcagtgagccaagatcgtgccattgcactccagcctgggcaacaagagcaaaactccatctcggtgggggaaaaatgttcaaaaaatcag

SEQ ID NO: 947633 - DNA, 562 bp, Homo sapiens
ggtacacagcatggatcctttccttctacaccatgaacccctcaagtgcaggaatccagtctgtgtcctcctgggggccgrtgcaccacggccacatagcaaacggccagatggagtctccctaggtagctaacccctaccctggggggtctctgcagggcaaacctggtggacctgcagaagaagctggaggagctggaacttgacgagcagcagaagaagcggctggaagcctttctcacccagaaagccaaggtcggcgaactcaaagacgatgacttcgaaaggatctcagagctgggcgcgggcaacggcggggtggtcaccaaagtccagcacagaccctcgggcctcatcatggccaggaaggtgagcactgcggggtcggggaggtcggggagtggtggggaaggtccccctggaaacaggaggcaggttgggaaggcagccgggtctctgcattctgattagctccaggctctgtccctcatccccaccagggactctaggtcctgagaaagggcccagcttctgggcagatgggagccgtgccagccacacc

SEQ ID NO: 947634 - DNA, 621 bp, Homo sapiens
actatgctgcagtctgggcgacccctgcctgaaagaaagaaagagagagatgaagaaagatctggaacaatataagtcacacttgaggggggaatggtggaagtgatgcggcgtccaggttatttatcctcatttgaattttttataagaaaaatgtgtttgccgggtgcggtggctcaagcctgtaatcccagcactttgggaggccgaggcgggcggatcacgaggtcaggagatcgagaccatcctggctaacaccagtagtgaaaccccatctctactaaaaatacaaaaaattagccgagtgtggtggcgggcacctgtagtcccagctactcaggaggctgaggcaggagaatggcgtgaacccgggaggcggagcttgcagtgagccgagatggtgccactgcacccccgcctgggcaacagagcgagactccgcctcaggaaaaaaaaaaaaagaaagaaaaatgtgttcacctactacctacgtaacaaaattacagttacaagaccattttaaacatcacacacayacacacacacacacacacacacacacacacacacacacacggtagacgtgtatggtcatgcacagagtgagatttggggtcagca

SEQ ID NO: 947635 - DNA, 733 bp, Homo sapiens
accacttatcaacagcatgatcttgagcaagttacctatattggttatctgctgatgcataacacactatgccaaaacctagtagcttaaataattgtcatttaacatctcctgcaatgtctaaggatcaggaatcctggggcagcttagctgggtggcttgggctcagagtctctcagaaggttgtagtcaaggtgccagccagggctaccaccaaccatctgaaggctcaaatggggttaaagaatccacttccaagttcatgcatgggtagttagcaggtgatagggtttggctgtgtccccacccaaatctcatcttgaattgtagctcccataatccccacgtgttgtgggagggacacagtgggaggtaattgaatcatagaggtgggtctttcccttgctgttctcatggtggtgaataagtcacatgagatctgatggttttataaacaggagttcccctgcacaagctctctcttgcctgccgccatgtaagacatgccttgcttcccctttgccctctgccatgattgtgaggcctccccagccatgtgaaaactgtgagtcaattaaacttctttccttcataaattacccagtcttgcgtatgtctttattagcagcatgagaacagactaatacagcaggtctcaatgcctcactggctgttaggcagaggtctctgtttcttatcccatgggtcrctccatgggctgcttgagtatgct

SEQ ID NO: 947636 - DNA, 567 bp, Homo sapiens
ctcccagaaacaaacccaaatcttactatatattatggcacgttatgatgatgagcagtgatgagcagccgaagcctcaaggaagggatgcttttgtaaaacaagacttgtagaatataacgtgtgaaagtaaagcacatggcagagctccctcctcagcacacgcggagcagacaggaagcttttgcctcaccttcctcaatggcctgcagccacgtctcccaggtcagtcttaaggacaacgaaactctggtcttcactgtggacacgccacactaccaggtgctccaaagccatggtgactcaccctcgggtgggtcctgagcacaacaaagctctggttctaatcctaaccctaaccctgtcccaagactttgaccctgaaccgaaatcctgatccctaccctggtccctaattctgacccttactttgaccctgactttgatctygaccctggccatgaccccacctctaaccatacttccggccctgactctgacccagatcctaatcctatgcctaaccctattattatcatttacaatctaactctaatcttaccctct

SEQ ID NO: 947637 - DNA, 567 bp, Homo sapiens
ctcccagaaacaaacccaaatcttactatatattatggcacgttatgatgatgagcagtgatgagcagccgaagcctcaaggaagggatgcttttgtaaaacaagacttgtagaatataacgtgtgaaagtaaagcacatggcagagctccctcctcagcacacgcggagcagacaggaagcttttgcctcaccttcctcaatggcctgcagccacgtctcccaggtcagtcttaaggacaacgaaactctggtcttcactgtggacacgccacactaccaggtgctccaaagccatggtgactcaccctcgggtgggtcctgagcacaacaaagctctggttctaatcctaaccctaaccctgtcccaagactttgaccctgaaccgaaatcctgatccctaccctggtccctaattctgacccttactttgaccctgactttgatcttgaccctgrccatgaccccacctctaaccatacttccggccctgactctgacccagatcctaatcctatgcctaaccctattattatcatttacaatctaactctaatcttaccctct

SEQ ID NO: 947638 - DNA, 735 bp, Homo sapiens
acagatgtgtgataatactgattcatggactgcagccaatggtttggatgacggtcagggacttgaaagaagcatgattggaaaactggtgacaaatttggggaagaggtatgtggatggacctctctgagtggtgaaaaaatgaagttatttgtatcccctgtgagtactctaccaaagggtgacctgagcagaggaggattttaataatcgagtggataggatgacttgttctgtggacaccacacagcctccttacccagccgcccctgtcatcacccaatgggtccatgaacaaagtggccatggtgacagggatggtggttacgcatgggctcagcaacatggacttccactcaccaaggctgacctggctaaggccactgctgagtgcccaacttgccagcagcacagaccaacactaagcccttaatatgacaccagtccttggggtgatcagacagctaattggtggcaggttgattacactggacctcttctatcatggaaagagcagaggtttgtcctcactggaatagacacctactctggatatgagtttgcctctcctgcacgcaatgcttctgccaagactaccacccgtggactcgcggaaggccttatccatcatcatgctactccacacagcaytgcctctgaacaaggcactcactttacggcaaaagcagtgcggcagtgggctcatgctcatggaattcactattcttaccatgt

SEQ ID NO: 947639 - DNA, 580 bp, Homo sapiens
gtgacctgagcagaggaggattttaataatcgagtggataggatgacttgttctgtggacaccacacagcctccttacccagccgcccctgtcatcacccaatgggtccatgaacaaagtggccatggtgacagggatggtggttacgcatgggctcagcaacatggacttccactcaccaaggctgacctggctaaggccactgctgagtgcccaacttgccagcagcacagaccaacactaagcccttaatatgacaccagtccttggggtgatcagacagctaattggtggcaggttgattacactggacctcttctatcatggaaagagcagaggtttgtcctcactggaatagacacctactctggatatgagtttgcctctcctgcacgcaatgcttctgccaagactaccacccgtggactcgcggaaggccttatccatcatcatgctactccacacagcattgcctctgaacaaggcactcaytttacggcaaaagcagtgcggcagtgggctcatgctcatggaattcactattcttaccatgttccccatcatcttgaagcagctggat

SEQ ID NO: 947640 - DNA, 735 bp, Homo sapiens
acagatgtgtgataatactgattcatggactgcagccaatggtttggatgacggtcagggacttgaaagaagcatgattggaaaactggtgacaaatttggggaagaggtatgtggatggacctctctgagtggtgaaaaaatgaagttatttgtatcccctgtgagtactctaccaaagggtgacctgagcagaggaggattttaataatcgagtggataggatgacttgttctgtggacaccacacagcctccttacccagccgcccctgtcatcacccaatgggtccatgaacaaagtggccatggtgacagggatggtggttacgcatgggctcagcaacatggacttccactcaccaaggctgacctggctaaggccactgctgagtgcccaacttgccagcagcacagaccaacactaagcccttaatatgacaccagtccttggggtgatcagacagctaattggtggcaggttgattacactggacctcttctatcatggaaagagcagaggtttgtcctcactggaatagacacctactctggatatgagtttgcctctcctgcacgcaatgcttctgccaagactaccacccgtggactcgcggaaggccttatccatcatcatgctactccacacagcattgcctctgaacaaggcactcactttacggcaaaagcagtgcrgcagtgggctcatgctcatggaattcactattcttaccatgt

SEQ ID NO: 947641 - DNA, 588 bp, Homo sapiens
tctgatctttgttgtctgtgtgggtgttagatttggttaatcctcttgcttctgatcagaaacctctggttttgcttaacaagcctggcctgacatcttcatccccagtaagtggtttatgaaaactgctttggccttcaagtcccatctcctctgatcacaaattttctgctgtcacctctgagccattgtcatccaaggtgagcaaagggtaaaaatagccctagtgagaatggctatggcagatgctgaatggaaaagccaaaatgtggaggctgagaacaacacttaggaatgtgaaaagtggagacactgaaacgggactagcagtttgttattcataacaaatgaatcatttgactttgctcctttctccatctcatttctctcccagggactgatcctaatgaaacaattgtgctacattagtttggaaaacattttgaagtttctggttttattctgayctaatagatttagatcaactgaatcacggcttaaagtggttcatttagttgtttttgtttttgttttttgttgtttcttggaagatctttttatgtctttgcttaacagtattgaattttt

SEQ ID NO: 947642 - DNA, 713 bp, Homo sapiens
cctgggcaatggcgggcacccctccccccagcctggctgccgccttgcagwttgatctcagactgctgtgctagcattcagcgagagtccgtgggggtaggaccctccaagccaggtgtgggatataatctcctggtgccgttttttaagcccgtcggaaaagcgcagtatttgggtgggagtgacccgattttccatgtgctgtctgtcaccactttctttgactaggaaagggaactccctgaccccttgcgcttcccgagtgaggcaatgcctcgccctgcttcggctcatgcacagtgcacgcacctactggcctgcgcccactgtctggcactctctagtgagatgaacctggtacctcagatggaaatgcagaaatcacccgtcttctgcatcactcacgctgggatctgtagactggagctgttcctattccggcatattctatttcaaacactgaataaatgttactagagatttttaagcaaatgcattttagctgcaaggtatagcagagacaaactgcatggacagttgacagaaaaaaatgtttgaaagaaataatagtctagacaaagaagacgttagaaatttgaaggaaatcagtgaaattaaagccaatgagattaactgggaatgatgtgtgaacagacttgactgctgttctttgtagtttcagatcgtagtaacagaggtagccagctttagca

SEQ ID NO: 947643 - DNA, 753 bp, Homo sapiens
ttaagtacatggaacatgggcaaattgaaccaagttagctattattctgagatggtgggaggttgaaaaatgagggtcaagaagggaggcactggtaccagatggtcagaaagatgsgcagagtgtgtaaaatggataagaaaggaagtagatccagaagggagaatgaggtaggtaatggctggggtgaaaatgtagggccaaaagtctggaggtaccataaggtcagaagcaagttggaataatggaactgaacactgcagataaagtcaatcttgaattttgaactttcagtctgggcaccgtggctcatgtctgtaatctcagcattttggaaggccaaggtgggaggattgcttgagcttaggagttcaagaccagcctgggcaacgtagcaagatcctgtctctactaaaaataagaaaaaattagttgggtattgtggtgtgcacctgtagtcctagctactcgggaggtttcggtgggaggatcacttgtgcccaggagattgaggctgcagtgagctatgatgacaccactgcgctccagcctgggcaacagagtgagaccctgtctcagaaaaaaaaaaaaagaagtttggactttcagaggagaccagatttggttgggagggaatgccgagacaacaaacagatggagttgagttggtagaaatcaaggagctccaggaacttcatagctgcctgttggatggattgtctagatgagctctgggttttcccagattgatga

SEQ ID NO: 947644 - DNA, 632 bp, Homo sapiens
caaaatcaaatgcaataaaaacagaaattgacaaatgagacctaattaaactaaagcgcttctgcacagcaaaaaaacccaaaacaaaacaacaacaacaaaaaactatcaacagagtaaacaaacaacctacagaatggaagaaaatatttgtaaatgattcatctgaccaagggctaatgttcacaatctacaaggaatttaaacaaatcaacaagaaaaagacaaataacctcattaaaaattaggcaaatgacatgaacagaccttctcaaaagaaaacatacaaacagtcaacaaacatatgaaaaattgctcatcattaattatcagagaaatgcaaacgaaaactacaatgagatactatcttataccagtcagaatggctattactaaaaagtctaaaaataacagatgttgatcaggctatggagaaatgggaagcttatacactgttggtggggatgtaaattacttcagtccctgtggaaagcagtttgtcctgcctagggacytagactccacacacttgacctactgcatcaccagccagacacattccacagcccactctgactcttacaagcacaggggattggtatatcaccggggtgttgtgggtctcctggtga

SEQ ID NO: 947645 - DNA, 714 bp, Homo sapiens
ggctccgtgggcgtgggaccctctgaaccaggcgtgggatataatctcctggtgtgccgtttactaaggccattggaaaagggcagtattagggtgagagtgtcccgattttccaggtaccctctgtcacggcttcccttttctaggaaagggaattccctgaccccttgtgcttcccaggtgaggtgatgccccaccctactccatgggctgcacccactgtctgacaagcccctgtgagatgaacctggtacctcagttggaaatgcagaaatcacccatcttctgcaacgctcatgctgggagctgcagactggagctgttcctattcggccatcttggaactgccccctgaattccgttttaaaaagttaaatgtgcaactaagcatattgtcacaaagattaatctcagtgtaaagtcttcctacaacaatagtattgtacatgccagaacatttattagaaaagaaagactggcttaaacaacattaattggcaaatagtacttggtaagagtacatgcttggaaaggctccgggaaatatctgttccttaagaaagttgacaggtcctaaatcagacatactattccaattgggraaacaactgttaatggagctaaacaatgatattgagtaactgggtgatgctaaacctgttgatttaaagaaaatataaataactcttaatctgcctcaaagatccttaaaat

SEQ ID NO: 947646 - DNA, 740 bp, Homo sapiens
gaaatatatttatggtggattttttttttccaatcacagatatgcttgtaagcagatagtgtaccatgaacattcctctgtattaatgcaaacctttcagtgtgggagtccatgtggcatgatctcagctcactacaacctccaccatccatgctgaagtgatcctcctgcttcagcctcctgagtaggtaggactatggcatgcacccttgggcccagctatttttttaatttttttgtagagatgaggtctcactatatcacccaggctgttcttgacctcctgagctcaagcaatccatccaccgtgacctcccaaagtgctgggattacatgcgtaagccaccacccctggcccctcaaacattttacagtctgcaaaagctactgctaaacacttcactgttaatttttggggggattcactaggtgataggaattttccaggttcataataatcttatggaactactcttctatgtatgatcagtaattgactgaatgtcattatgtggtgcatggctttaccacattttgtttatgtattcatcaattgatgaacattggggttgtttccactttttgggtactacgaataatgctgccattaacatttacataaaagtttttgcatttacgtatgttttcagtcctcttgggcatataccaagtagtggaattgttgggttatatggtaamtatgttaaacgcttttaggaattttcaactgttttccaaag

SEQ ID NO: 947647 - DNA, 605 bp, Homo sapiens
ttctttcctttgtcttaacattggataacctgaggacactgtgtctaggcaaagatctttttgcratgaatttcctgggtgttctttgtgcttctcacgtttggatatctaggtctctagcaaagccagggaagtcttcctcaattattcccccaaatatgttttccaagcttttagaattctcttcttcctcaggaacaccaattattcttaggtttggtcatttaacataatcccagacttcttggaggctttgttcatattttcttattcttttttctttgtcattattgtattgggttaatttgaagaccttgtcttcgtgctctgaacttcttacttctacttgttcaattctattgctgagactttccagagcatttcacatctctaaaagtgtgtccacagtttcctgaattttttattgctttttctttaagctatctgtttccttgaatatttctcccttcacttcttgtatcacattttggatttccttgtactgggctttgcatttctctggtccctccctaattagcttaataactaacctcctgaattctttttcaggtaaatcagggatttcttcttggcttggatccatt

SEQ ID NO: 947648 - DNA, 604 bp, Homo sapiens
ccagcaatataccttcactgtcgtacctcagaggtatatcagctctccggstttgtgtcataatcttgtttgcagagatcttgatcacttttcccttccgcaggatatcacaccagttcattagttcattacattgatgacagtatgtgaccggatctagtgagcaagaagtagccaacacactggacttattgatgagacatttgcatgccaggggatgggaaattaactaaaattcagggaccttctacctcagtaaaatttctagtggtccagtggtgtggggcctctcaagatattccttctaaggtgaaggataagttgctgcatttgccccctcctacaaccaagaaagagggacaacgcctagtgggtctatttggattttggaggcaatacattcctcattctggtatgttactccagcccatttatcgagtgacctaaaaggctgccagttttgagtagggtccagaacaggagaaggctctgcaacaggtctaggctgttgtgaaagctgctgtgccacttgggccatattacctagcagattcaatggtgcttgagatgtcagtggcagatagggatgctatttggagccttt

SEQ ID NO: 947649 - DNA, 620 bp, Homo sapiens
gtaatggcctggaggaagatggggagggttgggagacaggactgtgggttcagtagggagggaccaggtgtccccagtgaggggcatgggctgcccttaccttgagggcagtgagaccagtttctcaatttcccagaaggttgcctcttcttcacttccccagcttcctgatgataagcccataatattttcattttacaaatgagaaaccagagctcaaggaagttcagggacttgcccggcctgccgagtttctctttggcaaagcctgcatggggactggctctcagcacctggtacttctaagtacactggggaggcatggcttccaggaaatcaaggcagatgtcagagttggggtttttcctcctttcttcccagaactgctcagaacagagtgagcagccttgccctgagtcatttcacctaaaaggaaagagaattaaggagttgccttcaatggtaagttccagaaaaagcatcagactagaaaatgaagagctgccagaacccccgcaagttagcagggatgygtattatgcctggcatggcaatggaaagggtgctcttggttttgtggaatccacttgattgtaaataaatgtgttatatttaggact

SEQ ID NO: 947650 - DNA, 716 bp, Homo sapiens
gcctgggcaatggcgggcacccctccccccagcctggctgccgccttgcagwttgatctcagactgctgtgctagcattcagcgagagtccgtgggggtaggaccctccaagccaggtgtgggatataatctcctggtgccgttttttaagcccgtcggaaaagcgcagtatttgggtgggagtgacccgattttccatgtgctgtctgtcaccactttctttgactaggaaagggaactccctgaccccttgcgcttcccgagtgaggcaatgcctcgccctgcttcggctcatgcacagtgcacgcacctactggcctgcgcccactgtctggcactctctagtgagatgaacctggtacctcagatggaaatgcagaaatcacccgtcttctgcatcactcacgctgggatctgtagactggagctgttcctattccggcatattctatttcaaacactgaataaatgttactagagatttttaagcaaatgcattttagctgcaaggtatagcagagacaaactgcatggacagttgacagaaaaaaatgtttgaaagaaataatagtctagacaagaagacgttagaaatttgaaggaaatcagtgaaattaaagccaatgagattaactgggaatgatgtgtgaacagacttgactgctgttctttgtagtttcagatcgtagtaacagaggtagccagctttagcagag

SEQ ID NO: 947651 - DNA, 577 bp, Homo sapiens
gtaggtttgttatatcggtaaactgagtgtcatggggtttgtcatctgggtaatatgcgtagtattgataggtattttttctgatcctctccctcctgccagcctccatcctcaagtaggccccagtgtgtgttgttcccctcctagtatccatatattctcattgtctagctcccagttgtaagtgagaacatgcagtatttggttttctgttcttgtgttgcttcacttaggataatgtcctccagctccatccatgttgctgcaaaggacatgattgtgccctttttatggctgcatagtatttcatggtgtatatgtaccacattttctttatccagtttactgttgatgggcatttaggttgattccatgggagaacctgtctgtacaaaataagaaaaaattagccaggtatggtggtgtatgcatataatcccagctactcaggaggctgtgaggatcacttgagcccaggagtttgagattgtagtgagccaygatcacaccattgcattttagcctggggatggagtgagaccctgtctcaaaaaaaaaaaaattttttttttataaa

SEQ ID NO: 947652 - DNA, 647 bp, Homo sapiens
ctggcctggggcaggggagagagagagtaaacaggaagctgcaaagccacacaccaggatctttggaagctgctctggccttagattacaaggccaggygggtgggagagtggacaacacagaacaagaccagtttatctccaagtagctaagttacctgaggatgttgtgctccagggtatttttctcctgcagccacagaagcagagctctgcttggagtgctttatggagacaacatttgtaaagtgcatgcatgcatgactctgcctacgttctctacctgctggtgatgatggccaaggtcacaaccttgagatggaaaaacctcgatgagggtcctaactgccatttcctatataaccttggaaattcacttgactttcagatcctgtttccttatctgcaaaatagggataataatacctacttcagggattatgaattgcttggagcatctgtgacataagaaatacacacacacacacacacacacacacacacacacacacgtttggtctttgacctatgtcctggaacacagctcctagaacccttggaatcttcaaagtgctaaatgtcttctgtacactaataagatgactggtggctcctggatggactcaggatgggggttggttgcctggg

SEQ ID NO: 947653 - DNA, 550 bp, Homo sapiens
agcgagactccatctcaaagaaaaaaaaaaattaacttaatggaaattcactatacaattactatcttggcagacatagatgtaaamaatttaaaaatttttgtacatcattttggcagttttcctcttcacttttgtaatacatattttgtgtcatcttgatcatttccatcagcatataagcatggtgttggagatcttctcatcttacaaaacttgtcttgaccttatttcctgcagagctgtcatcccatctctgctttcttctcaagaccttgggagacttgcctatatacttgcagtctccaatttctctccccagttctgttttaaatcaacacaaatcaggttttgcttcactgaaacatttcttgtcaaggtctccagtgacctccatgttgctaaatccactggtcatttcttgttcttcattctattgactcccagcagtgtctgacccattggctcaccctctttcctcatatacttccaggataccatccttcctggcttcctcccacagcaccgccctttcctgaatcctcctctt

SEQ ID NO: 947654 - DNA, 551 bp, Homo sapiens
aatctggggaggctccataagagaaattaaacttcagtacttccctacagaaatagaatgggccagtgctcgagggtatacttttcagccctcaggatgtctatagtcagagaatggcaaactcttcttgccagcctccagccaatggaaagtccttaaaatcgttcaccaaacttttcacttgggaaaggataaaacttatcaatgtgcccagagattgttttcaggagagaacctactagaaacattcaaacaagttgttaatgctggtgaattctgtttcaaaataatccccggaataggcgactccttcctcctcaaacccgaagaataggaagttatccatgggaagactggcagatagacttcacccacatgccaaagatgaagggcattcaatacctcttggtataggtagatastttcactaattgagtagaagcatttgcatgctgcatagaaaaagcctctgaggtaataaaagtgttagttaatgaaataactccttgctttggcctacctaagtaccttcaaagtgacaatggctccgt

SEQ ID NO: 947655 - DNA, 586 bp, Homo sapiens
ctaatattttggatattaacttcttatcagatgtatgttttgcaaagacttcctcccattccataggttgtcttttcactagttgattattgtgcagagctttttagtttgatgtagtcccatttgtctatttttgtttttgttgcctgtgcttttggggccatatccaagaaatcattgccaaggccaatgtcaagaaggttttccctatgtttccttgtaggagttttatggtttcaggatttaaacatttaagtctttaatccgttttgagttgatttttatatattcagtaaaataatctaattccatgttgttgcatgtggatatccagttttttcaacactgtttattgaagagactgtcctttgttcattggtacccttgttgaagatccattggtcatacatgtgtggatttatgtctgggctcttcattctgttctattggtttgtatgttgtttttatgmcagcatcatcctttgttttaaagatttaatttttttagagcagttttatgttctcagcaaaattaagaagaaagtaagagatttcccatacaccctctgtccccatgtaacttctc

SEQ ID NO: 947656 - DNA, 666 bp, Homo sapiens
gtttggaaggacagtatcaaggtttatctgtcacacttttatttttcactataactacccaggtacaaatcctggcacctaataggtgctaagtaaatagtagtatgtgtctacctgccctatccatttcctattttctgacaaatacagtcttttttttttttttttttaagagatagggtctcactttgttgcccaggctggtcttgaactctgagctcaagcaatcctcccacatcagcctcccaaagtgctgggattataggcatgagccactgcacccggtcctgacaagtacaatctttctgtagctgtgtttatactgcagtctggttttgccttgtcacgtgagtcctttgatctctataagatgatttttctaattcagatctattttatgttatattttagttgtctgcaacattatttaccctcttcccttgtgttgcctacagagggattgaaagtcagcaccttatctagtaattctagtaacttctgatttctcagaaacatgattttgttcatcaaatttcattattacccaagtctttaccttaaagaccttccactttcatctcrtatatctgatgcggtagctatatgaaaagtgttcatatggagtctgtcatgaagtcagcagaactctgcaggtgaagtggccaa

SEQ ID NO: 947657 - DNA, 812 bp, Homo sapiens
ttttagacatgtcatgtttgaggtgcacattagacatcagagttaagatatgaattggcagtcgcatttaggagagaattctgggttggggatgtatgtttggaatccccagtgtatagataatagttaaagccatgaggtgagctcactttttaggcagtggttacagagaagagaagaggtccatgaattaaactctggaacataccgctatttagagaacaagcaggtgaagaggtatcataagagttgctggtgaggtaagccagagggcctgctgtcctaggagacaagtgaagagactgttcccaggaggagggaggagggagtgaggagctgtggggagtgaatgctgctgccaagtcaggtaagaggactgagaactgaatgttgcatttagaaatgtggagatcgttaatgattttgtttcttttttatccccccacaccctcaccttcctagatcattaatgattctgaagtacacttttggcagaggaacaggagcaaaagcttaatcatgtggttgcaacaaaaaaggaatagaaggaaaatagacgacacgctctttccagtttactataaaaggaagcagagaagtggtccagtattgctctggccagggtcaccagtgatctcgttattgatcaactgcatatccttagtctttttcttaatcactgcccagcagtgattaacacttcacccttsccctccctccctctctcctttcctcccttcctccctaactcccttttttgggactgggtcttgctctgttgctcaggttggaatgcagtggtgtgatcgtgg

SEQ ID NO: 947658 - DNA, 636 bp, Homo sapiens
tgaaaaaactaaaaatatgttatggttttctgttttgagacggagtctcgctctgtcacccaggctggagtgcagtggcatgatcttggctcactgcaacctccacctcccaggttcaagcaattctcctgcctcagcctcctgagtagctggaactacaggcacctgccaccacgcccggctaattttttgtgtttttagtagagacggggtttcaccgtgttagccaggatggtctccatcttctgacctcatgatccgcccgcctcggcctcccaaagtgctgggattacaggcgtgagccaccgcgcccggccacgttatggttttgagcaagaagaaagtttatgagagacagaatgcattcagccttgacgctgaagtcattctctcctgtggccccgggaaagccaccaaccacagagaaggaagccacttggctgctatgaatggtacttacaaagttgtaaaaacgcgaatgccgttgacttgttttcaacacagataaaacttaacaaagaacagaaaacttaattatgctcatcaaacagaatatgatgccatccttggtgctgcaaaagaaaaacccaygggatggaggaagagaaggggaagaggggaggggagacggaggac

SEQ ID NO: 947659 - DNA, 598 bp, Homo sapiens
atgaccctgcaaaggacatgaactcatcctttttaatggctgcatagtattcaatggtatatatgtgccgtgtttcattctaatsgtcatttacattttgatttagtatttggttatctcatgtttatagagatacatactttggaatctctagatttgggtggtgattttgtaagtttatatttgttcccatccagcatccatttcctctatcccaggcccccggtgacagaatatttagtatattgattttgtattaataatccttgttttcttatgtaacccattattgcattcatttgtgtcgcttttctgaatgtctccagccatcccttcacttagacatagatgtctttcatgttctatacactcagaatttttaacctagaaatttgaattttgaatatattgaaaaccttgggtcagatcaatccaacttgtggcatattgaactaatgagaacttgttctcagttatgtctatctacattcctaaaccttctcagatataattctctgaggccagaatctttcatttttcctttgctttttggatttccctcatatactcacaagaaaatccctttatttttcacagt

SEQ ID NO: 947660 - DNA, 676 bp, Homo sapiens
ggcatacctgctaccacaaaaatatccttaagctcatggcccataggcactgtaaaacaactatgaaatcaagtctacataacaaccagcaacaacaggatgaaagagtcaaaatcacacatatcacaaaattgcacaattttctttcagctcaagaagctcagtttgggtctttctaaaaatggcagttacatctttctattcttaaatctttgtactgaattggttggctttcttgaactgagtttcgactttctcctggatctcattgaacttccttgccatccagattctgaattccagtctatcatttcagacaattcagactgattaagaaccattgctgtggagctagtgagctcatttgtaggtaaggggacactggctttttgaatttccagagttcttgcactgactatttctcatctggaagggctagcatttctttaactgtggtgtaaatcgaatatagtcagttggctttatttctggaagctttcatagagctaaggctctgtacaaagtcttcgttgctgaattcttgctcttggttttgcagggggtagaattagtaaagtgatttttggtgctatatttggactgtaatccaatagaggatacttgagagcaatgggtggttgataagctcttagccrcacagcatctttgcatatcc

SEQ ID NO: 947661 - DNA, 458 bp, Homo sapiens
gcttagaacctaatatttcatgataggtaataagcatgctagccctttggtctggaaagagatattatcatcactgtatttgacagtaagcrtgcttgctatttgctctggaggaaaactctatctctgtcttccaaggctactctctatacaaaaatcttttaaaagatagttcagaataaagtacagtaactgccttccttataagacataaaattatgagatagccctggagaattatgtcacaacagtatctacttcttattgctactactttgtcttgactgctggtgaattttcccatgagtacgctactctgttggctagtctcattaatttaaataaggtaggctaggactaaatccatcactttgtttcccatatcatttaattaagactactatccccagagctaccagtagcaggaggaagccaatctgctgtattgaccattcttc

SEQ ID NO: 947662 - DNA, 571 bp, Homo sapiens
atgtcatgactgcataaaatgtataaaaatctatttagatactatttcatcatttactaccataaaatatacacagatataaacagttaaaatstatcaaattttatgcatataaacatagactgtacatacaatcatttgtggtcaagagaaatgtaaacaaatgtaaatatgaactataggacctactactgtataaaaagaactacagggcctactactgcataaaatgaactataggacctactactgtaataattttgtagctatctcctataggttagcatgcagttagctcaagtgctgtgagtatccacttaaaatactacatgatgttaatcatttctgcatgagcagtttctctctctagtaaattgtatatcacatcaaaaagtgatctctcatagttctcatgtatttttcattgtacttagttcaatactataaaccttgaataacaccacaggacccttatgaaatggctctactgatgctggaggacttaagcagagaaaagacatgacattacaagaaaaagttgaattgcttgatatgtactacgggttgaggt

SEQ ID NO: 947663 - DNA, 575 bp, Homo sapiens
cccaaagatttatactacctttcctttacaacattatgtgataatgtaacattattgctgagatgtgactgactacccagaaagtacatttccttccctgccatcttccaatgagttggaaacatagagcaattttgtctaatatatatgtaagagatgtatgctgcttccaacccagttcataaaacctccacagagccaagtgatatcaccatccagagtaacttggtcctgttaaagtggcagaacctctgtgaacttgtgtccttgatttacattttgaagcataaagccctctctttatgtgggtgaaaagcaagcctctaatctattatgctcagcctagggtgtgctttgggggtttatgtggtatagtagacagctttacatactactttttccaaaaaccactgaggccaacatgttttttcaatttgttgagcttatgatcttctgaataaacattgtcccacagtttcatcagcctctctggagtctgccactgttatctggtccattctgcaacctctgcctcaytctcctggactgatatgaggccaggctctgtttttctt

SEQ ID NO: 947664 - DNA, 644 bp, Homo sapiens
cttcaggtctagccctgacccttccttcctcagtaggcagggctttcctgcagggtctccaataactccagccagaggctcagasacagaattcggatctccctcggcctgagctcctaggggaaggggtggctgcagtctctgtggatcagcagatttagcctctccttctggtagttctgaggaatctgggcagtctagacaagtgggtttgcccccagcgaaacacaccctctcaactaagggacaaagtgtttcattaaacgggttctgttccctgtgccacccaactgggtgagaccctcctacaggggttgtcagacagcctataccggagcaatcctactggcattaggttggtggtcctcgaggtcagaggtcctagaagaaggagtagacatccatctttgctgctgtccagcctccttgagtgacatctccaggactggagagaatcagatgaacagggcctgaagtgaactcccagcaaactgcagcagccctacagaagagggacctgactattgaaagaaaaacaagcagaaagcaacaacaacagcatcatcatcaacaacaacaacaacaacaacaacacaataacaacaaaaaggcccccaggaaaaccctgtctaagtgttgacaac

SEQ ID NO: 947665 - DNA, 584 bp, Homo sapiens
tgcagaagatgggtgatttctgcatttccamctgaggtaccgggtgcatctcactggggagtgtcagaaagcgggtgcaggacagtggctgcagtgcaccgagcatgagccgaagctgggcaagacattgcctcacctgggaagtgcaaagggtaagggaattccctttcctagtcaaagaaaggggtgacaaacggcacctggaagatcgggtcactcccaccctaatactgcgcttttccaatggtcttagcaagtggcacaccaggagattatatccctctcctggctcggagggtcctatgcccatggagccttgctcattgctagcacagcagtctgagatcaaactgcaaggcagcagcaaggctgggggaggggagcgagccattgccgaggcttgagtagctaaacaaagcagccaggaagctcgaattaggtggagcccaccacagctcaaggaggcctgcctgcctctgtagactccacctctgggggcagggcttagccaaacaaaaggcagcagaatcctctgcagacttaaatgtccctgtctgacagcactgaagagagtagtggttctc

SEQ ID NO: 947666 - DNA, 665 bp, Homo sapiens
ctcctgacctcaggtgatccgcccctctcggcctcacaaagtattgggattacaggcgtgagccactgcacccggccaggaatttttttttaacctttattttagattcaggggtacatgtgcaggtttgttatacaggtaaatcgcatgtcatgggggtttggtatacaggttattttgccacccaggtaataagcatagtacactctataggggtaatatggtagttttttcacgagttatgtaggttatatattcactttccagagataaagtacataatctattttggaaacacactttaaaaagggagacagcatgctgccaaaattgcataggagctcactaggttttgatggtcatttttacacttaattcacttttttttttttttttttttgagacaaagtcttctctgttgcccaggctagagcgcagtggtgcgatctcaactcactgcaacctctgcctccctagttcaagcaattctcaagtctcagcctctcaagtagctgggactacaggcgtgagccaccacrcctggctaattttttttaatttttagtagagacaggttttcaccaggttggccgggctagtcttgaactcctgacctcatatgatctgcccacctcagccttccaaagtgctaggattacagctgt

SEQ ID NO: 947667 - DNA, 610 bp, Homo sapiens
tttattactgttacatttcaaatgtgtatttatttgaaaacttgaacatkaaaaaacaagaggctgcagaaaacccagctaatattaacagaactgcttttagaataaggacattgcctgtttactttttggtattcaaataactaaaacagtttgggattttattcaaggtagaagaactggaacatttttggggagtcactcagtttaaagaggcattgttcatcatttttatcaacctccaattatagaagttttggaaaaattacatacatgtgaccattgggcattcggcattaggttttctttttttctttttctttcttttttttttttttttttttttttgagacaaggtctcactctgttgcccaggctggagtgcagtgatgttatctcagctcactaaaatctctgcctcctgggttcaagcaattcttgtgcctcagcttcccgagtagctgggattacaggcgtgcagcgccacgcccagctaatgttttgtattttgagtagcgacaggtttttgccatgttggccagtctggtctctaactcctggcctcaagtaatccacccacctcggcctccagtgtgcccagccagcatta

SEQ ID NO: 947668 - DNA, 569 bp, Homo sapiens
ctcgcttgaacctaggtggcagagggtgcagtgagccgagatcgcatcactgcactccagcctgggtgacagagtgagactctgtctcaaaaaaacaaaaacaaaaacaaaaaataggtggcacaaacctgggcttacatgatgaacaggatttatttattttccttcttgtttattaagacattatttacatacaataaaattcaccaattttaagtgtacagtttgataatttttattatttgtatacaattgtataaccaacataacaatgaagatatagaacaattccctcactcaaaaagtgtccttgtgtccctttgcacttgatcccttctccctaactcctggcctcaataaccactttaatctgctgtcagtcactattgctattccttttctagaatttcatataaatagaattatatactacatagtagtcatgtttgacttgcctcacttaccatgttgtttttgagatacaytaatcttgtgtgtatcattatttcgctcctttttatggctagtatgattccatggaatggatacaccacaatgtattcttcacc

SEQ ID NO: 947669 - DNA, 635 bp, Homo sapiens
tccatcaaagcaaagctgggccaagggattctctccaccacagcaacctaggggcccrtccctcccacaccctgcgccgccctttcatcgcctctcaagatcaacattagccacaccttcaaactcttctgtcctccatctgagctcacttggtggtggtgtgcacacacacaacacacacacacacagtgtacacaagcactcagagtgtgcacgcacgcacacagacacacgcacacatgcatatggacatacacagagtgtacgcatgcacacagtgtgcacgcatgcacacgggcacacgcacatgcatgcacacagacacacacacacaagcacacggatgcacgcacatggacacacacacagagtgtgcacacacgcacacacagcctggctgtacggcggcctcaagccgcggcgttgccatatgggctcttggaggctgaatttagcagggcggatggagctcaacaagtcccggaacagaagccctcaggtggacacacccggcaccacactgtcaaagaggccaagggtgaaggacacagagagaagcggtcaagtggtgctgacgattcaactccaaggtcaaggcgtgggccctattgggtggacactgctgtttatagctc

SEQ ID NO: 947670 - DNA, 585 bp, Homo sapiens
ctcctttgcgtcttcctctcatacccccctaccttaacccacaagtatgggacatcgctactccttccctggcaaccggtcacatgcccattaccatcccattaaaacctaaccacccttaccccactcaaygccaatatcccatcccacagcacaatttaaaaggcttgaagctcgttatcactcacctgctatagcatgggcttctaaaacctataaactctccttacaattcccccattttacctgtcctaaaaccagacaagccttacaagttagttcaggatctgcaccttatcaaccaaattgttttgcctatccaccctgtagtgcccaacccgtacactcttttgtcctcaataccttcctccacaactaactgttccgttcttgatcttaaagatgcttttttcactattcccctgcacctctcatcccagcctctctttgctttcacctggactgaccctgacacacatcagtcccagcagcttacctgggctgtgctgccacaaggtttcagggacagccctcattacttcagccaagctctttctcatgatttactttctttccactcctccg

SEQ ID NO: 947671 - DNA, 590 bp, Homo sapiens
aagggacaaattccctaccggtcagcaagccatccccagtatggatgcccactgggatctagactcaagatcatggggactggagttgtaaacatctgctgacctgtgtyctggaaggactaagaagaattaggaaaaagcccatgagttattcaatgatgtccaccataactcagggaaaggaagaaaatccttctgccttcctcgagcagctacgggaggtcttaaggaaatatactctcctgtcacccaactcccttgggggtcaactgatcctaaaagatgagtttattacccaatcagccacagataacaggaggaaggtccaaaagcaagccctgggccctgaacaaaatctggaggcattattaatcctggcaacctcggtgttctataatagggaccaagaggaacaggcccaaaaggaaaagcgagatcagagaaaggccacagccttagtcaaggccctcaaacaaaccttggtggttcagagaggaaagaaaattgagcaggccaatcacctggtagggcttgttatcagtgtggtttacaaggacactttaaaaaagattgtccaatgaaaaataagc

SEQ ID NO: 947672 - DNA, 571 bp, Homo sapiens
acttagatagcagatgctactccttgagcaaccggtgcttcaaatatgtacatgtgtggccctcagccctgccatttttctcccagaggatggggaaccaatcgagcatgactgcygacaaattatagtccagatttatgccacctgagatgatctcttagaagtccccttagctaatcctgaacttaacctatatactgatgaaagttcatttgtggaaaatgggatatgaagggcaggttatgccatagttaatgatgcaaccgtacttgaaagtaagcctcttctcctagggagcagcacccagttagcagaactagtggcacttacctgagccttaaaactgagaaagggaaaaagaataaatgtgtgtatacagatagcaagtatgcttatctattcctacatgcccatgctgcaatatggaaagaaagggagttcctaacctctaggggaacccccattaaataccacaaggaaattatggagttattgcacgcagtacaaaaatccaaagaggtggcagtctcacaccgccgaagccatcaaaaggggaaggagaagggagaac

SEQ ID NO: 947673 - DNA, 575 bp, Homo sapiens
ttttccctttaacagtatgcaccagtgaatgaaacagatggtactcctgccctagctgagtttatacaaaacttaaccrggcgtggtggcatgcacctgtaatcccaactattcaggaggctgaggcaggagaattgcttgaacccaggaggtgaagtttgcggggaggcggaggttgcagtgagccgagatcgcaccattgcactctaggctgggcgacaagagcaagactccgtctcaaaaaataaaatgaaataaaataaaataaaaataataaaagttctctgatggataaaaccaggggccagtgatagagaataatggggaaatctactgagatgggggaattctgggagagactctctgaggaagaaacctttaacctgaagcctgaaaggagaccagccaggtgaagggtgtgggagagacagagagtgcctgagactgaatggaggcaggagcaggtgagaggagatccaggggaggcaggcctgctgggctgatacagagatggaattttattagaaaacaacctctttcttttagcttattgtgcagaatggcacccaaacctc

SEQ ID NO: 947674 - DNA, 692 bp, Homo sapiens
gtttctccacatcctagtcaatgcttgctatggtcagcttttgagttttagacattctaatagttgcgtaacggtatcgcattctggttttaayttgtacttccctatttaactactgatattaagcatcttttcatgggcttattgtcatttgaacactttcttttgtaaaatatctgttcaagtcatttgctcttttttttagacagtcttgctctgtctcccaggctggagtgcagtgataagatcttggctcactgtagcctctgcctcctgggttcaagcaattcttgtgcctcagcctcccaagtagctgggattacaggtgtgcgccaccatgcctggctaatttttgtatttttagtagagatggcgttttaccatgttggccaggctggtctcgaactcctggctccagtgatccgcttgccttggcctcccaaagtgctgagattacaggcgtgagccatcacacacggcctcttttgcccaatttttattatataatttgtcctttttaaaggaattctttaatttctagaagaaaacacaggagaatatctttaatgaccttgaggcaggcaaagatttcttagatacctaaccataaaagggaaacttgataaactgacttcactgaaattaaaaaccactgttcatcgaaacacactgttaggaaaatgaataggaaa

SEQ ID NO: 947675 - DNA, 448 bp, Homo sapiens
taatcagagaaatacaaatcaaaaccacaatgagagattctatcacaccagtcagaatggctattattaaaaagtaaaaaaaatraaaataggttttgaccaggcatggaaaaaggtgaatgcttatatactgttggtgggattgtaaattacctcagtccctgtggaaagcagtttgaaaatttctcaaagaactaaaaatagaattaccattttgcccaccaatcccattactttctatatgcccaaaggaaagtaaattgttctatcaaatgcacccccaacaaaaccaaacacctgcactggcatgattatcatagcactattcaaaatagcagacatggaatcaacctaggtatccattgatggtggattgaataaagaaaatgtggtacatatataccatggaatattacacagccataagagtatgaagtcatgttttgca

SEQ ID NO: 947676 - DNA, 647 bp, Homo sapiens
tgctcacccagattgcgggtgggyctgcatctcccagttcactgacacaaatgttaatctcctttggcaacaccctcacagacacacccaggaacaatactttgcatcctcagtcaagttgacactcaacattagccatcacaagtccatcccttgtcaacttgaacccatacacatctcctgaaattacacataatcttcaaataaagacaataatgatgtcataattacacctaacttaatacggctatccttcatacaaccagaagtgaattattaaccgaaatgctattacataaagttaataacacttaactgctgatatgaagttaataatgtcacttgataagggaaaagcaaaggaaataaataaaggtattttcttagtagaagtgtatacatgcacaaacatgtaaggaggaaatccacatgacaattacaggtctcatttctgcaactggtcttgtggtcatagctggtattgatgactacctttttctactaaccattctgtattccctttgccttcagctagcacctcagcaggctgttatttttttacctggtgaagtcacccaacccttcattcctgaagagtctgggccatttgtagtcctgcctagattggattgttgtagttttccact

SEQ ID NO: 947677 - DNA, 647 bp, Homo sapiens
tgctcacccagattgcgggtgggtctgcatctcccagttcactgacacaaatgttaatctcctttggcaacaccctcacagacacacccaggaacaatactttgcatcctcagtsaagttgacactcaacattagccatcacaagtccatcccttgtcaacttgaacccatacacatctcctgaaattacacataatcttcaaataaagacaataatgatgtcataattacacctaacttaatacggctatccttcatacaaccagaagtgaattattaaccgaaatgctattacataaagttaataacacttaactgctgatatgaagttaataatgtcacttgataagggaaaagcaaaggaaataaataaaggtattttcttagtagaagtgtatacatgcacaaacatgtaaggaggaaatccacatgacaattacaggtctcatttctgcaactggtcttgtggtcatagctggtattgatgactacctttttctactaaccattctgtattccctttgccttcagctagcacctcagcaggctgttatttttttacctggtgaagtcacccaacccttcattcctgaagagtctgggccatttgtagtcctgcctagattggattgttgtagttttccact

SEQ ID NO: 947678 - DNA, 576 bp, Homo sapiens
ctgaggagaaattagatgtgaytctttgttttatcataggtagggttttttaccctctgacttatagagtcttttctttagcttcaattttctataatgtaataattatatgcctaggtgtaggttttttgtttttaatttatcctgcttgttgttctctgagcttcttgaatatatggtttggtatctgacagtctgacatttacttggggatattctcagttactatttcaaatatttttccattctctctttttcttcttcttcttcatgatgcatatgttacaccttttgtaattgtcccacagcccttggatattctgatctttttttaatgtctctgttttctttgcttttcaattttagaagtttctattgatgatatattctcatgctcaaagattttttcctaagctgtgtccagtctatgaatatcaaaggctcacttcatttctgctatggcatttttgatgtctagcatttcacttttattctttcttaggattttcatctctgtgcttacattgctcatctgttcttgcaggctgtcttctttatcctttagaaccctttgta

SEQ ID NO: 947679 - DNA, 567 bp, Homo sapiens
  misc_feature 556: n = A,T,C or G
cctattttcttcctcctttatctctgtcttctccttcttctcttaggctaggagtaagagttgttgaaaaatttaacacccttcccagtctgattggagacatgagcaatgagctggggtgataatagattcctaatctttcaacccatgagacaaagatgtcgagaaagctttgtaaaagcttcgtaaaataattgtaaaagaaagaaaattctagacgaaaatgcaacttagtaatgattttatgaatcttgtcagtgtacctttctgctctccatttctcacaaatctctctctcatataaaagtgtgttttgctttaagacattctttacgaggcaaagaaaaagtcaagtatgggagaactaataaggaatttggtttctacttagacttgtaactaattgcagtgtgatcatgggaaatattactgtttctagtatatggtgtgaaaccccagagactgaagtttgtaatcaaatttagcatcctacctggatccagtttagataatttacccatcaycttgtttctaaagtggttttattaggacctgnaagtaactaga

SEQ ID NO: 947680 - DNA, 771 bp, Homo sapiens
tgtatccttctttgttgatcagttatagaatcaccttatttgtaggtggtttgctttctgttttttttttttttctttttttctttttttgagacaaagttttgctcttgttgcccaggctggagtatagtggcaggatcttggctcactgcaacctccccctcccgggttcaagcgattctactgtgtcagtcagcctctctagtagctgggattacaggcatgcgccactatgcctggctaattttgtatttttagtagagatgggtttctccttattggtcatgctggtctcgaactcccgacctcaggtgatctgcctgcctcggcctcccaaagtgctgagattacaggcgtgagccaccgtgcccagccagccttttgtttttttaggaagatttgaggatattcttatactctgagctttgagaatttacgtggctctgtctagaagtcagttattttttccctcattcatctgcccagtcctttcaaaccgaagactagtatttatcagctctgggatattatattgcagtgtgctttaggaatttctgcttgcaaaatgcttcaggaatttttgcctctttgttctttttttctttttatttctggaactccttgtaatggaacttgaatctcttggattaatttaacaccttattttttaaaatgagaattaaattttctatattctrccccttgcttttgctcttctttgtctggaaaagagtctccacctcattttctgacacttgtattgactcctta

SEQ ID NO: 947681 - DNA, 761 bp, Homo sapiens
tgtatccttctttgttgatcagttatagaatcaccttatttgtaggtggtttgctttctgttttttttttttttctttttttctttttttgagacaaagttttgctcttgttgcccaggctggagtatagtggcaggatcttggctcactgcaacctccccctcccgggttcaagcgattctactgtgtcagtcagcctctctagtagctgggattacaggcatgcgccactatgcctggctaattttgtatttttagtagagatgggtttctccttattggtcatgctggtctcgaactcccgacctcaggtgatctgcctgcctcggcctcccaaagtgctgagattacaggcgtgagccaccgtgcccagccagccttttgtttttttaggaagatttgaggatattcttatactctgagctttgagaatttacgtggctctgtctagaagtcagttattttttccctcattcatctgcccagtcctttcaaaccgaagactagtatttatcagctctgggatattatattgcagtgtgctttaggaatttctgcttgcaaaatgcttcaggaatttttgcctctttgttctttttttctttttatttctggaactccttgtaatggaacttgaatctcttggattaatttaacaccttattttttaaaatgagaattaaattttctatattctaccccttgcttttgctcttctttrtctggaaaagagtctccacctcattttctgacacttgtat

SEQ ID NO: 947682 - DNA, 725 bp, Homo sapiens; identical to SEQ ID NO: 946030

SEQ ID NO: 947683 - DNA, 634 bp, Homo sapiens
aattttattaagtgtcctttggaggaaaaccataaaaatcctaatggtgaaatgtggaaaaactcaaaagtataaaaatgaatctctttcwaactataatatattaatgaaatatcttcataagaaaaaggagaaatgatttatatatatacacacacataagtgtgtgtagatataaaatacattcaccccaaaacatcccaaatttctgagagctatactacaaaatcgacacatagtaactactgaacaaatgtttctttatttaacaactaatgcttttcctgtatcttatgaaaaatcacttttgattccttttgctttaaaaaaaaaaaagcaatatgtgacaaaaatttcaacacagatcagcactgagaaaaaaataaccactacccataaaaccatcatccaaaccaagaatccatcctcttatcatttaacttctgcttataaagaaagaatacattggttttgccaacatcaccattttggtttgcattgtaaataataaacagctaaactcatttacaccttcatttcttatcaatttggttttgggggagtcagtctccctgatccaaatcaactccagggaattaacaagagtttctggacccatcgtgcataggaacca

SEQ ID NO: 947684 - DNA, 618 bp, Homo sapiens
agtttgctagtgttttgttgaraatttttacatctgtattcatcagagatattgtcatgtagttttcctttttcgtggtatctttatctggctttggtatcgggctaatgcagctcttataaaatgaatttggaattcaccagtgaagtctataatcctgggcttttcattgttgggaggtttttgattaatgattcaattgccatactagttatagatctgtttagactttctgtttcttgaatttatcttggtaggttctatgtttctaagaatttttctgtttcttctaggttatccagtttgttggcgtataattgttcgtagtagtctcttatgattctttttatttctgtagcatgagctgtaatatctcttctttcatttctgattttatttgagtattctctttttttcttagtatagctaagagtttgtcaattttgtttattccatatgtctcttgtattcttttcaatattttgtattttctccttgatttaatctggatgcattttaattgttcatttttctgacttctcttccagttcagctgagtttaatctgctattatgaccatcctttgagtttctaatttttgcaattgcatttttcagg

SEQ ID NO: 947685 - DNA, 618 bp, Homo sapiens
agtttgctagtgttttgttgagaatttttacatctgtattcatcagagatattgtcatgtagttttcctttttcgtggtatctttatctggctttggtrtcgggctaatgcagctcttataaaatgaatttggaattcaccagtgaagtctataatcctgggcttttcattgttgggaggtttttgattaatgattcaattgccatactagttatagatctgtttagactttctgtttcttgaatttatcttggtaggttctatgtttctaagaatttttctgtttcttctaggttatccagtttgttggcgtataattgttcgtagtagtctcttatgattctttttatttctgtagcatgagctgtaatatctcttctttcatttctgattttatttgagtattctctttttttcttagtatagctaagagtttgtcaattttgtttattccatatgtctcttgtattcttttcaatattttgtattttctccttgatttaatctggatgcattttaattgttcatttttctgacttctcttccagttcagctgagtttaatctgctattatgaccatcctttgagtttctaatttttgcaattgcatttttcagg

SEQ ID NO: 947686 - DNA, 598 bp, Homo sapiens
atatatgtatatatgctgattattttaaagaggttatttgacttgtacaaatatatttaaattaaggtatttatataacacttttgaatayaggtaaaaagatacatagatctactttattaaagcctcattaagttttctttaaatactagattatagtgtcaatgatttacttacatggatattgttgctgtttttctctgaacacaattatattaaattttaatgacatcaattgtaatatctaactggtatctggaagcttgtggataccccaaaggttttatacaaatttatatgtgtaaagctttcactgatatactttgccagtagatattttaccttgagtagtcagctctgcaaatcccttcccacaaaagattaaaaacatcctcctattacatctagagatttctttttgttattcaaagccatgaataaatttaggaaaatgtgtatgattttaatgccttaaaccagaaagcttccttgattcctattaaaaaatggaatatttaatgttttccttcttctgtggtactttttttgatattgtagcaaagaacaaaaaagaattctgagaacatataaaacaaaa

SEQ ID NO: 947687 - DNA, 619 bp, Homo sapiens
ttttgttaaaatttgcatatgatgaggcaaaaaactgaagttctaaaacttggcaaactcttctcaaatgctttcttgggtaatttcttccagtgattttattatttagatgtcctgtttctatcaaaaggctaaatgagtatttattatgttttctctttatttatctgagtttaatagagatgagagagatgcatagcacttgtgaggtatggtgagaatttacttatatagtttcaaatagctagccagtttcctagctccgttggttgactaaatcaacatcattaacagtgataccaactaagaattaagttctcattcatttcagggtttatttctgttgaattctgtctttctgttcttatgctaatcttacagtcttttaattataacatgcttcattataactcattttaatatttttaaaagaattttcactctttacttctctctttgaaaatattcttggctcacctgttctattatctttgtttttttcaaattctcccaaaatatgcaactggaattttttaattaaaattygtttcaacagttataataatttaagaagaattaaaatagtcacaagatgtagctttcatctgagtcagacaat

SEQ ID NO: 947688 - DNA, 579 bp, Homo sapiens
agctattataaaaaaaaaagtgttggtaaaaatgtggagaaattggaactctcatacactgttcagtatacaaaataatccaggtactatacgaagacagcatgaaagttcctcagtaaattaaaaataaaactaccttatgatctagccgtgccagttctgggtatttattcaaaataattgaaattggaatctcaaagagttattagcactcctatgttcattgcagccctattcacaatagccaggatgtagaaacagtctcaatgtccatcaacagataaatggttaatgtgccatatacatgcaatggaatactatgcaggttttaaaaagaaggaaattgtgcaatatgcaacaacacaaatgaaccttgaagacattaggctaagtgaaataagccaggcacagaaagacaaatactgcatgattccccttttatggggaatcaaaaatagtcaaatacatagattttaagagtgaaatggtgattgcaaggggctgagggagaagggaaaatgggaagttactaatcaaccgacacagaatttcagtygagtgagattagtaagctctaga

SEQ ID NO: 947689 - DNA, 707 bp, Homo sapiens
gtcagtacagagcaggggccccataccttatttctgccaaggctttatggatgactctctcccccttcaacaaatgctcmttaatgttcccaccatcttattattcatgctgtaccaaagacattgtgaaatgcccaggctcttcttccttcatgtcctgcagccaattatagagattggtgcaggcctgacccacctgtaccagacggtataaacacagcgcaatgccctggagaaatcagttggagtctccagggatcagggttccaggaactcaggatctgcaggtcagtgatggacaggcaatattctctctctcttttctttcttttctactctctcctgtcaatatctctggtatgccctctatcccttcactcctcctggcaagctgtctaggtaacaaggtagtcccctcatatgacatgatgggacatcaaaaacatttaggagcacataaagagatttgaggagaaggaataggttaagccaaatcaagatttctgaactacttagaacaactgactttagaaagtaatctcaaaagaaaccatctgggccaatggtattcaaaccgtgtttggtggaagcttaagagattttttgttttcgttttttttttttttgtgctccttggtagctcctcagtgtcttctttgtaggcaagagaaatactagcagggttccaaagtctccattgcttcctg

SEQ ID NO: 947690 - DNA, 549 bp, Homo sapiens
ataccacaggattgcttattgcaacacggcaaatctaggcccttcagtgttgtgggaatgaaattcagaatgtttgcctcactgtggtcaggaactatggctggatgaataacagcccccaaatgtgtccctatcctgatccccggacttgtaaatgttatcatatctagcaaaaaggacatgaagatgtgattaagttaaggatgctgagatacggagagtatcctggatcatctaggtgggcctgatctaatcacaaggtcctcttgagagcggaacaggaggacttcgagtcagaggaggtgataatggaagcagagatgggagtgttacactcggaggatggaggaaagggtcgcaagccaaggaatataagcagctgccagatgctgaaaaaggcaagaaagcggtttctcccragagtctccagaaggaaccaggtctgctcacactgtaactttagcccagtgaaactgatttcatggtcctgacctccagaactctaacagaataaatttgtgttgttttaagccacgaagtttgtggtaa

SEQ ID NO: 947691 - DNA, 679 bp, Homo sapiens
agctgaaaaatataatagaaaaaaagataccagcagcagcaacaaaaaccatcaagtacctgggaattaacagaatattgaagaacacagaatatggaatgcatatagaacattttatatktaaatacatacatataatatctttaaaatgatatactatacaatatacagtattaaagaatatattaataatgtcaatatactccaactcaaactacaaattcaattcaatcccaatcaaaagtccagctcgatttatttaggaacttgactgactcaatctaacatttatatggaagacgaaaggtctttagaaaagaacagctaagaggaccaagatggccgactaggaacagttggggtcagaggctcccatccagactaatgaaaactgtgagcgacctgcactggcaactaacgtatctaggttctctcactgggactgactaggtggctggcgcatggagagtgaggaaaggcagggtggagccgtggttcacctaggagctgcacaggacaaggggagctcccaccgccagccaagggaggcggcgactgattgtgctaccccgcctgggaaaccatgcttcttccacagatctgcaacccatggatcaggagacccctcatgagcccatgccaccagggccttgggtctcaagcacggagctgtgcagat

SEQ ID NO: 947692 - DNA, 615 bp, Homo sapiens
ttgttttgaaattgttccagttccaggacagataaaaatgagtggaagaaagcaaagttcagagttcgggcctggtgacttctgattttctcagagaagtacgagatagactaatggtgaacagtgaagagttgagggtgagtgatgtcaaaagacaacactgtaacaaatttagtttaaagatttaacaggaattggggcagtatctcctccacaaatttagaaaaggtgctctgatgggcatggtagaacagttcgtttttataggacagtctaagcaggaccaaacatatagcataatacaaaaagcagatgggttaccatcaggttacttcaggttactttccttgcagggttaaaaggatgtttcctgactctaccagctaaaactggcctgtttggatacttggcaatggtctttctctcctgatttcctgaaaggtgaaataagcaacttttttagtttggtaccaaggaactttagcacragtgattccattttgatttggtcggttggggcctagttcaggagctcagtccaactcaatgacttcctataaattttatttaacagtgggtaggggttggatgcacttggtaaagtttggaatcagc

SEQ ID NO: 947693 - DNA, 591 bp, Homo sapiens
gtaatgtgtcctttttcatctctgttttgattatttggatctcctctctttttttcttagttggctaaaggtttatccattttgtttatcttttcaagaaaccaacttttccttccattaatcatttgtgttattttcttcatttcaatttcacttatttctgcccttatctttattttttcttttcttctaccaattttgagcttgctttgctcttgcttttctagttatttaagatgcattgttaggtcgtctacctgaagctttttttctttttgatgtaatcacttacagctataaatttccctcttagtaatgcttttgctgtaccacaaaggttttggtatgttgtgttgccattataacttgtctcaagaaatgctttattttcttcctaatttctttattcacacgctcatcactcaggagcatattatttaatttccatatatttgcatagtttccaaaattcctcttgttattagcttttagttgtaytccattgtgatcagagaagatgctggatagtatttcaattttttttgcatgttttaaggcttgttttatgatctaacatatggtttacccttg

SEQ ID NO: 947694 - DNA, 693 bp, Homo sapiens
gttaaaacctcatttacagcaggtgttgctgacaaccagttcccaggaagcaaggccttccagagcgctctctcgctcgctctcgcgctctctctctctctctctctctctctctctcyctctctctccctctccctctctctctgtagctggtaaacattattctcattgttgcggggggcagtggagccacagagtatggtgggaggcagagagctgcagtgggggaaccacatgcccatggctgactcacccatgggtgagcaaaggcagtggccatgagggaaagtgcaaggaaaagccctggacaaggcctagctctgctcctggcctgaggccctgcactggagctcagtcagtgctggggggcaggcagaagggaggccccttacccatgtcacgctgaaaatccttgccgcagggagtagggcagagtctggagcctaccacatgatgggaaggtgtgtttacttcccactgctgctgtaacaaatcgccaccaacttagcggcttaaagcaacacaaatttatacagctctggaggccagaagggcaaaatcagcatctttgggctaaaaacaaggtgttggcagggctgctctccttctggaggatctaggggagaacccatttccttgcctttcccacttctagaggccacctgcattccttggcttgggcccctgcctcca

SEQ ID NO: 947695 - DNA, 693 bp, Homo sapiens
gttaaaacctcatttacagcaggtgttgctgacaaccagttcccaggaagcaaggccttccagagcgctctctcgctcgctctcgcgctctctctctctctctctctctctctctctctctctctctccctctcyctctctctctgtagctggtaaacattattctcattgttgcggggggcagtggagccacagagtatggtgggaggcagagagctgcagtgggggaaccacatgcccatggctgactcacccatgggtgagcaaaggcagtggccatgagggaaagtgcaaggaaaagccctggacaaggcctagctctgctcctggcctgaggccctgcactggagctcagtcagtgctggggggcaggcagaagggaggccccttacccatgtcacgctgaaaatccttgccgcagggagtagggcagagtctggagcctaccacatgatgggaaggtgtgtttacttcccactgctgctgtaacaaatcgccaccaacttagcggcttaaagcaacacaaatttatacagctctggaggccagaagggcaaaatcagcatctttgggctaaaaacaaggtgttggcagggctgctctccttctggaggatctaggggagaacccatttccttgcctttcccacttctagaggccacctgcattccttggcttgggcccctgcctcca

SEQ ID NO: 947696 - DNA, 570 bp, Homo sapiens
acaagaaggagatgaaattttgacayccatctgttcatccattcaataagtgtgtttattgaggatttatgtggctaacctctgagacagggaagatacagccgctgccttcaaggaccttacccaggaggaagcaggcagttgtgctaacaaataattgtaacaaagcatgtagctgggggcagtggctcatgcctgtaattccagcactttgggaggctgaagcgggtggatcacttgaggtcaggagttcgagatcagcctggccgacatggggaaaccatgtctctaccaaaaacacaaaaattagccaggcttggtggtgcacacctgtaatcccagttactcaggaggccaaggtggaagaatcgcttgaacccaggaggtggaggttgcagtgagcctagattgcaccactgcattccagcctgggtgacacagtgtgactccttctcaaaataataaataaataaataaaaataaagcatctagagttctgtgatagaaatgtgtccctgtgggtggcttggatagaggagggtgttatcagttgcaagagaggagggaaca

SEQ ID NO: 947697 - DNA, 763 bp, Homo sapiens
ataccaacccctctggtaggggatgttgatagtaagggaggctgtgcatgcgtggaggcaggagatatatggaaaatctgtactttcctcttmatttttctatgaacctaaaactgctctttaaaaagtcttagccaggcacagtggctcacgcctgtaatcccaacactttgggagactgaggcgggtggatcgcttgaggtgaggagttcgagatcaacctggccaacatggtgaaaccccacctccactaaaaatacaaaaattagctctgtgtggtgacacacacctgtaatcccagctactcaggaggctgaggcaagagaatcgcttgaacctgggaggcagaggttgcagtgagccaagatcgtgccactgcactcccgcctgggcaactaaagtggcctttggccttgaataacaccagtggcagtcacgcagattggccatggcccttggtgaaccccaatgttgtgctggtcttcagggcttcagatgcaactcagcatagttgcaactgtggtggctacaggagtgcctgtgtcacccacctccaacactgggcaggccagtacagagaaagactcctgactgaaggaaagggaaggtagagagcaagagactctgcctggtaacctggggaattctcccaattatctgcccaagtccatcaagactgtgtatgtaggagtaaagtctttccaaaagtttctctggcaaactgcatctgagagacttctgcgactccggatcagaatagcag

SEQ ID NO: 947698 - DNA, 572 bp, Homo sapiens
aaaggtgcagaatacaaaaccagcctacaaaaaataagttggccttctgttcactaacaatgaatcatttcaaaggaaactataaaaaatcgcatttacagtaatatccagaaaaataaaatttttaggaatagacgtaaccaaggaggtgaaaggcttgtattatgaaaactgcaaattattgatgaaagaaataaaagaagacataaataaatgaaagaatatctatgttcatggattgtaaaatttcatattgttataatgttcatactaccaaaagcaatcgacatattcagtacaatccctaataaaattccaatggatttttttaaagaaatagataattctatccaaaaattcatatggaaccaggaaaaactccaaataaccaaagcaatcttgagaaggtagaacaaagctggagatttcacatttcctgatttcaaaatatttgtagagctacaaattaagcagtatgatatggcataaaaatggacaaacacacaaatggaataaaaaagagagtcgagaaataaatcaamaaacatacagccaactgattttcaccaaga

SEQ ID NO: 947699 - DNA, 610 bp, Homo sapiens
agctctatttttcagaccaaaatgatgcccagagggattcagcatgttctgcacagtttgtgggtggcagagttggaattcatgcccagtctcctactctttctcattgtttccctaagtcatcagtaartgcatgtttacaaattgaaccaataggcccaaaggcgagctattgaatgattttccagcttctagcaccctgaaaggcttactgttgttttgatgaattcacatgttatgtgtcccaccatttgggcatgtgccatggtagacgttactattcaatcacagccctctgctctatgatccagagggatacagctccataactcttttaagcgtagtgctgtgggaagcctttggctgaggactgactcattatagcacatcagaggaaaactgaggccagaattagggtttgaagaccaaggactctgaagaattaaattaaatagatcagaaatgggctgggtttaatcaacattttgaaagccacttcctttggttgtgtttcatttaccacatggtatggatggacagttttgacaattaatgaaatctacttattaatgacactttcttctttctatctttatcattattattgatt

SEQ ID NO: 947700 - DNA, 639 bp, Homo sapiens
cgtttacctactcaagcctcagcagtggcgggtgcccctccccgagcctcgctgccgccttgcagttcgatctcagactgctgtgctagcagtgagcaaggctctgtgggcgtgggaccctctgagccakgcgcgggatataatctcctggtgtgccgtttgctaagaccattggaaaaacatggtattagggtgggagtgaccggattttccaggtgccatctgtcatggcttcccttggctaggaaagggaattccccaaccccttgcgcttcctgggtgaggcatcacctcgccctgcttcggctcacagtctgtgggctgcacccactgtcttgcacccactgtctgacaagccccagtgagatgaacccagtacctcagttggaaatgcagaaatcacctgtcttctgcgttgctcatgctgggagctgtagactggagctgttcctatttggccatcttggaaccaatcaatctgaatttttaagaataatttggtgggtagaggctcgggaagtggcgaatgctaattggtcaggttggagatgaaatcatagagagctgaagctgtcctcttgcagtaagtcagttcctgggtgggggccacaagacctgatgagccattttattgatctg

SEQ ID NO: 947701 - DNA, 639 bp, Homo sapiens
cgtttacctactcaagcctcagcagtggcgggtgcccctccccgagcctcgctgccgccttgcagttcgatctcagactgctgtgctagcagtgagcaaggctctgtgggcgtgggaccctctgagccatgcgcgggatataatctcctggtgtgccgtttgctaagaccattggaaaaacatggtattagggtgggagtgaccggattttccaggtgccatctgtcatggcttcccttggctaggaaagggaattccccaaccccttgcgcttcctgggtgaggcatcacctcgccctgcttcggctcacagtctgtgggctgcacccactgtcttgcacccactgtctgacaagccccagtgagatgaacccagtacctcagttggaaatgcagaaatcacctgtcttctgcgttgctcatgctgggagctgtagactggagctgttcctatttggccatcttggaaccaatcaatctgaatttttaagaataatttggtgggtagaggctcgggaagtggcgaatgctaattggtcaggttggagatgaaatcatagagagctgaagctgtcctcttgcagtaagtcagttcctgggtgggggccacaagaccwgatgagccattttattgatctg

SEQ ID NO: 947702 - DNA, 621 bp, Homo sapiens
aaagcatcagaaatgataagtatgtaggtaaatataagactttaaaataatatcttaaatctctttaagtctttaaaatacaattgactgtttaaagccaaatgatttttgagtttataccatgtatattatggggtttatactatgtgtagaagtaaaatgtatgagaataatgacatgaagcctgggatggggaaagtggagatatactgttgtaagattcttatactatgaataaagcccatctttacttgaaagtagagagtgataaattaacagcacatgttataaaccttaacacaaccactaaactaataaaagatacatctatgtgtgtttatgtgtctctctctatataaaaccactatacacacatacaatacacttgatgtatatatactttgtatagctatatattatatacgatgtatacttcatatatctacattatatttaatgtatattttgtatatatacattatatataatgtatactttgtatatatactatatataatgtatagtttatatataattcratgaagtatataaaatggaatcatgaaaatattcaatttgtatgaaagaaagcaaaaacaagaaaaaaaagagcagatagaa

SEQ ID NO: 947703 - DNA, 579 bp, Homo sapiens
tttgttgaaaaaaacaaggatatttatgtcacagaactttccagtctgtattttgctattcatgtgctgtctttgaacatgatcctctgcccactgcacttcctgtaaattggtggttgcatttagaggcttgatcagattcaagtttcatccattggcaagactacttcaaagatagttatgtgttctttcgtcaagaggcacataatgtctggtggtctctttttgtggagttagtggccaggatccactaattcgttagcagtttcataagggtgatattccagttctatcatctcttcttaacttattagctagatacttctataaatacaaatttcctattatcaactcatttggttactcagcggtacagtttatatagaaaagaaaaaataaatatttgattctttctttttagtgttcaaaataatgagttggttccttaacaccagacaatggtgaacaattagctgttgtagttttyctcccctagtgtcattttgaactcatggatttaattatatttgatgagtatcatccatccactgcagttattatcctatttaatgcacaaat

SEQ ID NO: 947704 - DNA, 614 bp, Homo sapiens
gaataactgttatcaaaaatacataagataacaagtgttggtgatgatgtagagaaaagggaatgcttgtatactgttggtgggaatgtaaattagtacaccattatgamaaacagtatgaagatttctctgaaaatctataaacagaatcaccatataattcagaaatcctactcctgggtgtttactcaaaatatttgaaatttctatgtcaaagagatgtctgcactcccatgttaattgcagcactatttacaatagtcaaattatggaatcaaaagtagtgtggatcaacaggtaaaaggataaaaaatgtgttacacatatacattggaatacaatttagctgtaaataagaatgaaattccatcatttatgtccacaacatgaacagaattggagaatgttacactaagtgaaacaagctaaacacagaaagacaaatattacatgttctcacttatatatgaaacctaaaacacctgaactcctagaagcagagtagaactctggttaacagaggctgggggttgggagcaatggggagatgataaacaaaaagcacaaagcctcagttagattggaagaataagtttgtttctttttttaaacaa

SEQ ID NO: 947705 - DNA, 622 bp, Homo sapiens
aaaacaaaaaagaaaagcttcacaacattggatttggcaatgattacctggacataacaccagagactcaggcaacaaaagaaaaaatagacttcataaaatttgactacataatattaaaatatatatatatatattaaaaacgctatcaacagagtaaaaaggcaacccatagaatgaaaggaaatatttgcaagtcagcaatcagaaatgacaaaagtaacattacaacagatcacactgaaatacaaaaagatcctcagagactattatgaacacctctatgtacacaaactaggaaagctagaggaaatgaataaattcctggaaataggcaacctcccaagattgactcaagaagatgttgaaaccctgaagagaccaatatcaagttaaattgaatcagtcaaaaaaacctaccaaccaaaaaaagctctggaccagataaattcacagccaaattctaccagatgtacaagaagagctggtactaactcaactgaaactgtcctgaaaaaaaaagaaaaaaaaggaggagggactcctctctaatgtatcctrtgaaatcagcatcactctgatactaaaacctagcaaagaaacaaagaaaaaggaaaactac

SEQ ID NO: 947706 - DNA, 508 bp, Homo sapiens
gctccccagtgtcagggtcagagcagaaacccctggcagagctgtcagggcgaggacagtgggaggagtaatagggtgatggcccaggtctcccccacctcccgtgtgccctgcactttctgcagaygattggcggtgctcccatgggacgctgaaaaaggatgtccacagtcagaagcagaactttccagtgcagaaaggtggatctaggttaccattttgcagagtggatctcaggcagccccatgcagtggcgcctgagctccccacaggtgaaaatgaaaagccagggaggccagccctactctgctccgggcgtgcatgctctccactgtcctgtcgggagcagagggggtctgtggcctagcgtgcccttgcaccaccactctgtccatgccaggcttgggaagagtaggaacaccagcgtcccagcactggggagtcagatccagtggcctggcgctccccagagatccggatgttctgccagtgggcagccaccgcacag

SEQ ID NO: 947707 - DNA, 636 bp, Homo sapiens
caatgttcatcttacatatgttggttaatgtctcatgtctccctaaaaccaaactgtgctctgaccaccctgggcacatcgtcaggacctcctgaggctgtgtcacaggtaggtgtcttcaaccttggcaaaataaactttctaaattaactgagacctgtctcagattttcagggttcaaacattttggtaaccactgaaggattctgagtggagatgcccctgacttttcacaagtctcctattggtgcttggtaccagcttgagctaactttatggctcaaaccaataagacaatttgctgaggcctggaagcacctccccctgtgccccacccctaccccctgccgcagagaatccctgatctctcaaaatttggtcgagatctaaagtttattttgttttacaacttctctttttggagttttacttgcttccgatacaaggaaggcaagttttccctgcttccatgacgatggaaggcaggtaactcctttatggagttcgagyttgcttccaacagggaagatgaattttttttttttcctgctcccaggatggtggagatctgagttttcagcctgagacccatccctaggggagtaactgaattgtggtttgtcttagctaaagtta

SEQ ID NO: 947708 - DNA, 636 bp, Homo sapiens
caatgttcatcttacatatgttggttaatgtctcatgtctccctaaaaccaaactgtgctctgaccaccctgggcacatcgtcaggacctcctgaggctgtgtcacaggtaggtgtcttcaaccttggcaaaataaactttctaaattaactgagacctgtctcagattttcagggttcaaacattttggtaaccactgaaggattctgagtggagatgcccctgacttttcacaagtctcctattggtgcttggtaccagcttgagctaactttatggctcaaaccaataagacaatttgctgaggcctggaagcacctccccctgtgccccacccctaccccctgccgcagagaatccctgatctctcaaaatttggtcgagatctaaagtttattttgttttacaacttctctttttggagttttacttgcttccgatacaaggaaggcaagttttccctgcttccatgacgatggaaggcaggtaactcctttatggagttcgagtttgcttccaacagggaagatgaattttttttttttcctgctcccaggatggtggagatctgagttttcagcctgagacccatccctagggragtaactgaattgtggtttgtcttagctaaagtta

SEQ ID NO: 947709 - DNA, 597 bp, Homo sapiens
tttttttagagacaggagtctgactatgttgcccagggtcataaactcctggcctcaagcggtcctcctgccttggcctcccaaagtgctgggattacaggtgtgagccatggctcccagcctcttgctaagaactattttaaatcaacaaggaagagaaagcaactatcccagagggaaaaaaaaacagagtccagaccccagtgtgtccagggtgagcataatcctgagggaataattgagctgatgcccaaaaaggtgcctacacaggtgttcagggggcactttacaacagtcgtcacctggcctccgtttgcaactttgcaggaggtggaagggagagcacctgaccagcatttcaaatgttcaacaagattcactgtagccagtgtcactatttggagagctccagatgtcactctttggagctcctggggcaggattcatcaaatgaatatgccatagaggctgtcaaggttcrggggaaatcaactcatctgaaatcaaaagcccaggctgcactgattatattgaagagggcgcagtgagagcttccagctcatcagaagaaaatcctccatgcctccaaccgtgttg

SEQ ID NO: 947710 - DNA, 640 bp, Homo sapiens
caagatgaaaattttatagattggaattttggaaaacaatttaattggcttcatgatgttattagggcttattgtttggaaaactaagtctcctgtctcaaagaatgaaggcttttgccttttttttttttttttaaatccttgaggtatcactttgttcaaatgagtgaattattttacaatgacttgtaatcctactttgtaatatcaagtgttttaaaccttcaaaatttgacaaactttccaaaatcaaattataaattatgtctttttctaacctaatccttgaagatattattaataggttccctaaagtccaaaaatgacatatttggcttatttggtataaaaaattatacaggaagcagtgtcaaatataaaatggtatttggtcttctttgggctatatttgtacaaatatgttactggtatgtgttccaaaattataggaaactcctataattctgatatgacctaatatacattatcagtaatgattataattgttatgttaaattattttgtgccacagaggtaacaatttccttgtcaattgtgtctttgagtatggctgccctaaaactttttatcatccacaarcaatcattgtcttgttttggtcctctttagaaggtggttt

SEQ ID NO: 947711 - DNA, 729 bp, Homo sapiens
tctaacaggtgctcttgaatgctggtttctgataacwttagagactgtgacatcagaatagaggaaaaactttcagggttcatggagagctgaaatgttcataaatttgaagcagaacaggaattaactgcatggactaaactaatagaagtgtgaagtaattgccaggtgtggtggctcacgcctgtaatcccagcactttgggaggccatggtgggcggatcacttgaggtcaggagttcgagaccagcctggccaacatggtgaaaccccatctctactaaaagtacaaaaattagctgggtgtggtggtggatgcctataatcccagctacttgggaggctgaggcaggagaattgcttgaacccaggaggtggaggttgcagtgagccgagatggcgccactgcactccagtctgggcaacagagtgagactccatcacaaaaaaaaaaaaaaaaaaaaaaaagaagtgtgaagtaatctttttgactttttgcttaaaacattgtggatcctttcttttgtttttcagagtcaagaaaactttaagctatttacagcttttaacaattgagtatactcctgtgaacaaaatttggagcatatttgtttctctctacctaatttttacagaatttgaaaactatctgtgagtattcgtaacttatgacaatacagttatttgcataagtgcagtaagaatctgttttcatttgtaacaggacac

SEQ ID NO: 947712 - DNA, 639 bp, Homo sapiens
tagattgtaaacattttgctatatttgtgtcatgattattttttgcttgtgtttgaaagtatattaaagaaaatgatattttacccctaaattmtttagtgcagatttctaaaaaataagaacattttcctgtatggttacaaaatcatcttttcaaacagaataaaaaatagtttttttatatcatttattacccagtccacattcagatttcctcaattattatgaaatgtccttttattttttgagacaaagtcttgctctttcacacagcctgaagtgcagtgaaacaatcatagctcattgcagcctcaaactcctgggctcaagtgatcttcctgcctcagcttcctgagtagctaggactataggtgcacaccaccatgcccagctaatttattgtttttgtagagatggaggtcttactacgttgcccaggctggtctcaaactcctggcctcaagtgatccttccagcttggtctccctgaaatatcttttgtggctggtttgctcaaattagtttcttctaatcaagggacacacattgcatttgattatttagctcaagacttttttaacctggaaaataccctcactctttgtttatgtatttatttaatgaaattgacttgttgaa

SEQ ID NO: 947713 - DNA, 585 bp, Homo sapiens
tgccccctcgttagtgcccttgatcgctaataatctcagagcagaaaaatggttttatctttcttagttgctattcagagggctgggggtgggtgattgaacttctctgcttgagaaagaaaagttgctctaggtaagatttaattttactaaagaaaattctcaaaatgactttttccccttaatatttttttgtccttgaaaacagaacccacacaatacaggcagacagttccctaaagtctttgttctctaacaaagacttagagctgagtgcaggcagaggcatggaatcctcactttctcccttttaacacgaagctcaggcttttccaagacatcaggccacaccttaatgaccaagtgcccatcagaagctttgtggtgagagattagatacaattccaggtaaactggagcccacagcccctgtttttcctaatgaagtgtgtctgtgtgtgtgtgtgcatgtgtgtaagagctgaccttgtacttttaaaccatagccaaagatgcagaagagcttattttttctttggrgactgtattgctcttttctctgggaaatatttgttggtgttttct

SEQ ID NO: 947714 - DNA, 614 bp, Homo sapiens
tgaaggctggttatgggacacrttactttcatactttgctgttcaataaatgtggggtggagaataaagtaaattgacagaattaccatataaaataaaattctaagtcctctgacaacaaaagaaacttataacacacacacacacacacacacacacacacacacacacacacacagagttttccctgctaatcattttacatctaaacaaccaagtagctaacccagagcccacaaaagcagagtaaaaattctaacacttggtaaaataaaaatgcacatatatccctgtcatctaaaaaaaaatgcttacgtattcaaagacagcaattacagctactgagaacatcattgttagcaaactgaggcagagaaaacaaaggtgctgatgaggatttgaaccacctaagctgcagaaacccactggatggtttcctaggttccaagttggcattatctttcagaacgatcttctagaagagatcacataacactgttacaaaggatctggagaaagggaccctggcttcatcactctggctctccagtcatgctttacattttcacttcttacactctctttcataggaagtcaatttacaggcctccatc

SEQ ID NO: 947715 - DNA, 614 bp, Homo sapiens
tgaaggctggttatgggacacgttactttcatamtttgctgttcaataaatgtggggtggagaataaagtaaattgacagaattaccatataaaataaaattctaagtcctctgacaacaaaagaaacttataacacacacacacacacacacacacacacacacacacacacacacagagttttccctgctaatcattttacatctaaacaaccaagtagctaacccagagcccacaaaagcagagtaaaaattctaacacttggtaaaataaaaatgcacatatatccctgtcatctaaaaaaaaatgcttacgtattcaaagacagcaattacagctactgagaacatcattgttagcaaactgaggcagagaaaacaaaggtgctgatgaggatttgaaccacctaagctgcagaaacccactggatggtttcctaggttccaagttggcattatctttcagaacgatcttctagaagagatcacataacactgttacaaaggatctggagaaagggaccctggcttcatcactctggctctccagtcatgctttacattttcacttcttacactctctttcataggaagtcaatttacaggcctccatc

SEQ ID NO: 947716 - DNA, 632 bp, Homo sapiens
caggcgcatgctgccaggcccggctaattttttgtatttttagtagagacggggtttcaccgtgttagccaggatggtctcgatctcctgacctcgtgatccgcccrccttggcctcccaaagtgctgggattacaggcgtttgagcccccacgcccggctgggatgcttatttttttaattatttctttttttttttttaaacttcctgggtacatgtgcaggctgtgcaggtttgttacataggtaaatgtgtgccacggtggtttgctgcacctatcaacccatcacctaggtataaagcccagttttatacgtaggtattagctatttttatttaatgctctccctccccccaccccactccccgacaggccccagtgtgtgttgttcccctccctgtatctatgagttcccatcgtgcagctcccacttacaagtgagaacatgggatgcttatcaacaatgctgcgctgggtctcctggcacatgcgtcccgtgtgctgaggttagtcacctagaagagaaattgccaagccctccaatgtgggcgtgttctgatttctcaggaatgccgggttatttttctaacggctgtgttgaaaagtgccgggaagtttccgtgactcctcc

SEQ ID NO: 947717 - DNA, 644 bp, Homo sapiens
  misc_feature 1, 2, 3, 4, 5, 6, 7, 8, 9, 10, 11, 12, 13, 14, 15, 16, 17,18, 19, 20, 21, 22, 23, 24, 25, 26, 27, 28, 29, 30, 31,32: n = A,T,C or G
nnnnnnnnnnnnnnnnnnnnnnnnnnnnnnnncttctggcaacacgtgtgcccgtggacccaggcctgtcacatttccgatcaataataagctggtttcaatagtgatgtgatctaactccagttccacagaacctacaattaactggaatagattttccttccccttttacaactactacaagaaaacagtcaaattacatgcaaatacagtgctcttaggaatgtctgtttaaattgtgtaagatttgagcatctattgaatgaaaggaacaaccagtatttgggggaaggatggagcaggggaaggccctccaaccccatctgaggctctgaggagctctggggcctgctggacaccggctcttccagttggtttctggttccctgcagtggggctccccaggaccccttccagccctactgaagcagaatgtctgaaagcgaggcctgcagggctgaagagttaaaattctgatgcacccaaatgctctgcacttcagtgtttatgcctgtaaagtagaagtgacagtgtttccctccratgtttgctgtgtgggttccagagttcacgtctgcagtgggttccagcccaggttggtgcatggtgaggcctcatgtttgctgtgtgggttccagagttca

SEQ ID NO: 947718 - DNA, 556 bp, Homo sapiens
atcatcaggaaatggcctctccctggtgctggctgccaatttatgactttttagagaggcaatgtgataattgccaaaccattgctgacattcctagatttggggaagagtcctctcctgccytgctcctgcctgtctaactacccataataggaacagtcatcttatatagtatctcacagggattctctgcatttgttcaatttgaatgattacctctttagcgaagttggggtaatttttatgaataatattctcaaaaaagttttaaagttgcttgctttctctgctctttcagggatgccaatgagtcgtagatttgatagggttatgtaatcccatatttctcataggttttgttttatctttattttttattctttattttttgtctgactgtgttatttcagagaccagtcttcaagcactgagattctttcctcatcctggtccatgttgcttttagtacttgtgattgtgttatgaaattattgaagtgagtttttcagctctatcagatcactgcttttgtttactttttttttttaatgattgt

SEQ ID NO: 947719 - DNA, 605 bp, Homo sapiens
gccatggcatgcagatggagaagkgcaattcaagctaaacatccccttaggggactattcagtaatgattccatgggaattattgtgcagcacctctgcctgttctgcaatgcaatcttcccaaacaagcacatttattttttctgaccaggtccaatcctgtttacaaataggtttttgatgtggtatgcctcagttataggagcagatttattatggtaaatactaagaccagaaagcaagtgtaactgtgtcatagagtgattacatccaggcattattgccagccaagattgatagtgaaggtgtaggcaactagtggcctttcccaaacagataggcagatgttcaaatcctaaagaaatattcataacagttccttcctcctgtgggtgagatgggcctctatcatctgtaggactgaacatccaagagctatcattagtgtatacctccactggggggtccagccaagttacaggccgtagaagtggtggaaaaggtaaatatgcccaataagtataattgttctctgtgtcagcccttgttaaaggaatactctaggcaatggtgatcaccactatcatagctatcattaagttact

SEQ ID NO: 947720 - DNA, 579 bp, Homo sapiens
  misc_feature 298: n = A,T,C or G
tggatgtcagacaagcatctcaaccctgacatgkccagcaccgagctcctggacttctctcccaaactggcattcttctccatctcagttaatggcaagttcatctttacagttgctcagattaaaataagagtcactgtagtgagttgaatcatggctcacaaaaaggtatgtccacatcctaacgccaggccctgagaatgtgacctgatttggaaaagggatcttttttttttgagacggagtctcactgtcaccaggctggagtgcaatggtgcgatttcagctcactgcaacntctgcctcccaggttcaagcaattctcctgcctcagcttcccaagtagctgggattataggcaactgccaccacatctggctaatttttgtatttttagtagagactgggttttgccatgttggccatggctggtcttgaactcctgatctcaggtgacccacttgccttggcctcccaaagtgctgggatttcaggcataagccactgctcccagcctttatttttaaataatcccaaatttcaagagggccaattgcacttctagtgcctgcagtaaac

SEQ ID NO: 947721 - DNA, 624 bp, Homo sapiens
gttgctggggaaagcctgcgttttgggtgtgcctagggccagggctcagaccattatctccctgcagccttgcatgccttcccttgcctggctaccrttctcatcagaaaaagcaggattcttgctttaagtcctggtgatttacatggagaataataagttctggtttaatcatccctccaaagatgaagaaattctccaccgagcccactcttctcttgacttctgttcagaaatcaagtattaatataaatcgaagctctctccttcctcccatgccagaggctgttctgcaaagctgccattcatagggagaactggcgatgaagtgtctgtcaaaaggactgtttttacaattgggacctgcctgtagtggtgatgaggtaatttcttcttaagcttctggtatccaaggagagaaaaaagaacagcaaaacaagctctgttaataaaggtgtgagagtctttgggtgtttgctgttattaaagagaccttaaggaaggctgcttctgagctaaaagcaaacttttgtcaaaggttcattttagaaggttcaaaagacaccagagagagagagaacaagaggcaggaagaggcaggcacagagagaggggatgagagga

SEQ ID NO: 947722 - DNA, 582 bp, Homo sapiens
atcacctgaggtcaggagtttgagaacaacctggccaacatggtgaaacccatctctactaaaaaaatacaaaaattagccaggcatgatagctacttgggaggctgaggcaggagaatctcttgaacccgagaggtggagtttgcagtgagctgagatcatgccactgcactccagccttggtgacagagcgagactccatctcaaaaaaaaaaaaaaaaaaaaaaaaaaaccagaagagagcaaccaatacttatgaagcctctgatagttactcaaatgccaccagtaaacccacgagacgcacaggctgggattggtaaggcaacttgcccaaggtcacccagctaaaaaaggctaaaggcgggcgagaggggagctccagaaccaccccaaacacactgcctcccccacaccactgcctccccaacactgccttcaagaaagagaaatcgaaggacctggacaatttgcaagctgactgcycagcttctggactcatccaccgcgtttgtcagaagtccctgcagatgcccggccactatgccagtactctcgtctcgggctgcacttggaactggg

SEQ ID NO: 947723 - DNA, 660 bp, Homo sapiens
atttcattaagttgatctttaatctctgatatcctttcttccacttgatcaattcagctattgatacttgggtatgcttcacgaagttcttgcgttgtgtttttcagctcctccaggtcatttatattcttcgttaaactggttattctagttagcaattcctctaaccttttttcaaggttcttagctatcttgcattgggttagaacatgctcctttagctcagaggagtttgttattacccaccttctgaatcctacttctgtcaattcgtcaaactcattttctgtccagttttgttcccttgctggcgagaagttgtgatcctttggagaagagacgttctggtttttggaattttcagcctttttgtgctggtttttcctcatctttgtggtttatctaccttcggtctttggtgttggtgacctttgggtgggatttttgtgtggacgtcctttttgttgatgttgacgctattcctttctgtttgttagttttccttctaacagtcaggtccttctgctgcaggtctgctggagtttgctggaggcccactccagtccctgtttgtctgggtgtcaccagcagaggctgcagaacmgcaaagattgctgcctgttcattcctctggaagcgtcatcccagaggggcacccgc

SEQ ID NO: 947724 - DNA, 567 bp, Homo sapiens
ctctcctctgaacattctgcaaatctgagaaaatgcctgttgttttacttgataggcaggctgagattgtctagaagtctgtgtccactactagccaataagctccacaaggaaaggtattttgtgtattattcattttcacatccatcgcacttagcatagaccttggcacacaggaggagttctgagaagatttgtacatgtttactatacatgcaacctacagcctccttatgtgtaattgtgtagatgaagtatgtgtgtgtgtctatgtaaatagatgtacatatattcatgcaatatatttatgataatgtttttgagggagtaggaaacacttgttattgtgttagtgatactgatttatttaatcatcaagtgagatcacaggagcctctttcctaaagcaaggatttcatattttctatacttccattcttatattttccattttagagtgactcagaccacacagccacacacagtggattctkacatactctttccacaacatccttagggagggaatgaatgcttttatcttcttcactggaaagacgggagatg

SEQ ID NO: 947725 - DNA, 615 bp, Homo sapiens
ccactgtacctgttttctggggcctaccagaccacgggacacgttggaaggagggtctttggtcttgaagtttggaggtgaggccccagcaggaaggagaactaaggtgacagatgtatgccttttggatggggcctggtttgggggcatttcatagtcccatgccaatcccaaggcaccactggtagcccctttgtgaggatctgtcagggagagagtgaacaagatgttgcctcagcattttaggaccacagtttcctcatctgtatgagtggtttcagtaggtgacctcaattttggggagactgaattgtgtcttcccagaattcatatgttgaagccctgaccctcaatggggctgtatttggagatagggcttttaggagataattaagattaattgagatcataaaaatggggtcctatccaataggattggtggccttataagaaatctctcttgctgggcgtggtggcttacgcctgtaatcccagcacttttggaggccgaggtgkgtggatcacgaggtcaggagtttgagaccagcctggccaatatggtgacaccccatctctacgaaaaatacaaaaaaaagaaaaaattagctggatgtg

SEQ ID NO: 947726 - DNA, 418 bp, Homo sapiens
tgtcttctccactgccgatccatccattccacagcagacatgagttgagcttcccctacatgccagaagcagctcctggcatgtgctggggaaacagctatggatgagacagatgacatctttgccctcctggagctgacacatgggggagattgatgatcaaaagaacagcagcaatgccccgaagctaaagggcacaggagaaagctggagcagagagggtgtcgcacgggctccggtttgataagaacagcagggcaggcgtcttgaggagctctgtgaggggaagcatcatgtctttgtctcccccatggggtctggccccttgtgcctcctccaggcctatcttgtggattctttcattcatcttacatagtcagaacatccctyatgaggcttcttcccctgaagaagtgtg

SEQ ID NO: 947727 - DNA, 515 bp, Homo sapiens
cagggtggagtttcccaatcctgagggtactgcaggagaccagggtgtatttcagtccttatctcaactgcataagagagacactcccagagcggccgtttatagacctccccctaggaatgcagttcttttcccagagtgttaatatcaatattccttgctaggaaaagaatttagcgatatcttccctacttgcatgtccgtttataggctgtctgcaagaagaaaaatatggctctttttgcccaaccccgcaggcagtcagaccttatggttgtcttcccttgttccctgaaaatcgctgttattctgttctttttcaaggtgcactgatttcatattgttcaaacacacatgttttaaaatcaacttgtacagttaacacaattatcrtagtggccgtaaggtgacatacatccccagcttacgaagataacaggattaagagattaaagtaagacaggtgtaagaaattatgaagtattatttgggaactggtaaatgtccatgaaatc

SEQ ID NO: 947728 - DNA, 618 bp, Homo sapiens
tctgtatttttgccccattttctaattgttttttttttcttttttaaagttgcacattgaaaattatattctagatgttagccccttattgtatgtgtggtttgcaaatattttctcccagtcttcaaattctttcatccttttaacagtatcgtttgtacagcaaaacttttaatcttgatgaagcccaattatcaatttttccttttataaattatacttttgatatcaagtctaagaacactttgctttgctctattgcctaaaggatgttttctaagtttttattctaaaagttttataattttacattttagtccatgatccagtttgagttaatgttttactaacttttgagacttctgttgaaattcattttattatatatggatgttcaattgctccagcaaaatttattaaaaaggctatctttcctacattgaattgcttttgcacttttgtcaaaaagcagttggaaatttgcatggaactgtctgagttctctgttctgttttattgaactatatgtctatccttcagccaaaacagcactgtcttgattatcgtgmctagaaaattagacgaagttagtagaatgctatcttccactttattatt

SEQ ID NO: 947729 - DNA, 630 bp, Homo sapiens
gctcatctcacgtccgtggtgttacacagcaggttctatcccatagccttttttttttttttttttttttttgcaagttggcagatggacttagaggtttaatcagattcaagtttgaatctttggcatatctgccttacgggtggtggttcctcctactgcatcccatcaggggacacgaaatgtctgcctgtctctccttttgtgatattagcagccattgatgattattgcctggtccactaatgcattaggggtggctccatggccaccatcttggtccatcactccttcctcatttatttagctagaatactcctagagagagaaacttggctcctcagtggtttggttgccctgaactacagctcacttagggaagacaggataaataggttgggtttcaacctccatttatgagttaaaaaaaaaaaaagaatcaatttcctagtatccgccaaagtagctaatgaatttttccttttgtgagggcatgagggggagtatcattargaatttgaggatttaagcatatttgatgtattttaaacaatggcaattctatccttattgacacccacactgtcccatctcggccagtaggagccttctcacgttggctctgaatcc

SEQ ID NO: 947730 - DNA, 628 bp, Homo sapiens
ccctcacaagaccccagggacagagaggtcataggggctgcaggattaggccaggtcactgtctcggggaggagttgggaaagggcttgaaagccccctgttacttctgtgccctgatgtccccaaatcstctggccccctggcctgagtgtttcctttagcaagcaaatgaaatggccccagcaccttcccagcatccgagcactgaggaaagtcagggctcacccagcactcctgtggggagaggcgggaggtccttcttccatcccctctcatcgggtgccctgaaagtcagtatcacgaggctgtcagtgggaacagacagaactgaccaggaaacaaacttcacggtcaatgttagatttcctgtttctagaaaatacattggccatttccagctacagagactcccttcccaggctgcccactggctggcccccgtcctccccagggctctctagaagagacagtgtggggtgacagagagagctggctttgcaaccggacaggcaggagttcaaatcccaggctcccgtctcactggctatgtggccctgtgtgaccctgggatctttccttcctgagtctcaattcatccatctgtaaaatgggagtcctgaggccctat

SEQ ID NO: 947731 - DNA, 621 bp, Homo sapiens
atttctttattccaggggttctcacactttggcaagagtgtgagatgtgcagttgctgggccctacccagagtctctgggtcagtagatctgccttggggcctgagaatttgcatttctattaagtgcccaagagttgttaatgctgctggtcagggaccacactggtcagggactgaactaggcattggtgcagtatcacctgggaccctcgcagagtgctctatggcaaatatttcaaaaaagcccttgccggccgggcgcggtggctcacgcctgtaatcccagcactttgggaggccgaggcgggcggatcacgaggtcaggagatcgagaccatcccggctaaaacggtgaaaccccgtctctactaaaaatacaaaaaattagccgggcgtagtggcgggcgcctgtagtcccagctacttgggaggctgaggcaggagaatggcgtgaacccgggaggcggagcttgcagtgagcagagatcccgccactgcactccagcctgggggacagagcgagactccgtctcaaaaaaaaaaaaagcccttgccacagagcaggttcccccaccccatgtcayagtgaatgccactcaagaccaaagagggtaagtaac

SEQ ID NO: 947732 - DNA, 633 bp, Homo sapiens
aatgccttgcttcattcaagtcaccccagacaaactaagggagagctaacctggggacagtcgctcctcaaatcttagctcagagaatgttcgagcctgaggggccttagaagtcattcacttgagccccttcatctcacagaaaaggacatcagattcccagggggaaaaagaactcatttgaggttactcagcaaattaagagaccgaactgatgttagagccccaagtcaaaactgttagtggcaaatttttatgtgaaaggatctgagtttgagttctggctacacacttagaagttgtatgactgtggacaagttactcagcctctctgagtctctgttaactcatctgaataatgggctcatcataactacagatgcgagtgaagtgcccggtagagtggctgccacgtcatctgtacaaagcactgcagttactattattgctggctattgttattcagttgcagcaggctacttaaacagtagaagatagatttggagttttctttcttgccaagcattaaaaaaaawttttttttttgagatgggggtctcgctatgttgtccaggctggagtgcagtggctattcacaggtgcaatcttggtgcacaacagcctcgaactcct

SEQ ID NO: 947733 - DNA, 631 bp, Homo sapiens
agcacactccccaccctggacctggacgcctccgtctctccaaggagcccagttcctgttagcagggatcttccttctctcttgattggtgtagctacttttcacttttgrgagcacctatgaatctgtcagtcatttctgagtctattttatgcctccaattattcttatgagctagttcaataggaaaaatagctctttctaaggggtgtgtgtgtttgcacgacgggggcgggggagagagaaagagacagacattttgtaaaagactggcatatgtattagtgtgagattaatgagggcattaaaagaggctaaagacgttgtcaccatgctagtggttttcaggtcccccaaatccttgactcttcctcccatgatcttcgattttcccaaaatatccctgcgtcctccctggaaagccccagaatgttccagaagtgagagcaggctgggggccgggcagcactgtaggcaggactagagggtggtcgggatgcggtggtggtgagggggcgacagacccagaaggctgagggttaggaccacagaggacactgtcacttagaaggaaaatacataggatcaggcccccctcgggcctctccagtgtcccctcagcttccacacc

SEQ ID NO: 947734 - DNA, 769 bp, Homo sapiens
tttaccaaagatttcattagaggaattccccacggcatccagcgccttctacaacagtcmcagcctagaggaaacagatccctccagcaccttctcccagcccagcacaccaccaatcaggctgatctctgtctaaagtctcttctcaactggagtgctgctatgaggctttactggtggatttaaaaaaacaaaaaaaaaacaaaaaaaaaacccacaggtttttttgttgttgtttttggttttttataatttttgacacagggtctcactttgtcacctaggccggagtacagcacaatcatggttcactacagccttgacctcctgggctcaagcaatcctcctggcctcagcctcctgaggagctgggactgttggcacatgccaccacacctaactaatattttaattttgtatagaaaaggggtctcattatattgtccagactggtctggaactgctgggctcaagtgatcctcccaccttggcctcccaaagtgctaggattacaggggtgaaccaccgcacctggcccccagcaagtctttctgaaagtgggtaatatgagctcttgaggaacaggaggaagcatgggatgtagccctctctagcagtctggctagaggccgaattagcattcgtgaaacagcagcagctcagggcaggggaatggagataaactgggaaataaagacggaaagggcctttggtggaaggagggatattcttctgggcttccaaaaggaaattgctgcaaactactttc

SEQ ID NO: 947735 - DNA, 597 bp, Homo sapiens
catggccaacagtctctaagcatctctgatgctgccatcgctgctgtgctcatcagcgccaggtgctgctctcccacccctgtccctgtcccatcacagcctgacaattctcagccacaacaaggagctttgttggtggaggagggaggaatatggctagaacctctgtaagctgactttctgcgggctggggacagtccacgctaaagggtagctgccattcccctgggggctccaggtgccaggagtgagcactctgcatcttccccctgaccaagctgctcctcctctcttggcttccaacactggcactggcctcccgggacccatgctacctccagacttcaactggcaacagaaaagagacagagggctgggtgcagtggggtgcctgtaatcccagcactttgcagggatcacctgagcccagcagttcaagaccagactgggcaacacagagagagcttgtctctccacaaaatttaaaaattagtcgggtgtggtggtgtgggcctgtagtcccagctactcaggaggctgaggttgggggatggcctggcccrggaggtcaaggctgcagtgagcggagatcatgcc

SEQ ID NO: 947736 - DNA, 660 bp, Homo sapiens
gcagcaaacttttaatattgattaagcagcctgaacaaggtgattgtgaggccaatacttctgagttgttctttgccaggtccagccatagtcaatcaagttaattctcactcccatagctctctcttttctcatccccagagagctctaaaatgtctctgcttatctgagtgctttctttatgcattcaaacatttattgggcacccactacaagcaaagaactggcagcttgtgtggggttatcctgatggatccgcacatgaagtgtgtacttagtgcatggggtgattaaatatcagacccccttccgtaaggaaggaatctgcctgagcacctcagagagtgcaagtggatcccatctacggcgaaatgtaggtgctcacgttgggaagtctgcccccctagtaggagaaggagcactaggttgagaaatggccctgggttggggagatgggcagtgtcctgcggaggtggagagtgcccagaaataactggacacttagtaaacaatagggagaatcatctaattcaatccrcaatggagccggtagaagatttgtggaatatgctatcttattttcaatttaaaaaatattttctgggctggtgacggtggctcatgcctctaatctcagcagtttgggaggtcgagaagggc

SEQ ID NO: 947737 - DNA, 653 bp, Homo sapiens
ctgttcctggcggccacagaacaataccttctttaatggctcccacagtgaccagcacgtgccttaaactcagagcaggtcaatcaatcaaactccttttaactgaaagtttaggatgtgcttttgccacactctcaagtaagtaagtaaattcatcagcaaataccaagtcctaaaataatgaatggtacttaggaaacacataaagagtggtagaaaactagatgggctggggtcatcctgtggaggccctggacggcccggctaaagcatttggaactcctctgtagaagtgttttgataaagaaatgatgtgattgaagctatgcttaatagaagatgaatttggcagtaggatgggctggagggagacagtcgctgtggtggtagaaagaagaggtgaagaagtgttgccaagccaggtgagagcgtttgctaccatctgcactagcacgcagcgccgttcctctagggcccctggagcttaaggtagttcttttctcacatctgtcgcacttaggaagatcacatggtgatgctggcttttattctccctccctttcttccttctaataattagcaagcaacagttatctgccagacactgtgctattacacaagggrgagagagatgaaaggcagtctctactctg

SEQ ID NO: 947738 - DNA, 562 bp, Homo sapiens
caaccgtgaaggatgcatcaaagtgggcagcgctgtgggatcaaatcccgacctcccacaactacatcaaaacatacacaaaacaatcaacaaaatataatacaactgttgcagcagcaaacaagggccaaaaggcccaaactgaaacagttgaggtgcttcctctctctgtctgtttggcttgttcaacctgcaaatggaaagtcctttgaaatttctcaagctgagaggagctgatctcactgtctggtaaccacaaaagacactcagttgccaagacacacaagcaattactaacaagccccaagagtgtacaaactgaaacagtcagagtgctttcctctttgacagttgggcttgttccatctacaaatggaaattcctccagaatttcccaaattgagaggagctgatcctgctctctgagcccacaaaagacactcacctacccagacactgatgccaaattaaaaaggctgttcttaggcaatcaagaatgcagttggagctggcaacrgtggggctagagagagagagactgaaaccaacctctggccaaaaa

SEQ ID NO: 947739 - DNA, 562 bp, Homo sapiens
caaccgtgaaggatgcatcaaagtgggcagcgctgtgggatcaaatcccgacctcccacaactacatcaaaacatacacaaaacaatcaacaaaatataatacaactgttgcagcagcaaacaagggccaaaaggcccaaactgaaacagttgaggtgcttcctctctctgtctgtttggcttgttcaacctgcaaatggaaagtcctttgaaatttctcaagctgagaggagctgatctcactgtctggtaaccacaaaagacactcagttgccaagacacacaagcaattactaacaagccccaagagtgtacaaactgaaacagtcagagtgctttcctctttgacagttgggcttgttccatctacaaatggaaattcctccagaatttcccaaattgagaggagctgatcctgctctctgagcccacaaaagacactcacctacccagacactgatgccaaattaaaaaggctgttcttaggcaatcaagaatgcagttggagctggcaacggtgrggctagagagagagagactgaaaccaacctctggccaaaaa

SEQ ID NO: 947740 - DNA, 571 bp, Homo sapiens
ccagatggatgttaggtatgaggcttatttctgggctctctattctgttttattggtccatgtgtctgtttttgtaccagtactgtgctattttggttactgtagccctgtggtatagrttgaagttgggtagcatgatgcctccagctttcaacagtcaagctgagagccaaatcaggaatgcaatcccattcacaattgctataaaaagaataaaatacctaggaatacccctaaccaagtgtattagtccattttcacattgctataaagagctaccttgactgggtagtttataatgaaaagaggtttaattgactcacagtttttcaggctatagaggaggcaagactgggtgaggccttgggaaacttacagtcacgacagaaggcaaagggggaagcacacacgtattcatgtgacaggagagagagagagagaagggggggatgccacacatttttaaaccatgagatctcatgagaactcactcactatcacaagaacagcaagggggaaatccgcccccatgatccagtcacctctgaccaagtccttcctccaaaagtgg

SEQ ID NO: 947741 - DNA, 651 bp, Homo sapiens
gctgctatagatttattttgtttwaaaaaattaattgacataataattgcacatattcatggggcatatgtggtatgttgatacatgtatacaaagtgtcattatcaaattatcaaactgcaaagtgtaattatcatcatcctcaaatatctatcatttctttgtgttggtaacattaaaaatcctctcttctaactattttgaactatacaatacattattaagtatagtcatcctgctgtgctatagaaccctagaacttattcttcctatctaaatgcaatattttacccattaaccaagctcttcctattcttccctccctgctacccttcctagactctgataaccactattctactctctccttctttgagatattttttttttagctcccacatatgaatgagaacatgttgtatttgtctttctgtgcctggctcatttcacttagcatacaaaaaatcctaaaaatagaattaccatatgatccagtaattccggatatatatccaaaggaaagaaaatcagtacatcaaagagagatttgcacttccatgtttattgcagcagtagtcacaatagccaaactattaaatcaacctaagtgcttatcaatagataagtgggtaaagaaagtatggtatattg

SEQ ID NO: 947742 - DNA, 609 bp, Homo sapiens
atagatttattttgtttaaaaaaattaattgacataataattgcacatattcatggggcatatgtgrtatgttgatacatgtatacaaagtgtcattatcaaattatcaaactgcaaagtgtaattatcatcatcctcaaatatctatcatttctttgtgttggtaacattaaaaatcctctcttctaactattttgaactatacaatacattattaagtatagtcatcctgctgtgctatagaaccctagaacttattcttcctatctaaatgcaatattttacccattaaccaagctcttcctattcttccctccctgctacccttcctagactctgataaccactattctactctctccttctttgagatattttttttttagctcccacatatgaatgagaacatgttgtatttgtctttctgtgcctggctcatttcacttagcatacaaaaaatcctaaaaatagaattaccatatgatccagtaattccggatatatatccaaaggaaagaaaatcagtacatcaaagagagatttgcacttccatgtttattgcagcagtagtcacaatagccaaactattaaatcaacctaagtgcttat

SEQ ID NO: 947743 - DNA, 609 bp, Homo sapiens
atagatttattttgtttaaaaaaattaattgacataataattgcacatattcatggggcatatgtggtatgttgatacatgtatacaaagtgtcattatcaaattatcaaactrcaaagtgtaattatcatcatcctcaaatatctatcatttctttgtgttggtaacattaaaaatcctctcttctaactattttgaactatacaatacattattaagtatagtcatcctgctgtgctatagaaccctagaacttattcttcctatctaaatgcaatattttacccattaaccaagctcttcctattcttccctccctgctacccttcctagactctgataaccactattctactctctccttctttgagatattttttttttagctcccacatatgaatgagaacatgttgtatttgtctttctgtgcctggctcatttcacttagcatacaaaaaatcctaaaaatagaattaccatatgatccagtaattccggatatatatccaaaggaaagaaaatcagtacatcaaagagagatttgcacttccatgtttattgcagcagtagtcacaatagccaaactattaaatcaacctaagtgcttat

SEQ ID NO: 947744 - DNA, 698 bp, Homo sapiens
aaaatattgatagtgcagaggaaaataacactaaatatatatcattaataaggcatagcaagttatagcactactcttatatttagtagtcaaatatatggttattactataatttagaatacagtgaaaactttcttctcaacacggcttccttaaacactggtgtactttactactttttgttgcttccaatccactaaagcaagaatgacagacaaaaggaagtacaataagctaggaggtagacaaagtagaaggtgatacattactaagcttgtcccagcctcatgagaaacttatttggtttcttagtcacattagtaatccctggagactcaagaaccattcatctggtccaaaagaatgagaaaataattttctggcctcttccagtctcctttctctcaatgctaagtgttcaccctatggcatttaacttcaccatacacctagactctcaagcagcccttcctagcagacagagttcctcagattcaggattatgttattcagaacttctgtaaagatctactctctgtgaattaggttgagtcagacatgggtgctggagtatttgtaacctgatttaattataaaagtgaaagttatactgaagcctgattcttgccattgaaagactaggacaggtatgttgtagtgrtgttaggcaaagaggcaatagcaatggtgaccaaga

SEQ ID NO: 947745 - DNA, 543 bp, Homo sapiens
gtgggtgtagcaccctccaagccaggggcggtatataatctcctggtatgcatttgttaaayccattggaaaagcacagtaatagggtgggagtgacccgattttccaggtgccatctgtcacccttttctttgactaggaaagagaattccttgaccccttgcacttcccgggtgaggtgatgcctcaccctgctttgggtcatgcacagtgcactgcacccactatcctgcacccactgtccagcactccctagtgagatgaacctggtacctcagttggaaatgcagaaatcacccatcttctgggtcgctcactctgggagctgtagactggagcttttcctatttgaccatcttggctccaccccccaggaattcttaagagaatctgtgacggtcaatactgagtgtcaacttgactggattgaaaaatacaaattattgatcctgggtgtgtttgtgagggtgttgctaaaggagattaacatttgtgttagtgggctgggaaagccagacccatccttaatctgggtggacacca

SEQ ID NO: 947746 - DNA, 604 bp, Homo sapiens
agatcaatggaacggaacagagccatcagaaataacgccgcatatctacaactatctgatctttgacaaacctgagaaaaacaagcaatggggaaaggattccctatttaataaatggtgctgggaaaactggctagccatatgtagaaagctgaacctggatcccttccttacaccttatacaaaaattaattcaagatggattaaagacttaaacgttagacctaaaaccataaaaaccctagaagaaaacctaggcattaccatccaggaaagagatcaaataagaataaatgactattccagggctcaggccacaaaatacatccttaaaatcactatggaatacaaaactgttaagttttgttaatattgttatttagagaagggtagcacggtttaaaaagagaatctgtgtacatactaagcactccataaacattccttaaactaaattggctgatgcctgaataaatctgtaaattaattagctgtggctatgaattacaacattaccacaatggttggtcaatttaaagggatcctagacaggagttgsagcttccataggtggttgtctcagtgttatttcatgatagtctga

SEQ ID NO: 947747 - DNA, 728 bp, Homo sapiens
gcagggagaggcatcgcatcacctgggaagctcaaggggtcagggaactccctctcctagtcaaagaagggggtgacagatagcacctggaaaatcgtgtcactcccaccctaatactgcacttttctaatggtctgagcaaacagcacaccaggagattatatcccacacctggcttggaggttcctatgcccacggagccttactcattgctagcacagcagtctgagatcaaactgcaatgcggcagcaaggctgggggaggggcgcccgccattgcagaggcttgagtaggtaaacaaagcggcctggaagcttgaactgggtggagcccactgcagctcaaggaggcctgcctgcctgcctctgtagactccacctctgggggcagggcatagccaaacaaaaggcagcagaaaactctgcagacttaaatgtccttgtctgacagctttgaagggagtagtgattctcccagcatggagctggagatctgagaatggtcagactgcctccttaagtgggtccctgacccccgagtagcctaactgggaagcatcccccagtaggggcagactgacacctcacacggccaggtacccctctgagacaaaacttccagaggaatgatcaggcagcaacatttgctgttcaccaatatctkctgttctgcagcctccgctgctgatacccaggcaaacagggtctggagtggacctccagcaaac

SEQ ID NO: 947748 - DNA, 589 bp, Homo sapiens
ttctccctgtggtctttccccaattccactggcagtcctccccaaggacccctgtgagaaaaagtcagaaatggcttccctgggaaygagagtacccacagggctctccccactgcttcctctacccctgtattttgcttggctctcttaaattcatctcagctccaggtaaggtcaaatccatctcacaagatctggaccttcgggttccccttctcacactttggtcgctcacagttttttggctgtctcacggagcctgcagtagcaagctgcttccatcaaagggtctgtggattctctcagcttttatgtttctgcagtatttcttggatcaaaagcccacgatgtgagtctctacaggctgctctgtccatccaagtcggagctgagagttagttctgcctcctacccgccattttttccccatcccttcttgtaagggcactaatctctttcatgaggggctccatttttataagctaatttcctccaaaggccccaccttctaataaatacgtcacatgggagattgaggcctcaatataggaattttgggggaacacaaacgttcactccacagcaacat

SEQ ID NO: 947749 - DNA, 589 bp, Homo sapiens
ttctccctgtggtctttccccaattccactggcagtcctccccaaggacccctgtgagaaaaagtcagaaatggcttccctgggaatgagagtacccacagggctctccccactgcttcctctacccctgtattttgcttggctctcttaaattcatctcagctccaggtaaggtcaaatccatctcacaagatctggaccttcgggttccccttctcacactttggtcgctcacagttttttggctgtctcacggagcctgcagtagcaagctgcttccatcaaagggtctgtggattctctcagcttttatgtttctgcagtatttcttggatcaaaagcccacgatgtgagtctctacaggctgctctgtccatccaagtcggagctgagagttagttctgcctcctacccgccattttttccccatcccttcttgtaagggcactaatctctttcatgaggggctccatttttataagctaatttcctccaaaggccccaccttctaataaatacgtcacatgggagattgaggcctcaatatakgaattttgggggaacacaaacgttcactccacagcaacat

SEQ ID NO: 947750 - DNA, 581 bp, Homo sapiens
cattacctgacttcaaactatactacagggctacagtaaccaaaatagcatggtactgttacaaaaacagacacatagaccaatggaacagaatagagaactcagaaataagtccgtgcaactacagccatctgatctttgacaaacctgacaaaaacaagcaatggggaaaggattccctatttaataaatggtgctgggagaactggctagccatatgcagaaaactgaaactggaccccttccttacaccttatgcaaaaattaactcaagatggattaaagacttaaatgaaaaacccaaaactataaaaaccctagaaaaaaatctaggcaataccattcaggacataagcatgggcaaagatttcatgatgaagatgacaaaagcaattgcaaccaaagcaaaaattgacaaatgggatctgattaaactaaagggcttcwgcacaggaaaagaaactatcatcagagcaaacagacattctacagaaagggagaaaatttttgcaatctatccatctgacaaaggtctaatactcagagtcaacaagaaacttaaacaaatttacaagaaaaaa

SEQ ID NO: 947751 - DNA, 601 bp, Homo sapiens
gaagaaaagacagaagagtcaaatagacacaataaaaaatgataaaggggatatcaccaccaatcccacagaaacacaaattaccatcagagaatactataaacacctctacacaaayaaactagaaaatctagaagaaatggataagttcctgggcatatacaccctcccaagaataagccaggaagaagttgaatctctgaatagaccaataacaggctctgaaattgaggcaataattaatagcctaccaaccaaaaaaagtccaggaccagatggattcacagccgaattctaccagaggtacaaagaggagctggtacaattccttctgaaactattccaattaatagaaaaagagggaatcctccctaactcattttatgaggccagcatcatcctgataccaaagctgggcagagacacaacaaaaaaaaaagagaattttagaccaatatccctgatgaacagtaatgcaaaaatcctcaataaaatactggcaaaccaaatccagcagcacatcaaaaagcttatccaccatgatcaagggggcttcatccctgggatgcaaggctggttcaacatatgcaaatcaataaac

SEQ ID NO: 947752 - DNA, 747 bp, Homo sapiens
gaataactggctagtaattggagccatggaattcaaagtgaagttgtaactgattgcacctgggagagaaggccaatgagttttcttcttatgagaaaaatattggtttaacaacttgattctttgtaattatggcccacaaggcaaaggagaataattaatgtatgttatgttggctgtcttttgaaaaaatacttattgctaactacaactggaaatatgcagtgttctgtacattcctaatagcaaccatcacagacatcttgtcaattttgaatatatacgtaaacgctaaaataagaacctcaaatttagatgaagaaataaactcagagaaaaattctagtaacataatttagtaaaatgtgcataacaaacataagcatagagaacagcttatgcaagagtttttttggaataaacagtctgatgagactaacagtatttcgaaaatgcccctgcacattttagtaatttaaaaaatatataatcatacctaagaatttaatcttatgttttaaaatattgatgtccattttttattaatttaatgtaaatgtttgaatgttgtctctatacctggtaagtgttcttgaataatggttgctccattaagcttattttacttgttcaagtataggagaattgctgtgttacgccaaatgattctggaatrttgaaaattattgggttgtttcttaaaccaaagtataggcttgtaggagacaagcacagaaatttaacagc

SEQ ID NO: 947753 - DNA, 525 bp, Homo sapiens
ctgcctttgttctacagcagttcaaatataatatatatagtggtgtgtgtgtgtgtgtgtgtgtgtgtgygcgcgtatgtgtgtgtgtttatcctgtttcatattctctgggctttctggatatgtgatttaatgtctttcattaattttagaaaattttcagccattatctcttcaaagatttcttttgtcctattctgtctcttctctggaattccaaagacatgtactgaatgttaaatagtttgatattttgaatagctcttggatgacctattattttttccactactcttgctgtttgcatgttgtatttcagattgtataatttctaattacctaccttcaagttctctaatttttttttcagttgcatcaaatctagtgatgagcccatcaaaggcatgcttcatctctgttacagttttattcatttctaacatttgcaattaattctttcttaaaattttgatctctctgctaattcacctgatcatgcaatttatgtatctttttcactagagt

SEQ ID NO: 947754 - DNA, 770 bp, Homo sapiens
taatttcttcagtgaaagaattggtaatttgagtaaatttccaccacaaactgcttgtagtagccaaatttcaattcgggacaattttgtaataacgaagacactgttggcatgctggcccacgatcacttattagtctctcaacaaatatttactgagggcatccaagtgccaggcactgttctccatggcagtgctgcagatgggggtagggatataaaaatccttgtcctcatctggcacacctcctggtgaggaaggcaagcaaacgaaacaagtaagttatgtcgggtgctggatggcagtaagtgctcgggaggaaagtcagagatggggaggaggcagaccacaggagggaggcagttagaaaggccccaaggaggctggacaggaggaggtgagaggtgacagatgtgttccaggcagaggacagctagtgaacagggccgcagggagctgcccagtgctaggggaccagcgacctggggcatgctagggagaggagacagctaaggaaggtaggggtgcagtcagagggccaggtgtgggggcctgcagaccccagtaaggatcttggccttgactctgagtaaaatggggagtgacatgatccctcttaggttttaagtctggctgcagtggtgagaagataccatgtgtgtgtgtgtgtgtgtgtgtgtgtaaaagcagggcaggaagctgagttaggagacrgctacaacagtccggggaagagatgctatgactcagccctctgtattaggtgtggg

SEQ ID NO: 947755 - DNA, 616 bp, Homo sapiens
gtattcagttaacacaataaccccaaataaagtaatagtcaattaatcactcactgcaatgatgtaagcaggaagctaaactggagaaagagacctcatggaggagtttggaccctggtgctggttgagcatcasttgaatcaacacagatgtgatggtcaacttatgccttgggagtcctgaaaaaaaaaatcctgtttttttatggaccagcagctagtggtagggggtaagataggactaggagtggaaaagtactgagcactgagtcagcatggagaaaattgtcatcatgtttccctgctcccctaataaggaggtcttagcagaggaaggcctctgctgaaaattccagataaagaagatctgcatgaaggtatatgatctaggagtatagatatccataagagtatggctggccaggggactcaagtctttgattgtaactccctgcagagactgcagtgcactggctgtgcacccagtctattgtggggagggcagctctttcctctgaagcttaccaggtggtctgtaattgcctgtgatgatgtctgaaaaatcatacatagggttttggtctcaagccagattccccattgattatcatcttaca

SEQ ID NO: 947756 - DNA, 603 bp, Homo sapiens
gatttactccaaattaacttatttctgtaatggtaggaattttacctgctgctttggaaatatattttgtggaggcaaggctttgagccactataagaatcatatcacagatgatcaccagttattacaagaagttctatttttgtggtaaaggaacagacgtacatatgtacacacacatagccatacacacaatgttggttgcaaatcaatatgtagatctacagagagagaaaactgactcaaagcaagtcccaggtttctcaatcaaatgaaagtataattcttaaaatgctgaaaaattgctcacatcctgatattttaaatgctctagcaaaatggtattttctaaaaatgcagcatcctattatacctttgaggattttcattacactttctatatttttgctaaattagcagaaccttaatcattaagggcatttttaacttctgaatcccaaaaccttatagtgactagtcatggttaaatataaaataagaaaacaatcagtaaaaatcccttatccttaactttactaaatattcaaatgaagaaagawaaacaagtgttcaagtttatgaggcaatttgcttattagattc

SEQ ID NO: 947757 - DNA, 752 bp, Homo sapiens
ccatctgcattagagctgaaccaacacttccacaaacacctgcagccaaggctactcagacagctacaaacatgcagacattgattacaaccaaataaatatcatgaagactgcactactgtactcatgcagaatacaaaccaaagcaccctacccaactgacactatgagacacatctacaggaaaaagttttttcctactaaaactacattctaatattaggagaaattgttttgtcagatgtatagatactaatgtaggaacacaagaaatgtctaaaaagcaagaaacatgacacccccaagggaacaaaatcattttctaattccatatcccaaagaaaaggacagctacaaaatgcctatatgatttttaaaataatgatgttaaagatacgccgtgagaatcagtagaataaaaatagacaattcaaaaagtaggaaaacaattcatgatctgaatgagaaattcaacagagatattacacaaaaagaactaagcagaagtcttgaaactgaataataaaatgaatacaatttaaaaaataaaatcaagagcttcaacaacagactagatcaagatgaaaaaagaatttctgaacctggagacaggattttyggaataagccagtcagacaaaaaagaataagtaagaataaggaatgcctacaaaatgtgtggaacaaaatgcaggggacaaatattcccattatgggagttctagaaggagaagagatcagaaaggtgtagga

SEQ ID NO: 947758 - DNA, 585 bp, Homo sapiens
cgagctatttggtggtatcttggtcagaaaggtaggggtagtgttagagagcagataggaatggagataagaagcttccgsaagaattcttctgatttaatttgaaaacggaattaagtcagaagacatgcctccaaaagtataccaatgtttcttcaaagaacattttgtaaaatagtaacccatcccattcagaaagttgcttccctcagcagcaacactttcctatcctcttggaatcacaaggttattaaagtcataagcaagtagccctcatggattatttcctatctgccaataggaataattaccaatattgtgtattaacaaatgtagtataattattgcaccttctgataacagattgcctggggttcaaatcatagtttccctctcacacctgtgtgatcttgagcatgttaattagtgtcattgtgcctcagttttctcatctgtaacatgggcttagttttgttatatacccccatgtgtttttgtgttttttgttttgttatatacccccatgtgttttcgtgttttttgtttgtttgtttctttgtttgtttgttttttgagacagagttt

SEQ ID NO: 947759 - DNA, 604 bp, Homo sapiens
ttttctaaaggtcttagcaaatggcacaccaggagattatatcctgcacctggctttgagggtcctacgcccatgaaggcttgctcattgctgagacagcagtctcagatcaaatagcaaggcggyggcgaggctgggggaggggcacccaccattgcccaggcttgagtaggtaaacaaagcagcccggaagctcgaactgggtggagcccacctcagctcaaggaggcctgcctgcctctgtagactccacctctgggggcagggcatagccaaacaaaagacagcagaaacctctgcagacttaaatgtccctgtctgacatctttgaagagagtagtggttctcccagcatgcagcttgagatctgagaacagacagactgcctcctcaagtgggtccctgacccctgagtagcgtaactgggacgcatccccagtaggggcagtctgacacctcagatggccaggtactcctctgagacaaaatttccagaggaaggatcaggcagcagcatttgctgttcagcaatatccactgttctgcagcctctgctgctgatacccaggcacacaaggtctggagtggacctccagcaaattcc

SEQ ID NO: 947760 - DNA, 604 bp, Homo sapiens
ttttctaaaggtcttagcaaatggcacaccaggagattatatcctgcacctggctttgagggtcctacgcccatgaaggcttgctcattgctgagacagcagtctcagatcaaatagcaaggcggcggcgaggctgggggaggggcacccaccattgcccaggcttgagtaggtaaacaaagcagcccggaagctcgaactgggtggagcccacctcagctcaaggaggcctgcctgcctctgtagactccacctctgggggcagggcatagccaaacaaaagacagcagaaacctctgcagacttaaatgtccctgtctgacatctttgaagagagtagtggttctcccagcatgcagcttgagatctgagaacagacagactgcctcctcaagtgggtccctgacccctgagtagcgtaactgggacgcatccccagtaggggcagtctgacacctcagatggccaggtactcctctgagacaaaatttccagaggaaggatcaggcagcagcatttgctgttcagcaatatccactgttctgcagcctctgctgctgatacccaggcamacaaggtctggagtggacctccagcaaattcc

SEQ ID NO: 947761 - DNA, 675 bp, Homo sapiens
attttttagactgaaaacaggtgggaggcagagcaagcatagaaggctccactgatcatgcccatgcccccgccaacaaggataccaaattaagwtctacatagaaaaaacaccttcataaaaaacaaaaatcaggtgagtactcatagtacctggttttaactgaaacaccttcataaaaaacaaaaatcaggtgagtactcatagtacctggttttaactgcgtatcactgaagggagaaacaacagtcctcaattagcaactacgcacacttcctgttcccccagccagcagcaaaaggcctggtgcctagagcctctcggtgctgagggagggacaacacagcaactgcaagccactgaactcagtgctgtcctgtgagagcagaaaagaaaaccagatcaaacccaggtgactcccacccagggagggagcatttaaaccagccctaaagcggagggcaactgccgatcccaggagtcccaacttgagttcccaccagcctcaccatggagggctacagcactccatgtttccaagtaaactttttggcagtctgagccgtaaggactacaactcttaaccgattcttagtaatgaatgaactgggcaccaagacagtagaggtggtgggaagggggacaggaagcagggaatgagacatactgagacac

SEQ ID NO: 947762 - DNA, 552 bp, Homo sapiens
ttcaccatgttagccaggctggtctcgatctcttgaccttgtgatccactcgcctgggcctcccaaagtgctgggattacaggcatgagccaccgtgcccggcccccagtcttrggtgtgtctttatcagcagcatgaaaatggatgaatacacctatacagcaaacctatacaagtacccctgcactgaaaataaaaggttttttaaaaaaagaaaagaaaggccttagttcttaagcaatgactaaaatgtggggaaactcaggtggaattctgcaatgacactgaagtatcacggttcaattttagacacaaaaagccaggcaggcaaagacacccaccatgagccaagctttgctgggtttggggagggaaggggacaattgctgtaatcttgagactgaacagtgctggagggaggattcaggacagcttggtaaggggcttaaaagatattgacatgtaccccaaattgtatttaatggcattttgctaagtaatctggtttctggttttagattcggattttagttagaaagagcttatgctggg

SEQ ID NO: 947763 - DNA, 554 bp, Homo sapiens
tatgcacaataattgtgcttctgtctcatccattaaactatgaaatcatccaggcaggaaccataatttattcatttctttcttttttttgagatggagtctcgctctgtcgcccaggctggagtgtggtggcgtgatctcggctcactgcaagctccgcctcctgggttcacgccattctcctgcctcagcctccttagtagctgggaatacaggcacctgccactgcacccggctaattttttgtatttttagtagaaacggggtttcaccatgttagccaggatggtctcgatcttctgacctcatgatccgcccgccttggcctcccaaagtgctgggattacaagcgtgagccaccgtgcccggcctaatttattcatttctatattcctagggcctaagagtgctatagcagacatggcaacttttgaatgaatgcaagaacagagaaaacattttcatttttcacaagcaccttctttttctctygctctctctcttttttttttttttttttttgagacagagtctctctctgtcgcccaggctgg

SEQ ID NO: 947764 - DNA, 640 bp, Homo sapiens
aaatattttctccaattctgtaggctgtcttttcactctcttgatagtggtctttgatgcagaagtttttaactttggtgaagtccaatgtagtaattttttctttcgatgcttatacttttggtgtcatatccaagaaatcattgcctcccagcactttgggaggtcgaggcagatagatcacctaaggtcaggagttcaagactagcctggccaaagtggtaaaaccccatctccactaaaaatataaaaattagtcgggcatggtggcatgcacctgtggtgccagctactcaggaggatgaggcaggaaaatttcttgaacccaggaggccgaggttgcagtgagccgagatcgcaccacggcagtccaacctgggtgacagagtgagactccacctcaaaaaaaaaaaagaaagaaatcattgccaaatccaacatcatgaagatttacccctatgtttttgatacaggaactagaaagaaattatttaggcagatggtgagrgtaagagagtccttggtaaagtttcattttaataaaaagcaccccccaaatgatatcttttctaacaaaaagcagcctgaaaaatcaagctgcaagcatagataagcaagctaaaagcttgcataggtaaat

SEQ ID NO: 947765 - DNA, 578 bp, Homo sapiens
tgcagtggtgcaataacagttcactgcagctccaaactcctgaactcaagcagtcctcttcctcagcctcttggggagctgggattacagacatacaccactatgcctggatattttctttatttttattttgtaaagatggggtcttgctgaccaggctggtttcaaactcctggcctcaagcaatcttcccacttcgacctcccaaagtgctgggactacaggtgtgagccacagtgcctggcacaacaagctatctgaaaaacaaataaagaaaacaatcctatttacaatagctacaaaaaaatttaagaataaatttagccacagagaatgatctatacactgaaaactataaagcgtttataaaagaaataaaagaagagagaaataaatggaaatatcactcacattcataaattggaagaattaatattgttaaaatatccatactaccctaagtgatctacagattcaatacaatacctatgamaatttcaataatttttttagaggaatagaagagacaattttcaaatttatgggaaacgacaaaagatttcaaatagccaaagcaa

SEQ ID NO: 947766 - DNA, 585 bp, Homo sapiens
gaatcaacctaaatattcatcagtcacagactgrataaagaaaacgtgagacatacacaccatggaatactatatagcaagatcttgtcttttgtgagaatataaatggagctacaggtcattatccttagaaacctaatgcagaaacagaaaaccaaatatcacgtgttctcacttgtaagtgggagttaagtgatgagaactcatggacacaaaaaaaggaacaacatacattggggcctagttgagggtggagggtaagaggagggagaggagcagaaaaaatagttattcagtactaggcttagtacctgggtgatgaaatattctgtaaatgaacccctgttacacgagtttatatatataacaaacctgcacatgtacccctgaacttaaaataaaagttaaaaaaacaaaaataataaaatgtaaaatgtggttcaaaaagaagaggtcataaagactgaagaaaggtttgttcattgtcaattggttaatttgttcataatccactgcttatgccagttcctgtactaggggctgaaggacacagacaaattgtacttgctgtgccaggggctgaca

SEQ ID NO: 947767 - DNA, 588 bp, Homo sapiens
gaggtggggctctccttctagctgccagctccagaagccctaaacaaatggaatgcctcaccaaagaatagtattttgcaatgaccattattcctatcactatttttcattctgattttgcttgtcaatgcttacttggcatgatggggggttttggccaagcaaatgagcagcagcagaggttccacaaaattaggcacagtctatgagagcctggggttggtaatcagacattttagggggtacttggtggggaaatgccaccccctttacaccacagatactattctactcctgaaatattcactgccatctagaggctactgacatggtggtgtggtagggcagggtgaagcaggatcactgaatgagaaaataaactaacaggtgcatgaaggcctgcaagcaacgccccagggctgacagtgtgggtccattcattaagaatttcaaagaataaagttaagggtcagcaaactttttttgtaaagaaacagagagtaaatatttaaggctctgtgagccacaaggtccctttctcagctactcaactctgctgytgtcatgaaaaagcagccacagataaca

SEQ ID NO: 947768 - DNA, 599 bp, Homo sapiens
atgcattttttgaatttggagaacagagacacttctgtttcaatctgctgggagaagcctacacacaaaaggtgggttagctgggcattaggtgggagagagaaggtatgaaaatttaagtggcttatgagaaagctgctttattcccatcaatggagaagccaatatgcatgtgtcctagaggttggccccagagctcacctgaaattgtcttcacagggatgtcatctaagatgccagtccacaggggccaagaaacccctgcagaagggaagtttaggggaagcccatgggctgagaaggggagtgtcctaaaaacctgttagtgtttagagtgcttcaccaggcattcctcagcagaagaatctctccaaaaaccatgtgagctccctgggagatttacaaaaagaaaaagatgaagaaaaaaacaataatcatattgattacaattgtatcagcatcatgagattaggctcatacttctctctgcctttgggttctgaagtagcctccagcaagtagggaaggaagagcaagaartattaacaaaaccaacctggtgcttttgcctcactgcaggatttttgtccctaaaatga

SEQ ID NO: 947769 - DNA, 586 bp, Homo sapiens
tcatcacggaggaccggaggcaggactagattgcagctccagacaaggcagcatgcggaggcttgcattatgaattttagctccagatcaactgcaagaacaaaccagcaatcccragaggactcacagaccctgcaaaggaagcgaccgctcctgcaggacccaggagatgccccaaatactgtgagtgccccaactgcggaagtgggaaagggagaccttcctctcccaaacacacaccaccactggagaagctgaagttctgtttgtgggagaagtttctgactttacctggagctgagtcaatttagagagctgagtgaaatacatgggtagaagaagcagcagaaaggccctgggagcttgctgtgtcccctagcagccccttcctgcctggcaccacagggatccatcaggaaggtggccagaggagcggggggtaaaactccacaggaagaaggaaatctcccgctgaactttgtaacaatttgaacagggccagacgcttcctagccagaactcagaggagggcacaaatctggtttgcagactccacaggcaggggaagaaccaagccttttttctt

SEQ ID NO: 947770 - DNA, 519 bp, Homo sapiens
tttatttgtttgcttgtttggagaggaggggagtctatctcccctacaccaatggaagctccatagacagtttgtcttgtacgtagctataagagtataggtcacaaaccagatgctcaacataaacatgttgaacaaacgactgaattaacaacccaaacaaggtaagcattacagtatacatcctttagagatgaagagacacaggcagtggcatacagagacagaataacttatgtgaatcacaaaagtacagaatggcagatattgaagaaaacctgtgccatgtggttgcagagcgtagcacctaaccactaactatactactgttcatgtggtatctctctaaaaataattctgtgacctaaaattacctatgctactacaatatcagtactgtgggaaggtccaaccctccctggtttctacttgtttttataagactgctgtwtaaaaaagacactgataaacctagagaacaccaaagatctacattttgccaaagctaatgataaatta

SEQ ID NO: 947771 - DNA, 519 bp, Homo sapiens
tttatttgtttgcttgtttggagaggaggggagtctatctcccctacaccaatggaagctccatagacagtttgtcttgtacgtagctataagagtataggtcacaaaccagatgctcaacataaacatgttgaacaaacgactgaattaacaacccaaacaaggtaagcattacagtatacatcctttagagatgaagagacacaggcagtggcatacagagacagaataacttatgtgaatcacaaaagtacagaatggcagatattgaagaaaacctgtgccatgtggttgcagagcgtagcacctaaccactaactatactactgttcatgtggtatctctctaaaaataattctgtgacctaaaattacctatgctactacaatatcagtactgtgggaaggtccaaccctccctggtttctacttgtttttataagactgctgttwaaaaaagacactgataaacctagagaacaccaaagatctacattttgccaaagctaatgataaatta

SEQ ID NO: 947772 - DNA, 711 bp, Homo sapiens
agctaagtattattataagagtcaaaaagtcaaaaacattaaaaagtttataaagtaaaamtgttacagtatgttgaggttaatttattattgaggaaagttttttatgtaaatctagtgtagcctctgtgtgcagtgttcataaattctacagtagggtacagcaatgtcttaggacatcacatgcaccatcactcactcactgactcacccagaacaactaccagtcctgcaagctccattcattgtgctctattcgttgtaagtgcccaatataggtttaccatttttatcttttaccccatatttttaccatacctttctatatctagatatattaggtacacaaatactgactattctgttacaattgcctacagtgattagtacaataaaaagccgtatatatttgtagctaggagtaagtaataggctacaccatgcagcctaggtgtggcaggctgtaccatctagacttgtgtaagtacactgtatgatatttgcataaagttgaaattgtttaatgatgcatttctcagaacatgtccccatcattaagtgacacatgtctatttcaaccttttattttcattttccatttttatctctcactctgtgttaatctgagtattttcaacagatctatctaaggttgctaatccttcttttgccagggtggaagattaaggccattcctcagaagcagcttaa

SEQ ID NO: 947773 - DNA, 580 bp, Homo sapiens
aagattgaacctcaaagaaatccaaaacctgaatagaccaatagcaagtaaccagatcaaagccataattaaaattttcccactaaagaaaagccagggacatgatggcttcactgctgaattttgstaaacatttaaagaactaacaccaatcctactcaaactgttccaaaaaatagaggcaaagggaatacttttaaactcattccacgagtccagtattaccctgataccaaaaccggacagacacatcaaaaaaaaaatactgtaagccaatatccctgacaaacattgatgcaaaaatcttcaacaaaatactagcaaactaagttcaacaatatattagaaagattattcattgtgacccagtggtatttatccctgggatgcaaggatggttcgacatacacaaatcaaacaacatcatacattataccaaaagagtgaaagagaaaaaccatatgatcgtttcaattgatgctgaaaaagcatttgataaaattcaacatcccttcatgataaaaacctcaaaaaactgggtatttaagtattattcctcaacataataaacaccatatat

SEQ ID NO: 947774 - DNA, 592 bp, Homo sapiens
caaataataaatgaataaacaaaatgtggtttatccatacaataggaatattatttggtcataaaaaggaaccaagtactaatacatgcttcatacaatatgattgaaccttgaaaacatcatgctaagtgaaagaagccagtcatagaggatcacatattatatgattccatttacatgaaatgtcaaagagccctgttgctttggtctgtagggatagcagatggggctggggtgggatagtagctaaagtgtaccaggtttcttactgaggaaatgaaaatgttctgtaattgaatctggtaatagttgcacaactttgtgaatatacttaaaaacatttaattgcacactttcaatgagtgagttgcatggcacatgaattgtatcttaataaagctgttagaaaaaaattaagtaaatgggcgcaaaccaatgtagggaaacaataacaataaaagtcaactaaaggcatataaagagaattaaataagcagtgactttccarattcctggaaaaggagattcaacattttagagacagaatttcttttaaattaatctactgattcatttcaagtccattcaaatg

SEQ ID NO: 947775 - DNA, 836 bp, Homo sapiens
cagagatgccatccaagagtgaagtcctgaatacaaggaccctaagagcccacttggtgctctattcccctgtggccgtgctggtaacgaaggtgcaagacaaagtcccctttactcttccctctgcttttctcaagcagaaggagtttcatgccatagccaccacatctggtaatgtgctgagtctcacctgaagccagcaaatttcagaatctcacccaaggcccttggtgtaatacctggtgttgctgctggttgttcagggcccaagggcccttcagttaccaagtgatgactgctgccagggctgggtttttcccttcaaggcatctggtttcttctggcccaggacatatctagaaatatcatctgggagctagggcctagaaaaggggcttcatgactttgtccagtgccctatcctgctgtgactgtgttggtatccaagatgcaaggcatagttctccccactcttctctctcctctcctcaagcagaaggaagaggtctcttttgtggctgagagctgtgcagcctgtggttaggggaggggtgatgccagcactcttttagctgccctggctggtgtcttggtaggtcgtgtgcaccttccccagtctactgtctctggacacatttcatccctaggactcgcctaagtgttgcaatatttatggccttggtggcctttcaagttttcatggagacctagagcrcagttgccctctgtgcgaagtttgcaggaactcaagttcagaccactgggatcagcaattctcctttggctagggatggtttaaatgctccctctttgggcagtcatcagctgaatttggt

SEQ ID NO: 947776 - DNA, 560 bp, Homo sapiens
catccacaccaaaaccccatctgtacatcaccatcatcaaagacaaaagatagataaagccacaaaracggggaaaaaacagagcagaaaaactggaaactctaaaaatcagagcgcctctcctcctccaaaggaacgcagctcctcaccagcaatggaacaaagctggatggagaatgactttgatgagctgagaaaagaagacttcagacgatcaaactactccgagctaaaggaggaagttcaaacccatggcaaagaagttaaaaaccttgaaaaaaaattagatgaatggctaactagaataaccaatgcagagaagtccttaaaagacctgatggagctgaaaaccatggcatgagagctacgtgatgaatgcacaagccgcagtagctgatttgatcaactggaagaaaggatatcagtgatggaagatcaaatgaatgaagtgaagtgagaagagaagttcagagaaaaaagaataaaaagaaatgaacaaagcctccaagaaatatgggactatatgaaaagaccaaatctacatctgattggtgtaccaa

SEQ ID NO: 947777 - DNA, 560 bp, Homo sapiens
ttataaagtaaatatgacacatgtattgatgatctctatgaatccctctccaatgccttcttctcccttccgccccagaggaaacactattctgaagttgtggtgcattctattcattttttagrcttttaccacaaatgtatgtatctgtagacaatatatattgttttgcatgttttaaaactatagctaaatgatgtcatactataatatccttctaactgtagttaattcattcagttttgtgttgtagatgttcatccacacgtttccatgtagatctagtgcattgtaactgctctacagtatacagtatgggaggactccatgatttatacaatacctcctgccatagacatttccccatttttaagctttatgaactctgctgtgataagcaaccatgtacatgatctgacctggttcatgaggtatacacttttcagttttatcagatgttgccaaatagctctccaaaattacggtaacagtttatattcagtttctaagtagtccattcatccacagccagccatggtgtcatcagacttcactgtcct

SEQ ID NO: 947778 - DNA, 582 bp, Homo sapiens
tgctagtgttttttggtgatttttgtgtctgtgttcatcagaaatattggcctgtaattttcttttttcatgtgtctttgccaggctttggtatcaggggaatgttgccttcrtagaatgagttagggaagggtccttcctcagtttttctggaatggtttcagtagagttggtatcagctctttgtacatctggtagaatttggctttgaatgcatctagtctggggctttttttggttgctaggtgtttttgttttctactgattcaattttggaattcattattggtctgttttatgtttcagtgtcttcctgatgtaatcttgggaggttgtgagttttcaggaatttattcatgttctctggattttctagtttgtatgcataaaggtattcataatggcctctgaagatcttttgtatttctgtgggatcagttgtagtatcacctttgtcatttctgattgtgattatttagatcttctctctttttctttgttaatctagctagtagtctattgaatgtgtttatcctttcaaagaaccaacttttggtttcattggttgtttgtatggatttt

SEQ ID NO: 947779 - DNA, 581 bp, Homo sapiens
gtggttcagcttgtggttccatgaagtagggtgtcataatttctctccttggaagaactataaaagtatgattgattttcagattctcatcctaacargaaggtggtaacaccaatgcaacaactctggtgggatcagaaattagattttatagtgctgttgcctcctctcctcaccacctccagcctcagtacaaccattacccattgcagcaaagctcttgcttctcaaaacttcatttctctgaaggtttttatcttatttatttatttttttaattaacagacagaatcttgctctgtttcccaggctggaatgcagtggaatgattatagatcaatgcagcctcaaactcctgagctcaagcaatcctcctgcctcagcttcccaagtagctgggactacagatgcgtgctcccacacttgtgtgatggttaatattgagtgccaacttggttggactgaaggatgcaaagtattgttcctgggtgtgtctgtgagggtgttgccgaaggagattaacatttgagacagtgggctgggaaaagcagaaccaccctcaatctgggtgggcaccatct

SEQ ID NO: 947780 - DNA, 603 bp, Homo sapiens
caagctgatgaatacaggttgacttcttcctttttaatcacatcaagaaatacatattttctctcatatggtcttccccactgataacccaactttcaactttgacccacatttacctttatctggtagtcaatttctttaaaaagcaaagttgctgttgtttttttaataaattcacaaatgttactaaatataggaaagagtcaaagatatcaaagccccattgagatcttgatgttgggcagttatctaggtttactcactagctaagtgacttatgacttattctttcaccttacccaagaaatttgaatgctgttatctgttacagacctttgaggttaccaggacatagcttaaactgtgagcttttgaataataaggaccaaggcttctatgcaaactttggagattttttatagttgctttctagaataaaaaagccagtaatacctaagagcaaaagtagcatcwccagttattttctatgtcctttccagtcagacttgaccttttcttcaatgcttccccaaattccaaattattttctgcctgagggaaggaaaagcattgcctcctgccagagacagccaagatgctgca

SEQ ID NO: 947781 - DNA, 634 bp, Homo sapiens
acatcaaaccctaaactagaatcttaatgygatcatgttccagctctttggcagtgacatgctagcttgcgctctttaccacataaaccacctctgattgcatctatacattcctcttggaaaactcgttatataaaaacaaaaacagcaaaacagggccgcttttaaaataaaaatgccacttgctttaaactttaaaaaatctggcttaacactgacttcctaatgataaaataaatgtaacttattttttttcttaagcagattagtcattgatagtatgattcacatttcctgttatcaggcttaatttttcccccacatgtgtcacttttagaatgctggaatctatggaaatgaggtgatttgcattttaaaattggtttgattagaacatttggtttgtttggacaaaaatataaaattactagatattttacttgtaactgccaggacttgaaggagttaatcccaaagaggaagagtctatatgtactttgctctaaaactttaccacccacttcctaaaggtcctctccttcccaacaccgtacttggggaggagaggggtaaaaagtcccgtttccactgaccgtccttcatgcagttctgacagttgagttagctacattca

SEQ ID NO: 947782 - DNA, 791 bp, Homo sapiens
actcaaagatctacagattcggtgtaatctccattaaaattccaacagcctattttgcagaaatgaaaaacatgatgctcaaattcatatggaattgcaaggacccccaaatagccaacatgattttaaaaaagaacaaatttggaggacttactcttcctgatttcaggacttactacaaagttacagtagtcaaaaatcgtgtggtactggcataaagatacacccatgaaatagaactgagaagaaataaatccataaatataaagccaattgattttcgacaagggtgccaactccattcaatggagttgaatggagttgaattattaaaaataagtccaatgccattacaattaagaaatttggttcatctaaagttacaaagaaaatgagaagacaaaatacaaattggaaggatatatttggaacatatttcactgacaaagagtagtgtgaccaatgacctctgcattgttaaacaccgtaatcaattcttaggtctcccttgtcagcaacatttgaccctgttggttactccctctataaaacaacttctcctgtttcctagacgcagtctcctgatttccctcctctttctctgcacaagcctcctcagtctcctttggtggtttcttctcatgtgactataaagcagagtgacctagagctctggycttggacctcttctgttgtcttatctgctttcattccctaagtcatttcattcagcttcatggctttcataccatctctatgctgatgaattccaattggatatctctagccca

SEQ ID NO: 947783 - DNA, 506 bp, Homo sapiens
ataatcctactgcctggcgtgtggaccaggaggaaggagaggaagcagagttaggctgtctgtccactatcaaaaactgcaactgaagtgggtcctgggacacaaatgactggcagtggacacgctagagagaagatctgagactgatctgtcacgcgtgggtggagaaatcacagtcgatggggggtgccatcccacaacatgcagctttcagcagacatcgcacaagttagaagtgcaacctgtctgcatcagaaatacagtgcccatgagcagcttcactccagttggccccaccggagaacaagcccttcatcatgggcatctgcaagagatgtgggaggtctgtgctgcatctgtgctgtgtggtgayggtttcgaaccccactaacaggtgtttaaaacctgccagggttccagagtcaaagatgcctttgttgcattgagctatgcctgctttctgcttggcacagcttgtggtgagtccgaaacagctcagagcagat

SEQ ID NO: 947784 - DNA, 585 bp, Homo sapiens
ataaaaggcatattagcaggaagcgcaacgttgtgggggaaaagggagtcgtatcatacaggacttgtaagccaatatacaacctttggttcttactcagggaaatgggaawccactgagagattttaacagatgaaaatgtgatttttttttcgaaggattctattgcctttggtgtgttaaaaagagtgaagggtaagggcaaaggtcaaagcaggcaactgatccagtgacatgatccaggtgaaagttagattattgcaatagcccagtgtgggagtagcagagatagtgagaggtactttgcatcagcttgtattctcagattgtgtcaacaaagtttggatgatagatctaatagatccagaagcagaagactttaagaataagataattccaaagtttttgtttcagcaactgaaaggatggggtcaccatgtattgaaatggaaaacactgtcataaaatggttttgagggagaagatcaggagtcagggttttagatgttaagattgttgttttcactatgtgaaggtgtaagcagaagttgtatatataaatctggacttctggggagtggtgtg

SEQ ID NO: 947785 - DNA, 603 bp, Homo sapiens
gcttggcaggggcaaagctgagtgatgaagacctcgagtgttagtgtctggacccaaatcatggcttcactattttctttgcttgggggtggtacttgatctgtctcaktttcctgctttataaaaggaggataaataatggtaatagcttcagtcaaagggcacttatgaagatgaattgagattaaccatatcataagggtttaattctgtccttggcaaataatatgcactatattagtttcctatggctgctgtaacaaattgccacaaacttggtggcttaacactgtacaaatttactatctttcagctttggaggtcagatatttgaaatcaatttcactgggctaaagtcaaggtattggcagaccatcattccttatggaggttctgggagagaatcagtttccttgtcttttccaactttcagaggccacctttgtcacttggctcatggcccgtcttctatcttcaaagtgcatcactccaacctcctgcttctgtcatcccatctcttgacttccaccttttgactctcctggccttcctcttaataatgccccatggtgtttgcatcaggccccaccttggatcattaca

SEQ ID NO: 947786 - DNA, 579 bp, Homo sapiens
taatgttggtttctagcacattgggcagtgagccttttttgcttggtaacacctagagtagtcacgctcttagggacagaaagtagaagggtagttgccagggggtgggaagaatgaagaatagcaagttgtttaatgggtatagcacttcagttttgcaagatgaaaagagttctggagatggatagtggtggtagcacaacaatgttaatgcacttaatactactgaatttttttacttaaaatatttaagatggtattacggactgaattgtgtcccccctcccaagttcatatattgaaattctaacccctattaccttagaatgtgactgtatttggagttaagaactttgaagaggtaattaagtttaaataagatcataaaggtggaacttataagaaggaggaagagacagcagggatgtgcacatagataaaaggctatgtggggaaataacaaaaagatgtctgctttcaacaacgcagggaggcctcaggagaaactagacccactgtcaccttragctttcacttccagccttcagaacttgagaaaataaattgctgctattgaag

SEQ ID NO: 947787 - DNA, 466 bp, Homo sapiens
taaagaaatgcaaagtaggcagaacactatgtctcttaaatttgaaacagtatatgagaaacgagaagctgcatgtcttttactatgaactaagagagtcacatcgccccaataaaaactgtaattttccaaaagaacatttgggtggtcccctgtgagctcatgaaaagagcctaggcaaatccaataaaccttaccttagagtttcttagtatacacttagagtactcaaagctttggcatctgactaattaattaaggaaatataactgagtgctttacatacacttagcactataagagaacctggaattatggggtgagcaacacaaaaagtctccaccttcatggaataatattccagtgagtagcatagacaacgtagtactctgttttcatgctgctgctaaagatatacccaagactgggtaatttataasaaaaaggagatttaacagacttgcag

SEQ ID NO: 947788 - DNA, 558 bp, Homo sapiens
aaaaacaatctacaaattcaatgcaaatcccatcaaaataccaccatattcttcaaaggattataaaaaaaactctaaaattcatatagaatcaaaaaagagcccagaaagcaagactaagcaaaaagaacaaatctagaggcatcacattacctgatttcaaactatactataaggccatagtcaccaaaacagcatggtactggtacaaaagtaggagcatagaccaatggagcagaatagacaacccagaagtaaacccaaatacttacagccaactgatctccaacaaaggaaacaaaatcataaagtggggaaaggacccccttttcaacaaatggtgctgatataattggctagccacatgtaggagaatgaaactggatcctcatctctcaccttatacaaaaatcaacccaagatggatgaaggacttaaatctaacacctgaaactacaaaaattctagaagataacattggaaaaacgcttctmaacattagcttaggcaagaatttcatgaccaagaacccaaaagcaaatgcaataaaaacaagga

SEQ ID NO: 947789 - DNA, 569 bp, Homo sapiens
cctggtatgccagggagaactaaatggaacaatctgtcaggcctctcttctcatgtggatggagaaatctagagcccattgctagcaaktctctctagatctctagagattatcttgctcgtttactttcttctagatagcactgtacattgggcaatctagtcagaagagaaacagtttcttgtgagtgtaagtaaaggcttcaaattcttgacacccttcccattaggaagtggcatctatctcttcctcttgaatctggctgggcttgtgacttcttcaaccaatcgggtatggcagaagtgatcatatgtgatttctgagactgagtcataaaagccataaagctttttccttcttcactggaacagtctcctttagaatcctgaagcaccacataagaaatccaattgcaccgagaccaccatgctatgaggaagctcaagtcacatgcagagggcatatctgagagttccagtcaacagtctcagatgagttctgccttctggtcatctcagtccaggtaccatgcatgtgataagtctctggatgattccatctcccagcca

SEQ ID NO: 947790 - DNA, 575 bp, Homo sapiens
ttaaaaaaaaaaggcaaagaagggcattacctattggtaaagcgatcgattcaacaagaagagttaactaccctaaatatatatgcacccaatacaggggcacccaaattcataaaacaagttcttagaggcctacaaagagacacaataatagtgagagaccttaacacaccactgtcaatattagacagataattgagacagaaaattaacaaagatattcaggacttaagctcctctttggatcaagtgaacctgatatttatctacagatctttccagcccaaaacaacagaatatacattcttcttggtgccacatagcacttactctaaaattgatcacataattagaagtaaatatctgctcagcaaatgcaaaataactgaaatcaaaatagtctctcagaccacagtgcaatcaaattagaactcaagagtaagaaactcactcaaaaccacagaactatatgaaaattgaacaacctgctcctgaatgactcctgggtaaataaygaaattagcacagaaatcaagaagttatttgaaaccagtgaaaacaaagagagaatgtac

SEQ ID NO: 947791 - DNA, 627 bp, Homo sapiens
ataaaatcaagaactcaatcccttttccaatagctgccaaaaaaaaaaaaaaaatacttaggaatatacctaaccaaggaggtgaaagacctctacgaggaaaactacaaaacattacygaaagaaatcacagatgacacaaagaaatggaaacacgtcacatgctcacagatgggtggtatccatattgtgaaaatgaccatactgccaaaagcaatctacaaattcatgcaattcctatcaaaatactaccatcatttttcacaaaattaggaaaaacaatcctaaaattcatatggaaccaaaaaagagactcacagccaaagcaagactaagcaaaaagaacaaatccggaggcatcacattatctgacttcaaactatactaaaaggccatagtcaccaaaacagcatgacactggtgtaaaaataggcacatacaccactggaacagcacagagaacccagaaataagcccaaatacagccaactggtctttgacaaagcaaacaaaaacactaagtggggaaaggacaccatattcaataaacagtgttgggataattggcaagccacatgtagaagaaagaaactgggttctcatatcgcactttacacaaaaattaac

SEQ ID NO: 947792 - DNA, 511 bp, Homo sapiens
ctaccagaggtacaaagaggagctggtactattccttctgaaactattccaaacaatagaaaaagagggaatcctcccyaactccttttatgaggccagcatcatcctgataccaagacctgacagagacacaacaaaaaacgaaatttcaggccaatatccctgaagaacatcgaagtgaaaatcttcaataaaatactgtcagacagaatccagcagcacatcaaaaagcttatccgtcacaatcaagacagcttcatccctgggatgcaaggttggttcaacataggcaagtcaataaatgtaatccgtcacataaacagaaccaatgacaaaaaccacatgattatctcaatagatgcagaaaaggccctcaacaaaattcaacaccacttcatgctaaaaactctcaataaactaggtattgatggaacgtatctcaaaatagtaagagctatgtatgataaacccacagccaatatcatactgaatgggcaaaaactggaagcat

SEQ ID NO: 947793 - DNA, 632 bp, Homo sapiens
catagagaataaaagatacaatgttggcctagaaatttataaggcaggtattaacaccgtgaccacaatcgatacttgtgaactaaagccactgatcaatttcaatatctaaatcattttcttgaaaccattattgaaatagacacaacataccattaatatgcaaatcagtgaacaaagagctaactcttccctggcaacactctcgtgatgtagaaataattatattagaaccaatcacctgttcctgggccctttgtaactcttaaaatgccttttcgacttacctactttacaaatctaaatctctgtcttctttaattcaaataattgagtaaccagtacctttgtcatctcaaatattttaagaagaaaaatatataaacattttaaaaaataataaacagccaaaaattttaaatattaagcaactagtatcttgttctctattccttaaaagggagaatcaattccacatttttcaatatctgagcttaaaatttggtttctcagatccttgatttcatcatctktagtggtggcacaactcagggagttttacaaggcttagtttacaaattcagtgtccatgacttgaagacatcactatcagctcgaaaagaaaggggtaa

SEQ ID NO: 947794 - DNA, 632 bp, Homo sapiens
catagagaataaaagatacaatgttggcctagaaatttataaggcaggtattaacaccgtgaccacaatcgatacttgtgaactaaagccactgatcaatttcaatatctaaatcattttcttgaaaccattattgaaatagacacaacataccattaatatgcaaatcagtgaacaaagagctaactcttccctggcaacactctcgtgatgtagaaataattatattagaaccaatcacctgttcctgggccctttgtaactcttaaaatgccttttcgacttacctactttacaaatctaaatctctgtcttctttaattcaaataattgagtaaccagtacctttgtcatctcaaatattttaagaagaaaaatatataaacattttaaaaaataataaacagccaaaaattttaaatattaagcaactagtatcttgttctctattccttaaaagggagaatcaattccacatttttcaatatctgagcttaaaatttggtttctcagatccttgatttcatcatctttagtggtggcacaactcagggagtttkacaaggcttagtttacaaattcagtgtccatgacttgaagacatcactatcagctcgaaaagaaaggggtaa

SEQ ID NO: 947795 - DNA, 632 bp, Homo sapiens
catagagaataaaagatacaatgttggcctagaaatttataaggcaggtattaacaccgtgaccacaatcgatacttgtgaactaaagccactgatcaatttcaatatctaaatcattttcttgaaaccattattgaaatagacacaacataccattaatatgcaaatcagtgaacaaagagctaactcttccctggcaacactctcgtgatgtagaaataattatattagaaccaatcacctgttcctgggccctttgtaactcttaaaatgccttttcgacttacctactttacaaatctaaatctctgtcttctttaattcaaataattgagtaaccagtacctttgtcatctcaaatattttaagaagaaaaatatataaacattttaaaaaataataaacagccaaaaattttaaatattaagcaactagtatcttgttctctattccttaaaagggagaatcaattccacatttttcaatatctgagcttaaaatttggtttctcagatccttgatttcatcatctttagtggtggcacaactcagggagttttacaaggcttagttkacaaattcagtgtccatgacttgaagacatcactatcagctcgaaaagaaaggggtaa

SEQ ID NO: 947796 - DNA, 632 bp, Homo sapiens
catagagaataaaagatacaatgttggcctagaaatttataaggcaggtattaacaccgtgaccacaatcgatacttgtgaactaaagccactgatcaatttcaatatctaaatcattttcttgaaaccattattgaaatagacacaacataccattaatatgcaaatcagtgaacaaagagctaactcttccctggcaacactctcgtgatgtagaaataattatattagaaccaatcacctgttcctgggccctttgtaactcttaaaatgccttttcgacttacctactttacaaatctaaatctctgtcttctttaattcaaataattgagtaaccagtacctttgtcatctcaaatattttaagaagaaaaatatataaacattttaaaaaataataaacagccaaaaattttaaatattaagcaactagtatcttgttctctattccttaaaagggagaatcaattccacatttttcaatatctgagcttaaaatttggtttctcagatccttgatttcatcatctttagtggtggcacaactcagggagttttacaaggcttagtttacaaattcaktgtccatgacttgaagacatcactatcagctcgaaaagaaaggggtaa

SEQ ID NO: 947797 - DNA, 605 bp, Homo sapiens
aaaacttgtttgttgaaaactatataatgttgatgaaataaattttaaaaatgtaaataaatggagaaaaatgttgtgttcatgatttgaaagtcacagcgtagtaaagataccgatwcttcccaaattgatatacaggtttaaagcagttcctatcaaaaatctcagtatgattttttcatatatagatgacattattctaaaatttatacagaaacaaaggaactagagtagctaaaacaattttgaaaaagaaataataaagtgggagcaatcagtctacccagtttcaagaagtattgcatagttactatgtggctatccatggagtgacagaaacatagatcaacggaacagaataaagaacccttcttttagaaggagaaggcattagagaaaaatctttggaatctctggctagggaaagagttcttagatttcacataaacacaatccataacaggaaacaaatgatatattggtgatatattggactatatcagaattaaaacttttgcttttgcaccgtgaaagagtttttttttttttttttcttttcttttcttttttgagacagtgtctcactcagttccccaagctggagg

SEQ ID NO: 947798 - DNA, 630 bp, Homo sapiens
gaaactccacagacactacattactacactgtgcaaacaaaggcaatataccytacccgacccaaatcctaagaaacatctgcaagtgaaagtctttccccatgaaagccactctacacaactggaagaggtgactgtcttaccaaatgcacagatataatacaatgatacaagaaaaatgtaaaatcaaggatacatgacaccaccgaaaaccacaatcactctccagtaactgacaccaatgaaataaacatacatacctgaaaaaaattttgacaatattattaagaaaactcagccaatacagatagacaattgaacaaaaatcagagaaacaattcatgatctctgaaataagacatcatgaattgttgagagagaactctcatttgagagactatgaattgaaatgaggaattcaacaaagaggtagatatcataaaagagaaccaaacagaaatgttgaagctgaaaaatccaatgaatgaaataaaaagtacagttgagagcttcaacaatatactagatcaagcaaaggaagcatccctaacttgaggaagggacttttgaaataatccagtaagacactcccccaaaacagaaaaaaataaaaataatgaagaaagtcta

SEQ ID NO: 947799 - DNA, 589 bp, Homo sapiens
tcctattatatgctgtctaaaagagattaattttacctttaagcagacatacagactcaaagtaaagggatggaaaaatacgttccctacacacagaagccaaaataaagcaggagtagctatacctatattagacaaaatagaatttaagtcaaaaactgtaaaaggagacaaagttggacattatataattataatgaggtcaatttatcaagtagatgtaacagttgtaaatatatacgcactcaatgttggagcacctaaatatataaagcaaatattaaaatatctgaagggagagatagaatactgtacagtaaaaatgggagaacttcgatgctccaattttaataatggatagatcattcaaagagaaaattaataaagaaacaatggacattaacaacactttaaaccaagttgaactttacagaaatatacagaccattccatccaacagtaccagaatacacattttttttcaagtgtayataaaacactcactaggataaacactacgttaagtcaaaagaaaagtcttcacaaatttacaaaagattgaaatcatatcaagtatcttgtctgacca

SEQ ID NO: 947800 - DNA, 629 bp, Homo sapiens
gtgtataagggaagatgtagctgggcgcagtggctcacacctgtaatcccagcactttgggaggctaaggcgggcagatcacttgaggtcaggagttcaatgccagcctggccaacatggagaaaccctgtctctactaaaaccacaaaaattagccgggcatggtgatgggcaccctataatctcagctacttgggaggctgaggcaggagaatcactggaacccaggaggcagaggttgtggtgaactgagatcgtgccactgcactctggcctgggcaacagagtgagattctgtctcaaaaaaaagagaagatgtgtgtgctctctgtctgtctcctcacagaactgtgcaaacagacatgagttaagagcatgtactttaatgtggttgataattttaatcacatcctgcaaaatgttgttaagttcaagtgacattttttggctagccagcatttctctgtagatgacacagtgcatagactcacattcagaagcgacctctttgacccgagcagtgaaatcagaaagccattttagtcayggcagctactctgtctatgcatatactgacacaaaatgaccaattcagttttcttgatatatattcattcaaagacttgaat

SEQ ID NO: 947801 - DNA, 486 bp, Homo sapiens
acatgtgattcacagctcattttaaagcttagcacattgatttggtacaaggatgaccatgaatctgcatggtaatattatatgagatggatttaagcaagccatttgggctaatccaggcaaattactgccagctgatagagggtttctgcatatgtagctgtgtttgctctggtcttcttgcctgttggtagcagtaaaatatcgtattaattttatccttctggtgtccacctggctctccattactagaccttgagttccaatgatgtcaccctttgatccttcctcttttaacgtccatctgctgaataactgtcccttccagcttggagcacagacctgtaagaaagaacaacccttcatttaatatgaaaaccctatcawttctattaaataatgtttaaaactagacacggtctaatgctttcaatagatttgtagttagttcatcagagtttcaaaactctatttgttcttttgcct

SEQ ID NO: 947802 - DNA, 603 bp, Homo sapiens
caattggtattgtgtatgctatacgaagttctcatgctgtgttttcagctccatcagrtcatttatgttcttctctaatctggttattctagttagcacttcctttaatcttttaccaaggttcttagcttccttgcattgggttagaacgtgctcctttagctcgaaggaatttgttattacctgccttctgaagcctacttctgtcaattcatcaaattcattctccgtccagttttgttccattgctggcgaggagttgtgatcctttggagaagaagaggcattgtggtttttggaattttcagcctttttgccctggttttccctcctctttatggatttatctacctgtggtctttgctgttcatgacttttgggtgcagtttttgtgtggtcatttcttttgttgatgtggatgttattgctttctgtttgttagttttccttctatcaggccactcttttgcagggctgctggagtttgctggaagtccactccagaccctgtttgcctgggtttctccagcagaggcagcagaacagcaaagactgctgcctcctcattcctctggaagcttcgtcccagaggggcacacctga

SEQ ID NO: 947803 - DNA, 483 bp, Homo sapiens
atattttaagaaaaaatttttaaatttaaatttatattcatctattaattgaaaaactcctaggcacaatagaaggatatttctgtgttagagatctattaatataattcagcatataaatatcttattattaataatagctaacttgtactgagcactcaccgtaagcacaatatatgtattagtaaatttaattctcacagtaactcaataggtcctatattatcgtcattttacagagccacagaaaaagtgacttgctcacaactattagcagagcccgtattaaaactcaggaaaatgtctccagagataacactcttgaatagaacaataataacctcttaaaacakaaaacttatgattattttcaagactcctttttttttgagatggagtctcgttctgttgccaggctggagtgcagtggcaccatctcggcttactgcaacctctgcctcctggattcaagcgattctcctg

SEQ ID NO: 947804 - DNA, 620 bp, Homo sapiens
aatggggaaaatgtctccagggcatgtcagaggacttcacagcagaccctcccatcacaggcctggaggcctaggaggaaaagatgstgtcatgggccaggcctagggtccccatgctgtgtgcagcctagggacttggtgccctgtgtcccagctgcttcagccatggctgaaaagagtcaacatagagctcagagcatggcttaagagggtgcaagccccaagccgtggcagcttccacgtgatgttgagcctgcgggtgcccagaagttaggaagtgacctttggaaacctccgcctagatttcagaggacatatgggaacacctggagcccaggcagaagtttgctaaaggggcagggccctcatggagaacctctgctaggatagtgtggaagggaaatgtgggatcagagcccccacacagagttcctactggcacaccacctagtggagctatgagaagacagccactgttctccagaccccagactggtagatccactgacaacttgcaccatgcacctggaaaagccacagacactcaatgccagccagtgatagtagccaggagagaggctataccctgcaaagccacaggggtgaagcttcccaaggct

SEQ ID NO: 947805 - DNA, 467 bp, Homo sapiens
atggagaacctctgctaggatagtgtggaagggaaatgtgggatcagagcccccacacagagttcctactggcacaccacctagtggagctatgagaagacagccactgttctccagaccccagactggtagatccactgacaacttgcaccatgcacctggaaaagccacagacactcaatgccagccagtgatagtagccaggagagaggctataccctgcaaagccacaggggtgaagcttcccaaggctgtgggagcccacctcttgcattattgtgacctggatgtgaaatatgaagtcaaaggagatcattttgggattttaaggtttaatggctgctctattggatttcagacttgcatggagcctgtggtccctttgttttggccaatttmtcccatttggaatggctgtatttacccaatgcctgtatacccattgcatttagagagtaactaacttg

SEQ ID NO: 947806 - DNA, 741 bp, Homo sapiens
cacaacagcagtacacacgtttttctcaagtgcaaatggacctttctctaggatagacagtatgttagatgactaaacaagtcaacaaatttcaaaagactgaggaaataaaatatcttttckggccacagtgggatgaaactagaaatcagtaacagacaaaaaactgaaaagtacacaattatgtgaaaattaaacaacgctctcaaccagcagattaatggggaactcacaagggaaattagaaaatatcttgtggtaaatgaaaaatgtaatatacaaaaaaacaggtacagtcaaagcagtggtaggagggaaatttgtaactgtaaatacacctattaaacaaattaagatctcaagtcaaccctaaatttacatctgaaagaactagaaaaagaagagcaatcaacccaaagccagcagaatggagatgattataataataataaagattagagcagagacaaaatagagaacagaaaagcaatagagaaaaataaatgaaaccaagagtttgttgatagctaagagtgactaagaaaaacaactaaaaaccaggaggagacattacaactgattttacagaaataaaaaggattaagagtactatgagcaattacatatcaaagaattggataacctagatgaactggacaaattcttagaaacacacagcctatcaagattgaatcatgaagaaatggaaaatctgaacagacctatgctagtcaagagcat

SEQ ID NO: 947807 - DNA, 605 bp, Homo sapiens
aacatagctcctggagtgtgccaggagaagcaagcagagaaactgcccagcaaaaccttgtggaagcatgaggaatgatacatcattctttttttgagccactatggtctgttgtgccgcaagataaccaatataccacagtgggaaagctccaatacagtgcgaaactggaaagaagagaatgcagagggtagctgtactgtttacaacgctccctctgtttgctagcttcattttgtttagtgagtgtgcagattctgacaaggatcatttagatatgtttgacctcgtccttggagccatgaatcggagacctcttgacggcaggcacagatcctctatatggaaaaaacaaaacaaaacagaacgaaataaacaaaaaaaacaggacaagaaaaaatgttgaaaaacatatttacctatatttctcatttcatgaaaaaggattcctgcagttttctttagagagccttgaaaacaaatcatcaccacaaagacttggttttatttcacttctaaaatttaaggagatgaaacttccctgaaaaagcaaccatctgcaaygtctagcattcatcagtgttctcctctattaattatttaga

SEQ ID NO: 947808 - DNA, 593 bp, Homo sapiens
ggtgggtggcagagacaaacatggacccattggacaaagggaggattcacatcctgggcaagacagagtggtacagcaaagatttcatcacaccacttagaacagtgcacaacttaacacttagaaattktttatttctggaattttccattgactattttcagacagtgatggaccatttctgcaggtaactaaaacctccaaaacaaaaaccaagtttaagggaggaatactgcacatgctaactgaaagcacatattttgctggaaaagtcactctattttttaaaatctcatgagatgaatcacatcatttctcacttttgcaaactgttttaatgtctggcttaaaaaacaggtagatcctcatggctgcatgtgcagtcactctgctgcagtatcacatgctacaacctcaagaaaatccacgttgcctcacgagagatagcgagtgaaaaaggcaaatgacacttagtagtattacaaaaataatacatctgactccaccagccctttggacagggccttgagcacccccagagcccctggccacacatagaggcctgtggccccaagaacctgcctgcatgtggc

SEQ ID NO: 947809 - DNA, 632 bp, Homo sapiens
gcggaaactccgccagagctgacttattcccaggcttatctcagcaggggcctgcagaagtggggacacggaattgaggccactgtgagttttcggtgtaagcttagtcccatttccaatccacatgatcacctccctgccccctccccctccacattcttggcctgagccagtccctcccgtgaacacagcaaaggccaggtgaccaagaaagtggaataataaaggattttagactgggggaggcaactaatggtcttctaagccagtgaataaaaaactgttttagctgcccaaccctttcttcaaaagaaccttattggaaagtcaaacaggcaaaacctataaaaacccagaaagaacaatccacacttctgctctctggttttgcttctatctggccatgatgttttcatcattttactcttctgccttagctccctttcattcctgacaagcagaggcctctgacatctctgagcccaaacatgggtacagcagtgcctctgaagccagcagtgccagaccagcagcagaacttctcttgcccatctgggaatggtgtttacygaaaaccagagaaaacaggcacattgatgagtccatcagttagattattctttcttgagagt

SEQ ID NO: 947810 - DNA, 680 bp, Homo sapiens
aggaagctgaggcaggagagtcgcttgaaccagggaggcggaggttgcagtgagcccagatcacgccactgcactccagcctgggcracacagtgagactccgtctcaaaaataaataaataaataaaaataaaataaaaataaagttctcttcgaagttaagtgcaaagacagtgcttggaaatatttctttcaataataaatgcctacaaaatgcttgtcatcttcctctactatacttcttcacttaccatactcatactgttgcatgaaaaataccatattttttcatgcaattgccttttttcctcatgtcactctattctcctataaactccttgaaagaaggaactgagcctccggtaggttctgaataacatagtacgttcttaagaaatattgatttcatctaactgcattggctacaccaagtgttgtaggaatacagagaagcacagaggaaggaataattaacttttctgcaggtgatgtcgtgctagagaaagccataccaacatctgagttgagtcttgaatttgctgggcatggggaacagacatttcaggtaaattaccaaggtgcagagagttccaacattttagatgtgactttgtctaagatgccccagtcaatcggtggtttgccatattgaaagctcagaactcaaagggctatttatt

SEQ ID NO: 947811 - DNA, 578 bp, Homo sapiens
agtcattgccatgtctctttgaagcccttatggatttaacaaattccctgttaggtgaatccttcrgaaggaatctttctaaagtcacctacaggtggcgaagtgaatgcatctctcccatagaagacattgcatctctgacactcagttatttaggactactagggggagttttataattttttctcttacatttaggtggatgatccattttgagttaattattgaatatgatgtgaggcaatgatccaacttcattctgttgcacgtggataatcagtagtcccagcattatttgttaaaaagaattttctttccccattgaattgtcttggaaactttgtcacaaatcaattgattataaatgtgagagggtttatttctggactctcaattttatccattactctatgtgtctgttcttatgtcgataccatgctgtctagatttctattgttttatacttttatattgggaaatatgagtccttcaactttgttttttttttcaggattgtttgcttattcaaagtcctttgcatttctatatgaatttcaagatcactttgtcaattcaaa

SEQ ID NO: 947812 - DNA, 584 bp, Homo sapiens
ttcttctaccttttctcctttgaaatggagaaaaatcaatggtgtgaagggtttacaaatcttctaaagttttgtgcacataaaacaatgtgttaatgtctgtctccaaatgtaagtccttatattttttgtgtcaatgttgattgaggaggtaccacattttatttcctcatggaagagctttttgtacacaaggagccacatttagaatctggatcctccgtttaatggcttttataatacattttccagtattacagtgtcctatggacccattcattttttattagaaacttaaagaggtaagagctattatccttgtttaaagtcagaaaggcaaatgaatatctccagcaagaatttactaatgttttgtcagtctgcatttatttttctgctgaaatgtttttcccctaaatttttctcctaatccttgcttttcaaacaattaatgatgtttttttwaaaaaatctttctcttttcttttctttttttctcttcttctttctctctgcttgtgcctttcttcttttttctccatcaacccacccttctgcccctctctctctctctctctcctcct

SEQ ID NO: 947813 - DNA, 660 bp, Homo sapiens
agaaggagaattctcccagcacagtgcttgagctctgctaagggacagactgtctcctcaaatggttcsctgacccctgtgcctcctgacagggagacatctcccagcaagggtcaacagacacctcatacaggagagctctggctggcatcaagctggtgcccctctgggatgaagcttccagaggaaggagcaagcagcaatctttgctgttctgcagcctccactggtgatacccaggcaaacagggtctggagtggacctccagcaaactgcaacagacctgcagaagaggagcctaactgttagaagaaaaactaacaaacaaaaagcaaccacatcaacatcaacaaaaaggacccccacacaaaaactccatccaaaggttatcagcctcaaagatcaaaggtagataaatccatgaaaatgaggaaaaaccagcccagaaatgctgaaaattccaaagaccagaatgactcttctccaaatgattgcaactcctctccagcaagggcacaaacctggatggagaatgagattgacgaattgacagaagtaggactcagaagatgggtaataacaagctcctctgagctaaaggagcatgttctaccccaatgcaaggaagctaagaaccttgataaaaggttacaggaactg

SEQ ID NO: 947814 - DNA, 797 bp, Homo sapiens
attagatattgcagtagcaactaggtgatcagccatttgattcccttcagttaaaggtcctggaagaggtgtatgagccctaatgtgagtgatattaaaaagagtgcattctagtcctaactgctgtttgcaattgggtaaataaagtcatcagttgttcatctgtatcaaatcataactgagcattttcaattaattgtgtggaatgaaccacatatgaagaatcagaaatcacattaataggcataataaaagcagtcaatacctcaattacagctacaagctcggctttttgagctgaagtatagggagtctgaaaaaccttacctttcaagccagaataagaagatttaccattactagacccatctgtaaaaacattttcagcaccttcaattggtttaaatttaattttagggagaatccaattagttaatttcaaaaattgaaataattttgttttcggaaagtgattttcaagaacacccgtgaaatcagctaaatgggtttgccaagtaagactatttataaaggcttgctgtatttgtgccttcgtgagagggacgacaatttttccaggatcatatccatgtaaattaacaatccaagttctcccatttcctatcatagtagcgatttgatttaaataaggagttagagtccatgaattagtatgtggaagaaaaagccattctactaagtcctgctcttagacaataacaccagtaggttaatgctgagttggaaaaatyagcaaatctagagtcttctctggttctgttctatttatttgagtc

SEQ ID NO: 947815 - DNA, 575 bp, Homo sapiens
gctgattgggcaggtgtgggtccacagtggtactcacagtaggacaggtcaggtgtgtgtttcaggtgggctaatcaccatagatgggagcgtgcatctccaatgtccgcttggattgtcagctttctttggaataattaagagaaggtaaaggaagaggaaaaggagtaaagaaatcatctttgtacattttaatctgagctgttttcgagcagtgtgataaggtaggttgtcgaaatgtcagcttctccttatctctaattgacttaagtagaggcagctctaatccttgtgtgcacaggagcctggaatggagagatgaggccaattgattcctactttttaattaacaggtgagctgcttaaaaacaatagtatattgggggcaggttgggaacaggaaggaatgtgagggagggtcatctccaccacagtggcatttagagaaatattaacaagtgtcagcatttgatttgaatcaggggctggagcagagggaaaagttatgtcttatgcatggrtgtggtcacaaaagactgctgccaaagtgacaaaaaatatttatacttctctcc

SEQ ID NO: 947816 - DNA, 575 bp, Homo sapiens
gctgattgggcaggtgtgggtccacagtggtactcacagtaggacaggtcaggtgtgtgtttcaggtgggctaatcaccatagatgggagcgtgcatctccaatgtccgcttggattgtcagctttctttggaataattaagagaaggtaaaggaagaggaaaaggagtaaagaaatcatctttgtacattttaatctgagctgttttcgagcagtgtgataaggtaggttgtcgaaatgtcagcttctccttatctctaattgacttaagtagaggcagctctaatccttgtgtgcacaggagcctggaatggagagatgaggccaattgattcctactttttaattaacaggtgagctgcttaaaaacaatagtatattgggggcaggttgggaacaggaaggaatgtgagggagggtcatctccaccacagtggcatttagagaaatattaacaagtgtcagcatttgatttgaatcaggggctggagcagagggaaaagttatgtcttatgcatgggtgtggtcwcaaaagactgctgccaaagtgacaaaaaatatttatacttctctcc

SEQ ID NO: 947817 - DNA, 555 bp, Homo sapiens
agtttcgctctcgtcacccaggctggtgtgcaatggcacaatcttggctcactgcaacctctgactccygggttcaagtgattcttctgcctcagcctcctgagtagctgagattacaggtgtccaccactatgcctggctaatttttgtatgttttagtagagacagggtttaaccatgttggccaggctggtctcgaactcctgacctcaggtgatccacttgccttggcctcccaaagtgctgggtttacaggcgtaagccactgtgcctggcccctaatctgctttctgtctttataaatttacctgtcctggacatttcatatgtcttttaatgacattttttattcctacttttacactcaggtttttctctatcttaacttttctttttttcttctctctttttttttttttttttctttgatacagggttttactctgttgcccaggctggactacagtagggtgatcacagctcactacattctcaaactcctgggctcaagcaatcttccctcctcagccacctgagagctgggactacaggtgc

SEQ ID NO: 947818 - DNA, 669 bp, Homo sapiens
ctagcagtatacatttattgtcctacctctggagtatattaactctctggctttgtgtcataatcctattcaaagagaccttgayccctttttgcttctgcaggatatcacactagtctattacattaatgacattatgctgattggatccactgagcaagaagtcaccacagtgatcttatcgatgagacatttgtttgccagagtatgggaaaaaaattcaatctaaattcaggaaataaatccagctaaatttctatctcagtaaatttcctaggggcccagttgtgtggggcctatcaagatattccttctaaggtgaaggataagttgctgcattgggcccctcctacatccaagaaagagccacaatacctagtgggcctatttggattttggaggaaacacattcttcatttggatgtgttactctggcccatttattgagttaccaaaaaggctgcagttttgaatggggtccagaacaagagaaggctctacaacaggaccaggttgttgtgcaagctgctctgcctcttgggccatatgacccagcagatccaatggtgcttgaggtgtcagtggcagatagggatgctgtttggagcctttggtaggcccccataggtgaatcacaatgaaggcctctaggagtttgaagcaagaccc

SEQ ID NO: 947819 - DNA, 669 bp, Homo sapiens
ctagcagtatacatttattgtcctacctctggagtatattaactctctggctttgtgtcataatcctattcaaagagaccttgatccctttttgcttctgcargatatcacactagtctattacattaatgacattatgctgattggatccactgagcaagaagtcaccacagtgatcttatcgatgagacatttgtttgccagagtatgggaaaaaaattcaatctaaattcaggaaataaatccagctaaatttctatctcagtaaatttcctaggggcccagttgtgtggggcctatcaagatattccttctaaggtgaaggataagttgctgcattgggcccctcctacatccaagaaagagccacaatacctagtgggcctatttggattttggaggaaacacattcttcatttggatgtgttactctggcccatttattgagttaccaaaaaggctgcagttttgaatggggtccagaacaagagaaggctctacaacaggaccaggttgttgtgcaagctgctctgcctcttgggccatatgacccagcagatccaatggtgcttgaggtgtcagtggcagatagggatgctgtttggagcctttggtaggcccccataggtgaatcacaatgaaggcctctaggagtttgaagcaagaccc

SEQ ID NO: 947820 - DNA, 591 bp, Homo sapiens
gagaaggctctacaacaggaccaggttgttgtgcaagctgctctgcctcttgggccatatgacccagcagatccaatggtgcttgaggtgtcagtggcagatagggatgctgtttggagcctttggtaggcccccataggtgaatcacaatgaaggcctctaggagtttgaagcaagaccctgccatcttctgcagataactactctccttttgagagacaactcttggcctgttactaggctttggtggaaactgaatgtttgactgtgggtcattaagtgaccatgcgacctgaactgcctatcatgaactgggtgctttctgacccatctagccataaagtgggtcatgcacagcagcattccatcatcatatggaagtggtatatatgtgatcgggctcaagcaggtcctgaaggcacatgtaattcacaggagaaagaggctcaaatactcatggtctccactcctgccaccctgccttccctcccctgcactaattgcctcatggggagttccttatgatcagttggcagaggaagagaagwctggggcctggttcacagatgattctgcatgatatgcaggcac

SEQ ID NO: 947821 - DNA, 520 bp, Homo sapiens
gcagcagaagaacataaattgtcaagatttcatggacatttatcagttcccaaaattaatacttttataatttcttatgcctgtctttactgcaatctctggacataaattrtgaagatttcatggacatttttgtaacttccccaatcaatactgttataatttcctatgcctgtctttacttatctcttaatcccgtgatcttcctaagctgaggacgtatgtcacctcaggaccctgtgatgattgcattaactgtacaagttgtttgttaaacatgtgtgtttgaatgatatgaaatctgggcatcctgaaaaagaacaagataacagcgattttcagggaacaagggagataaccataaggtctgactgcctgtgaggccgggcagaacagagtcatattttccttcttgcagaaagcaaataggagaaatatcgctgaattcttttccctgcaaggaataaccctggggaaggaatgcattcccaggggtaggcctacagatgactgctctcgg

SEQ ID NO: 947822 - DNA, 314 bp, Homo sapiens
gaaactggatcccacccctaagagggctgcaggtacattgacagaaccaaagcatcaggccggaggcctcatggaagagttgctcccaccaagcgtgggtgagggcaggaaggatgccaactgtacttccaaatgcagtgtctgctccttagggaacagggagcaggtgggattgtttctcctgaagccaatcaagtaaatgactaattaaggmgatacaacattccaatcacaaccttaaaattcaacgcagtgcccaatgcctagcaggtgccttcatccttctgccagaagcaattctgatggagacacag

SEQ ID NO: 947823 - DNA, 691 bp, Homo sapiens
gccggaggagcgacagcaggcaatggccaaggtcagggccttggcggggtcaggaccttgcatcgccaaggggagccccttgggacctgcagcctgggccatcgcaggggcctgcgccagccagaggggtgccgagaggggacatgggcagtggctgcaggtaccaggacacgccctgccttctggccatctttgctggtcagggatggtgttcatgttaacataaatcacaagtagatcaaagatccaggtggcatccctgcagcgggtgagctggccagcgacaggctggataaaagaccgggctgctgtttaaaatgtccaaagcactttacaggtcctttcttcacatcaaacagtcttttccccctttttgctccagttaaaaggcaactgacgtatatattctaccatcccgaagccttatggttcttctggctagttattttaaataacaatagggaacttcgctttcagccgtggcctgttcttgcttcctgatgcgtgtttgcgcttctaacaagaaaatgttcttttacttaaacacgtcaaaaaggaggaagcrctagttttatcaaggtctctttaaaagtctctttaatgcacaagagttggcctgggccccgcccctctgcccggcagcctttgatgaaggttgatatacagtgtgccaggcgatctggcacacaca

SEQ ID NO: 947824 - DNA, 731 bp, Homo sapiens
accctgtttctggagaggagggattraatcagagaactattgaagagatggaatcaacttgatttgagctgaggtgaggagggaagaggaaacattgatgtcagggtttgtcagggttcaaccagagaaacagaacaagtagctacaaagtgaatatgtgggtatctagatatgtatgaattaaagggatgcattgcaaggaattggcttatgcaattgagaactggctaggcaatttggaatcccataggctgaatcttgttgcccacaggtaggaagcaattctttttcctccctttctcctgcaacattctttctctttctttttcttcccccctcccccttccttcctgtcttctttcccttttctctttttatctctctctcctctctgccttccactgattatcagcttatttagcataatctcctataaagtcacctgattagggactttaattacatctgcaaaatcccttcacagcagcacctagattcatgttggattgcatatttgagtgagtgtatgtgggtgctacagacggccacatctcccttccatctaccaactttcaggagaaggtcttccttgtagcccaccctaatcagaaacatactagaaagggaattatggggatattgtttagcctggccaaaatgacaccacaaagccatcacagatgactcccagttttcttaactagggcaactttgtgccttcttatgttaga

SEQ ID NO: 947825 - DNA, 612 bp, Homo sapiens
gagaacagaaatgaagccagggtgactggagctgggtggcaatgctcctcaaggtggtcaaggacctagaagccacagaagggcatkcaagcatgagcgacatgatctgacatttttcaagatcattctgggagctgaatgtggtatgaatggatgcaggaaaagcagttaggagtccagaagaggctgtagtgaagatggagagaagaggatgattatggcatatgtttcagaggtggagacaaaagaacacgctgatgagggggatgatgatgagacaaagaacagagcctgagtatccacttcatcaactaggtggatggtggcaccatttgctgaaatttataaaatggagggagaggcaggaattacaggaaagggaacaaaggcattgaaaattcagagctctgcccatgaggaagaagccaaggggagtcgtccagtagttgtttcagtcaagggtctggaactcagggctggggacacacatttggtcaccatctacctatgaatggtatttagagacactggaataaaaaagactggaaccgagaaacaagccctggttgttcagacaaaggaagagccagcaaaggaaacttcagacacagc

SEQ ID NO: 947826 - DNA, 596 bp, Homo sapiens
tagcaaacagcacaccaggaaattatatcctgcgcatggctcggagggtcccacacccacagagcctcactcactgctagcacagcagtctgagatcgaactgcaaggtggcagccaggctgggggaggggcgcctaccattgctgaggcttgagtaggtaaacaaagtggccaggaagctcgaactgggtggagcccaccgcagctcaaagagccctgcctgcctctgtagactccatctctgggggcagggcacacctgaacaaaaggcagcacaaacttctgcagacttaaacatccctgtctgacagctttgaagagagtagcggttctcccagcacagagtttgagatctgagaacggacagactgcctccttaagtgggtccctgacccctgagtagcctaactgggagaaacctcccagtaggggcctaccggcacctcatacagccagatgaccctctgaaacraagcttccagaggaaggatcaggcagcaacatttgccattctgcaatatttgctgttctgcagcctcccctggtgatacccaggcaaaacaggggatggagtggacctccggcaaactccaaca

SEQ ID NO: 947827 - DNA, 596 bp, Homo sapiens
tagcaaacagcacaccaggaaattatatcctgcgcatggctcggagggtcccacacccacagagcctcactcactgctagcacagcagtctgagatcgaactgcaaggtggcagccaggctgggggaggggcgcctaccattgctgaggcttgagtaggtaaacaaagtggccaggaagctcgaactgggtggagcccaccgcagctcaaagagccctgcctgcctctgtagactccatctctgggggcagggcacacctgaacaaaaggcagcacaaacttctgcagacttaaacatccctgtctgacagctttgaagagagtagcggttctcccagcacagagtttgagatctgagaacggacagactgcctccttaagtgggtccctgacccctgagtagcctaactgggagaaacctcccagtaggggcctaccggcacctcatacagccagatgaccctctgaaacgaagcttccagaggaaggatcaggcagcaacatttgccattctgcaatatttgctgttctgcagcctcccctggtgatacccaggcraaacaggggatggagtggacctccggcaaactccaaca

SEQ ID NO: 947828 - DNA, 615 bp, Homo sapiens
cctcaggaaacttacggccatggcagaagaagaagcaaatacatccttcttcacaaggtagcagcagagagaagaatgagagttcagtgaagggggaagccccttataaaaccatcagatctcatgagaacttactgtcatgagaacagcatgggggaaaccatcccatgattcaattacctcccactgtgtccctcccacaacacatggagattatgagaactacacctcaagatgagatttgggtggggacatagccaaaccatatgtattagtccattttcatactgctataaagaaatacccaagactgggtgatttataaagaaaaagaggtttaatggactcaccattccacatggctgggcaggcctcacaatcatggcaaaagacaaaggaggagcacaggcacatcttacatggtggcaggcaagatggcacgtgcaggggaactgccctttataaaaccatcagaccttgtgaaactattcactatcatgagaacagcacgggaaaaacccacscccatgattcaattacctccgaccaggtcgctcccacgacatgtggggattatgggagctacaattcaagataagatttgggtggagacac

SEQ ID NO: 947829 - DNA, 696 bp, Homo sapiens
gaacaagtggaactgtcattactagggtgggagtgccaattgtttcaactactttcgaaaactgtttggcagagtctattaaagctcagcagtgcatacttatacaatccagcaattctattctcggatctatctcagaaatgtgtatatatgtttaccaaaggataagtacacaaatattcatgggagcaactattcctattagtccaaaattggaaactaccaaagtgttcattgacatggtttggctctgtgtcctcaaccaaatctcatctcaaattgtaatccccatgtatcgagggagcgacctggtgggaggtgactggatcatggggtggtttcccccatgctgttcttgtgatagtgagggagttctcaccagatctgatggttttaaaagtggcagtttacctctgagctctctctctctcctgcaaccttgtaaagaaggtgcttgcttcctgttgatttctgccataattgtacgtttcctgaggcctcccccaccgtgtggaattgtaagtcaattaaacctcttttgtttttaaattacccagtctcaggtggcatctttttttttttttttttttttttttttttttttttaagacagagcctctttgcccaggctggagtgcagtggcgcgatctcrgctcactacaacctccgcctcccaggtttaggcaattctcctg

SEQ ID NO: 947830 - DNA, 736 bp, Homo sapiens
cccatggattgatggattgatggttttggaggttagataatgaatatggggtrgggcacttatcgtaccatttggtctacttttgtgtaagttatacattctccataattggaaagattttaaaaactaagatatggcagcacgtttgattgcaggtgaccatatctaccctagccaccttgaaggatttattttaaaaacttagtagtttgcttaaaagataagttgaaaattttaaatgctaacaaatcttcatcccaattttgctcttcccacacaacataagtgacttcctggccacagaacttatgtgaaaccatgtacaacacaaagtgaattatcagtttacttggagtctctgcctgtaactcagccctgacttggctgtgtttctttagagctgaagcctcagttgagactccttgctgcagaaacaggggccagacaccagggcccatgcaaaaactggagggggtcaccaagacccttgaggcctctgctcccaagaacatgggtcccctgttacatccaaagggagaaccacccacatgtctgaaggcatcttctagatggaggattctaaacacaccggaatgcctcagaatctgttctcagctccttctcttctcttgctacactttcttccttgagaattcatcctggttcacagcttcaaatttatctaaaagctaatgattcccaggtttatactgccagcctggactgtcccttgact

SEQ ID NO: 947831 - DNA, 884 bp, Homo sapiens
gctgcctgggagactgaggtaggaggattgtttaaacctgggaggcagaggttgcagtgagccaagatcacaccacggcagtccagcctgggtaacagagtgacaytctgtctcataaaataaaataaaaacaaaacaaaactcaaattccttacgtggcggacaggcccctacgtgagctgcccctggccacccgctgcttccgactcctgttggctccttctcctccagtcactggcattcatgatggtctgtgacttttactccagtctcaggatccttgtgtttgttcttcctattgtagtttgttctttcttcatacttcttatggtgtgttccgtcccttaatcagggggatggtggggtccttggattcaggtgtctacttagggttttctacgtaggttctcagagacattctcccgctgctgtacgtaaaagaggcctttttccatggtttacgttatttatttatttatctttttgaggtggagttttgctcttttgtccaggctggagtggacaatctggggtcactgcaacctccgccttccagtttcaagtgattctcctgcctcagtctcccgagtagctgggactacaggggcccgccactatgcctggctgatgttttgtgtttttagtagagacagggtttcaccatgttggccaggatggtctcaacctcctgacctcgtgatcctccctcctaggcctcccaaagtgctgggattacaggtgtgagccaccgcatctggctaccttacattttaaaataacccttatcactactgaaaatgatgtctttatatgtctatctccttattttctgtttccttactctcctcccaggaacataaacttcatgagggcaaggactttgc

SEQ ID NO: 947832 - DNA, 464 bp, Homo sapiens
tcaaaattccatttacatacataccatcctgttggttacacctttcctgtatcttcatctcctatatttatattgttctttatgaccactcacccagactactgctagttttgtaagagttttctrtggctctaggtattaccattacacagcccaatcaattcaacacaatacttaccattatctcaaacactcctcaaagacctgtggcttcctaataataaaatataaaatttaacatatatttatatatttattatctaccgatagcctataaaatagtccagattatctgtggcttacagttctccacatatgtaaaacttcactcccactcagattttcttacaatgcccactaataaatacaccagatcttgtccaaacttttcacttttttcaaagcattgttaaattcccaacacctttaaagtattcacctaatatccctctcttctgaactcc

SEQ ID NO: 947833 - DNA, 509 bp, Homo sapiens
ctagtggaaggcagctccattagtgccctcagctaccccttatgaaacaaaagaaccataccagctaagcccaggcaacccacaggattgggagaaacaacacatgaattgttttaagccccygtgttttggaatggttcattatgcagcgattgataactaaaacactagacttttttgaatctaaattttctttctaatcgtctcttccacttacacatccaaaaaatatgtcctacctatgtgttaagacaatggcttgcagcatggtccccacatcagcaacataagcaccttgttagaagcttgttagaaatgcaaattctaaggcccaccccagacctgatggttcagaaactcagggatggggcccagcaatctatattaacaagccttctgggtgatttcaatataacactcaagtttagggatcaccgggctcagccagtggttctccatcttggctgtgcaccttgatcacctgtggtctttaaaaatacaaacgtgta

SEQ ID NO: 947834 - DNA, 579 bp, Homo sapiens
tttttttatttctttgcagaatatcatttgtattttgatagggatcacattgaatctgtgtttgcattgtgtaatatggtcattttaacagtgttaaatcttccaatkaattagcatgggatgactttcccgtttgtgtgtcctttgaaatttctttcataggtgttttctaattttcatcgtagagatctttcactttttgattaagttaatttctagttattttattttgtagctattggaagtgatttctgatttcttttttagctcatttgttatttgtatatagaaacactactaatttttgtatgttggatgttggatttctatcctgcatcttactgaatttatcagttttttggtttgtttcgttgttttttgagacggagtctcactctgtcacccaggctagagtgcagcggcactatctcggctcactgcaaccttcatctcccgggatcaagcgattctcctgctgtagcctctcgagtagctggcattagaggcgcccgccaccatgcctggctaacttttgtatttttagtagagatggggttttgtgcccagcctatcagtttc

SEQ ID NO: 947835 - DNA, 587 bp, Homo sapiens
gaaggattccagatgacccctatgtgtctgacttgcaaaagagaacaaatagkgatgctgtttctagagagagaaaagaccaggtttggaaggggaggtcatgagttccattttggatctgttgacccccatgaagagataggaaggagatggctgggtatacaagtctggagttggaaagtctcgacctgggcaggaaatataaatttgtcagtcatctgactatagaaagatcacctagggaaagatcactgagggaaaaggcaagaaggtcttatggaatgctagtttatcttgattaggtactgaaggatgacttgctgaggagaatgaatagaagaggtaaaagatgaaggagataactaagtttccacatgattatagaaatcacaggaagaaagtatttcacgtaggaggggctggctgtggcataagatacttctgagagtttaagtaaaatggactgaaaaatagcccttaaatccagtcattgcaggccactggtgactctgggagaactgtttgcactgatgagggaagacaaattaagctgaattgtagtgactggtgtgtgagaaatagagcca

SEQ ID NO: 947836 - DNA, 611 bp, Homo sapiens
cacagattaatacagtaaattggtaccagtagagtggggcattggtgaaagagacccaaaaatgtggaagcaacattggaattgggtaacaggcataggatggaaaagtttgaggggctcagaagacaggaaaatgtgggaaagtttggaaccttctagagacttgttgaatggctttaacaaaaatgttgatagtgatatgaacaataaggtccaggctgagatggtctcagatggagatgaggaacttgttgggaaatggagcaaagatgactcttgttatgttttagcaaagagactggcagcattttgcctctgccctagagatttgtgggactctgaacatgagagagatgatttagggtatctagcagaagaaatttttaagccgcaaagcattcaaaatgtgacttgggtgctgttaaaagcattccattttaaaagggaaacagagcatgaaagttcagaaaatttgcaacttgatgctgtagaaaagaaaaacccattttttgaggagaaattcaagctgrctgcataaatttgcataagtaacaaggagcgtaatgttaatccccaagaccatggggaaaatgtctccaggccatgtcaga

SEQ ID NO: 947837 - DNA, 678 bp, Homo sapiens
ttccaaatgggagaaatcggccaaaacaaagggactagaggtcccatgcaagtctgaaatccagcagggtggtcaaatcttaaatttccaaaatgatcgcctttgactccaggtctcacatgcaggtcacgctgatgcaagaggtgggttcccatggtcttggacagctctgcccttgtggctttgaagggcacagcctccctcctaactgcctttgtgggctggcattgaatgtctgtaccttttccaggcacacagtccaagctgtggatggatctaccattctggggtctgcaggacggtggtcctcttctcacagctccactaggcagtgccccagtaaggattctgtgtggggggctctgaccccatatctcccttatgcacttccctagcaaagattctctatgagggccccaaccctgcagcaaacttctgcctgggtatccaggcatttccatacatcttctgaaatctaggcggaggtttccaaaccacagctcatgtcttctgtgcacttgcaggctcaacatcatgtggaagctgccaagacttggggcytgcaccctctgaagccactacccaagctctattttcgtccatttcagccatggctggagcaactgggatgcagggctccaagtccctaggctgcacacagcatggggaccctagggc

SEQ ID NO: 947838 - DNA, 545 bp, Homo sapiens
ctctgcttcacttatcgaatggaatgtttttaatagcaccaagtcacctcttgaatgctttkctacttagaaatttcttctgccagataccccaaatcacctctctcaagttcaaagttccacaaatgcctagggcagaggcaaaatgctgccagtctctttgctaaaacataacaagagtcacctttgctccagttcccaacaagtcttttatctccatctgagaccaactcaacctgaatttcattgtccatatgattatcagcattttggtcaaagccattccacaagtctctagggagttccaaccattcccacactttcctgttgtcttctgagccctccaaactgttccaaccactccttgttacccagtttcaaagttattttcacattttcagatatcttttcatcttttccctaatgccccactccactggtaccaattaaatgtattagtccattttcatgctgcttcataaagaaatacccaatactaggctatttacaaaagtaagaggtttattggacttacagttccacat

SEQ ID NO: 947839 - DNA, 692 bp, Homo sapiens
  misc_feature 674: n = A,T,C or G
aggctggagtacagaggctcagtctcagctcactgcaaccccttccccaacmctgccgggttcaagcgattctcttgcctcagtctcctgagtagctgtgattacaggcatgcaccaccacacctggctaatttttgtatttttagtagagatagggtttcgccatgttggccgggctggtctcgaaatcctgacctcaggtgatctgcccagcttggtctcccaaagtgctaggattacaggtgtgagccaccaagccgggccggcaattagattttaaaagttggattctagaggaataaatcacagtaggtcaaactgcaatcactgatgaaactgctggtaagacgaagaggtgaaagataggtataatggctggtaagtgcgtccgtcacggtgctctcattttctgtgtagagtgctgatgaagaagggctccttgctctcttggaaagttgtgtgttgggtatttttggagtcacaaaggaatgtgagtgcgtggtgagtgacaaggcatgttaggacgtgcctgagtagggagaaagcctgcaattggaatgatgcttacccaaatgaacattgaaccaatttgcctttgaggaaatagtgacagatttggctaatgagaggttgttttacattttcctctaaagagggtcaaatttgacatagtngaattaccgtgtcgctgt

SEQ ID NO: 947840 - DNA, 571 bp, Homo sapiens
taccctcccattagaaatgccatgtgaatgcaactgatacacccagggccagcaaggggacccaattttttgatgttcakttggctcactttccctttcttgattaattgcccccaatcctagaatactatattatacttctgggctccaaatcggcccccaaaccatagcattctacttcctcttcctatagagatggacaggacagctagggtatcaacattctagtaagagctgactagaaactgttccacataataagagctctccatgccagccattgactttggcatgttactgacattatccctaactttgctatatctctgcaaggtaggtgctgcagtttccaagttatagaccaaaagaaggttacttcactttttaaagctcttacagcctgtaaattagagagctgggcttcaaatccagccctatgtgacccaaagcccagcccatggtcttcttatcataacccactgtctcttcttctcagtttccaacaaccaaaatctgtttagctttcagcttgaataattcaagtagactttcctctacttgggcacatttc

SEQ ID NO: 947841 - DNA, 574 bp, Homo sapiens
attacaatgtacacataaagaatgtgctgtttctcagtggtgctattaatcttccttctataccacttatagttcttgggcatctgattaacaatgacctccttatatgtttattgggggatagatagaggttaggtataattgtatatctagttagttttatcactgcttgattaaccggctatatgactttgcattaggaatctcaataatactgacttaatattgagaagggtggcaatcctcatgggagctggtcaaaactggagagacaagataactcacttgtaaaagcatattgaatatacatattatttttataaagcaactggaataatgtaagacttcgcaaaatcttcctgagagatgggcaagtataaaatatagacagctaaatcatattgaggatggggattaaaaggggttgaaatatactatatgcaatgatctttataaaacactacaytcaataatcttgagactccatgatagctttcatttattcactcattaaacaaataattattgaacttctattgtgttctcattgttgtgtaccccaataattaatgtt

SEQ ID NO: 947842 - DNA, 623 bp, Homo sapiens
agacagtgcttatttaccaccccaaaaatcctaggtcccttaaggattatgctaaatctctgcccatgctcatgctctataaatggaagaacaaagcctacatgacaacacattacagcrtggtttactcaatattttaagcccactgttgagacctactgctaaataaaaagattcatttcaaagtattactgcttcctgaccatgcctctggtcacccaagagttctaatggagaagtacaaggaaattaattttgttttcatgcatgctaacacatggtcatttcatagcccttaaataaaggagtaatttcaactttcaagtcttattatttaagcaatacatttcatgtagctatcacttccataggtaatgattcctctgaggcatctaggcaaggtaaattgaacaccttctggaaaggatttaccactctagatgccattaaatacatttgtgtttcatgagaggtgttcaaaatagcaatattaacaggagtttggaagaagctgattttaaccctcatggatgactttgaaggattcaagacttcagtggaagaagtcactgcagttgtggtggaaatagcaagggagccgaaattagagatgaagcctgaag

SEQ ID NO: 947843 - DNA, 622 bp, Homo sapiens
atttctaactaaatctcagtgttagacattgtcaaattttaattagcaaatctcttaccctatctttattagttctattcgaaactaccattagagaatagwataaacagctctatgcaaataaactagaaaatctagaagaaatgaataaattcctggacacatacaccctcccaagactaaaccagaaagaaggagaatccttgaatagaccaataacaaattctgaaattgaggcagaaatagcctactaaccaaaaaagcccaggtccagatggagtcacagctgaattctaccagaggtacaaagagcagctgttgccattccttctgaaagtattctaaacaacagaaaatgagggactcctccctaactcattttatgaggccagcatcatcctgataccaaaacctggcagagacaaaataaaaaaagaaaatttcaggcaaatatccctgatgaacatcgatgtgaaaatcctcaataaaatactggcaaaccaaatccagcagcacatcataaagcttatccaccaccatcaagtcagcttcatccctgggatgcaaggctggttcaacatatgcaaattaataaacataatccatcacataaacagaacca

SEQ ID NO: 947844 - DNA, 561 bp, Homo sapiens
aaaaataaagttggtataaatatattaataatcaaagtagacttcagagcaaggaaaatcaccagggataaactgagacatcatgtaataatataamagtaaattcaccaagaagacatacaaatctaaatgtgtgtgcacctaacagactttaaaaatacgtgaagcaaaaatagacaaaactgaaagaagaaatagacatattctcaatatatatataataattctaaaatgtatatgggaagacaaaacaaacaaacaaaaaaccagaatagccaaaacaattttgaaaaaaggagaaagttggatgacttacactgatgttaagatttactacaaagctatagtaatcaatatagtgtggcattggtgaagggatagacatgtagatcagtggtactgaattgagtccagaaattggcttcattcaaatatggccaattgattttttatgaaattgcaaaggcaattcaatggaaaaaggatcatcttttcaacaaatggtgttggaacaattggatatagacatgtaaaaaaaattaacctccacctaaactcatg

SEQ ID NO: 947845 - DNA, 561 bp, Homo sapiens
aaaaataaagttggtataaatatattaataatcaaagtagacttcagagcaaggaaaatcaccagggataaactgagacatcatgtaataatataaaagtaaattcaccaagaagacatacaaatctaaatgtgtgtgcacctaacagactttaaaaatacgtgaagcaaaaatagacaaaactgaaagaagaaatagacatattctcaatatatatataataattctaaaatgtatatgggaagacaaaacaaacaaacaaaaaaccagaatagccaaaacaattttgaaaaaaggagaaagttggatgacttacactgatgttaagatttactacaaagctatagtaatcaatatagtgtggcattggtgaagggatagacatgtagatcagtggtactgaattgagtccagaaattggcttcattcaaatatggccaattgattttttatgaaattgcaaaggcaattcaatggaaaaaggatcatcttttcaacaaatggtgttggaacaattggatatagrcatgtaaaaaaaattaacctccacctaaactcatg

SEQ ID NO: 947846 - DNA, 615 bp, Homo sapiens
agtttttttcatcttcccaaccgcactacccactggagagaatttctctttttcctggagatcgcctacctcagctccagtcatcctgcccttacaggcactcacagcaccctgagcatttcctttcgtggttttcctaggttggatgtaccgtttcctggatcctgtgtcccatgtatttcactttttttttatttattcatatcctcccttcttttctttctctttctcctccaacccccaaaaccctttctaaagtgcagccttaagtaactttcaaaaaagtgttatgtggaaatcattttctggggctgcatttctgaaagcgtctttaatgtactttcacacttggtttaattttactgggtatagaactagaggctgaaaatattttttgcttcagtgttttggaagcattgcctcattcgcttcttgcattcagggttgatgtggagaagtctaatgccacactaacttatgtctctgttttctgaaattttgtgagggtgtatctaygtatgttttggggttttggtttttcctgtttgtactgtttactaagtggggtctgttaatcagaatccttgtgtcctctattatgtatttgatattatt

SEQ ID NO: 947847 - DNA, 476 bp, Homo sapiens
atgcatggagctgtcatctcctaggataacaatgccttcttctggaatacttcctgaaagacctgcctaaggctgttttacaattaactckttttttaataagtagaaggagtaaactcaaaagtaatgataaaaagtatagtatagtaaatatataaaccagtaacatagtcatttattatcatgatcaagtattatgaactgtatataattgtatgtgccatacttttatatgactggcagtgcagcaggcttgtgtacaccagtatcaccacaaacgaaatgagtaatgccttctgctatggcattactatggctacaacatcactaggccataggaatttttcagttccattataaccttatggttccaccatcgtacatgcggtctgccattgatcaaaacattaagaggcatatgattgtaatattgatgtaaaaactgagacttatttcaaacaagaaacaaattctag

SEQ ID NO: 947848 - DNA, 618 bp, Homo sapiens
aggcaaagctgtaaaggaagtaatgatgtggctcaggaaagaggcatgaggttaaagmaaaactgtggcaagggtagcagagatggaaaaaaaaccaaaaaacagaaaacaaaaaaacacaacacagcaagagaacacgttggcttccaatgtgaattttcattctttgaaagagggagcatgttcatgtcctttgcccactttttgaagacatttatgcagccaaaaaacacatgaaaaaatactcatcatcactggccatcagagaaatgcaaatcaaaaccacaatgagataccatctcacaccagttagaatggcaatcattaaaaagtcaggaaacaacaggtgctggagaggatgtggagaaataggaacacttttacattgttggtgggactgtaaattagttcaacccttgtggaagtcagtgtggcaattcctcagggatctagaactagaaataccatttgacccagccatcccattactgggtatatacccaaagggctataaatcatgctgctataaagacacatgcacacgtatgtttattgtggcactattcacaatagcaaagacttggaaccaacccaaatgtccaactatgatagactgaa

SEQ ID NO: 947849 - DNA, 618 bp, Homo sapiens
aggcaaagctgtaaaggaagtaatgatgtggctcaggaaagaggcatgaggttaaagcaaaactgtggcaagggtagcagagatggaaaaaaaamcaaaaaacagaaaacaaaaaaacacaacacagcaagagaacacgttggcttccaatgtgaattttcattctttgaaagagggagcatgttcatgtcctttgcccactttttgaagacatttatgcagccaaaaaacacatgaaaaaatactcatcatcactggccatcagagaaatgcaaatcaaaaccacaatgagataccatctcacaccagttagaatggcaatcattaaaaagtcaggaaacaacaggtgctggagaggatgtggagaaataggaacacttttacattgttggtgggactgtaaattagttcaacccttgtggaagtcagtgtggcaattcctcagggatctagaactagaaataccatttgacccagccatcccattactgggtatatacccaaagggctataaatcatgctgctataaagacacatgcacacgtatgtttattgtggcactattcacaatagcaaagacttggaaccaacccaaatgtccaactatgatagactgaa

SEQ ID NO: 947850 - DNA, 758 bp, Homo sapiens
cacactgccacgcccggctaatttttgtatttttagtagagacggggtttcaccatgttagccaggatggtctcgatctcctgaccttgtgatccacctgcctcagcctcccaaagtkctgggattacaggcgtaagccaccgcgcctggccaaatcttttataaaattataccttcaggctatgtgggtataaggtgtatatggagcaaaagtgaatttcatgtttaaacttgggtcctgatatggtttggctttgtgtcctcacccaaatctcatcttgtagctcccataattcccatgtgttgtaggaaggacccagtggaagatgattgaatcatgggggcgggtctttcccatgctgttatcgtgaaagtcagtgggtctcatgagatctgatggttttaaaaacaggagtttccctgcacaagccctctctctctttgcctgctgccatccacgtacaatgtgagttggtcctccttgcctttcaccatgattgcgaagcctccccagccatgtggaactgtaagtccaataaacctctttcttttgtaaattgcccagtctctggtatgtctttatgagcagcatgaaaacagacgaatacacgtcccatccccaagatatctcatcaggtatatgcaactacttcaaaatccaaaacacttctgtcccaagcattttggatgagggctattcaactggtaccattttcctcattttatacaggagaaaactgaggcctggagagggagga

SEQ ID NO: 947851 - DNA, 578 bp, Homo sapiens
cttcccaaagatttatactacctttcctttacaacattatgtgataatgtaacattattgctgagatgtgactgactacccagaaagtacatttccttccctgccatcttccaatgagttggaaacatagagcaattttgtctaatatatatgtaagagatgtatgctgcttccaacccagttcataaaacctccacagagccaagtgatatcaccatccagagtaacttggtcctgttaaagtggcagaacctctgtgaacttgtgtccttgatttacattttgaagcataaagccctctctttatgtgggtgaaaagcaagcctctaatctattatgctcagcctagggtgtgctttgggggtttatgtggtatagtagacagctttacatactactttttccaaaaaccactgaggccaacatgttttttcaatttgttgagcttatgatcttctgaataaacattgtcccacagtttcatcagcctctctggagtctgccactgttatctggtccattctgcaacctctgcctcaytctcctggactgatatgaggccaggctctgtttttctt

SEQ ID NO: 947852 - DNA, 605 bp, Homo sapiens
gaatatgtgaagtggaggcctttgttccaaagctagcaataygcattttccaactttttggtttctatttgatattgtcttcttctgatttagtgattgtatttaatatttgtgttgattacattttataaataaaaaatgtggtattggtgttcattcatattcataatatatgtagatctctattcctacaattaaccactctttctttctccatacagcaagattcctccattatctcatgtcatgtttgaaaagagaaactaaatgaggaagttagttataagggattatctagagcagtaaagatgtataagaatgtataaggatcatgtgcatcaggcatttttttttttttttttttgagaaggagtctcactctgtcaccaggctgaagtgcaatggcgcaatctcggcttactgcaacctctgcctcccgggttcaagtgattctcctgcctcagcctcctgagtaggtgggactaccaacatgcaccaccacacccagctaatttttgtatttttatttgagaaagcatttcaccatgttggccaggatggtttcgatctcttgacctggtgatccacccaccttggcctcccaa

SEQ ID NO: 947853 - DNA, 743 bp, Homo sapiens
atttctaccaaagcccagtaacaggccaaaagctgtctcttaaaaggagagtagttatctgcagaagatggcagaaccttgctccaaaatcctagaggcctctgctgtgattcacctatacggacctaccaaaggctccaaacagcatccctatctgccactgacacctcaggcacaattggatctgctgggtcttatggcccaactgtcagagcagcttgcacagcagccttgacctgtagcagagccttctcctgttctggaccccactcaaaactggcagccttttgagtcacttgataaatgggccagagtaacatacccaaatgagggatgtgttgcctccaaaacccaaataggtccactaggcattgtgcctttttcttggttgcagggggtgccaaatgcagcaacttatccttcatcttagaaggaatgtcttgacagaccacacacaactggacccctggaaattttactgaggtagaagttccctgaattttagttgattttatttcccatcttctggcatgcaaatgtctcaccaataagtccagtgtgtttgctgcttcttgctcagtggatccagtcagcataatgtcatcagtgtaatggaccagtgtgatatcttgtggaagctaaaagtgatcaaggtytctctgaataagattattacacaaagccagagagttgatatacccctgaggtaggactgtaacatacattgctggctttgccagctg

SEQ ID NO: 947854 - DNA, 607 bp, Homo sapiens
atttgtgtattttgtttttgttgcttgtgcttttgcagtaatgtccaaaaatttattgcccaaaccagttttataaaatttttcctttttattttctcctaggagctttacastgtaggttatatttgtagtatttaatcaatgttgagttaaattttatatatgatgtgagatggggtatatttctattcttctgtatgtagacatgcagttttcccaacaccgtttgtgcaagagattgttctttcccacttgtatattcttggcatctttgtcaaaaaaaataaatggacagtaaatgcataaacttacttctgggacctctattctgttccactggtctgtgtgtctctttttatgctagtaccaggctgtcttgcttatcatagatttatggtaccttttgaagtcaggtattgcgatgtttccagctttgttctttttgctcaagattgctttggctatttgaggtcctttttagttcaataaaaaatttttcatttctatgaaaatatgtcattgtagctttaagagtaattacacttgatatgttgattcctttgatagtatggacactttaacaatattaactcttccaatgcatgaa

SEQ ID NO: 947855 - DNA, 585 bp, Homo sapiens
tgagtcaattaaacctcctttgtttataaattaaccagtctcaggtagtatctttctggcattgtgaaaatggactaatacatatatattacttggacaaaagcctgccactatgaaagttggacatagctctaacattctagtttttaacaaaagaactaagcaattcatttttgcatgactgactctttgttgatattctgatctcaacttaaagattataccttcaggctgggagtggtggctcacgcctgtaatcccagcactttgggaggtgggggtgggcagatcacgaggtaaggagttcgagaccagcctgaccaacatggtgaaaccccgtctctactaaaaacacaaaaattagccgggcgtggtggtgcacgcctgtaatcccagctactcaggagcctggggcaggagaatcatttgaacccgggaggcggaagctgcagtgagaaaagatcawgccaccgtactccagactggaagacagagcgagactccagaaaaaaaaaaaaaaaattatatcttcagaggtgtctttcctgactacctagtgtctctctttccataacatcatgctac

SEQ ID NO: 947856 - DNA, 579 bp, Homo sapiens
ataaagatcttcctgtttctgacctgcagtttcctcaactgtggacttcctgattggtagagtcccagcacarggccttatgggttggcagtatgtgttagacagcacttgctgcactgacatgactcagcagagaagtcattgcttgtcatggcgattctgaggggggcacatgcttctttcttgcatgtaagggaggggataggcagctctgttacaccagcaccatttgtgtttatttgtttggttttagcattttgcattttgaatcaacagagtttttaattgcacaaaacattacaagtattgctttatacagtcactacttacttatatttatcctccccaacgttcttttatcacactcttattttcatgtttctccctgggattgttttcctcttgtgtgatgaacactctattttttgtctctttctgtttcagtttgcctgaaaatattttgtcttcttcattttcaaaggataactttactacctatataagattctagttggcagttatttccttttttgcaactgaaagatgttattccattgtcttccagttcatattgtttct

SEQ ID NO: 947857 - DNA, 470 bp, Homo sapiens
taaggaatttaaacatgattaagacagattgccacgtgtgtttagaaagaactctggggagactaagggctgaatgggaatgaggtatatgtgtaaatctgcagcatgactggaggcagggaatacaattaggaggctgtagcactaatcctagtgggagatataagtcgatgcccaagtttcatctccagaggagtgataggttggaatcctgtgaatgaacgggatgtctaggagacagtaaacagggagtatagaagagggccaataaattaactcccaggatcagtttaaaaatacttggaaaataatccaaacaatctgcacttaatcatgtacagggaatagcaagaaaatccatggttatggaaggcaagatgacaaaaggttgcaaaagcaatattccgtttccrtaagcatccaagagaacttgaagagcatttgacttcctaaacaatctctctagacca

SEQ ID NO: 947858 - DNA, 557 bp, Homo sapiens
ttgttttaacagaaaggataaatgcttgagggtatggatgacctattttccatgatgtgactatatgtgttacatgcctatatcaaaatatctcakgtaccccattactatatacacctactatgtacccacaaaaattaaaaattaaaagaaaattcctccaaagagttgtctattctccttgtctccataccatgtattgtcactctcttgtcacacttcaatcaatctttgatttcaagcctccactgagatctctctcactaaggtcaatgataatctccatattgtcaaatcctatagtcaatcctcaaatcacatttagcttgatcgctcagcaacatttgtgacaattgattatgccctcattctggaaatacttacttcacttggatttcatgacaattatttcttcttatgttcctcctaccttactagctactcattctcatctccttcactcgattcttttacttcctgaacttgaaacgttggaatgtgccagagctggtccttggactcattctctatctatacttattcactaaagtcattgt

SEQ ID NO: 947859 - DNA, 554 bp, Homo sapiens
gctgcagaatacacattgttcctatcagcacatggaacatcctccaggaagagaccatacgttaggccataagacaagttataactaatttttaaaaattgaaatcatatcaagtatcttctcagactacactagaataaaactagaaatcaataacaaaaactttgtaaaccacacaaataaatggaaatttaaacaatgtgcttgctcatgaatgcccattgggtcaattaagaaattaaagatcatcaaagactactacaggcaactatatgctaacaaatcagataacctagaggaaacagaaaaattcctggatacatgaaaacctaccaagactgaaccaggaagaaacagagcagaagaacctgagcagaccaataacgagtaatgagattgaagcaatagtaaaatgtctcccaacaaraaaagcccaagactaaagggctttactgctgaatcctaccaaaattacaaataactaacctcagtttttctcaaactattccaaaaaatggaagagaagttaattcttcctaatccattctacaagg

SEQ ID NO: 947860 - DNA, 587 bp, Homo sapiens
cccctctcttcacaaaaaaatacaaaaaaaattatcctgtagtgccagctactcgggaggctgaggcaaaaggctcagtggagtcgcagagttcgaggctgtagtaagctgtgactgcgccactgcactcaagcgtgggtgacagagcaagaccctgagtcaaaaaaaaaaacaaaaaacagtaaagtgaaataactttcaataggtatcaagaaggggagaaaatacagaaacctctaagagtataaagggagggggctaattgagaatgagtagattctaagaaagtagaatttaaatggagttctgttaaatgaaggagagaagtacacatgaagtcccaaggtgcaaaggagctcagagcattggaggacccaaagggacaacaggtggctgcaggcagcggggaggcactggggcatagagatgtgggaagggccagatcatgctgggccttttcagtcatattacraaattggagatttaagcctccattgcaatctaagcattaccagcattgtaagcatcccctgaagattctctccttaaattgcctcctagttgccatgtttttgaaaactgtttat

SEQ ID NO: 947861 - DNA, 532 bp, Homo sapiens
tttagatggtgcccacccagattgagggtaggtctgcctctcccagtccactgactctccartgttaatctcctttggcaacaccttcacatgggtattatatgcacaatgctgtgagatcaagatagttatcgccagcttcgtgatcacagacacacccaggaacaatactttgcatcctttaattcaatcaagttgacactcagttattgaccatcacaccttccacggtgtaaattcccagcatggccaattttaagccaccaacatgatatccctgaacatggagctgggaagggaagtgcacaagtggctctgaagagctggaatgagccagctctagcataccactgtgggtaccaatgagtagacaaaacagccacctgtcccctcttccttccctaagggagctatgaaggccaagagacatgttgcttttctcattcctctttaccttaggctcccgtcaaagccttgagaagaaccaattgtcattccaggtgaaaaaaaagcacctcactgtccctcttta

SEQ ID NO: 947862 - DNA, 590 bp, Homo sapiens
ctttcttacaccttatacaaaaattaattcaagctggattaaagacttaaatgttaggactaaaaccataaaaaccctagaagaaaacctaggcagtacccttyaggacataggcatgcgcaaggacttcgtgactaaaacaccgaaagcaacggcaacaaaagccaaagagacaaatggaatctaattaaactgaagagcttctgcacagcaaaagaaactaccatcagagtgaacaggcaacctacagaatggaggaaaatttttgccatctacccatctgacaaaaggctaatatccagaatctacaaagaacttaaacaaatttacaagaaaaaaacaaccacatcaaaaagtgggcaaaggatatgaacagacacttctcaaaagaagacatttatgcagccaacagacacatgaaaaattgctcatcaccactggttatcagagaaatgcaaatcaaaaccacaattagataccatctcacaccagttagaatggcgatcattaaaaagtcaggaaaaaacagatgctggagaggatgtggagaaatagaaacgcttttacactgttggtgggagtgtaaacta

SEQ ID NO: 947863 - DNA, 627 bp, Homo sapiens
cttaaacagatgctggtatattcataccaaggaacactatgcactcattagaaaaaaaatagatttctgtaaataaaagggaatatgaatatgttcataatatattttaagtaaaaaaggcttaaaatagcatgtagcacatgatcttattttaaataaatatatatttatttttacgtattatatataggaaatctctagtgggataacagcaatcttcatttttttgtatttctctacatgtttcaaatgattttgacatgtttctctacatatgtttctctacatcatatttcaaatgatctttgacacaatgacttattgctttgtgtattagggttctctagagggacagaactaatagaagatataaatatatatatataaatgtatatataaataaatatatatatgtaaagggagtttattaagtattaacttacaaaattacaaggtcccacaataggccgtctgcaagctgaggaacaaggagagccagtccgagtcccaaaactgaagaacttagaatcygatgttcgaggacaggaagcatccagcacaggagaaagatgtaggctgggagactaggccagtctctctttttcacgtttttctgcctgctttata

SEQ ID NO: 947864 - DNA, 627 bp, Homo sapiens
cttaaacagatgctggtatattcataccaaggaacactatgcactcattagaaaaaaaatagatttctgtaaataaaagggaatatgaatatgttcataatatattttaagtaaaaaaggcttaaaatagcatgtagcacatgatcttattttaaataaatatatatttatttttacgtattatatataggaaatctctagtgggataacagcaatcttcatttttttgtatttctctacatgtttcaaatgattttgacatgtttctctacatatgtttctctacatcatatttcaaatgatctttgacacaatgacttattgctttgtgtattagggttctctagagggacagaactaatagaagatataaatatatatatataaatgtatatataaataaatatatatatgtaaagggagtttattaagtattaacttacaaaattacaaggtcccacaataggccgtctgcaagctgaggaacaaggagagccagtccgagtcccaaaactgaagaacttagaatccgatgttcgaggacaggaagcatccagcacaggagaaagatgtaggctgggagrctaggccagtctctctttttcacgtttttctgcctgctttata

SEQ ID NO: 947865 - DNA, 597 bp, Homo sapiens
aaaggctccaaacagcatctctctctgcagacacttcaagcacaattggatctgctgtattacatggctcaagtggcagagcagctagcacagcagcctggacctgttgcagagccttctctcgtctgcacatcactcaaaaatagcagcttttcagctcactcagtaaacgtgccaagtagcacacacaaatgaagaatatgttgcctccaaaattcaaagaggcccactaggcattgtgtctctttcttggttgtaggagggggctagatgcaacaacttttccttcaccttagaagggatgtctcgacatgctccacaccactggacccctagaaattttacagacgtaggaggcacctgaagttttgtcaaatttatttcccaccctctggcatccaaatatcttacccataagtctagggagtagctgctacttcttcctcactaagtccaatcagcataatgtcatcaatgcaatggaccactgttatagcttgtggaaaaaaaaggtgagcaagatccctgtgaastaaattatgacatagtgttggagagctgatagactcctgagaaggacagtggcagtgtattgct

SEQ ID NO: 947866 - DNA, 762 bp, Homo sapiens
atatatctattcttattacacatttggaaactggggaaatgatcacaggagggtttaacaatccactgtgagatgaacctgagttaaaactccattgagccaggcgtcgtggctcacgcctttaaccccarcactttgggaggctgaggcgagcagatcacctgaggtcaggagttcgaggccagcctgaccaacatggtgaaaccctgtctctactaaaaatacaaaattagctgggcatggtggcgcatgcctgtaatcccagctacttgggaggctgaggcagaagaattgcttgaacctggaggcggaggttgcagtgagctgagattgtgccattgcactcccacctgggcaataagagtgaaactccaactcaaaaaaaaaaattagccaggcgtggtggcaggtgtctgtaatcccagttacttgggaggccgtggcatgagaattgcttgaacccaggaggcagaggttgcagtgagccaagattgcatcactgcactccagcctggaggatagagtgagactctgcctccagaaaaaaacaaaaacaaaacaaaaaaaaccctccattgattacctgacctccataagccagaggtccccaactcccaggccacaaactagtaccactccgtggtctgtcaggaaccaggccacacagcaggaggtgagtagcaggtgagtgagcaaagcttcccatgtatttatagccactccccatcactcacattaccacctgagctgcacctcctgtca

SEQ ID NO: 947867 - DNA, 633 bp, Homo sapiens
tagtacactgttagtaagatggagaccctttacaggtgattagatgcttctctcttgttgtttttaaaattatctytttgtcattgactttagactagttgattacaatatgtagtgtacaagaccttttggtattatatttgtctggagatcactggacctcttgtatctggatgtctaaattgcttgctagacttcaaagttttcatctattatttcattagttttttttcaagcacctacattttatcttcacctttgcagaccaataattcctatatttgattgctttatggtgtcccatttatcacaaaagttttgttaattctttttacacgttttttctttatttttatttgaccaggttcttcaaaatactgtcctcaggttctgaaattcttccgttttgtgtagtctgttgtcgaagctttgaagtgtactttgtatttcattcaaggaattctttattatagaatatctgtttgattttttacgatatcaatctatttggaaattttcttgttaatatcttgaattgtttttattttctgcatttttgtttcagaattctcttgcatttcactgaactgtagtccataactttgaattctttttctggggttttggggattt

SEQ ID NO: 947868 - DNA, 548 bp, Homo sapiens
tgattttttacgatatcaatctatttggaaattttcttgttaatatcttgaattgtttttattttctgcatttttgtttcagaattctcttgcatttcactgaactgtagtccataactttgaattctttttctggggttttggggattttcttttgttggaatctgttattgggaaattatttttttcctatggaggtgtcatgtttccttgttttttcatatttcctgtgtcttcacattgatatctgcacatttgttgtaaggtacggccttttcaatgttttttttttaaatttgctttcatagggaaaacctgtgacttccttagcagttcaggctgctgttattggtggaggctataatgaagttttgcttaggattgggatgccagagggggcattcttcgggctagagttgtggcagtgttgggctgaatgtggtagttcttggggcttgggtgacgtatcatggcattgctgttagtgggmctattcatgggcctctaggtagtttgctcaggttccagtagtggcagcagtgagctac

SEQ ID NO: 947869 - DNA, 587 bp, Homo sapiens
cttctgttatttacatctaccattaatatgtcacatctcttacaatcagtaaaccaatcatgctaggttattttcaactaaagcccatgctatattcagatctttagttttaatctagtgctattttcctgttccagaatgacagccaagatgctgacattatatttagtagtcatatgtcctcaggttattcttggtcgtgactatttccagctttcttctattagtggtagtgtgctgtgtcttagtttatcctatttgtgtctttatagttgaaatatgttccttggaggcagcatatagttagttaggtcctgatttttatcaatgtgataatcattgtctcttaactaggacaatctttggtttttaatcattcctacctaatatgattatttatttggttaagtttatcatcttcttattttgatgtgtcaacttaatttattctctgttccyattttcttcttttttgcgttcttttggatttgctatttatgactctttttaaatcgctttttgggtttatcagtgaaactcttttaaagtattttagtagttgctttaagatgtatagtttacatctt

SEQ ID NO: 947870 - DNA, 441 bp, Homo sapiens
ttgcagacagcctattgtgggaccttgtgatcatgtaagttaatacttaataaactcctatatatataatatatatatggatatatataaamatatatgatatatataaatatatatggagatatatatttatatatatcacctattagttctgtgtctctaagagaaccctgactgcagcactgcaacccctttctaggacatccctgaaggacagtggtgaagtgaagggaaatcttctctgtgggcagaactttgagcagtgcacctagttgtgcactttccatggaaggagaaatggccagatgtgtgattatatactgattcatgggctgtagccaatggttaggctggatggtcagggatttggaagaagcatgattggaaaattggtgacaaagaaatctggggaagaggtatgtggatggacctctctgaatg

SEQ ID NO: 947871 - DNA, 617 bp, Homo sapiens
ctaaagtcacttgaatttttgtttctcttaaattatgtactagagcccaattcattaaaaataaaataaaaattatcagtattatttattttcatttcagccaccaacacagcacaatgaaacacattgctggctgggtttcagccatggctatgccattcaaaaattgctgggactttggttaagtcacttatgctttgtgttttcatctgtaaaatgagtatctcaggttagaatacctctaagatcgcttacagattcctcattccagaatccaaccttttctaagcaatccttccccatctattagcagttcatttagaaatccttttatgaaaggacaatttttcagtatagattacattgtaatgattaggtgggaagtgtgtgccctaatagccggaatgaagttaagtgtatttttgtaaatatgcaaactcctcatttgtctttatgaggtcccatttgtcttttggcattttgatgagtaaaccaatgccaaaccaatttagarcaagtaaaatatgttatcatgagatatttgttttgtcaattgtactcacaaagtccctctctctctctctctctctcttcctctctttcttttagtctgttct

SEQ ID NO: 947872 - DNA, 583 bp, Homo sapiens
ccttcccaaatagtcagagtctccaagttgaattgtgggaatgtagggtccaaatgtcagccctcctgggggggagcacttatcatatggtaagtactgtgataggcttggggccaccaatattaataaracctgtcccatccctccaggaggtcatggcataaactccttcccactgtcaggcactgggagttgtgtgtaataatcagcttaagaccttgtctagcttctaggccaggtgttaagagggttggttttgcattcagacctatcttggttcaaattctgtcactgtcatttatctacctcgtggctttggggaaattagtgactctctgtgactctaaattatcttatctgtaaaataggcataaagacacccaccacacagggcgattgtgatggttagaggtaatgtagcatttgctcaatacatgttagatcttgttactttgattgctttctgattcaagacagcagttctgcctctctctgtagttatcagcagtgactcaccaccagtcctccctaaacaagagattcctagaatctgccactttatggaaataaagcttttccagca

SEQ ID NO: 947873 - DNA, 571 bp, Homo sapiens
acataaaatgttgagtttaaaatttttaagaattggccgggcacgggggctcacgcctgtaatcccaacactctgggaggaccaggcgggtggaccatraggtcaagagatcgagaccatcctggccaacatggtgaaaccccgtctttactaaatatacaaaaaattagctgggcgtgctggtgggcgcctgtagtcccagctactcgggaggctgaggcaggagaatggtgtgaacccagggggcggagcttgcagtgagccgagatcgtgccactgcactccagcctgggcgacagagcgagactccgtctcaaaaaaaaaaaaaaaaaaaaaaaaaaaaaaaaaaaaaaatttaagaatcatccctaactatcctatgtaaaacgcaatggcttaattattttgctttaaaccagaaaatttttgccatccagaaggagttttagaaaataaagtgacaactgagtttaactacatggatatttggtccaaactataattacagttgtatatatgtaataaataacaggagcaaatgggtgatgataaagtttaaatattgcaggac

SEQ ID NO: 947874 - DNA, 684 bp, Homo sapiens
aaaattttatcttctattatctttgattattgyttgtgttccacttattctctcttccatttgagagctctggtccctcattagttggttgtctcttctctggttgtctgtgaccattttctttttctaattatcatttctggataccttccttctgtatggagggatagctgctaagctgctcatcctctgcattgctgattttctgtaactgtgctgttggtgctaatgtggactttaattttgtatttatgttttcatgtatattgaaatatgaagaaattccataacttctcttatattgtattatttatattgttattttagtatttatatattattattattataattattttgagacagagtctcacttcgtcatccaggctggagtgcagtcactgcaacctctgcctcctgggttcaagcaagtctcatgctcagcttcccaagtagctggaattacaagtgcgtgccaccatgcccagctaatttttgaatttttagtagagacggggtcttaccatgttggccaggatgatctcgaactcctgatcttaggtgatccacccaccttggcctcccaaagtgctgggattaaatgcatgagccaccacacccggccacatattgtttctatactatcattttagctctttatgttatttcgttgcctttatgtag

SEQ ID NO: 947875 - DNA, 608 bp, Homo sapiens
aaaactgtgaagacgtttgtatcccatgtgagtgctcaccaacaggtgacctcagcagaggaggattttaataatcaagtggataggatgacccattctgtggacaccactcagcctctttccccagccaccgctgtcatcaccaatgggcccatgaacaaagtggctatggtggcagggatagaggttactcatgggctcagtaatatggacttccactcgccaaggctgacctggctacagccactgctgagtgcccaacttgacagcagcagagaccaacactgagccttcgatatggcaccattccttggggtgatcggccagctccctggtggcaggttgattatactggaactctttcatcatagaaagggcagaggtttttgtcctcactgaaatagacacttactccagatatgggtttgcctatcctgcacgcaatgcttctgccaagactaccatctgtggactcacagaaggccttatctaccatcatggtattccacacaacattgcyactgaccaaggcactcactttatagctaaagaagtgcagcagtgggctcatgctcatggaatttactggacttaccatgttccccatc

SEQ ID NO: 947876 - DNA, 460 bp, Homo sapiens
gcttggtgttagaaggagtgtttagtaacaaaatggagcatttggattttgtggcagccaggaggaatgctcttattttataatgaaacaactgaacaaatgttccttacagtgattcattcctcatgtgggaaaaatttcattttatatatactctttctctctctattggacacataaagctgttttaccttcaatatttaggcagaattttcagtgagcaatttgggaacaatatctgtaaattacaaagataggcacctctgcaaaagtaaccataggattgaatgtcaggaaccacttgggttctattcctaactgggccagagtttgcatatgmccttgagctattcacttaatcttttttaaacttaggttttctgtctgaaatgggcagaaaattgcctacctatttagctaaggcagaaacaatttcctgatagggagatgactcagcggc

SEQ ID NO: 947877 - DNA, 562 bp, Homo sapiens
cccatctctgaattctaatagcaakttataatactttcagttcatatcacacttggccttatataatagttttgtatgcacatgactttattttcttcaaaacacctggcacagcataagggagacaaaagagcatggactttgaatgtcacacagacccaagttgaaattccagcctcacaattactggctggtttgccttgaaatagttacttaatcttggaccagttgctgcatcctgtgtgatacttaacctgtctgtgtctcagtctcctcatttataaaatggagataagagtattttgttaatatataggtgttgtgatgaataaattagatatttcatgtaaaacattcagaacagttactgggacatggcaaagacattaaaaatacttgcttttaaagtgaataattatattataaaagtatcaatattgttaaactctattttttttccttttttcccagcttttttgaggttaaactctaaattttaatgttaccaataaatgtaatcagactgtcttttcgggaatattacatgagttaagtatgctat

SEQ ID NO: 947878 - DNA, 657 bp, Homo sapiens
tatagagtttctataattttgtgattattttctaagtatgtatagacatttttatcacattaagaattttttccttctattgtttgctaagaatttagtccacaattactattaacattaaawtgttatcaaatattttctcatctattgagatcattatgtaattttcttctattatttcattaatatgctaatttacattggttttgaatgccaaattaattttggattcctaacataagttgcactttttctgacatgtcatttttatactcgttgaattcagattgttgatgtttttattttttaatttacaaataaaaattatatatatttatggtgtacaacatgatgttttgatagattcttgatattttctttagaatttttgcaactgtatttgaaagacattgtcctataatttattttctcataatgttagaaaaccctggcctcatagaacaaattagaaagttctattctttggaaaagtttgtgaagatttatgttatttcctccataaatatttaataacattatctagtaaatttatctaggatatgggttttctttctggaaatgtgttcaaattatgaatttgatattttcagaagatatggatagtggtttgtgggaatctgttgatactgacactgg

SEQ ID NO: 947879 - DNA, 657 bp, Homo sapiens
tatagagtttctataattttgtgattattttctaagtatgtatagacatttttatcacattaagaattttttccttctattgtttgctaagaatttagtccacaattactattaacattaaattgttatcaaatattttctcatctattgagatcattatgtaattttcttctattatttcattaatatgctaatttacattggttttgaatgccaaattaattttggattcctaacataagttgcactttttctgacatgtcatttttatactcgttgaattcagattgttgatgtttttattttttaatttacaaataaaaattatatatatttatggtgtacaacatgatgttttgatagattcttgatattttctttagaatttttgcaactgtatttgaaagacattgtcctataatttattttctcataatgttagaaaaccctggcctcatagaacaaattagaaagttctattctttggaaaagtttgtgaagatttatgttatttcctccataaatatttaataacattatctagtaaatttatctaggatatgkgttttctttctggaaatgtgttcaaattatgaatttgatattttcagaagatatggatagtggtttgtgggaatctgttgatactgacactgg

SEQ ID NO: 947880 - DNA, 650 bp, Homo sapiens
aaagaatgcgttgaagaatgggcaaataaaatcgggaatatttagaggtaggaaggtggtgaaaaggttcacaaagaagtttcaatttcaacaaaaagcttttaattcaaagatttttctttctttttctgagagtgatcagaacatgaagatggctgttgggagacaaatctccatgtatcctttatgttcccaaacatcttttgggcaaaggcactaagtgcctttgtgcctgtctgtctttacaagtatgtttatatcgtgaacacactaggaagatatagatagtgtctctctctggagcaaagggtaggttttttatctttatacagtaaagataatgtctccttatggggcaacaatcagtgaggattattgtccattatgaaagacctgagttccttaccttggttctcccctgtcacatatcccgctacatgtgcagcatctcctggccctttgcacacccttctgtgggagttggggctcagaatgcaacacaaatgatgatactctaggtactactattctgtgcataataaaccatcttttgtctctgactcaagagtctcatggcttttgctrgcatccataaaactggcagggcaaatcctgatacccttcacaattcttggcagttttggcagtga

SEQ ID NO: 947881 - DNA, 797 bp, Homo sapiens
gctgctcgggaggctgaggcaggagaatcgcttaagcccgggaggcggaggttgcagtgagtggagatgacaccactacacyccagcctgggtgacagagagacattccatctccaaaacaacaacaacaacaaaagatataaatggaaaatgaacattggatttggtactaggacggtcatgggagaccttgacaacagcagtctcagtagattagtcttgatcaaatctttactggatcaggttgaaggctgggtgagctggctcacacctgtaatcccagcattttgagaggctgaagtgggcggatcccctgagttcaggagtttgagaccagcctggtcaacatggtgaaacccagtctctactaaaaatacaaaaactagctgggcatggtggtgcatgcctgtgatcccagctactcaggaggctgaggcaggagaatcacttgaacccaggaggtggaggttgaagtgagctgagatcacaccactgcactccagcctgggcaacagagcaagactctgtctccaaaaacaaacaaccaaacagaacaaaaagaatggaagtagtgatgatgaccagaaataattatttcaacttttttttcaggaagtgcagcagagagacaaggtagtaattgaaaaggaattcaggccaaggttagatatttttttgattgtagtttttatgtttttgttacttattgttatttaagaccggattattaaagtgtaattggaaaggttcagtagatagggaaagaaaatgatggcatagaacaaagggtgatcatt

SEQ ID NO: 947882 - DNA, 571 bp, Homo sapiens
tgccacccaggctgaagtgcagtggcttgatcttggctcatggcaacctccgcctcccgcgttcaagmgattctcccgcctctgcctcctttaatttttctacttgttatttttgcttatggcagattacttttccatgtctttattttgtattgcaagctcatgctttttggggccctgtctatggaactcttttgcttcctgggttgaatatgtactcttccagagagatttttgtttacttaagccagataccccagggtattactagtctgaaaatgctttaaagtgattcatttgcttgggagttcacagaccaattaaatagtgtgaattaaaacctgaaacccatgtgagggcagacatttttgttaatagttctaggaatttattttttatttttggtctactcaggctgagagagacaaactaaaacactgtaagatatgccagaatgtgctccacaatcccaggaaattggcactgatagaaaccacagagattactcacatttcttcacttatacactgcctttcaggcctgaaggacttattttcccagttactgggag

SEQ ID NO: 947883 - DNA, 581 bp, Homo sapiens
ttgtccagtactattcaaccagctctcttagaagcacttggaaacatcccagctttcttacmtgtggagtccacacccacacggacccccgttatgcaggctctgtggagcactcaacacccaactctagtatcatattgggatctctgagttttacaaaattattaggccaccaaacatcttataagaacatgaatgtctttttgagacatatgatcgctaaacctgtagcgttcatttttcctttgctaattaccattgagtataacccctaacaggagagagagcttataaagataaaaaccatatatatatgtgtgtacatacatatatgtgtgtatatacacacatatatatacatatatatacatgtatatacacacacacatatatatatatatatatggtagtttctgcaccaaacacttcaccagaccagccattagataagcagattgtctggtctgggctccacgcccttttatataccccgatcactctctaaagaagttctagtgagtaatgaaaaggactgatcctgagctgctggttcgaattctctacttccattgcaagaaacc

SEQ ID NO: 947884 - DNA, 581 bp, Homo sapiens
ttgtccagtactattcaaccagctctcttagaagcacttggaaacatcccagctttcttacctgtggmgtccacacccacacggacccccgttatgcaggctctgtggagcactcaacacccaactctagtatcatattgggatctctgagttttacaaaattattaggccaccaaacatcttataagaacatgaatgtctttttgagacatatgatcgctaaacctgtagcgttcatttttcctttgctaattaccattgagtataacccctaacaggagagagagcttataaagataaaaaccatatatatatgtgtgtacatacatatatgtgtgtatatacacacatatatatacatatatatacatgtatatacacacacacatatatatatatatatatggtagtttctgcaccaaacacttcaccagaccagccattagataagcagattgtctggtctgggctccacgcccttttatataccccgatcactctctaaagaagttctagtgagtaatgaaaaggactgatcctgagctgctggttcgaattctctacttccattgcaagaaacc

SEQ ID NO: 947885 - DNA, 748 bp, Homo sapiens
gtcagtggggccctgaagtctcccattattattgtatggctgtctaagtcttttcataggtctaaaataacttgttttatgaatctgggtgctctaattttgggtgtgtgtagacttaaaatagttaagttttcatagtgaattgaaccctttatcattatagcatttctatacaacaatgagcaagctgagagataagtcaagaatgccattcatttacaacagccacaaacagaacacaatacctaagaatacagttaaccaaggaggtgagagaactctacaaggagaactacacttttgaaagacatctaagatgacgtaaataaatggaaaaacattccatgctcatgaattggaagagttaatatcattaaaatggccatgctgcccaaagcaatctgcagattcaatgcaattcctatcaaactgccaatgtcatttttcacaaaattagaaagaaactattccaaaattcaaacaaaacaaaaaaagacacgaaatagtcaaagcaatcctaagtaataagaacaaagctggaggcatcacattacctgacttcaaaccatactacaagatcgcaataaccaaaacagcatggtactggtactaaaacagacacagagaccaatggaacagaatagagagctcagaaataaagctgcatacctacaaccatctgatctttgacacaggcaataaaaaarcaggggaaagactccctattcaataaatggtgctgggacag

SEQ ID NO: 947886 - DNA, 716 bp, Homo sapiens
tgagcatttcttgtaggactggactagtggtgatgaattatctcaatgtttgcttgtctgggaaagattttatttgtccttcatttataaagcttaatctagatgaacataaaattcttgatttacaggttttttagttgttgttgtttgtttgtttcagcactttgaaaaccccacgccattcttttctggcttgtgaagtttctgctgagaagtcttcttttggggtttcctttataggtgactaaatgcttctttcctactgactttagaatgctttccttcatattgtctttagacagtctaatgaccatatggcatggtgaagtcaattttgcaatttattttctggggattgctgagcctcctctatttgaatgtctaaatttcttcctaggctaggaaagtttttgttgattactttattttattcttttttttttttgagatggagtcttgctctgttgcctaggctggagtgcagtggcacgatctcagctcactgcaagctccgcctcctgggttcacaccattctcatgcctcagcctcctgagtagctgggattacaggtacccaccaccacgcccggccaatttttttgtatttttagtagagacggggtttcaccktgttagccaggatggtcttgacctcctaaccatgtgattcacccgtctcggcctcccaaagtgctgggattacaggcgtgagccac

SEQ ID NO: 947887 - DNA, 573 bp, Homo sapiens
acctagacttctaaccatagaattgtgagatgataaatttgtgttgctacatttgtcgtaatttgttatgcatcaatagaaaactaatacaaattccatatgcayattgcccacatggcatttccagtttcaaaagcaattaaaatgaagtttcaagacctaggtatatttattgaagttttgtttatctctttcctgaaaggaaaaatatctaatatatcttaaaaacatctaatggggccaggcgcggtggctcatacctgtaatcccagccctttggtaggccaaggcgggtggatcacaaagtcaggagttcaagaccagcctggccaagatggggaaaccccatctctactaaaaatacaaaaaattagccaggttggtggcaggtgcctgtaatcccagctacttgggaggctgaggcagagaattgcttgaacctgggaggtgaaggttgcagtaagccaagatcgtgccactgcactccagcctgggcgacagagcaagactctgtctcaaaacaaaaaacaaacaaacaaaaaacccaaaaaccaaataaacatctaatgatgt

SEQ ID NO: 947888 - DNA, 619 bp, Homo sapiens
  misc_feature 297: n = A,T,C or G
gttagcattatatctaatacttttgtaatttaaaagctttaacaggtcagataaagtttccagtggcaaaatgtaaattaattcataatgtttaataatgtttaaaatggctgttctgtattcccaaaaagttgatgatataaataatgtaatatacaaaaaaattttaagtaaatgattcatagcaataataaaacattcaagtttggggatgcagttaaggaagtgaagggcaaaagtgtgattttcaatttgaatttgtattgcttaaatattttaaagtatttttatagtatntttgatttcatatattatttagcatattacatatatgggcaaaggatatgaacagacacttttttaaaagaagacatttatgcagcccacagacatatgaaaaaatgctcatcatcactggccatcagtagaaatgcaaatcaaaaccacgatgagataccatctcacaccagttagaatggcgatcattaaaaagtcaggaaacagcagttgctggagaggatgtggagaagtaggaacacttttacactgttggtgggactgcaaactcgtacarcaattgtggaagacagtgtggcgattcctcggggatctagaacta

SEQ ID NO: 947889 - DNA, 646 bp, Homo sapiens
tacattctgtgctgtatttctcatcttttagtatcttattacaataaattataaaatttcttttgatactattttttatttagctatatacaatctgctgctatattgatttcaattactgtattttttagtctagagtacctagttggttaattttctaatatgttgtgctaatttttatcaatttttagtttctcctaaaatattcatgcttaggttttttcttcttgacatgttgtgcatagttactttttatactggaacaattttatttttagtatcttggcttcccattagttgttttaaatgtttgttgttttcacttattcttgcttattttacctaatcttacatgtgtcaggttacctatgaatttaatctggtcatttgcttaaaatatattaatacttgtcatgatttgacgactaagatgaatttactcttatttgcatttttatggcacctcaagtcagccacaatttaagatgccttaatgcaggtgtagaagcactcagattattcattggaggctgggcgcagtggctcactcctgtattcccagyactttggaagtccaaggtgggtggatcatgaggtcaagagattgagaccttcctggccaacatggtgaaaccccatctctact

SEQ ID NO: 947890 - DNA, 600 bp, Homo sapiens
tttctttttactttttaaaatgtgatactagaaaattttaaattatatatgtgtttcgtatttatggcttgcattgtgtttctgttggacagtactatatattatcagcttargctgattcctgatgatgcttgtgcattcacacactaggaagaattaggatactgattagaagggaggaagatctgcctcaggtttaaagtttctgtgggggcaatttttattttttatgaccatagaaaattttgcccataagatgttgtgaacccataaaatctaagacaggtctcagttaatttagaaagtttattttgccaaggatgaggacacgtgtgtgacacagcctcaggaagtcctgacgacatgtgcccaaggtggtccgggcacatctttggttttacacattttagggagaccatgagacatcaatcaatatatgtaagaggtacattggtttggtctgaaaaggcggaacaacttgaagcaaaggcaggaagactccaagtcgggagggagtttccaggtcacagataggtgagacacagacagttacattttttgagtttccgattagcctctccaagggaggcaatcagatat

SEQ ID NO: 947891 - DNA, 505 bp, Homo sapiens
ctttagcagctgtttcatgtaggtgacaggctgacaggagaacaatcaagggtttatttctggttgaattttagtttctactttcatttgttattgttattgtttgaaaagaagtatacccataawttctgttttgtcagcaatcctccttttcaagtttttgaagcttgtcatagatagctaggaaacaactgaactttttaaagttttttattacatgtgcatgatgtcctctaaaactttaactttgaaataaataagatgaagttatccatgcttaaaaattgggtattggcatatatgtaacaaaactagcttaacctgcataattacaggtattgatgtagaattgtgtcacactagctgcctggagtactgctggcattcagtaaatgttgaaataaattataacaatgggctttcaactcttactaaggacaaaataattccaccgattttgagaaagtgagttactttacatgtgtaagggtattaaccccacatc

SEQ ID NO: 947892 - DNA, 436 bp, Homo sapiens
tgcatttccagctgaggtacgcagctcttctcattgggactggttagacagtggatgcagcctatggaggttgagccaaagcagggtggggcgtcggttcacccaggaaggacaagggaattccctcccctagctaagggaagccatgaaggactgtgctatgtggaagagtgcatttcagccaggatactacaattttcccacggtctttgcaactcacagaccaggagattcccttgggtgcctacaaaaccaagggcctgggttttaagcacaaaactgggcgaccgtttgggcagacactgagctagctgcaggagtttttttttttttttttgtatactccagkggcacctggaacaccagtgagacataactgatcactccccttaaaagggggctgaagccagggagcaaagtggtctagctcagtgga

SEQ ID NO: 947893 - DNA, 618 bp, Homo sapiens
ccttgaagttatctactgttttctgttttcaagaagctcaaagtttaactgcatttaattaaaaaaaaaaaaaaagaaggaagaaaggaaacaaaaaggcaaagaaggaaacagaatgctcatattacctttattccactgtttgttttcccacatcaaaaggaatagttggtaaaaaataatacgaactttaatttaaaaaacatatacataggtaaaaacacattaaatcctctgatgaaatcctttagggcatcaactgtgttacctctaagatactgaaatctctcctccttgtttaatcagaggtcagttccttttgaatgaatatgtcctaaatatatgctgaaattttttagtttttgttcattgctattccaaatactgtttcctatgtggttggttagtctctggaactcaaatacaagaaagttcaaataagagagctcaaataagatgttattaattaagcaaattaagtagatgatctcaaactaatagctgacattctcatcagtggattctcttgtaagtggaatatataatagaaatgytcaattagaacctttatgagaaaatctggctggatttctccagataatggctggaaagatgagg

SEQ ID NO: 947894 - DNA, 578 bp, Homo sapiens
cagggcagggcggtcacttcccattgtcctaactcctgctcctggttcttttgagtagagggtggttaagcctggaggaatttgggagagttttactcggagcccatgcgctcttaaaccagattagattttaagaacacagaagtgaaggagccccatagggctgtacttgagtaatttgagtaatccttttcctccctgctcagactttacaaatgtgtttatcattagatcttctgtttgaaactacttttttagttcggaatattgctttttctccctacagcaagggttcactgtttctcatttagtttttgtgcaggcggcatttgtatgatgaaggcctaattctctgtgaaactgaccagttctcacccttgccattcattagacttgattctgccacatttaattcagtgatcttgggcaagttattcttcacctgmgcctcattttacacatctggttttggggatggtggtgtttgctctgcaagattatttctgaggacaaataggatgtttgccaaactcctagcactgcaccaggagagctaagaagtgcttaataaatggtgg

SEQ ID NO: 947895 - DNA, 608 bp, Homo sapiens
gctaatttttgtatttttagaagagatggggtttcaccatgttgacctggctggtcacaaaytcctgacctcaggtgatccgcccacctcagcctcccaaagtgctgggattataggcgtgagccagccgtgccctgcctcaacactctttcatgatttacaaaaagaaaacactgaacaaaccaggagtaaaagaaaaccacctcaacgtaataaactacatatgtgaaacacccacgtgaatatcatactcaatagtgaaagtctaaaagtttttccgctaagataaagaacaagaaaaggcttgtgccacttctagtcaacatagcactggaagttctagccagagaaattagataataaaaaataaataaaactatctttgtccataagtgatttatgatcttttatgtagacaatcctaaagatcccacctcccaaaaaatgtattagaataagttaggcaaaattgcggcatacaaagtcaacactcaaaagtcaattatatttctatacactaaaaataaacaatctaaaatgaaaattacaaaaacaattccatttacaataacatcaaaaagaacatttaggaattaacttaattgaaa

SEQ ID NO: 947896 - DNA, 664 bp, Homo sapiens
cagacactgctagaaccataaatgggtagaaacatttaaatggtagttttgacacaattttggaggctgagtgtggaccagaatgagactgagraacttgtggacctgcagtcttatacacctttatacagagtattaaacacactttcatgggttttacctgcagaaaccacatcaggctctaatgatgaagagctgagaagataccctgtggttctggcaggaggaagggaagaataaccattgtaaaatatacccagatcattctccacaacagacttacttttaaggtgaaaagactttaccagagatgaagaccatatgtcacatggggaaaagtatttctctcacttcagtgccctctagctttcctgtctcacccaagaaaaagaagggagggaagctaaaaacacttgtgaagatcacagcctaacgcagcaggactactaaagggctgaaatttaactacaagatttaagaatactttccctcccttgccaccacacccacagagttccagtgtgataacagtggattatggctagaatagctgcaagtcatagactctaagaaggagttctcagggaaatccaaagacaattgaggaagaagggagacaaggacactagaggaatttgaagcacctacagatactgtaaatagt

SEQ ID NO: 947897 - DNA, 604 bp, Homo sapiens
ggacgggcgaaacttgcagctctcccagggtggctacgacttgacttttcttttttaatagaaaacgtttggttttaaagtttacatacacacaaaaacagcgattatgaaaacaataatctgaggataagcggccagagacagattttcaagtcatgggcgaatttggggagcgcggaaatgtaaatgtttattagcgtgactagatggactgcaaaacgattaagactgttttctggaaacaccattgtcgcataattgcaacaaaatccccaaagcaatgcgggggatggggtataaatcacgaggggaagaaaagaaacctctagcttttttttgaaaccaaatgaaaaaggacttgattaagaaggccttttcttgcaaaggcatctttctgggttccaaaaacttggggaaaaatcagtcccagaaatgtggaaagtgctaatagaagctgaagctgcagtctagcagcaacagtttctccggagccgcagaccccagaagccataaygaaaaattactccggttaaaacaagcaaatgcgttgccgcgcttgcgacttaccccgagtatagacgtggccatagcaggtctctggctg

SEQ ID NO: 947898 - DNA, 590 bp, Homo sapiens
tttgctattgtgaatagtgcttcaatgaacataggtgtgcatgcgtctttataagagaataatttatattcctttgggtatatacctaataatggaattgctgagtcgaacagtatttctgtctttaggtatgaggaattgccacactgtcttccacaatcgctgaactaatttacactcaccaacagtgtttaagtgttcctttttctccacaaccttgccagcatctgttattttttgactttttaataatagccattctgactggtatgagatggtatctcattgggggtttgaatggaagttttctaatgatcagtgatgttgagctttttttcacatgccctctcatttctttgacttttaaggcctaccatcaattgaataacagctattgagaaagtgaacacacttattgtaagtcctattctaatttcagggacactgaatgtgtcttagaatgaggatatgtgatacgtatattttcagcttmtaccacttgctaaagaaattcattttcatttatccaatattttccaagagccaagactgtgtcagaagctagggagtcagaggtaaaggacaaggcc

SEQ ID NO: 947899 - DNA, 765 bp, Homo sapiens
cccagttttgggtatgtctttatcagcagcgttaaaatgaactaataccataaattagtaccaggagtaggtgttgctgaaaagatacccaaaaatgtggaagcgactttggaactgggtaacaggcagaggctggaacactttggagggctcagaagaagacagaaaaatgtgagaaagtttggagcctcctagagacttgttgaatggctttgacaaaaatgctgatagtgatatgaacaataaggtccaggctgaggtggtctcagatgaggacaaggaacttgttgggaactggagcaaaggtgactcttattatgttttagcaaagagactggtggcatacttcccctgccctagagatttgtggaactttgaacttgagagagatgatttagggtatctgggggaagaaacttctaagcagcaaagcactcaaaaggtgacttgggtgctattaagagcattctgttttaaaagggaaacggagcataaaagttcagaaaatttacagcctgatgatgcagtagaaaagaaaaacccatttttttgagaagaaattcaagctggctgccagaatttgcataagtagcaaggagcctaatgttaatccccaagaccacggggaaaatgtctccagaccatgtcagagaccttcayggcagcccctcccatcacaggcctggaagcccaggaggaaaaagtggttttgtgggtcaggcccagggtccccatgctgcgtgcagcctaggaacttggtgacct

SEQ ID NO: 947900 - DNA, 608 bp, Homo sapiens
ggctttttgaagactcagttacagcaccagccaggtggcagtactttgcagggctgggacaaggttcccaggaggctgtgcatgctctgaatcagtgtccaatatatgatgctgttctcccatagcctgrattcatgaggccaggtattgaggggagaaaatgggagtggtatcactcaccattacctgtaatgatccactggccaaattttttatttctgtttccatgaccttctctgctggcctagaaatcctagttccaaagggataaatgcttccactaggagacacaataatgatttcattgaactggaagttaagactgctacctgaccactgcagacacctcagacctctgaatcaaaaggcaaaggagttaactgcgctggctggggtaactgatcctcactaccaaggggaaaatggatcacagtagaggtgaggaggagtatgtctggaatatgggagctcttttagggtgtcccttagtatcactatgtcctgtgattaaggtcaatgggaaactacaacagctccatccaggcaggactactaatgatctagacccttcaggaatgaacgtttgagtcactccactagctgaagac

SEQ ID NO: 947901 - DNA, 608 bp, Homo sapiens
ggctttttgaagactcagttacagcaccagccaggtggcagtactttgcagggctgggacaaggttcccaggaggctgtgcatgctctgaatcagtgtccaatatatgatgctgttctcccatagcctgaattcatgaggccaggtattgaggggagaaaatgggagtggtatcactcaccattacctgtaatgatccactggccaaattttttatttctgtttccatgaccttctctgctggcctagaaatcctagttccaaagggataaatgcttccactaggagacacaataatgatttcattgaactggaagttaagactgctacctgaccactgcagacacctcagacctctgaatcaaaaggcaaaggagttaactgcgctggctggggtaactgatcctcactaccaaggggaaaatggatcacagtagaggtgaggaggagtatgtctggaatatgggagctcttttagggtgtcccttagtatcactatgtcctgtgattaaggtcaatgggaaactacaacagctcmatccaggcaggactactaatgatctagacccttcaggaatgaacgtttgagtcactccactagctgaagac

SEQ ID NO: 947902 - DNA, 621 bp, Homo sapiens
gtgaatttcttctacaaatttacctattctgaatagttcatataaattgaatcatataatgtgtggtcttttgtgcctggcttctttcactcaggatagtgttttctttttcttttatttatttacttatttcattgcttttttttttttttttttttgagatggagtcttgccctgtcacccagactggagtgcactggtgcaatctcagttcactgcagcctccgccacctgggttccagtgattctcctgcctcagcctcctgagtagctgggattacaggcatgagtcaccacatctggctaatttttgtatttttagtaagatgggatttcaccatgttgtctaggctggtctcgaactcctgacctcaggtgatccacccacttcggccttccaaagtgctgggattacagacgtgagtcaccacgcctggcctttcttgctctttttttcttcccccaaatcagaggtcaagcacagagttttcamggttcacctatgttgtagcatacattagtattttgtttgttttagagtcaggatttcattctgttgctcaggctggagtcagaggcaggatcatagctcactgtggcctgaaactcctggactcaagt

SEQ ID NO: 947903 - DNA, 621 bp, Homo sapiens
gtgaatttcttctacaaatttacctattctgaatagttcatataaattgaatcatataatgtgtggtcttttgtgcctggcttctttcactcaggatagtgttttctttttcttttatttatttacttatttcattgcttttttttttttttttttttgagatggagtcttgccctgtcacccagactggagtgcactggtgcaatctcagttcactgcagcctccgccacctgggttccagtgattctcctgcctcagcctcctgagtagctgggattacaggcatgagtcaccacatctggctaatttttgtatttttagtaagatgggatttcaccatgttgtctaggctggtctcgaactcctgacctcaggtgatccacccacttcggccttccaaagtgctgggattacagacgtgagtcaccacgcctggcctttcttgctctttttttcttcccccaaatcagaggtcaagcacagagttttcaaggttcacctatgttgtagcatacattagtattttgtttgttttagagtcaggatttcattctgttgcycaggctggagtcagaggcaggatcatagctcactgtggcctgaaactcctggactcaagt

SEQ ID NO: 947904 - DNA, 780 bp, Homo sapiens
atttatatttactatttcaatataccatgtatattcatgattttattttacagttgacccttgaacaacatgggtttgaactacgcgggtccacttataggtggattattttcaataatttgaaaaaaaaattcaaaaaattatttctaataattgaaataattttttcaatgtgttagaaaaatttttggacatctgtgacaatttgaaaaaacagatgacccaagtagcctagaaatactgaaaaatttaagaaaaacttaggtatatcatgaatgcagaacatatatgtagatactaggctgttttatcatttactgtaaaatatacacaagtctattataaaaatgtaaaatttattaaaacatacatacaaacatagactacatggcaccgtttgtagttgagagaaatataaacaacaaagatgcagtattaaatcgtaactgcataaaactaactgtagtacatactgtattgtagtaattttgtagccacctcctgctgctattgccatgagctcaagtgttgtgcatagccacttaaaatgtcatgtgatgctaatcatctctgcaggagcagtcaatctctccagaaaattgtgtatcacagtaaaaagtgatcttttgaggttctcatgtatttttcattgtgtttagtgcaatacttccattgtgttcagygcaataccttgcgtcacaccatgggacccatgcaatgctggaagtgctcccaagaagcagagaaaagtcatgacattagaagaaaaagttgaattgc

SEQ ID NO: 947905 - DNA, 615 bp, Homo sapiens
tgcacctgtagtcccagctacttaggaagctgggtcgggaggatctcttgagcccaggagttcaagactgcagtgagctatgattttgctactgcactccagcctagragcctgggtgacagagtgagagactccatccctttaaaaaataaaataaaaagataaatttagacacagagacacataggaggaataccatgtgaagatgaaggcagaaattgggatgttatgttgtctacaagccaaggaacagcaaagattgccagctaaaccaccagaagcttccagagaggcctggaacagattctacctcacagctttcagaaggaaccaaccttgccaacatcttgaccttggacttagcctccagaactttgaggcaatatatttaagccacccagtctgcagtactttgttacagcagctctagcaaactaatacacttggtgaccctgacctggtaatcaatgccttgagcaattataatatcctataaaaaagagaaaaaattataatattctatacaaagaaaagaaatcacagggttactcttgtgtatatgtcagaaccatgactgctatggtttgaatgtttgtgtccctccaaaattcatgt

SEQ ID NO: 947906 - DNA, 656 bp, Homo sapiens
ttctcacaagataagaaagctgaagtttgtggtgctcaagtaatttgccagtgtttcagaggtgatgatctagycaagttttgaaactagatacgacttctaaggcatgtgttcaatacatatcacgcctgtgacccagaagtcaccacatctgattggagatcagacagaaagttttggcattcaaaatgtgaagcctcatgaagaaaaaaattagagttactgaacatatatacacaagcatgcacacgtgtgcacacactcccaaaaccacacatgtagactgtcagatcagatagagtcacaggaaggaactttctttgggttggaattggaaaggggaagaagtccaggtagatggattgtcaaatagacatacaaataggcacattacataggactaagatcaggctttgagttcagatgtgtatgttttactggttcaatgaaagtaacagcttgtcaagtagcataatcgtagaaagtattcactttctcacctgtaaaatgggacagttataggacctgcatcataggaaataatgtctgcacagtttcttagggcagcttcaataaagctgattaagggcatgtacctttcactggaaagtgcacagcctgtataatcagccggtgttgctgagaggccagctggc

SEQ ID NO: 947907 - DNA, 573 bp, Homo sapiens
agaaagaaaaatgctaatttggttactctatgcaaccccttggtcagcaacttrcaaaattgaggatgttgcttgcctgtggtttcataatttttctttgtgatgcaggatggaccccagagctatggtatggcaaacagggttgctgggctctcttagggaaagagaacccagaaacctgacatactggcaaaaacgataagaatttcttacaagtcagacttctggtctctctctctgtgcaaactggttgaatgaatggtaaaaatcactgtttatcccctgtaaacttttgattaatggaaaaaatgatttctgaggctagtcaagctgtagccaatctggtgtggtttgtgtgtctttctgcacggttctatcataaggaagaataccgtaggataaaacatgggcttagaacctcataaacccgctgttcaagccagtctggcaaactggtcagtaacaaactttgctgcagttccctgaaacaagcaaaaaactggatgagatctccattttgttttatgtccttgggaacttgatcttgtaaccacatggcagtattttcttttg

SEQ ID NO: 947908 - DNA, 573 bp, Homo sapiens
agaaagaaaaatgctaatttggttactctatgcaaccccttggtcagcaacttgcaaaattgaggatkttgcttgcctgtggtttcataatttttctttgtgatgcaggatggaccccagagctatggtatggcaaacagggttgctgggctctcttagggaaagagaacccagaaacctgacatactggcaaaaacgataagaatttcttacaagtcagacttctggtctctctctctgtgcaaactggttgaatgaatggtaaaaatcactgtttatcccctgtaaacttttgattaatggaaaaaatgatttctgaggctagtcaagctgtagccaatctggtgtggtttgtgtgtctttctgcacggttctatcataaggaagaataccgtaggataaaacatgggcttagaacctcataaacccgctgttcaagccagtctggcaaactggtcagtaacaaactttgctgcagttccctgaaacaagcaaaaaactggatgagatctccattttgttttatgtccttgggaacttgatcttgtaaccacatggcagtattttcttttg

SEQ ID NO: 947909 - DNA, 577 bp, Homo sapiens
tatttcggtaagaacaaatcagttagtgtcatagatattagtgtggttgaaagcaattagcaattgatttattttaattataaaaaaattaaaagatcacaaatacaaacaaaacaaagccaagcaaatcaatcttaacataaatattaatgatgtattggatttttaataaagaaatgtaaatagtgaacaaatagcaagctattagatttggaaagataagatttgggaaatgatttattgtagtgtattttatttgtagttgcatcagaaattacattaatcattgattaaattacatttatgattcttacgtgatcaccatatccatttaagagtgagcctattagataaaagccaaagcaattatcttactgattttttgaaataaaaaaatagtaataactcagaaaaaatgagatgcacatgttcttccagcatattttccaggcttaatagagttaaaatacrggccttaatattatcacaatagtgatgaatgtgcctgcttcccaggctagacaatttaggaataagatggctggtgttagtcatctgatcaggtagttaactccat

SEQ ID NO: 947910 - DNA, 574 bp, Homo sapiens
atgtagaaacttccaccaatcaagtcagagccacttatccctgatcaargttatgctcatgctcactaatgacacactttttgtgagacaggatctttgctgaaaaagcaaagggctggggatgtacaagtaatgaaaatatagctgcaagtttccatgcaggttgctgtcacaacattctcatggaatccttacaatcactccttaaggtacaatgtaaacatcattatccctattttacagttaagggaaactgaggcatattgaagtgataggacttgcccacaccaatcccaactggactatcagctcaggccttcctttctctctggcccagggttttcacttatgttgatttgaggaggggtagagagagaaaaaagaaaacgatttctgtcttctaagagcttatactgtagaatgggaatttacttatgaacatgaattgatataagataaaatacctataccattttgaatcaagcacatttgtttttatgtggttcatatctactacacaccatgctgggcacttttcatgatccttgaaagccaaacaaccttgccatgtgtc

SEQ ID NO: 947911 - DNA, 574 bp, Homo sapiens
atgtagaaacttccaccaatcaagtcagagccacttatccctgatcaaggttatgctcatgctcactaatgacacactttttgtgagacasgatctttgctgaaaaagcaaagggctggggatgtacaagtaatgaaaatatagctgcaagtttccatgcaggttgctgtcacaacattctcatggaatccttacaatcactccttaaggtacaatgtaaacatcattatccctattttacagttaagggaaactgaggcatattgaagtgataggacttgcccacaccaatcccaactggactatcagctcaggccttcctttctctctggcccagggttttcacttatgttgatttgaggaggggtagagagagaaaaaagaaaacgatttctgtcttctaagagcttatactgtagaatgggaatttacttatgaacatgaattgatataagataaaatacctataccattttgaatcaagcacatttgtttttatgtggttcatatctactacacaccatgctgggcacttttcatgatccttgaaagccaaacaaccttgccatgtgtc

SEQ ID NO: 947912 - DNA, 601 bp, Homo sapiens
caatttgctttagaatgaattctgcctttaatctcacccaaatctaatttagatgatatttagatgagacttaggacttaccctttaaaatggatactggaacaagttaagacttttggggctattgggatgaaatgaatgtgttttgcatgtgagaagcacatccattttgggggccagggttgtgatgctatggtctgaatgtttatatctccctaaaattcatatgctggaatcttcacccccaagttgatgatgttataagatggggccttagggaggtggttgggtcatgaagatagagccctcatgaattggattaatggttttgtaaagggagcctgagagatacctctccccagttggccatgtgaggaaagagtaagatgtaagctaggaggaagtagaaagtgtgcccctcaccagatgtcagatctgctggttctttgatcttggatttcccagattccagaactgtgagaaataagtttctgtttataagccaccccttcccartctatggtattttgttataggagctcaaatggactaaaacagtaggcatccatagtttttacctaattttcatgggagtaattct

SEQ ID NO: 947913 - DNA, 620 bp, Homo sapiens
gaggaatgcaccaacaggcactgcaagccggcaggcaatccaccagcagaacaatgtggagtttggcaggggcagtcagaagagagcccaggtgactcagcaacctgactcyaggggaaaaccttcccactccatccccatctggcttcccctatctgctaagagctagctcaactcaataaaaccttgcactcattctccaagaccaggtgtgatctgattcttccagtacaccaaggcaagaacccaagatacagaaagccctctgtccttgtgacagggtagagggactaactgagctggttaacacaagccacctatagacaggaaaagtgaaagagcaccctgtaacgcacacccactggggcttcaggcactgtcaacatccacccctagacgttgccatggggttggagccccacaacctgcctgtctgtatgctcccctagaggtctgagcagcagggcactgaagaagcaagccactccgcctgtcatacaccctgtgagggggacagaggaacttttcccatttcaactggatcatgggagcagatttcccccttgctgttctcgggatagtgagttctctcatgagatccggtagtttgaaagtgtgtc

SEQ ID NO: 947914 - DNA, 631 bp, Homo sapiens
gtatttcaaactgcctgtcctaatgttatttcatcataggtttaagtaacaactattatgtggctgagagtagagctgtgcaaaaaacccatttcatcttcttcctaaatctatagctaacccacatttaccagctactctggtgatcatgtgactagctcgtgtaatattctgttcctgtagtgagtagaattgatgctcactgcaactgggaatggttcacagaaagcttcatgaatccttgatgtcctttattcctttcctgagaaggataaaagataatacaatggtctcgtggaaagtggccaagccacaagaaacaaggggcctagattcctcaacttaccacttggagttgagttgcctgttgatctttatttcaggtgagcaaaaatagacttctcatatgtttgaacagatatatccttctgaggcatttgttgctgtagccagtgttatcttaaataatgcataaattaaaataaataagtagtcaaaagttgtcattattaaaayacatactcaggggaagcaggcattctctccactttccagatagctaaacttctgggtgtacaatttttcgctaacctctccagcttcatcccatttcaatctttcctcaaatcca

SEQ ID NO: 947915 - DNA, 538 bp, Homo sapiens
cagctctgagcatgactgggtggggacattatgttgaagctcctggaatccttattcagcccaggaagaggggtttgaaaggccaacaatctccctacacaggagggaaaagagagggtgtgggtgggcagcggcaaccttgaattgggggtctggtgagataagtctctgctcctcaccccagctatggccttcatgtgtgcttccaccagcagaggccccttactggacttggaccgagtggatggacaggaaaccaccaaccatggtggccacccaaaccaactttcactgccttactcttgaaaccccactctctccatctcctggctgaagaaccacaagagctctaaggagagcatcacatcagcatatggaggtgggcctggaagttggtgggaatgtgggctggatgtggaaggtgggacctgtctttggctcacctgccyttctacctggagctgtggcaccaacagtagaggctgatcatggagtgtggtgcccacagactgctgtcaccccacctctgtgatggaga

SEQ ID NO: 947916 - DNA, 591 bp, Homo sapiens
aacagaaactgtgtccccattaagcaggaactcctcctgcttcccacctccagcccctgcacccaccattctactttctgtctctgaatttgatgactgtagatayctcatagaagtggaatcacacaggatttgtcctttggtgtctggcttattcacctagcacagcgtcctcagggttcatctgtgttgcagcacgggtcagaatgcccctcctttcaaggctgataatgttgcattgtatggaatattttgtttatccatccatccattgatggtcacttggcttgatccgtgtgactcgagtctatcatgaataacactgtagtgaacttggatgcgcaaatattatttttaaaaaattactttctgggcctcaggtggtctcaggcccactaataaattaagggtagatttttggacagtttctaggatcaggctgtcttccctgcctctgcctggtgtgtggctgtgtgtctgtgctcagtaaactccatggccactgtgggtgcccacccaggtctctcacctggaggtgcacatgtctcccagcggccacaggtgctggctgctgatggctcacacctgtgc

SEQ ID NO: 947917 - DNA, 458 bp, Homo sapiens
tgtgggcagactgaggcttcaggactgtctggatggctggccctcaaggggcaaagctgagcccagggcaagctggcaggcctcaggctctgcactcgcccccctgccccaacccctcaggcctctccctggtaccttcctggtcaaggtctaggccggtggacctggtgggactgtggttccaagtatagtcaagggccacataaggacgttttggtcagtgatagaccccatatataaaggtgggattagcaggtaggcaagcctgcctggcacagagggcccagaacctgggggtggaggagtagggagagagggagtgagaggctttctctcctgcttccagccccgtcctctagcctgcccccctcaccttttgggtgccagagattcagcaggaaccacaaaggtgaagacccttagkgatgagggtccctgctgttaactccagcgactgt

SEQ ID NO: 947918 - DNA, 594 bp, Homo sapiens
taaaggaaaagctgagtaagctttttattaatatgtgttgtttttcttctggcacaagtattttactacctattattttaaaaatattgagcaagtattatgagattagcttgcacttgataattcttttccacttgagaaaatcatcttttggggaggtaaaagcaacacatattagaaattcattgatcacatgaattaagtgacaaaaaccacagaagtaaatgatgttcccaattgaagttaagacagttgatatagagaactcctaattaaaagttcctacatgaatttagtagattagagaaagtttcttgaaggaggatgaaagtgagctgcgcctcagagcacatggaggagttatagcaaggggccaagtggcatctttgcagttgtactaaggtgggaattagctctgtgttttctgagaagtgtactagtttgatggaagaagaggagcaggtacatttgaaggagatttggggayaagagaatgacatgaaaattcagatgatgggagttcacttggtaagctgttggagtcgtctctgggaatatgactggtcctaaatgttgagaatcctgatgtggacc

SEQ ID NO: 947919 - DNA, 585 bp, Homo sapiens
aggctcggtctacccacttagcagttctgacaaggaaaaaaggaccacagaacacagaaaagatgggaagagtcaacttggaggtggaaagaggaagacaaacagcaagtccactgtgggagmataaggaggagcccccacagccttctccagctcttctcaggttccatttagagagttccaaatcccagcagcacccaacatctccccacaggaagttacactccccaaaattacagagcagagcttcttactgcaaaaatcttttaacatggcaataatacaattgtgatatattgccttgtctaccatgctaaatgatggtggtcttgcctaccattctaaattcactgtatggttttacaacttagaaatttttgaagctatgaaaaaactcagttatgtaaatgacatccataggccccagggtaaatggacaacacctatagagcagccttgccaattttatcatcccacacttgttatgcacagaaagccctttgcttgtttattttctataacacttgatattgtttgtggacctctaccccaccaagagaggaaaaaatacaaatttattctaat

SEQ ID NO: 947920 - DNA, 640 bp, Homo sapiens
gaatagattgcataatgtgctttttgtgcttgtattgaacccaaacagtgaacgtagtacccaaaaggtagttttacaactcttgcccccctccctccttctcttcttttgaagtctcctgtgtctattttttctctctttatgtctgtgtataccccttgtttagctcccacagataagtgagaacatgtaatatttgattttctgttcctgcattaattcatttaggataatggcctccagctacattcatgttactgcaaaggacataatttcattactttttacggcttcgtagttttccatggtgcataggtaccacatcttctttatccagtccaccattgatgggtatctaggttgattctataactttgccattgtgaatggtgctgcaataaatacatgagtgcatgtgtctttttggtagaatgattcattttccttcgggtacatacccagtaatgggattgctggatcaaatggcagttctatttttaggtctttgagaatactccaatctattccacagagactgaactcatttacwttcccaccaacaatgtgtaaacattctcttttctccttatcctgaccaacatctgtcattttttgagtttttaataatagccattccaat

SEQ ID NO: 947921 - DNA, 636 bp, Homo sapiens
tttatggaaacacagacagggttttccactgaccttctctaggttgcctggcaagagccatctgggcagcttgtatgctcagcactggcgtgtacttcttccgagaagctggtagtaaaacttargttatttagccctcttttcacaaggctactgtcatgtgagccttatagaaggacagaagaagaggggactgggcccctcttgtgtactgtatctggcccatctaaccaacctcttagtaggaaaggggagctatgagtctactgactctgcctgtgcatctcagcctgctctagtgtctcttgtgccatgttcaactgtgccctttgcctgatactaggccactgcttggagataaagtgatcaagagaagatgtatacacacacacatacatacatatatacatacatacaaagtctgtgagttttggggaacaagtggtttgcggaaaagctaaggtttaaaggtctccatcaacccccatcagtcactctcttctcttctactgatacaaaaaagagagaaagaccttattactttgcctgaatgtgttttctgcaacttccttgttattttgattgaaaagtctcttgatttctgccattgatcctagacaaaactgattcttgagt

SEQ ID NO: 947922 - DNA, 597 bp, Homo sapiens
tgttgctgtgaaggatgtgattttatatttttatggctgcatagtattccatggtgtatatatacaacatttcctttatccagtccaccattgatggacatctaggttgattccatatctttgctattgtgaacagtgctgtgatgaacatatgcgtgcatatgtctttatggtagagcaatttatattcctttaattccaataatgggattctgggtctaatggtagttagtggctgaactaatttacattcccaccagcagtttataagcattccatttactctgcaaccttgccagcatgcggtggtttttttttttttttttttttttttttaaaactttcaagaaacacccattctgactggggtaaaatggtatctcattgaagttttgatttgcatttttttaatgattagcgacgttgagcatttttaaatggaatgctaaaaaacgtagcattcctatacatgagttwaacattgttcttaaataattgttggccaaagtttcatttgatgaatctgatttttctgaaatagataattctgatgattcacatgattctgatgttagttctgtttagaaataactccaa

SEQ ID NO: 947923 - DNA, 632 bp, Homo sapiens
taagccaagatcacaaagatttactcctgtgctttcttctaagagttttatagctttatttcctatatttataagaaatataaagttctatgatgtatactgagttaatttttatatctggtgtgaagtaggaacaatttttatcatactttaactctttagataaattttaaaaaattattttaacataatagctgatttaaaatctgtttctaatatgtctacaatctgggcttttgtagaaatagtttctgttaattattttcccccctgtgtattgctcatactttcctgcttctttgggtgccttaaatttttttggtgaaactgaacatctaaaataaataatgtggtaagtctggaaatgatagccccccatttccagggcttgttcttattggtatttgttgctgttagtttagtgacattcctgcactaattctgtagcctgtgttttttcttttaactgaccactggtgtctctgcctggtaagactgatggtcagctcatgattgaatagagatttcctaaaatgtcctgtatcakaagtctcccagcctttgctgatgggctgtgtgtgtgtgtgtttgtgtgtgtgtgttgcaaaatgtcttgaatgctccaatttgca

SEQ ID NO: 947924 - DNA, 775 bp, Homo sapiens
tcattgggactggttggacactgggagcagcccacaagggtgggccaaagcagggcagggcatcacctcacctgggaaatgcaaggggccgggatatttccctttcctagccaaggaagccgtgacagactgtacctggaaaaatgggacacttctgcccaaatactgtgcttttcccatggtcttagcaaccagcagaccaggagattttctcccatgcctggctcgtcgggtcccatgcccacagagccttgctcactgctagcacagtagtctgagatcaacttgcgaggctgcagcctggctgggggaggggcatccgccattgttgatgcttaaataggtgaacaaaatggccaggaagctcaaactgggcagagcccaccacagctcagcaaggcttactgcttctatagactccacctgtgtgggcagggcatagctgaacaaaaggcatcgcagaaacttctgtagacttaaatatccctgtctgacagctctaaagagggcagtggttctcccagcacagtgtttgagttctgagaacagagagacagcctcctcaagtgggtccctgaaccccgtctagcctaactgggagacacttcccagcagaggcctacagacacctcatacaggtgrgtgcccctctgggacaaagcttccagaggaaggatcaggcagcaatatttgctgttctgcaatatttgctgttctgcagcctctgctggtgatacccaggcaaacagggtctggaatggacctccagcacact

SEQ ID NO: 947925 - DNA, 619 bp, Homo sapiens
ctgtgaaagctgccaggaagagggctgtaccctgcaaagtcacagggtcagagctgcccaacatcatgggagyccacctcttgcatcagtgtgatctggatttgagacatggagtcaaaggatattattttggagcttaaggatttaattactgccctattgaattttggacttgcctggggcctgtagctcctttgttttggccaatttctcccatttgcagtggctgtatttacccaatgcctgtactctcattgtatcaaggaagtaactaacttgcttttgattttacaggctcatagacagaagggacttgcctttggatgagattttggacttggacttttgagctaattatgggatgagttaaaattttgggggacttttgggaaggtatgattgtgttttaaaatgtgaggacatgagatttgggaggggccagggcagaatgatatggttttgctgtgtccccacccaaatcacattttgaattgtagttcccataatccccacataatgagagggacccagtgggaggtaattgaattgtggggggtggtttcccccatgctgttctcatgatagtgagttctcacgagatctgatggttttataaggg

SEQ ID NO: 947926 - DNA, 582 bp, Homo sapiens
aaagtaatgtaggcctggtgcagtggctcacacctgtaatcccagcactttgggaggccaaggtgggtggatcatgaggtcaagagatcaagaccatcctggccaacatggtgaaaccccgtctctactaaaaatagaaaaattagctgggcatggtggcatgcacctgtagtcccagctacttgggaggctgaggcaggagaatcgcttgaacctgggaggcagaggttgcagtgagctgagatctcgctactacattccagcctggtgacagagcaagactccatctcaaaaaagaagtaaagtaaaatacctgggaatatacttagccaaggaagtgaaagatctctccaaggaaaactacaaaacactgctgaaagaaatcataggtgacataaacaaatggaaatgcatcccgcgctcatagattggaagaatcaatattatgaaaatgaccatattgcccaaagcagtctacagattcartgcaattcccatcaaaataccaacagcatttttcacagaactagaaaaaacaattctaaaatttatatggaatcaaaaaagaacccaaatagccat

SEQ ID NO: 947927 - DNA, 494 bp, Homo sapiens
gatctggatagaagatcaagtcagccacaatattcccttaaaccaaagtctaatacagrgcaaagccctaactctcttcagttctacgaaggctgagagaagtgaggaagctgcagaggaaaagttggggccagcagagattggttcatgaggtttaagaaaagaaactctctctgtaacaaaaacgcaaggtgaagcagcaagtgctgatgaagaagctgcagccagttattcacaagatctagctaagatcactgatgaaggttattacactaagcaacagattttcttttttttattgttattatactttaagttctaggggacatgtgcacaacgtgcaggttttttacataggtatacatgtgccatgttggtttgctgcacccatcaactcgtcgtttacattaggtatttctcctaatgctatccctcccccagctccccaccccccgacaggccctggtgtgtgatgttccccgccctgtgtccat

SEQ ID NO: 947928 - DNA, 612 bp, Homo sapiens
  misc_feature 1, 2, 3, 4, 5, 6, 7, 8, 9, 10, 11, 12, 13, 14, 15, 16, 17,18, 19, 20, 21: n = A,T,C or G
nnnnnnnnnnnnnnnnnnnnngaattccacttcttgaaatttgttctttaaatacactgcacaggggcayaaggatgttcccgctagcatgacttatagtagagacaatctagatgtcctcattaggggttagttctttaagttagaacaaagtgacacattatgagtgggttaaaaagagagatttgtatatttggacattcttaatcaaacaatcaagaattgctgattgaaaaaattatatatacatatttaaattaggctgttgcaaaagtaattgcggtttttgccaattacttttgcaccaacctaatatatgtacacaatccatatatatgtatatatatttaatgtccacaggaaaaaaatctaagaggacatccaccaccttgttggttaggttctaaagtccacttgtgaggtaaaagatcctgtatagaaattttgtattgaaattcctaaagaagacactatacaattcacaacatattctgaagtaaggactatggagttggattgctgaagtcaactgctgggtctattgcctgactttgcaatatcaactggtcacccacctaaagcaaacagagtagctataaatgtctatgaggg

SEQ ID NO: 947929 - DNA, 701 bp, Homo sapiens
aactgggtaatggacagaagttggaagagtatgaagggctcagaagaagacaggaaaatgagggaaagtttggaacatcttagatactggttaaatggtgaccaaaaagctgatagtgatatgaataatgaagtccaagctgaggagttctcaggtggaaatgaagaacatactgggacctggagcaaaggtcacttttattatgccttaccaaaaaatttggctgcattgtgcccctgccctagggaatctgtggaactttgaacttgaaagtgatgatttagggtatctggcagaataaatttctaagcagcaaagtgctcaagatgtcacctagctgcttctaacagagtatgctcacatgcatttgcaaagaaatgacctaaagttggaacttatatttaaaggggaagcagagagtgaaagttcagaaaatttgcagcctggccatatggtagaaaggaaaagcccattttcagggaagtagttcaagcaggctgcagaaatttgcatagctaaaaaagaagcaagtgctgatagccaagacaatggggaaaaggcctcaatgacatttcagagatcttagaggcagctcctctcaccatatgcctaggaggagascatagtttttgtatgccagacccagagccctgctgtctcacactacctcagagcactgcttcctgcatcctggccagtcc

SEQ ID NO: 947930 - DNA, 616 bp, Homo sapiens
acaaatggtcataaatgacatgattaatacgttattgtaattcaatgttgtggaatattatgtggctgatatggtttgactgtgtccccaccaaatctcaacttgaattgtatctcccggaatttccaygtgttatgggagggacccagggggaggtaattgaaccatgggggcaggtctttcccatgctattctcatgatagtgaataagtctcatgagatctaatgggcttatcaggggtttccacatttgcttcttcctcattttctcttgccacttccacgtaagatgtgccttttgcctcttgccatgattctgaggcctcaccagccatgtggaactgtaagtccaattaaatctctttttcttcttagtctcagatatgtctttatcagcaaagtgagaacagactaatacagtaaattggtatcaagtgagtggggcattgctgaaaagatacacaaaaatatggaagccactttggaactgggtaacaggcagaggttggaacagtttggagggctcagaagacaggaaaatgtgggacagtttggaacttcctagagacttgtggaatggctttgcccaaaatgctgatagtgatatggacaataa

SEQ ID NO: 947931 - DNA, 616 bp, Homo sapiens
acaaatggtcataaatgacatgattaatacgttattgtaattcaatgttgtggaatattatgtggctgatatggtttgactgtgtccccaccaaatctcaacttgaattgtatctcccggaatttccacgtgttatgggagggacccagggggaggtaattgaaccatgggggcaggtctttcccatgctattctcatgatagtgaataagtctcatgagatctaatgggcttatcaggggtttccacatttgcttcttcctcattttctcttgccacttccacgtaagatgtgccttttgcctcttgccatgattctgaggcctcaccagccatgtggaactgtaagtccaattaaatctctttttcttcttagtctcagatatgtctttatcagcaaagtgagaacagactaatacagtaaattggtatcaagtgagtggggcattgctgaaaagatacacaaaaatatggaagccactttggaactgggtaacaggcagaggttggaacagtttggagggctcagaagacaggaaaatrtgggacagtttggaacttcctagagacttgtggaatggctttgcccaaaatgctgatagtgatatggacaataa

SEQ ID NO: 947932 - DNA, 557 bp, Homo sapiens
cccaatgcgtgtacccccattgtatctgggaagtaactaacttgctttttattttacaggcttatagggggaagggacttkccttgtctcacatgagatgttggactgtggacttctgagttaatgctgaaatgagttaagactttgggggactggtgggaaggcatacttggttttgaaatgtgaggatatgagatttgggaggggccaggagtggaataacatggtttggctgtgtccccactcaaatctcatcttgaattttagctcccacaattccaatgtgttgtgggagggacctggtgggaggtaattgaatcatggggtcagtcttccccatgctggtctcatgatagtgaataagtctcatgagatctggtggctttataaggaggagttttcctccacaagctctctctctctttgcctgatgccatccatgtaagacatgacttgctcctctttgcctcctgccatgattgtgaggcctccccagccacgtggaactgagtccattaaacctctttcttttgtatattccccatctcaggtatgtc

SEQ ID NO: 947933 - DNA, 575 bp, Homo sapiens
aaaaaaagaacaatggaacagaactaatatttaaaactataaggcaggaaaaccatcttgaaataagagaagataagaatctagacagtgaaaaagaataacatgtatctagaaaaagaaatcaagagtggtcaaatctcagacatatgttagtaaaactactagacttgagaaacaaacaaaaattaacactttcttctggcaaaacaccatattacttacaatgaaacaaaagtaaatatggcaccaggtttcttgaaagaaatgcaggaaacaagaatagagatactctgtcaagaaactccaagaaaaaaaatgtgagcctaggattatttctatccagcatatatgtaaataatatattttctgacaaagtacatttaacatttaacacaagttcaaaaaataggagaatagctcaagaaataagaaagtagattaagtacctaactgtcacaaaggtaayaggatatcatttaaagcagagaaaacaaataataggcactcagtcaagaagagtgaactttcaagcctatccatcccaactttttttgttgttgtgttttgttttaggc

SEQ ID NO: 947934 - DNA, 564 bp, Homo sapiens
ctctttaataggaaataagacaataaaagaggaacrtaagaacaaaaaagacaccagcaatttagaaaacaaatagcaaaaatggcagacacaaatccaaccctatcaataataacattaaatatgaatacattagatactctaatcaaaaggcagaaattgtcagactgcatttaaaatttttaactatatacagtctacaagaggcacactttagattcaaagagacaaataaactaaaaagtttaaaaatggaaaaagatattccatgcaaacaataatcctaagagagctgaagtggctcattaaggatcaaaaatattaccagagcaaaaaaaagcattatatgaaaaggtcaattaatcaagaagatatagcaattctatacatacctaacaacaaagccccaatacacatgaagcaaaaattgacagaattaaagggagaaacagacaactcaacagtagtagttgatacattcaacatccactctgaataatgaataaacagctagacagaaaagtcagcaagagtatagagaattcaaacaccatcatcaaacaa

SEQ ID NO: 947935 - DNA, 572 bp, Homo sapiens
gtcttaaattgtttgatgatggtgtttgaattctctatactcttgctgacttttctgtctagctgtttattcattattcagagtggatgttgaatgtatcaactactactgttgagttgtctgtttctccctttaattctgtcaatttttgcttcatgtgtattggggctttgttgttaggtatgtatagaattgctatatcttcttgattaattgaccttttcatataatgcttttttttgctctggtaatatttttgatccttaatgagccacttcagctctcttaggattattgtttgcatggaatatctttttccatttttaaactttttagtttatttgtctctttgaatctaaagtgtgcctcttgtagactgtatatagttaaaaattttaaatgcagtctgacaatttctgccttttgattagagtatctaatgtattcatatttaatgttattattgatagggttggatttgtgtctgccatttttgctatttgttttctaaattgctggtgtcttttttgttcttaygttcctcttttattgtcttatttcctattaaagag

SEQ ID NO: 947936 - DNA, 763 bp, Homo sapiens
cacattgccggaagtcctaaccagaagaatcaggcaagaaaaagaaataaaaggcatccagataggcaaataaggagtcaaactatctctcctcacagacaataagattctatacttaggaaaccctaaagattccaccaaaaggttcctgtaactgataaacaacttcagtaaaatttctgaatacaaaatcaatgtatgaaaatcagtagtatttctatataccaataatgttcaagctgaaagtcaaatcaagagcataatcccatttacaatagccaccaaaaaaaataaaatacctaggattacatctaaccaaggaggtgaaagatctgaactacaaaacactgcaaaagaaatcagagatggcacaaataaatggaaaaacactccatgctcatggagtgtcaatagcattaaaatggtcacagcattaaaagcattaaatcaatagcattaaaatgatcattctatctaaagcaatttacagattcagtgctattcctaccaaactaccaatatcatttttcacagaattagaaaaaaactattctaaaattcatatacagccaaaaaaagagcatgaagagccaaagaattcttatgcaaaaagaacaaagctggaggcatcacactacttgacttcaaactacactactrtaaggctactgtgatcaaaacagcatggcactaatacaaaaaacacacacatagaccaatggaatggaactgagaatccagaaataaagccacacagctgcaa

SEQ ID NO: 947937 - DNA, 565 bp, Homo sapiens
gaacagacacttttcaaaagaagacatttatgtggtcaacaaacatgtcaaaaaagtctcatcagcactggtcattagagaaatgcaaatcaaaaccacagtgagattccaycgcttgcaagttagaatggtgatcattaaaaagtcaggaaacaacagatactggagaggatttggagaaataggaatgcttttactctgtcggtgggagtgtaaattagttcaaccattgtggaagacagtgtggcaattcctcaaggatctaaaccagaaataccatttgatccagcaatcccattactgtgtatatacccaaaggattataagtcattctattgtaaagacacatacacacatatatttattgcagcactgttcacaatagcaaagacttggaaccaacccaaatgcccatcaatgatagactggataaagaaaatgtggcacatatacaccatggaatactatgcagctataaaaaagaatgacaaacccagagccaatatatttattggttatctaaggaatatgataacctttgcagggacatggatgaagctagaaa

SEQ ID NO: 947938 - DNA, 824 bp, Homo sapiens
tgacaatcagtgcgctcgtacctgagaaacagcttgcactgagcagcctttggtgattagctttgggctctggatacaaggcagccccttccacccaacactatacatttctgagtccctctctaccctttcaccaagcagccactgaggccctattgcagaccagccctgcgtcccagctgggctgaatcagcgaaccatccaagagggccagacttggggaagctcgggcccccgacagagctgccgtctcctggcagaaagtgatgagagggcagcaggatgtggccagcttctccctatgttccttcagagacaggggcaagaaaggcggggcatgaaaaccaaacactttcctcctcttcatctctcttccattcgcccactgctctcccttctcccagccctcctggcctttcctctctccccaccacaccgcaagcccacataatgtgtcggtggctgtgcaggctgacgactcactggaacaagacacccctgtggactgccgctgtgtctcaagagaagcccgacccctaagcccctctggatagacccccactttccttaggagatggctcctaggaggtcagcttcagcctccctatagaattggagatcttattgtaccccatatgaaactgcccataatgcccctgctatctagaaaattccttctgccgcagtccctgagataaacacctaacatgctcatttatttattcattctatcagcagacatttattgagggcctacagtatatcagtgagcaagaaacagcacccctgccctgagaagcttrcattcaagcatgaggagacaa

SEQ ID NO: 947939 - DNA, 587 bp, Homo sapiens
aagctacattgaaacaatctaccaatcttactccagtttccagtttcgcttgtactctccgtgttcctgtgtgtgcacgcgtgtttaagtacacacmactttcttaccatgcacgcgtgtttaggtccacagcactttatcaccgtgcacatgtgtttaggtccacagcacattatcaccgtgcacgcgtgtttaggtccacagcacattatcaccgtgtacgcgtgtttaggtccacagcactttatcaccgtgcacgcgtgtttaggtccacagcacattatcaccgtgcacgcgtgtttaggtccacagcacattatcacatgtgtaggctcttatatccaccaccacagttaagatacagaacagttctaccatcaccaggatacgccccttcctcctccttcaaccccaatcaggggtttttgagtgagtgacgtgagagactaagaagagcgtgggaaaaatgaggcaagaccattgaggcacctggagcagagaaagagacttcccagaaagaacagaaaagttgaaagaggatttccagttttgctgtgcaatgagtgatatgcctccacaattccccc

SEQ ID NO: 947940 - DNA, 368 bp, Homo sapiens
ccagcactttgggaggccaaggcaggaggatcaatggagcacaggagttccagaccagcccaggcatcatagtgagacctaggttaagacctygtctctattaaatttgaaaagattaggcaggggtggtggtgcctgcctgtggtcccagctactcaggaggctgaggtggagggttgctcgagcccagaaggtcgaggagcagtgagccatgatcatgtcactgtgctccagcctgggtgacagagcaagaccctctctaaaaaaaaagccaatttgaatgttctgtgtatgtatgtctacatgcccatgtggtatgtgtacacatgtgtatgcggatgcctgtatggtacatgtacctgtgcctg

SEQ ID NO: 947941 - DNA, 368 bp, Homo sapiens
ccagcactttgggaggccaaggcaggaggatcaatggagcacaggagttccagaccagcccaggcatcatagtgagacctaggttaagacctcgtctctattaaatttgaaaagattaggcaggggtggtggtgcctgcctgtggtcccagctactcaggaggctgaggtggagggttgctcgagcccagaaggtcgaggagcagtgagccatgatcatgtcactgtgctccagcctgggtgacagagcaagaccctctctaaaaaaaaagccaatttgaatgttctgtgtatgtatgtctacatgcccatgtggtatgtgtacacatgtgtatgyggatgcctgtatggtacatgtacctgtgcctg

SEQ ID NO: 947942 - DNA, 617 bp, Homo sapiens
cataacctgtgatgatttactagccagtagacctgcgctacagaggcattaggtaatttcttcaggcagaaagaagatgatgccagacagaaacttggatatacaagaaagaagaaaaattgatggatataaagtaaataaagacaagcataaaatccagtttcttttaaaatttaattgctctaaaatacctattttattttattgtactttatgaaacaggctatagctctgttgcctaggctggaatacagcagtgtaatcagctcactacagcttcaaattcctgggctctgcctcctgagtagctgagactataggcatgctacaactccagggtataaagtaaccctttataaagcaaaatattgagattttgtaacatatatgatataatatataaacataatgttatatatataaaattttttgaggtgaagtctcattctgttgcccaagcttgagtgcagtgacatgatctcagctcactgcaacctctgcctcccaggttcaagcaawtctcctgcctcagcctccagagtagctaagattataggcaaatgtcaccacgcctgactaatttttgtatttttagcagagacagtgttttaccatgt

SEQ ID NO: 947943 - DNA, 773 bp, Homo sapiens
catccatattatagctgcaattttaatacaaaataaaaaggtatttagcaaaaagagcaagatttttgtgtctgttagcatagctgcaatgacagctacaaaaattgttttcttttcctttttttttttaagtagtccttatgttgaattcatttctcttgaaatggtgggcaagtgcgtttgtaggcttcaatctacagtacatattaaggaattcaagctttttttttgtaatgtcatggcttttctctgcctcttgggagcactttcatcatcgctagtggcactttatctaggtctcatggtgttattcaaggtttacagtactggattaaataggatgaaagatacgtgagaactgtgagagatcactttttattgtgataagtaatttactagagagagactgatcatgcagagatgattagtgtcacgtggtgtttaaagtgaatcatcagagcacttgagctcactgcagtagcaacagaagtgactataaaatcatagtagtacagtatgtactgcagttaatttatgcagttataattcaatactgcatctttatgcttgtttacatttcttctcaaccaagaatggtaccatgcatgatctgtgtttgtgtgtataatttttaataaattataactttacataatatctatattttatattacataagaaaatagactagtatttacatatattttatgcattcatgacatctcaaacttctcaatttttttgatrtttctatgacacatgatttttctata

SEQ ID NO: 947944 - DNA, 622 bp, Homo sapiens
ttgaagtcaggtagcatgatgcctccagctttgttctttttgtttaggattgtttggctatacgggctttttgtttccatatgaaatttaaagtagttttttctaattctatgaagaaastcaatggtagcttgatggggatagcattgaaactataaattactttgggcagtatggtcattttcacgataatgattctttctatccatgagcatggaatgtttttccatttgtttgtgtcctctctcatttccttgagcagtgatttgtagttctccttgaagaggtccttcacatcccttgtaagttgtattcccagggattttattctcattgtagcaattttaaatgggagttcactcatgatttggctctctgtttgtctattacttgtgtataggaatgcttgtgatttttgcacattgtttttttatcctgagactttgctgaagttgcttatcagcttaaggagatttggggctgagagaatggggttttctgaatataccatcatgtcatctgcaaacagacaatttcacttcctctcttcctatttgaatgccctttatttcattctctctcctgattgccctggcaagaacttccaatactatgttgcata

SEQ ID NO: 947945 - DNA, 590 bp, Homo sapiens
atatcacttttcaagaggagctagttcatgatattcaaacmcacctgagaaagtgttcaggaaagaactagagaagggcttatttcataataaggaataaggaatttgacttattaagtcaaattatgcccctggctgaggaaaacaaacatttggaataatgggtaattaatagggaccaattagacagaggaaggttttatacatcggttttatatatctttgtaagagaaatgttcaatttctagttataaagataaaataagcattattaagcttttgaaaatgaaagaatagtattgattgtattaattagcatttattaagcacttaactggcacaatgcacaactccaaatactttatgtgggttaactcaaacatcacagaaaacctaaacaggtaggtcctttactcacttagcaagtaggggaaacgaattttcaaatcagttagtggttaaattgtgaataattaagagtgtccaccaaatgagagttgaacaactgacctatacatagaatgactctttgagggacgactgctgcattgttaataatttgaatatttaactcatgagctcatctaaaa

SEQ ID NO: 947946 - DNA, 601 bp, Homo sapiens
gtaaatctggtgttaccaagtgccacattgtaaataggaacctaatagttatcagggtttcttattttattaatatataaaatgttagcattttttgaaatatatttaataagtagatgatcaaataatatttaactttttcataggaatgactatttgtctttttagaatgtatataccaaaggagaataattctttaaaaaatgtcttttatgtagaaataaacatttcatatatatatttatattccacattgaaaaactacttttatgaaggagatatacaaaagtcaaatttttaattaatgtgcctggcttagagataatgttcaataaacatttcttaagcagatgaatataattatttgcagaatgtaaaaagtattctcgcagacccacaaagatgtcagaaattaataataacactaaaggaaaatgaagattatcacatcattttacagtccatgagatatggacaaattttaagtgaaaagtcatttcaaattcrtaagtaatgtatatgttgatcaactatgtaaactttcattaccagataatttaaattttacaatgattaacaggtataaaatggtactgtaaaa

SEQ ID NO: 947947 - DNA, 554 bp, Homo sapiens
tgaaacaagtatgcaatttttttgcaattaaaagttattttttgcaaattattttttgtaaaaaataaaattataattttwaaaaagaaatagaggctaataaaattgacttaagctcccctgtttgtctgttttagctgataaatgtgatgatagctttgtccatcgggactgtatcagttgttgtccaccaacctgcacatttgagaagcaatgtcttgggagcaatctccattgtcttgatggatgttactgcccagatggtaagtgcttcatgaagaaaccatgtctgcactcatggaaactagtacccagtgatctaaggatcacatcttcgttttgctgtcctttcccagtacattggacctattgcaattttctgttcttgtagaagttggtccttgaagtgacaaggaggaatggctacttttcattgataaaaggctcattactttgtaaagtttccaggaaatttggaatctatagtcctgaagttacccatgagaaatcttttgttcgatcaatatttaatggtatttaacaatttatatatc

SEQ ID NO: 947948 - DNA, 634 bp, Homo sapiens
aaatacttaggtgtaaatttaatgaggtaaaggacctgtgtagtgaaaactataaaacgctataaaagaatttgaagaagaggtggagcaagacggcagaatagaaggctccayggatcatcccattcacaaggacaccaagttaacaactgtctacacagaaacactttcataggaacccaaagacagctgagcacccatagtacctggttttaattttatattgctgaaagaagcacttaaaaggtagaaaaaactgtcttgattcgctgccaccacacctctcctacacccagaagctgcagcatggaacaaagagcatctctgagtgtcccaggggagggagaacacagaaattgtgaggcattgaactcagtgctgtcctgttacaggagaatggtaaaaccagaccaaactcagctgacaccagctgagcatttaaaccagccctagccagagggtaatcaccaatcccagcagctggaacttgagttcccacaaaccttgccaccaagggatacagtgctgtttttcagtatatttgaaagcagtctagagcacagggactgcaattcttatgtgagtcctattgctgaactaggcccagagacagaggactcgggggcacatgacc

SEQ ID NO: 947949 - DNA, 573 bp, Homo sapiens
caagaaaccacctgctaacaagagggctggacaacttttgggtcaggagaggataaggggggaaatatttggcacagaaagcccaaatgccccatcacttacagagagatgtaaggtgtctttaaaaataattgattctcagtaagattaaaagtttgaactgtttctccaaccatgtagttctgttaagttaatcttgaaatcattctttgaaaactgacaggaaagatacaacttagaaaacattgtggatgaatacttcccccttttgcaaatgatattttggaagcacaaaagaaaaagctctaatacaaatattcataatgaaaatatgaacttaataataccaatggcaagacagaataattaggagaaatcgggtaacgagcatctctcctatttttagtttgtaagccttttttgcttttttttttttttttttttttttkgagacagagtctcactctgttgcccaggagtgcagtggcatgatctcggctcactgcaagctccacctcccgggttcacaccattctcctgcctcaacctcccgagtagctaggactacaggcg

SEQ ID NO: 947950 - DNA, 559 bp, Homo sapiens
acctaagcagttcccagtttaaattttcccttcagcttagtgatttgggggtccccaagatttattttcctttcacacctattgtattagtcagctcaggcttcataacaaaataccacaaactgggtggtttgcacaacagaatttattcctcaaagttctgaaggaaccaagattagggtgttggcaggttagtttcccttgcctctctctttggcttatagatgggcatcttctccttgtgttgcctcatggcttttgcctgtgcttgtgtccccctggtgtctctctcttcttataagcacatcagtcctgttggattaggtcacacacttaggactccatttaacctaaattgtctccttagaggtcctgttcctaaatgcaatcaaattgtgatttaaggcttcagtgtgtgattttttgsggggacacaagtcagtccataacacctactgtaggacaaagctgaactgatctaaattacactcctgaagcttcctgtttagcatgtttgagtatgttgaattcacttttgaatatctccctatatgagttt

SEQ ID NO: 947951 - DNA, 565 bp, Homo sapiens
atccttagcagacaaacacaggaacagaaaaccatataccccatgttctcacttataagtgggakctaaatgattagaacacatggatgcatagaggggaacaacagccagtggggtctacaggatggtggagggtgggagaagggagaagatgaggaaaaataaataatgggtactaggcttaacatctaagtgataaaataatctgtacaacaaatccccatgacacaagtctacctatataacaaacctgcacatatacccctgaacttaaagttaaattaataaaatacttgcaaaccaaattcaacagcacattaaaattatcataccccatgaccaagtgaaatatatccctataatgcaagtatggttcaacaaacaaaaatcaattaatgtgatatgtcacattaacagaatgaaagattaaagaaaaccacaatcatctcaatagatgcagaaaaagcattttacaaagttcaacaccctttcatgataaaaacttttaacaaattaggaatagaagaaatagacctcaacataataaatgccatatatgaaaagc

SEQ ID NO: 947952 - DNA, 718 bp, Homo sapiens
tcaagccagggatggcctgaagcctgggggctaagctttcacttctgtgatccagagtgagaagttatggtgctttctctcgcctgcctatggctgcccacagtccactcaacacacactttcttcctttggaagcccataaaaaccctggactcagccagactggggagacaacaggacttcctgcctgcaaataggagctacccactctgggtctattctccactaagggcttcagatattgggacaacatgcctgcagataggagctacacactctgggtctcctctcctgagagctgcactcactgggatgatctacctgcagaaaggagctacccactttgggtctccttaaagctatactgttactcaataaagcaccccttaaccttgctcattctacagttgtccatgtacctcattcttcctgagcatgagataagaacttctgacactgagtggtgagagtggaagagctgtaacaaacagggctaaaacacgcctctcaactacactcaccatattgctggcaatgagaaggagagaagagtggcaaccctttggggagcccagacctatgggtgctccgagtcaggaatgtgacaccctctttggggctttgcagtttctggyatttccaagtttccaggcatcaccacattcccctcatccagacatggtgcccacagtgaaagctacttgcaatgcatctgatt

SEQ ID NO: 947953 - DNA, 718 bp, Homo sapiens
tcaagccagggatggcctgaagcctgggggctaagctttcacttctgtgatccagagtgagaagttatggtgctttctctcgcctgcctatggctgcccacagtccactcaacacacactttcttcctttggaagcccataaaaaccctggactcagccagactggggagacaacaggacttcctgcctgcaaataggagctacccactctgggtctattctccactaagggcttcagatattgggacaacatgcctgcagataggagctacacactctgggtctcctctcctgagagctgcactcactgggatgatctacctgcagaaaggagctacccactttgggtctccttaaagctatactgttactcaataaagcaccccttaaccttgctcattctacagttgtccatgtacctcattcttcctgagcatgagataagaacttctgacactgagtggtgagagtggaagagctgtaacaaacagggctaaaacacgcctctcaactacactcaccatattgctggcaatgagaaggagagaagagtggcaaccctttggggagcccagacctatgggtgctccgagtcaggaatgtgacaccctctttggggctttgcagtttctggcatytccaagtttccaggcatcaccacattcccctcatccagacatggtgcccacagtgaaagctacttgcaatgcatctgatt

SEQ ID NO: 947954 - DNA, 575 bp, Homo sapiens
gcaggaggatcacgaggtcaggagatcgagaccatcctggccaacatggtgaaaccctgtctctactcaaacacaaaaaattagctgggygtggtggtgcgctcctgtagtcacagctactctgaaggctgaggcagaggaaccacttgaacccagggaggcggagattgcagtgagccgagattgcgccactgcactccagcttggcaacagagtgagactcgaaagaaggaaagaaaggaagaaaggaaggaaggaaggaaggaaggagaaattaagagaaaaaataaaaatttcttgaaaaaaaaaaaaaagaatatggaacagaacatacccaaaccaatgggatacagcaaaagcagtacaagaaagaagtttatagctataagtgcctacatcaaaaaagaagaaaaatttcaaataaataacataatgttgcatctgaaagaactagaaaagcaaaggcaaaccaaacccaaaatagatagatgaaaagaaataatagagataagagcagaaatcaataaatttgaaatgaataaaacaatacaaaagataaacacacacaaagttgg

SEQ ID NO: 947955 - DNA, 629 bp, Homo sapiens
ttcatatatgctttctggttctccttctccccsctctctctctcctctctcctccccctggaaaatctcttgatgtgaatataggtctgcttgatggtatcaaataagttccttcagctttcttcatgcctttttttttattatcgttttctctttcgctcctttgactgaataattttacatggccagtctttgacttcactgattctttcttctgcttgatctagtctgctgttgaagctccctagtaaatgttttagtgcagttaatgtaccgttaagctccaggatctctgtttggtaccctttaatattttctatatctttattgaaattctcattttgttcatgcattcttttgttaaccttggtgaacatactttatggcagttattttacattctccatcaggtatatcatataactcagtttcctctgggtcagcttctggagctgtattttgttcttttgtttggaacatatttcttgtttcttcattttccctgactctatgttggagtcttacacattagacaaaacagccacctctttcatattggcctcatacaggagaagaccctcacgaatcagccttgctagggattctaggagcctttttaaccttcgtgc

SEQ ID NO: 947956 - DNA, 629 bp, Homo sapiens
aatacatggtactgtttctcccatagccaggattcacaggtccaagaatcaagggatggaaatggaggtggcaccactcaccatcacccctagtgatccaccagcaaaatttttgctttctgttcctgcgacattacgttctcctgtcctagaggtcttagttccagaaggaggaacgctgccatcaggaaacacaaggacaattccattaaactggaagttaagattgccacctggacactttgggctcctcctacctttaagtcaacaggctaagaagggagttacagtgttggctgggatgattgacccagactatcaagatgaaaacagtctactactctacacagaggtaagaaagggtatacatggaatacaggagcttcattagggcatctcttagtattaccatgccctgtgattaaggtcaatgggaaactatgacaacccaatccaggcagaactacaaatggtccagacccttcagcaatgaagtctttggtcactccaccaggraaaaaaagcacaacctgctgaggtgcttgctgaaggcaaagggaatacagaatgggtagtagaagaatgtagacatcaatacaagctacgaccttgggaccagctacgaccac

SEQ ID NO: 947957 - DNA, 582 bp, Homo sapiens
tcaaggggatggggcacagtacagcacagtgcaataatcaggargcgaaagcccaagtagttctcatttttactatttttgctttaactaatttatctgattgtaagtttctgtaatttaatttttagtaatgactacattaaaagaacagctcaaggctgggcacagtggctcatgcttgtaattccagcactttgggaggctgaggtgtgtggatcacctgaggtgaggagttcaagaccagcctgaccaacatggtgaaacccccgtctctactaaaaatacaaaaattagctgggcatggtggcgtgtgccagtaaacccagctactcgggaggctgaggcaggagaatcatttgagcccaggaggcagagattacagtgagccaagattgtgccattttactccagcctgggcaacatgagcgagactctctctaaaaaaagaaagaacagctcacaaaaatgtctgaaaatttaacaatcagttctcatgcgctggtacaaaccatcttcagcatgttgtaccattattgaaaatcttggcccaaatgctccatatgtatctcactaaaccctctg

SEQ ID NO: 947958 - DNA, 654 bp, Homo sapiens
gaagtggggggttctcattcaccagggcaagaagcaattccttagggagaaaatggagcctgagtagggaagagattcagcctcctttgatgtgcattttgagtggtctaactagagagttcctaggaggtgaggcttaaggatagtgcagcagacagaatagcagcctcccaaagaagtccatgttctaattcctgaaacctgtgtatctgtgaccttttatggcaaaaggaactttgaagatgtgattcagttaaggatcttgagatgggaaatcatcctgatgagcccatttaatcaaaagagcccttttaagggaaagaaagaggcaggaaagtcagagtctgagaagaagatgtaacaaaggaagcagagctcagggacagaggtttgaagatgctgcactgctgtctgtgagggtggaggaaggcgccacaagccaaggagtgctggcagcctacagtagccagcaaaggcagggaaactggttctcccttagagactccaggaggaacacagccctgctgatcccttgattttaggacttctaacccccaaactataagacaataaacttgtattgttttaaaccaccacgtttgtcagtaatgtgctacagcaggaacaaraaactcataccaacaacatcagctg

SEQ ID NO: 947959 - DNA, 560 bp, Homo sapiens
cttcatatcagttctctcatttaattctctgttgtttgcatgaggttgccttactagctccattttgccactgaggaaattgaattcaaagggctttagagatttactatgaggaaatattggaggccaagctaacacgtaagcttccaaacactcagcaaatctttcttccaccacaccacattactctcaaggaggagggagaggagaaatgaggaaaaaaagccaaattttttccttcaaaggtaagtagttagaatcatcagttttggaatgtattatcagtaaaggaaccaaggtgatcttcctgaggccaatttaaaatctaattcaaattatttgaattattaagcaataagatgtcttccctttacgtttaattcaacaagcataaataacagcataaattttaattatctgggaataattaggaacacatttctttcctatcacacttasggccaaatcacatttctaaagtgaaacctaatctaagaactttccaatacaatatcatataattaggtaatttaaaaatacattttgaaaatgaaatctcc

SEQ ID NO: 947960 - DNA, 613 bp, Homo sapiens
ggctcctggctgaggtattttgagtctgaaaagcaaagcaaaacaccatcgttgtgagcccctacatactacagctcagccccagcaggtgcaggacgctgtatgtgggtaaaagactagttatgtgttcaaaatacagtgatgaagaggccaatgagaaggtggttgtaaatgaagagataaagagcatggtgcaataaagggtgataggatcctctctcagccatcacacaatttgctttcttcagccagctccgtcaaaagtatcccctattagaaactctgtccccttagagagtagtttgttgaaggtttctaacagaaaaagacaaggctcggacactagcagtcctgcaggaaacagttgtattcaaagcagacatgaaaaccctgtatcgtgtgatgcactgccaatgcaacagcaccttcaagcactaacttcgatagaccctcagcctctgggatgacctggcatttccctctagctacgtgaactygctgagggcccactttaacaatttagtaactccttttggcatggtgcactggcccaatggactaagtgtcctattgaagaatgcaatagaagcagacagcgagattggcctcaaca

SEQ ID NO: 947961 - DNA, 475 bp, Homo sapiens
agaaagaatctggaatttgaagagaagttattttgaaaatatacagagcagaaaaaataaaaaagaaaaagggaatgaagaaagctatgggacttatgggaaagcatcaaaagagcaaatgttcaaaagggagtagagaatgataaaggggtagaaagagtaaagaaataatagcaggaaactttccaaacctggagaaagatataagtatctggttacagaaaggtcaaaagtctctaatcctccaacccaatctaaataagactaccccaaaagattttataatcaaactgtcaaatatcaaagacaaagagagaaaactgaaagcaggaagagaaaagaagctagtaacatataaggaagttccaatatgtccagcttctcagcagaaatttcacaggacagaagagaatagaatcayatattcaaagagctcaaggaggaaaacaaaaagccctgccaatcaagaattctg

SEQ ID NO: 947962 - DNA, 631 bp, Homo sapiens
tgttgtagacaagaagcacatacaacagtacatactgtacaattacattgacttaagcttaagaaatggtaaaactggytgggtgtggtgctcatgcctgtaatcccagcactttgggaggccgaggtgggcagatcacgaggtcaggagctcgagaccagcctggccaacatagtgaaaccccgtctctactaaaactacaagaaaattaaccgagtgtggtggtacgtgcctgtagtcccaactactcgggaggctgaggtgggaattgcttgaactcgggaggcagagtttgcagtgagccgagatcatgccactgaactccatcctgttgacagagtgagactccatcttaaaaaaaaaaaaaaggaactggtaaaacaatactatggtcttagaggctcagagtagtagctacccctgtttggggtagtgacgggaagggcaccaggaaggttttgggggtgcagtaatgctctctgtttcttgatccaggtgctgactagatggctgtgtttgttttgtgcaagtttgttgagctgtaccacttataatccgtccacatctctggatgcatattatactaagtaaaaagtttacgttcataaaataaaccatgggacataaagga

SEQ ID NO: 947963 - DNA, 676 bp, Homo sapiens
gatctcaacccaatctaaggtagaatttttttaaccaagggggttgcttttttggaaagttggactgtgtgtgtgtgtgtgtgtgtgtgtgtgtgtgtgtktgtgtatgaagttttgtacattaaatttgtggactttttttgaccaaatgagtcagatatccaaattagtatgttgctttcaaaattgtcaccctagaaggttataaactcattccataaaggctgcccttgacagttttagaacacccttttgagaagagcctttgtagcctatggaccattttctcctgggatgcctctgtaatggcaaatccacaatactagattcttgaataggtcaacggatacccagacctatatctctctcataaataatgtgattaatagaggtagatgaatacttttgagggatcagaaagtcaaaatcaaaattaaagtgttactataaatgttgagatggagccgcttaagaggtttttgaaagcaattcttgctgagatgcccccaaacttctctttaaccctgctaactaacttggagaatggaggctcatccaagcaggaaaaatattcagtgtgttcttgactcataactcaagctaaaaatagaacaaaaaacattgcattacatatcaggtgtctgagttctatgagctcccaggaatggaaaagtat

SEQ ID NO: 947964 - DNA, 606 bp, Homo sapiens
gttatctagggataaaaggttagcttgtattttgcctgaggggtgtgatttactcctgttagtacctatgcctgctctgtcattttgaccagaggttaacatactccaattgcattgtggactgggcccacacctacactaggtgaccaatgtttccaactattggatatgcactgcccttccagcagggctgcggatggcttgccttggcacatacatcttgtgtctgcagagaactggacatggttggagacttgggggtcccatggctgatgcctggaatgcaacatggcagctttggacaaaggatgctgcaagacacatggtgtgcccaacccctggctggcccatagcgtttatgatggggctggctagtggggaacatgtagtactcccagcccaagtgccacagtgcatagagcaacattggggtaacaccactgtgggatgggtacctgtcacagcctttgcaaacataacacatgtcactaccaaggtcaggccctgattgactttgtgccccctgggagtctatgggtctgtggggacacagagtagatttacctacccrcgaactgcactggacattgtacctgggggtggcct

SEQ ID NO: 947965 - DNA, 665 bp, Homo sapiens
tcaaccattgtggaaaaccatgtggtgattcctcaaggatctagaactagaaataccatttgacccagcgatcccattactgggtatatgcccaaaggactataaatcattctactataaagacacatacacatgtatgattatggcagcactattcacaatagcaaagacttggaaccaacccaaatgtccatcaatgatagactggattaagaaaatatggcacatatacaccatggaatactatgcagccataaaaaggatgagttcatgtcgtttgtagggacatggatgaaactggaaaccataattctgagcaaactatcgcaaggacagaaaaccaaacactgcatgttctcactcataggtgggaattgaacaatgagaacacttggacacaggatggggaacatcacacaccggggcctgtcatggggtggggggaagggggagggatagcattaaaagaaatacctaatgtagatgacgaattaatgggtgcagcacaccaccatggcacatatatacatatgtaacaaacctgcatgttgtgcacatgtaccctagaacttaaagtattaaaaaaaaaaaaaaaaagaaaaaaaggaagggagyccatgcccgagggcaccatgcctccctgtccatctgcgtggtactgaatc

SEQ ID NO: 947966 - DNA, 585 bp, Homo sapiens
gaactctccaccccaaatcaacagaatatacattcttctcagcatcacattgcacatattcaaaaattgaccacataattagaagtaaaacactcctcagtaaatgcaaaagtgcagaaatcataacaaacagtctctcagaccacagtacaaccaaattagaactcaggattaagaaaatcactcaaaaccacacaactacatggaaattgaacaacctgctcctgaatgactactggggaaataacaaaattaaggcagaaacaaataagttctttgagaccagtgagaacaaagagacaacataccagaatctctggaacacagccaaattagtgttaagaagcgaatttatagcactaaatgcctacaacagaaagctggaaagatctaaaatcaatagcctaacatcacgattaaaagaactagagaagcaagagcaaacacattcgaaagctagcagaaggcaagaaataactaagatcagagcagaactgaaggacacagagaaacaaaaaacccttcaaaaaatcaatgaatcctggagcttgttttttttwaaaaaaattaacaaaatagatggac

SEQ ID NO: 947967 - DNA, 765 bp, Homo sapiens
ttaactcacaggagtgttgtggggatgaaatgaggtgacatattgagtgttcaacaaaggttggttctgttgcacatagggaagatgtgaattccctctcccaaaaaattacaaattacttccataatcccatattttagaacattatgcacccattatttcatttattctccatacagcccattttcagatgaagaaagtgagaatcagaaaggtcaattgacatgtccaagtgtcatatggctaggaagaaaagcagccagaattgggacctagaccctttccaccataccacaaaatcccttaccaagttgccatagggatatggatgccctgcctgaagacaggaggtcacagagaaagacacgaaaagttggaatcttgaggttcttcctcattttgcaatcctgtaataaaattctagaagggcatataaagtctgctcaagtgctgaccctaaatctcttacacttctccttccccagtgccttctcactctgacccatctgctctcaagactaactatgcagtagactcttggaacttagagtccacaggtcacagttccactcacctgccttcaggaagataaagtagcatcagccccatcctagagatgaggtaagagagtccctgagatgaggagggattgtccacatacaaagagccaatgggaaaggttggggatgactagagcctaggtctcctacagcctggtsaggcgctgtctctgccatctgggatgctcctcctttcagagtctta

SEQ ID NO: 947968 - DNA, 586 bp, Homo sapiens
agagccatcagaaataacgccgcatatctacaactatctgatctttgacaaacctgagaaaaacaagcaatggggaaaggattccctatttaataaatggtgctgggaaaactggctagccatatgtagaaagctgaacctggatcccttccttacaccttatacaaaaattaattcaagatggattaaagacttaaacgttagacctaaaaccataaaaaccctagaagaaaacctaggcattaccatccaggaaagagatcaaataagaataaatgactattccagggctcaggccacaaaatacatccttaaaatcactatggaatacaaaactgttaagttttgttaatattgttatttagagaagggtagcacggtttaaaaagagaatctgtgtacatactaagcactccataaacattccttaaactaaattggctgatgcctgaataaatctgtaaattaattagctgtggctatgaattacaacattaccacaatggttggtcaatttaaagggatcctagacaggagttgsagcttccataggtggttgtctcagtgttatttcatgatagtctga

SEQ ID NO: 947969 - DNA, 631 bp, Homo sapiens
atttaccttaggggtcactatttctattgaattttctatatgttttaacaagtgtataatgacaagtatctaccatttcagtgttacacagaatagtttcactgccataaaaatcccctgtgctccacctgtttatccctctctccctccacttgaaccactggcagccactaatctttttggctgtctccatcatttgttcttttttagaatgtcatacagatagaatcatacaatatgtagccttttcagattgacttatttcactaacatgtatttaagtttcctccatgtctttttgtactagtttatttctttttattgttgaatgctgttttctgatatgaacacgccacaattcatttatgcatttatctattgaaggacatcttgtttgcttccaagttttgacagttattaatgaagtgctataagcatttgtgtgcaggtttttgtgtgtacataagttttcaactcatttgggtaaataccaaggatcacaattgctggatcrtatggtaagagtgtgcttaaagttttataaggaaaggctgaactgtgtttcaaagagactgtaccattttgcattcccacaatgaatgttagtgtaggttttccaatatctttgtca

SEQ ID NO: 947970 - DNA, 621 bp, Homo sapiens
caggcccatggcacatagctgagcatgtgtccctggagcagcttgcacagagcttgcaagagccaaagtgagaaaaagggaactgtcctccaaatattgggagtctgcactttgattgttgattgttgattactgatcccagtcacaggtgcaaagaggtggtggccattgttgtacaccctgcccattgctgcaagacccaccttatccaactgaagtgacttctgggggataaaaagggccagtgcctttttccccccttattttcctcttttccctttttaaggatacagacagtgtgaagacttggatattcaaagactaacacctatgtaggggaaattagaaagtcatcacacatacccagaaaagacacaggctcagaaaataactgaaagaaccttacatttatacctaaggccaatcatcatggcatatgggaggcaggactagattgagattgcagcactggacagagcagcgtgtggaggctcacatttgtgaattttagctccaggttgactgcaagaacaaaccagcaatcccgagaggacccacagactctgtgaaggaagtgaaatgctcctgcaggtctcaggagrcaccctaagtactgtgagt

SEQ ID NO: 947971 - DNA, 644 bp, Homo sapiens
ctcccctctcatcctgtgactattcctcctgggaatgcagcccagaagatctcagccttattttacccagctcctgttcaagatggagtcgctctggttccaatgcytctgacattcccatctttgttattactgtgaatacttttttcaaagtataatatatttatgatatcagttattaaggagccctgacactgagataaaccttgttagcatctgctgctcactctggatgcctgccctagtgggagagcccttatgactcccatcctactctgcttttctattgttctgcaacacattgaggaatccaaagagatcctagagataacccatcctcagtcaacacattttcctctctccttttcttctcttctcttctttctttctctctctctctctctctctctctctctctctctttctttctgacagggtctcactccgtcaccctggctaaagtgcagtggtacaatctcagctcactgcagcctcaacctcttgggctcaagtgctcctcccacctctgcctcccaggtagctgggactacaggtgtgcaccaccacgtctggctaatttttttgtatttgcagagacaaggttttgccatgttgcccaggctggtcttgaactcctgggctca

SEQ ID NO: 947972 - DNA, 576 bp, Homo sapiens
ctatccatggctaaaaggggccgaggtacagcttaggccaaagcttcagagggtgcaagcctccagccttggcagcttccacatggtgttgaacctacaggtgttcagaagtcaagaactgaggtttggaaacttcctcctagattttgggggatgtatggaactggatgtccaggcagaagcttgctgcaggggcagggccctcatggagaacccctgctagggcaatgcagaagggaaatgtgggattgaagcccctactcagagtcgctactgggtcactgcctagcagagctgtgagaagaggaccactgtcctccaaaccccagaatggtagatccaccaacagcttgcactatgtgcctggaaaagccacagacactcaacatcagcccctaaaagcagcagggaaggaggctgtaccctgcaaagccacaggggccaggctgcccaagaccatggggacctacytcttgcatcagcgtgacctggatgtgagatgtggagtcaacagagatcatttggagtcttaagatttgactgccccactggattttggacttgcatgcagcctgt

SEQ ID NO: 947973 - DNA, 574 bp, Homo sapiens
tacaggcgcctgcactacgcccggctaactttttgtatttttagtagagacrgggtttcaccatgttagccaggattgtctcgctctccggaccacgtgatctgcccgcctcagcctcccaaagtgctgggtttacaggcgtgacgaccgtgaccggcctttatttttttaattttagacttcaggatacttgagcttgtttgttataaggacattacacgcataatggtgagagttgagcttctagtgtacccatcacccacatattagatattgtacccagtaggtattttgggtttaaaattgttctctagtgtctgtttttttttttatttcattggttgctgctttttctaattttgtttttctacttattttggattcaatttactgggtatattttagattcttaaggtagacatttagatcactgattttaaaacctttttcttttctaatataataatttaaaatggcaaatatccctataattgctgctatacatgcatctcacaaattttgatatattaggtagttattattacccgtttaaaaatattttctaagatcattt

SEQ ID NO: 947974 - DNA, 520 bp, Homo sapiens
tttgttctacagcagttcaaatataatatatatagtggtgtgtgtgtgtgtgtgtgtgtgtgtgygcgcgtatgtgtgtgtgtttatcctgtttcatattctctgggctttctggatatgtgatttaatgtctttcattaattttagaaaattttcagccattatctcttcaaagatttcttttgtcctattctgtctcttctctggaattccaaagacatgtactgaatgttaaatagtttgatattttgaatagctcttggatgacctattattttttccactactcttgctgtttgcatgttgtatttcagattgtataatttctaattacctaccttcaagttctctaatttttttttcagttgcatcaaatctagtgatgagcccatcaaaggcatgcttcatctctgttacagttttattcatttctaacatttgcaattaattctttcttaaaattttgatctctctgctaattcacctgatcatgcaatttatgtatctttttcactagagt

SEQ ID NO: 947975 - DNA, 589 bp, Homo sapiens
agcgccgcaggcagccccggttcccgctcgcgcctctccctccacacctacctgcaagctgagggagtgggctccagccttggccagcctagaaagaggctcccacagtgcagtgkcaggccgaagggctcctcaagtgccgccaaagtgggagcccaggcagaggaggcgctgagagcgagtgagggctgtgaggactgccagcacgctgtcacctctcactactacatacacattagaatgaatattattaaaagaattgacaatgccaagtgttgtcaagaatgtgaagtcactgggattatcataattctgctggtagaaatgtaaaatattgcaatcacgtttgtaaacagtttgcaattgcttataaagttaaaggtacaaaggtacaattactatatactccagaaatttctctctcaggaatttatgacagagacattaaaacatacattcatacaaagacttgtatatgaataattacagaagtttaattcataatagtcaaaaactggaaacgacccaaatactcaacaattggtgaatatataaacaaatgtagtatagccatacaatggaatattat

SEQ ID NO: 947976 - DNA, 537 bp, Homo sapiens
ccaaagtaagacccagaccaggaagccaacttaatagcyaacttaagaaatcagctccaaaatggaattttggaatgtaagcaccctggaaattttaattccctttgaggaatactacaagcaagccagtctaatttcaatcttaatgaagtggaggacatgagctaaaataaatgttacacacacctggcatagaaaaacatccttttttcaaaaacaaaagacaacatatgaattgggtattttccatgatttaaaggggaaatgcattttttaattaaaaattaaaaaatgctaaaatttagaataaagaactaaaatggcacatatgcaaatattaaagacaactgtaatttgagaaggtgtatgtcttaggccgttcaggttgctataacaaaatattataactgggtaccttacaaaggatagaaatttatttctcacagttctggagcctggaaatctaaggtcaaagcaccagcagatttggtgtctagtaagggcctgctttctggcttataacattgtgccttcttg

SEQ ID NO: 947977 - DNA, 546 bp, Homo sapiens
cctagaaaggaaaaaaaataaaactatctatatttatggatgttatgattgtctatatagaaaaccccaaggaatctacaaaaaaaaaaaacttccacaaactaataactgattccaataaagtcacaggagacaaaatcaacatgaagaaattaattgcatttttatccattataaataaacaaattaaaactaaaataaaaaatgcaataccatttacaattgctccaaaataaaaaccttaggcataaatctaactaaacctgtatggaatctgaataatgaaaactatgaaattcttgtgaaaaaaataaaggaagacttgaatactggaagggaaaaatcatttttctggattagaagtctcaacataataaagatttcaattctccacaaattgatgtataggtttaatgcaatgcctatataaatctcagtaaggtttttgcaaacatagataagcttattccaaaatttatatggtaagtgaaaggccctagaacagtaaaaaygattttgaaaaaatgaacaaaaaagcaggaattc

SEQ ID NO: 947978 - DNA, 616 bp, Homo sapiens
gtgattttgtttatgaaaaccagatttggttaaacctagctattttacaagaaaggaattttgaatcaagagaaggcaagtgacttcgttaagagtgtgctgtcctggtattgagtaagatgccaatggcccaagataagggttagaaatacgcatagcacaaaaatctgtatttataaggacaattgagattctgcatctgaccaaaggccagagcccctagcagataatcagtaagtcctcaagttgaacttttcctctctgttcttcactcggatctcccagtcatttgctcccacacagcatgtggcagcattgctggaataagtaggagctcaagcgtagtgaaaaagaaattaatgcctcacctgctggaaacacatgtaagaaatggtgaggctctcatgtctccttacataacctgtattcttattagttggggctttgactgcaaacgtaaatattagttatctttctcccattaattattgtcacacagatttaaagggtcagagatttggaagttaatgcytcattcagtgtgggaaaagtaacactgtgcactttggctgctgtttttctttctggctgactgcagaccaattgtttctgcccc

SEQ ID NO: 947979 - DNA, 566 bp, Homo sapiens
gctgggcgtggtggctcacacctgtaatcccagcacttcgggaggccaaggcgggcggatcacctgaggtcaggagttcaagaccagcctggccaatgtggcgaagccccatctctactaaacacacacacacacacacacacacacacacacacacacacacacacacacaaattagcccgcatggtggtgtatgcctgtagtaccagctactgaggaggctgaggtggaggatcacttgagcccaggaattcgaggctgccgtgagtgatgatcatgccactgcactccagcgtgggcaacagtgaggccatgtctctaaaaaataaaaaaagagagagaaacaagagagagctggcttccccctcctctgccatgtaagcaacgtaatcaggatgaagcgcctcaccaggcaccgaatctgtcaacaccytgactttgaactccctggcctcgagaactgaaagacactctctatgggttaagccacccagtgcatggtatcttgttataactgcccgagctgactgagacggacgttcaggacagagagcgtgaatgcatag

SEQ ID NO: 947980 - DNA, 628 bp, Homo sapiens
  misc_feature 105, 107: n = A,T,C or G
tcatatatagcctcctgtgtccaaaaaagtgatggcaaaacagacactgtgatgctgtagtgaccaagggattaaaatttccctaatctcttgatgtttctgcangntcaatttttaaattcctgaaacatctatttttttttcatggtctgataataagcagatggttgtgacaagtttgattggggggcacatctcatacttgagcatggaaactgaatcatcaccacttatcacccacaaaaggatctcctcaaacatctttttagcaatgtatgaagtgaagttatgctagctgctataacaagtaactcctatgtctcagtggcataatacaataatttttgtacctatcaatcacagaccaatgtgattggggggtactttctccatattgtcttgtagaatcctggctgaaaagggggtccatcatcttcaatgtatggcttccagaacatactggaaattgatatacaaccagcacgcacagaagaaataataaagaaccagacagaacacatgaaagtggcacttttctctccctatgycattgactagaactcaatcatgtgatgccacctaactgctggggaggttgggaaatgtaatttaactgtgtatctacaaa

SEQ ID NO: 947981 - DNA, 706 bp, Homo sapiens
caacccagaccttcaaacctatattttttctctttggttctggtgttttttccacttcaccatgttgaaaatgcccyaaagggggaaagggaggaatgtgtatgtgttagaggtggatggggaagaggagaaacagtaggtccagaggaataggttttaattaaaagtcaggcggccaggctccatatgaaccagggagtagggtgcataaatgcccatctgagcaaggccagtgttgaaggggaaggagtgatcggagttcttgtgaaggccgtgggaagatgggtgggacacaggcaaacacatgagaacaaaacaatgagctttgccaataaacgacacacaggccaattgtgggttggcatcgagagggttgtttttttgtttgttttgttttgttttttttgagacagagtcttgctctgtcgcccaggctggagtgcagtggcacgatcttggctcactgcaacctccccatcccaggttcaagtgattctcatgcctcagcctcctaagtagctgggattacaggtgtgcaccaccacacctggctaatttttatatttttagtagagatggggttttgccatgttggccaggctggtttcaaactcttggcctcaagcgatccacccacctcagcctccccaagtgctgggattattacaggcatgagcatggcgcccagccttcatcgggagattaa

SEQ ID NO: 947982 - DNA, 706 bp, Homo sapiens
caacccagaccttcaaacctatattttttctctttggttctggtgttttttccacttcaccatgttgaaaatgccccaaagggggaaagggaggaatgtgtatgtgttagaggtggatggggaagrggagaaacagtaggtccagaggaataggttttaattaaaagtcaggcggccaggctccatatgaaccagggagtagggtgcataaatgcccatctgagcaaggccagtgttgaaggggaaggagtgatcggagttcttgtgaaggccgtgggaagatgggtgggacacaggcaaacacatgagaacaaaacaatgagctttgccaataaacgacacacaggccaattgtgggttggcatcgagagggttgtttttttgtttgttttgttttgttttttttgagacagagtcttgctctgtcgcccaggctggagtgcagtggcacgatcttggctcactgcaacctccccatcccaggttcaagtgattctcatgcctcagcctcctaagtagctgggattacaggtgtgcaccaccacacctggctaatttttatatttttagtagagatggggttttgccatgttggccaggctggtttcaaactcttggcctcaagcgatccacccacctcagcctccccaagtgctgggattattacaggcatgagcatggcgcccagccttcatcgggagattaa

SEQ ID NO: 947983 - DNA, 717 bp, Homo sapiens
tggagtgcagtggtgcgatcttggctcactgcaacctccacctcccagcttcaagtgattctcctgcctcagcctcccgagtagctgggattacaggcatgcaccaccacgcccgggtaattttttgtatttttagtagagacggggtttctccatgttgaccaggctggtctccagctcctggccttaggtgatccgcctgcctcagcttcccaaagtgctgggattacagacatgagccacctcacccagcccagataatccttttacacactgtttaaaattttcaattttcctggagatagggtctcctgtcgcccagcgggtaaatgcagtggtgcgattatagctcactgcagcctcagacacctgggctgaagcctgattcttgagcctcccaagtagctgggactataggtgtgagccatcatgctttgcccttttttttttttttttttttttttgaggcagagtctcactctgtcacctaggctggaatgtagtagtggcacgatcatagctcattataacctcaaactcctggtttcaagcaatcttcccgagtagtcaggactacaggcatgccctgccatgcccaactaattaaaaaaaaawttttttttatacacatagggtctcactatgttactcaagctagtctccaattcctggccttaagagattttcccaaagcattaggattataggcatgagcca

SEQ ID NO: 947984 - DNA, 784 bp, Homo sapiens
tcctcctggctctgaagttccatgcrtgctataaccacaagaaaatgaattctgtcaacaacctgagagaatatggaagagggtgccaagggtcaggtgagactgcagccctggctgacaatttgtttttatttttatttttatttttgcaatggattcttgctctgtcacccaggctggagtggagtggtgtgatctaggctcactgcaatctccacctcctgggttcaagcgattctcctgtctcagcctcccaagtagctgggattacaggtgtgcaccaccacacccagctaatttttgtatttgtattagagacatggtttcatcatgttgaccaggtggatcttgaactcctgacctcaagtgatctgcccacctcagcctcccaaagtgctgggattacaggtcctagccactgtgacaggcttgttattgtttttttccccatttttcattgacacagagtaattgtatatatttatgggatacacagcgatgttattatatgtgtataccatgtattctgatcaaatcagggtaataagtatattcatcttcttttatctttgtgagagtacccagttatgctgttcccagaatcctgaattatggaaactgtgtgataataaatgagtgttgttttatgctgctaagttgtggtaatttgttacataacaataaaaaacttacataagcattgtggatgggtcatctgtctttggcagccaggaggcaaaaagacatagaggattactcctcagaagaatactgaaagaggagg

SEQ ID NO: 947985 - DNA, 640 bp, Homo sapiens
tgaatatttctataatcctaccacacagaattcaagaaatctaacagcttttcttcatttcatcccattttttgcccctttcagttcaaattagcagtttttctgcaggggtggtttggtaagcctgtagttcatacccattactaatctccttatcaaactgtcaattggctgcacccttactgttctcttccaaacatgctttctcactttttgcgatacagatgggctgagaattttccaaatatttaagttctagttctttttgcttaataattttaccttcaagtcacttttctcttctctcattttactgtataggaactgagcaaccttcaacaatttgctgagaattttcaccagctaagtatccaatttaattatgctaaatatacatttttattgctttcaagttctaccttccacagaacactagaacatgaacagaattctgccaaattctttgccactttgtaacagagattgcctttcctctagcttccaataataatrtcacttgattctgtctgagacctcatgacaatgaccttgaccatccatgtctttgccaacattctgttcatgattacttttgtattctccaagaaaatggaggctttgtctttagctcttctctttt

SEQ ID NO: 947986 - DNA, 641 bp, Homo sapiens
tgagtcaaattttttatctcattattcccagtagctacattctataatgttgctgcaaaaacagaattagcaaataatgaaacactactgctaagggaaatacagggtraagttcctgtgaggctccggtcataacattttcacccaccaattaatatataaccttgtttcagatgtgtttctgtgtaataatactttaggtcatttacactgttgattcattaacattgaactcatggccaaaaccaccataactcatgcctaaacaaagcttatatctaacactcgcatattttctctgtaagacataccacagcctttttgtgcttagggaccctagacagcagcacttcagcactacacttggtggccattctaaacagtgaaatcactcatgaaaagcacaaaaacataaaacatctttcactaaataaaactcaaaagaatgcctgtttacaacatgagggctgcaaaaagaaggtagggcatcattttgttcaacctcagctaggaacatgtgagtgaggtgactcaaattttttgttgcattgcacactacattcccatgaatgattatgaaacctctgtaagtactgatttgggtgttacaaatacatcttagtaagtgggggaattcacaa

SEQ ID NO: 947987 - DNA, 681 bp, Homo sapiens
tttgagcaattctgcctcagcctcccgaatagctgggactacaggcatatgccaccatgcccggctaacttttgtacttttagtagagacggggtttcaccacattggccaggctggtctcaaactcctgacctaggtgatctgcccgccttggcctctcaaagcactgggattacaggtgtgagcccaccatgaccagatgttgaatgaattttgacaaatacatacacctgtgcaaccagccccacaatcaaaatgcagaataattccatcactccaaagttccctcatgctcctttgcggccaatctcctcccacaacccctggttccaggctaccactgatctcatttctgaccctatagtttgtcttttctatgatttcttttttttttttttttttttgagacggagtctcactctgccacccagactggagtgcagtggcacaatctcagctcactgcaacttcccccttccagggttcaagtgattctcctgcctcagcctcccaaggagctgggactacaggcgcctgccatcacgcytggctaaacttttctataatttcatatgaatggaatcatacagcatagactcatttttctctgtttcacagaccatcatccatgcatcagtagttctttttattgctaggtgaatgaagcacagtttgtccatt

SEQ ID NO: 947988 - DNA, 552 bp, Homo sapiens
aaatgcaatgtccctgtttacttccaattcaggtagaattgtatatacttcccttatacagcttcccacactgagckgtctcaccatctctgtggacagatgagtaattcgtgcccgctctcccttctcagtttgtcttctgtgtggagaactgccaacatggtctctcctttttagaaactcacatactgtaagtgcaaccttttggaagtcagtgtacataaacatgtgaaatgtgcatcccagctactgtagataatgaggcagctctacatgtaatcacgaggaaaaatcgccaagataaattcagtggacaaaccagcacggaagaggctgaggagcacgctgccatatgtctacacatagtgtagctctagcagaattcgtgaggagcaagtgacagcaggtgcctctgcagaaaggaactggggacaacagtggggaagaagttaacatgtcattattttattttttagatattctacaatgtgaatttactatttattaaaaactaaataaaattgtaagctggggatagtggctcatgcctgt

SEQ ID NO: 947989 - DNA, 583 bp, Homo sapiens
attctcctccctcagcctcccgagtagctgggattacaggcgcctgccaccatgccctgctaatttttttgtatttttagtagagatgggattttaccaggttgcccaggctgttcttgaactcctgacctcaggtgatccacccgcctcagcctcccaaattgctgggattacaggcatgaaccactgcacctggcctgttgttgttgttttagagatggtctcaatctgtctcccaggctggagtgtggtggtgcgatcatacctcactgcagcctcaaactcctgggctcaagggatagtcccgcctcagcctcccaattaattgagactacaggcatgtgccaccacacccagctaattttggggtatactttttgtagagatggggtcttgctatgctgcctaggctggtcttgagttcctggcctcaagtgatcctctcacctcagcctctgaatgtgttgggattacgggtgtgagcctctgcacccagccrgtgtttcagagctttatggtgatgaggcatgcttctggatagtcctgggagcctgtgtccttctcacattcaggagtccagtgg

SEQ ID NO: 947990 - DNA, 726 bp, Homo sapiens
aggagctggggctggaccagaggagtgcccccttggatttgcagggtgatatggtttggctctgtgtccccagcctaatctcatctagaattgtaatccccaagtgtcaagggagggacctggtgggaggtgattggatcatgggggcactttcccccatgctgttctcgtaatagtgaaggagttctcacaagatctgatggttttaaaagtggcagtttcccagcctggccaacatggtgaaacgctgtctctactaaaaatacaaaaattagccaggtgtggtggtgtacgcctgtagtcccagctactcaggagactgaggcaggagaatcacttgaacctgggaggtggacgttgcagtaagccgatatcacaccactgcactccagcccgggcgacaaagcaggactccatctcaaaaataaataaaagtggcagtttcccctgagcactctctctctcctgtcactgtgtaagacatggcttgcttcccctttgccttccaccaggactataagtttcctgaggcctctccagccatgcagaactgtgagtcaattaaatctcttgtttataagttacccagtcccaagaagtatcwttttttttttttaactgagacagagtttcgctctcatcacctaggctggagtgcaatggcacgatcttggctcactgcaacctctgcctcccaggtttcaagcaattctcctgcctcagcct

SEQ ID NO: 947991 - DNA, 585 bp, Homo sapiens
gttacataggtatacacatgccatggtggtttgctgcacccatcagcctgtcatctacattaggtatttcttggaattcttggcaatcctgtgtgtgaaaaatggtttytcagtataatttaactttgcatttttcttatcagtgaggttgtgcattgtttaaatttacataagagccatttggcctttttttttgtaaatgaacaattcatttcctttgccatttttctattgggttgttggtcctttttttctccttgatttttaagagctttttacagttaggaaagtgagctccttgggtgtgatcagagttgcaaatatctttttcctttttttctttgcatatgttttagagattcaaatatggtgagcatattttgtttctttttgttgttgcatagtattccatagtattgccttaccatagtttatccattcaccagctgatggacattgaattacacttagagtttttggctattgcaaataatgatgttattaacatttttagacaagtctttgtatgtagaagaaattttcatttcttttggataggtacctaagatgagtgctgggtcatat

SEQ ID NO: 947992 - DNA, 660 bp, Homo sapiens
gcaccactcacaggagacattgagctggacagttctctccgtggtcacctgagctccttggcgtttcayctgacaggtgaggttggtgccatggtcctcgggcctgggggtgagggtgagctccgaggagcgggtggtctcggggtccagggggctgagggcattccccgtccaggagaatgtgagaggtggtcccgcttcacaggatcctggaaggctgcagctcagccttgtggggcggccggactccagaggctccagaaagtggatgtcgggtttctctatcagggctgaggaggagacagggagatacctgggccccaggggcttgaggacgtaaggtgtgaccccgagagtggccaggcctcaggccccgacctgccccaagtcctacacctcctccagccgcccctgcccaactcctgtccctgttctcatacgggggtctccacgtcccagggtcctctcctggggtccctgccatacctgtcacctccaagttcagcttattctgttggtagctatattttacatcccttcctctctccacgcggaagaaatagcttcccgtgtcctccattctggcatctccgatgctcagggagcagttcttcttctggacatccccaaggaggcggaatcggccctgggtctctggct

SEQ ID NO: 947993 - DNA, 577 bp, Homo sapiens
acacatttaacactgctgaactgtactctttaaaatggctaagatgacaaattttgtgctatgtgtattttctcacaatgaaaaaataaatctgaaaaagagagcagagaaaagggagaagccaaaagaaatactaggtctgttcgtgcaagatcttagtgactgggattggggggttgggagcaggaaggacccagacccaggggctgaggggtgagggagggtctcctctcccaatgctgaaccctgagctaatagaaggctcccatcacagccccagagggaagagggtctttcctacctgtgcctgtgccatttctgaagaagatgctgatggcgaggttctgtggagcatctgggatagaaagatacagcaccagcttcagaggtgacaagagggatgggcgtggtcccgggagggacccaaggaggggccacagaaacccaccaggtggggaccgctgtccttcctgcccacacacgagttttccctggttatcattctctttctctctctctcttctacacacacacacacacacacacacacacmcccctcactcccactgcccttggg

SEQ ID NO: 947994 - DNA, 714 bp, Homo sapiens
gtgatggaagacccagctcatttaaatgatatggagattcattatttcatttatcaagaaccctggcacaagggggactatggggttaattcattcagtggctcagcagcataatctgaaattcatattcctgccacttctctgtacttaaatgtacatgtacagcatgtactccccaggttaaagtttctcatcgccccaagatggctggtgcagttccagacatcacacatagacactgaaacctccaggatggatcactggacaaaatcagagttctgttaggaaggaggagggggttagagtgagaaataaccaccagagtcgctcaatctaggtgtcaatccttgttgagaaacatttacccattctctgctgcttaaaagattacaaacatcttgtcctgacatcatttgacttccacagtatgccctgacttcttagtttttattttctcccatatcctctgcatatagccattgcacagccaaacaggaatatctgctattgccagaatttgccacatgtctggtttctactttcttgccttgcttaggctgtgccctgtatctggaatatactctgttcatgatccctgtctcaacacaaacatgtccagggacygggataaaagcagagactttctattctccctcttgtccctatcttttttagacaatctttttattgcaaaataaaatacaagatacagaa

SEQ ID NO: 947995 - DNA, 678 bp, Homo sapiens
ctggaaggggggctgtaccctgcaaagccacagagctgagctgcccaaggccatgggagcccacctcttgcatcakcatgacctggatgtgagagacatggaatcaaaggagattattttggagctttaaggtttaatgactgccctattggattttggacttgcatgggccctgtaacccctttgttttggccaatttctcccatttggagcatgtgtttttgcccaatgcctgtacccccattgtatgtaggaagtaactaacttgcttacttgctttcatttttacaggctcataggtggaagagacttgccttggctcagatgagactttggacttggacttggttttttttttgtttttttttttttttgagaaggagtcttgctctttcaccaggctggagtacagtggcgcagtctcagctcactgtggcctctgcctcctgggttcaagcaattctcctgcctcagcctcccaagtagctgggactacaggcgtacgccaccatgcccagctaatgtttgtatttttagtagagatgaggtttgaccatgttggccagggtggtctccatctcttgatctcatgatccacccgccttggcctccccaaatgctgggattacaggcatgagccactgagcccagcctggaattaaacttttgagttaatgc

SEQ ID NO: 947996 - DNA, 609 bp, Homo sapiens
agagccagaaaagggttggatttttattgcgcttggccctttaccagctgtgtgggttgaagcagtcacttttcactcagcctcagttttcttatctgtaaaaggggaataataaatgtctacctcatgggattatcgtaaggattgtaaatgacagatacccatctaatggcatgttaagcaaaaaactaaactaaactaaaaatcaatgaagtgggtatttattggtccaaagtgttactgaaaagtttaagggcagatataatttcagacacacctgaaactacatgttcaaacatcatcagaaatctctctctctctctctgtctcagttggctccattttcttataagccttcgaatattgtttggacatttgccccccaccacccaatctcatgttgaaatttgattcctaaagtttgaggtggggcctagtggcaggtgtttaggtcattagggtagacccccatgaatggctcagtgtcatccccatgataatgaatgagttcttactctattarttcacatgagagcttggtgcttaaaagagcctggcacctttcccctctctctcttgcttcctcctctctcaccacgtgacgtgcct

SEQ ID NO: 947997 - DNA, 609 bp, Homo sapiens
aattatttccgatacttcaataaacaatgattaagcttggtgaggacggcatgtcaatagctgagatggactgacaggtaggcattttgggccaaacrgccaagttgtaaaggcaaaataaaagtgcctgaaggatagtaaagttcttttccagtgaacacacgaatggtaagaaagcaatattattgctgatattgagaaaatttgagtggtctggatagaagataaaaccagtcaaaaaattcctttaagccaaagcctaaccaagaattcttcaattctatggaggctgagaaaggtgaggaagttgcagaagaaaagtttgaagctagcagaagttctagttctagttcatgaagtttaaggaaagaaggcatctccataacataaaagagcaaggtaaagcagcaagtgctgatgtagaggctgcagcaagttgtctagaaaacccaacaataattgatgaaggtggctgcattcaacaacagattttctaggcagagaaaacagccttctattggaaagtgctatcctggacttccataactagagaggagaagtcaatgcttggcctcaaatttcaaaggacaggctgactctcttgttagc

SEQ ID NO: 947998 - DNA, 636 bp, Homo sapiens
gtatagccaatcatgaatcaatgttattttcttaggccaatgagaattcttgacaatttgtatcagtccactctccrccccctcccccagttttgtctttaaatattcacttgtaactgctcttaattggagtgtatattcaggaaaacatgaatctatgctcccagattgcaatctcaagcttgtcccaaataaactctttccttgtattaatttggtccagctttttgcttttaggttgacagcagaataccaaataaagtacttgaatggaatttggcagtttagttttataaaaaacaaaatatctttatacaatataactcattcctatgggtcagatagcagtgaaagctgagggaaaagacagtcatgcctcctgtctcaagagatctcacagttattggttcattttgtggaatataagtgatatatcttattgccccaatatattcaaactattttaaattcaatatgtaattaatatctaaacaagtattaagatatttaaattcatttttatacaaaatattccaactcctgtaagtgttttacacttacagctcattcactggggattaggcacatttcaagtgctcagtagccatgcatagataattggtgctataacaaaca

SEQ ID NO: 947999 - DNA, 463 bp, Homo sapiens
gcagtgtgtaattatcacatcatagtaactggggtatcatcacttctctgcccatttttaaaacagattattagattttttcctatagatttgtttgagttccttatacattgttaacccactggtcatatgggagtatattgattaacttccaggtatttttgtagtttccaaaatttgtcttgttattggtttctagtttattcctttgtagtcagagaagatgcttgatattattttaatttatttgaatgtcttaatacttgctttgtgaactaacatatagttggtctgtccttgaaaatgatctatgtgttgagaaaataaatgtgtattttgtggccgttggataatgttctgtaaatatctattagctccactcrgtctatagcgcagattaactccgaggttttttttattttccacttggaagagctgtccagtgctgaaaatgaagcattga

SEQ ID NO: 948000 - DNA, 618 bp, Homo sapiens
cacgtttgtgaatagccattctcctttaggtttataaagagagatgcatcgakagagcagggagaatgtctaggggattacactagcaaagattctttcatgagaaaggaagcattgtgaggaaggaagatgtgttccccttccccacaaaagtgtcttctgctgtgctttgaacatgtttcttcttatttagttatctgttgcttggtccaaaacgtagtactccccccacaccagggaagatagccactcccacccctgtacttgtcattctaatcttccactcttcatacaaaaccagttcagttcttccttttaaattatcgtccatcaattccccaaaaggaagggtggaattccctatggaggagaagtcaaaggatatatgcttgagacagaaagtccataaccagcatgggcctaacatgtcaaatatttcgtgggactacagtcatgtggtcccaagtggtagctgtcaaaggcctgttgtaggaagatgacctcaatttccccttctgtcagtcaggccatcttcccaggccccatgtctaattcagaaacctcctctactcttcaaattcaccctgctttacccctggggcttaaggactgaagtca

SEQ ID NO: 948001 - DNA, 621 bp, Homo sapiens
aaaagagggacgataacctctggtgagacaataggcaacgtgaagtctagaggcacgtattaaagaagttaacacctggcctgtggacctttaatgaaaattaggtcccatgctattgggaatagaaaatcatcccatgaaaccctctgcctttatagactctgagacccatggcacctcctcaaggtgagaaggaagaatggtaggggcagagttaccaatatagcagccatcaaaagtccccattaactctataatgagttgacttttaattttgacgtaatgatacatagcagcatggttaccctctggatcagcatgtcatgaacacctgtttgggaaagctgaacttgccaagcattgatttttttttttaagtcagccaatacagttccacatctagaaatctaccccgtagataaacttgcatttgtgagaaatgacacagtcatgtctgcaagagctaactattgggagctgcccagaaatccatccataggaactggtrcaaagatatatgcatgctcacacaattacataatacacagatatttaaaagatcaaagttgttcttcatgtcctgatgtgaaataattgccaagatactaagtaaagaaagaa

SEQ ID NO: 948002 - DNA, 682 bp, Homo sapiens
aacaatcttagcagatttgaggctcagtatctgcttctgaagcctggagacagaatccctgagttcatcattttcttttatcaccttgtccactgaacttagcagcaaccaaccagcttcattatgttccttggttctccacatatggtcaaaggtattatgtatagagtcactaaaccccttgcctcttatgactgatgaatcaggagtgttcaaatgcatttactttgcacaactctctaaacagtttatgccaaggactaccagtgttctccatactagtagaagaagagtccttagaattttggggtttaatcatatcaagcagccaactccaggaacaccaaaaccaatgaaaaaactccattcttaatattctgttcctctaaaaccactcctgttagcaaaatctgtattagtcagggttctctagagggacagaactaatggactatgtgtatatgtaaaggggattgtattaactcgcatgatcacaaggtctctccataggccatctgcaggcaaggagagcaaggagagccagtccgagtcccaaaactgaagaacctggagtctggtgttcgagggcaggaagcatccagcatgsgagaaagatgtagactgggagactaggccagtctctcacttttcatatttttctgcctgctttttattctagcca

SEQ ID NO: 948003 - DNA, 625 bp, Homo sapiens
ttcctctcatcccctctctctgtgcctgcctcttcctgcctcttgttctctctctctctggtgtcttttgaaccttctaaaatgaacctttgacaaaagtttgcttttagctcagaagcagccttccttaaggtctctttaataacagcaaacacccaaagactctcacacctttattaacagagcttgttttgctgttcttttttctctccttggataccagaagcttaagaagaaattacctcatcaccactacaggcaggtcccaattgtaaaaacagtccttttgacagacacttcatcgccagttctccctatgaatggcagctttgcagaacagcctctggcatgggaggaaggagagagcttcgatttatattaatacttgatttctgaacagaagtcaagagaagagtgggctcggtggagaatttcttcatctttggagggatgattaaaccagaacttattattctccatgtaaatcaccaggacttaaagcaagaatcctgctttttctgatgagaayggtagccaggcaagggaaggcatgcaaggctgcagggagataatggtctgagccctggccctaggcacacccaaaacgcaggctttccccagcaac

SEQ ID NO: 948004 - DNA, 584 bp, Homo sapiens
tatctcaaaagaaaaaaaaaagttactaaagggatacttttagacagaaaacacaggcctgagtgtggcggttgctctccttggtaagggaggtgagggagaagcmgcagcccggtgccagtggagcactgggcaatggcagcacccaggaggccaaaggaagtgtccgccatgtccagtgctgttgggccgagtgaagccgtcactggtgactgtgatgggagagtgtgtgacgtgatggagcaaagctctgactggaggagttccagtgagatggaggagaggacatggagacagcgagtgtagacaactgtgacaaagcggggaaatgaagaaggaggctgggtgctagtggctcacacctgtaatcccagcactttgggaggctgaagcagaaggatctcttgagcccaggagtttgagaccagcttgggcaacatggcgaaactcgatctctacaaaaagtacaaaagttagccgggtgtggtggtgcatgcctgtggtcccagctactcaggaggctgaggcaagaggatcggttgagccctggaggtcgaagcttcagtgagctgtgatggcgccac

SEQ ID NO: 948005 - DNA, 607 bp, Homo sapiens
acttttccaaggaagatatacaaatggccaataagcacatgaaaacatacttaagaacattagccatcaggaaaatgtgaataataaccacagtgaaataccacttcacacccattataacgactataataaaaaacatatggagggtggtgccaagatggccaaataggaacagctccagtgtacagctcccagcgtgagcaatgcagaagacaggtgatttctgcatttccaactgaggtaccgggttcatctcactggggagtgtcagagagtgggtgtaggacagtgggtacagcgcacctagcatgagctgaagcagggcgaggcatcgcctcacctgggaagcacaagggatcagggaattccctttcctagtcaaagaaaggggtgacacatggcacctggaaaatcgggtcactccaaccctaatactgtgcttttccaacggtcttagcaaacggcacaccaggagattatatcctgtgcatgcctctgagggtattatgcccatggagcctcgctcattgctagcatagcagtctgaaatcaaactgcaaggtggcagcgargttggaggaggggcacccaccattgaggaggcttg

SEQ ID NO: 948006 - DNA, 687 bp, Homo sapiens
tacgagtaggcagtgtgatggaaaaagcgccgtgagtmggggtacctaaattctcttttgttaccagctctgcagcctgggccgcacttgcagctccttaaccttagcctatccagccacaaaagaaaggtgatcagaccaatgcccaccactcaggattgttgtagagacaatttgcatgctgtaaagtactcgcacagttaattgttcctttttaatttttaaattttttgatacataatatttgtagttatggggtacatgagatattttgatacacacaacaaatgtgtcatgagcaagtcaaggtattaaggatatccatcaccttgagcacatcaattgttcttatttttaaacaccactggccaaacggaggtagtgttactggaaaggggtcctgatccagaccccaagagagggttcttggatcttatgcaagaagtagaggtgaatctggccgggcgcggtggctcacacctgtaatcccagcactttgggaggccaaggcgagcagatcatgaggtcaggagatcaagaccatcctggctgacgaggtgaaaccctgtctctactaaaaatataaaaaattagccaggcgtggtggtgggcgcctgtagtcccagctactcgggaggctgaggcaggagaatggcgtgaacccaggaggcggagcttgcagtgagc

SEQ ID NO: 948007 - DNA, 776 bp, Homo sapiens
agtgcatgctctccagtcacctatagctactgccactgaaagcaaccccatcctccccaggagcagggcagcagcacagtcactactgcccccacccaagcattccaccagtggtctggatatcatccyatgcctgcctaccacagccagctcccacatgcaccactagaggggtctgaggacaggcctgccctggctctacactcccactcagtgcctgagcaaatggtctggaagcctggggatgaccctgccccatccaccactgttggtacctcagcactcctcccaggagcctgaggacaggcccactaaacctgcagctactaccacagctaacatctgcctgcatgtgccacctacgggcctggggactagtgtgcccagcctgttgcagccactgtcaacaccaatgcagacttcttggaaaccagaggattgtcctgccactgctactgccatttcccatgccatacctgctgtccaggggcctgaagacccagccatccagaccagtggtctaccactgccactgccagcacccaagcaggccagtcacctggaggcccaagattcatcatgcttggactcactaacaccagtgccagcatatactgcactgaagcccaaggacaggcacactcagcctgctgctgccaccagtgaagtccaaggactggccttcttgatgaccccatccccagcaaaacttcactacagcctccactaacaactataccctaagccactgaggaaatcacaaacaccactgatgc

SEQ ID NO: 948008 - DNA, 648 bp, Homo sapiens
cagttccagagctgggtcttgcagcaccgcatcccatcatgccaacttcttctaggctcacagaatagggcatacggtttcagaacaagaccaccttggaaagcttttgggaaactctttttttggataatatacactactttcaggctctgttttagcatatttaaagaaacaccagtctagcatgtaaactggccgagaagtgatttacatctttctgaagcctctctagaaaatgccaaagaagtgcattcataacccctggcaagaatcctttcttcccatagtctcttacccatgtctgctgctccccaaatttctctctgccccagctccaagctccttcccaggccctcagttcacgccttctcagcagcccacttccctcccgcaacatcttttatttatttatttattttcttaatgagacagaaatctcactctgtcgcccaggctggagtgcagcggtgcgatctcggctcactgcaaccttcatctcctgggttcaagctattctcatgcctcagcctcccaagtagctgggattacaggtgtgtgccaccactcccsgctaatttttgtattcttagtaaagatggggtttcaccatgttggtcaggctggtctcgaactcctgacctcaggtga

SEQ ID NO: 948009 - DNA, 612 bp, Homo sapiens
gaggctgaggcaggataatcacttgaacccggcaggtggaggtttcagtgagtcgagattgtgccactgcattctagcctgggcaacargagcaaaactcagtctcagaaagaaaaaaaatacatttcataagactatagctgccatcgagagtgattcctctgatggatctgggcaaagtaaattgaaaaccttctggaaaggattaactgttctagataccattaatatgtgtgatttataggaggaggtcaaaatatcaacatcaacaagagtttggaaaaagttgactccaaccctcatgggtgagttttagggtttgggacttcagcgaaggaagtcattgaagatgtggaggaaatagcaagagttagattaattctagagttaattctaattctaatttgaatcttagttagaattagatatggagcctgaagatgggactgaattgctacaatctcatgataaaacttgaacagatgaggagttgcttcttatggataagcaaagaaagtagtttttgagatggcatctactcctggtgaagatgctgtgcacattgttgaaatgacaacaaaggatttagaatattacataaacttagctaat

SEQ ID NO: 948010 - DNA, 550 bp, Homo sapiens
taggccatttttctggatttttgtatcgtgtgatgctgtcatgggccacgctcctctctgccccagcccaggtgcaatgccagggagatcacctgagatgacaagcctgcatcctgccatgcacatggtcctgtctgatggctcattttggggctgaagatacaggcttatttaaggtggtagctaacatctttaccccgaagaggtccaggttcttccttttggagcctgagaaaataaacagagttttaagagtaagcatgtgggcagggatgcctaaaattgagtcaagaaaattaagctggaagaaagcttattcatatgcaaggagtatcattaggtccattggtaataaactaataaaatgttctataaatactccatgagaagtatccactgggcatcatcaggtggtcggtctgtrgtagctcctgggaagctaaaggactaatggatttcatacatgttcccataaaacccggagctcatttccaggatgaggaagagccaacagaaagactgaatgaggccaggcacagggacaggcgct

SEQ ID NO: 948011 - DNA, 687 bp, Homo sapiens
tagcctttggtgggggtggtgctggaagtcagctcccccagactgtgaccttcctactctccagcatcagggacctgcagtggagaggcggagtttccacccagggaacaaagaccaaaccacgcrccgccctccactggggtggtgcagggcccgacacacacgggtctgccatggaggctgtgctcagagctccagctctcctcgtctggtagaggtggggggagcttgggagctgccaacagtggccgagggagagagatgggcccttggcaaggagggcgcaaacctcctaatgcacaaacataccgcttagggactgggagaactgtcacaaatcaacatggtgttgtgcaggctgccaaaagggctcatgagtgagctgaagaccagataggcaagccccttggaaattccattgcagggtcctgaggatgacgcaggaccccctgcaacattcatggcaggaaatgaacattaaattagagccaggcttgcttcttcccactaagaatagccaagggcacgtggacaaatgaagagcacttttccctcacggtttcagggatggcgctgctggctgaggcagaagctccaaggagtcacaatctctagaacaggcatgctctttctcttttctatggggagtgggagggatgggggatgctgacttgtttagttgtctaa

SEQ ID NO: 948012 - DNA, 560 bp, Homo sapiens
cttcctccccacaagatgtccaccttgaaacctgtgaatatgctaccttacaggtttattagtttcccttggctgctgtaacaaagtaccaccagcttgttggcttaaaacaagagaaatttattgtctcacagttctgaaagctgaaagtctaaaatcaaagtatagtaggatcaagctccctctgaagtttctaagtggggatctttcttgcctcctttcatgctgatcattccaggagtttcttggctcatcaatgcatcatgccagtctttgctagtgtctccatatggcattctccctgtgtgtctgggtcttcacatggctgtgtacttataaggacaccagttggccaggcatgatggctcatacttgtaattccagcagcttgagagactgaggcaggaggatcttgaggtcaggagttttgagaccagcctgggagacatagtgagaccatgtctctacaaaaaaaatgaaaaaattagctgggtgtgatggcatgctcctgcagtcccagctacttgggaggctgargtgggaggatcccttgagcccag

SEQ ID NO: 948013 - DNA, 652 bp, Homo sapiens
attaaaagatcagtggttcccagggtttgcgggaggaaggaatgaaaaggcagagcacagacttttagggtgatgaaactattctttatgatactgtaatggtggatacatatcattatatgwttatcaaaacccataaaatgtacaagaccaagagtgaacactaatataaactatggactttggatgataatcgtgagtccatgtaggtttatcagttgtaacaaatgtattgcatggtgtaggatattgatagtggggtagaaggagctgtgggagaagatgcaggggatatatgggaactctgcactttctgctcagttttgctgtgaacctaaaactgttctaaaaaataaagtctactaaaaaataaactgtataagatttaattaaatatattaaaagcagaggtaattgatcttcaaaatggatgacctcctgttttatgatatattactatcatctatactcttatttctatctattgtatctgtataaaggagttattatacaatggtgtacatccgtgtaactcttcccaactccgtgttaagtgacctcaatttggtagcttgaaatcaacttggccatagctggtagtgtttgcagtatagaagtaggcaaccactacataacagcactttgcccccaa

SEQ ID NO: 948014 - DNA, 626 bp, Homo sapiens
ttttagtatatttacagatttgtgcaaacaataataacaataatctaattttagaatattcatcaccttataaaaagactttgcatccattagcaattactcccaatccctctgcccttactttcctgtaccacaggccaagcaatcactaatttactttttgaacatacagatttttctgttttgcacacttcatttaaatggtatcatacaatatgtaatgatttatgactattttttcatttaccgtagtgattttcaggtttatacatgttatggcatggattagtactgcgtttcttcttactgtaaaatagcctattgtgtcgcaatttgattacctattcattagttgatggacatttcactttttccacttttaagctattatgaataacattactataaacatttgtgtacaaatttttgtgtggccatgcattttaactcgtattgggtaggtgtgaagaatgagaactgtgaatttttggattataagataactccttttcacrtttgacaaactgtcttcagaaatggttgctccattttatatttccatcagcatgcataagaattccaatttcttcacatcctcaccaacacttgttaatgtgtgtcttttg

SEQ ID NO: 948015 - DNA, 449 bp, Homo sapiens
aaatgtgtggtcttgtttctgggttctctgttctgttcctttggtctctgtgtctgtttttgaatcagtaccatgctgttttggttactgtagccctgtaggatagtttgaagtcaggcagcatgatgcttccagctttgttcgctttgcataggattgcattggctattcaggctcattttttgttttatgtgaaagttgaaataatagttttttctagttctgtgaagaatctcagtggtggtttaatgagagtgacattgaacctaaaaattgccctgggcaatgtggccatttcagctatattgattcttcctgtccttgagcatggaatgtgtttctatttgtttatgtcatctgtgatttctttgagcagcgttttgtagytctccttgtagagatctttcacctccctagttcgctgtattcctaggtattctgtgtgtgtg

SEQ ID NO: 948016 - DNA, 773 bp, Homo sapiens
tttactatttcaatataccatgtatattcatgattttattttacagttgacccttgaacaacatgggtttgaactacgcgggtccacttataggtggattattttcaataatttgaaaaaaaaattcaaaaaattatttctaataattgaaataattttttcaatgtgttagaaaaatttttggacatctgtgacaatttgaaaaaacagatgacccaagtagcctagaaatactgaaaaatttaagaaaaacttaggtatatcatgaatgcagaacatatatgtagatactaggctgttttatcatttactgtaaaatatacacaagtctattataaaaatgtaaaatttattaaaacatacatacaaacatagactacatggcaccgtttgtagttgagagaaatataaacaacaaagatgcagtattaaatcgtaactgcataaaactaactgtagtacatactgtattgtagtaattttgtagccacctcctgctgctattgccatgagctcaagtgttgtgcatagccacttaaaatgtcatgtgatgctaatcatctctgcaggagcagtcaatctctccagaaaattgtgtatcacagtaaaaagtgatcttttgaggttctcatgtatttttcattgtgtttagtgcaatacttccattgtgttcagygcaataccttgcgtcacaccatgggacccatgcaatgctggaagtgctcccaagaagcagagaaaagtcatgacattagaagaaaaagttgaattgc

SEQ ID NO: 948017 - DNA, 330 bp, Homo sapiens
tctagtaaaagtctaaagggcaacacaattggaatcttgtttactttgtttccaaggatgagttttacttctgaagggggggagtacctggcagaatgaaatagtttttatttatttatttatttttaatgcatttttgagccaggatctcactctgtcgcccaagctggagtgcagcagtgcgatcatggctcactgcagccttaacctcccaggatcaagtgatcctcgcayctctgcctccagagaagctgggactacaggtgtgcaccaggatgtctgtctaatgtttgtatttttcacagatacagggtcttgccatgttgccca

SEQ ID NO: 948018 - DNA, 479 bp, Homo sapiens
ttggtaccaaacaccagtttcatggaagacaatttgtccacagatcagggttgggggaggggaggatggtttcaggatgattcaagtgcattacatttattgtgcactttatatctattattattacattgtaatacataatgaaataattatacaactcaccataatgtagaatcattgggagccctgagcttgttttcctgcaactagatggtcccatctggggatgatgggagacaatgacaggtcatcaggcattagattttcataagaagcacacaacctagatccctcaaatgcacagttcatgatagtgatggcagcagatgcagcagggtggtgtggctggggctgcacacttcatggagctccccagtgctgctgcaaccacccaaactgtgactgcagacccaggcctcctgctctctaaggagcaggcaggagccccaccctcctggacrgggctgcagccacccaaa

SEQ ID NO: 948019 - DNA, 581 bp, Homo sapiens
taggtaaaaactatggatgcctactgttttagtccatttgagctcctataacaaaataccatagaytgggaaggggtggcttataaacagaaacttatttctcacagttctggaatctgggaaatccaagatcaaagaaccagcagatctgacatctggtgaggggcacactttctacttcctcctagcttacatcttactctttcctcacatggccaactggggagaggtatctctcaggctccctttacaaaaccattaatccaattcatgagggctctatcttcatgacccaaccacctccctaaggccccatcttataacatcatcaacttgggggtgaagattccagcatatgaattttagggagatataaacattcagaccatagcatcacaaccctggcccccaaaatggatgtgcttctcacatgcaaaacacattcatttcatcccaatagccccaaaagtcttaacttgttccagtatccattttaaagggtaagtcctaagtctcatctaaatatcatctaaattagatttgggtgagattaaaggcagaattcattctaaagcaaattg

SEQ ID NO: 948020 - DNA, 408 bp, Homo sapiens
caacttaagtgtctatcgacagacaaatggataaagaaaaggggtatataaacagggtggaatattatttagccataaaacaaatgaaatcctattattcacagcaacatggatgagcttgggggatgttacgttaggtgaaataagttaggcacagaaagatcaatattgcatgttctcagtcatataggaattaaaacatcaatttcataggattagagagtagaattatggttactagagactggaaagggtagggaaagggaaaaatagaaagaggttggttaagggatgcaaaattacagctagatgggaggaataagttttagggttctttagcactgtagagtggatatggttaacaataatttagtgtatattttsaaaaaagctataagacaagattca

SEQ ID NO: 948021 - DNA, 480 bp, Homo sapiens
gacctttaagtagaaactttacaagccagaagagattyggagcctatattcggcatccttaaagaaaaaaatgtgaatgaagaattttatattcagccaaaataagcttcataagaaaaacagaaataaaatcattttcagacaagtaaatgctaattgaatttattaccactagacctgcctcataagaggtcatcaagagagtgctaaacatagaaatgagagatcattagtggccacaacaaaaacacacttaagcacatagcccactgacactataaagcaactatacaatcaagtctgtataagaactagctaaaaaaacaataacaggatcaaatcctcacatatcaatattaaccttgaatgtaaactggctaagtatcccaattagaagacatagagtgacaagttggatatagaagcaagattcaactgtatgctgtcttcaagaaacccatctcacctgaaatggtatcc

SEQ ID NO: 948022 - DNA, 746 bp, Homo sapiens
tgctgtgagtgatgactgctacatgctcagagacacccccttctccaaggaattgacctcaactagtggttctcaaattttataatgaatcagaatcacctggagggcttgttaaccctcayagatctggaccccattctcagagtttctcattcagtacgtctggggagatttctgagaactagcatttataacaaattcctaggtgctattgattctgctagtctatgggtcacttcttgagaaccactctcctagaccaagctaaatcctcctgacctagaggtcacagcaacccctttccatccctcctctccatggaggattatacctgactgacagagggcaaaaggataattcccttactaagagtgagatcaactctgtggagcaatgcatgcttcagagctccccatggtgtctggctgaggttagaccccacctgagaccacaggcttgctcagcccctcctgtttcccttgctgcccttctccaaggagaaccatcttcaataaaccatgtctcagccttcacttcagagtaactcagccaaagacacacacacacacacacacacacacacacacagtggaaatacaggaaagaacaaagagcaaagttatcaactttccctagacagacaggaatatgaatttcctcaaaggaggatttgaaggagctttctagaatgaagaaagcctattttcccttgaagtcatgagcacagaaagatgtatcctgtaaaa

SEQ ID NO: 948023 - DNA, 577 bp, Homo sapiens
gctgactgagcagaatggtggytgctgcaagttgggatggctgttgcaatttcttaaaataagaaaatgaagtttgcagaatcagttgactcttcttttcgtgaaagaatcctctgcagcctgtgatgttgtttgatggcattttacccacaatagaacttctttcaaaattagagataatcctctcaaaacctatcactgttttatcaaccaagttcatgaaatattcaaaatcctttgttgtcatttcaatgatcacagcatagtcatcagaggaagattccacctcaaaaaacaaaacaacaaaataaaacaaaacaaaccaaaaaccacattctttgctcatccataagaaacaactcatcatctgttaaagttttatcaggagactgaagcaattcagtcacatcttcaggctacacttctaatcctagttcttttactatttctacaacatctgcatatactccctccactgaagtcttgaactcctcaaagccatccatgaggattggaatcaacttctaatctcctagtatccgtgatatttttacctcctcacatgaatcatgaaata

SEQ ID NO: 948024 - DNA, 725 bp, Homo sapiens
cgtcttctgcgtcgctcatgctgggagctgtagaccgtagctgttcctattcggccatcttggctgcccttcctaacaaaatgtatttcttaagtaataagatctgaaagtcaaaatgactccttgattcatgggctgcagaatgaatgctgttagcaggcatgaaaactacattaatctgtacatcttcatcaagctcttggatgactaggtgcattgccaatgagcagttttatgttgaaaggaattttttttgtttttgtgagcaataggtctcaatagtgggcttaaaatagtaaggctgggtgcagtgattcacacctgtaatcccggcattttgggaggccgaggtgggcagtttgtttgagcctaggagttggagaccagcctgggcaacaaggcaaaaccccacctgttaaaaaaaatacaaaaattagctgggtgtggtggcaggtacctgtagtccaagattcttgggaggctgattatcacttaggcccaggaagtcaaggctgctgtgaactgtaatcacaccactgcactctagcctgggcagcagagcaagaccctatctcaaaaataaaattgagtaaatcatgctgtaaacagttgtgttgtaatccaggctttgttgttscacttatacaacacaagtagagtacattcagcataatttttaagtgccgttcaattttcaaaatagtaaatgagcatgggcttccacc

SEQ ID NO: 948025 - DNA, 593 bp, Homo sapiens
gatttctcaaagaattgaaagtagaactaccatttgactcagcaatcccagaaatgcatacatacccaaaggaatataaagcattataccatagagacatgtgtgcatatgttcatcacagcactattcacaatagcaaagacatggactcaatcttgatgcccaccaatggtggaccagatacagaaaatacggtacatatacactgttgaatacaatgcagccacaaaaaagacaaaattatatactttgcagcaatatgaatggagctggaggccattatcctaagtgaattaatgcaggaacagaaaaccaaatactacatgttctcacaagtgggagataaacattgagtacacatggacacaaagaagggaacaacagacaccaagggctacttgaggatggaggggtgggaggagggtgaggattgaaaaaactacctgttgggtactatgcttactacmtgggtgataaaataatttgtacaccaaaccccaataacacacaatttacccatgtaacaaacctgcacctgtacctgctgaacctaaaataaaacttgaaaaaaacacagttgcctattgatggtt

SEQ ID NO: 948026 - DNA, 586 bp, Homo sapiens
aaccctaagaactctgccaaaatgtgcctgtaactgatcaatgactttggtaaarttttaggaaacaaaaccaatgtagaaaaatcagtagaattcctatacagcaataatgttcaaagtgagagctaaataaaaaaatgcaatcctatttacaatagccacaaaaaaaaatacctaggaatacctcttaatcaaggaggtgaatgatctctataggagaactataaaatactactgaaagaaatcacaggtgacacaaacaaatggaaaaaacttccatgcttctggattggaagaatcaatgttcaaatggccatactgtccaaagcaaactacagattcgatgctattcctatcaaattaccaacatcatttttcacagcattaggaaaaactactataaaattcatagaaaccaaaaaaagagtgtgactagccaaagcaatcctaagcaaaaagaacaaagctagaggcatcacatttctcaacttaaaactatactgcaaggctatagtaacaaaaacagcatggtatctataaaaaatcagacacatagaccaatggaacagaatagagaatccagaaa

SEQ ID NO: 948027 - DNA, 438 bp, Homo sapiens
caaaattccatctcaaaaaacaaacaaacaaaaaaagatatccagttgattccatcaatcattgaatttatgtctgattttgggcwatttagttaatctctctgtgtatccattttcacactgccaagtattaatagtaatagtgcctcctccttggggtgttggaatatcaaataggataatgcatgtgaaccgtttccgtggtccccatcacttagtaaatgctaaataatcaggagtattgagaatatatgatttcatcatgatttaaacatttggtcctaacttttggcatcaagtacattagggatcaaaagattttaaaaattgttttttcctaaaaacacataaaattgctttttaaaactatgatttttcaaagttaaaaggtgagacaaaaaaacgaaccttgaaatagtttgtctgtgtatttgaggt

SEQ ID NO: 948028 - DNA, 475 bp, Homo sapiens
gtaatcccaactactcgagaagctgaggcaggagaatcgcttaaacctaggaggtagaggttgcggtgagccaagatcacaccattgcactccagcctgggcaacaagagcaaaactccatctcaaaaaaaaaaagaaagaaagaaaacccgaaagcttcactacatactctgttggtgaggctgtagggaaacaggaattctcatacactgctggtggaaatgcaatgtatgagaacccctatcaagagaaatttggcaagtctagtaaaatcacttaggcatttactcttttgacctactcatttctaggtatctatctcaaacacaattcaaaaagtcatacagagacgactattaatagcagccgtwttcataatatcaaaaaactagaagcaacccaaatatctccatgtgaagatagattgaactataggtgttatatagttatagtatagtatatcttcacactggaa

SEQ ID NO: 948029 - DNA, 744 bp, Homo sapiens
cagcagctccgaagagagcgaccatcgagaacgagccatgatgacaacggtggttttgtcgaaaaraagggggaaatgtggggaaaagaaagagatatcagactgttactgtgtctatgtagaaagaagtaaacataagagactccattttgttctgtaccaagtaaaattttgtcttgagatgctgttaatctgtaaccctacccccaaccctgtgctcgcagaaacatgtgctgtgtcaagatttaatggatttagggctgtgcaggatgtgctttgttaaacaaatgcttgaaggcagtatgctcgttaaaagtcatcaccactccctaatctcaagtacccagggacacaaaacacagtggaaggccgaaggacctctgcctaggaaagccaggtattgtccaaggtttctctccatgtgatagtctgaaatatggcctcctgggaaggaaaagacctgaccgtccccaagcccaacacccgtaaagggtctgtgctgaggaggattagtaaaagaggaagacatctgtctcctgctcatcccctgggcaatggaatgtctcagtgtaaaacccgattgtatgttccatctactgagataggagaaaaccgccttagggctggaggtgagacatgctggcagcaatattgctctttaatgcaccgagatgtttatgtatgtgcgtatcaaagcacagcacctttttcttaaccttgtttatgacacagagacatttgttc

SEQ ID NO: 948030 - DNA, 744 bp, Homo sapiens
cagcagctccgaagagagcgaccatcgagaacgagccatgatgacaacggtggttttgtcgaaaagaagggggaaatgtggggaaaagaaagagatatcagactgttactgtgtctatgtagaaagaagtaaacataagagactccattttgttctgtaccaagtaaaattttgtcttgagatgctgttaatctgtaaccctacccccaaccctgtgctcgcagaaacatgtgctgtgtcaagatttaatggatttagggctgtgcaggatgtgctttgttaaacaaatgcttgaaggcagtatgctcgttaaaagtcatcaccactccctaatctcaagtacccagggacacaaaacacagtggaaggccgaaggacctctgcctaggaaagccaggtattgtccaaggtttctctccatgtgatagtctgaaatatggcctcctgggaaggaaaagacctgaccgtccccaagcccaacacccgtaaagggtctgtgctgaggaggattagtaaaagaggaagacatctgtctcctgctcatcccctgggcaatggaatgtctcagtgtaaaacccgattgtatgttccatctactgagataggagaaaaccgccttagggctggaggtgagacatgctggcagcaatattgctctttaatgcaccgagatgtttatgtatgtgcgyatcaaagcacagcacctttttcttaaccttgtttatgacacagagacatttgttc

SEQ ID NO: 948031 - DNA, 561 bp, Homo sapiens
taatcctggcctccctgatggctatagcaaggatttttaaaggtagggktgcagaagctacaggcaacatcataaatcaacccatggaggccacacattggtttaagcttagaagggcaggacgcccagtcgctggggctcatggatcatagatggattcagagatcttctcatttgcaactggttaaagaagagaagctttgtttaaaaatttgggggtcaacagaaaaatgttaactcgctagaaagacttactttctccaaggccctcagggagaaatttagagcaaagggcaatccttgaagttgtgtcttcacttccccctaatctggggtctgtgtgtggtggggtccttagtcggggtcagagcctgtgaaggacagttcaagggcagtttccaggcgttcctttagtttccagaagaaagcaaacatctctggagcattagcttccttggctattgttttaggtgattaccttcttaacaagctacttaagcactcctggggccagccagatacctggcatttttctgaaaagaactttggaattttccttta

SEQ ID NO: 948032 - DNA, 561 bp, Homo sapiens
taatcctggcctccctgatggctatagcaaggatttttaaaggtagggttgcagaagctrcaggcaacatcataaatcaacccatggaggccacacattggtttaagcttagaagggcaggacgcccagtcgctggggctcatggatcatagatggattcagagatcttctcatttgcaactggttaaagaagagaagctttgtttaaaaatttgggggtcaacagaaaaatgttaactcgctagaaagacttactttctccaaggccctcagggagaaatttagagcaaagggcaatccttgaagttgtgtcttcacttccccctaatctggggtctgtgtgtggtggggtccttagtcggggtcagagcctgtgaaggacagttcaagggcagtttccaggcgttcctttagtttccagaagaaagcaaacatctctggagcattagcttccttggctattgttttaggtgattaccttcttaacaagctacttaagcactcctggggccagccagatacctggcatttttctgaaaagaactttggaattttccttta

SEQ ID NO: 948033 - DNA, 606 bp, Homo sapiens
aatatgtattaattcaataattatttaagatgctttctatctgccaagcaggctctgttcttggtgcttgggatatgacagtgaaaatttttcctacttgacggtagttacaaatacgcatgtcaattatgtctcttatatgagagaactgtgccttactcatcctgatattccctcttcctgacccacattaaatgtgccacgaatgccaggtaaatgctaaaataagagatattttcattatctgtcattttcttgcaattcctcttagacaatggctcctttgagaggagaaaacctatcttaatcatccatgtggtttaaattctgtctgccacgatgccacaaacatatcgtacgctcaaagaatatcgttttgattcattgcttaacttgaatctgccttcatattaatccacatcaaggggaaacaatgagaagtcaaaattaataaggtaaaataattaaggttgagaaratatccttattgtttttaacaacaaggagtatgtcttctgtttttctccatctcacacattgtttgctagagaacagaacatatagatgctcaataaatatacacatatagagcatatgggtgcttaa

SEQ ID NO: 948034 - DNA, 575 bp, Homo sapiens
cacagggctccaagatggaatgragaatgtgacaaacaatctaattagattacacatatatgaaacaaactcacttgaagggatgagggagaactgttctggcctcagtaactttgaaataagtggaatctgtaagacaaatggcagaaggaaccatgcataagcactgtactttagctgacaaagttgtttctctatgggtaacaattctaaaactactacacaatcatacagcaattaaacacataagtaaatgaatggcagaaagaaccatgcataagcactgtactttagctgacaaagttgtttctctaggggtaacaattctaaaactactacacaatcacacagcaattaaacacatgagtaaatgaatggcaggaaatagtagccacttttcttattgctggagtagaagatcacagatagcaaggggagggagctaaaatgaacagtctagaaatggattacagttgaagacatcagtatgcaaactcatgtttagcttaataaagacacagatgcttacatataaaaatatttatagatatgtgtacacacgtatatgtctcttt

SEQ ID NO: 948035 - DNA, 603 bp, Homo sapiens
atttccttaaaaaattaaaagtagaatcaatatatgatctagcaattctacttctagctatatatacaaaagaattkaaaacagaatctcaaagagaaatttgtgcacctttattttatagcagtattactcactgatatggtttggctgtgttcccaaagaaatctcttcatgaactatagctcccacaattctgacatgtcatgggagggaccaggtaggaggtaactgaatcatggtgatgggtctttcccatgctgttctcatgatagtgaataagtcttacaagatctgatgcttttataaagggaagtttttctgcacaagttctgttcacttgtctgctgccatgtgagatgtgcctttgctcctccttgccttctgccatgactgtgaggcctccccagccacgtggaagtgtgagttcattaaacctctttttccttgtgaattaccaagtcttggtaaatctttatgtctttatcagcagcgtgaaaacagactactacactcacaatagccaagaggtgggagcaactcaagtatccattgatggatgaatggataaagtgtggcatgtccacatagtggaatataatttag

SEQ ID NO: 948036 - DNA, 603 bp, Homo sapiens
atttccttaaaaaattaaaagtagaatcaatatatgatctagcaattctacttctagctatatatacaaaagaatttaaaacagaatctcaaagagaaayttgtgcacctttattttatagcagtattactcactgatatggtttggctgtgttcccaaagaaatctcttcatgaactatagctcccacaattctgacatgtcatgggagggaccaggtaggaggtaactgaatcatggtgatgggtctttcccatgctgttctcatgatagtgaataagtcttacaagatctgatgcttttataaagggaagtttttctgcacaagttctgttcacttgtctgctgccatgtgagatgtgcctttgctcctccttgccttctgccatgactgtgaggcctccccagccacgtggaagtgtgagttcattaaacctctttttccttgtgaattaccaagtcttggtaaatctttatgtctttatcagcagcgtgaaaacagactactacactcacaatagccaagaggtgggagcaactcaagtatccattgatggatgaatggataaagtgtggcatgtccacatagtggaatataatttag

SEQ ID NO: 948037 - DNA, 634 bp, Homo sapiens
ctcatcatatttaatggtggaagactgaacrctttctccctaaatcaggaacaaaacaaggatgtctgctctcatcatttctattaaacattttactggaggctcaaatagtgcaataaagcagaaaaatgaaacaaaaagtttccaaattggaaaggaagaagtaaactgtttttatccacacaaggcataatcgtctttttaaaatgtttattggaatctacttaaaatctaatagaacagtagtaatgcatatatgaaataatatacatcaatgtaaataatcaattacattcctatatattagtaatgaaaatgagaaactgaaattttaaaataccatttacaatagcatcagcaagtggtaaatatgtagaggtaaatctgaaaaaaagctgtgaaatatctgtatgctagaaactataaaaaattgccaaaataattaaagaaacatagacatagagagatatactgtattcacaagtcagaagacatattaatcattgaaatgtcaattctccctaaattagtctacaggttcaatacgatcccaatggaaacttccacaaaagttttagcagggattaagtggctttaacattcatgtgaaaatacaaagggcctggaataacca

SEQ ID NO: 948038 - DNA, 740 bp, Homo sapiens
aactccctcactctatctggatttactagcactcaaagagctgaggttggagccctaatattagccgtagaaaccttttccaytcagcatatcaatattgttagtgactgcttactctgtttatttattacagaaccttgagacagccctcattaagtccactcttgagcccaccactctgactgatccctcacatcttccccttttctgttttttgcatcaggtcttgttgattgaagagtacatatatgtgcagcaacgggtttgtcaggtgtagcggctacagctcgttttccagctttgcatcctagaattagtaaataacatgagacaaacatgagtataatcagtaatattcttttcgaatcaaagagtggtccccaggagtggaggtctatccaggagaggatagactctttttgcagtggcagttaaatattgaggggagttcagggctgcattgtccttttgtatagaaaacaggttttgtaacttgtcagtagttatgcccaaggtggggtgaagccagttaatatcgccgagtaatttttgataatcatttaaggtgtgtaagttgttagtatttaatttaaccttctgaggtcttactgactgggaagttagtatgtatccaagatatttccaaggagaggacatctgtactttttcaggtgctatgattaaacctcttaactgtgaattctttttgacagaggcatatagacgcaaaagtgttggct

SEQ ID NO: 948039 - DNA, 785 bp, Homo sapiens
ccaagatatttccaaggagaggacatctgtactttttcaggtgctatgattaaacctcttaactgtgaattctttttgacagaggcatatagacgcaaaagtgttggctctgttggggctgccagtaagacatcgtccataaaatggatgatcttgcaattaggaaattcttttctactgggaatcaaaacctgatttctatgatacacatagtaggactgttcagcgttccttgaggagtactttctaatgaaatcggcaagctggcctttcattattgatagctggtattgcaagcgcaaatttttctctgtcctgttttgcaaggggaatagtataaaaacagtcttttaagtcaataatgactatagaccaatctggaggaatcgccgtggggaagggagcccctgttgaaagggccgcatgcgttgcaaattagcactgatagcatgtaggccgtgcaaaaatctccatttactagaccttttgggaatgatgaaaatgggcgaattccaagggctgtttgatggttctatatggctggcttttaattgttcctcaactaattcatgggctctttgtaatttctctccctttaaaggctactgttctacccaaataggattttgagagagctacatcaggggtaggggaggaataacaacagtggcyattattagaagggggtctgcagagtgacccccccatttggctaataggtcccatccccaaagattaacagggatgggcatgattagaggttgtataataacataaggacccct

SEQ ID NO: 948040 - DNA, 584 bp, Homo sapiens
ccctgccacaccacaatctaagcccagggcataaaacccttygtggcttggatggaatccagggctcagggtataaaacccctcgtggcttctggaatgggtctagacttgctggcttcttgcttctagcactcccaagctcataaaacgattgtatcttaaactataagaacatgttccccattatctcaagtggcagaatatgttccatatacttcaaaggaaatgctaaaccatcacagctatagctcatgtgcttgatgcaccacttcctttcaacccccacatcctcaccacctgcttctttgatcagcaataaatatggtgggctcccagagctcggggccttcacagcctccatactagcgttggccccctggtcccactttatgcactctaaacttgccttttctcattcctttgactctgctggacttcattgccgccatggcctggtgttgggtctggccaccccaacatcagtcaatcatgcctacttaataaaaccacagtaaaaactctggacactgaagccctgtagagcttcttgaacacactgatgtgccaggagggtagtgcacctt

SEQ ID NO: 948041 - DNA, 581 bp, Homo sapiens
tccagcctgggctgaacagagcgagactccgtctcaaaaaaaaaaaaaaaacttcccatggctccataaatcccctactttattaattctaaacccttgcagcgactatagaatacccccaaaataaacattgaaactgctgttcgaagacctgggttctagctcctgctcccaggcctttctgggttcaaattttggccctccttctcttactatctgtgtgatcatccataaatttcctaatctctcttggccttaacttcctcacctctaaaataggaatcattatagtaccgatttcccagggttgctcaatgattgagacaatggcactaagaatcatgactcacacagttaagcactcaacaaatgtaggtagtattactgccataataatagttattcaactttaaatggtctttcctcttgggtctcagctttcttactcaagattgaccacacacacacttyagactagttcttcctcccttgcaaaactacacacatctaacacccatccgacgcctgaaacctcccctagcaacccggagtcctgctggggttttccagctccacctcct

SEQ ID NO: 948042 - DNA, 611 bp, Homo sapiens
ttcgaggtccctgacttcccacaacaggctggaagggctgagtgctcccagaccactgggagcagcactccataatttctacatcatgaaatattttgataccatattattctatgttttattttattttyatttactattacttattaattataatcaattatgccataaaagactgaatagtaagaaaatttgaatattggaattttctagaaggctagtgcaatactgaataaataacttttcaaaaaaattgtttcttatggtatgaccacaactattgtaaccactcttcaaaaagctataaacaagtttggaggcactgtaaatttccagtccattcttagttgtcactgaaaataagttataattcaaactttttcatttcctgtctacagtgttacataaaaaatagtagatgaagatatttcgcacttagacaaaccagaagatgaatgcaaagagaaagatagtaactctatagactctataaattgccttaaactcaagaagagatgagaaaattgtgtttttatatacaaaatgaattatgatattctcatctagttagctattcaataaaaaagacttcataatgcaatcttttgcag

SEQ ID NO: 948043 - DNA, 600 bp, Homo sapiens
tcagggaagcagataatttakttaaaatgtctcagcctaataagggaactgggcacgtggggataactaaaaagaagtgaataaaagtattgtccaagttggcaccacagttggggagttttaagaggtttagaaccctggccatcaatacccacaacagttatggaggcaagggaaacacacccttgaaaagaaggttatgtggagtgggtagcctctgtatagattaagaagacaatggacttactttccactgtaagagttacccaaggcatctgtgatggtccaggaggcttccgaggcaattgggcagcgtcaatcttcagctgctaagctgagaagatttgggaaggagtcagtcagagagccttgggccagagttccagggactctgggagtggctgccaggtgagttggacagtcccatttccagtggggtcccacacagatgggacatggcttaggaggaatcctgggctgcaggcattcctttgcccagtggccagatttctggcacttgaagcaagatcctgggggaggaggtcctgaaggaaggcctgaccactgtggcttaggcgttttgaagttcttatgtgctgg

SEQ ID NO: 948044 - DNA, 694 bp, Homo sapiens
ataagcaaaataatttggttgataaggcacagatcctgaactaacttgtaagacttcttcggtttttggacaggtaaaatgggggacttgtaaggagagtttatgggatttaaaaggctatgctgtaacaggcaagtgataacaggctttaatccttttaaagcgtgctgtgggatgggatattggcgttgagtggggtaagggtgattaggttttagtgggatagtaatgggcatgtgatcggttgccagggagggagtagagatgtcccatacctgtggattaaggcgggtagatacaaggggaggatgcaaaggagactttgaactgggggaatgggtgacaatgaggtgtggctatagcccaggaatagtcagggaagcagataatttagttaaaatgtctcagcctaataagggaactgggcacgtggggataactaaaaagaagtgaataaaagtattgtccaagttggcaccacagttggggagttttaagaggtttagaaccctggccatcaatacccacaacagttatggaggcaagggaaacacacccttgaaaagaaggttatgtggagtgggtagcctctgtatagattaagaagacaatggacttactttccactgtaagagttacccaaggcatctgtgatggtccaggaggcttccgargcaattgggcagcgtcaatc

SEQ ID NO: 948045 - DNA, 601 bp, Homo sapiens
cccagcagagaggtttctgttccaggatgtagcactgtggggggccagtgtgtagcttgcatgcagtaatataaaccccaacatcckcagcctccaccgggctgattttcagtgtgaaatcaatgcctgacccactgccactgaacctgtctgggaccccagaaaaccggttggaaaccgtgtagattagacactgtggaggctggcctagcttctgcagctatcaatgtaaataggtgtttccattactatgcaggaggctccgactagacctgcaggagatggaggccggctctccgggggtgatggacagggacagtggagtctgggtcaacagaatgtccccactagatcctggaatgatgacagaaaagggcaaagttatgtacaaatattatgcgttatgctcataattttccatttattatttcagcctgtataatttctttgcaatttcaagaatatccaatttcaaaaagaactcaacagatgcaaggcacaaagtggtctcccataccatcatcctctttctaagacttgcgtttcttcagggcacatatccttccttctaaaatcttcctccctctcagagatcagtaca

SEQ ID NO: 948046 - DNA, 601 bp, Homo sapiens
cccagcagagaggtttctgttccaggatgtagcactgtggggggccagtgtgtagcttgcatgcagtaatataaaccccaacatcctcagcctccaccgggctgattttcagtgtgaaatcaatgccygacccactgccactgaacctgtctgggaccccagaaaaccggttggaaaccgtgtagattagacactgtggaggctggcctagcttctgcagctatcaatgtaaataggtgtttccattactatgcaggaggctccgactagacctgcaggagatggaggccggctctccgggggtgatggacagggacagtggagtctgggtcaacagaatgtccccactagatcctggaatgatgacagaaaagggcaaagttatgtacaaatattatgcgttatgctcataattttccatttattatttcagcctgtataatttctttgcaatttcaagaatatccaatttcaaaaagaactcaacagatgcaaggcacaaagtggtctcccataccatcatcctctttctaagacttgcgtttcttcagggcacatatccttccttctaaaatcttcctccctctcagagatcagtaca

SEQ ID NO: 948047 - DNA, 716 bp, Homo sapiens
ccatttcaaagatggataagaataccacataggaacatggggaatgcttgggctgggatgtgaaataatagaaaaaaagatgcaagagaacacagacaagtgaaaaccatgactatttttgggtcaaaacttcatacatgatctttgtccttttttttccaaatgtgatttgatgtggctcgatgacatttataatgtgtgttgcagccattgtcctggcagccactagcccatgtcctctcgcctgttctgggaagccaggatcagacccatacaaatgatcctttcagtcattgagagactggccaggcaaggaagtccaagcaaaactcaaccaagtgtccgggggacactgcaaatctcctcactgtagtacagcagctccattatcgacagattggccacaaagaccacaaccaggaactctacctcctacccacagacaggctgggacagcaaaagtttcaagcctttctacaccctgagatctaggagttctgtccagataattccactgggtccggaagagcaaggacagatgcttgccctcaggcctgggcacaagactgcactgaagggaacaggaaagaagcgagaccccctggcatcatggcatcctgtgccatgaagaccccagccctcccagtgggcccattagcctgacatgagggagagtgactgctakgtgtccagtagctccctgagttgggccactc

SEQ ID NO: 948048 - DNA, 633 bp, Homo sapiens
caggggagccagaaggttccaccctaagcaaggcacatctgggagtaggagtcctcagatctgggagacctcgctragctgacttgcccacgtcataagctccccactgccctggcctttagtcaggttgtgttagatgtgaaagctctgtctttgcttggctttgagtcattaatggaaatggttgtgtctctgatggggagaagctgggttcagaggtagcagaaattagcctggagatgttcagagggggtctgcaagggccctgagccaaggttcagggggactgctggctgctgtgaccatgaccgccaggatggtcttggaacaggcatccctgggatgaccagaagtgtggtggggaatttggccgaagaacgaacttcctgcagccacacgggatgggggtgtggactgggatgtgcttattaagaggccccctgggggctgggtgaggtggctcacacctgtaatcccagcactttgggaggccgaggcatgcagatcacgaggtcaagagatcgagaccatcctggccaacatggtgaaaccccgtctctactaaaaatacaaaattagccaggcatggtggcacactcctgtagtcccagctacttgggaggctgaggcagg

SEQ ID NO: 948049 - DNA, 633 bp, Homo sapiens
caggggagccagaaggttccaccctaagcaaggcacatctgggagtaggagtcctcagatctgggagacctcgctgagctgacttgcccacrtcataagctccccactgccctggcctttagtcaggttgtgttagatgtgaaagctctgtctttgcttggctttgagtcattaatggaaatggttgtgtctctgatggggagaagctgggttcagaggtagcagaaattagcctggagatgttcagagggggtctgcaagggccctgagccaaggttcagggggactgctggctgctgtgaccatgaccgccaggatggtcttggaacaggcatccctgggatgaccagaagtgtggtggggaatttggccgaagaacgaacttcctgcagccacacgggatgggggtgtggactgggatgtgcttattaagaggccccctgggggctgggtgaggtggctcacacctgtaatcccagcactttgggaggccgaggcatgcagatcacgaggtcaagagatcgagaccatcctggccaacatggtgaaaccccgtctctactaaaaatacaaaattagccaggcatggtggcacactcctgtagtcccagctacttgggaggctgaggcagg

SEQ ID NO: 948050 - DNA, 634 bp, Homo sapiens
tacaatgaaaactctaaaatattgattttaaaagttgaagagcgcacacacacaaaaatagaaagatatcctatgtttatggactggaagaataaattttgttaaaatgaccatactrcccaagatgatctacagattcaatgcaatccctgtaaaaataccaaagatattcttcactgaaatagaaaaaaaaaatcctaaaatttatatggaaccagaaaataccctaagtagccaaagcaatattgagaaaaaaaaaaaaacatagttagaggcatcacattacctgacttcaaattatgctacaaagctatagtagtcaaaacagcatgacattggcatgaaaacagaagtgtagaccaatggaacagaatagagaacccagaaacacttccacattttatagccagctgctgttcaataaaggtgccaaaaacattggggaaaggacagtctcttggataaatggtgttgggaaacctggatatccatatgcagaagaacaaatctattcctccatttcttaccatacacaaaaccaattcaaaataaattaaatacctaaaagaaagacttggaaactatggaactactagaataaaacataagtgaactgctttaaaatattgatctt

SEQ ID NO: 948051 - DNA, 607 bp, Homo sapiens
atattgcagcactattcacaatagcaaagacttggaacctacccaaatgtccatcaataatagactggataaagaaaatgtggcacatatacacaatagaatactatgtagccataaaaaagaatgagttcatgacttttgcagggacatggatgaagctataaaccatatttttaagcaaactttcacaagaacagaaaaccaaacaccacatgtttctcactcataagtagaagttgatcagtgagaacacatggacattgggaggggaacatcacacaccagggcctgtcagggagtggggggctaggggagggataacattaggagaaatacctaatgtaggttatgggttgatgggtgcaacaaaccaccatagcacgtatatacctatgtaacaaaactccacgttctgcacatgcaccccagaacttaaagtataattaaaaaaagaagcaataaaaacaatctaaatatctaaaaaagaaaaaagaatgaggagcaaatatgaatatatggaaagaattttgtgtaagagaacttaattttttttagatttaagatttaaatacrgaaaattgaaaactaaaaaccatgatttggcagt

SEQ ID NO: 948052 - DNA, 638 bp, Homo sapiens
ctttttggttccatagaaattttagaagagtttttcccaattctgtgaaaaattacattggtagtttaataggaatagtgttgaatctgtaaattgccttgtttgcccattttttaaayggtaattgtttttctctggttgagttatttgagttccttgcagattctggatattagccttttgtcagtgcatggtttgcaaatattttttcccattatgcgagttgtctgtttactctgtcagttgtttctttagctgtgtagaaagcttttaattaaatctcatctttctatttttgtttctgttgggtttgctgcatttaggttcttagtcatgaaatctttgcccagaccaatatccagaggagtttctcctagcttttcattcaaaacttttatagttttcagtcttacatttaggtcattaatccaacttgagttaatttttgtatataatgagaggtccaagttcattattctgcgtatagctatccaattttcctagcaccatttattgaatagagggtaatttcttgagtgtatatttttgttgactttgacaaagatcagttggttgtaggtatgtgtctctacttctgggttctctcttcatttccattgatcttcttgtctgtttga

SEQ ID NO: 948053 - DNA, 728 bp, Homo sapiens
ctgggtcaaagtgcgagattgttctggctcaacttggtcaaactggggagctgcaccattccttgaatccccttccccaggttagacttggctaacagagawctatgtgaaatttggaaggcagggctaaagtggtgaccattactctcagaaatccattgtgaccatgtctggtgagagatgcagagctgcccgggcctcccaggtatgctagctttcattcccttcttccaaactgctggcccgctgaccaatagcagttcaaagcccagcaccagagtggggacccacagaggtggatgtgactgaggcacagcttctctgacccctctccacaagcccccatttgtggtctcaaggggaggctgcccgcccttggtttcttagatttccctgcaagctcagattttctaccgtgccagtgaatgaggaggtctagttggtgactcttcttagatcctccaactttgccttccaagtcttcacttctttagcttcttccacatttatgtgaggtttaattctagtgaaatctcttatccctaaaacatggtgttttcctgattgaaccttgattgatacaccagccaaccctcccagatagtccttgagcctgctaagggaagggccatgcccttctttgaactttttcatgatgtccaggacaatgccagttacaagtaggttgtcaatgattttcgttgatggctagatggaaaaaaaaaagt

SEQ ID NO: 948054 - DNA, 500 bp, Homo sapiens
cctgtggggcaggggaaagagactgtcaaggtcctccaggaagctcctgttccacccacacctaggttttataccttccagtcttctcccaccrtcctggagtctggttccacacctgcctgcccaccagggggaaggaagcttggcccaggcctgagcattaactgcaacagggggaattggtggtcagtttctcagaaggactgttttgcccagtagacctaggacttaggactttttttttttttttttttttttgagacggagtctctctctgtcgcccaggctggagtgcagtggtgcgttcttggctcactgaaaccttcgcctcctgggttcaagcgattttcgctgcctcggcctcccaagtagctgggattataggtgcccaccatcacgccaggctaatttttgtatttttagtggagagggggttttgccatgttggccaggttggtctcaaactcctgacctcaggtgatctgcctaccttggcctcc

SEQ ID NO: 948055 - DNA, 590 bp, Homo sapiens
tttatttgttctgaagtttcaaagaaggcacaatgaactcagcaaacagagtgaggatggtaggagtgggcgtcggggtagaaaaaggggctcaagagagactttcagaaggagctgagtctggaaaaaggcacaggcactagccagacagagagggcttggggcactccagagcagaagcagcccagtgggcagccctggaagcaggaaacggcctggggggattagagtcctacacttggtgtggtggagctaaaacacatgcacgaggctgggagtgaggaggacgaggctggaccggcaggcgcaggctggacctgcaaggtctctatctaccatgttaagcaactcaagcctgtagggcagaaggtcttaatccagtgtccagaagggagttctctgaagcccttgcagttgtcttcaaaatatctgtatatctttcataaacttttcaaagacatacatgacccccaacaacctgccatakaggttgagaagccgtgtcttctcaggctgatctctgtagtgaccatgtggagagcacgttccacgggagaaagactgtgggcacgacactgtcacgggagaaa

SEQ ID NO: 948056 - DNA, 627 bp, Homo sapiens
ttgaaaggatcaataaaattgataagctccttaccaggttaattaggggaaaaagagagacgacacaaattactaatatcagaaatgaaagagtatacatcactacagatcccatgarcattaaaaaaataattaagcaataatatggacaagtctatgcccacaaatatgatagcctagatgaaatgtaccaattccttgaaaggcacaatttgccaaaactcacactagaggaaataaacaatctgaacagatttttttgctattgaagaaatttaatcaataattaatattttagaacaggagacacaaggcctagatgagttcactggtgaattctaccacacatttaatatacaaattatactcatcctctacaatgtcttccagaagatagaagtgggagaaatagctcctaattcttcctatgaaggcagcataaccctaataccaaaacaagacattaaaaagaaaataaaattaggaataaatatcttttatgaacacagaagcatacattctcaacaaaatattagcaaatttaattgaacaatgtataaaaataattatataccacaaacaaggaagaattatgtcacatatataaggctgggtcaacattcaaag

SEQ ID NO: 948057 - DNA, 620 bp, Homo sapiens
tttacaacttagtggctgggagaactatctagtgactgcctgtcctaggaccccttggatattgacagatctggaggacagttgtctgggacaggagagtaagactgagaaggctgcaccagtgtccaggagacagttaacctcctggccctcaatggtcaagcatacctggggttctgtgagggtgatggcatgggctggcacttgccccgggcaccctcagtcctgctgctggatcatctggttagtggcttctgactcagagaaccttcatcccctgaggcagtgggccttccagtgattcccttgacataaggggcatggacgagggggtggcttatttctattcggacaatcttttttaaagtgtccttgtagaccgcactggaagcaagccctattgggcattcgatttgtccaggctttcccttttccggagcctccaaagtccacttgcctgagggccatgactaaagtggtggcctttttktaatccagttttgtctcattccacctgctcctcctgatctctattataaaaaactgaagttgccaagttcaacagggtttctaagttttgctctgggcctaaggcagacttttgaagtttttttctaatg

SEQ ID NO: 948058 - DNA, 751 bp, Homo sapiens
agtttgtatatatagttacccttttttcttcttctaattctagtgtataatggcccctgcttttgctaggatgtcactccctaataaaggaatggggctttcagtcataattagaaaggcatgtgaaaagagtaaagttccccatttacaacttagtggctgggagaactatctagtgactgcctgtcctaggaccccttggatattgacagatctggaggacagttgtctgggacaggagagtaagactgagaaggctgcaccagtgtccaggagacagttaacctcctggccctcaatggtcaagcatacctggggttctgtgagggtgatggcatgggctggcacttgccccgggcaccctcagtcctgctgctggatcatctggttagtggcttctgactcagagaaccttcatcccctgaggcagtgggccttccagtgattcccttgacataaggggcatggacgagggggtggcttatttctattcggacaatcttttttaaagtgtccttgtagaccgcactggaagcaagccctattgggcattcgatttgtccaggctttcccttttccggagcctccaaagtccacttgcctgagggccatgactaaagtggtggcctttttttaatccagttttgtctcattccacctgctcctcctgatctctattrtaaaaaactgaagttgccaagttcaacagggtttctaagttttgctctgggcctaaggcagacttttgaag

SEQ ID NO: 948059 - DNA, 633 bp, Homo sapiens
gctaggaggcatagttcctgacttctagttctatagcaattcctgcttttctcattcattcatttattcattcrcttacttatgcttttacccaatcaacatctacttaaaatctatatatactgtgcactgaggggacacacaggtgaatgtgatatcatccttaccatcaaggagcttctagacttgtatttgaatgatggacaattcaaatgatggacaagtattagaatgttgctagcacactctgacaaggactttaatggagttgggaatatattgtgttgaatcataaatgagattgagactaatgacctaagcaagttaggggaaccatctcagaaacagaatgtttgatttggtactagggattagtaggaaattatctgagcattctggatagagagaagaaacttgcaagttcccagaatcatgagaggtggtatgtgcaaggctgtaaattataatctggaaaagaatgaatggagataggttggtgaaggtgggttgaagaggatctatgagggaacaggtaggtagcttcctgagccacagttcatgctgcacaccaagccatctatggccatccttgcctgtttataatgataaagcttcatgaagcaattatatttc

SEQ ID NO: 948060 - DNA, 644 bp, Homo sapiens
tttttctttctgttactgatttctagttgatcgtattgtgatcagagaataccctctggatgacttcttttaaatttgttgagggcrttttatgggccagagaataatctatcttagtgaattttccatgaatacttatgtttaaaagaaaagtatattctgctgctattgggtaaagagttctgtgtatgccaactagatattaccggctgactgtgttcagatcatcagtatacttgctgcttttctgtctagtattcagttgctaaaaggagggtgttgcagtttttaattataattgtgaatttgtctcttctttcatttctatcaatatttgtttcacgtattttgaggctctgttgtttggtacatgtagatgtaggatgttatattttcctggattgattcttttatcattattttattataatgtccttcattgtttttagtaattctctttgctgtagagtttactttatctgatatagacatagccagtcctgccttttttctagttaatgtttgcagggcatatattttcccattcttttactgtcaacctacataagccattgaatttgaagtgaatttcttataaacagcagatagttaggtcatgctttttattccactctacaaatctc

SEQ ID NO: 948061 - DNA, 441 bp, Homo sapiens
acattagctgcaaatggtcaaaacataccaatcaaaagacaaagatcaacagtatggatttttttaaaaagacccaactatatgatgtctacaagaaatgtatttaaaacacaatgacttaagtatgttaaaagtaggatagaaaaagttttgccctgcaaacactaatcaaatgacagctgaattacctatagcaatatcagaaaaaatataatttagagcagagaaaattaccaaggataaaaggacactacataatgaaaacatcaattcaccaataagacataaaaaatattaaacaagtatgtaccaaacagarcttcaaaatacatgaagcaaaactgacagactgaaaaaagaaatagaaaaatccacaatatttggagacctaatcacccttctctcggtaatcaatagatctagtagacagaaaatcagcaa

SEQ ID NO: 948062 - DNA, 609 bp, Homo sapiens
acactgaggtttttccttacatactcttgagtctagacaaaggctcccaagcctgtgcacctgctggcttaacactatgtrgaagccaccaaggcttgcagcttgcaccctctgaagcagtgacccaagctgtacctgtgcatctttcagccatggctggagctggagctggagctgcagggatgcaggcggcactgtcctgaggatggacacagcagcgcgaccatgggactgacccaggaaaccattctttggtcctagaactcagggcctttgacagcaagctctgctgcaaaggtctctgaaatgccttcaaggcctttttaacattgtcttagctattagcactgggctccattttatgcacatttctgaagccttcttgaattttcccactaaaaatcagcttttctttttgacctcttgggcaggctgtaaatcaaacttcaaagctctgcttctcatttaaatataagtttcaacttgaggtcatttatttggtcacacagaacaccacaggctgttcaatacagacaagatacctcttgagctttgctgcctagaagttcatttcaccagatataccctaaatcatcaccctcaagttca

SEQ ID NO: 948063 - DNA, 874 bp, Homo sapiens
gaaataagacaaacgggtagaagctttaggatggcagattcacagcagtttaatacgagaaagaacttctaacagaactggttggaaagggaacaggttgtttttttgygtattaatggtggaaatcacagggaattttcaaaatggatgacctttgtggtaatggtggagtttgaattcagtaagggttgaattagatgactttcaagatccttccatttctaaaagttatgattctgtgacccagaaagcctaatagttctccgacaccagaaagcatgaaagctggaaaccagattaaaaaaagagcagtcagccaaacagtcagaaggtaggtcaggtgtacagtaacaaatttaagatctgattatctttcagtctacctatcatcatttaactctggtagaccatgaagtacaacactctcagtgacttaccacatccataggtgctctgacttattacagataaagatatccattatgcataattagcttctttatctgactcaaatctgaagctaaagattattctggacatgatttcctggatagatggccagctaagttgtgtttcagataggaggatcacttaattaactaggcaacacaggtattttagtatattaatcacttccctaggtaggcaagttctaaatcacccttttctcctatatgaggacacatggagctactgttttctgttcccgtgttactctttaatctctgtcagtgttgtacttttgaacttccactttgtaacactgcactacactaaacactatatgtagcaagcattctatacgtttgtagaagattttagtaaatatgtactttcaaatgctatataacacatctgcaacttgttttgcaaa

SEQ ID NO: 948064 - DNA, 564 bp, Homo sapiens
tgcctggaaatttcttttctcagatacatgcgtggttcrcttccttccttcaaatcattgctcagaagacactttagtagtgaaacccctaacaaaccataataaaatggtaatccccacccataataaaatggtaacccccatcctagacctgtgccaggattctccctcttttttgccctgctcatttattctctatatctggggtgaccatataatttattatccaaagagacatttatgcagtgaaaggaggcactattaataattactataggtgacatagaaactgagacttttccaggcaaaccaggaatatggtacattgtacctatccatagtacttttcacctatctcgctatttatttacacattggtctgtttgttctttgtctctcttcagtagaacataaactccaggaagtcaggaactttttgttcataattttatctccaatacctaaaaggcaactggccaaagtagatgctgagtaatttgttgagtgaatagaaggctgaatgaataaatatgtcctgtacttaactgagtctatctaaaatta

SEQ ID NO: 948065 - DNA, 610 bp, Homo sapiens
aagtaatttgaaggtttctaaaataacttacaataaccatttgattgagcaatgttattattgggtatatacccaaagaaatacaaattattctagcataaagagacatgcatgcatawgtttatcacagcactattcacaatagcagacatgaagtcaacctaaatgcccgtcaatggtagactggataaaggaaatgttataaagaaaatgtaggctgggcgtggtggctcatgcctgtaatcccagcattttgggaggctgaggcaggcagatcacctgaggttgggaattcgagaccagcctggccaacgtcttgaaaccccatctctactaaaacaaaaatacaaaaattagccaggcatggtggcacgtgcctgtaatcgcagccactcgggaaggtgaggcaggagaatcatttgaactcaggaggcacaggttgcagtgaacagagattatgacactgcactccagcctgggtgacagagtgagactccctctccaaaaaaaaaaaaaaaaaaaaaaagaaagggaaaatgtatttgtggtacacatatacatggaatactacacactcataaaaagaatatcacgtcctttgcagcctcat

SEQ ID NO: 948066 - DNA, 610 bp, Homo sapiens
aagtaatttgaaggtttctaaaataacttacaataaccatttgattgagcaatgttattattgggtatatacccaaagaaatacaaattattctagcataaagagacatgcatgcataagtttatcacagcactattcacaatagcagacatgaagtcaacctaaatgcccgtcaatggtagactggataaaggaaatgttataaagaaaatgtaggctgggcgtggtggctcatgcctgtaatcccagcattttgggaggctgaggcaggcagatcacctgaggttgggaattcgagaccagcctggccaacgtcttgaaaccccatctctactaaaacaaaaatacaaaaattagccaggcatggtggcacgtgcctgtaatcgcagccactcgggaaggtgaggcaggagaatcatttgaactcaggaggcacaggttgcagtgaacagagattatgacactgcactccagcctgggtgacagagtgagactccctctccaaaaaaaaaaaaaaaaaaaaaaagaaagggaaaatgtatttgtggtacacatayacatggaatactacacactcataaaaagaatatcacgtcctttgcagcctcat

SEQ ID NO: 948067 - DNA, 590 bp, Homo sapiens
cctgacctcatgatctgcccgcctcggtctcccaaagtgttgggattacaggcgtgagccactgcgcctggccgcctgtttgcaatttatcaaccaaagtttattccctgagaggttcctatgtccrgtatatttgggaactacctatattccatattttctcagatcagcgtaaggggccaggtctcttttcctatgggattaaagactaattttctagttttaggggcagaactagaagcacattctcattccccctctgagagcatctttacacaataacagactcacaaggcacaagtagacacacacaagctttagcgatgcctcctgtcttctcaagaccctgtgggaaagagaacagagggtctatccaaagaagaagttgaagaattagagtgtctcagcactccagatatgccagcacagagataggtgggtggaattgttccaattatttatgatccccaagaaaactggggactttctctactgtttagagaaggaagcatgggcttcagtagatgcagagtaacagcatggattgggtgtgtattctgttgcctttagctgccctggagagaaggcca

SEQ ID NO: 948068 - DNA, 554 bp, Homo sapiens
cccggccagaacatggtattttttaaaaaggcaaaattttataaagtaaccaaaatgaaagcacattaatagtcaataattawatatgctaacatatgtgaacatacctaattactttatctgaatgtatttattaaaatatctaaagggttcatagcaaacagtatacagtctgggcaggagaattttgtgggtgctagggtgcagaagtggaaatttttttccttttacatttcttactgatttggggaataatttttattataaaatttaataagtatttgatgagcatgaaatagtatttgaaatataaggcaaaaatgactctgagtcgtcataagggtatagacatagagccatgagggttcagaggaggacagttgttttcaactagaagggatgaagaaagccttcaggaatggatgagattttatcctagccctcaagtatgaggagaacttggacaagcagagacgaaggaagatctaggtgggggactgtggagaaaaatgcatgaaggtcaggagtgggtgagccatggacatggtgatttg

SEQ ID NO: 948069 - DNA, 554 bp, Homo sapiens
cccggccagaacatggtattttttaaaaaggcaaaattttataaagtaaccaaaatgaaagcacattaatagtcaataattatatatgctaacatatgtgaacatacctaattactttatctgaatrtatttattaaaatatctaaagggttcatagcaaacagtatacagtctgggcaggagaattttgtgggtgctagggtgcagaagtggaaatttttttccttttacatttcttactgatttggggaataatttttattataaaatttaataagtatttgatgagcatgaaatagtatttgaaatataaggcaaaaatgactctgagtcgtcataagggtatagacatagagccatgagggttcagaggaggacagttgttttcaactagaagggatgaagaaagccttcaggaatggatgagattttatcctagccctcaagtatgaggagaacttggacaagcagagacgaaggaagatctaggtgggggactgtggagaaaaatgcatgaaggtcaggagtgggtgagccatggacatggtgatttg

SEQ ID NO: 948070 - DNA, 554 bp, Homo sapiens
cccggccagaacatggtattttttaaaaaggcaaaattttataaagtaaccaaaatgaaagcacattaatagtcaataattatatatgctaacatatgtgaacatacctaattactttatctgaatgtatttattaaaatatctaaagggttcatagcaaacagtatacagtctgggcaggagaattttgtgggtgctagggtgcagaagtggaaatttttttccttttacatttcttactgatttggggaataatttttattataaaatttaataagtatttgatgagcatgaaatagtatttgaaatataaggcaaaaatgactctgagtcgtcataagggtatagacatagagccatgagggttcagaggaggacagttgttttcaactagaagggatgaagaaagccttcaggaatggatgagattttatcctagccctcaagtatgaggagaacttggacaagcagagacgaaggaagatctaggtgggggactgtggagaaaaatgcatgaaggtcaggagkgggtgagccatggacatggtgatttg

SEQ ID NO: 948071 - DNA, 551 bp, Homo sapiens
aaatataatttcttatgatcccttctcccaagatgctctgagtcccttgactttatcttcttttaaaatttgaagtatatcaggtgcggtggctcacrcctgtaatcccagtacttcgggaggccgaggtggatggatcatgaggtcatgagttcgagaccagcctgagcaacgtagtgaaaccctgtctccactaaaacaaaaattagccaggcagagcggtgcccgcctataatcccagccactcaggaaactgaggcaggagaatcacttgaatcctggaggcagaggttgcagtgagccaagatcacgccactgcactccagcctgggcgatagtgtgagactccgtctcaaaaaaaaaaaattttttttgagatataattcacatacatgcataaaattcaccattttaatacccttctgtggcttttatttattatttttgagacagggtcttgctctgacacccaggctggagtgcagtggtacaatcatagctccctgcagccccaacctccctgggctcaagtgatcctccggcggcctcag

SEQ ID NO: 948072 - DNA, 653 bp, Homo sapiens
tttactgtcctacctcaggggtatatcaactctyctctggctttgtgtcatgaccttgttcagggagatcttgatcacttttcccttccacaaaatatcacactggtccattatattgatgccattatactgatgggatccagtgagcaagaagtagcaagcacactggacttattggtaagacatttgcatgccagaggatgggaaataaatatgactaaaattcagggaccttctacctcagtaaaatttctaggggttcagtggtgtggggcctgtcaagatgttccttctaaggtgaaggataagttgctgtatttgcccccaccccctacaaccaagaaagactcacaatgcctagtgggcttatttgggttttggaggccacacattcgttacctgggggtgttacttggcccattaatcaagagacctgaaaggcttccagttttgagtggggtccaggacaggagaaggctctgcaacaggtccaaactgctatgcaagttgctctgtcacttgggccatagaacagagcagatctaattgtgcttgaggtgtcagcagcagagagggatgctgttaggagcctttggaagtcccccatagatgaatcacagcagaggcctctaggattttggaggaaggccctg

SEQ ID NO: 948073 - DNA, 578 bp, Homo sapiens
aacaggtccaaactgctatgcaagttgctctgtcacttgggccatagaacagagcagatctaattgtgcttgaggtgtcagcagcagagagggatgctgttaggagcctttggaagtcccccatagatgaatcacagcagaggcctctaggattttggaggaaggccctgccatcttctgcagataactactttcctttttagaaagagctcttgccctgttactggactttggtagaaactaaacggttggctatgggtcatcaagtcaccatgcgacctgaactacctatcatgaattgagtgctttctgacttgtctagccaaaagtggggcatgcacagcagcattccatcatcaaatggaagtggcatatatgtgatcaggcttgagcaactcctgagggcacaagtaagttatatgaggaagtggcacaaatgctcatgatccccattccygccacactgccttctctcccccagcctgcactgatggtctcatggggagttccccaggatcaattaacagaggaagagaagacaagggccctgtttacagatggctctgcacgatatgcag

SEQ ID NO: 948074 - DNA, 611 bp, Homo sapiens
gtccaggacaggagaaggctctgcaacaggtccaaactgctatgcaagttgctctgtcacttgggccatagaacagagcagatctaattgtgcttgaggtgtcagcagcagagagggatgctgttaggagcctttggaagtcccccatagatgaatcacagcagaggcctctaggattttggaggaaggccctgccatcttctgcagataactactttcctttttagaaagagctcttgccctgttactggactttggtagaaactaaacggttggctatgggtcatcaagtcaccatgcgacctgaactacctatcatgaattgagtgctttctgacttgtctagccaaaagtggggcatgcacagcagcattccatcatcaaatggaagtggcatatatgtgatcaggcttgagcaactcctgagggcacaagtaagttatatgaggaagtggcacaaatgctcatgatccccattcctgccacactgccttctctcccccagcctgcactgatggtctcatrgggagttccccaggatcaattaacagaggaagagaagacaagggccctgtttacagatggctctgcacgatatgcaggcaccacct

SEQ ID NO: 948075 - DNA, 577 bp, Homo sapiens
agcaggggttatgtgactgggggctgcatgcaccagtaatcagaatggaacaggacagggatwttcacagtgcttttccatacaatgtctgggatccatagataacataaccagttagctcaggggtcgatctttaaccaggcccagggtgtggtgctgggctgtctgcctgtggatttcatttccgccttttagtttttacttcttctttctttggaggcagaaatgggcataagacaatatgaggggtggtctcctcctttagtcccccgctttgagaatctcactcattagtgggagttctcactttcattttcactacccatgtcttcttgcaagacagatcaatagtgattcatatagtacatttgtgctgaagcattttggtgaactaaggtagcgatgaagctttttatcatttgaagaagtacaggtagcaaacaagagagcagtaagcaggtttctattactattattactcctattataagagttttaaatcctcctagcactgggaaccattttccaaacatggccccaggatcatatccatgccacacttgcacgggcacatgtg

SEQ ID NO: 948076 - DNA, 638 bp, Homo sapiens
tagatcagatcgctttcactgccataattttctcactgttacaatttttgcaaaggcggtttcagtctggctagagttccastcccatctcttctgtatgaccctgagcatattatgaaacttccttgagcacagttttattataaatcaagtgggaataaaaataattaaaatagttgttgaatatgtttaatgggcttaatgggagaaccaacgggttctccttgcccactacctagcagagccaattatcaagacaggggaattgcaatagaggaagagtttaattcatgcagagctgggctggctgtatgggagactagagttttattattactcaaatcagtctccgtgaaaacttggagactagagttttcaaggataatttggtgggtaggggttgaagagtggggagtactgattggtcatgtctgagatgaaatcatagagagtcaaagttatctttttgtagagtccgttcctgggtggaggccacaaaaccagatgagccagtttacacatctgggtggtgccaactaatccatcaagtgcagggcctgcaaaatatctcaagcgcttaggttttacaatagtgatgttatccctaggagcaatttagggagggtgagaatcttgca

SEQ ID NO: 948077 - DNA, 620 bp, Homo sapiens
tctgtgtcaaattccatctgaacaatcctgtttttttaaaggtcggaagcccatacatacttggaatttttgctctctctgcctttgatttaaagtgcaaaatcaaaagcctgttctatgaaaagaagtgcacttgagcaactcaggaatgtgctgaagcctttctacaaattaatctcttctttagtgaagtgaaacatcgggaccattcagggacagtgggagggtctcaggggcttgaatttgagccaagcttaatgagaaggagttggaggcaaaatggaattgaactgtaccttgttaactgttgaaagctgtgaatgaggtggacttactggccaagaattcttttcctttgttgcaattaactgcagtataggggatacttgtgaggtagttttcacgatctttaaagatcatttttttaaaaaattatacatttttacaaatgatttataaatttgctactgctttgaagacatataaattcatgtttcagtgaagtaaacatttattcatttcaccatttttactgggaatctctattgctagccactgtctcaggtgccagggggaatagtagtgttaaacacagtccckggctccagtgactcaacttc

SEQ ID NO: 948078 - DNA, 616 bp, Homo sapiens
gtggcagctgccatcacctgttcaccctaaatttaagggtagtgcattccacacctgtaacttttgcttccttgacatttagagttttctaaatataagagtaaaccaaatattttttgtttacaagattaatagtttttaaacatgttttgtgaaaattgaggagagatttgggaagacagatgtgtatattctcagtatgttttagcctcctgagcccccaagcatgaatatatgaggcttcaaagagaagaaaaatgagaacgtgtcttttatctttgctaatattcaattaagtagatcaagtgaatcttgaatctttaagtatatacgatgctaatattttaatttctttcaacacatttattcttgatcttggattcctgtgaggacttaaagaaaaccagtgacactcactcactcagacttggaaccacctaagagataaatgcagaggtttggtagagggagataaaaatatcagccttattactgctatgggggaagatatggctgaggactgcagtactagggacttytgaacaatgagccctagaactaggagacccatcctcccagccataggtgtctgtgctaccaccgggctcccttcctg

SEQ ID NO: 948079 - DNA, 648 bp, Homo sapiens
atagcacagcagaaagtttgtcaaaaagttttttttaggaaaaattttattgaaatatatgcatacagaagagtgcattaatcataagtgtatatagccattgaattttcacaaagttaatggcccgtatcactgtatcaagaaaacaggacattaccaggtccctagtcccttccaccttgatccctcgcagtcattgagtcctacaaaaacagaccactttccacactcccctcatcatggattcgtttggccagtttctgagttttatataaatacaattgtacaggatgtgtatttttctggctcatttctttatttaatgttatttcatgagatccattcatattattaacatatagcagtagtttatcgctttttgttgctttattgtaattgattgcatgattatttgcaatttattcatctattctattgttgacagacatttgggaggttttcaggtttttggttattataagtaaagctgctatgaatcttcttacacacatcttttgagtgtacacaaacatgcaattttgttaggcatttttctaggtatggaagtgctgggtcataraatatatgtgtttagctttaataaatactgccaaattgttttataaggtgatcatacaaatttatact

SEQ ID NO: 948080 - DNA, 620 bp, Homo sapiens
catgaggaatcaggtctcttcccaaagtagcagttacattttaacaggaactttggtgctgtaattccaaataataawcaatatggaaactgctggaactgtggcaggaccaaggaaggagattccggaggccatgaaaggttttgccacagcactattcagagtagcaaagacatggaatcaacctaagtatccatcaatggtgggctagataaggaaaatgtggggccgggggtggtggctcacgcctgtaatcccagcactttgggagactgaggtgggtagatcacctgaggtaggaagttccagaccagcttgaccaatatggtgaaacgctgtctctactaaaaaaaatgcacaaaaaattagctgggcatggtggcacacacctgtaatcccagctacttgggaggctgaggcaagagaattgcatgaacctgggaggcagaggttgcagtgagctgagaacgcaccactgctctccagcctggacaacagagggagaccctctcaaaaaaaaaaaaaaaagaaagaaagaaagaaaagaaaatgtgatacgtatacaccatggaatactactactactactacatggccgtaaaaaagaatgagatcctgtc

SEQ ID NO: 948081 - DNA, 588 bp, Homo sapiens
taatccagtacagattaccatcgctgctccccagagttcttccccttcattaagctgtttctatggtattggagcasaagtctcagggaaggaccccatgggatcctttgcaatgcactttgtcgcctcctcacctcctgcacccacttctccctctccttagttctccggtaaccaaaccttctctcgttatatacccaatgataaaaccaaagtaattgttgtacaggttaaagattcaaaacaaaccatagcaactgaaacagggtatcaggacgcaaatgcttggctggaatggattaaacattctgtttgcaggctaaacaaaagcgcctgttacacttgtgtgacaggcaggccagagacccaaattgttccctttccacttgggtggtcctctcacagaccgggcacgagctgtgtggtagctctcttccagaaccccacagcctggggtggtgagtcatgcaagactctttcactgctgttccctgaggtcaagagccctgcgggtcagccctgaagactatccggcctccagcccctgatgttaacttcacctcatgcctttcacggcagggggaaaag

SEQ ID NO: 948082 - DNA, 588 bp, Homo sapiens
taatccagtacagattaccatcgctgctccccagagttcttccccttcattaagctgtttctatggtattggagcacaagtctcagggaaggaccccatgggatcctttgcaatgcacttygtcgcctcctcacctcctgcacccacttctccctctccttagttctccggtaaccaaaccttctctcgttatatacccaatgataaaaccaaagtaattgttgtacaggttaaagattcaaaacaaaccatagcaactgaaacagggtatcaggacgcaaatgcttggctggaatggattaaacattctgtttgcaggctaaacaaaagcgcctgttacacttgtgtgacaggcaggccagagacccaaattgttccctttccacttgggtggtcctctcacagaccgggcacgagctgtgtggtagctctcttccagaaccccacagcctggggtggtgagtcatgcaagactctttcactgctgttccctgaggtcaagagccctgcgggtcagccctgaagactatccggcctccagcccctgatgttaacttcacctcatgcctttcacggcagggggaaaag

SEQ ID NO: 948083 - DNA, 226 bp, Homo sapiens
agacatcccagcccatgctggctccaccccactttcatgcctgtggatattcccatctatagtccatctcccctgacaaacaaccacccctcgagccaccccttgggcccagggcctgcagtcattggtggtgtggtcagacctcagggagacagatayagaagaagactcgctcaggcccaggaagcatgatttgggggtcctggactccagcttgtgatctaga

SEQ ID NO: 948084 - DNA, 279 bp, Homo sapiens
gttgagactttggggggctgttgggaaggcatgattggttttgaaacgtgaggacatgagacttgggagaggccagtggcggagtgatatggtttggctctgtgtccccaagcaaatctcatcttgtagctctcataattcccatgtgttgtgggagggacctggtggcagacgactgaatcatgggggcagttctttyccatgctgttctcatgatagtgaatgggtctcatgagatctgctggttttaaaaacaggagtttctctgcacaagctctc

SEQ ID NO: 948085 - DNA, 578 bp, Homo sapiens
ggggtattaccttgggggaaatatgaagaaagtaattwatttgatgcaggaggttaatagacagtagagatagaagggatagaatagagattagggaggagattaaataaaaacaaaagtggagggtttatctttaaaaggaatgaagacagcctcttctgaaatgggaggaaggaagtaaatctgagggcatttgtcactgttgtataagagggaagggcatctgttaaggcgtcttgggagctagagtgaacctggagccttgagaaggcaggagaagagttaaaatagtcactataaggaacgaaagtggaaatcagccctggctaagcacccgcactgttaaaccatccccttgaaatggggccagttagtataagtgtaagcctttcccagcaggagcagagacagtaggttattgagcagatccagagtgggaatgttggatggacaaggcagaatggattattgagggtgcctgagtgagtattgtggaagtaactgaccacagggttcagaagagatggcccaggaacaggtgggtggaaatgccacctcaaggcagaatgtgcactcag

SEQ ID NO: 948086 - DNA, 458 bp, Homo sapiens
tgttggaggcagggcctggtgggaggtgattgggtcatgaatacagatccctcatgcatggtttaacaccatccccatggtgataagagagctctcactcaattatttcacacgagatcaggttgtttaaaagcctgggacctccccgaccccagtctcttgctcccactctcatcatgtgatgtgcctgctcccccttcactttctgccatgattggaagcttccagaggccctcaccagaagcaaatgttggacccacactttctgtgcagcctgcagaactgtgagccaaagtaaaccacttttccttataaattacccagtctcgggtatttctttatagcaatgcaagaatgagttaattaaaaaattggtactgaggagtagggtgctgttataaagatactagaaaatgtggaagtcrctttggaactgggaaatgagcagaggttggcag

SEQ ID NO: 948087 - DNA, 637 bp, Homo sapiens
aacggttagaaaagcctgcctgggggccaggtaaaggatgaaggagatgagaaatttgtgcaacatccttttttttttttttttttttttgcctggctggcccccaaaatggtatttktttttctctttttaagcaacttggtgtttgtacattcaattcagcacactcatgtggatgaattaagggggatgggaataaaccagtgtctcccaagttcgccataagactcaccctgggtgtttgttaagtgcacatcttggagtccatcctgggcattctgattcaatggtctgaaacgggaccctggagtctgcaggtttaacaaattgcccatgtgatttttaatcaggcaaatttatgaacccctgtgctgtttccccagcgtatccagagcctgccagaacatggagattaattgcaaggatattcacgataacatctagatcaggagctacggcacggggaggccctcatgaggcccgggctgggagactgggtgaggcggggaggtcaggatccagtggagctctcagggcatggctttctgaggtcttacagcagccagagtttgtggctcttccttccagactctgccaccagccggactcatctgctgtcagggagtctccgttcact

SEQ ID NO: 948088 - DNA, 557 bp, Homo sapiens
gcaggacaatggtgtgaacccaggaggyggagcttgcagggagccgagatcacgccactgcactccagcctaggcgacagagcgagactccgtctcaaaaaataaataaataaataaatagataaataaataaataaattgcccatttgtatagtgagctgttttcttgagtgttgagagttctttataccagtaagatacaaatcttacatcagatacatgtttatgaaaatattttctcccagcctctagttttttaattaacagtttctcttgaagagcaaaaatttaaaattttgatgaaatccaattggttatgttgttcttttaatgattctttttggtggtcatatctaggaaagctttgcctaatgcatggtcacaggtgttttcttacacattgtttttatagttttaagttttatatttaactctatgttcaattttgagttaatttttgtatataatatgagatatagatcaaaggggttttttgttttatttttgcgtgtgaatatctagttgttccagtatcatttgttgagcagacttctttc

SEQ ID NO: 948089 - DNA, 557 bp, Homo sapiens
gcaggacaatggtgtgaacccaggaggtggagcttgcagggagccgagatcacgccactgcactccagcctaggcgacagagcgagactccgtctcaaaaaataaataaataaataaatagataaataaataaataaattgcccatttgtatagtgagctgttttcttgagtgttgagagttctttataccagtaagatacaaatcttacatcagatacatgtttatgaaaatattttctcccagcctctagttttttaattaacagtttctcttgaagagcaaaaatttaaaattttgatgaaatccaattggttatgttgttcttttaatgattctttttggtggtcatatctaggaaagctttgcctaatgcatggtcacaggtgttttcttacacattgtttttatagttttaagttttatatttaactctatgttcaattttgagttaatttttgtatataatatgagatatagatcaaaggggttttttgttttatttttrcgtgtgaatatctagttgttccagtatcatttgttgagcagacttctttc

SEQ ID NO: 948090 - DNA, 731 bp, Homo sapiens
aggatttgaatagacatttctttctcttttttttttttttaaaaaaaaaaacagagtctcactctggcaaccaggttggaatgcagtggcatgactttgactcactgaaacctttgccttctgggttcaagtgattctcctgcctcagcttcctgaatagctgggattacaggcatgtgccgccatgtctggctaatttttgtatttttagtagagatggggtttcaccatgttggccaggctggtcttgaactcctggcctcaagtgatcctcctgccttggcctcccaaagtgctgggattacaggcatgagccatcgcaccaggttgaacagacatttcttcaaagaagatatacaaattgccaataagtagatgaaaagatgctgaacatcattaatcaggaaaatgcaaatcaaaaccacaattaaataccactttctattctctaggatagctataataaaaaagatagacaatagcaagtgctgtcaaggatgtagagaaattgaacgctcataccttgctgatgggaatgtaaaatgatgaggttgcttttaagaacagtttggtcattcctcaaaaggttaaacagagttacatatgacccaacaatttcastcccagcaataaattcaaaagaattgacatcatatgttcacaaaaaattttgtacaccagtgttcatagcagcatgatttataatggccaaaaagcaaaaaaaaattcaa

SEQ ID NO: 948091 - DNA, 777 bp, Homo sapiens
gaggaagaaacagtgtgatatctggcctacttaagcatcatacggaatcaggatgggcccagttctccaaccctccagccctcctctccttgctggttgggaccawttgaccccattgagagggttcagctctgtctggcctgggaatctgcctctactcagggaaaattcagcattaccttcttgataaaatgcttgctgcttcttttagctcctctaggaaaatggtgctaagaagtagtttgcatatatgagtcaaccaaagcactggttaaatgcactctattggattcttcacccatgcaattaggaatcagtaggtctcaggtgaaggcacaggtgtctgggtttttaatgagcagatgcagatggtctgcgcatcagcctttgaggaataccactctggatattggtggagtggccaactggtccctgtttgcccaggactttcccagcttagcactgaatattctgcaggatggcacatgtcccagggaacccctctgcaacttgcaaactgggacaaatgatcaccttaaacatacagaaattcaggctctgagggacttctagggacctacctgagcttggggacaggactctgagtcctagtccctgcttgcctggattttctaaaattgtttctaatcaaattccctaatgtcatgctcaaccagcccactgctggggacacacaatggcagatggctggctccctgctgctgtctgctgactgagatacggctgcgggcagctctgtcctctccaggtacccac

SEQ ID NO: 948092 - DNA, 599 bp, Homo sapiens
ttaatccctatcactcaggaaattacaagggttttaggagttttgtaccagcaacctggaacmaagaccaaatatttcttacatcacaatatcatagctagtaactttctgcatgacttttaggacgtcactatttttcagtttaatctttttttcctacaaagttaggggtaggactacaatattctgagtgcttttagtcctaaactttcaggattttaaattgttagcagactatctttattatttacaatagctttcagtggtgtgctggaggccactcttaaccatctccaaaaagcaaactgtcacatattcagaaacctcaaaagctgggtgttaaacttttggtattttaaaaccagccccttacgagagtactgtatttatatcatggaaataggaaaacactagaaatcaaggctttaaaaagcaaaacaaaacatagagccagtttaccagcataccactgataacaagtgttataatgttccacagaccagaaccagacgcagtaaatacgtaacagaatgccccaccatattttaaggtagattattatagtactaattgaattagggcagatttgtaaattgttc

SEQ ID NO: 948093 - DNA, 568 bp, Homo sapiens
cttgcttcttaaagacccagtccttgctctgcatccttgagtcacttctatctttggttccagggctgagaggtgttcctttgaagacaaacaaataagtcccttttctcttttcattcattgggcctcattagactaatctccacttcttgaaatattatttctcactagattcctctttccagaaagtccaaactgggttgtcttattccatttgagctgccacaacacaatactataaactgggtggcttataaataatgaaaatgtatttctcacagctcccgaagtcgggaagtccaaactcagggcagattcagggtctggtgaggatctgctttctgcctatagacagtgccttcttgctgtgtcctcacatggtgaaaggggtgggggtctccctctagcctttttgatgagggcattaatcccatacatgaggactgcyctgatgacctaatcacctcccagaggcagtacctcataataccgtcaccttgagggctaggatttcaacatgaattttggaggagaaacaaacattcagaccatagaatttcacccttgc

SEQ ID NO: 948094 - DNA, 528 bp, Homo sapiens
agattcctgagcctgccccagaccaccttactcagattgtgtctaaatctaggaatatgtgttmtatcttgctcctcagccaattcctatgcaactgcttggcattctccattcgtgttttgggaaccacatgggtgacggaaagaatcagtaattctggagtctgttggacctgagttcagatcttagcacctgcacttattagctgaccaggttaccagacttctctgggcctcagagactacaaaattgcagtttcttttccaaagattttttgttttgttttttagaggaaggatgctctgaaagttgaagataccacccaactaagttggtacatcaagtagtgtgaatatagtcttctgaagatggtcctatgaaacagactgcttttctgagtggggtgtggtagccagtctcgtttatgatgtggtcatactgagtagcagtggcatttccctccctcccttcttctaaagttcaaatgagttttctctcttcaatctagaactcccatagtcatttacg

SEQ ID NO: 948095 - DNA, 528 bp, Homo sapiens
agattcctgagcctgccccagaccaccttactcagattgtgtctaaatctaggaatatgtgttctatcttgctcctcagccaattcctatgcaactgcttggcattctcmattcgtgttttgggaaccacatgggtgacggaaagaatcagtaattctggagtctgttggacctgagttcagatcttagcacctgcacttattagctgaccaggttaccagacttctctgggcctcagagactacaaaattgcagtttcttttccaaagattttttgttttgttttttagaggaaggatgctctgaaagttgaagataccacccaactaagttggtacatcaagtagtgtgaatatagtcttctgaagatggtcctatgaaacagactgcttttctgagtggggtgtggtagccagtctcgtttatgatgtggtcatactgagtagcagtggcatttccctccctcccttcttctaaagttcaaatgagttttctctcttcaatctagaactcccatagtcatttacg

SEQ ID NO: 948096 - DNA, 583 bp, Homo sapiens
aaattagctgggtgtggtggcacatgccagtaatcccagctactcgggaggctgaggcaagagaatcgcttgaacccgggagggggaggttgccgtgagccaggaccgctccactgcactccagcctgagccacaagaaagggactccgtctcaaaaaaaaaaaaaaaaaaaaaaaaaacaattgtgatgggatttgctcagactttaacagggaaccaatacctatatttccaatgaatccaaataccagctctgacctaaaatatacaagggtctgccttcctctacctgagcaggtagatgcccaaggtaatcctgatactataaggctcaccacattgagttacttaaacacagagcagctctaccaaaaacaggctggctcaccccgatctgctcttcataataattccttttccaactcccttaacggccccccagtttgtgtactccacgtagtccggggtttggagttgttkttttttttttttttttttagttataacttacacgtagtaaggtgcataaatcttaaagtgtgcagcgtgatgaatttttttaatatgtatatacacataaagc

SEQ ID NO: 948097 - DNA, 591 bp, Homo sapiens
ccagctggctttgagatggagagactcacccggattattcaagtaaacccaatctaatcacatgagccctgaaaagcagaggacctctccttgctctggtaagagagagataagcctatgaaaaaagggtcagagggataagatttgtatggtttggctgcatctccacccaaatctcatcatgaattgtagttctcataatccctacatatcatgggagggacctggtgggaggtaactgaatcatggggtggatacctccatgctgttctcatgatagtgagtgagttctcaggagatctgatgattttataaggcccttccaaccctgcctttgctctgcacttctacttgcagccaccatctgaagaaggacatttttgcttcctgaggcctccccagccatgctgaactgtgagtcagttcaaactcctttctttataaattacccagtttcaggtrtgtctttattagcagcatgagaacagattaatagaaaattggtaccaggtaggggtactgctgtaaagatacctgaaaatgtggaagcaactttggaactgggtaacaggcagaggttagaatagtttg

SEQ ID NO: 948098 - DNA, 634 bp, Homo sapiens
cccatgctcctctctttccctcccccatctagaagtccacagtgtctatgaaatgcattttcaaaacgtatatgacccagttatcactaygaaggtagcacagttcccatctttatgtccatgagtatccaatgtttagctcccacttacaagtgagaacgtgcaatatttggttttctgttcctatgcaacattttaaattcttgtgcacttaaactaaccatggatggctttaaaatgggaaaaataaagactccaaaggaaatgtttgtcagcatgcaaataaaattggaatatattaaaaagtaataaatatatcagttaattcatgtactagataaaataaatcaatagtgcaaaggaaaaggcatttctaaataaaaaaacttctttcttaattttactataataatagctttgggcttctgtatttcaacaatttcgatttatcaaaatccacatattttgaattttagatagattttgtattatgactattaattgcctctaattactattttctattcttttttttttttttttttgaggtggagtctcactctgtcacccaggctggagtgcaacagctcactgcaacctccaactcccgggttcaagcaactctcctgcctca

SEQ ID NO: 948099 - DNA, 590 bp, Homo sapiens
ctaagaaaagagagaaaatggaatcatataaaatgttcaattaaaaccacaaaagccagaaaaaaattggaagacaaagatagaagaaaagaacaagagtgatacatagaaagcattaacaaatatgttagatattagtcaaaatatataaataaccactttaaatattaatggtctaaatatagcagtcataagacagagattgccagagtgggtcaaaaaataagacccaacagtgttttgttttcaagaaaccaattttaaataaaagatatatatagatagattaaaagtaaagagggggagaaagatatacaatggtaacactaatcaaaagaaaacagaagcagctatattaatttctgaaacagaagacttcaaagtaaaaagagttaccagataatctggggagaaatggcagataagaagcagaattaacttgcagctcccacttggacagacagagcagcacrtggagactcacgtcataaaactttgcttctagaactaccataagaacataccagaaaagctgagagaatccagagaccatatgaaggaaacagattgctgttgcaggctctcagaga

SEQ ID NO: 948100 - DNA, 601 bp, Homo sapiens
cttcatctactctgttgcaatatattgttttggttgatgtatrtgaaaaaaattcagtctcacacagatatacagttggaatacaaggaagtattttaatagctttttcaggtaattttgggatatattttgattctacaaaggcagatggcagtttcttaaaagttaattgtggtgtggatctgaaagcattatcagtgaacatttttcaaatgctattacattaaagtgcactggttgattttgtactttgaatgattttttttactaatgcatgattttgtgatatcaggcattgctcatcttgaaaatatttattcgctgagttaagcaaatattccaagtgttgatgcattttattgtatactaccatgaaatcattttgttagtgtcttcaccaatctcatcaggaaagtattgcagtattgggaagctgtcaagctcacagtgaaaaatatgttttacaaaattccatctcccccccaaaagctcatcttatcattgatgacaaatgttgtcagttgctttctttgaagtgatagattcactttcctcatttttaggaaagtgtttactatataactgtatatgatgaactata

SEQ ID NO: 948101 - DNA, 596 bp, Homo sapiens
taaatttgagagctataactttatataaagcccttagaagaaaacagagaggaaaatctttatgtccttcaccttggcaatggtttcttaaatataataccaaagacacaaataacaaaagacagataaactggacttcattaaaattacaaacttttgtgcatcaaaggaaagtatcaagaaagtgaaaaggcaacccacagaatggaagaaaacatttgcaaatattttatggtctaatattcagaaaatatgaagaactcctacaactcaacaacaaaaagacaaacaatccagttaagaaatgggcaacagacccaaatagacatctctctaaagaagataaaaatgacaaagacattcaacatcattaatcattacagaaatattagtcaaacctcccacagaatgccattttataccactaggatggctataaaaaaaaaaaaagaaaaatctcaagtgttggcaaagatgtagagaaattgaaatccttgtgcactgtgggtgggaatgaaaaacagtgcagttactrtggaaaatagtttggtggttcctcaaaaagttaaacatagagttacaatttgactcagcaa

SEQ ID NO: 948102 - DNA, 516 bp, Homo sapiens
ttccatagtattgtaggctgcagctgtttttggaggctgtggtgaggtgttgcttgggatagggaaaccaggaaccaggtagtccagtccttggaccccactgattgtagcagcaggcagagcatacctggtttggggtccccaggcagcacatgtgtgaactggttttagcaagtccacaggggttgattcttgggccttgagagggcttgcttggtttccaccagtgtcagtggctgaccaggtaggtgagcaggtccttggttctcagagtattgtgtttggtatagatgatggcaatagcagtggtgagaaaactcttgtgctgcaagtagcacactggtgttagtgttagctgtgagggtctgagtgggccaatccccaggctcctagttagtgcttgcatgtgaatgycatctgtggagatagaagcaggttatgtgggcctatcctcaggcctccaggaagagtgcacagttaccagtagtggtggacagagtgggactattctgagtt

SEQ ID NO: 948103 - DNA, 650 bp, Homo sapiens
ccctcttcccagagagatgtgctcaggaataggtgcccaacaggaagtatttgattgagagcttatttgtccctccaggagatattcaaggagagcccccatccagaccccaagcgagaagagctaccgtgtctcacagggcccacagcccatcacccacatcatcccacggagggcggggattatgcccagtgtgcagaagggttgacaaaggccaggtaggggaagtggctggctctgcttacatggacccaagactcactccagaacccctgaccttccgctgaaggatctttgcaccaactctcctggccccagtgggtctggctcaccagaagttaggcctggaagggaggaggctgggtggggggacatagaaggcaaaagcagcagtgtcctcacatggaactgttcctccaggtcctttccctgggacccctccctggagagctctccctgctctctctggcttcctttcccttctgtcaaccctaatagcataggttttggtgtcaggcagtcctgcgttggaatctcagattcccagggacaktcatgatttatacgtgttgtcccggtatactaatacatcaaggctccttgtcaccctcaaacatgcgcattaggaccatgcatcatgtgtcccgctt

SEQ ID NO: 948104 - DNA, 650 bp, Homo sapiens
ccctcttcccagagagatgtgctcaggaataggtgcccaacaggaagtatttgattgagagcttatttgtccctccaggagatattcaaggagagcccccatccagaccccaagcgagaagagctaccgtgtctcacagggcccacagcccatcacccacatcatcccacggagggcggggattatgcccagtgtgcagaagggttgacaaaggccaggtaggggaagtggctggctctgcttacatggacccaagactcactccagaacccctgaccttccgctgaaggatctttgcaccaactctcctggccccagtgggtctggctcaccagaagttaggcctggaagggaggaggctgggtggggggacatagaaggcaaaagcagcagtgtcctcacatggaactgttcctccaggtcctttccctgggacccctccctggagagctctccctgctctctctggcttcctttcccttctgtcaaccctaatagcataggttttggtgtcaggcagtcctgcgttggaatctcagattcccagggacagtcatgatttatacgtgttgtcccggtatactaatacatcaaggctccttgtcaccckcaaacatgcgcattaggaccatgcatcatgtgtcccgctt

SEQ ID NO: 948105 - DNA, 605 bp, Homo sapiens
gctgcagccctcgcctagccacacatggacaacagagggttaacggccctctccaggtgctgctccgtccatccagaccctgcaccccaggctgtaatcactggaggagttcttcctgcccactgcatgaaraaaggtcgtggaattgcagtaaagaaagaattgaacagacccaaggcccgccgtgccatgtgggagacagagttagtactgaaattatcttcaaagcttgtaggttaggggtttttcaaaggcagtttgggggaagagttgggggtggccaggtaacaggtgcttgctgttggcagagatgaaatcttagggggtcgaagctgtcctcctgggtgctgagtcacttctgggtggggccacaggggcaaggttggcgggtccaggtggagccatgggtgtcagacatgcaaaaggcctgaaaaggtatctcggaaggccgaccttaggttcacaacattggcattatttgcaggagtaattagggaagttgcctgtcttctgacctctggcatcgtggctgacagtcttttatgtctgcgccttagcaggagtcagggccctctactcccccaggcctgatggcctctcattag

SEQ ID NO: 948106 - DNA, 625 bp, Homo sapiens
cccatgtggattctggaatcagaaaagcctgcttcctgagtttgaatccagtcttcatccttcaactgtgggaccctggacaagaaccaacatcttccagcagagaccaccaagaacacacttgtggttgaataagccaggtttattaattactgcagtgagagagaatacacaccagggtgtcttagtaagagggagttagacaaaacctatgatagaattggggttggtatgagagatttggggggagggtaagtgtattagtccattttcacgctgctgatgaagacatacctgagactgggaagaaaaagaggttcaattggacttgcagttccacatggctggggaggcctcagaatcatggtgggaggtgaaaggcacttcttacatggtggtggcaagagaaaatgagcaagaagcaaaaatggaaacccctgataaaaccatcagattttatgagacttattcattaccacaagaatagcacaggaaagatcagccccccataattcaattacctccccctgggtccctcccacaacccatgggaattctgagaggtacaattcaagttgagatttggrtggggacacggccaaaccatatcagtaaggaagtggca

SEQ ID NO: 948107 - DNA, 442 bp, Homo sapiens
agagtctcactctgtcacccaggctggagtgcartggcaaaatctcagcttactgcaaactccaccactcgctttcaagtgattctcctgcctcagcctcctgagcagctgggattacaggtgtgtgccaccacgcccagctaatttttgtattttttttttttagtagagatagggtttcaccattttattcctggttttatgttttcagctttccctttaaattccacatgtaaataaaatcatgtgggcttttcatttttctctctgtcttatttcacttagcataatgtcctccatgtttctgaaaatgccaatatctcctttgctaaggttgaatgatattccattatgtatatataccacaatttctttatccatttacccattgatggacagttaagttgtttctatattttggctattgtgaataatattgcaa

SEQ ID NO: 948108 - DNA, 575 bp, Homo sapiens
attttgtcaacactgtagaaagttctcaaggaaaggccccccaaggagttttggtgccctggggtgaagctatctgctctgaacattccccgcaaggtaactgacytcagccaattcctcaaagtctggtgggtggccccacaccaagagcactcacaggaatcaaagttcaaatccagcctcccaaggaggaacggtcacaccagagctgcccctgacatttgcagggccggggcgagggcacacatgggggcccacatccacgtctgaatatctaaagattatccactggccttgtacgctgttcagtgaaacaggcctcattcttccaccttgagatatgtgccaggaaggtgaggtttgaatttagaatccttgggctcctcagatttcctatggaaaggtggctgtatggtggctgcgggcccgggactgcccctgccccaaggttcatttctctctctatggcatgagacactgccggcagccacagccccacaagagcgccttcagctgctccttaggcctgggggtgcgcacacccacgtgtgccctctgggaggctgggcctggga

SEQ ID NO: 948109 - DNA, 610 bp, Homo sapiens
tgattttgccgactctgtacatcgatttgaagagtactgccatattccaatccrtgaacatgatgtcttttcatttacttaggtcttctttaatttctttcgatgatgctttgtagttttcagtgtacaggtaatttatttctaagtatattactctttttgatgctatttgtaaatggaactgtccttaattttattttgattgtccactgctagtgtacagaaagaaatacaatagaattttttttttttttaaagatacggtcttgttattttgcccaggctggtcttgaactcctagcttcaagtaatcctccagcctcagcctcccaaaacattgggatttaaggtatgagccactgcacctggcctttttgattttttaagagtcagagtcttgctctgttccccaggctggaaagtggtggtgcgattgtggcccactgcagccttgaaatcctgggctcaagcaatcctcctgcctgagcctcttgagtagctgggactacagaactgtgccaccatggccagctaagagttttgcacattgatcttgtatccttcaattttgcttaacatgtttcttatgggttccttaggattttccaca

SEQ ID NO: 948110 - DNA, 457 bp, Homo sapiens
tccatctagtcctggacatttttttgttggtaacttttaaattatcatttcagtctcacttcttgttwttggtctgttcagagttcctatttcttcttgatttaatctaggttggttgtatagttctaggaatttatctgtctcctcagggttttctagtttccatgtgtaaaagtgtttgtagtagccttgaattatcctttgtatttctgtggtatcagttgtaatacctcccgttttaattctaatggagcttatttggatcttctgtcttcttttcttggttaatttcactaatggtctatcgattttatttatattttcaaagaaccagctttttgtttaaatttcatttagttctgctctgatcttggttatttcttttcttctgctgggtttgggtttggtttgttcttgtttctctagctgcttgaggtgtgacctcagattgtctatt

SEQ ID NO: 948111 - DNA, 465 bp, Homo sapiens
cactgctgtttttcacactgctgtgggtatttctgaaggataggtgtctgtggaacggctgagcaggggtatacatacttcacacggtgctgcctattacctgcaggttcacacgcacacacacatagcagtgtacagcagttatgggctcaaatgaagaaaggcctttctcataaactgtccctttgcagattggactacctgggttgaatgagtgttcaagaatctggatgattaggatgctgtagcagggatttccaccctgaactcagcttgtgagaagctctggagaaaccccagggcctcctcctaggcggccggtcgccaagcagggcaygcttgtggaggcagtggattctccaggccagcctgagacagcaccttctcccaggtctctgtgaggctttccactggaccctgcttgtcctctccttaaactcacgcttgtcgactgcagtctcagct

SEQ ID NO: 948112 - DNA, 465 bp, Homo sapiens
cactgctgtttttcacactgctgtgggtatttctgaaggataggtgtctgtggaacggctgagcaggggtatacatacttcacacggtgctgcctattacctgcaggttcacacgcacacacacatagcagtgtacagcagttatgggctcaaatgaagaaaggcctttctcataaactgtccctttgcagattggactacctgggttgaatgagtgttcaagaatctggatgattaggatgctgtagcagggatttccaccctgaactcagcttgtgagaagctctggagaaaccccagggcctcctcctaggcggccggtcgccaagcagggcacgcttgtggaggcagtggattctccaggccagcctgagacagcaccttctcccaggtctctgtgaggctttccactggaccctgcttgtcctctccttaaactcacrcttgtcgactgcagtctcagct

SEQ ID NO: 948113 - DNA, 543 bp, Homo sapiens
ggaaagcgtctagaaattaagcttaggtttaaaagaaaataaagaatagggctgatggagaaacattttattgcaaagggtaaacaatttcaaatgaaatyaggtgggaaataaatagcatatataaataaatatatctacagatagatctatacccatcaccataaagaaacatatccttacctttgacagtggaatgagaaaatccaatttgtaggaaaggatcactctggtgagcagtaccacaaacaccacataggcagagttctcaaagtctgttaattgcacctagacaagcagaagcccagagaagttatgaaccaactacacaaacatgctcttccctgacccaggcccttcctcagatcatgtcattcccaagccatctcctaattccccatctgggtctggaagccctttgcccacatctattctcagaaatcaaccctccttaacttggactgacttgctaccatgcacatacttaatttttattttatatataagagccttctcatagcagcatcagaagggtgatgaaca

SEQ ID NO: 948114 - DNA, 601 bp, Homo sapiens
ctggactgaaaataaaggttaacaaaataaaaacaaataaagatttaacaaaaccaaaggtgggaaaatgtggttggtatatacatgcaatagaatatttagcctttaaaaaaaggaaattctgacacatgctacaacataaatggaccttgaggacatgctaagttcaataaaccagtcacaaaaggacaagtattgtatttttctaatcatatggggtgtttagagtagtcaaattcagagacagaaggtaaatcatgattgctggaactataaggagagggaatgggatattgttgtttaatgaatgtatagtttcaatttgcaagatgaaatgggttctggagattggttgaacatggatttacttaactacagaactgtacacttaaaaaatggttaactggtaaattttatgctatatgtattttaaccacaattaaaattttaaaaataaaaattaagaaaaaagggaagkctaggccgggcatggtggctcacgccagtaatcccagcactttgggaggccaaggcgggtggatcacctgaggtcatgagattgagagcatcctggccaacatagtgaaaccccgcctctact

SEQ ID NO: 948115 - DNA, 620 bp, Homo sapiens
gggctcaaagcaaaaaggggatgccatctgcccaacccaacctttccaaggccttcaactgcttttaggagaacaactaaaatttatggttaacctgacctggcctgccaattacctgccagcttccctttmccccatacctgcacttcctcctcagcctcctagtcacactggccagcttgctttcttctagttcccaggaagtccccgcttgtttggttcatcctaggacttctacacacactgctccccctccctaagactgtcctccgctcctcattcctatttcactcctcctggaaccttggacatcccaccccctccccctccacccaccagagtccactggatacctaggttgtactctttgctccccatctcctcctgctagcacagccccactttgacgcttatgaatctatgggtatttgattgttcttcaaccccccagctccacagagacagagctgtccgtcttcactcatgagagcatgcccattctgcctgcagcaggcactcaagtgtctgagtgaatggcagggccaatgatttttcacctcctctttcaaacattaggtcgaagaaatgtgcccactctaatcaaaacaaatctgtccacc

SEQ ID NO: 948116 - DNA, 539 bp, Homo sapiens
atgcaactgtgtctgcagctctactgttacagagtctatcaagtgcagtctataaaagataaaccatctgtaaygtatgaggattgtaaggtggaatgcccgggtcgtgacttgctcttttcattacctgtatctctgagagatctgctggggcatgttaatataggaactaacctgggaaatgaagttattgtgcaaagagcctgattttcttctaatatagaagtagcctccttccggcgttttcgcatgttggcctcaactgtattgaactcggacattgttcctccgtagggctgtcctggtgtcccttcaatcatgtaactcccatactctggtctccaaagggtaggatggctacggaggagaaataacttagttccatcttattcttttgctatagtctgctcaatttttaagtttttaaagttgctttaaaagtgtagaaaccattaggtataaatgaagctaagaagtccttcacagttctcagtgattattacttttccatagctattcaactacataagggtcaacaa

SEQ ID NO: 948117 - DNA, 698 bp, Homo sapiens
taaattggttaattttttttttttttaagagacagggtctcactctgtcacctaggctctggagtgcagcagcacaatcacagttcactttaaccttgaactcttgrcctccagtgatcctttcacttctacctcccaaagtactaggattatagccatgagccactgtgcctggctagttaaagtggttaattttatgttatgtgaattttacatcagtaataaaaaagaagccggaagaaaaccagacatcaaagatgttagaaaaagggatatatttacaaaccaaaaagtctccaaattcccactggaaggaggtagcaagtatgagcaggtctctttagaagcccgtcctcattcctatagaaaccccaagtactagcccatggggtcagcccttgccctatagcccatccttgtcacaacccaagaagcaatccctccattggccacaccctcagtccttttgccagtcatcctgtgcccaggcaggcattggtgaaaagtactcaaagcctggccctttatagcgtagggcatgtaggaacatcacaaggtcttggggcaagggatcctgtcgcaccagccggcactctgcacagagtgggtctgtctcttgattcatgacatctgtttcaactgccttctctgatgccaaggctattgtgtccaactcctgaggggctgcctcagctact

SEQ ID NO: 948118 - DNA, 555 bp, Homo sapiens
ctgcgcccacagccgccccttcctgcaggtgctctgtcccagggagatgggagttttatctataagcccctgactgtgctgctgcctttctttcagagatgmcctgcccagagagaaggaatctagagaggaagtctggctatagcagttttgcagcaccgtggtggggtctgcccagtatgaaatttctggtggctttgtttatactgtgaggggaaaacagcctactcaagcttcagtaatggtggatgcccctccccccaccaagctccagcatcccaggttgacttcagactgttttgctggcagcaagaatttcaagccagtggatcttagctttctgggctctggcgggggtgggatccgctgagcaagaccacttggctcccttgcttgaggtgttctaggcgcctctgaggtatgaaaaaaaaactcctgcagctagcttggtgtttgcccaaatggccacccagttttgtgcttgaaacccagggcccttgtggtgtatacacccaaggtaatctcctggtctgtgggttgagaagaccatgggaa

SEQ ID NO: 948119 - DNA, 468 bp, Homo sapiens
gggagatggagcttgcagtgagccaagatcgggccactgcactccaccctgggcgacagagcgagactctgcctcaaaaacaaataaatgaataaacaaacaaayaaataaataaataaatagaaacattctctgccatataaagctcggaacgattcaacattaaaaaaaacaattttaaaacacttttgaagaagtatgtcaataataagaggagaggaccagagaagaaagaatgatcagatatctcagtcaagttaatggttttattttgtatttttaaaacaaagaaaaaagaaaaatcaaaaacaaacattggtaaacacccaaagctaaaattctgtatgattcctgccattaatcaggttttgggaacagactctgaggcagaaatgtgcatgcaggaggtttatttggaagaggtctcaggagcagcacctgtgagggagcaaacaaggcaagactgga

SEQ ID NO: 948120 - DNA, 590 bp, Homo sapiens
ctaccagacattcaaagaattgctatcaatcctattgcaactattccaaaagattaagaaaaagggaatcttccctaaatcattctatgaaccaagtatcacactgataccaaagcccagaaaggacacaacaacaacaacaacaacaaaactgcaggccaatatccctgatgaacatagatgcaaatatctgcaacaaaatacaagctaacagaattcaacagcacatcaaaaaggtaatacatcactatcaggtgggtttcatctcagggattcagggataatttagtatacacaactcaataaatgtgatacattccataaacagaattaaaaataaaaatgatataatcatctcaaaagatgcagaaaatgaatttgacaaaatccaacatcctttatgataaaaaccctcaacaaacgaggcatagagaggacttatctcaaaataataaaagycatttatgacaaacccacagacaacatcatattgaatagaaaaaagttgaaagcattttccctgagaacaggaacaagacaaggatgtcctctttcaccactgctagtcaatatatttgtggatatcctag

SEQ ID NO: 948121 - DNA, 458 bp, Homo sapiens
cttttagaataccatccctgagaaggcaactggacatattttatgcaagtatttctaaaatacacagagataatattttgaattaagccttcaaatgtaagatgatttaattcaatttgtttattttcraattctcagaggaaaaaaatgcctttaaaaataattttttgtaacgtatttttttttgtccttagtatatgctttaaaatatacagattcccttggatttctaaaatttaattctgttaatatttcagttttaaaacacaaagaggtaaacaaatgaatgcttgcctaaccagaatttaaatatttttggaatctgttgacttattaaatatctcattgagttttgctataaaaaataaacagcttaattttttatcatttgaatatcatgatttttacaagattattctcttgctggagaataacattcctttgcgatgtgcttttca

SEQ ID NO: 948122 - DNA, 458 bp, Homo sapiens
cttttagaataccatccctgagaaggcaactggacatattttatgcaagtatttctaaaatacacagagataatattttgaattaagccttcaaatgtaagatgatttaattcaatttgtttattttcaaattctcagaggaaaaaaatgcctttaaaaataattttttgtaacgtatttttttttgtccttagtatatgctttaaaatatacagattcccttggatttctaaaatttaattctgttaatatttcagttttaaaacacaaagaggtaaacaaatgaatgcttgcctaaccagaatttaaatatttttggaatctgttsacttattaaatatctcattgagttttgctataaaaaataaacagcttaattttttatcatttgaatatcatgatttttacaagattattctcttgctggagaataacattcctttgcgatgtgcttttca

SEQ ID NO: 948123 - DNA, 458 bp, Homo sapiens
cttttagaataccatccctgagaaggcaactggacatattttatgcaagtatttctaaaatacacagagataatattttgaattaagccttcaaatgtaagatgatttaattcaatttgtttattttcaaattctcagaggaaaaaaatgcctttaaaaataattttttgtaacgtatttttttttgtccttagtatatgctttaaaatatacagattcccttggatttctaaaatttaattctgttaatatttcagttttaaaacacaaagaggtaaacaaatgaatgcttgcctaaccagaatttaaatatttttggaatctgttgacttattaaatatctcattgagttttgctataaaaaataaacagcttaattttttatcattygaatatcatgatttttacaagattattctcttgctggagaataacattcctttgcgatgtgcttttca

SEQ ID NO: 948124 - DNA, 595 bp, Homo sapiens
aacttttctggatgctctgaaaactggccaaatttttgcttgtataaagccaaatcagatctagaaaatgcacatgtactctaagtgttcccccatttccatcagctacctcccacaatgaacacaggtttgactttaggggctgataggggaccccattcctggtggtactggttgggcagcagggtatatgtgctggggcaagttggataagggggagggttgcctgatgactttggggtagaatctttcattagagaagtggtgggacctgcacccggcctgagaactaagggactgaagagactctggagagggtgtaggccttttaggaagaatagctcggagggaatcccttaagtgcagcttcctggtatctggaagtaacatgagccagtaaagggccatacaagcctgtacataagagacctcctcccattttccttcttttttacaggataagtccaattgtaaaacagcagtataatgtatagaaccatgtttaggccaaatatcttggttttccaatttatattaaacccaaatggtgttgcgatagaaaatgwatttatttttctttaagctgaatttcaat

SEQ ID NO: 948125 - DNA, 628 bp, Homo sapiens
ccctgctgcagccaatagtatctctctctctgtctctctctctttctttctgtctcyagtctctctgtctcctctcctctcccctctctcctctttcctccttctccactccctctccctgagtcctctttttttgttaatttaacttttattttaaggtcaggggtacatgtgcaggtttgttctataggtaaacttgtgtcatgggggtttgctttacagattattttgtcacccaggtattaagcctagtacctattagttatttttcctgatcttctcccttctcccaacctctgccctctgataggttcgtgtgtgttgttcccctctatgtgtccatgtattgtcaccatttagctcccacctataagtgagaacacgcagtatttggttttttgttcctgcattagttcgctaaggatcacttggcctgggaggtcaaggctgcagtgagccatgatagtgccattgcactgcaacccgggcaaaagagcaagaccctgtctaaataaataaataaataaataaataaataaatatgagacttcagtttaaaagaaaaaaaaagcaatcggaggtcaaggctgcagtgagccttgatagtgccactgcactgtaacctgag

SEQ ID NO: 948126 - DNA, 534 bp, Homo sapiens
atgattctgtctggttattatacgaagatatttccttttctgcaattgtcctcaaatcgcttraaatctccacctgaaaatgccacagcaagagtgtttcaaatctgctctctctaaagcaaggttcaactctgtgagttgaatacacacaacacaaaaaagttcctgagaactcttcttagtctagcatgaaaggaagaaaccccgtttgcaacgaagccctcaaagaggtccaaatatccacttgcagacataacaagcagagtgtttctaaactgctctaagaaaagaaaggttaaactctgtgagttgaaggcacacatcacaaagtagtttctgagaatgattctgtctagtttttatttgaagatatttccttttctactgttggcatcaaatcgcttgaaatctccacttgcaaattccacaaaaagagtgtttcaaatctgctctgtgtaaagggacgttccactctgtgagttgaatacacacagcacaaagaagttactgagaattcttctgtctagcatgaaa

SEQ ID NO: 948127 - DNA, 559 bp, Homo sapiens
gttattatacgaagatatttccttttctgcaattgtcctcaaatcgcttgaaatctccacctgaaaatgccacagcaagagtgtttcaaatctgctctctctaaagcaaggttcarctctgtgagttgaatacacacaacacaaaaaagttcctgagaactcttcttagtctagcatgaaaggaagaaaccccgtttgcaacgaagccctcaaagaggtccaaatatccacttgcagacataacaagcagagtgtttctaaactgctctaagaaaagaaaggttaaactctgtgagttgaaggcacacatcacaaagtagtttctgagaatgattctgtctagtttttatttgaagatatttccttttctactgttggcatcaaatcgcttgaaatctccacttgcaaattccacaaaaagagtgtttcaaatctgctctgtgtaaagggacgttccactctgtgagttgaatacacacagcacaaagaagttactgagaattcttctgtctagcatgaaatgaagaaatcccgtttccaacgaaggcctcaatgcggt

SEQ ID NO: 948128 - DNA, 601 bp, Homo sapiens
cgtctagcattcaatgaagaaatcccgtttccaacgaaggcctcaaacaggtccatatttccacttgcagactttacaaacagtgtgtttccaaactcctctatgaaaagaaaggttaaactctgtgagttgaacgcacacatcacaaagcactttctgagaatgattctgtctggttattatacgaagatatttccttttctgcaattgtcctcaaatcgcttgaaatctccacctgaaaatgccacagcaagagtgtttcaaatctgctctctctaaagcaaggttcaactctgtgagttgaatacacacaacacaaaaaagttcctgagaactcttcttagtctagcatgaaaggaagaaaccccgtttgcaacgaagccctcaaagaggtccaaatatccacttgcagacataacaagcagagtgtttctaaactgctctaagaaaagaaaggttaaactctgtgagttgaaggcacacatcacaaagtagtttctgagaatgattctgtctagtttytatttgaagatatttccttttctactgttggcatcaaatcgcttgaaatctccacttgcaaattccacaaaaagagtgt

SEQ ID NO: 948129 - DNA, 474 bp, Homo sapiens
tcttttttaatttataaagaaaagaaatttaattggttcatggttctgcaagctgyacaggaagcataagcaggcatctgcgtctgcggaagcctctgcaagcttacaatcatggcaaaaggagaagcttgtgcttgcaggtcacatggcaaaaggaggatatttcagtgaatgattccctaattttcttattcatctcctattttccatttctttgtctatttgttctacttctggagatttcctcaactgagatcacattccaaactttattgagtttttctttttgctttcacatgtattaaaaaatttccaacattttcctagcccttatgtctatttttttttaaaacagccctccttttttatttcatgaatgcactacgttcttttcactctccgtggacatttaatttggatttaataaattattattattattttaattgcacatgatatttgtacatatttatg

SEQ ID NO: 948130 - DNA, 474 bp, Homo sapiens
tcttttttaatttataaagaaaagaaatttaattggttcatggttctgcaagctgtacagsaagcataagcaggcatctgcgtctgcggaagcctctgcaagcttacaatcatggcaaaaggagaagcttgtgcttgcaggtcacatggcaaaaggaggatatttcagtgaatgattccctaattttcttattcatctcctattttccatttctttgtctatttgttctacttctggagatttcctcaactgagatcacattccaaactttattgagtttttctttttgctttcacatgtattaaaaaatttccaacattttcctagcccttatgtctatttttttttaaaacagccctccttttttatttcatgaatgcactacgttcttttcactctccgtggacatttaatttggatttaataaattattattattattttaattgcacatgatatttgtacatatttatg

SEQ ID NO: 948131 - DNA, 543 bp, Homo sapiens
tggtgagagagggagcaagagataggagggaaggtcccagactccttaacaaccagatcttgagtgaactgagcaagaattcactcatcaccaaggggacagtgctaagccattcatgagggatctgcctccatgaccccaatacctccactaggctccatgacccacattggccgttacatttctttttctttttttttgagatggagttttgctcttgttgcccaggctggatggagtgcaatggggtgatcttggctcactgcaacctccacctcccgggttcaagcaattctcctgcctcagcctcccgagtagctgggattacaagtgggcaccatcacgcctggctaatttttgtgtttttagtagagacggggtttcaccatgttggccaggctggtctcgaactcctgacttcaggtgatccgcctgccttggcatcccatagtgctggaattacagrcgtgaaccaccgcgcccagccagggattacatttcaacatgagatttgaaggggacaaacatccaaaccatatcagg

SEQ ID NO: 948132 - DNA, 543 bp, Homo sapiens
tggtgagagagggagcaagagataggagggaaggtcccagactccttaacaaccagatcttgagtgaactgagcaagaattcactcatcaccaaggggacagtgctaagccattcatgagggatctgcctccatgaccccaatacctccactaggctccatgacccacattggccgttacatttctttttctttttttttgagatggagttttgctcttgttgcccaggctggatggagtgcaatggggtgatcttggctcactgcaacctccacctcccgggttcaagcaattctcctgcctcagcctcccgagtagctgggattacaagtgggcaccatcacgcctggctaatttttgtgtttttagtagagacggggtttcaccatgttggccaggctggtctcgaactcctgacttcaggtgatccgcctgccttggcatcccatagtgctggaattacagaygtgaaccaccgcgcccagccagggattacatttcaacatgagatttgaaggggacaaacatccaaaccatatcagg

SEQ ID NO: 948133 - DNA, 732 bp, Homo sapiens
gtctgtaattctaatctgacttccagagccttcattgttaactctaagtgatgctgctaagatgctgtgtttcttctattaaaaaaaaaaaaaaaaattgkggggggagccggggacggtggctcatgcctgtaataccagcactttgggaggctcaggcgggtggatcaaggggtcaagaaatcgagaccatcctggccaacatggtgataccccgtctttactaaaaatacaaaaaaaaaaaatagctcacacctgtagtcccagatacttgggaggctgaggcaggagaatcacttgaaccccagaggcagaggttgcagtaagccaagatcatgccactgcactcctgcctggcaagagcaagactccatccgaaaaaaaaatgtggctaggcgcggtggctcacacctgtaatcccagcgctttgggaggccaaggcggccagatcacttgagatcaggagtgtgaaaccagcctggccaatgtggtgaaaccatgtctctactaaaaatacaaaaaattagccaggcgtggttgtgggcacctgtaatcccagctacctgggagtttgaggcaggagagttgcttgaatctgggaggcagaggttgcagtgagccgagatcgtgccattgcactccagcctgggtgacagagcaagacacaagacattatctgaaaaaacaaaaaaaaaaaagtgtgaacaatcttagaaacaaatctctgccgct

SEQ ID NO: 948134 - DNA, 732 bp, Homo sapiens
gtctgtaattctaatctgacttccagagccttcattgttaactctaagtgatgctgctaagatgctgtgtttcttctattaaaaaaaaaaaaaaaaattggkgggggagccggggacggtggctcatgcctgtaataccagcactttgggaggctcaggcgggtggatcaaggggtcaagaaatcgagaccatcctggccaacatggtgataccccgtctttactaaaaatacaaaaaaaaaaaatagctcacacctgtagtcccagatacttgggaggctgaggcaggagaatcacttgaaccccagaggcagaggttgcagtaagccaagatcatgccactgcactcctgcctggcaagagcaagactccatccgaaaaaaaaatgtggctaggcgcggtggctcacacctgtaatcccagcgctttgggaggccaaggcggccagatcacttgagatcaggagtgtgaaaccagcctggccaatgtggtgaaaccatgtctctactaaaaatacaaaaaattagccaggcgtggttgtgggcacctgtaatcccagctacctgggagtttgaggcaggagagttgcttgaatctgggaggcagaggttgcagtgagccgagatcgtgccattgcactccagcctgggtgacagagcaagacacaagacattatctgaaaaaacaaaaaaaaaaaagtgtgaacaatcttagaaacaaatctctgccgct

SEQ ID NO: 948135 - DNA, 619 bp, Homo sapiens
gcaagactccatccgaaaaaaaaatgtggctaggcgcggtggctcacacctgtaatcccagcgctttgggaggccaaggcggccagatcacttgagatcaggagtgtgaaaccagcctggccaatgtggtgaaaccatgtctctactaaaaatacaaaaaattagccaggcgtggttgtgggcacctgtaatcccagctacctgggagtttgaggcaggagagttgcttgaatctgggaggcagaggttgcagtgagccgagatcgtgccattgcactccagcctgggtgacagagcaagacacaagacattatctgaaaaaacaaaaaaaaaaaagtgtgaacaatcttagaaacaaatctctgccgctcttcctgcttctcatcccaagaacgacccacagagaccagtttcccccattcctgtctccctaaatgcgctgtcctctctccctgcctggctgcagccacttgttttcatgaagacttccgcgggcktccaggatggacacatctggtattcgatcttcagccgctgcgctcgcagcagcttcacccgcgtccagagggtgtcctgctgcttctccctgctgctgtgcaccatgctgaccagcatcatg

SEQ ID NO: 948136 - DNA, 619 bp, Homo sapiens
gcaagactccatccgaaaaaaaaatgtggctaggcgcggtggctcacacctgtaatcccagcgctttgggaggccaaggcggccagatcacttgagatcaggagtgtgaaaccagcctggccaatgtggtgaaaccatgtctctactaaaaatacaaaaaattagccaggcgtggttgtgggcacctgtaatcccagctacctgggagtttgaggcaggagagttgcttgaatctgggaggcagaggttgcagtgagccgagatcgtgccattgcactccagcctgggtgacagagcaagacacaagacattatctgaaaaaacaaaaaaaaaaaagtgtgaacaatcttagaaacaaatctctgccgctcttcctgcttctcatcccaagaacgacccacagagaccagtttcccccattcctgtctccctaaatgcgctgtcctctctccctgcctggctgcagccacttgttttcatgaagacttccgcgggcttccaggatkgacacatctggtattcgatcttcagccgctgcgctcgcagcagcttcacccgcgtccagagggtgtcctgctgcttctccctgctgctgtgcaccatgctgaccagcatcatg

SEQ ID NO: 948137 - DNA, 619 bp, Homo sapiens
gcaagactccatccgaaaaaaaaatgtggctaggcgcggtggctcacacctgtaatcccagcgctttgggaggccaaggcggccagatcacttgagatcaggagtgtgaaaccagcctggccaatgtggtgaaaccatgtctctactaaaaatacaaaaaattagccaggcgtggttgtgggcacctgtaatcccagctacctgggagtttgaggcaggagagttgcttgaatctgggaggcagaggttgcagtgagccgagatcgtgccattgcactccagcctgggtgacagagcaagacacaagacattatctgaaaaaacaaaaaaaaaaaagtgtgaacaatcttagaaacaaatctctgccgctcttcctgcttctcatcccaagaacgacccacagagaccagtttcccccattcctgtctccctaaatgcgctgtcctctctccctgcctggctgcagccacttgttttcatgaagacttccgcgggcttccaggatggacacatctggtattcgatcttcakccgctgcgctcgcagcagcttcacccgcgtccagagggtgtcctgctgcttctccctgctgctgtgcaccatgctgaccagcatcatg

SEQ ID NO: 948138 - DNA, 557 bp, Homo sapiens
gataaagaaaagagagtaaaaatacaaattagagtcataagtgaaacatcattacagatacataaaagtttaacatattacaattcttttctaaagagaatttaatacacaattccagcacaacaaatttgaaaacctagagaaaaaattgatgatcttctaacaaaatacaagttttaataatgacccaaaaagaattgaaaaactcgtacaacaaatactaaaataggcagagtaagatggcagaatagaagactccactgatcattccccctgcaaacacacgagtttaacaactatttgcacccaaaaaacaccttcaaaggaaccaaaaatcaggtgagcattcacggtacctggttttaagcacatttggctgaaagaggcagtgaagtggcaggaaaaatagtcttgaatcaccaatgccacccctctcccatcctccagcagtggcaacatggtgcagagagcatttttgtgmgttcagagcagaagaactcagcaattgtaaggcactgaactcagcactggcctgttatagcagaaacaaaaaccag

SEQ ID NO: 948139 - DNA, 552 bp, Homo sapiens
aagaattctaagatgacccaccaacattcccagccattggtgtacacataccttctcccagttattcaatctaggtactgtggtgaaggggtttgcagatgtawttaagttctccaatcaattgacctagaaatagggattatttaggcaagcctgatctaatcacatgaacactttaaaagttttctcaggctttccgagtcctggcccacgggcgttgggtatgagcagcgccctccgccctccgccctaagggttcgtggcccaccgctccttcgcagtccctgccgccaccgtccacgctctgcgttgtagagaagacagtgggtcggaagagcgccatcgccgccagtgtatgtggggccctttttatcaggtactgcatctacttttaccacaaaagacgaagtgaccccaatttcaagaacaggcttcgagaacgaagaaagaaacagaagcttcccaaggagagagctgggttttccaagttacctgaccttaaagatgctgacgctgttcagaaattcttccttgaagaaacacagcttggtg

SEQ ID NO: 948140 - DNA, 611 bp, Homo sapiens
ttttttcatatgtttgtgggcctcataaatgtcttcttatgaaaagtgtctattcatatccttcacccactttttgatggcgttctttgtttttttttcttgtaaatttgtttaagttctttatagattctgcrtatcagccctttgtcagatggatagcttgtaaaaatttcctcccattctgtatgttgcttgttcactctaatgacagtttcttttgctgtgcagaagctctttagtttaattagatttcatttgtcaattttggcttctcttgccattgcttttggtgttttagtcatgaagtctttgcccacgcctatgatctgaatggcattgcctagattttcttctagggttttaatggttttagttcttatgtttaagtctttaattcattaatccatcttgagttaatttttgtataaggtgtaaggaaggggtccagtttcagttttctgcatatggctagccagttttcccaacaccatttattaaatatggaatcctttccccattgcatgtttttgtcaggtttgtcaaagatcagacggttgtagatgtgtagcattatttctgaggcctctgttctattccattggtctatgtat

SEQ ID NO: 948141 - DNA, 639 bp, Homo sapiens
aaattgaaagcgcaagctggttccaggcagatcaatgctcccaacccagaaggtttgggggttgttagaaagccttttcccagatagcctcacatctgagtcttaagtctggcagccacgctaatcgtttttttaactggccgacaagcaccctgtattttcctctgattctaaggaaggatagcaagcgaaagtagtccaatattactcaccgctttggagagtcccttcgtggttgccaaaatgttaccagggtgtccttgctcctagagctcccaagatgttggcggccacttccaagatggcagcaagcctcttgttctctgacctggggttcttggcctcacggattccaaggaatggaatcttgggccatgtggtgagtgttatagctctattagaagccatgggtcatggaacagaaccgtggaacccagcgactagtgttcagcttgattaggatgaacttgggcacttagctgtgcaggaacaatggcaagcctttagcccgatcgggagtggcaatgggtgcctcgctggatcaggagcacagtggacaccctgctggatytggaggggtggaagtcagcatcagcggcgggtctgcgatggcggcaaacaacagtggtggatggcaag

SEQ ID NO: 948142 - DNA, 780 bp, Homo sapiens
atttgaggaagaaccaaataggaatgagaattttaacatttaaaaacccaataaaaaatgraaaagtcattcagataggtttaatagcaaattcaacacaggtaaagagataattaatgaactggaaggtagattagaagaaactacccagaatgaataagaaagagataaaacaatggaaaatataaaggtgagaaaaatacaatgagcagacttaacatatttctaggagtcctagaaagagaagttagaagaacagcaaagtcatctcctaaaaatatggaaaaaaggaagtacaaaaatcagagcaaaaattaatgaaacaaaaaaatacaatagacaagatttaaaaggtaacaatttttaccttttaaatgataaaattgataaacttctgctgagacagatgaagacaaaaaatgggaaaggcacagataactcatgtcagtaatgaaaaagagaacatctgtggagaaaggagaacccttgtacactgttgggagtgtatgttagtactgccatcatgaaaaactatttgaaagttactttaaaaactaaaactagattatcatatgaccaagtaactccacttctgggtgtttatccaaatattgaaatcagattgtctaagacatgtccttactcccatgttcactgcagcactatttacactagccaagttatggaatcaacctaagtgtctatcaatggatgaatggataaataaaatgtagtatatacatgcaatgggataattcagcctttaaacagaaggaaatt

SEQ ID NO: 948143 - DNA, 498 bp, Homo sapiens
agctgaaccaagcaaggttttgctccctgctgtgacagggcagcactgagttcaatgccaagacccctagtcactgtgcttgccctgcctcaagtgcacagattgtttctctatgccatgtggccactgccagggagtggaggagaagtggcataggcaattcaagactgtctttcctaccctcttcaatgtctctttcagcaatatgaagttaaaatcaggtactgtgattgctcacctgatttttgttttttgtgatagtgcttttttgtgtgtagttagttgttaaaatttagtgttcctttggtggggggataattgttgcaggcttctgtttggccatcttgctttgcccgctcattttcttgataatctgtaccttttgtctttgttcttgatcagtctagatatgtcaacttcaatactcttttcaaagaacagctttgttttaatcaattttccytatagtttgtctattttttctcattgaattctgtc

SEQ ID NO: 948144 - DNA, 630 bp, Homo sapiens
tattaccagaattgtttctctgttccttctcatttgggtagactatgtcagagggaagatctgggacttaagggctgctgttcacattcttttgtcccataggggtgctcccttaatttggtgttctcccctttcccctagggatgaggcttcctgagacctgaactgcaatgactgattttgctcttctgggtctagccacccagtgtagctacagggctctgggctaatactggaaagtgtctgcaaagagtgctgtgatgtgatctgtcttcaggtctttcagccacagataccagcacctgctccggtggaggtagcaggggagttaagtggagtctgtgagggtccttagttgtatttttgtttagtgcactggttttgtgttggttggcctgcagccaggaggtggcatgttcaagagcacatcaactacagtactagaaggaggatgtatacttgccctggggttgtctggttacgtattcaggtttctcaggtggtgggcagcgccatagagctctcaggatattatgtccttygtctttggcaaccagaacgggtagagaaagaccaccaggtgggggcagagataggtttgtctgagctcagactctccttgggtggagc

SEQ ID NO: 948145 - DNA, 630 bp, Homo sapiens
tattaccagaattgtttctctgttccttctcatttgggtagactatgtcagagggaagatctgggacttaagggctgctgttcacattcttttgtcccataggggtgctcccttaatttggtgttctcccctttcccctagggatgaggcttcctgagacctgaactgcaatgactgattttgctcttctgggtctagccacccagtgtagctacagggctctgggctaatactggaaagtgtctgcaaagagtgctgtgatgtgatctgtcttcaggtctttcagccacagataccagcacctgctccggtggaggtagcaggggagttaagtggagtctgtgagggtccttagttgtatttttgtttagtgcactggttttgtgttggttggcctgcagccaggaggtggcatgttcaagagcacatcaactacagtactagaaggaggatgtatacttgccctggggttgtctggttacgtattcaggtttctcaggtggtgggcagcgccatagagctctcaggatattatgtcctttgtctttggcaaccagaacgggtagagaaagaccaccaggtgggggcagagataggtwtgtctgagctcagactctccttgggtggagc

SEQ ID NO: 948146 - DNA, 588 bp, Homo sapiens
cctgttaggaaacctgctgggttaagggaatagtggttaatgttaaatcatcttttttttttttttctttaggataattctgaactagtgaggtgtgctcacaatgaggtttcctctaaaagttattttttttactttcttgtgttagcaaagcagttgtcgctacagattgaatgcatctgggccaactgcaggttactgagttaaggattttttataggaaggctacgggttatcagtggtctcagtgctttcaggatacgcccttgtttacactgacaacaaagtggtattggagtgttatagggttatggagaataacttcaattatcaattataggttttaaatttaccctggcttttaaaggaatagggtacaattttttttttaaactacttgtatatctctctccttctctcttcttgactccctctttgtctctctgtctcttcctctctgtctcttactctgtctctttacctcttttcctctctgtgtcttttttytctctctctctattggtctttccttgcctctgtcagccacttatgctgctgttctctcaaccactgtaggggggcgtctaa

SEQ ID NO: 948147 - DNA, 668 bp, Homo sapiens
agcagaaaaccttggagcacttgtttctcatctcacatgaagtaggggagttaatgggaacctgggtgtgggaggggctgaaggatggggatcttgctttgtaatgtgagaatgtaagaagaacgtgaccttctactgttttcctaggttggaggggaccggccaaaccccaaggaaagtggagagaagaaaggcatggaggggttctgtggagggtgtggaaagggaggatgtgtaaatcccagcgtgggtttggagaacctaagtaggttggcttccctggggtttaaatcacagaggtgttgggaggtgagcccgaaatggaaataggccgcatcttgaagaatcccacgtgcggtgctgagaagtttgcatatggaacaatggactaattttaaacaggggaatggcatagtcagatttggatttccaacagattgctccagtttcagtggagagaatgaagcagaggcgggatctttggtggcaactgtgcaggtgcaaggcgaggaaagtgcagcctaggtgagtgagagtaaarctagggaggaagagttggatatctgatatggcaggagtggaaccatagaaactggagatgcgttgggtcgatggatagaggtttgagtttcccagttaatggacgtacttctttgcagccattctga

SEQ ID NO: 948148 - DNA, 693 bp, Homo sapiens
cctggaagtccctggagggcagcacccggggagggcatggaagctccataccctgtttcctatacctcgccctacgcatttcttcatctgtctcctttgtaatatgctttatagtgtgttkccctgagttctgtgaggcactctagcaaatcaattgaatccaaagagggggtcctgggaaccttaacttgaagccagttgatcagaagcaagttctggaggccggcacttgcaactggtttgtgtgtcaggggttagtcttggggactgagagcccaacctgtgggatctgacactatctccaggtagagtatgggaactgaattggaggacacccagttggtgtctgcagcttggtgagtggggaaaactcccacacatttggtcacagaagtcttctgtgttgatgatggttgttctggtggtatgagatggaggaaaaagttagagttttccctacaaatatcttgataagcaagaaggtaatagaagcttaaaacaataagcaaggaagttatagtcagagatatttgattcccctgtggaaactaaagataacctctaaatgtcacagtaagtagctggtcggacatgagaggttgggagagagctcccccgactcccaccaggaacgtccagcaaacattaggtgatggtcaggaagttgttaagctctccctctaaaataataat

SEQ ID NO: 948149 - DNA, 639 bp, Homo sapiens
gtcatgtcagtgtcagcatttgtggtaatggtttgggatgtggaagggggagtgagaagggagataatccttcttcttctccttcttcttctgagacagggtcttgctttgctctctctcccaggttggagtgcagtagcatgatcatggctcactgcagccttgaactcctgggctcaagcaatcctcctggctcagcctcctgagtagctcaggctacaggcgtggaccaccccacctggataattttattttttactttgtaaagatagggcctcgctgtgttgcccaggctggtctcagactcctaggttcaaatgatcctacagccttggccactgcacccagtcttgatctgacttttgaagcactatgtatttaccgtactccagcctgggcaacagagagacatcctgtttctaaataagtgttatctcttagtgctatttctattcttgttgtcagcttgcaagttgatagctggggtcaaaagtgtgacagttgtttgagtcagatttggaccagaacattttctgccacttattccaaggagatggcaagggtcagcggggggtcctaaaagtctcgggkccagacattaagtttctgccttctgtaagtcacccaaagatccccaaa

SEQ ID NO: 948150 - DNA, 580 bp, Homo sapiens
ggaggacagagcttgatttgtaccatggctttttcacacatggagggtggtgtcttttttctggaagcggtaagargattctgtgctgtccctagggatgtaagtcttgaccttattcctttccactaaagaaacaatttaaaaatccaaagccaatttcctaataccactctgggcattttaaccagagttgaagctactgaaaatacagtagctaccatgctaggaatgttgtaaggatgatctcatttatccctgtataatgctatgaggaaggttctattatcttccacttttgcaggtgatctaacaggctcagggaggtgaagaaacttgcccaggattctgtttctgtatataccagagtctgacctgtctggctgtgtttcttagtcactgtgccatcctgcccccgcctcccaccaccattatacagatgaagacatcggggcttgtcaattttttttaatacaataattttattattttttaaaattagatatggagtcttactgtgtttgccaggttggtcttgagctcttggcctcacgcaatcctcccgcctcagcctcccaaaggg

SEQ ID NO: 948151 - DNA, 440 bp, Homo sapiens
atccatctagtgcagggtctgcaaaatatctcaagcactgatcttaggttttacagtagtgatgttatccccggggccaatttgggaaggtttatactcttggagtcagaggctgcatgacccctaaacagtaatttctaatcttgcagctaatttgttagtcctgcaaagacagactggtccctaggcaaaaggggggtctcttcaggaaagagctgctattaattttgtttcagagtcaaaccatgaactgaattccttcccaaagttacttcagcttatgcccaagaatggacaaagacagcttaaagrttagaagcaagatggagtcaggtagatatgatttctttgactgtcataatttcctcagttataattttgcaaagacagttttatcataagtacaaagaacagggcctgggacataggtgcccactaaa

SEQ ID NO: 948152 - DNA, 479 bp, Homo sapiens
agaagtaaaatgctcagttcaagagtggttataactatgctgtgatcagttaatttctctgaagacaatgggctcaagctacaattttgccaattttgttgatattttgtaagaaccgacttttgattttgttgcttttctctactgttgttctgttctctatttcatttatttccactgtgatctatattagttccttcattctgcttgctttggatttaattttcttttattatactttaaattttagggtacatgtgcacagcgtgcaggtttgttgcttatgtatacatgtgccatgttggtgtgctgcacccattaactcatcatttagcattaggtatatctcctaatgctatccatccccctgccccccaccccacaacasgccccagggtgtgatgttccccttcctgtgtccatgtgttctcgttgttcaattcccacctatgagtgagaacatgcggtgtttggttttt

SEQ ID NO: 948153 - DNA, 538 bp, Homo sapiens
tctattcttcctccaaatagagcacttaatgctcatgcaatatatttaggagttatattgcttcatttcatgctcatggataggaagaatcaatatcgtgaaaatggccatactgcccaaacttatttatagattcaatgctgtccccatcaggctaccattgactttcttcacagaattagaaaaaactactttaaacttcatatggaaccaaaaaagagcccacatagccaaggcaatcctaagcaaaaagaacaaagctggaggcctcaaggctacctgactttaaactatactacaaggctacagtaacaaaaacagcatggtactggtaccaacacagatatatagaccaatggaacggaacagaggcctcagaaacaacactgcacatctaaaaccatttgatctttgacaaacctgacaaaaacaagcaatggggaaaggattccctatttwaaaaaatgtgttgggaaaactggctagccatatgcagaaaactgaaactggaccccttccttacaccttatacaaaaat

SEQ ID NO: 948154 - DNA, 611 bp, Homo sapiens
aacagcttgtgcagcagcctggacctattgcagagacttctgctcttctgggtccttcttaaacataatgaattttcagattgctcagcaaatgagytgatataagacacacaaagaggaagatgatgcctccaaattcccaagaggcctactgagcattgtgcctcatttttggtagtagaaggaaaaagatgcaagaacttacccttcacatgagaagggatatttcaacatgccccataccactggacccttagaaatttcatggaggcagaaggcccctgaattttagacaaatttatttcctaccctctgacactcaaatgttgtaccaacaagcccagagtggttgctacttctcgctcactaggtccaatcagcataatgtcatcaataaacagaacagagtaatatctcatggaagagaaaggtaatcacatctctgtgaactaaattatgacttagagctggagaactgatagaaccccaaggaacaatagtgaggcatgttgctggccttgccagctaaaagcaaactgtttcttatgagcgttatggacaggcatggagaaaaatgaatttaccagataaatagctacatgtcagttctc

SEQ ID NO: 948155 - DNA, 611 bp, Homo sapiens
aacagcttgtgcagcagcctggacctattgcagagacttctgctcttctgggtccttcttaaacataatgaattttcagattgctcagcaaatgagctgatataagacacacaaagaggaagatgatgcctccaaattcccaagaggcctactgagcattgtgcctcatttttggtagtagaaggaaaaagatgcaagaacttacccttcacatgagaagggatatttcaacatgccccataccactggacccttagaaatttcatggaggcagaaggcccctgaattttagacaaatttatttcctaccctctgacactcaaatgttgtaccaacaagcccagagtggttgctacttctcgctcactaggtccaatcagcataatgtcatcaataaacagaacagagtaatatctcatggaagagaaaggtaatcacatctctgtgaactaaattatgacttagagctggagaactgatagamccccaaggaacaatagtgaggcatgttgctggccttgccagctaaaagcaaactgtttcttatgagcgttatggacaggcatggagaaaaatgaatttaccagataaatagctacatgtcagttctc

SEQ ID NO: 948156 - DNA, 593 bp, Homo sapiens
gtataattcttatatccccttgatgagttaattgctttatcactatataataaccttctttgtgtcttttaacagtttttgacataaagtctgttttctctgaaataatagatgtagctacctctgcttttacattccacgtgcatggaatatcttttaaaaaatattttattttatttttattttagatccagaaggtacatgcgtgggtttgttatgtggatatattgcatgatgcagatgttatccattcgtctaattttttttcaaagtttttaacttctttgccattggttcaaacttcctcctgtagctcggagtagtttgatcatctgaagccttcttctctcaactcgtcaaagtcattctccatccagctttgttctgttgctggtgaggagctgcattcctttggaggaggagaggtgctctgatttttagagtttccagtttttctgctctgttttttgcccacctttgtggtattatctacctttggtctttgatgatggtgatgtacagatgggttttgstgtcccatctgtacaccttgatgtccttcctgtttgttggtttatgttctaaccgacagg

SEQ ID NO: 948157 - DNA, 693 bp, Homo sapiens
taaccatcctgcagctctgtgcagaccttacatctgatcttgcttcagctttgaccatcctgcagctctgaccagaycccacgcaggtctgatctcactgcacatctgactgctgcagctctaaccatgccgcaggaagtgaaggagacgagagagagaactaaggctgcaatgctgtttgcatagcttgttggcacggccgccaggaatcttggatccaaagttaggagtgctgctgctgcttctcccagggatgggtctgcctcagtatccctgcagagtcagtcctggggtgttggggcagccgtgcacatgtggtctctgtggccggtgttccagtgggtttcagagcagcggctgaaactgtcaatgaaacccccaatgtctgacatctcaggaggcttctcaggtctcccacatggcagcttttttttttcctctttaaaataaaaactttttttcatccttcactaagaaatagcatttccctatacacctgacctcagcaatgtacaccgtaccaaataattacaaatggtaagtgcttttgtgaaaagataatcaacatgccagataaggaaagaaatacaacattaaaaaaaaagaggccataattgtccatacatttggcaaacatacaaagaaaatggacaatactgacacgtttcagggtatcgggcaaaaggattctct

SEQ ID NO: 948158 - DNA, 693 bp, Homo sapiens
taaccatcctgcagctctgtgcagaccttacatctgatcttgcttcagctttgaccatcctgcagctctgaccagatcccacgcagktctgatctcactgcacatctgactgctgcagctctaaccatgccgcaggaagtgaaggagacgagagagagaactaaggctgcaatgctgtttgcatagcttgttggcacggccgccaggaatcttggatccaaagttaggagtgctgctgctgcttctcccagggatgggtctgcctcagtatccctgcagagtcagtcctggggtgttggggcagccgtgcacatgtggtctctgtggccggtgttccagtgggtttcagagcagcggctgaaactgtcaatgaaacccccaatgtctgacatctcaggaggcttctcaggtctcccacatggcagcttttttttttcctctttaaaataaaaactttttttcatccttcactaagaaatagcatttccctatacacctgacctcagcaatgtacaccgtaccaaataattacaaatggtaagtgcttttgtgaaaagataatcaacatgccagataaggaaagaaatacaacattaaaaaaaaagaggccataattgtccatacatttggcaaacatacaaagaaaatggacaatactgacacgtttcagggtatcgggcaaaaggattctct

SEQ ID NO: 948159 - DNA, 693 bp, Homo sapiens
taaccatcctgcagctctgtgcagaccttacatctgatcttgcttcagctttgaccatcctgcagctctgaccagatcccacgcaggkctgatctcactgcacatctgactgctgcagctctaaccatgccgcaggaagtgaaggagacgagagagagaactaaggctgcaatgctgtttgcatagcttgttggcacggccgccaggaatcttggatccaaagttaggagtgctgctgctgcttctcccagggatgggtctgcctcagtatccctgcagagtcagtcctggggtgttggggcagccgtgcacatgtggtctctgtggccggtgttccagtgggtttcagagcagcggctgaaactgtcaatgaaacccccaatgtctgacatctcaggaggcttctcaggtctcccacatggcagcttttttttttcctctttaaaataaaaactttttttcatccttcactaagaaatagcatttccctatacacctgacctcagcaatgtacaccgtaccaaataattacaaatggtaagtgcttttgtgaaaagataatcaacatgccagataaggaaagaaatacaacattaaaaaaaaagaggccataattgtccatacatttggcaaacatacaaagaaaatggacaatactgacacgtttcagggtatcgggcaaaaggattctct

SEQ ID NO: 948160 - DNA, 566 bp, Homo sapiens
cctgccctaacaggaaattaaggggctgacctggtgtgccttatatggaatccttctttcacctgggggatggcctgaacccattacccaacccatggctgggggtccctcacacaggaaacgttcatactggcacatgtcctgtggcttgtgtctgccccatctccaggctatgcctgcctggccatcactctggcacagggagcccaacctcatgttccctccagcatcccagagaaaacccggcctggggtagctcctagctcttcagatggaaggcacaaattcagtccacccctgtgataggaaacacattcagatttattacttacaggtcctggacagggagggcgcctgtggggaggacagtgctctgtccacaggtagcaagaggcaggaaagaaggctcaggcagagaggggtctcgtgggccagcacctttattggggctcagggcgtcatccaggcaggtttcccgtgrggagttttaattggtgggtttagagcaggcaggcacaagctccacggggtcccgctgtgactgagggcatcactgtggtacatct

SEQ ID NO: 948161 - DNA, 719 bp, Homo sapiens
ggaaactttgggccatgcagggcccccagttcgcaggcatcctcactccactctggcctcgttcggctgccaggacrctcttggtccagctcctccatgcgggaacttgggtagccggtcagggttggggttgagggggccacacagccagctcctcagcggtcagctccacctgcccctccctccccagcgcacactggctccgtctgtccccacagacgccccaccctgctgtgttgttgaccagcatcagcccctgccgcagtgagtgctccttccttgggaagcccccgttgtccctactgggtcaggagtcccgtccgacctgggcaggtgctgcctcgggctctgtagaggggtggataccactggcctgggctgtagaggcgtcctgggaggtgcagggtgcactggaaagttggaggaggccgtttccagccagtgtcctggtcctagctcgtgtcttctcccaacagaggggtcatgacgctgcacgtgtgtccctgcctgggtgtctctccctgtgctgagggctgtgttctggggaagcaccccctccttgctccctgtaggagccaggccccatggggaggagccacctggccacaggagggaagccgggcagccccagccctgcatcctctgtacctgccctggccggcccccacacccacaccgttctccctacgaatgtccactgagtatctgctgtatgccag

SEQ ID NO: 948162 - DNA, 600 bp, Homo sapiens
aaatcctttatttctttctcttttctgattcctctagctgagactcccagtactatgttgaataacaggggtgaaagtgggcatccttgtcatgttccagatcttagaggaaaggctttcagcttttccccatttactgtgggtttgtcatatatggtttttattatattgatgtttgttccctctatattcaatttttgaggttttttttttcatgaaaggatggttgaattttatcaaatacttttcagcatcaattgatatgatcatatggtttttatccttcattctgatgatataatgtatacattgattgattcatatatgttgaaccatccttgcatccctgggagaaatcccacttggtcatgatggataatctttttaatgtattcttgaatttggtttgcaagtattttattaagtgtttttgcatcaatattcatcaaggatattggcctgtaatttctttttttttatgtgtctttgtctrgttttggtatcagggtaatactggcctcatagaatgagtttggaagtattccttcctcctctatttttcagaacagtttgagtagggttagtattagttcttcttta

SEQ ID NO: 948163 - DNA, 539 bp, Homo sapiens
aaggggtcagtatcacaacgactctcagaacctggctgttacatcctatttggtcacatataagtagaaaataatacccagcccagcacttagtaatgtcttttctctgaagctcttggtgaaaactagtgacgacaatagcaaagtgcaaactgatgctctggtttaatctgtttcagaagttacagaaagaggaaattgaatttatttgaaagccaactttaaagggaaataaaaagataaatgtcttttctaagctaaaaaaaaaaaccccaaagcaatgcaacagtttcagaaactaattgtataagtgtactgttattaccagtctcttttcccctggttgaaacaatcttccataacaacatttacaactataatattgcgtaacaagcactgttacggtgtaatgtcttttaaataggggttagataggagagaagtgagtatccattatcttattatcataacatccgtcagtcttccagacaaaacamcatcatcccactgggagctaaggacggtttttacttaaacac

SEQ ID NO: 948164 - DNA, 628 bp, Homo sapiens
actgtgagtcaattaaacctcttttcttcataaatgacccagtctcatgtagttctttatataagtgtgaaaatgaactaatacagaaaattgataccagtagtttggggcactgctataaagatacctgaaaatgtggaagcaactttggaactgggtaacagacagacattgaaacagtttggaaggctcagaagaagacaggaagatgtcaaatgtttagaattttctagagacttgttgaattgttttgaccaagatgctgatagtgacatgaacaataaagtcaaggctgaggtggtctcagatggagatgaggaacttattgggaactggagtaaaggtcactcttgctatgctttagcaaatagactggtggcattttgcccttgccctggagatctgtggaactttgaacttgagagagatgatttagggtatccggcagaagaaatttctaagcagcaaagcattcaagaggtgacctcactttttatgaaagcgtacagtcacatgtattcacaaagagatgatacaaaatgggaacttatgtttaaaagggaagcagaatataaaagtttggaaaatttgcagtctgacratgtggtagaaaacaaaaacccatttt

SEQ ID NO: 948165 - DNA, 530 bp, Homo sapiens
aacatataattctccaagattcaatcaggaagaactaaaaatgctgaacataccaataacaagcaacaagattgaatcagtaaaaaaaaaaaattgccaacaacagtaaaaaagcttagggccagatggattcacagttgaattctactggacatttgtattagtcaaggttctctagagggacacaactaataggatagatgcatatgtgagtttattaggagaactgactcacacgatcacaaggtgaagtccctcaataggccatctgcaagctgaggagccaggaacccagtctgagtcccaaaacctcaaaagtagggaagctgagagtgcagccttcggtctgtggccaaagcctgaaagccactgactaatcactggtgtaagtctaagagtccaaaatctaaagaacttggagtctgaagtttgagggcaggaagtatccagcrcgggagaaagatggaggccagtagacttagccagtctagtctttccatgttcttctgcctgcttttattctgaccatg

SEQ ID NO: 948166 - DNA, 605 bp, Homo sapiens
gactacaggtatccaccaccacgcccggctattttttttttttttgtatttttagtagagacggggtttcacygtgttagccaggatggtctctatctcctgaccttgtgatccgctcgcctcggcctcccaaagtgctgggattacaggcgtgagccaccgcacccggcctcttgtccctattttttgttttgctgctctgccctccctttctatcccaagccttttccaaagatgctgtgcatacaggtgtgtcaataacactatgctccaagtgaataagtgaatggcattgtgcattgtgtctttaattttctttttgtctgtagagatggggtttcactatgttgcccacagttatcttgaattcctggccttcagcgatcctgctgccttggactcccaaaatgctgggattatatgtgttagttatggtgcctggcccatggtatcttttgaactactgatttatggattatgctgattaaatttgatgacccctattttacaagcaaggaaactggggcacacagaagttaaataatttgcccaagatggaggtctggctctggaagcattgctctaaagcactttacgaggttgcc

SEQ ID NO: 948167 - DNA, 605 bp, Homo sapiens
gactacaggtatccaccaccacgcccggctattttttttttttttgtatttttagtagagacggggtttcactgtgttagccaggatggtctckatctcctgaccttgtgatccgctcgcctcggcctcccaaagtgctgggattacaggcgtgagccaccgcacccggcctcttgtccctattttttgttttgctgctctgccctccctttctatcccaagccttttccaaagatgctgtgcatacaggtgtgtcaataacactatgctccaagtgaataagtgaatggcattgtgcattgtgtctttaattttctttttgtctgtagagatggggtttcactatgttgcccacagttatcttgaattcctggccttcagcgatcctgctgccttggactcccaaaatgctgggattatatgtgttagttatggtgcctggcccatggtatcttttgaactactgatttatggattatgctgattaaatttgatgacccctattttacaagcaaggaaactggggcacacagaagttaaataatttgcccaagatggaggtctggctctggaagcattgctctaaagcactttacgaggttgcc

SEQ ID NO: 948168 - DNA, 403 bp, Homo sapiens
tgcaaactccaccttccaggttcaagtgagtctgctgtctcagcctcccaagtacctgggattacaggcacccaccacgcctggctaatcttgtatttttagtagggatgggatttcaccgtgttggtcaggctggtctcgaactcctgaccttaggtgatctgctcacctcagcctcccaaagtactgggattacaggcgtgagccaccatgcccggcctattttttaattttttgtagagatgggggtctcactgtattgccgggctggtcttgaacacctggctcaagcgatcctcttgtcttggccttccaaagttctgggatgacaggcgtgasgtgccgctcccagccaggaacctctcctaaagccctgtcttgactcagtgcagggtgtgcttgg

SEQ ID NO: 948169 - DNA, 403 bp, Homo sapiens
tgcaaactccaccttccaggttcaagtgagtctgctgtctcagcctcccaagtacctgggattacaggcacccaccacgcctggctaatcttgtatttttagtagggatgggatttcaccgtgttggtcaggctggtctcgaactcctgaccttaggtgatctgctcacctcagcctcccaaagtactgggattacaggcgtgagccaccatgcccggcctattttttaattttttgtagagatgggggtctcactgtattgccgggctggtcttgaacacctggctcaagcgatcctcttgtcttggccttccaaagttctgggatgacaggcgtgacstgccgctcccagccaggaacctctcctaaagccctgtcttgactcagtgcagggtgtgcttgg

SEQ ID NO: 948170 - DNA, 621 bp, Homo sapiens
gcaggtcagcacagagagagagagagttccttttgtatgggggaaagtaagaaaaaaaaaaaaacactatctgtctggtaatccagataattacttcagtctcatccaagaccactaaggcagtacctctacaagactgcaaggactacaatgttactggacttgaagttcaccctaaagaagatatggctgcaatgaccaaaatcttatatcgcagcacccaagtccatttgaatacctggaaagccttcccaagaaaatggtacagccaagcctgattgtgaagactacagtaatacctaattcttcaatgcctagacattgagaaacatccacaagcatgatggccctccaggaaaacattacttcatcaaatgaattaaataaggcaccggggcagtcccagagagatggagatatgagactttttagacagataattcaaaatagttgctttggatgggcgcagtggctcatgcctgtaaccccagcactttgagaagccaaggygagcatatcacaaggtcaggaggtcgagaccatcctggctaacatggtgaaacccagtctctactaaaattacagaaaaataaaaataaaaaaatatccgggtatggtggc

SEQ ID NO: 948171 - DNA, 634 bp, Homo sapiens
ttctatttttcattaacgtctgttcattactttcagcacagatcttcaacggtttatccttctgtttcttcagctcatgtatggtggtcattccaacagggtactcttctgtttcacacttacatcattgtccagtttctccaacagcatgactttctgtgctatagataaatacaaatccttcctttttttcttatcactgttactcacaggggtatctgctgacctttttgacattttcaacactatctttacatcacataagaagacaattcttccccatccatgaacactgaacatttttccatttgtttgcatcttcttcaatttctgttatcaatggtttatagttctcagtgtacaggtgtttcactggcttggtaaaagttattcctgaaaattttatttttttttatttgtaaatggaactgttttcctaatttctttcttggatagctcattgtcagtatatagcaatgcaacgaataaccaaaaaacatggtgagtaacgcacacacgtcttggccatgtggaacactgtagggaaactgccattggcacatccagcctgcacacatgacattttcttaytctttgtgggtgtgtgtggggaaatctgtgcgtgtgcagaaaa

SEQ ID NO: 948172 - DNA, 513 bp, Homo sapiens
ggggcagcaatgttcgcagcagtcagggcccctagccgaggctgcgcaacaagtaaatggagggtaggggctgagatacggccgactgcaggcagcgcctggcagggacccccactcatgccccgggctccttagagtagcaggtgggcgttactcagcctagtcaggtgggtcacttaattaatgagaaaaggaaccagatgaacaccccggggagtagttcccacggcctggggttgttcaccgggtaagtgagttcttatttgtaaagcacgtaggtgaaggccacacaggcagggcgaagtaaatgtttgcagaatggtcttgccacccatcacctggtaaggttttgaagctgttcatctttgacatggggtcaaggcatttctgcagacctgagtatcccgcatgtaaatcacccttcttatgtaaattattcccagaaatgtcctctaccgtttccagttgtagtttcaatgcgttgaatggagracagaggacacgtgtggagcc

SEQ ID NO: 948173 - DNA, 601 bp, Homo sapiens
gggattcaggatgtcatgtcctgaggcttcacagagcagcaggaccctgggccttaccsacaaaaccatttctgcctcccaggtcttcaggcctgtggtgggaggggctacagctaaggtctctgaaggcactttccccattgtcttgtctattaactttcagctcctgttatgcaaatttctgcaaccttctggatttcctccttggaaaatgagtttttcttttctaccacatgatcatgctgcaaatttttcaaacttttatgctcttcttcccttttaaatataaattccaatttcaggtcatttctttgtttatgcagatgcgtgtaggcttttagaagcagccaggtcacatcttgaattattttctgcttagagatttcttctgccagataccctaaatcatcactttcatgttcaaagttccagatctctagagcaggggcctaaagctgcttgtcttttcactgaggcatagcaagagtgacctttaccccagttcccaaaaagcttctcatctccatctgagaccacaatgtgtccatatcattatcagcattttggacacaactatttagcaagtctctaggaagttcca

SEQ ID NO: 948174 - DNA, 601 bp, Homo sapiens
gggattcaggatgtcatgtcctgaggcttcacagagcagcaggaccctgggccttacccacaaaaccatttctgcctccyaggtcttcaggcctgtggtgggaggggctacagctaaggtctctgaaggcactttccccattgtcttgtctattaactttcagctcctgttatgcaaatttctgcaaccttctggatttcctccttggaaaatgagtttttcttttctaccacatgatcatgctgcaaatttttcaaacttttatgctcttcttcccttttaaatataaattccaatttcaggtcatttctttgtttatgcagatgcgtgtaggcttttagaagcagccaggtcacatcttgaattattttctgcttagagatttcttctgccagataccctaaatcatcactttcatgttcaaagttccagatctctagagcaggggcctaaagctgcttgtcttttcactgaggcatagcaagagtgacctttaccccagttcccaaaaagcttctcatctccatctgagaccacaatgtgtccatatcattatcagcattttggacacaactatttagcaagtctctaggaagttcca

SEQ ID NO: 948175 - DNA, 596 bp, Homo sapiens
ttctccctgtggtctttccccaattccactggcagtcctccccaaggacccctgtgagaaaaagtcagaaatggcttccctgggaaygagagtacccacagggctctccccactgcttcctctacccctgtattttgcttggctctcttaaattcatctcagctccaggtaaggtcaaatccatctcacaagatctggaccttcgggttccccttctcacactttggtcgctcacagttttttggctgtctcacggagcctgcagtagcaagctgcttccatcaaagggtctgtggattctctcagcttttatgtttctgcagtatttcttggatcaaaagcccacgatgtgagtctctacaggctgctctgtccatccaagtcggagctgagagttagttctgcctcctacccgccattttttccccatcccttcttgtaagggcactaatctctttcatgaggggctccatttttataagctaatttcctccaaaggccccaccttctaataaatacgtcacatgggagattgaggcctcaatataggaattttgggggaacacaaacgttcactccacagcaacatcaaaaca

SEQ ID NO: 948176 - DNA, 596 bp, Homo sapiens
ttctccctgtggtctttccccaattccactggcagtcctccccaaggacccctgtgagaaaaagtcagaaatggcttccctgggaatgagagtacccacagggctctccccactgcttcctctacccctgtattttgcttggctctcttaaattcatctcagctccaggtaaggtcaaatccatctcacaagatctggaccttcgggttccccttctcacactttggtcgctcacagttttttggctgtctcacggagcctgcagtagcaagctgcttccatcaaagggtctgtggattctctcagcttttatgtttctgcagtatttcttggatcaaaagcccacgatgtgagtctctacaggctgctctgtccatccaagtcggagctgagagttagttctgcctcctacccgccattttttccccatcccttcttgtaagggcactaatctctttcatgaggggctccatttttataagctaatttcctccaaaggccccaccttctaataaatacgtcacatgggagattgaggcctcaatatakgaattttgggggaacacaaacgttcactccacagcaacatcaaaaca

SEQ ID NO: 948177 - DNA, 630 bp, Homo sapiens
acacccagccggcccttgccctgcytcggccctcaacttcagggctggctcaggcccaccgccatttctgtcatggagggcagaggaccacagtgttacagccttctctgtaccacgttcgatgggtcccatgctcttgtactgcatccaagaagaatgaggatatgttgacaatcagatagtgaggaggggctgggcacagtggctcaggcctgggaggctgaggtgggaggatcacttgagttcaaaagtctgagaccagcctggccaactggtgaaaccctgtctctactaaaaaaaaaaaaaaaaaaaaaaaaaaaaaaagccaggtgtggtgggcacctgtaattccagctacttgggaggctgaggcaagagaatcgcttgaacctgggatgtggaggttgcagtgagctgagatcacgccactgcactccagcctgggtgacagagtgagactctgtctcaaaaaataaaaatacaaaaattagccaggtgtggtggtgggcacctgtagtctcagctactcgggaggctgaggcaggtgaattggttgaacccaggaggtggttacagtgagccgaaattgtgtcactgcactccagcctgggtgacagagtgagactctgt

SEQ ID NO: 948178 - DNA, 656 bp, Homo sapiens
tgtcttacatggctggagaaaggggaagagaaaacagagggaagagccacacacttttaaacaactggatctcactcatagtgagaactcactcactatgaccagaaaagcaaggaggaaatccacccccatgacccagtcacctcccaccaggcctttctttttctttttctttctttttttttttttttttttttttttgagacagagtttcgctctgttgcccaggcttggagtgcaggtggtgcaattctttggcttccactggaaacttcgccttctggggttcaagtggattctcctggccttaggcctccttgagtagctgtgactacaggcacgtgccaccacacctggctaattttttgtacttttagtagggatggggttttgctgtgttagccaggatgcgctcggatcttctgacctcctgatctgcccacctcagcctcccaaagtgctggggttacaggtgtgagccaccacgcctggcctcaccaggcctttctttcagcactgggawttataattcaacatgagatttggatgggaatacagagccaaaccatatcagtgaccttgtctaggggaccccaaggctggatcctgcccactgcttagaaaatgcagttgctggatgagccaccactgctgtc

SEQ ID NO: 948179 - DNA, 694 bp, Homo sapiens
atttgaggaacttcccagatttctataagactgtggtaagatcaccattcacyattagacgctgcccacttctcctctattgtaatcaaaaatggttgtaaatgaaagagatgtctctcttttctctaagaaatcatcaggaataaatgccatcatgcctcatataccttagtaccaaaagtatatctctttcacaaatttgagaacccacatcatcaaagaacatgcggaaatatctccatatataaagatctatattctctaatcatctaaatccttccacctttttctctctctctctctttctttctcccttccttccttcctttccttcttccattcttcccttctttcctttctttccttcctttccttcctttcctttctctctttctctttctttctttcttttttgtttttgagatggagttttgctcttgtcacccaggctagagtgcaatggtgcgatcttggctcactgcaacctccgcctcccaggttcaagttattctcctgcctcagcctcccgagtagctgggattacaggcaccagccaccatacctggctaatttttgtatttttagtagagacagggtttcatcatgttggccaagctggtctcgaactcctgacctcaggtgatccacccgccttggtctcccaaagtgctggtattacaggcatgagccacca

SEQ ID NO: 948180 - DNA, 603 bp, Homo sapiens
gatggtgcccagcagattaagggtggatctgccttccctaagcccactgactcaaatgttaacctcttttggcaacaccctcacagacacacccaggatcaatactttgtatccttcaatccaatcaaattgrcactcagtattaaccatcaaagatcattttgcttttaaggctggaattatagttttatgacctgtgtgtcgaatcctgacactttaaaacagctagaacaaatataaaaattgtctgaacaataagtgcaggcaagaatgtatgctgacaattctaaaaacatttctattttactgataaatttaaaaccagcttatttatcaaagattcacttaagtcacataaacaaaaaggcatttgggttaattactatatatttcaacagttttagatataattttacatgagtacccatttctctctaagccaatctaaataggcttccttaagggatttctggtcaattatgccagattttgccatgtatacacaacatataacatacataaacacatatgttaacaaagatcttatagctttcacttttatatgtattcatgagactgtaaaatatagtaacataaattcac

SEQ ID NO: 948181 - DNA, 743 bp, Homo sapiens
gtggaaggggaaaaggaaacattcttcttgatgaggcggcaggagagagaagtgctgagcaaagggaggaaaagccccttataaaaccattaggccttgtgagaacttactgtcatgagaacagcatgaggttaaccatccctacgattcaatgaactcccaatgggtcccttccatgacacctggggattatgagattggggtggggacataccaaatctcatcatatcaaagcaaatcaatccatccctgccacctcccatatctcatattctcacatttcaagacacaataatgcctttccaacagtctccccaaaccttagcattaacccaaaaattccagcattaacccaaaagtccaaaaccaaagtctaatatgagacaaggcaagtcctttacacctatgagcctgtaaaatcaaaagcaagttagttacctcctagatacaataggggaacaggcattgggtaaatacacccattccgaatgggagaaattggccaaaacaaatgggctacaggcccataaaagtctgaaatccaataggttagtcattaaacctaaaagctccaaaatgatcttctttgaatccatgtcttatgtccaggtcatgctgatgcaagaggttggctcccrcagtcttggtcaactctgcccctgtagctttgcagggtacgattcctctacaggctgtcttcacaggctttgcactgagtttctccagcttttccaggcacatgg

SEQ ID NO: 948182 - DNA, 543 bp, Homo sapiens
ttctcaatgtttgtttctgttgcagttgtgtttggagtctacatcatgaaatctttgccagggcctatgtacacaacggtttttcctacattttcttctagagttgttatagttttagattttacatttatatctttcatccatcttgagttgattttgtatacggtgaaaggaaggttttcagtttcaaccttctgcacatggcttgccagttgtctcagcactacttattcaatagggatttttttttctcattgcttgttattgttgactttgtgaaagatcagtttgctatagatatgcatctttatttctgggttctctaagctgttccatctgtctatgtgtctggttttatgtcagtattatgctgttttggtcaccgtaaccttgtagtatagtttgaagtcaagtagtgtgatgcctccagctttgaattmttttggctaagatcactttgaatatttggggttgttttttgttacatataaattggggaatagtttgtattcctaatactttgaagaataacattggtagctt

SEQ ID NO: 948183 - DNA, 717 bp, Homo sapiens
agtgtcctggagcgtaaagactccaagttcccaattcccacaacaggaccgaaatgcttatgaattcaagagatttatgagcaattcttctgttgtgttaaaacatgtgcaattctgggtaagttgtgagagaggtaatgaatgccatgctctgataataccggtccattctcattacagatgttctgaatgccataccctccttccacatgcccctcttgcagtgcctaataatagcagtagcatgggctgttcctgtgtctcttgagaaagtcatccacactggctgcacaaccaaaagaacacagctactccaatggcatacccttcatcctgctggggaattgtgttacctgcttattttacatgaagctttcttttgctcctgacccagtttcattccttttggatttcttgatttttctcactctgcatcattttatttgcacacttgtttcctaccagcatggccctcacccaccttcctttgtacccaaagagatgatgctctgtggttactcttacttagtccctggagtctgaactgtacaatattcagtgcccaacaccatttctgtattaaatttctatttatatgaagcctttactgatagtaataattratatttattgaacacttcctgtgggccaggcactgtgcttgtgtgcttatcatgctatgtacagatgtgaatctgtgtacataatagcatttat

SEQ ID NO: 948184 - DNA, 494 bp, Homo sapiens
ttcattctatcacagtctttcacaatgcaaaagttttaattttcatgacaatgaattaatcatttcttagtttatatatagtgcttttaatgtaatgtccaagaactcttctctaaccttaggttccaaagatattctcctaatttttccaatagttttatatttttacatttaaacccatgatacatttgagttaatttttgataaggtataaggtttaggttgggattaatttttttgcctatgcacacccagtgactccagtgccatgtgttcaaaaggctgtttctccattgaattgtgttaataactttgtcaaaaccaatttgttatatttgtatttgtctgtttctggggtctctattctgttctattsatctttgtgtctattcccctgccaatactacgctgtcttgaatatagtatctataaagaaatccttaatattcaattcaaaattattcaattcaaatttcaattcaaaattcaattca

SEQ ID NO: 948185 - DNA, 677 bp, Homo sapiens
gagtaaaaacaaaaggccaagatcaaaagcaagtgattggctaggccaggtgctattaggtgaggaagaatctctccctaaacatctaccctcaacagactgtggcacctaaaacagaatacagcagacccaaggttctttgtagcagagcagcaatgacgatacaggacgagcccttttccatttaatctacgccgggagtgttactctcaggacactcactatggaaataagagctgaaacagaacggtgttctcattgcttacatactaggccacttgatggcatggaacgggaagtcaactcagttttccattcccttactgccaaaataaatcttttgttttcccgaccatgctttgttatggggcagattctggcaggcactttatgacaaaagctacctcgatatcaggaatcttaggcctttcacaaagaacctcacatttgagaagacttgaggtcaacttaagtgacatttcacaagatcacttacagacatcatcaggactacaaatcaggcttgatctctcatgttcagtacttctcctgtgaccccaggcagactgataaagtgacmtgcgagaacctaatcaaatttaggagtcggtctctcgacaccgaacgggcccgaccggctcccacttaatctacctctcacacttcgacccagtgtg

SEQ ID NO: 948186 - DNA, 557 bp, Homo sapiens
caccaagtttagaaactagtattaatttgggaaaatataaagtttaaaatccaacaattcacttattttgtctcttttccttctctctccgccagatttaaggtctaaagagcagggattttatttttggcgggggtctgttttgttcactgctgtatccctagtgctcataactatgagtggaacacagtaggtaattaatattttgtggaataaatggttgtttaaagcagcccactagagcctgagactccttttgtgacaatcccgctctcctttaatgaaaaatgtctccgcaggctccaggctctgcacaagcgaagggtgagaacaaaggctccagacaatgcattagtgccagattctaggcccagtggtgtaggaagagcctacagccctcaaaatcaatagcaattatagaagcacatctactttgccaggaaaactacttaaatcagaaattagccaggaaactaacggccatgactgcgagcctratgtcaatcaataccatagtttaatagctcaaagacacaagatgctaaatattgagactc

SEQ ID NO: 948187 - DNA, 532 bp, Homo sapiens
aatatgttatgtaagtaacatgttttatataaataaatgacatatgttacataaacatatatgtgttgtatacataagtttatatagatatatgttatttaaaatataaattcatatgttratatattataaacagatctatgacatattaacataaccaataataaaaagacaactgttcttttaaaaatgtgataaatatgtaaacagttaattcgcaggtggtaattgaagggaccaaaatcattaaaacgtattacacctccccagttatcagggaaatgtaaattaataccaaaatgggatacctttttatgtttatcagatttgcatcaatctgacaatgccagtaaatgctgaatgaagtcgtggatcaatgagaagttttgtaaattctagtgtcttagcccaggctgctataacaaaataccttagactaggtgacttaaaccacagacatttatttctcacagttctggaggctgggaagtccaagatgaaggtgccaacagattctgttcttggtaagggc

SEQ ID NO: 948188 - DNA, 853 bp, Homo sapiens
tttactgccactgcccagcctaacaagagtattgtaggcatatttccagcctgggaaaagaccaaattcaaaatttgaagtatagtttctactgaatgcrtattgcttttcaccattgtaaagttgaaaaatcataagtaaacccattgtaagtcggaagccatctgtattagaaaagaaaaaagactgaaaaaccaaaatgttaagtgttcatgtcaagatgtcaacaacagaacagcaaattaaactcaaagaaagtagaaagaagaaaataataaaaagcagaaattaaatgaaatttagaaaacaaacatatactagagtatcaataaactacatgattatctctttgaaagaatgaggccaggtatgatgactcatttcctgtaataacagcactttgggaggccatggcagcaggattgcttgaggccaagagcttgagaccagcctgggcaatttagtgagccccacatctctacaaaaaattaaaatattagctgggcatggtggtgagtgcttgtagtcccatctactcaggaggctgaggcaggaggatcacttgagcccaggaagttgaggctgcagcgagtcattatcaagccactacactctagcctgggcaacagaacaagatcctgtctcaaacaaaacaaaacaaaacaaaacaagaatggaagggactgataaaccccaagtaagattgataagaaagagatagagatacagaaaaggcataaataatgaatggcagcaacgaaaatggaaatctcaccatagatttcacagatattaaaaagataagaaaaaagattgtgagcaactttataccaataaacttgaaagattaaat

SEQ ID NO: 948189 - DNA, 439 bp, Homo sapiens
tgtaattgaggtgttgactgcttttgatatgcctattaatgtgatttctgattcttcatacatggttcattccacacaattaattgaaaatgctcggttatgatttcatacagatgaacaactgatgactttatttacccaattgcaaacagcagttaggaatggaatgcacctgttttacatcacttacattagggctcatacacctcttccaggacctttaactgcagggaatcaaatggctgatcacctagttgctattacaataactaatgctagacactttcacaatttaacccatgttaatgcctctgstctcaaacgcagatacaacactacctggaaagaaactaaagctattatccagcaatgcccaacttgccaaatggtgtattcctcatcttttacaggaggagttaatcctcaaggattggagcct

SEQ ID NO: 948190 - DNA, 609 bp, Homo sapiens
agctgaacttggggaggtgggggcagtggagtaaatgggaggctgggagagaactgagaactctgatgtggccttgatgccccctccccaaggcccacccatactggtgaggattggggtgaccrgtgtgaggagagggagagcccctgatgaggccagagtccaggcccagagagaccccgtccgctgtgccacacatgacatcatttttgtgtacttaacccaaggtaaacagggctggaaaaacccaagtactcattatctgacttagtggctgctgctggctccttaacaactggtttcctgggattctgcagttctcctgcagaacggacccagacagaggggcttccctccggtgcacagagaatccttgcccagtccctgtgctgggggctcgctgacctcttccttctgggaggctttgagtcgttccctaccagttcatggggctgggcctgctgagggccaggcgccagggtgggcgttgtgggagcatgacggagagcaaagcccaaatgtggtcagggggatttggttctagtgagcaggtgggtttgagaccccaggagcacaggagggcagtgggagcccagcagggaggttgtg

SEQ ID NO: 948191 - DNA, 718 bp, Homo sapiens
tgaggctcctgttacctgttctgtacagatcctttggcacttagagcatactgtctggccttgctgtgcarctaggctgtgaggccgccagccacctgcctgcactaccattgtacacaggaggtctttggtaagggatggctggctgtggatggtgatgaggcagtacaggaaagatccttggtgagtggagattattattattattattttgagacagagtctctgttgcccaggctggagtgcagtggcacaatcttggctcactgcaagctccgcctcccaggttcacaccattctcctgcctcagcctcctgagtagctgggactacaggcgcctgccaccacgcccggctaattttttgtgttttttagtaagagacggggtttcaccgtgttagccaggatggtctcgatctcctgaccttgtgatccgcccacctcggcctcccaaagtgctgggattacaggcatgagccatcgcacctggccgagtggagattatttttgcttactttggctttgtgtgttttgctatgggggagttaatggtattggtttctttggagaaattcatgacctaggagagctatggaggaagggccacagctcttttgtctctccctgatttccaaaataccacctcaccatggtactgccttgctttagaaacttcagtggctccccattgccttcagaatcacatctgaatggtgga

SEQ ID NO: 948192 - DNA, 573 bp, Homo sapiens
cagccacagtagaacaagacaccaggtagatttcyaaggtttttgactccagtccctggcttactgactgcatttctggacccacccagagctttgggaaacttgctgccctgacgaaaaggatataagcctggctacatttggaacctgctggttttagagccctagggccttaagcaaatatagccagcagccaggtagcggttatagtgggctttggtcgagacccagtgcagtcccagtgctactggccacagtggtgcttgtgtcaccctatccccacctccaggtggctcagctccctttgtttgggagaaagtaaaagaagagaacaagagcctctgcctggtaatccagataattcttctggatgttatccaagaccactaaggcagtacctctatgagtctgcaagaaccgtagcagaccgggtgtggtggctcacgcctgtaatcccaacactctgggaggctgaggtgaatggatcacttgaggcccagagtttgagaccagcctggccaacatgatgaaacctagtctctgctaaaatcacaaagattagccaggcgtggt

SEQ ID NO: 948193 - DNA, 466 bp, Homo sapiens
tgatgaacacatcatattggaccacagtaaacactgatttccattacataaactacaggcatatctcatttcattgtgctttgctttattgcctttcacaatatactttttamaaattgaaggcttgtggcaaccttgcgtgaagccaagtctatcggtgccatttttccaacagcatgtgctcactttgtgtctctgtgtcacatttgatgattcattattattatatctgctatggtcatctgtgatcagtgatctttgttgttactaatgtaattgttttgcgtgccatgaaccacacttacataaaatgatgaacttaatccacaaatgttatgtgtgttctgactgctccattgaccacccattccccagtctctctttgggccttctctgaaaaacaatattgaacataagccagctaataaccctacattggcctctaagtgttcaaatgaaaggaaga

SEQ ID NO: 948194 - DNA, 700 bp, Homo sapiens
gttgctgattgtcacctgttcaccatctggcccagacaccccgggttatgtgtgtgcaagcatgtgtgtgcatttagccgttcattctctgactctgtttgcttacttgaggcacttactatgccccttgcttgggccttctcagtccatatgctcgtggagttcatggtctaatgcaggacacacgtgggtaagtcattagagcacatgttctttactatcaggatagacatgttgtctaaacactagaaatgccagaaaactgaatgtcagactttagaggaaagccagggaaggtttagagaagaggagacattggagtttggtgttaatgaattagttcccacaagccaggcaagaacaattgaggtgtgctagcacatatgtacataaagactaaggatgtccgtgacattttcagaggctgctgtgtaaggccttcgggatccccagatttcatcaaaaaggcctttcccccaaataacattccatgaaagtcacaagtttcacatcagcgtttcatatcacaaattaacctcctttccaaatttctcttaagttttaatcctcttgtttaagtggctttatttcttaaggtttgaagtgcctttattcmcattgtatagactcgaacattcctcaaataaatttaccaaatttctgctttctggcttgaaaatcatcacttttttagattttc

SEQ ID NO: 948195 - DNA, 639 bp, Homo sapiens
gcttttttatggctgcatagtattccatggtgtatatgtgccacattttctttatccagtctatcagtgatgagcatttgggttggttccaagtctttgctgttgttaacagtgcygcaataaacatacgtgtgcatgtgtctttatagcagaatgatttataaacctttgggtatatacccagtaatgatattgctgggtcaaatggtatttctagttctaaatccttgaggaatcaccacactatcttccacaatggttgaactaatttacactttcaccaacagtgtaaaagtgttcctatttctccaaatcctctccagcatctgttgtttcctgacttcttaatgatcgccactctaactgtcatgagatggaatctcattgtggttttgattttcctttctctgatgaccagtgatgatgagttgtttttcatgtgtttgttagccacataaatgtcttcttttgagaagcatctgttcatatcctttgccctctttttgatggggttgtttgttttttttcttctaaatttgtttaagttccttgtagattctggatattaaccctttgtcagatggatatattgaaaattttttctcccattctttaggttacctgttcactctgatgata

SEQ ID NO: 948196 - DNA, 738 bp, Homo sapiens
tttttttttttttttgaggagtattcctattaacataaatgaaatcaggcttcagcasggtccgcagcaagttaggaggccaaatatattttttttacatgggagatacttagatgttgatagtattttagcaggaaagaaaagttaataacatgggagaaaaagttgtaggaacaaattagttgtttagatgggagggggtaagactgtaaaaatgatgggttgaatttagataggaaccaagaaagtctatcccatattattccaaggaaagcaaagaatataagtgaagatacagtgaaattatacaaaaaaaagtaaaaaaaaagagaagagagaacaggtgtggtaggtttgggaagaaagaaaaactatgaaataatcatcttggagaagaggagagaaaattgatcagagaaactagcacaagattgctgagtagtgctggaggctcacttggtacttttttacttaaatctgtattaaaagcgggcgtgagtccttggttttctgtaatcacatttggctgcatgggtgatggcacaaagcagaaagaaaactggatttaaccagacctggggtgctgccaggtgaaaatgataggtggggagacaggcagaaaaagttgaagctgcatgttagggagtaattgcagtgttcactagaccactagaccattaaatctgaatggtttaggaagtaaaataatttcaggagggaggtatggacaatgtaaag

SEQ ID NO: 948197 - DNA, 738 bp, Homo sapiens
tttttttttttttttgaggagtattcctattaacataaatgaaatcaggcttcagcacsgtccgcagcaagttaggaggccaaatatattttttttacatgggagatacttagatgttgatagtattttagcaggaaagaaaagttaataacatgggagaaaaagttgtaggaacaaattagttgtttagatgggagggggtaagactgtaaaaatgatgggttgaatttagataggaaccaagaaagtctatcccatattattccaaggaaagcaaagaatataagtgaagatacagtgaaattatacaaaaaaaagtaaaaaaaaagagaagagagaacaggtgtggtaggtttgggaagaaagaaaaactatgaaataatcatcttggagaagaggagagaaaattgatcagagaaactagcacaagattgctgagtagtgctggaggctcacttggtacttttttacttaaatctgtattaaaagcgggcgtgagtccttggttttctgtaatcacatttggctgcatgggtgatggcacaaagcagaaagaaaactggatttaaccagacctggggtgctgccaggtgaaaatgataggtggggagacaggcagaaaaagttgaagctgcatgttagggagtaattgcagtgttcactagaccactagaccattaaatctgaatggtttaggaagtaaaataatttcaggagggaggtatggacaatgtaaag

SEQ ID NO: 948198 - DNA, 438 bp, Homo sapiens
agtgaagttcacagcctgggggcaaaagctcactacaacactgagaaataattataggataatagaaggctaccttttcttccataccttaccaccacattaccaaaggcctatttaccacagctcttttgwcccagtacattatgtccagctatctagaaaaacccgcaatgcatactaataagaaaaaaaaaacacagtttgaagagatggagcaagcatcagagtcacaggcatagatggcagagatgtttgaattatcagactgggaatttaaacaagtagaattaatatgctaaaggctctaatgggtaaagtagcatgcaagaacagatgggcaatgtaagtagagaaataaaaattctaaaaaaaaataataaaggctagagatcaaaaaaactgtaacagaaatgaggaatgcttttgatggacttagca

SEQ ID NO: 948199 - DNA, 409 bp, Homo sapiens
gaggcaccaaggctggctgccaaactactttctacatactaggattgatcatatttacagttgggctgcttaactcatatggacagattacagattttttttgaacaccacatataagtttcataaaascaacaattatgttttatttttaaattttatatccatgcttgccatacaaatagtgctcaactaatttggtaaataaaatcaaaccagtggccaggcctgctggctcacaactgtaatcctagcactttgggaggccgaggtgggtagatgacctgaaatcaggagttcaagacctgcctggccaacatgcgaaaccctgtctctactaaaaatacaaaaaaaaatagctgggtgtagtggcaggcacctgtaatcccagctactggggaggctgaggtag

SEQ ID NO: 948200 - DNA, 567 bp, Homo sapiens
accttgagttagttttcatataaagtattaggaagtggtctagttttaattttctgcatacaactagccagttctcccagtgctatgtattaaatagtaaacccttttctgattgtttttacaaggtttgtcaaagatcagatggttgtagatgtgtggtgtaatttctgaggtctctgttctactccattggactacctgtctgtttttgtacaagtattatgctgttttggttactatagctttgtagtatagtttgaagtcaggtagcatgatacctccagctttattctatttgcttaggattgtcttggctctactgactttttagttccttatacattttaaaatagtttttttttttctaattctgtaaagaatgtcaatggtagttcaatgagaacagcattgaatctataaattactttgggcagtgtggccatttttatgatattgattcttcctacccatgatcaaggaatgtttttccatttgttggtgtyctctgtgatttccttgagcagtggtttgtagttcttgaagaagtccttcacttcccttgctagt

SEQ ID NO: 948201 - DNA, 567 bp, Homo sapiens
accttgagttagttttcatataaagtattaggaagtggtctagttttaattttctgcatacaactagccagttctcccagtgctatgtattaaatagtaaacccttttctgattgtttttacaaggtttgtcaaagatcagatggttgtagatgtgtggtgtaatttctgaggtctctgttctactccattggactacctgtctgtttttgtacaagtattatgctgttttggttactatagctttgtagtatagtttgaagtcaggtagcatgatacctccagctttattctatttgcttaggattgtcttggctctactgactttttagttccttatacattttaaaatagtttttttttttctaattctgtaaagaatgtcaatggtagttcaatgagaacagcattgaatctataaattactttgggcagtgtggccatttttatgatattgattcttcctacccatgatcaaggaatgtttttccatttgttggtgttctctstgatttccttgagcagtggtttgtagttcttgaagaagtccttcacttcccttgctagt

SEQ ID NO: 948202 - DNA, 577 bp, Homo sapiens
ctgaggacaaggcattatagagctggcacatcaaacatrcattacatttattaatgtaattgatgtaactaacatacagtgtatgttgaaaaaaacaaaaagggggagtaggagaccagctaccacctcaaataaaattacatttagccttatttactttaaattttttagctcctgttacagataataagactccggcggaatgacagtggcaaatgttaaagggaaaaaagaaagtttacctaaaggtattatagaagtccccagaagaagggcaatggaaaggcccagtagatttactaacgtggggatgagggtatgcttatgtttttacaggacatggacaaactgtgtgggttcccccaccatgtatgtgaccatggaatgggagactggagggacccatggatcccaaccatgggcccagctcctccaatatgagccatgagccagttgaatctgaatgcaaagacatggggacagatcaagaaaaccacacaaaaagctgagaaactgctagagcgtcagggtgaggcaaaaaccccttactccaagtttatggccatgtcagctgtaa

SEQ ID NO: 948203 - DNA, 609 bp, Homo sapiens
tattcccaataacagtctcttatcatctgtatgatttgcaagtatttcccccattctgtgggttttcacttttttgatggtgttcttygcagcgcaagttttaaattttgatagagaagtttatctaattttccttttatgcttatgctttggctttgatgtaatactgatttggcgtcactttggttgcttatggttttggtgtcatatctaagaaactattgcctaatccaaggtcatgaagatttactcttaagttttcttctaagggtttcagagtttttagctcttatgtttacattggtgatctattatttcatattttaaatatttgtgtgaagtaggagttcattctcattctttttgcatgtagatattcagttgttccagcctcatttgttgaaaagactgttctttccctactgaatgtcatgacactgtcattggaaatcaactgaccataaatgtaaagactgggtgttgactgacaccgactgattctctgacaccaacttggcatctaacaatttaaatcaatttgaaacttaactcctggaattagcgtcagaccccacaggttgaaggctcagttctgtaagactgacctca

SEQ ID NO: 948204 - DNA, 605 bp, Homo sapiens
ctgttaggttatcaagaaattattatcaagaataacaagcggccacgtgtggtggctcacgtctgtaatcccagcctgggtaatatggtgaaacaccatctttaccaaaagcaacaacaacaataayagtaacaacaaacaaaaattatcagggcacagtgattcatgcctgtaattctggcagtttggaaggctgaggcaaaaggatgacttaagcttagaagtgtgagaccagcttggccaacatggtaaaaccctgttggtacaaaaattacaaaaattagccggatgtggtggtatgtgcctgtggtcccagcttcttgggaggctgaagtgggaggattgcttgagcccagaagttcaaggctgcagtgagccatgattgtgccactgtactccagcctaggcaacagagtgagagaccctgtctcaaaaaaaaaaaaaaaaaggaaaaataagaaataaaaaacattggtcagggtgaggagaaagggaacccttgtacactctgttgggaatgtagatgggtgtagccactgtggaaaacagtatggtggttcctaaacaaatcaaaaatagaacaaccatatgatccagtaatccct

SEQ ID NO: 948205 - DNA, 614 bp, Homo sapiens
ataaataaaaacatctgtatataactataaagcttacactctcatagctcgcacagagtttttgcaaaagcaaaaagataaaactttagctctttgtaggtatgatttttgagttgagatggcaggaaaatttagtgagattttgatataagagtaacaaaagggagcctctagggacaaagcagataatacattgagagtgaacagaaattatttctcagcctggctctgccatggcagttcttgtcccttccctataattaattattttctggtttaactgagaaaacatgagacaatctcaaatttcctcagagctagattacaatattccattttatcagccctagaacaacatgaacagaagctttagtggtagtgttatagtctatgctgaggtttgttagcagtgcatcattacctaagagatcgctgcttagttcagccagttaactggagctcaccaaaatgttctgctcttgaaagasaaagcgggggagaaagggtgggcagagagagagagcaagacagagctccttcacagagcaattcatgtaaatgcattgtccaatggccctgagatccattaattaaattaattagacttcatagca

SEQ ID NO: 948206 - DNA, 614 bp, Homo sapiens
ataaataaaaacatctgtatataactataaagcttacactctcatagctcgcacagagtttttgcaaaagcaaaaagataaaactttagctctttgtaggtatgatttttgagttgagatggcaggaaaatttagtgagattttgatataagagtaacaaaagggagcctctagggacaaagcagataatacattgagagtgaacagaaattatttctcagcctggctctgccatggcagttcttgtcccttccctataattaattattttctggtttaactgagaaaacatgagacaatctcaaatttcctcagagctagattacaatattccattttatcagccctagaacaacatgaacagaagctttagtggtagtgttatagtctatgctgaggtttgttagcagtgcatcattacctaagagatcgctgcttagttcagccagttaactggagctcaccaaaatgttctgctcttgaaagagaaagcgggggagaaagggkgggcagagagagagagcaagacagagctccttcacagagcaattcatgtaaatgcattgtccaatggccctgagatccattaattaaattaattagacttcatagca

SEQ ID NO: 948207 - DNA, 535 bp, Homo sapiens
ttgatacacagtccggtagttcctcaaattatgaaacatagagttacatattatccaacaatttcattcctaggtacatacccaggagaaatgaaacatatgtccacacaaaaacatatacacaaatgcttacagcagcattattcataatagccaaatggtggaaataacccaaatattcttcagataataaatggatttttaaaagatggtatatccatacaatggagtgttattcagtcatccaaagaaatgaagtactgatacatgctgcaacatgaataaaccttgaaagcattatgctaaatgaaagaagccagtcacaaaatgcctcatcttatattattccatttacagtaaacacccatagtaggaataatctagaaggacaaaacgtagattagtggttgctcagggctggtggagagacatgggggataggaattgacagtagctaaagggaaagggtattccgtttcattttgagtcaattctmaaattgagtatttgtagataactgtgactatattaaaaa

SEQ ID NO: 948208 - DNA, 615 bp, Homo sapiens
ttattaaagttagatgaaatgatgataagtgtggggcccccataatggaattagtgcccttataagtattggtttatatttactttatattcacttaaaagaattggtttatatttactgtattagtccattctcacactgctatggagaaatacctgaaactgggtaatttataaaggaaagaggtttaattgactcacagttccaaatggctggggaggcctaaggaaacttacaatcatggcagaagggaaaggggaatcaggcaccttcacagggcagcaggacacagtgagtgcaagcaggggaaatgccagatgcttaggaaaccatcagatctcatgagactcactatcatgaggacagcatgggggaaactgcttccatgatctaattacctccacctggacctgcccttgagctgtggagattatggggattataggggttataattcaagatgagattttgggtggggacacagccaaaccatatcattccacccctkgcccctcccaagtctcgtgtcctcacatttcaaaacacatttatgccttttcaacagtcctccaaagacttaactcattctggcataaacccgaaagtccaagtcca

SEQ ID NO: 948209 - DNA, 762 bp, Homo sapiens
gaagctgggtgatttctgcatttccaactgaggtacccagctcatcagattgggactggttcggagggcaagacgaagcagggtggggcgtcacttcacccaggaagcgcaaggtgtcagggaactccctcccctatccaagggaagctgtgagagactgtgccctgaggaacggtgcactccagcccagatactgtgtttttcccatgatcttcgcaacccgcagaccaggagattccctcaggtgactacaccacgagggccctgggtttcaagcacaaaactgggcagccatttgggcagacaccaagctagctgcaggagttttttttcatactccagtggtgcctggagtgccagtgagacagaaccgtttcctcccctagaaagggggctgaagccagggagccaagtggtctagctcagtggatcccacactcatggagtccagcaagctaagatccactggcttgaaattgtcactgccagcacagcagtctgaagtcgacttgggtgctcaagcttggtggggggaggggtgtccaccattactaaggcttgagcaagcggttttccctcacagtgtaagcaaagctgctgggaagtttgaactgggtggagcccaccrtagctcagcaaaaccatgtagccagactccctgtctagattcttcctcactgggcagggcatctctgaaagaaaggcagcagccccagtcatgggattatagacaaaactcccatctccctgggacagagcacc

SEQ ID NO: 948210 - DNA, 762 bp, Homo sapiens
gaagctgggtgatttctgcatttccaactgaggtacccagctcatcagattgggactggttcggagggcaagacgaagcagggtggggcgtcacttcacccaggaagcgcaaggtgtcagggaactccctcccctatccaagggaagctgtgagagactgtgccctgaggaacggtgcactccagcccagatactgtgtttttcccatgatcttcgcaacccgcagaccaggagattccctcaggtgactacaccacgagggccctgggtttcaagcacaaaactgggcagccatttgggcagacaccaagctagctgcaggagttttttttcatactccagtggtgcctggagtgccagtgagacagaaccgtttcctcccctagaaagggggctgaagccagggagccaagtggtctagctcagtggatcccacactcatggagtccagcaagctaagatccactggcttgaaattgtcactgccagcacagcagtctgaagtcgacttgggtgctcaagcttggtggggggaggggtgtccaccattactaaggcttgagcaagcggttttccctcacagtgtaagcaaagctgctgggaagtttgaactgggtggagcccaccgtagctcagcaaaaccatgtagccagactccctstctagattcttcctcactgggcagggcatctctgaaagaaaggcagcagccccagtcatgggattatagacaaaactcccatctccctgggacagagcacc

SEQ ID NO: 948211 - DNA, 434 bp, Homo sapiens
ttcttcctgaaactatcccacataactgagaaggaragactcctccctaactcattctatgaagccagcatcatcctgacaccaaaacctggcagagacacaacaacaaaaaacttcaggccaatattttttatgaacattgatgcacaaattctcaaaaaaatactggcaaaacaaatccagcagcacatcaaaatgcttatccaccataatcaagtaggctttatccatgagatgtaaggttggttcaacatacacaaataaataaatgtgattcatcacataaacagaactaaagacaaaacccacataattatttcaatagatgcagaaaaggcattcaataaaactcaacactctttcatgttaaaaacttttgataaactaggtattgaaggaacatacctaaaaataataggagccatctatgacaa

SEQ ID NO: 948212 - DNA, 434 bp, Homo sapiens
ttcttcctgaaactatcccacataactgagaaggagagactcctccctaactcattctatgaagccagcatcatcctgacaccaaaacctggcagagacacaacaacaaaaaacttcaggccaatattttttatgaacattgatgcacaaattctcaaaaaaatactggcaaaacaaatccagcagcacatcaaaatgcttatccaccataatcaagtaggctttatccatgagatgtaaggttggttcaacatacacaaataaataaatgtgattcatcacataaacagaactaaagacaaaacccacataattatttcaatagatgcagaaaaggcattcaataaaactcaacactctttcatgttaaaaactttygataaactaggtattgaaggaacatacctaaaaataataggagccatctatgacaa

SEQ ID NO: 948213 - DNA, 432 bp, Homo sapiens
ctcaacaaaaaccttatcagctagaagagattgggggcctatttttaccctcttaaagaaaaaaacatgccagccaagaatttatatccttcaaaatgaagcttcataatcaaatgaataacgawgtctttcatagacaaacaaatgctaagagatttctagaatggccctataataaatgttcaaaggaattctaaacatggaaatgaaaggacaatacttgctaccataaaagcacccataagtacaaaattcacagatcctgtaaagcaattatacaattgagactacaaagcaactagctaacaatactatgatgggaacaaaacctcacatatcaatattaaccttgaaggtaaacagcctaaatactccacttaaaagacaaaaatggaaaatcggattaaaaaaaaagagagacccaaccatcta

SEQ ID NO: 948214 - DNA, 817 bp, Homo sapiens
  misc_feature 804, 805, 806, 807, 808, 809, 810, 811, 812, 813, 814, 815,816, 817: n = A,T,C or G
ggccaagagctgtctctcaaaaggagagtagttgtcttcagaagatggcagggccttgctccaaaatcctggaggtgtccgctgagattcacctatgggggcctgccaaaggctgcaaacagcatttctatctgccactgatacctcaaggaccattggatctactgagtcatatggcccaagtggcagagcagtttgcactgcagcctggagttattgcagagccttctcctcttctggaccccacttcaaaccgtcagccttttgggtcacttgattaatgggccaaagtaacacatcgaaatgcagaatgtgttgcttccaaaatccaatgggcccactaggcgttatacctctttcttggctgtaaaaggggccaaattcagcaacttatcttttaccttagaaggcatatcttgacaggcctgacaacactggacccctagaaattttacagaggtagaaagtccctgaattttagtcagatttatttcccatcctctggcaaacaaatgtctcaccaataagtccagtgtgtttgctaattcttgctcactggatccaatcagcatgatgtcatcaatgtaatggaccagtgtgatatcttgcagaagagaaaagtgattaagttctctctgaataacattagaacacaaaactggagagttgatatacccctgaggtaggacagtaaasgtatattactggccttgcatctgaatgcaaattgtttctggtcgggcttatggacaggaatggagaaaaagacatttgccaagtcaatggctgcatacaggtacaggnnnnnnnnnnnnnn

SEQ ID NO: 948215 - DNA, 472 bp, Homo sapiens
aagcaagcagatgcttgaagaaagggccactccacagtattttttggcttttttttttttttcactttttttgagacagggtctggctgtgtcccccaggctggagtgcagtggcacaagcatagctcactgcagcctcaaccatcctgggtcatgcagtcctcccttctcagcctcataagtagctgggactacaggtatgtgccaccatgcctggctactgtgtgtgtgtgtgtgtgtgtgtgtgtgtgtgtgtgtatgtgtgtgtgtggagatggcttatctttctattacccaagatggttttgaactcctggcctcaagtaatcctcctgcctcggcctcccwaagtgctgtggttgcaggtgtgaatcaccacagccagcctattttttacttcagataaaatatttcagtaccctgaggtctaggtgaaacaaaacaaggtaataaattactaatccatatctct

SEQ ID NO: 948216 - DNA, 563 bp, Homo sapiens
ctcaacagtgggcttataatattcggtaaaccatgctgtaaacagatgtgctgtcaggtggactttggtgctcctttaatagagcacaggcagagtagatttagtataattctttcttttttttaactaggcaaagaactttattaacctttgtttcaaacttgattcccaagtttctttggtttaattagctgcaaagaatgaactgtgtataagcaaaaactgaaaagagctgcagtgtccaaggggcttgggcttaaaaatattagagatctagattttatcagatccataaacaaaaatttcttaaaaagcagtcataatataaaatagcagctcccagtaactttaagttttatcttcagaagttgactcaattcagtttgccccattcttggaagcctcttcaaatttctccacaagatctggaacttcatcatcatcatcctcgccagtagcaagtggtgcttttccatccacagattgttgggcagagcttcatccagtctccttaaaytagtcagactgcctgtaccaagctggtttaagatgctgggtagcat

SEQ ID NO: 948217 - DNA, 585 bp, Homo sapiens
gtttttttttttgcaaaatatcaatacaaattaatcaagactgaactgtgaagactgaaaatcaaatctattcttcaccactggttagagttggttatttatttgtttgtttatttatttatttagagacagggtcttgctctgttgcccaggctggagtgcaggggcatgatcatagttcactgcagcctcaaactcctggacaactactcaggaggctaaagcaggaggatcacttaagcccaggggttacagttagagttatattcccacagagattcctgtgaattttcacatacaaggctgagatcacaccaggtatgctcttttatgagacacacaccctcatgcctttttgctgaccaaaagcctcagggacacacatttatggcttccagaacttttgaggaaggttgcaagctgtgagcagaaataatgagtctagcatttcctccgaactagaaagaaacctcatttgcattctggtgcaamctcaccattatcccacttaccgtagggcccaccagtaaatagaaaattggatttttttgaaaaagaaaaaaatccacaatatgggtgtgtgtc

SEQ ID NO: 948218 - DNA, 603 bp, Homo sapiens
cagcctgggtggcagagtgaggcaccacttctttaaaaaaaaaagcctcatcttttgaggcccaggtttgaatcagcctattttccctgttcccccttagctctaccgcaatcctcccaaagcagctccaagccagccctggcccttgggagggcaggtggcccctcagacggggtctcctcctgccttcattggtgtagctggagcaccagaacggggctgttgttaacacggaagggcctgagacagagactcagatcagacaactgcctctctctggcatcccccatccagggctctgaattctcactcagaaacactcactgactgagcctttggtgtgcaggttggcgacagtgttccttgggctggccccttaggctaaagccctagcatctcaagcctcaaagactagcccccagccccaatccttagctgtgcagagggcatgcacagcaaccaaggtcctggggccttgctggagctcagcctttcaggaatttgcaagcagtgagagttcagaattctacaaataaagaaactggggtcagcaggaagagagatcaggcctgctaagctccgkcatcagagctctctggaacc

SEQ ID NO: 948219 - DNA, 585 bp, Homo sapiens
gctgggactacaggcacatgccaccacaccaactaatttctgtatttttagtagagacggggtttcatcatgttggccaggctggtctcgaactcatgacctcaggtgatctgcctgcccgggcctccaaagtgctgggattacaggcgtgagccactgcacccagccacgaggggcctgtttccctgctcttaggcatcaacatgcagcctaggagttagggcaaagtacccctgcctttggtcctcttcggggtggcagtgcttgggccccttgtatctaacaaggctgctttatcagaggacagcgaccccacaaagcagggaggctgcctccgttgggttctaattcctgggccttctactgccctcaccccatcccagcagcttccggacaacctaagggagccagcaccacaccactctcattgactccctgaaaccctcttctttgctcccgcccctgggcttccagatcatcttccccactcaktggcttccttcaggatttcaatgactgtggcttctttgcttaataggaaaggaagcgtgttggcaatatgccctcaaagttttactcctacct

SEQ ID NO: 948220 - DNA, 437 bp, Homo sapiens
agggtcagagtggtcggtagaaatgtcaatcacatattttaatcctctgctcaaattgcccaatgacttcccatctcaygtccaataaaatgcacactcttcgctgggccatgatctagcccctgcctacgtccccagctccccacatagcccaccaccttccagccttctttcctttccacacacaccccaagatcctccctgcctcagggtctttttccttgctcttccctctgcctggtatggttttctttcttgtcctgtagatctcggctgttcagagaggacttccctgaccaacctgatctaaatcagcatcactgtctgcctggttgttttgtttccttcacaggtcttgtcacagtaatctccaattgtcttgtgtatggatctgtccctggcatatttgctgcttcccactggaatggaagctcctg

SEQ ID NO: 948221 - DNA, 572 bp, Homo sapiens
cagcaagaagttccagggtcagagtggtcggtagaaatgtcaatcacatattttaatcctctgctcaaattgcccaatgacttcccatctcacgtccaataaaatgcacactcttcgctgggccatgatctagcccctgcctacgtccccagctccccacatagcccaccaccttccagccttctttcctttccacacacaccccaagatcctccctgcctcagggtctttttccttgctcttccctctgcctggtatggttttctttcttgtcctgtagatctcggctgttcagagaggacttccctgaccaacctgatctaaatcagcatcactgtctgcctggttgttttgtttccttcacaggtcttgtcacagtaatctccaattgtcttgtgtatggatctgtccctggcatatttgctgcttcccactggaatggaagctcctgagggcagggcccttgcstggttggacgctgcagtattcctagcactccagcagcaactagcatatagtaggcacttggtgaatattttttggatgagtcaatgaatgaatgaaagagccca

SEQ ID NO: 948222 - DNA, 611 bp, Homo sapiens
catgttgacaactaaaagcaaggtttataacatatcagaatgacgtctctttgtatatatttatatattaaatatagtacaatccatattttgagtaaaagaatataaatgtgcatctataaatattctatgggcatttctctaggtgtattgcatgaatatgtttcatataaagtgtcacagaaattcatgtgtgggtggggtcaatacaaagggaaaagcaataactcagtccctatagaatattgattggttttaatagctctgcttgaatcccagcctagaatttactaaaatcttctggctgaaaacattattaataaaattacttaccttgaaattctttcttgtttctaaaaatgctatcagaccctggagagcccaccactgcaccttactgcatactttagacctgagagtgttcacatttagttacccatcaagcagagaaaagacaaaccctaaaagtcattaattttggaaacagaaaaatgatgaggagaaagaaaagtatacagtgaaggtctacatcgtttataggttcaaastctcaattttcctttcagtaggtgaaaagaattctttttttattattattatactttaagttc

SEQ ID NO: 948223 - DNA, 572 bp, Homo sapiens
agttccttatctccatctgagaccacctcagcctggatttaattgtccatatcattatcagcattttggccaaagccattcaataagtctctggggagttccaaactttcccacatttttctgtctttttctgagccctccaaactgttccaacctctgccttttatccagttccaaagtcacttctaaatttttgggtatcttttcagcagcactgcactctactggtaccaatttactgtattagtccattttcacactgctgataaagaaataccagagactggacaatttacaaaataaagaggtttattgaacttacagttccatgtggctggcgaggcctcagaatgatggcagaaggtgaaaggcacatctcacatggcagcagacaagagaagcaagcttgtgcagggaaactcccatttttttaaatcatcagatcttgtgagacttattcactatcacaagaacarcacggaaaagacctgcccccatgattcagttccctcccaccgggtgcctcccacaacaggtgggaattcaagatgaaatttgcatggggatacagc

SEQ ID NO: 948224 - DNA, 572 bp, Homo sapiens
agttccttatctccatctgagaccacctcagcctggatttaattgtccatatcattatcagcattttggccaaagccattcaataagtctctggggagttccaaactttcccacatttttctgtctttttctgagccctccaaactgttccaacctctgccttttatccagttccaaagtcacttctaaatttttgggtatcttttcagcagcactgcactctactggtaccaatttactgtattagtccattttcacactgctgataaagaaataccagagactggacaatttacaaaataaagaggtttattgaacttacagttccatgtggctggcgaggcctcagaatgatggcagaaggtgaaaggcacatctcacatggcagcagacaagagaagcaagcttgtgcagggaaactcccatttttttaaatcatcagatcttgtgagacttattcactatcacaagaacaacayggaaaagacctgcccccatgattcagttccctcccaccgggtgcctcccacaacaggtgggaattcaagatgaaatttgcatggggatacagc

SEQ ID NO: 948225 - DNA, 571 bp, Homo sapiens
tcccactgattctacagtttggtgagytgtataattatttcaatatgtattacaatgtaactgatatgatttggctgtatccccacccaaatctcatcttgaattatagctcccacaattcccaggtgttatggaagggatccagtgggaagtaattgagtcatgggggcgggtctttctcatgctgttcttgtgatagtgaatacgtctcatgagatctgatggttttataagggggagtttccctgcacaagctctcactttgcccgctgccatccatctaagacatgacttgctcctctatcccttctgccatgattgtgaggcctccccagccatgtggaactttaagtccattaaacctctttcttgtataaattacccagtctcaggtatgtctttattagcagcatgaaaacagactaatatagtaacaataatagaaataaagtggacaataaacataatgtgcttgaatcattcaaaaccatccccttccccaatccatggaaaaattgtcttccacaaaaccagtgcctggtgccaaaaatgttggggactgctgctctaa

SEQ ID NO: 948226 - DNA, 578 bp, Homo sapiens
tcccctctttgtgtccatatgttctcatcatttagctcccacttacaagtgagagcatgtggaatttgttttctgttcctgcattagtttgctaagggtaatggcctccagctccgtccatgttactgcaaaggacatgatcttgttcttttttatggctgcataatattccatcatgtacatgtaccacattttcattatccagtctatcattgatgggcatttaggttgattctacatctttgttattgtgaatagtgctgcaatgcacatacatgtgcatgtgtctttataacagaacaatttatattcctttgcatatatacccagtaatgggattcctggggcaaatggtatttctgtctttgtctttgaggagtcaccacactgtcttccacaacgattgaagtaacttacactgccattgtgatggttaatactgagtgtcaactggactggattgaaggatgcaaagtattgatcctgggtgtgtttgtgagggtgttgccaaaggagaataacrtttgagtcagtgggctgggagaggcagacccatccttaatctgagtgggcaccat

SEQ ID NO: 948227 - DNA, 656 bp, Homo sapiens
cctgagtctggtggggacttggagaacctttatgtctagctaagggattgtaaatacaccaatcagcactctgtatctagctcaaggtttgtaaacacaccaatcagcaccctgtgtctagctcagggtttgtgagtgcaccagtcctcactctgtatctagctaatctagtggggacatggagaacttttgtgtctagctcagggattgtaaatgcaccaatcagcaccctgtcaagacaatcggctctctgtaaaatggaccaatcagcaggatgtaggtggggccagataagagaataaaagcaggctgccctggtcagcagtggcaacaccctcagctccctttccacgctgtggaagctttgttctttcactctttgcaataaatcttgctgctgctcactctttgggtctgcactgcctttatgagctgtaacactcactgcgaaggtctgcagcttcactcctgagccagcgagaccacgaatctaacagaaggaagaaactccgaacacatctgaacatcagaaggaacaaactctggacacgccacctttaagaattgtaagagggtgrgcggcttcattcttgaagtcagtgagaccaagaacccaccaattccggacacacccttaatctccaatattggaaggt

SEQ ID NO: 948228 - DNA, 585 bp, Homo sapiens
ggctcaaaaaagaagtctgaagagaaatttaaaaatacttttaagtatacgaaagtgaaagtaaaacatcaaaatttttgatatatagcaaaagcactatttatagggaaaaatcrtagcattgaaatacatatattagaccaggcgtggtgactcatgcctgtaatcccagcgctttgggaggctgaagcagacagatcacaaggccaggagtttgagaccagcctggtcaatatggtgaaacctcgtctctactaaaaatacaaaaattagctgggcacagtggtgcgtgcctataatcccagctactcgggaggctgaggcaggagaatcacttgaaccctggaggtggaggttgcggtgagccgcgatcgcgccactgcactccagcctgggcgacagagcaagactctgtctcaaaaaaaaaaaaaaaacaaaaaaaaaacatatattagaaaagaagaaagactcgagtagctgaagctctattttacgaaacttaaaaaaaaagcagaagaaaaaagatcataaaaaatgagagcagaacacaatgaaattaaaatttaagaaaaatagagaaaacca

SEQ ID NO: 948229 - DNA, 611 bp, Homo sapiens
accatgggacacatatatctatgtaacaaacctgcacattcagcacatgtatcccagaacttaaagtgaaatwaaaaaaaagttaaaaagaactaaatatataaagggtataccataattaaatggagagatagagtcaatattattaaaattaaaacaatctcaaataaatctcagcacagactgatgtggaaattgaaagatagatactgaagtttatctgaaagtacataggacctagtattccaaggcaatgctgaagactaagaacatggctgtagaatttatactaccagatttcaagacttattacaaagctacattaaatgaaatattgtattggctgggcacagtggctctcccctgtaaccccagcactttgggaagccaaggcgggcagatcacttgagaccaggagttcaagagcagcctggccaacatggtgaaaccccctttctgctaaaaatacaaaaattagcctggcgtggttgtgtatgtctgtagtcagctactcaggaggctgaggaactaacattgcctgaaccaggaggtggaggttgcagtgagccaagatcatgccactgcactccagccttggtgatggagcaagg

SEQ ID NO: 948230 - DNA, 669 bp, Homo sapiens
gtctttttaataattgccattctaactggtgtgagatgctatctcattgtggttttgatttccatttctctaatgaccaatgatgatgagcttttttcataygtttgttggccacataaatgtcttcttttgaaaagtgtctgtttatatcctttgcccacttttggatggggttgtttttttcttgtaaatttatttaagttctttgtagatcctggatattagccctttgtcagatggatagattgcagaaattttctcacattttgtaggttacctgttcactgtgatgatagtttcttttgctgtgcagaagctctttcgtttaattagatcccatttgtcaatttgggcttttgttgccgttgcttttggtgttttagtcatgaagtctttgcccatgcctatatcctgaatggtattgccaaggttttcttctagggtttttatggtttggggttttacatttaagtctttaatccatcttgagttaatttttgtataaggtgtaaggaaggggtccagtttcaattttctgcatatggctagctagttttctcaacaccgtttattaaatagggaatcctttccccattgcttgtttgtttgtttattttgagatggagtctcactctatcccccaggctggagtgcagtggtgcgatctca

SEQ ID NO: 948231 - DNA, 658 bp, Homo sapiens
taaggcaggcctgatggtgacaaaatctctcagcatttgcttgtctgtaaaggattttatttctcctttgcttatgaagcttagtttggctggatatgaaattctgggttgaaaattcttctctttaagaatgttgaatattggcccctactctcttctagcttatagggcttctgcagagagatctgctgttagtctgatgagcttcctttgtgggtaacccacctcttctctctggctgcccttaaaactttttccttcatttcaaccctggtgaatctgatgattatgtgtctttgggttgctcttcttgaggagtatctttgtggtgttctctgtatttcctgaatttgaatgttggcctgtctttctaagttggagaagttctcctggataatatcctgaagtttgttttccaacctggttccattctccccatcactttcaggtacaccaatcaaatgtagatgtggtcttttcacactgtcccatatttcttggagtctttctttgtccttttcattactttttctcttacgttgtcttcttgctttatttcattaagttgatcttcaatctctaatatcctttcttctgcttgatygatttggctattgatacttgtgtatgcttcacaaagttctcatgctgtgctttc

SEQ ID NO: 948232 - DNA, 658 bp, Homo sapiens
taaggcaggcctgatggtgacaaaatctctcagcatttgcttgtctgtaaaggattttatttctcctttgcttatgaagcttagtttggctggatatgaaattctgggttgaaaattcttctctttaagaatgttgaatattggcccctactctcttctagcttatagggcttctgcagagagatctgctgttagtctgatgagcttcctttgtgggtaacccacctcttctctctggctgcccttaaaactttttccttcatttcaaccctggtgaatctgatgattatgtgtctttgggttgctcttcttgaggagtatctttgtggtgttctctgtatttcctgaatttgaatgttggcctgtctttctaagttggagaagttctcctggataatatcctgaagtttgttttccaacctggttccattctccccatcactttcaggtacaccaatcaaatgtagatgtggtcttttcacactgtcccatatttcttggagtctttctttgtccttttcattactttttctcttacgttgtcttcttgctttatttcattaagttgatcttcaatctctaatatcctttcttctgcttgatcgatttggctattgatacttgtgtatgcttcacaaarttctcatgctgtgctttc

SEQ ID NO: 948233 - DNA, 480 bp, Homo sapiens
ggaatgaaaaatggctgcctgtcaacagcatgctgcttagtaaataaaaaacaaaaagcaaaaaaaaaaaaaagatttacttcatctggaattttaaaataaaagtaggaaagaaactgctttttagaagaaatttgtgttatagggcattttgaaaatgtttccaacactgattttatagccaaaaattaggtgttacctataaaaattctcatatctatacacttaaaacatttataaacataactttttattctattcacaaatatttctgtaaataatgtaagttttatatgtgttgacctaaaaggaaagaagttgaggcaaaattaataacatacatagagagttcatttgagccaagcttgagggttgcaaccaaggagcatarattcaagttgccctgaatatgctcattagcagcagtaacaagtagatttttaaagagaaaaagaaaaataaaaaggcacgctctgagtt

SEQ ID NO: 948234 - DNA, 628 bp, Homo sapiens
tacccgaagttctgttgtaactcaggggtctcagttaagtcygtatgcatccctttaatctgcttttaatatttctagagagggctctgatgtttctgtgctcgaaaatgtgagacgattctcgatttcctaccaaatatagctgcagttcttcaggccttctctgacctggtgctagtctagtttacaaggttttcttccactctttcccttcagggatcctgcaaggctcagcaagctacactccttctgttccctcaacctctgaggctgcgtattgcttcccggagtcatctccttctccgtcacttgtctgtacaaatcctacatctcttcccaaggaagacccagctcaagtggtgcctctgccatgctaccttccctcacccctccagccaggtctcccacttcttcaaatttccaaagtatactttttggtgtttctctcagggcaatcagttatttctatcagttgtatttctgtaattcttctttacttctgcttacttccataagttccttaagggcagagacttcattcattcaaacaaccttgggcctggggaccccctggtacaagaaacagatacggtcactgtcctagtggaacttgatgtaatggggttta

SEQ ID NO: 948235 - DNA, 667 bp, Homo sapiens
ggagagacttacgcctgagtaaaggacagagaagagtgaagggaactttgtcttgyagattgggtaccagcttggccatagtgggtataacaccaagctggctcctggggtcttcaattacagacatttgctcctgggtggcatttctgaacctgtccttagccagaggggagcccactgccttgaagggagagagactcaggactggcagcattcaccagaagctgactgaagagcccttgggccatgagtgagcattggcagtagtcaggcagaagttgctgtgggtctgggatggtggtggccacagggagagactcctctgcttgaggaaaggggagggaataatttgtcttatggcttgggtgccagctcagccacattagaatagagcaccacgaagattcttaaggttcccaactccaggcactgtcttccagacagcatccccagaccctgccctggtctatagggagctcaccgctctgataagaaggacacaaatgtggctggatttgccacctgctgattatagagtccatgaaccttcagttaacataagtggtagccaggcagtgatcactgcagaccttgggtgaggcacagtgctgtgctggcttcgggtctgacccagcaaagtcccagtggtgatggtcaaaggagtgct

SEQ ID NO: 948236 - DNA, 636 bp, Homo sapiens
ctttgctttataaaaatgaccttagttaccttcctagcctataggaaaatatctatcaaaggagaccatgagagtttttaaagctttcaagtcagcagtatgctttcaaagaaaggaactcagctaggatttaggagaccttgagattattttttgtctttccttggtatctcatttattgacctggaacaagtcactggaggcctctctaggcctgaaatttctcatgcataaaatgggtatatctcctgattaatgtaggctgcctcattttacttctcaatgttgaaatttatccatgtgaagtatctctcatggtcaatttattttgtgatggagttggaataatgataatgagaagactttctcagaggtagtgaaagaaagtaccaacagcacaacctgaatatggcaggtacacacatagcaacgttccactcacgacctattcttgcaatgcttgaggggttaccagagatgacatgcagtggctgctttgaacattcctgttgaccattaagtccctcagawacttgaatagaattgtaacctctcactcccactctccttgacccaccaccacaccttgccccagggataaataacccttgagtttagagaaggaatgttaggaag

SEQ ID NO: 948237 - DNA, 621 bp, Homo sapiens
tttttagtagagacggggtttcaccatgttgaccaggatggtcccgatctctttacctcgtgatctgctcgccttggcctcccaaagtgctgggattacaggtgtgagccaccgtgcccggccctctsttcccatttctactccagcttcccatcttagtaaaaaaaatctgtgagcaacaccctgtagcgggaaaaggtaacctgtcttgatgggagtccataggaggctgcaggctgcttccctacagagactgatatcaaggtagctgcagaatttagattctaatcctagtgtgattggaggtggggtagattccagggaggtcagaaagtgatcaaatacaaaattgtgctcctatggaggaggtcataggaactttgaattatgacaatggctagtaattgggtagaattggagcaggctggtgatggcagttttgtgtgggtggtaggacctaggaatcaaacttgagggcaaattgtggagcacatatgacaaacgatgtagagcctttcctatttccctttccagtgtgttatccaaaacaataaataataaagaattaagaaagactaatatttttatcaatctcattaagaaaaattgcatcaaatcaag

SEQ ID NO: 948238 - DNA, 592 bp, Homo sapiens
gacatctatgcttggtgaaccctagtcagcctctccacacttccttgtttcaataaatggccccaatattcacctagtttttcagactcaaggcataggagatatttttactcttttctttacaccacacmtccaactcatcagaaacttccatttattccaccttcaaaatttatttcaaacttcaccactgtttaccactttcactgctgctatctataccaaagaaaccatctttgttcacctaaatccctgcggtaggcttgcacctggactccctgattccttttatactcttaagtggtcaggtctccagatagcaactagaatgatctgcctaaaacataaatcagataatgcctcacccctgcctcaaagtcctacataacactttggattttggttgttgtttttgttttgttttttgagataaggtcttgctctgtcacacaggatggagtacagtagcataatcacagcttactgcagcctcgacctcctggctcaagcagtcctcctgtctcagcaacctgagtagctgggactacaagtgtgcaacgtcaagccaggctaattttttatttttcgtaga

SEQ ID NO: 948239 - DNA, 592 bp, Homo sapiens
gacatctatgcttggtgaaccctagtcagcctctccacacttccttgtttcaataaatggccccaatattcacctagtttttcagactcaaggcataggagatatttttactcttttctttacaccacacatccaactcatcagaaacttccatttattccaccttcaaaatttatttcaaacttcaccactgtttaccactttcactgctgctatctataccaaagaaaccatctttgttcacctaaatccctgcggtaggcttgcacctggactccctgattccttttatactcttaagtggtcaggtctccagatagcaactagaatgatctgcctaaaacataaatcagataatgcctcacccctgcctcaaagtcctacataacactttggattttggttgttgtttttgttttgttttttgagataaggtcttgctctgtcacacaggatggagtacagtagcataatcacagcttactgcascctcgacctcctggctcaagcagtcctcctgtctcagcaacctgagtagctgggactacaagtgtgcaacgtcaagccaggctaattttttatttttcgtaga

SEQ ID NO: 948240 - DNA, 592 bp, Homo sapiens
gacatctatgcttggtgaaccctagtcagcctctccacacttccttgtttcaataaatggccccaatattcacctagtttttcagactcaaggcataggagatatttttactcttttctttacaccacacatccaactcatcagaaacttccatttattccaccttcaaaatttatttcaaacttcaccactgtttaccactttcactgctgctatctataccaaagaaaccatctttgttcacctaaatccctgcggtaggcttgcacctggactccctgattccttttatactcttaagtggtcaggtctccagatagcaactagaatgatctgcctaaaacataaatcagataatgcctcacccctgcctcaaagtcctacataacactttggattttggttgttgtttttgttttgttttttgagataaggtcttgctctgtcacacaggatggagtacagtagcataatcacagcttactgcagcctcgacctcctggctcaagcagtcctcctgyctcagcaacctgagtagctgggactacaagtgtgcaacgtcaagccaggctaattttttatttttcgtaga

SEQ ID NO: 948241 - DNA, 542 bp, Homo sapiens
tggatcgggtggggacttggagaacttttgcgtctagctaaaggattgtaaacacaccaatcagcactctgtaaaaatgcaccaatcagtgctctgtgtctagctaaaggattgtaaatrcaccaatcagcactctgtaaaaataaaccaatcagcgctctgtgtctagctaaaggattgtaaacgcaccaatcaaccctctgtaaaatggaccaatcagcactctgtaaaatggaccaatcagctctctgtaaaatggaccaatcagcaggacgtgggtggggccaaataggggactaaaagctggccaccagagccagcagcggcaacccgcttgggtccccttccgcactatggaagctttgttctttcgctctttgtaataaatcttgctgctgctcactctttgggtccgcactacctttatgagctgcaacactcactgcgagggtctgcagcttcattcctgaagtcagtgagaccaccaacccacagggaggaacaaacagctcctgacgctccacctttatgagctgtaacgc

SEQ ID NO: 948242 - DNA, 489 bp, Homo sapiens
gcttgcactgtgtgactggaaaagatgtggacactcaacaccagcccatgaaggcagccatgagggaggctgtactctgcaaaaccgcagaggtagagctgctcaagaccatgggaatcyacctcttgcataagcgcgaccagggtgtgagacatggagttaaaggagatcattttggagttttaagatttgactgccccactgcattttgaatttgcatggggcttgtagcccttcgtttggccaatgtctcccattcacaatggctatatgtacccaatgcctgtaccccattgtatctaggaagtaactaacttgcttttgattttacaggctcatagatggaagaggtttgccttttcttggataagactttgaactgcagacttttgagttaattctgaaaggaattaagactgggggactgctggaaaggcatgattggtttttaaatgtaaggacatgatatttgggagaggacaggggtgg

SEQ ID NO: 948243 - DNA, 631 bp, Homo sapiens
aagtatccctgagtcaagcattgattccagtcaaacttagattttgaagatttatttcttataaaaagaaataaaattaaccaaaataaccaaatataaagaaataaaactaagcagattgacctaaccaaaatatacaatttgattcacatcttaacagatatctgtatcttcaactttttaaaatcacttttaccaaattatatcagagaaatgttcagacatttaacttgataataatcctacaagacattttaaaaacacgaaggctaccattagatattatagatagtagtgttgtggttgaaggcattctttctaattttttaaaattttattttatttagattcagggagtacatgtgcaggtttgttatatgggtatattgtataaggttggggtttgagattctcttgaatccgtcacccaataagtgaaaatactatccaatgggtagtttttcaacccttgcctctctctctctcccttcctccttttggagtacccagtgtcaattatttctatttttatgtccatgtgtagcagttgtttagctccaacttttaagtgagaacacrtggtatttggttttctgtttctgcattaattcacttaggataataacgtcca

SEQ ID NO: 948244 - DNA, 598 bp, Homo sapiens
cgtgagctggcactgagtatctgaagctttttcagtgcacagtgagagatctcagtggatctaccattctaggatctggagratggtggccctcttctcacagcttcactagctggtgccccagtagggactctgtgtgagggctccaaccccacattacccttctgtgctgccctagcagagattctccataagggccccaaccctgcagcaaacttctgcctggatattcaggcatttccatacatcttctgaaatctaggtggaggtccccaaaccccaattcttgccttctctgcattcgcaggctcaacaccacatgaaagctgccaaggtttgggaattgcaccctctgaagccacagcccaagctctacattggcctctttcagccatggctagagtggctgggactcagggcaccaactacctaggctgcacacagcacagggacctttgtcctggcccacaaaaccacattttcctcctaggtctctgggtctgtgatgagaggggctgccatgaagacctccgacatgctctggagacatttttcccattttcttggggattaacatttgtctactcattatttatgc

SEQ ID NO: 948245 - DNA, 669 bp, Homo sapiens
gactcaggcagctgaagccgctgggaacaaagccttcatcatgggggtgggaggcgtcgtgcacctgagtgcagcaaggcacctgcctttcagctccgtccccacatccacagacttggtcctgggagacggacatctttaaagaaaaaagaaaaaaaactcagtgacttgaggttgcactagccaacagaaaggaacatggagttacgaaagcgacatgctcctcacttctccacagatgacctttcatttgcttttgcaggatgaggccgtcagtgccttgccacgagtctgaggtgggaagaaagggtcgcagctcctggcacatggcagaattagcgaagcgtgccatgtggaggtctgaggtctgcaggttctgactggacagtgaaacccactgctcccgccatccctttctctgtcacacacacacacctagtgaccttcaaaagtgtctcgggagaatttggcaggatgctcgtgtcctgtgccagtgacagcactgtcatcactgttagtgtgaccctatctgtttttcaggcttgtaaggtgaccaggaggaacatacgtacacacacacacacacacacacaagcgyagccaccgtcccatgggaaagtgaggacaggttcacactctggggacatgggaagcaaaatatcacagtgg

SEQ ID NO: 948246 - DNA, 614 bp, Homo sapiens
ctgcagtggagcatggccagggacgccccaatgctcgccacactcctgagtgggctttgccctttattggatgttggacctggacagagcagggctatcttgcccatggaactgggccagtcttgtcttakcacccccctgtctacttgcctctcctgggatccctacatggccatgcccgcttgcagcacagccttggctgcccaacctgggcacttcctggtagccaccgccatagctccttcgtcagcagactctgcctaaccattggagaacatctcttcagagaggcccccaccagcacgcacttgcccacagcctcccctcaccactttgctggtgtgacttgtccacagcctcctgccgctgcatttccagggtgcacatgcacgtggactttgccactgctgccccaccaccactgacatacatgtgtgtaaaccccaccacactgccaccaccagtgcatgtgcacatacatggacgccaccacactgtcaacccaccaccaccagtacacacacatgcacagaccccaatgcaccgctgccactggtgtgcacgtgcaagcacagaccccactgttactgccccaacaaagtgctttttctagc

SEQ ID NO: 948247 - DNA, 612 bp, Homo sapiens
gcgacttaaagagcgaagtgtaaagtattcgggttgggtggttctgactgtaccaagggacgtgtgcatcagacctgcttacctcaccccaggggggacaagcctggggcaattttagggtcgagggtgcgccaccgtatcccagatccccaggacccagcccaggctgagctggacactagtctggggcctgccagcccctccccaccctggacagggcttgtgcactcagcagggctttcttcccaggggttttctgctcagccccctgcactgagggtttcctacaactagcttagtcactggggtctcggcttatcagcctcaagtcacacatgacatcagcacccagaggtgtgagcccgtccccatccattcatttcctccacacacatgctttccaggggccaggcactgtgctagacccagggacaccatgacagatgccacagatgaggtcccccatgccgtggacgtccgttcaggtgggtaagactgacataaataagcamacggataaatgagccaggctgtgccaggtcgtgacaggcaggggcaagagcacgaggctcacagggacacctggagcaaggcgtccaacatcacgctggg

SEQ ID NO: 948248 - DNA, 579 bp, Homo sapiens
aatagacaaaagggactatattaaacawaaaagcttctgcacagcaaaagaaacattcaataagtgaagagacaactgcttgaataggagaaactgtttgcaaactactcattcaaaagggggctgtatccagaatatataaggaactcaaacaactcaacagtaaaaaaccaatagtcccattaaaaattgggctaagacatgaatagacgtttctcaagaagaaatacaagtggccaagaggtatatgacaaaatgctcaagatcactaatcatcagggaaatgcaagtcaaaactacaatgagatatcacctcacctcagttacaatggcttttatttaaaaatcacaaaataacagatgctggtgagaatccagagaaaagggaactattaaacactgttggtgaaatgtaaattatgcagccactataaaaagcagtgtggagatttctcaataaactaaaaatagtactaccacatgatccagaaatcccactgacaggtgaagccagttggacttcctgggtcagtggggacttggagaacttttctgttttacaagaggattgtaaaacgc

SEQ ID NO: 948249 - DNA, 615 bp, Homo sapiens
ctgttgcattttggcctgcctttgttttcaccaagtgtgagtgcagcacaatgccacagaaatgagggcataagaaaaacatcagatttattattcatagcaacagctccaagtccagacagctccaaagtaaatctgagcaaggacttgctgtgactttgtgaccaaatacttaatgttctcatatcattagtgcgctctggcactttatcaaatctgtaatattgactaactaccagtaattgctgatttatgggcaaagttttctcagtcttgttttcttcaggactctaacagaccttcatcttctgaaaacacgttgaatcagtaagttcacgttctctttgagctttgctgtttttatatctaaaaagatgatgtcttgctcttttacctgttgctgtcaacactttacttgccttaagttatcggtttgaaaaaaacagccacacgtctgcgcattcacagaaggcaattaatgagaatatggcatgtggggaataaattttattkttctataattttcaaaagctctttacttaagtgcaataaaataatgatacaactaagaatgatttctaaagagcatctagtccttggtgacaaataggtttc

SEQ ID NO: 948250 - DNA, 646 bp, Homo sapiens
tggcctattgtgggatttcattttgtgattgtgtcagtcaatyctccttaacaaactcccttttatgtatacgtctatcctattagttgtgtccctctagagaactctaatacaatgaatttcttttttgtttttttaattctggaggtcagaaatctgaaataagttttaccagtggaaagtcaatgtgtcatcattgctagtttgttgttgttttccaaaggccctgaggggagaatggattttcttggcttttgtgatcttctggtgaagctgcctgtttcctgggctcttaggccctttctccagcttcagagagcgtcactctgacacccgctttcatcatcacgttgccttctcttctgaggctgatttctgatgcgttccccttgtaaagacaattatgattacattaggccaacacagatcaagatacttaatcacatctgcaaagtcctttttgccacataatgttacattcccaggttccagagattaagacatggtcatatttcaggaaatgagcgttttattcagtttaccatagcctgtaagccaaattcaccaatacttttgtattctggttcacgtatcccatttttatgagcctccttttgcctattcctagaatgtttaatgacccttt

SEQ ID NO: 948251 - DNA, 606 bp, Homo sapiens
atggtggcaccctggtggtgtgttgccttgttgctggggtggtttccctccgctggtgagggcaaagggctggtgtgacagccttttctgggtactggcgcttggtgggtcccaagctcttgtccggtgtctgagaagaatggggttacacagaaaattgaatgatggtgaaaatggagaattttgttgagtgatgaaaacatttctcagaagagagtggagctggagaggggacgagaaggacaggtcgtctttccccaaaatcaggttgtctcttccccaaagtcaggctgtctcccctctactgactgagtctgggatctttataggcacaggataggggtggggcataccataggtagttttggaaaaagcaacattcaattggtaaaaaggcatgattcagaaagaaccaattgggagagggcaggcaaacaggaatataagtacttactttggacttttggccatgggtttcaggctgttttttgttgttgttttatggtgaaggtggggtttcaccagggacycacccgccctgtccacctagaatttctctgcctcctgcctctattaccgtgaaggggttgggggaagctgcactcc

SEQ ID NO: 948252 - DNA, 606 bp, Homo sapiens
atggtggcaccctggtggtgtgttgccttgttgctggggtggtttccctccgctggtgagggcaaagggctggtgtgacagccttttctgggtactggcgcttggtgggtcccaagctcttgtccggtgtctgagaagaatggggttacacagaaaattgaatgatggtgaaaatggagaattttgttgagtgatgaaaacatttctcagaagagagtggagctggagaggggacgagaaggacaggtcgtctttccccaaaatcaggttgtctcttccccaaagtcaggctgtctcccctctactgactgagtctgggatctttataggcacaggataggggtggggcataccataggtagttttggaaaaagcaacattcaattggtaaaaaggcatgattcagaaagaaccaattgggagagggcaggcaaacaggaatataagtacttactttggacttttggccatgggtttcaggctgttttttgttgttgttttatggtgaaggtggggtttcaccagggactcacccgccctgtccacctagaatttctctgcctcctgcctctattacygtgaaggggttgggggaagctgcactcc

SEQ ID NO: 948253 - DNA, 540 bp, Homo sapiens
gaattccgtatcttgattttaatccagattttaatcctcccatgactttacctttatatcactattaagtttattcgcagattggtaagtatgtctgatttttaaaaaatttttcctaggagaacttgtactgacgagaatagccctcttactttaaaattgctaaaatctactctcaatgtatcagcaaaaacagaggaacaaaaaagaagaaagaacctaaaagataaaattattttgggggggagaaaaaggtttccagatttgtagttatcatagtttagcagaactcaccaaaagtttaatcttgttataaaatgttgtaaaaataattagaatgtattcatagcgaatcttaaatctcttttcccacttaatttagattctataaaatattgactttttgaaagaaaaatgtcattgggtgctaaagagctcttaataataatgttggcctctaatggacctaaatatttggctttagaataaaaagtaaatgaacctagagtgacmttcaatcattgtaaacgttggtgatac

SEQ ID NO: 948254 - DNA, 719 bp, Homo sapiens
actgtctccaggtctctgtgggagcctgggttcctttggggcctggattcagggctcatcctagagtgagctgtcatctcagggcatctccctgggggatatgtgcaccccrgagctgcagttacagacactgagctcactccaccttcaccacccagccctgctgcttcccgccctaatcctcctggcagagcccctggataaggaaaatatttgtgaaccacggaagctctttggtgctggaattttgcactccaaagcatcgccgcctgttagatgatgtttccctccagcacctaggacactgaagaggagaccagggcaggcaggcagatgcgtaagagggaggattgactgctgtagcacccgacccaggacacctgcctctgggactgtggcgcctccatccggctctctggatcctgggttctggggggtccgacctttcatttttttctccgcctcacaccccaccatgtcgtgtctgaaaggaagcgaagcccagccctggcaggtggagtatttttatttcccctgacagcgcacctcctgacctctatcttcttgccagtgattttttaaatcctaaatgatttggcaataattgctcctccttgcgtgattattgcccttcaccgatagtaaatctgggaatcccctggggtcctgagcgcactttggtatgcggagcccacaagctggcctggacaggcatcact

SEQ ID NO: 948255 - DNA, 521 bp, Homo sapiens
ttcagggcacccaaaatggtggtttacagagagaatagcaagagccagggcccagggtctggattctgctcaggctggggtcttggctctgccaattatgagccacggggccacaggtgacttgctacctttcccccatgccttgatttcctcatctgtcaactgggtatatcatagttcctgccggccaggtgcagtggctcatgcctgtaatcccagcactttgggaggccaaggcaggcggatcacttgaggtcaggagtttgagaccggcctggccaacatggtgaaaccctgtctctactgaaaatatgaaaaattagccgggtgcggtggtgcacatctgtattcccagctactcgggaggctgaggcaggaggatcgcttgamcccgggagaggcagaggttgcagtgaaccgagatcgtgccattgcactccatcctgggtgacagagtgagactctgtctcaaaaaaagaaaaaaaaaagttcctgccttgtagagtaagggtgaagcctgc

SEQ ID NO: 948256 - DNA, 600 bp, Homo sapiens
ggtctgttggagtttgctggaggtccactccagaccctgtttgcctgggtatcagcagcggaggctgcagaacagcaaatattggtgaacagcagatgttgctgcctgattgttcctctgaaagtttcrtctcagaggggtaccctgccatgtgaggtgtcagtttgcccctactggggggtgcctcccagttaggctactctggggttagggacccacttgaggaggcaacctgtctgttctcagatctcaagctgcatgctgggagaaccactcctctcttccaagctgtcagacagggacatttaattctgcagaggtttctgcagccttttgcttagctatgccctgcccccagaggtggagtctacagaggcaggcaggcctctttgagctgcggtgggctccacccagttcgagcttcctggccgctttgtttacctactcaattctcagcaatggagggtgcccctcccctagccttgctgccacgttccagttcgatctcagactactgtgctagcaatgagcaaggttccgtgggcataggaccctctgagccatgcacgggatataatctcctggtgtgccatttgctaa

SEQ ID NO: 948257 - DNA, 759 bp, Homo sapiens
ttctgtgaacctaccaaaagctattgaattgtacacttaaaaaatgggaactcaacattaagggcacattcctccacaaaactgctctccagacaccagcagcaagttcaggaattaccaggycatcctttcttctgactagctggctgcaaatttggagtttcccacagccactctctggtcagtaatttgctaaaacaactcacagaactccagaaaaaactatgttatgattgcagttctattatagcaaaaaggacagaccagaaacagaagaagaggtgcctggggcaaagtctgagagagtcccaaatgtgaagcttccctcattctcagggacacattgccctcccagcattgaagcatgaaaatactctgaccagggacgttctcctgagttttggtatccggagtttttattgaggcttcgttatttaggtatgattgaatcattggctatgtggttgaactcaatctctagcccccttttccttcctggaggttggactggtatcacatgactcaaagccccaactctaactacatggttggcttttccgggtggccagctcccagcctgagtcatcttgcaaacataaactatccaggggtcttccgtgagtcactgtgttagcagaaactatcaagtgggatcccaggagtccaccgtgaataatgaatactcctatcactcaggaaattccagagaattagaggttacttcccagaaaccaaagacaaaggccgcctaattcttta

SEQ ID NO: 948258 - DNA, 590 bp, Homo sapiens
catcacattttttaatgcagtcatccatcgataaacacctagattgattacatgaccttgctactgtgaatagtgctgcaataaatatacaagtgcaggtgtctttttggattaaagacataaatgtaagatctgaaactataaaaattcccagaagaaaacctaggaaatcctcttctggacattggctgatgcaaaggatttatgaataaggcctcaaaagtaaatgcggcaaaaacacgcatagaaaaatgagacttaaagagattatgtggagcaaagaaatgatcaacagaataagcagacaacctacagaatggggggaaaatatttacaaactatgcatttaacaaaggagtaatatccagaatctgcgaagaactctaacaacaggaaaaaaaaaacctaacaacctctttacaaagtgggcagaggacatgaacagacatttctcaaaagaagacataygagcagccaacaaacattaaaaaatgctccacatcactaatcataagagaaatgcaaattaaaaccacagtgagacaccatctcacaccagccagaatggctattattaaaaagccagaaaa

SEQ ID NO: 948259 - DNA, 596 bp, Homo sapiens
aagggcacccaagtgagttgccactgctggctcaggaagcctgcttttattctcttatgtggtcccacccacatcctgctgattggtccattttacagagagccaattggtccattttacagagaggtgattggtccattttgacaggatagtgattggcgcatttacaatccttgagctagacacaaaagttctccacgtccccactagattagctagatacagagtgttgacacaaaggttctccaagtccccaccagagtagctagagagtgtcgattggtgcatttacaatcccttagctagacataaatgttctccaagtccccaccagactcagaagcccagttggcttcacctagtggatcctgcagcaaggctgcaggtggagttgcctgccagtcctgtgccatgtgcctgcactcctcagcccttgagtggtcgatgggactgggcgccgtggagcagggagcrgcactcttcagggaggctcaggctgtgcaggagcccacagtgagggggaggctcaggcatggcggactgcaggtcccaagctctgccccgtggggaggcagctaaggcctggcaggaagttg

SEQ ID NO: 948260 - DNA, 596 bp, Homo sapiens
aagggcacccaagtgagttgccactgctggctcaggaagcctgcttttattctcttatgtggtcccacccacatcctgctgattggtccattttacagagagccaattggtccattttacagagaggtgattggtccattttgacaggatagtgattggcgcatttacaatccttgagctagacacaaaagttctccacgtccccactagattagctagatacagagtgttgacacaaaggttctccaagtccccaccagagtagctagagagtgtcgattggtgcatttacaatcccttagctagacataaatgttctccaagtccccaccagactcagaagcccagttggcttcacctagtggatcctgcagcaaggctgcaggtggagttgcctgccagtcctgtgccatgtgcctgcactcctcagcccttgagtggtcgatgggactgggcgccgtggagcagggagcagcactcttcagggaggctcaggctgtgcaggagcccacagtgagggggaggctcaggcatggcggactgcaggtcccaagctctkccccgtggggaggcagctaaggcctggcaggaagttg

SEQ ID NO: 948261 - DNA, 609 bp, Homo sapiens
caaactgtcatctgacaacctgaccaaaaaggggaaatttttgtgagcaaaattatgggaggacattgttttgaactgagctcttgcactaggcctcaacagaccaaaccaaamcacaatggagtcactcgtgttaaatatgcctaaaacggaccaggttttgtttttctcctgccaacagaatgtttcagcataaggaggtaccctctactcattctttgttccctccttgcaaaacccattgttctactgtttcccagtgggtttcaagatcaaataagtacatttacaatggcaaaagtgatatcgatgactaaagttttggtcaatctctcaaaattgagaaaattaccaaaagaggggaattgttaaagcaaactaaatatggcctgagaaaggctctgtacttctacatttgagtccttgtggataaactgtaatctaactttataggcagacaagattgaaaacctaatttaagaatatctgcctgtaacaatagctgagtcttggccaatcccacggtcatacttcaaccactcatagactactaagtgttcaaactgtgttcaaataaggcaaatgccaacctgtaaccaatccacctgt

SEQ ID NO: 948262 - DNA, 581 bp, Homo sapiens
tggagctacattcaaacacccccagtggatgcctgaaaccacagattacactgaacctgatatacactaccttttcctatatgtacacacctaaaataaagtttaatttataaattaggcaaagtaagaaactaacaacaataactaattataaaatagaacaattataataatattttgtaatgaaatatatattaatgttgtctctcatctcaaaatatctcattgtactgcactcactcttcttgtaatgatataataaaatgcctacatggtgaggtaagtgtgtgactagtgttggcattgtaacataaatttgaaaatacagaaataaacaattctcgagttttaaattgtgcattgttctgagtggtataataaaatctcacaccatcctgctttattctgctcagatttttcttactcagtaggtatattggttgtcaactcaamtatctcactatcacagtgcttggtgttcaagtagccatttaaaaaaatgtattatactttaagttctgggatacacgtgcagaacgtgcaggtttgttacacaggtatacacgtgccatggtggtttg

SEQ ID NO: 948263 - DNA, 591 bp, Homo sapiens
ggagcccaccacagctcaaggaggcctgcctgcctctgtaggctccacctctgggggcagggcacagacaaacaaaaatacagcagtaacctctgcagacttaaatgtccctgtctgacagctttgaagagagcagtggatctcccagcacgcagctggagatctgagaacgggcagactgcctcctcaagtgggtccctgacccctgacccccgagcagcctaactgggaggcaccccccagtaggggcagactgacaactcacatggccgggtactcctctgagacaaaacttccagaggaacaatcagacagtagcattcgcggttaatgaaaatctgctgttctacagccaccgctgctgttacccaggcaaacagtgtctggagtggacctctagcaaactccaacaggcctgcagctgagggtcctctctgttagaaggaaaactaacaaacagaaasgacatccacaccaaaaacccatctgtacatcaccatcatcaaagaccaaaagttgataaaaccacaaagatggggaaaaaacagagcagaaaaactggaaactctacaaagcagagtgcctctcctc

SEQ ID NO: 948264 - DNA, 620 bp, Homo sapiens
ttaatccctatcactcaggaaattacaagggttttaggagttttgtaccagcaacctggaacmaagaccaaatatttcttacatcacaatatcatagctagtaactttctgcatgacttttaggacgtcactatttttcagtttaatctttttttcctacaaagttaggggtaggactacaatattctgagtgcttttagtcctaaactttcaggattttaaattgttagcagactatctttattatttacaatagctttcagtggtgtgctggaggccactcttaaccatctccaaaaagcaaactgtcacatattcagaaacctcaaaagctgggtgttaaacttttggtattttaaaaccagccccttacgagagtactgtatttatatcatggaaataggaaaacactagaaatcaaggctttaaaaagcaaaacaaaacatagagccagtttaccagcataccactgataacaagtgttataatgttccacagaccagaaccagacgcagtaaatacgtaacagaatgccccaccatattttaaggtagattattatagtactaattgaattagggcagatttgtaaattgttctaaaaaatcattaagtctaca

SEQ ID NO: 948265 - DNA, 573 bp, Homo sapiens
cattgatgttcatcagggataaaactggctagccatatacagaaaacagaaactgtaccccttccttacaccttatacaaaaattagctcaagatggactaaagacttaaatgtaaaacctaaaaccataaaaacctgagaggaaaacctaggcaataccattcaggatataggcatgggcaaagacttcatgactaaaacaccaaaagcaatggcaacaaaagtcaaaattgacaaatggcctctaattaaactaaagagcttctgcacagcaaaagaaactatcatccaagtgaacaggcagcctagagaatgggagaaaatttttgcaatctatccatctgacaaaagtctagtatccagaatctaaaggaacttagacaaattacaagaaaaaaaaaacccatcaaaaagtgggcaaaggatatgaacagacgcttctcagaagaagacatttatgtggccaaaaaacatatgataaaaagctcatcaccactgttmattagaacaatgcaaatcaaaaccacaatgagataccatctcatgccagttagagtggtgatcaaaaaagtc

SEQ ID NO: 948266 - DNA, 573 bp, Homo sapiens
cattgatgttcatcagggataaaactggctagccatatacagaaaacagaaactgtaccccttccttacaccttatacaaaaattagctcaagatggactaaagacttaaatgtaaaacctaaaaccataaaaacctgagaggaaaacctaggcaataccattcaggatataggcatgggcaaagacttcatgactaaaacaccaaaagcaatggcaacaaaagtcaaaattgacaaatggcctctaattaaactaaagagcttctgcacagcaaaagaaactatcatccaagtgaacaggcagcctagagaatgggagaaaatttttgcaatctatccatctgacaaaagtctagtatccagaatctaaaggaacttagacaaattacaagaaaaaaaaaacccatcaaaaagtgggcaaaggatatgaacagacgcttctcagaagaagacatttatgtggccaaaaaacatatgataaaaagctcatcaccactgttaattagarcaatgcaaatcaaaaccacaatgagataccatctcatgccagttagagtggtgatcaaaaaagtc

SEQ ID NO: 948267 - DNA, 605 bp, Homo sapiens
atgccattgcactccagcttgggcaaaaaagtgaaattttgtctcaaaaaaaaaaaaggaagaagagaaatagaaagataacaaagtgcaatagtttagccaacgaaggacaaaatttgttgaagaaagtcgcrggagattgtcaacaacatacaaggttaaagcaagcaggagatgagagatgagagaaagccactggatctggtggaaaagcacattttgatctttgatgagcaggtagtttcagaagagttttaaagtcagatgaaagctggcagaaactgagatgatactgaatcaggatagaacttggaagtaaaagtacacaccaaatatttgaaaatcgtagcaactaaaacagaaagaatttatgggtgttaaaagaaatggaagctgaatcaagaaaaaaacttataattaggaaacagaaaaccttcttatattggaaaaaggaaggaatcctatctattgaatcaaattgagaagtattggctaattgtggagtgaaattctggggttaaaggaaagaaaggtgagttaaaatttagttcaatacccatttcagaaagtaggagacaatatttacccagattataaggaaagat

SEQ ID NO: 948268 - DNA, 582 bp, Homo sapiens
agaagttacatggggacagagggtgtatgggaaatctcttactttcttcttaattttgctgagaacataaaactgctctaaaaaaattaaatctttaaaacaaaggatgatgctgkcataaaaacaacatacaaaccaatagaacagaatgaagagcccagacataaatccacacatgtatgaccaatggatcttcaacaagggtaccaatgaacaaaggacagtctcttcaataaacagtgttgaaaaaactggatatccacatgcaacaacatggaattagattattttactgaatatataaaaatcaactcaaaacggattaaagacttaaatgtttaaatcctgaaaccataaaactcctacaaggaaacatagggaaaaccttcttgacattggccttggcaatgatttcttggatatggccccaaaagcacaggcaacaaaaacaaaaatagacaaatgggactacatcaaactaaaaagctctgcacaataatcaactagtgaaaagacaacctatggaatgggaggaagtctttgcaaaacatacatctgataagaagttaatatccaaaatat

SEQ ID NO: 948269 - DNA, 646 bp, Homo sapiens
aactttattctttttgaaacaaggtstcactctgttccccaaactgtagtgcagtggctcaatcacggctcactgaaatcttgacctcctgggttcaagcgatattttcacctcagcttcaggagtagctgggactacaggtgtgcctaccatgccccgctgtattatgtatctagaatccttttctttctctccttttccttcgtcttttataaataccaatatatttttcctcctaaacctcactagtaaactcctgacacaggacctgctactacttctttgtacctgttaaatccattctccacatatatgcaacttaccgttagtaacaaaaattagctaatgtcactttcttgcttaaaacggccacacataagcaggaagtatttcttagtttttctacatggaggtgtgatatgagtatataaaagatattgcttgtgtaaagtggaaaagagtaccatctcaagcaagtttgattaagatcagcagaatatactttcagccgggcgcggtggctcacgccggtaatcccagcactctgggagtccgagacaggcggatcacgaggtcaggagatcgagaccatcctggctaacacggtgaaaccccgtctctactaaaaatacaaaaaattagccag

SEQ ID NO: 948270 - DNA, 564 bp, Homo sapiens
tcttcactgacaatatgattttatacctagataaccccaaagactccaccaaaatgctcctggaactgacaaataactttagtaaagtttcaggatacaaaatcaatgtacaaaaatcaatagcakttttatacattaataatattcaagctaagagccaaatcaagaatgcaatcctatttacacttgccacagaaaaactaggaatacttctaaccaagatggtaaaagatctctccaaggagaactacaaaatattgctgaaataaaccttagataacacaaaaagaattccatctcatggattggaagaatcaatatcattaaagtaaccatactgcctatggcaatctatagatccaatgctattcctatcaagctatcaacataattttagaaaaaattattctctaattcatgtggaaccaaaatgagcctgagtagccaaagcaatcttaagcaaaaagggcaaagctggaggcatcatattaccagactttaaactgtgctgtaaggctacagtaaccaaaatagcatggtactggtacaaaaacaggtacatag

SEQ ID NO: 948271 - DNA, 631 bp, Homo sapiens
gcactatgcaattctctttattaacagcttaatggggtataattgacatactgcagactatatatatttaaagtatacaatttgataagttttgacatatatacacacttataaacaattactacagtcaagataagaaacatattcatcaccccataatcattgataaaccctctctcctttcctccttctaacccaaatattcatctgctttctgttactaccagtgagcttgcattcctgtaattttacataaataaagtaatacagaatttactaattttgtctgttttgttaaacttataataattattttgagattatccatgttgtgtggataggtagatcattaattttttttacagttcagtagtatgccttgcacagatttacacgtttttgcttatttgcccatttatttatatttgttttgctttcagttttggttattacaagtaagaccattatgaagatttttgtacaagtttttttgtactaatgtgctttcatttttcctgattacatgtttaggagtggaaatagtaaaaagttaggtaagtrtatttaatgttttaacacacttgcaaaatattatccaagtggttgtaacattttacacttcacaaacaaa

SEQ ID NO: 948272 - DNA, 564 bp, Homo sapiens
tgttgcctaggctggagtgcaatggcacaatctcacctcaccgcaacctccgcctcctgggttcaagcaattctcctgcctcagcctcccaaatagctggaattacaggcatgtgccaccacgsctggctaattttgtatttttagtagagacagagtttctccgtgttggtcaggctggtctcgaactcccgacctcaggtgatccgcccgcctcggcctcccaaagtgttgggattacaggcgtgagccaccacaccccgccagggacccttttctttaactgattcctcaccctccagcccaagagctagagctgaccccaaaagataacatttgccaagactctcctgtcactgcaccaaaaggagaaattaatcctgttttctctaattccaatcactaaaaagcttctttatcagaataacggtagaatcacaatagctgatatgtactgaatgcttattatttggcaggcactgggctaaacccttcatatgtaacttagtcaacttagttgatagctgtgctctaataaagaccacagtaaaggggctttttgcgg

SEQ ID NO: 948273 - DNA, 660 bp, Homo sapiens
tctcccagaaaatggtttttttcttttttattgcrtcatcagcctgcaaattttccaaacttttatgctctgcttcctcttgaatgcttcaccacttagaaacttcttcccccagataccctaaatcatctctctcaagttcaaagttccacggatctctggagcaggggcaaaattctgccactctctttgcatagcaagagtgacatttactccagttcccaacaaattccaaatctccatttgagaccacctcagcctggaccttgttgttcatgtcactgtaagcattttggtcaaagccattcaacaagtctctaggaattttcaaactttcccacattttcctgtcttcttctgagccctccatactgttccaatctctgcccgttacccagttccaaagtcacttccacatttttggatatctttatggcagtaccccactctatgtgtaccaatttaccatattagtctgttctcatgatactaataaagacatacccaaggttgggtaatttatcaaggaaaaaggtttaattgactcacagctccacatggctggggaggcctcacaatcatggcagaaggtgaatgaggagcaaagttacatcttacacggtgccaggcaagagactgtgtccagggaaactccccttt

SEQ ID NO: 948274 - DNA, 602 bp, Homo sapiens
gctgccagccggctctcccttgccttcagggtcagcagcttarctatttctctctctggtaacgagtgcacctgtacagtgttggcagggcattatactttttacagacaatagtggtgtagagccaagtgatgaccttcccgttttatggcttgatagctgtttatacattatatatggaattgtgtgcctgtgctccaaactcactgagtcatgcaggatgtttacctcagcctctcctgcctggctgcagtgcagccatattcctcacaagatgctagcgaggttacagagaaaaaaggaatgcttttatactcttggtgggagtggaaattagttcaacaattgaggaagaccgtgtggtgattccttaaagatctagggacagaaataccatttgacccagcaatcccattactgggcatatacccaaaggaatataaatcattcttttacaaagacacttgcatgcatatgttcactgtggcactattcacaatagcaaagacatggaatcaacccaaatgcccagcaatgataggctggataaagaaaatgtggcatatatacactatggaatactatgcagccatgaaaaggaa

SEQ ID NO: 948275 - DNA, 571 bp, Homo sapiens
attgaatttggaaagaatttcagttttacaagatgaagagttatagaaatggatagtgggtgatggttgagcaatattatgaatgtatacggtaccagtgaaatgtatgtatacttaaaaatggagggccgggcscggtggcttacgcctgtaatcccagcactttgggaagccgaggagggcggatcacgaggtcaggagattgagaccatcctggctaacacggtgaaacccagtctctactaaaaatacaaaaaaaaattagccgggtgtggtgcgggcgcctgtagtcccagctactggggaggctgaggcaggagaatggcgtgaacctgggaggcggagcttgcagtgagccgagatggcgccacagccgtccagcctgggctacagaaccagacaccatctgtaaaaaaaaaaaaaaaaaaaaaacaaaatggagaatatggtaaattttacgttacatgtattttctcacaataaaaaaatttaaaacaaaattgacttgcagaggttcactttcgtcacacagcgatgggggaatggactgtctcccctcccagctctcagc

SEQ ID NO: 948276 - DNA, 575 bp, Homo sapiens
tcccttataaaactgaatgcttttaacagcacccaagtcatctttatgctttgctgcttrgaaatttcttctgccagacaccctaaatcatctctctcaagttcaaatttccaaaaatctctagggcagtggcaaaatgctgccattgtttttgctaaaacataacaagagttacctttgctccagttcccacaagttcctcatttctgtctgagatcacctcagcctgggctttattgtccacatcactatcagcaccttggtcaaagccattcaacaaatctctaggaagtaccacactttcccacattttcttgtcttcttctgagcccttaaaactgttccaacctcagcctgttacccagttccaatgtcacttccacattttcgggtatcttttcagcagcgccccactctactgtatgaattttctgtattagtctgttttcatgctgctgataaagaaatacccaagattgtgcaatttacaaaagaggtttaatggacctacaattccacatggctgtggaggcctcacaatcacagcagaaagtgaaaggtatgtctcacatagc

SEQ ID NO: 948277 - DNA, 551 bp, Homo sapiens
agaaaatgtcacaaatgtcaaaaattctggttctcccctcacaaatttattttgcaaggtattggtgaagtgtatgtcttcaggatcctcccagttggggcagtaggtctaaagtkacaaatccactctaacattctaatctttctaagtctttggaccctttcctctacattaaaccaagggagattaggcatgtccagttcactcaaagtgggcaatgttttgatcaattttcagctaaccaagcaaataaactattagaaccttgtttaactccccaaactgcaactttaaatgcagaatctctggttagtgggcccatatcaataaattcagcctgatccaattttatgtttctaccaccattctctcagccccttaatatccatttccataactattctgtaggtttctgcttatataaattagaaaactcagatcattcatttggagtgtagcacaccttctcatgggtcacactgtacctcaccaccacagggctgctggaacttgaatctagttacaggggtggtgggagtgggtcctgaaga

SEQ ID NO: 948278 - DNA, 604 bp, Homo sapiens
ggattaggctggtattacgggttttgaggaagaagactacagaggtaaactgccgttttcatcatatgtcaggggtatatactatcaacatgacatcactgttaatgttgaccttgatcaccttgctaaggtagtatttgccagctttttccactctggtcactctttttctacactttcttattatgctgtttgaaagaaagtcactatgtatagtctacacttcagaagtggggtgttatgctccacttccttgagggcggaatatcaatataaattacttagaattctcctgcactgaaggtttttctattctccccccatttatttatttaatcatttatttttatcagtatggactcatgaatatttactttatactttgggttataatccagtagtttcttcctccctccctctctcttttcctcccttccttcctcccctccttcctttgcttaaattcttccagctttggtcactgggagctctttcagtgggttcctgtgtccctttgatagatcctcatcattatgaactcttttttaagactttcttgctttttgtcattacaaagtttatttygtatattcactgcccagtt

SEQ ID NO: 948279 - DNA, 568 bp, Homo sapiens
ggaagcaggtgacacattatagratacacagcaatggataagcctaacaaagccagtcactgccattccccctcttacctttgtgttctctccctcccacatttcctgtcaactctcccaacatcccctcccaaactgtactcagaataatttacacggcctcaatctcaaagagaaggaaacataagctgtttatgatattccgtattatgctttcgaaaaatatacatggctcactgagcttaccccagtgtgagcaactcctctcagcgatccctgagacaaggggtgtgcgtgtgggtgaatgtacacatgtgtgagaccagctagtggcagtggcacagggtgtgtttgtgagtgtgcatgtgtgtgtgtgtttatgagagagagaaagaaagaatgtcggtgtgtgactcccccactcactctttggagcctgagaggctctcctttctcagagcaattactacaaatgatttatgtgaccagtcaaaagggcctgccagggttcttatttcatctccagaaaaaggaactctgctggaatgttatcagggagcttgggatt

SEQ ID NO: 948280 - DNA, 645 bp, Homo sapiens
agcatgaaatgtgctatttggagtgctggtatcactttgatattttccccattataggtgacaaaactttttttttctggatgccttttgtattctatccttatcttcaaagacttttaaaataaatgttaccgctgtagatagatagatagtaattattacttatccttttatcccttaaatactgtactttttcctgcaggttctaggttttctgtatttcaaacatgtgttttcaaaaaatttgataaatttattctgttctttagtactatcaattatgcatatgtcctacttcctcatctgtcattcatatacaggcatacctcattttattgtatttctctattgtgcttcacagatattgcattttttttacaagctgaagttttgtggtaaccctgcgttcagtgtctattggtgccctttatccaacagcgagcatgtgctcacttcgtgcctctgttacattcttggaatattttcacaatatttcaaagtttttcattatwattatatctgttctggtgatctgtaatcaatgatttttgatgttactattgtaattttgttgaagtgtcatggacctcacccacataagatagcaaacttaatttataaatgttgtgtgtgttctgactgctc

SEQ ID NO: 948281 - DNA, 552 bp, Homo sapiens
tcatcatacctgggaatccatattcggcagaaacctgttaygccaaggaaccatcatagttgctttagggttttgggataaggataggccagtataggctggatacgttcctcactgagggccttggtgtctttggataattttagccctaagtatttaacgtgctgtgagcagagctgagcctttcatctggaaacctgtagccacaggtagcgagaaaatttaagagtgcttgggtggcttgatggcacaaggtttcttaacaggtggctaaaattaaatcatctctgtaccaaaggacaagagtgtccaggtatgagagttggctcaagtcttgggctaatgcctggccaaatagatgggggctatacttgaacccttggggtaaaacagtccacgtgagttgagacgttgggttcaaaggatctttaaaggcaaatgagaattgagagtcaggatgtacagggatgcagaaaaaggcatccttaaggtccagaactgtaaaccactctgcttcctctggtatttgggaaagcagagtataagggctag

SEQ ID NO: 948282 - DNA, 655 bp, Homo sapiens
gcaggctcactgcgggcccgagccccaccttgctcaggaaccaggtctcagcgtctctgcggtttttctctgccatctgctcgtactggtcacgcatctcattcaggatgcggctcaggtccacgccaggtgcagcatccatctccacgttcacatctccgccggtctgacctctcagagcaagcatctcctgggaagggatggcaggaggcggtcagttcagcagacttctctcctggccctgggtgcatctggcaaccccaccaaaccagcctcccaccccggaagccagcagcgaccgtacctcctcgtggttcttcctcaggtaggccagctcctccttcaggccttcgatctgcatctccaggtcagtcctggccagggtcagctcatccaacacccggcgcaggccattgacgtcggcctccacagtctgccgcagggccagttcgtgctcatacctggcaggacagaggtcaggtcctcaggctgcagccctgaggattctgaggctcggggtctgctggccctgctgggtggaccrccccactctttgtcccttgccctctgcccccagcccaccatgctggctgctcacttggtcctgaagtcatcggctgccagcctggcattgtcaatctgcaaaatgggctgc

SEQ ID NO: 948283 - DNA, 591 bp, Homo sapiens
ctctccaaaaggacacttgtctttatatcagaaagggcttgccaaaaaagactttatagtctcaagagggatgcagggtccttcatttaaggcagtcttataccaaaagagaagatcccaaataaagtcaaaagaactcatcaaaaggagggagtgcaagaatcagagaggagattcatcagggtagaaaaggcaactcctggaagtagatagtgcaaagggctctgctgggaccacactcagttccaggggccattgatccatgtgaggcgagctcactctatcctgcttctggacactatgatgtcagactaaataacaaacagagaggaaaattctctaaataaaaatatttattcaggagtagcattgcaatgggaatacatgtgtcttagtaaattacatgtgtattcaaagaggttcaggcaaggggaagtttttgaaggcaaaacaaggaggattatrtaagttgccttgaatccgttatctttggctacaagaatcaatagcaaggatggcatcagtccaaggttggtcaggcggttgctggacagatgcccccaacgaagtgttttctaaggttttgatggc

SEQ ID NO: 948284 - DNA, 591 bp, Homo sapiens
ctctccaaaaggacacttgtctttatatcagaaagggcttgccaaaaaagactttatagtctcaagagggatgcagggtccttcatttaaggcagtcttataccaaaagagaagatcccaaataaagtcaaaagaactcatcaaaaggagggagtgcaagaatcagagaggagattcatcagggtagaaaaggcaactcctggaagtagatagtgcaaagggctctgctgggaccacactcagttccaggggccattgatccatgtgaggcgagctcactctatcctgcttctggacactatgatgtcagactaaataacaaacagagaggaaaattctctaaataaaaatatttattcaggagtagcattgcaatgggaatacatgtgtcttagtaaattacatgtgtattcaaagaggttcaggcaaggggaagtttttgaaggcaaaacaaggaggattatgtaagttgccttgaatccgttatctttggctacaagaatcaatagcaaggatggcatcagtccaaggttggtcaggcggttgctggacagatgcycccaacgaagtgttttctaaggttttgatggc

SEQ ID NO: 948285 - DNA, 576 bp, Homo sapiens
tgcaggggaactcccctttataaaaccatcagatattgtgagacttattcactatcatgagaacakcatgggaaaaacccacagccaagattcaactacctcccactgggtccctcccatgacatgtgggaattatgggagctataattcaagatgagatttgggtggggacacagccaaaccataacattccactcctggcccctaccaaatctcatgtcctcacatttcaaaatgaatcatgccttcccaactgtcccccaaagtcttaacacatttcagcattaactcaaaaatccagagtccaaagtctcatctgagataaagcaagtcccttccacctatgagcctgtaaaatcaaaagcatgttaattacttccaagatacaatgggggtacaggcattgggtaaatacacctattgcaaatgggagaaactggccaaacaaaggagctacaggccccttggaagtccaaaatccagcagggcagtaagcgccaaaatgatctcctttgactccatgtctcacatccaggtcacactgatgcaagggagggggttcccatggtcttgagc

SEQ ID NO: 948286 - DNA, 726 bp, Homo sapiens
ggcaaatgagactgcgaagcaagcacatattctgtcctttggcagagcatcataaataaccatttccagtgatttaaaacaaggtggcagaggaaggataacagtgcgtattgtacacagaataatgctgaggcaaactaagaggtacatccaacacctcctatatttcatagtgatgatacacatgcacccacttccgcctgccatgatgttattcctgagcagattcatcacgtctgtcgccgggaagtgtcactttccttcccgagttgtcatcaacacttagctatactccgcaactctgatatttcattcccgactcaaaattattttcaggtttagccaaccaccaacaattctttcatcataagtttgacgcaattgcacttttatgtcataaagtcaaccaataatttgttgattatcctacataccaatactttaacacggtttatctgtaaaatactttcattgaacaaaaataaaagtatcataaagatttaagcaagtataaaaaagcagtataaattatttgtaatagtctagcattatcaactttattgtttatttaaaaggctgacataaacattamgatcagagaagatctttctatgttcaagtggaatctcatttttttggtgggggatatcaaaccttaattatgctcttatttttaagagcttttggggaagagatgatgcaagcttccataataaccttttgcag

SEQ ID NO: 948287 - DNA, 534 bp, Homo sapiens
gcgggactggcgggcacgccgcccatggtcctggtgcgggatccactaggcgaagctagctggactcctgagtcaggtggggtcttggagaacttttatgtctagctagaggactgtaaacacaccagtcagcactttgtgtctagctaaaggtttgtaaatgcaccaatcattgctctgtgtccagctaatctagtggggacttggggaacttttgtgtctagctaaatgtttgtaaatgcaccaaacagcaccctgtcaaaacggaccaatcagctctctgtaaaatggaccaatcagctctctataaaatgggccaatcagcaggatgtgggtggggtcagataagggaataaaagcaggctgccggagacagcagcggcaacctgcccaggtccccttccacactgyggaagctttgttctttcgctctttgcaataaatgttgccactgctcgccctttgggtctgcactgctgttatgagctgtaacactcaccgtgaaggtctgcagcttcactcctgaggccagca

SEQ ID NO: 948288 - DNA, 590 bp, Homo sapiens
tgaatggctgagactcccctacttgttaaaaagagtaggttgcagtctgtttgcgcatgcaattaggttgcagttcactatgtgtagggaaatctttagggcagacttaaaatatgtaargaggcagctaactgatccccagttttaagttatatcccctcaaatatagatattgagtcctatggagatatctttaaatataaaacaaagtttgtaaacaatatcacctatagaacacattgcagtattcaaattattgtattataataatttataagggttataatcaagaatttttatatactgaaatgaccacactctttctttgcttatgcaggaaaatgactcttttctttaatgtccaacggaattgtaatgatctgactcctcagactaagtgctttctcagaactttacgcctacatagaccctttttttttttttttaatcctactcagggccaagctaagtaaacatcatgccttattcaggttgagcctagggaactcaaactgcttcagccagcagtatcaggagtccaagaagttagcccagaatagcagcatctgcatcaactgggaagttgttag

SEQ ID NO: 948289 - DNA, 637 bp, Homo sapiens
agatagctcagcctaaagacatcaacaaaggaaaacagtgatgcaaacactaagctgagaactctcttcagttcagagtaggaaatacataaattacatggccatataacgtgttaatgataaattcagagtagacacatttcatgatgtgcaataactataactttcagagccacaaatgaacccctgcggaaaaaaccttgacaattttctggcagagagaaaggacacaaagagtctcaaagaagaaaaactcaaattatttatttaataagtaaatacaaaacagccctgctgcttatcaccttttaaaaatagacttgattaattaggacaaacacattttctgaatgctgctaaaatgagctttggcaaatttttcgaaggagtttattttctatggaagtggtctccaaggggaaggttttagaaatttttgagagagccaagaggggagtcaatcaaatcttctccccagattttaaggagttctattccttcaggcggtccagtctcaggacatgtacagttgtaaacatcatcataataaattsacatggacaaaccttttattaggtatatttgctgtgtttccagatttttatggccaacctataaagctgtctaatattgttat

SEQ ID NO: 948290 - DNA, 632 bp, Homo sapiens
cgtcattcctgacagctcagaccacgagctgcctggagaggctcatgaacaagttctttgtcttcaggggatgaagaaagtccaggcgtttgtttactctagagctaccggtcagaaaggggtttcagcmtcggagtctgcaacctttgtataaaagaacacaaagtcagtgatggaaaattaagctctttagaaggctgatttggctgggcgcggtggcttacacctgtaaatctggcactttgggagactgaggcaggaggatcacttgggcccaggagtttgagaccagcctgagcaacatggcaaagccctgtctccacaaaaaataaaaaataaaaaataaaaaaatagcggggcaatggtgttgggcacctatagtcccagctactcgggaggctgaggcaggagaattgcttgagtccaggaggttgatgctgcagtagtgagccatgatcgcaccactgcactccagcccagggaattgtgtgagactctgtctaaaaaaaaaaggaaagaaaaagaaaaaagaaggctgattaattagccttaaactcagctaaactagcgtcatctttaccaccccttagctgcaaaaaatgtttcaaaccaaatggcccccagtgagtgca

SEQ ID NO: 948291 - DNA, 621 bp, Homo sapiens
catggtgaaaccccatccctacaaaaaaatacaaaaattagccgggtgtygtggtgggtgctactcaggcgtgtgaggtggaaagatcgcttgagcctgggaggcagagattgcagtgagaggagattgtgccactgcactccagcctgggggacagaaagagaccctgtctctgaaacaaacaacagcaacaaactgggacaaattcatctcagagttggcctgtctctcccggaaaacaggtctgttttctttccgtagacaatgtgccctatgtaactcatccctcctttgatcagctcctcagagaattcagaataaaggtctgttttcacctcagtactttcacctaacaagttcctgacttaaattgcacttgtcacttcattcttattttaatgttttttcggttttacgaaggtactgattttttaaatggatctttttatttggttgagcagttttaggtttacaggaacatggagcagaaaacgcagagctcccgtgtgcccttcctctccccatagacactttctcctgctagtaacatctttttttctttcttttttttttttgacagagtctcactctgtcatctaggctggagtgcagtggcgtgac

SEQ ID NO: 948292 - DNA, 587 bp, Homo sapiens
tggattcaaaaggaatggaatcgtacggaatggaatctaatggaatggaattmaatggaaatgaatcaaattgaatagcacggaattgaattgaatggaatcgaatgcaatggaatctaatgaaacggaaaggaatggaatggaatgggctggaatggaaaggaatcgaaacgaatggaatggaatcgaactgaagagactggaatggaatgcactggaatggaagggagtgtaatggaaggttctcgaaagaaatggaatcgaatggaatggaattgaattgaacggaatagagtcgaatggaattgaatggaatggaatggactagagtgaaatggaatcgaaccacaaggaatggacaggaatagaatggtctcgaattgaatggaatcgtatggaatggcatcaaacggaatggaatggacagccacggaatggaatgcactcgaatgcaatggagtcgaaactaatggactggaatagaatggactcgactggtacggactccaatggaatggaatcgaatggaagggaatcgaacggaatggactcgaagggaaaagactgcaatggaaaggtctcgaatg

SEQ ID NO: 948293 - DNA, 633 bp, Homo sapiens
actcacaaaaaaaaatatccaattaggaaatggtcaaaagacaaaacaaacatataaccaaagaggatacacaagtatgatacaaatacttggaagattgttcgacatcattaggctttagggaaatgcaaattaaaaccacagtgtgatacctatctaaatggctaaaataaaaatgatggtgaagaaaccagataaatcaaatatttctggtgagaatgtaaaatggtacagctactatggatacagtttgctagtgtcaaaaaaaaaaaaaaactattcaactgcatttatcccagagaaatgaaaactttcgactagacacaccttgtacatgattattcatagcagctttacttgtaatagtcaaaaattgaaggcaattagatgtcctcccatgagtgattaaacaaactaaagtacattaatcccatggaatattattaataatagtaataaaaagaagtaggctatgtcagtctatttagtctgttataacaaaagaccatcaactttgtggctgttaaaacaagagaagcctagttctcacagttctgraggctgagaagtccaagatgaaggcacaagatttggtgtctggtggaagcttgttttgtaggttatagacggtgc

SEQ ID NO: 948294 - DNA, 606 bp, Homo sapiens
tggacacagacagaggggagaaggccacaagatgatggaagaggcagtgattggagtgacgtggccacratccagcgaccaccaggggccaccagaagttggaagaggcaaggaaggaaccttccccagagcttttgggggcagcacggctctgttgacaccttgatttcagacttctggcatccagaacagtgaaagaataaattttagggggctgggcgtggtggctgacgcctgtaattccaacactttgggaggccaaggcgggcggagcacctgaggtcgggagtttgagaccagcctgaccaacatggcaaaaccctgtctctactaaaaatacaaaaattagccgggcatggtgtcacatgcctataatcccagctactcagaaggctgaggcagaagaatcgcttgagcctgggaggcagtggttgcagtgacctaagatcgccccactgctctccagcctgggcgacagagggagactgtgtctcaaaaaataaaagaataaattcttgttgttttaaaccagcaagctggtgatgatttgttatggcagctcccaaaaatctaacacagacaggaagcagtgggtgggtgatgaca

SEQ ID NO: 948295 - DNA, 607 bp, Homo sapiens
caaagcaggcacagaggcagggctgcctaagcccttgcgagcccatcccacacaatcatgtatccaggatttgggacrtggggtcaagggagattatattgaagctttaagatttaatgtcttccctgctgggtttcagacttgcagaggcttgttgcctctttcttgtggccaatttctctcttctgggatgggaatattcactcaatgtctgtgtcaccattgtatcaatatattgggagtaaacaacttgtttttgatcttacgggctcataggtggaagggaattgccttgagtctcagatgagactttggacttttgagttgatgctggaatgagttagaacttttggagactattggggaaggatgactgtattttccaatgtgagaaggacatgaatttggggggcaaggaatggaataatatagtttggatttttgtcccctccaaatcacatgttgaaatctgatccctcatgttggaggtggggcctggtgggagatgtttggatcatgggggtgaatcctccatgaatggcttggtgacctcttcatggtagtgagtgagttctcactccattagttcatgtgatagctgttgttt

SEQ ID NO: 948296 - DNA, 596 bp, Homo sapiens
tggagaaacagtgtaaactggcagtgtaaacaaaagcagggcatgtatgagtagttgagaatggtgaataggagtatgactagacagaaratagtagggatgacaagtttttttggggcacagtccaagttggtctggtgtctggaatgagattgggtcttaataaaaaaaggagcgtccatacaggagctcaaatgggctgtaccctgtagcattctgaggacaggcctgaattctgagaagggaaagtggtaaaagtattgtccattcctttttaagttggtggctgagcttggtgaggtgtgtttttaaaagacctttagtccgttctacttttcctgaacactgaggactgtaagggatatataaaggcttcactgaataccaagagcctgaaaaactgcttggctgatttgactaataaaggctggtccattatcagactgtatagaggtgggaaggctaaacagaggaattatgtctgacagaagggaagaaatgactgtggtggccttctcagaccctgtaggaaaggcctttacttatccagtgaaaatatctacttagactaagaggtatttttgttttctgactca

SEQ ID NO: 948297 - DNA, 567 bp, Homo sapiens
agaggaaaaataggcttgcacccaagcctatttttatgaaccttatgaaccaagaaacaagaacaattaaaaagacaggttggtatggcaggcaatgctagcaactaacccactcatcctcataataaccccaataaagtatattttcaggatgctttgtagctaggggtggctgtgtgattcagttatagtcaatgatacctaagaggagggcattgggtagggaggactcataggaaagcttttttaaatgtggcaggtctgctgtcatcctccttttgctctttgcctttgtagcaacacattgtagatgtcctgcctctgagttcacccatctacactgacggcctccacctgtgtccatgctgttccgcttcttgacctaacagctttctctagaagcttgtttagccattgtatgggcagcctataaaagctggtgtttaatgtccccacagcaacgctcaacgagtgaggtttgggatttggtagayagataactcagctttcccaccccttagtagggaaactctgaggacagtcctataagattcctcagaggtcccc

SEQ ID NO: 948298 - DNA, 557 bp, Homo sapiens
tcgctccactgcctctcaccttccgctgtgcagcccggttcctaacaggccacagaccaggaccagtctgtggccggggggttggggrccctattctatagtactgtaggatgactacaggtaacaatttcttttattatatattttcaaatggcttgaagagaagaatttaaatgtttccaacacaaggaaatgataagtgtttgaggtgacagatatattaattacccgaatacgatcaccacacatcgtataaatgtatcagaatatcacaccataccctacaaatacatacaattatgtgtcaattaaaaataatgaaaaaaaggccaggcgcagtggctcacacctgtaatcccagcactttgagaggccgaggcaggcagatgacttgaggccaggagtttgagaccagcctggctaacatggcaaaaacccatctctactgagaatacaaaaattagccggcgtggtggtgcctacctgtaatcccagctactcgggaggctgagccaggagaatcgcttgaacccaggaggcagaggttgcagtgagcc

SEQ ID NO: 948299 - DNA, 557 bp, Homo sapiens
tcgctccactgcctctcaccttccgctgtgcagcccggttcctaacaggccacagaccaggaccagtctgtggccggggggttggggaccctattctatagtactgtaggatgactacaggtaacaatttcttttattatatattttcaaatggcttgaagagaagaatttaaatgtttccaacacaaggaaatgataagtgtttgaggtgacagatatattaattacccgaatacgatcaccacacatcgtataaatgtatcagaatatcacaccataccctacaaatacatacaattatgtgtcaattaaaaataatgaaaaaaaggccaggcgcagtggctcacacctgtaatcccagcactttgagaggccgaggcaggcagatgacttgaggccaggagtttgagaccagcctggctaacatggcaaaaacccatctctactgagaatacaaaaattrgccggcgtggtggtgcctacctgtaatcccagctactcgggaggctgagccaggagaatcgcttgaacccaggaggcagaggttgcagtgagcc

SEQ ID NO: 948300 - DNA, 601 bp, Homo sapiens
gccagtttttggatttccttgcattgggctttgcctttctctggtatccccctgattagcttaataactaacctcttcaattcttwttcaggtaaatcaaggatttcttcttggtttggatccattgctggtgaactagtgtggttttttgggggggtggtgttagaataaccttgttttgtcatattaccacggttggttttctggttccttctcatttgggtaggctctgtcagagggaaggtctagggctaaaggctgttgttcagattcttttgccccacggggtgttcccttgatgtagtactctcccccttttcctatgggtgtggcttcctgtgagctgaactgcagtgattgttgtctctcttctgggtctagccacccatacagtctacccggctccaggctggtactgggggttgtctgcagagtcctgtgatgtgagccatctatgggtctctcagtaggtagataccagtgcctgttctggtggaggtggcggagggtgcaatggactccatgaggcttcttagctttggtggtttaatgctctatttttgtgctggttggtctcctgccaggaggtggtgctttccag

SEQ ID NO: 948301 - DNA, 601 bp, Homo sapiens
gccagtttttggatttccttgcattgggctttgcctttctctggtatccccctgattagcttaataactaacctcttcaattctttttcaggtaaatcaaggatttcttcttggtttggatccattgctggtgaactagtgtggttttttgggggggtggtgttagaataaccttgttttgtcatattaccacggttggttttctggttccttctcatttgggtaggctctgtcagagggaaggtctagggctaaaggctgttgttcagattcttttgccccacggggtgttcccttgatgtagtactctcccccttttcctatgggtgtggcttcctgtgagctgaactgcagtgattgttgtctctcttctgggtctagccacccatacagtctacccggctccaggctggtactgggggttgtctgcagagtcctgtgatgtgagccatctatgggtctctcagtagrtagataccagtgcctgttctggtggaggtggcggagggtgcaatggactccatgaggcttcttagctttggtggtttaatgctctatttttgtgctggttggtctcctgccaggaggtggtgctttccag

SEQ ID NO: 948302 - DNA, 601 bp, Homo sapiens
gccagtttttggatttccttgcattgggctttgcctttctctggtatccccctgattagcttaataactaacctcttcaattctttttcaggtaaatcaaggatttcttcttggtttggatccattgctggtgaactagtgtggttttttgggggggtggtgttagaataaccttgttttgtcatattaccacggttggttttctggttccttctcatttgggtaggctctgtcagagggaaggtctagggctaaaggctgttgttcagattcttttgccccacggggtgttcccttgatgtagtactctcccccttttcctatgggtgtggcttcctgtgagctgaactgcagtgattgttgtctctcttctgggtctagccacccatacagtctacccggctccaggctggtactgggggttgtctgcagagtcctgtgatgtgagccatctatgggtctctcagtaggtagataccagtgcctgttctggtggaggtggyggagggtgcaatggactccatgaggcttcttagctttggtggtttaatgctctatttttgtgctggttggtctcctgccaggaggtggtgctttccag

SEQ ID NO: 948303 - DNA, 601 bp, Homo sapiens
gccagtttttggatttccttgcattgggctttgcctttctctggtatccccctgattagcttaataactaacctcttcaattctttttcaggtaaatcaaggatttcttcttggtttggatccattgctggtgaactagtgtggttttttgggggggtggtgttagaataaccttgttttgtcatattaccacggttggttttctggttccttctcatttgggtaggctctgtcagagggaaggtctagggctaaaggctgttgttcagattcttttgccccacggggtgttcccttgatgtagtactctcccccttttcctatgggtgtggcttcctgtgagctgaactgcagtgattgttgtctctcttctgggtctagccacccatacagtctacccggctccaggctggtactgggggttgtctgcagagtcctgtgatgtgagccatctatgggtctctcagtaggtagataccagtgcctgttctggtggaggtggcggwgggtgcaatggactccatgaggcttcttagctttggtggtttaatgctctatttttgtgctggttggtctcctgccaggaggtggtgctttccag

SEQ ID NO: 948304 - DNA, 554 bp, Homo sapiens
acagatgtccttggcagccaacacctatcaaatccccaaacaacaaatrtcaccagagtgaaaatctctctgtgtgtttatgtgggtgcatatgtggatgttggctccagttgatggcaagctgatttctagcagtatttgataaaaaaattccagttcctcaaattaagttgaatagttatgttacgtttttgccacaaaggatttcacatgtgggtccaaagacaggacattcctaaacacgttttcccatgaatactaagaaaaccacaaaaccctccagaaaaaaaaagaaaaaggaagattaaatgagtactcttttgtctttttgagctttatttttatttatttatttatttatttatttatttatttatttctttatttaagacggagtctcactctgtcacccaggctggagtgcagtggcatgatctcggctcactgcaacctccacctccctagatcaagcaattctcctgcctcagcctccctagtagctgggactacaggcgcccgccgccacgcttggctaattttttgtatttttagta

SEQ ID NO: 948305 - DNA, 791 bp, Homo sapiens
cgcaccaccccgcctggctaataggtttattttttgtagcaatagggacttgctatgttacccaggctggtctcaaactcttagcctcaagtgatctcacgtttgcctctcaaagtgctgggattacaggtgtgagccaccacacccagcctttttggtgtcttttgaagaaacagaaaaacttctggccaggtgaagctgaggcaggaggccaagggatccttggtgcaagaccaacctgggcaacatagcaagactgtttctacaaaaaataaaaagtattagtggggtgcagtagtgtgcacctgtagtcccagctaccaggaggctgaggaaggaggattgcttgaacccaggagtttgaggctgcagtgagccatgatcacactactgcactccagcctgggtgacagagtaagaccctgtctcaaaaacaaacaaacaaaaacccaaaaaaccttttgattgagaaagtcttgcctgtctaaccccagacttgtgagaatctgctccatatgtgccttattctcctgtctaccacaccccacccatcaagtatgtgctgtttctgctatttgcctccttaatcaggcaccctgtccttccaactgtcattaaaatgacacagttgtttagccttccttttcagtgactactgggtcatgmtggcattggtattgtaatctgaactcttagaaaacctgatcgtaatagtcacagtgttaaagattaaactacactatctcaatacaaacaaagcacaacagttactccacaggcaaaggcagagc

SEQ ID NO: 948306 - DNA, 622 bp, Homo sapiens
aaaaaaaaaaaaaagaaagaaaagaaaagaaaaaagaaggagggcaggatgtttcaaagaggactaggaaagacttatttgggaaattcattaacctcagtgttttttttttctaattaatagactttattaygtagagctatcttaggtttatagaaaaattgagcagaaaatgcagagagctcccatattaaacccctctcccaacacaaagtttcctgttactaacatcttgccttggtgtggtacatttgttacaatattaacccattgaataatattgaagaaatattaacacgtcattattaacttaagcccatagtttacattggaatttattctttgcattgtaatttatggacatttttaatcaaaaataaaactgttttcataggagagattataagtagatgaagagaatcaaaaatttatataattccaaaaaaagcatggaccttcctttccaggataagatagatacaaaaaaaaaaaaaaaaaaaaaaaaccctttaaaggtcccttctgatggcaggactcttgggttctagaatgacttggagctttcaagaacaacagtttagaaactaggcatgacaaagggtagtcaaatctttcagttcag

SEQ ID NO: 948307 - DNA, 611 bp, Homo sapiens
aagatagatataaccagtattttaaaaattatgttgtataragcactaccctcagtgagatattagtagaacacacatgcacacacacgcacacacactcacactgagcccagattattctggcaaatgctgggttaagcaaattgaaagaaacatcttttgtgctggacttctcagaacctggaatgtggctatatgactcataaaacagcaaggttaagacagagcatgtcattttttcccagaaatgttgaaacactttccttcccttggcttcagtgtcaccttctttctcctggttctccttcaatctctttggctgctccttcttgatttcctttttgacaatctgctgctgctcagccattctcttttctttcaccatggatttctcaagtgtgtttctattcctgcagattaaacttcccttgtttttcctgacaactctccttgtctgaccctccctggttctaaggcaggtgttccatctgtgtgggcttttggcatcctgggatgctcccagcatgttccctgccacacttcatcaggttttctccgtagactctgcgagggcagcaaccttgtctccactgttccttcaatgctcagca

SEQ ID NO: 948308 - DNA, 611 bp, Homo sapiens
aagatagatataaccagtattttaaaaattatgttgtataaagcactaccctcagtgagatattagtagaacacacaygcacacacacgcacacacactcacactgagcccagattattctggcaaatgctgggttaagcaaattgaaagaaacatcttttgtgctggacttctcagaacctggaatgtggctatatgactcataaaacagcaaggttaagacagagcatgtcattttttcccagaaatgttgaaacactttccttcccttggcttcagtgtcaccttctttctcctggttctccttcaatctctttggctgctccttcttgatttcctttttgacaatctgctgctgctcagccattctcttttctttcaccatggatttctcaagtgtgtttctattcctgcagattaaacttcccttgtttttcctgacaactctccttgtctgaccctccctggttctaaggcaggtgttccatctgtgtgggcttttggcatcctgggatgctcccagcatgttccctgccacacttcatcaggttttctccgtagactctgcgagggcagcaaccttgtctccactgttccttcaatgctcagca

SEQ ID NO: 948309 - DNA, 718 bp, Homo sapiens
gttaaatagcatataaatatgattagagccttaaagtttacacttctctggtttgctcaaatttttttcaaaatagcrtatgcctttctaaaaaattgttagtatattttttaaaatgaacattaatatatatattttccaaaaacaaaatgcagctcccattggtaaatgatgatgttgagatacaacagacaacttatcttggaaaccatttaatcagtgctcacttttgcactctttccagaaatgtcaatggctttaaaatgtagaagtatattatacaactaaacttacacttattcagtattgtgcaatatttagtacttgttctagctatctcttgctgaatagtaagccattccaaaacttaaggaattatttattgtttaatattgtttattgttattatttgttcagtgattttaaataatgttatttctcatggttttgtgggttgatgggcactacaaaagttctcttttggagtctttcttgcagttgctgttggttggctgctgctgaactcacctgaaggctccactagactaaagagcctagacgggtcactcatatggctggcagtgcatattggctgctgagtgtgatgcctatctgacctctccatgctatctggagtgctcacaacttggtagttggtcccaagacacacaggcaaatactacaaagcttcttaagacctagccttggaggtcctaga

SEQ ID NO: 948310 - DNA, 718 bp, Homo sapiens
gttaaatagcatataaatatgattagagccttaaagtttacacttctctggtttgctcaaatttttttcaaaatagcgtatgcctttctaaaaaattgttagtatattttttaaaatgaacattaawatatatattttccaaaaacaaaatgcagctcccattggtaaatgatgatgttgagatacaacagacaacttatcttggaaaccatttaatcagtgctcacttttgcactctttccagaaatgtcaatggctttaaaatgtagaagtatattatacaactaaacttacacttattcagtattgtgcaatatttagtacttgttctagctatctcttgctgaatagtaagccattccaaaacttaaggaattatttattgtttaatattgtttattgttattatttgttcagtgattttaaataatgttatttctcatggttttgtgggttgatgggcactacaaaagttctcttttggagtctttcttgcagttgctgttggttggctgctgctgaactcacctgaaggctccactagactaaagagcctagacgggtcactcatatggctggcagtgcatattggctgctgagtgtgatgcctatctgacctctccatgctatctggagtgctcacaacttggtagttggtcccaagacacacaggcaaatactacaaagcttcttaagacctagccttggaggtcctaga

SEQ ID NO: 948311 - DNA, 651 bp, Homo sapiens
acagggtcccgatcccgttccttctcaatgggtgggatctccagacccrggtgtccggccacatcctgcaagtgtgtttggacttgcaacatgtccatacctccctagagtggaggtcctagagggaggggaagccaccatgtttgctgttttgcagcctttactgttgataccttcaggtactggaaaacccagagttactagggacaggagcagatccccagcaaaccacagcagccctacagaaaagtggccagactgcttattacatgggtccccaatcccatatctccacactgggtggaacctccaggcctggttctccagccaccctatgctagtgctgtcaagccagtagcatctctgcaactccctgggacagagcttccagtgggaggttgccatctttgttgtcttgcatcttgtacccttgctgtatccaggctatggagaatccatggggactaggggctggtccagacccccagcataagccaaccacctcaaagaaaaatggccaaacttttctctacgcaggtgttagttctcacctatcctcactgggcaaggcttcctgacctgggactccagaataagaacgctgctctgacctgattacctcaatcagtggcagactggaatttctgagga

SEQ ID NO: 948312 - DNA, 580 bp, Homo sapiens
tatgcatcaggtatgaggaagaaaatagattttggaaactgagagctgtagagggtgagttgagcatagtttgtgattttgagggcctctaaaactattaaagcagyggcagcctctgcacgcagacatgagggctgggctaaaacagtaaggtcaagttgtttggacagaaaggctacagggtgtggtcctggctcttgtgtaagaattctgaccatgctaaccatgcctaggaaggaaaggagttgttgttttgtagaaggtgtgggggtttgagagatcagtcgtacacgattggcagggagagcacatgtgtttctatgacaattatgctgagataggtaacagatgaggaagaaatttgggcttgattgaagtaatgggggctgtctgtgaagctttgcggcagtatagcctaggtaatttgctgagcttgatgggtgtcagggtcagtccaagtgaaagcgaagagaggctgggattaagggtgcaaaggaatagtaaagaaagcatgtttgagatctagaacagaataatgggttgtagaggcaggtattgaggataggagagtacatgggtt

SEQ ID NO: 948313 - DNA, 511 bp, Homo sapiens
atggcaaatggaactaagattgcagatggaattaaagttatgaatcacctgacctttaaataaggasattatcctggattatctggataggccctatctaatcacatacattcttaaaagaggacatcttgggcttggttccaagatggtcgaataggaacagctccagtctgtagctcccagtgtgagcgacacagaagatgggtgatttctgcatttccaactgaggtacccggttcatctcactggggcttatcggacagtgggggcaggacagtgggtgcagcccaccagtgtgagctgaagcagggtgaggcatcacctcaccagggaagctcaaggggtcagggaattccctttcctagaagagggaagggtgatagatggcacctggaaaatcgagtcactctcaccctaatactgtgctttttcaacggtcttagcgaacggcacaccaggagattatatcccgtgcatggctcggagggtaccatgcacatgaagcctcact

SEQ ID NO: 948314 - DNA, 511 bp, Homo sapiens
atggcaaatggaactaagattgcagatggaattaaagttatgaatcacctgacctttaaataaggagattatcctggattatctggataggccctatctaatcacatacattcttaaaagaggacatcttgggcwtggttccaagatggtcgaataggaacagctccagtctgtagctcccagtgtgagcgacacagaagatgggtgatttctgcatttccaactgaggtacccggttcatctcactggggcttatcggacagtgggggcaggacagtgggtgcagcccaccagtgtgagctgaagcagggtgaggcatcacctcaccagggaagctcaaggggtcagggaattccctttcctagaagagggaagggtgatagatggcacctggaaaatcgagtcactctcaccctaatactgtgctttttcaacggtcttagcgaacggcacaccaggagattatatcccgtgcatggctcggagggtaccatgcacatgaagcctcact

SEQ ID NO: 948315 - DNA, 511 bp, Homo sapiens
atggcaaatggaactaagattgcagatggaattaaagttatgaatcacctgacctttaaataaggagattatcctggattatctggataggccctatctaatcacatacattcttaaaagaggacatcttgggcttggttccaagatggtcgaataggaacagctccagtctgtagctcccagtgtgagcgacacagaagatgggtgatttctgcatttccaactgaggtacccggttcatctcactggggcttatcggacagtgggggcaggacagtgggtgcagcccaccagtgtgagctgaagcagggtgaggcatcacctcaccagggaagctcaaggggtcagggaattccctttcctagaagagggaagggtgatagatggcacctggaaaatcgagtcactctcaccctaatactgtgctttttcaacggtcttagcraacggcacaccaggagattatatcccgtgcatggctcggagggtaccatgcacatgaagcctcact

SEQ ID NO: 948316 - DNA, 601 bp, Homo sapiens
tgccagagggcaggaaaggagaaaacagggratggggaacctgcagcctcttccctccttctaccaggtacagagccaccggggagaggcaggaaacattttcaactcaaggcctgccctggctcacacactctcccgcccaagccactgtccaggtataaggcagagtttggcagcaggagcaggagtgggcacgagccctgcaccccaagggtataggacccacctgcgacggaggctgggccaggagcacgccaaggagccggaagcaagcagcagtagccctctgccagggagggcaggagcagacaccaggcacagcacagcatccaaggcctgctggcatctaagaaggggcggggcactctggcacccacaccatgcacaggctggctatggcactgctggaagaatcggaagcctgtggtgcctgcagggatgaaggcagcccaagcccacagcccgctcacctggtgaccacacccacccagggcctgtctgaaggggagtgctgtttctgggcatgaggactatttatcttggtctcactgttctacaaaaaaacccggcattcaataactatgagagaacaacaggcaat

SEQ ID NO: 948317 - DNA, 458 bp, Homo sapiens; identical to SEQ ID NO: 947661

SEQ ID NO: 948318 - DNA, 607 bp, Homo sapiens
cttctgacagctctagtacctatttgttataaaaacaatcaaaacatcctcttgtaattgaaggactgataacaatgactgcaagtcctgggtgtcgggacaaggtgagctggctttcaggtttacttattagggtacacagatgggatgtaggtagcaaactgtccgtctcctccaccgaaagaaaagtgctttcctcttaagacacatacctgccttaggaaccctaaccttgcataaataagttgttcaaactcattggaaaactctttttctagttttagctacggaggcaactctactgctctctgatttttggtatatgtaggtttgtttaaatttaaaaagatcaattaacttagtcttcatatagacagttttaaaattatttattcagattattactctacaacactttgtgcttttcctgcctgttgatcctgagcctggtctttccagggttttgccacgaagctcagcttctacttttttttttttttttttttttttgagacaggtcatccaggctaragtcgagtggtgtgatctcggctcactgcagcctcaacctcccaggctcaatcaatcctcccacctcagcctccca

SEQ ID NO: 948319 - DNA, 605 bp, Homo sapiens
aagcttcttaaccttgtgctcttggatgttgtaccatcaacctcaagctcttggatgttgtacatgatgatcacttaagcagatcaactttttggttaatatcactgaattttctatatctagttttagtttaggattccaatgaacctaggaaccaaaatttggaggctattactaggtgctaagtcacacattcggataaggaaagtattaagcttatttccgactagtatttgtaaaaggatttttcagtacatggaaactaatcaacaactaaatatgatattgtggaagcattttgcattgatattaaaactaaggaaaagctgtagattgaaagggtatatgttactaacttcatatatacctgggacttgaaaatgaagaattttcttaaaatgattaagactagcttgctccttttgaaaacagaggtattaatttgtagcataggaatgaattagaaagaaaaaagattagataaatgaataatatgaattattctctcacaaggttagtaatgctttgtatgcatatattctttattctatttgctattgaacaaaggcatttwaaaaaaaattccatagggctttggatctcaa

SEQ ID NO: 948320 - DNA, 644 bp, Homo sapiens
tccatcagctcctttaagcacttctctgtattggttattctagttatacattcgtctaaatttttttcaaagtttttaacttctttgcctttggtttgaatttcctcctgtagctcggagtaatttgatcgtctgaagccttcttctctcaactcgtcaaagtcattctccgtccagctttgttctgttgctggtgaggaactgcgttcctttggaggaggataggcgctctgctttttagagtttccagtttttctgctctgttttttccccatctttgtggttttatctacttttggtctttgatgatggtgatgtacggataggtttttggtgtggatgtcctttctgtttgttagttttccttctaacagacaggacgctcggctgcaggtctgttggagtttgctagaggtccactccagaccctgtttgcctgcgtatcagcaacggtggctgcagaacagtagattttcgtgatccgcgaatgctgctgtctgatcgttcctctggaagttttgtctcagaggagtaacaggccatgtgaggtgtcagtctgcccctactgggcggtgcctcccagttaggctgcttgggggtcagsggtcagggacccacttgaggaggcagtctgctcgttctca

SEQ ID NO: 948321 - DNA, 608 bp, Homo sapiens
gagtgggcaaccaactatccttaccatcttcagtccatactcctctggagtgtatcctgaatctttgggactgttttsaccctcagaccctggagaaaaaatgcctcatagccctctgcacaaaggtttggacatattatgatctgcaggaaggactggcttggcctcaggaaggaaccattcattttgatacaatctttcagttggactttttctgtaaacacaaaggcaaatggtctgaggccccatatgtgtaggctttctttaccttgcagggtaatacagacctttgccaacatgtaggattgatccggctctcctgtttgccatctcaggagaggctgcacgggtcaatctcagggaactaaaaaatcaaaccccagagaaacctccagcaggggatccagctccctctagccctgctcccctggatccaccttggcctccctatccagtttctctctttagcttgcctcctcctagaaatcctcaccctagacaaggcccagtaccacttatgcccctccaacagatgcctggtgaatttggccccagtaaaatccaggtccccttctctctacaggaattaaggcaaattaaggcggatc

SEQ ID NO: 948322 - DNA, 673 bp, Homo sapiens
aactcactcacccccacctcccaggaagagcttaatctattcatgggggatccacccccgtgacccaaacacctcccactggggcctatgatgtagtttggatctgtgtccctgcccacatctcatgtcaaatcataatccccagtgttggaggaggggcctggggggaggtgattggatcatgggggtggacgtctcccttgctgttctcatgatagtgagttctcacgagatctggttgtttaagtgtgtgtagcacctccctctttgctctcttgttccttctccagccacgtaagacttccccttcgccttccatcatgattgtaagtttcctgaggcctccccagccatgcttcctgtacagccagtggaactgcaagtcaattaaacttcttttctgtataaattacccaatctgaggtagcctgtttaaaaatttttttttctggctgggcacggtggctcatacctgtaatcccagcactttgggaggccgaggtgggcagatcacgaggtcaggagatcgagaccatcctgtctaacatggtgaaaccccgtctctactaaaaatacgaaaaattagccgggcgtggtggtrggcacctgtagtcccagctactcgggaggctgaggcaggagaatgtgtgaacccaggaggcggaggttgcag

SEQ ID NO: 948323 - DNA, 623 bp, Homo sapiens
ctgagatgggcgtctttctcatgcaccggctctttgatattcggaattcatagggtccacagaaagttgtgttccccagcatgcattgccamctttccttgtcctgtcctggtctttgtctatcccaagatacagcctaccactgccagttcagactccacttcttgctctgtggtgccctaagttgccatatctggataatgatgggatagaggggagggagacacagagttgaggtgtgggaagaatggagggaacgttgtcctgattgcctaggcaagtagatctcttttcttccccctagtgttttgtttaaagacagggtcttactgtgttgcctgggctggagtgcagtggcatgatcatggcttactgcctcaaactcctgggctcaagtgatcttcccatctcagccttccaagtagctgggactacaggcgtgtacaacagtgcctggctagtttgttaattttctgtagagacagggtctcactgtgttgcccaaacttctttatcttttaaaaagatttcctaactgctctacaggatgtttactgcttgtgtaataaagcaaagaattttcaaatagcacccctctatctatggaacaactgtttggcatt

SEQ ID NO: 948324 - DNA, 585 bp, Homo sapiens
taaagacacatgcccacgtatgtttattggggcactattcacaatagcaaagacttggaaccaacccaaatgtccatcaatgatagactggattaagaaaatgtggcacatatacaccatggaatactatgcagccataaaaaaggatgagtttatgtcctttgtagggacatggatgaagctggaaaccatcattctgagcaaactatcgcaaggacagaaaaccaaacaccgcatgttctcactcataggtgggaattgaacaatgagaacacctggacacagggtggggaacatcacataccagggcctgtcgtggggtggggggagtggggagggatagcattaggagatatacctaatgtgaatgacaagttagtgggtgcagcacaccaagatggcacatgtatacatatgtaacaaatctgcacgttgtgcacatgtaccctagaacttaaagtataatttaaaaaaagaaatcatatttcaaacaggctttgcaytatgcatgttcacctgcagatcctggggttgcagtgggggcctggggaattttgatgaatttcctctctgctgttttggaga

SEQ ID NO: 948325 - DNA, 585 bp, Homo sapiens
taaagacacatgcccacgtatgtttattggggcactattcacaatagcaaagacttggaaccaacccaaatgtccatcaatgatagactggattaagaaaatgtggcacatatacaccatggaatactatgcagccataaaaaaggatgagtttatgtcctttgtagggacatggatgaagctggaaaccatcattctgagcaaactatcgcaaggacagaaaaccaaacaccgcatgttctcactcataggtgggaattgaacaatgagaacacctggacacagggtggggaacatcacataccagggcctgtcgtggggtggggggagtggggagggatagcattaggagatatacctaatgtgaatgacaagttagtgggtgcagcacaccaagatggcacatgtatacatatgtaacaaatctgcacgttgtgcacatgtaccctagaacttaaagtataatttaaaaaaagaaatcatatttcaaacaggctttgcactatgcatgttcacctgcagatcctggggttgcagtgggggcctggrgaattttgatgaatttcctctctgctgttttggaga

SEQ ID NO: 948326 - DNA, 635 bp, Homo sapiens
tgcctgtaatcccagcactttggaggccgaggcgggcggatcactcgagttcaggagtttgaaataagcctggccaacatggcaaaaccccatctctactaaaagtacaaaaactagcctggygtggtggtgggcacctgtaatcccacgtacttgagaagctaaggcatgagaatcacttgaacccgggaggtggaaggtgcagtgagccgagatcatgccagtgcactccagcctgagcaacagggcgagactctatctcaaaaattaaaaaagaaaaaaaaaacaattcaggcaaaacaacaattatgattatttatattttattttagagacaaagtctcactttgtcactcaggctgaagtccagtggcacaaacatggctcactgcactctgacctccaggcttaggcaatcctcctgcctcagcctcttgagtagctgggactacaggttcatgccaccacacccggctaatttttgtattttttgtagagatggggtttcgccatgttgcccaggctgatcttgttgcccagggtgctcaagtgatccacccgcctcaacctcccgaaatgctggggttacaggcatgagccactgcacccagcctatttatacaaattaaaacaag

SEQ ID NO: 948327 - DNA, 565 bp, Homo sapiens
ctgggctcaagtgatcctcccacctcagcctcctgagtagctaggactacagatgcatgaacacccagctaatttttttgtatttttgtrgagacagggttttgccctgttgcccaggctggtttccaactcctgggctcaagtgatctgcctgcatcggcctcccaaaatgctatgattacaggcatgagccaccatgtctgaccagccattgttatcacagcagatgacggctccatgcatgttattactcctgaagaccttccagtgggacaaggcagaggaagaagacagtgatatttatggacctgactctgtatgcctaggctaatgtatgtgtctgtgtcttcatttttaacaaacagtttaaaaagtaataaagtaaaaaaatttttgaatggagaaagcacacagaataaggatataaagaaagaaaatacctgtatttttgtactgttgtataatgagtttgcattttaagctaagtgtcactacaaaagagtgaaaacattaaaaaaattaatactaagctcataaagtaaaaacattacattaagctaaggtt

SEQ ID NO: 948328 - DNA, 605 bp, Homo sapiens
atggtggtgcgggcctgtagtcctagctactcaagaggctgaggwaggagaatcacctgggcccaggaagttgaggctgcagtgagccgagatcgccttcactccatcctaagtgatgggaatcagaccctttctcaaaaataaataaataaataaataacaaaacagtgccatatctataccaatggatctcaatgtgagacgattttgctccttacaatataattggcaatgtttggatagatttttgattgtcacaactgaaggcaaggatcctactggccctctagtcagtacaggctggtgaattttccgcaatgtatctgcacactcctcacaagaaataatatttggtacaaaatataatcagcccttcatatcagcaggattcacatcctcagattcaaccaactacaaattgaaatatttaaaaataaaaacaatagcgcaataaaaataatatcaataaaaatgtcatataacaactatgtatatagcatttaattgtcttagttattaccagcaaactagaggtgattgaaaatatgtgtaaggatttgtgtaggttatattcaaacactgtgccattttataaaaaggacttg

SEQ ID NO: 948329 - DNA, 722 bp, Homo sapiens
ccgaagcagggcgaagcatcgccttacctgggaagtgcaaggggtcagggaattccctttcctagccaagcaaagctgtgacagatggcacccagaaaatcgggtcactcccaacctaatactgtgcttttccaatggtcttagcaaacggcacgccaggagattatatcctgtgcctggctcagagggtcccacacccatggagccttgctcattgctagcatagcagtctgagatcaaactgcaaggcagcagcgaggtggggggaggggcgccccccattgctgaggcttcagtaggtaaacaaagcagccaggaagcttgaactgggtggagcccaccacagctcaaatgggcctgcctgcctctgtagactccacctctgcagggcatagctgaacagaaggcagcagaaacctctgcagacttaaatgtccctctctgacagctttgaaaagagtagtggtactcctagcatggagtctgagatctgagaacggacagactgcctcctcaagtgggtccctgacccccgagtagcctaactgggaggcaccctccagtaggggcagactgacacctcacatggcagggtacccctctgagacgaaacctccagaggaacgatcaggcagcaacatttgctgttcagcaatattcaytgttctgcagtctctgctgctgatacccaggcaaacagggtctggagtggccctccagca

SEQ ID NO: 948330 - DNA, 642 bp, Homo sapiens
gagtataaatttgtatgatcaccttataaaacaatttggcagtatttattaaagctaaacacatatattytatgacccagcacttccatacctagaaaaatgcctaacaaaattgcatgtttgtgtacactcaaaagatgtgtgtaagaagattcatagcagctttacttataataaccaaaaacctgaaaacctcccaaatgtctgtcaacaatagaatagatgaataaattgcaaataatcatgcaatcaattacaataaagcaacaaaaagcgataaactactgctatatgttaataatatgaatggatctcatgaaataacattaaataaagaaatgagccagaaaaatacacatcctgtacaattgtatttatataaaactcagaaactggccaaacgaatccatgatgaggggagtgtggaaagtggtctgtttttgtaggactcaatgactgcgagggatcaaggtggaagggactagggacctggtaatgtcctgttttcttgatacagtgatacgggccattaactttgtgaaaattcaatggctatatacacttatgattaatgcactcttctgtatgcatatatttcaataaaatttttcctaaaaaaaactttttgacaaactttctgct

SEQ ID NO: 948331 - DNA, 609 bp, Homo sapiens
gagttcatattaagtcaaatgtaatgtatttctgttgtacaggctctaagaggttaacagactgcatcccatgccacccctcagattattcaggagacaagagagcaaaagttagcctagagaagccccttccatccatagctgtccaggtattctgaatagctacattcagcctcaactattaagctacaaaggagcattcagggagtcactagagacaatgtattacttttgttaacctaaaaaataataatagcagtacataatactctgttaaagtctaaagaacactaagaaatagctccttccttcccttgttcatttgccattcttttggggagattttagccttttttttttttttttggaggcaatggtgagtccagagaaatggggacctctctcctaaatggcttatttactgtggagctcctcaaaggggaacttgaagccatctttctataacataactccaattctaggtcatagtcctgcatgagaagcckgggcggggggtaggcagtagttccttagtgccaatagggtacaatccaatagatcccatttgagtccaaatgccttctctggctccagactctttggcttcct

SEQ ID NO: 948332 - DNA, 444 bp, Homo sapiens
ttttttgtctgaagtgtcatgtcccygtttctccaggattggtccctggtgccttttatttggtgaggttgcgttttcctgcatggtggtgatgcttgcagatgttctgttagtgtctgggcattgcagagttaggtatttgttgtagtcttcacagtctgggcgtgtttgtgcctgtccttcttgggaaggctttttaggtattcaaagggacgtgggccctaagcccaataacactgtggtttttgcagacttgagaggtattactctggtggtctcagattagatcaagaaaatctctctggattaccaggcagagactcttgttcattttctttactttttcccaaacaaacaaatggagtcagtttctctctgcctctctctctctctctctctctctgtctctgtctctgtgcttagccatctgaaactgggggtgtg

SEQ ID NO: 948333 - DNA, 407 bp, Homo sapiens
ctattctgttgtactgcagctaagctggcactcaaaccacaacacaaaatgttttcactcttccctcccctttccacgggcagaggaacctctccctatggccaccaccgccgcctgtccatatgggcttctgccaggccactgccaatattcacttagagcataaggattctttcatcagcttgcattgaacgctgccaggcttgggactcgccctccagggcagtgggctcctctctggcccagggcaggtctagaaatgctgtctagagcctagacctagcctcagggaccccaagagcctgcttgttgctctacctcactgtggccaagctggtrcctagggtacaagacaaatttcaccttcctttgcctctgcttttctcaaacaggagtctttcactgta

SEQ ID NO: 948334 - DNA, 644 bp, Homo sapiens
agctcatttattctagtaggggtgtgtgtgtgtgtgtgcgcgcgtgcgcgctcctcggaattttctgcatacagggtcatgttgtctttacrtaaagacagcttttttacttcttctttccattctgggaacattttctttcttttccttacctgactgcactagctagaaactccagtacaatgttaaatagaagtggcgagagcagacatgtttgccttgttcttgatcttaagagaaagcttttagtctttcatcattaattatgatgttagcgacaggttttttgtagatgctttttatcaagttgcagaagttctcatatagtcctagtttattgagagtttttatgattggccattagattttgttaaatgctttttctgtgtctgctgagatgatcatggggtttttgtcctttattaatatagaatattatattaacttttaaaagggataaaccaatcttatgtttctgggataaagcctacttgatcgtgatgtataattccttttatatgttgctggattttgtctgcttatattttgttgagaattgtgtctatatacatgagggatattggtctctagttttcttgtcatgtctttgtctggcttcggtatcagggtaatttttgcctcat

SEQ ID NO: 948335 - DNA, 700 bp, Homo sapiens
aaaaggataagtgagattgtcattttgtttgcttgcttgcttwtttttttttttttttttttgagactgagtcttgctgcatcgcccaggctggagtgcagtggcccgatctcggctcactgcaagctccgcctcccaggttcacgccattctcctgcatcagcctcctgagtagctgggactacaggcgcccgccaccaagcctggctaatttttttttttgtatttttagtagagacggggtttcaccgtgttagccaggatggtctcaatctcctgacctcatgatccgcccgcctcggcctcccaaagtgctgggattgcaggcttgagccacggcgcctagcctacttgctgctttttatgaacaccagtgaccaggaattgatggaaatttaccagaaatgtttcctgatgctatggtagacaaactatggaagtaatgagttctacaagggcattgaaaatggtggtctaggcttcagtggagttgaggatgtatagtcaaccctttttttgttgttttattattttttgtgtgtgccaggcattagcctgtgcattttatgggcatcatcttatttaatcttcacaatggataccttcattttacagtggaagatactgaagttcagagacattaagtgacttgttaaggtttgtgactggtaaatggtggagtctgcattagaaatccaga

SEQ ID NO: 948336 - DNA, 496 bp, Homo sapiens
gtctaaaaggataagtgagattgtcattttgtttgcttgcttgcttttttttttttttttttttttgagactgagtcttgctgcatcgcccaggctggagtgcagtggcccgatctcggctcactgcaagctccgcctcccaggttcacgccattctcctgcatcagcctcctgagtagctgggactacaggcgcccgccaccaagcctggctaatttttttttttgtatttttagtagagacggggtttcaccgtgttagccaggatggtctcaatctcctgacctcatgatccgcccgcctcggcctcccaaagtgctgggattgcaggcttgagccacggcgcctagcctacttgctgctttttatgaacaccagtraccaggaattgatggaaatttaccagaaatgtttcctgatgctatggtagacaaactatggaagtaatgagttctacaagggcattgaaaatggtggtctaggcttcagtggagtt

SEQ ID NO: 948337 - DNA, 584 bp, Homo sapiens
tccatgccttgctaaggtctctggtttttataggcccatgatgggggcacagcaggccagggtggtcttggaaaatgctacatttcggcatgaaagcagaagtgcctgtccttacctaggtcygtgggggtggagccctagccagggaccacgccctcctctacccagcacttcccttctccccttccctatcatttaaagggaccacgctcttcccttcccagcacttccatatcagtttggtacacaggtaaactcgtgtcatcgaggtttgttgtacagattgtttcatcacccaggtattaagcctaatgcccatttgttattttccccgttcttctctctcctcctatcctccaccctcatgtttccctctgtgtgtccatatgctctcatcgtttagctcccactataagtgagaacatgctgtatttggttttctgttcctgtattagtttgctaaggataatggcctccagctccattaatgtttgcgcaaaggacatgatcttattcttttttatagctgcatagttttccatggtgtatatgtactacattttctttatccagtctatcattgt

SEQ ID NO: 948338 - DNA, 792 bp, Homo sapiens
tataggaatgctagtaatttttgcaccttgattttgtatcccgagattttcctgaagttgcttatcagcttaataagcttttgggttgagactatggggttttctagaaatatgatcatgtcatctgcaaacagggatagttgacttcttctcttactatttgaaagttctttatttctttatcttgcctgattgccctggccagaacttccaatactatatttaataggagtagtgagagagggcaaccttgtcttgtgccagtttccaaggggaatgcttccagcttttgcccattaagtatgatattagctgtgggtttatcatatatggtgcttattcttttgaggtatgtttcttcaatacctagtttattgagagtttttaacatgaatgaatgttgaattttattgaaagccttttctgtatcttttgagataatcatatggttttggcctttagttctgtttatgtgatgaataacatttattggtttgtgtaggttgaaccaaccttgtatcccggggatgaagtctaattgaccgtggtggatacgccttttgatctgctgctcaattcggtttgccagtattttgttgaggatttttacatcaacattcatcaagaatattggcctgaagttttttgttgttgttgttgttgtatatctgccaggttttggtatctggatgatgctggcctcatagaaggagtttgggaggaatccctcctcctcaayttttttgaatagttttggtatgagtaataccagctcttctttgtacatctggt

SEQ ID NO: 948339 - DNA, 633 bp, Homo sapiens
agctgaccagcatttaacattaaaacagagaccttacgactgatgaaacagactcttggtagccattaagataycaacatgacagacagcaagccctaaaagaaataaaaatattttacctcaaaagatatttcttttctctccctcttcttctttttttttttttttttttttttttttgagatggagtctccctctgttgcccaggctggagtgcagtggcatgatcttggctcagtcaccacaacctccgtctcccaggttcaagtgattctcctgcctcagcctcttgaatagctgggattacaggtgcccgccaccattcctggcttatttttttgtattttttgtagagacgtggttttgccatgttggccaggttggtctcaaactcctgacctcaagtgatctgcctgcttcagcctcccaaagtgctaggattataggcatgagccaacgtgcctggctatatttcttaaacatattttgaaatggccctgcaaagctgtctcttgtgggaaaatctaccttctatagaaaatctccttttatttccaggtcttcttcctgatccgggagagaattaactgagtttggtacctttttaagtctgataaaaaacatttacaatct

SEQ ID NO: 948340 - DNA, 579 bp, Homo sapiens
gcaatctgcttgggttaccttccatgtgtggaagctgtgttctttcgcttttcacagtgaatcttgctgctgctcactctttgggtccgtgccacctttaaaagctgtaacactcaccgtgaaggtctgtgacttcattcttgaagtcagcgagaccaccaacccactggcaggaaccaaatctggacacagacctttatctctcaccatatgcaaaaatcaacttaagatgtattaaagacttaaatataagacccaaaactatcaaaatactaaaaaccttgagaaaattcttctggacattggtctaggcaaagaatttatgacttaagacctaaaaggacagggaacaaaaccaaaattagacaaatgggacaattaaactaaaaagcttctgcacagcaaaagaaataaccaggtgtgtaaacagacaatgcacaggagaaaatatttgaaaactatttatcccataggggactaatatccataatatagaagaagctcaaayaactccctcaacaacaacaaaaagcgcaaacaaggccaggcatggtggctcacgtttataatcccagcact

SEQ ID NO: 948341 - DNA, 544 bp, Homo sapiens
atccacagcaaaactaataatgttggaccatcaccattttttgtcccttaataagatactgggctattgctaatgacctacaatgactgctgaaacaktaagtgaaaagctgatatagaactttatatctgaggattgcaaaaaggagagatgaccagacatcattgtgcatcataaggtatttctaaaaagtcaaagttgaatttgatcaagcccttcaatttaatgcattaatataaaataaaggaaatagaggaatatgttaaatgatatcatagggatgcaatttagctcaaaaattatataagataaatgacataataattatttcttgttgaaaagaaatactttttcttttttttcttttttttttgagatggaatttcactcttgtcgcccagactggcacaatctcagctcactgcaacctctgcctcccaggttcaagcgattctcctgcctcagcctctcaagtagctgggattacaggtgcctgccaccatgcctggctaattttttgtatttttagtagagacgaggtttt

SEQ ID NO: 948342 - DNA, 495 bp, Homo sapiens
gcatgaaaaggcgagactggcctagcttcccagcctacatctttcactcgtgctggatgcttcttgccctcaaacatcagactccaagttcttcarttttgaggctttgactggctctcctggctcctcaagcttgcagacggcctattgtaggaccttgtgattgcataagttaatatacatttctctcttattagttctgtccctctagggaatcctgactaatacatttggaaagatctatttcattcatcctacagtaatcaagaacatgtagtattcccagaagaagatacctatagatcaatggaaccaaataaagaatccaaaaatatatctacacaaatatgtctaaataatctttgacaaagaaatgaaagtaattcagtggaggagtggtttcctgccaaaaaaaggcactagagccatttaacatccatcatcaagaaaaaaaaagattcttaatgtaaattcacaccttatacaaaaattaac

SEQ ID NO: 948343 - DNA, 638 bp, Homo sapiens
tgagaaaacttgtcatgaataaatacaggtaaaaagcattccaagaagagggactrtaagtgaaaggtctccacagatgtggcacgttccggaggcaggaagaaaaccagcgggactgactggaggagacaggttgaaggagaggctggaaggagagaagataagaaagacagtacggggccttaatgcatggatgcatggcaccttgtgggctgttacgtgacggaagggttcagagtacaggagcgctattcagaaggatcactctgggtgctatgtgcagggcaataaaagaggaagcaatacggaggtcatggcaataaggcatggaagaggatgaggatagagacttgttctgaggcagtagcatggagctggtaagaggtagctgaattctaaaaacttttcaaaggtggagcagtactagatttcccagaattggatgtggggtgtgagagaaagggagcaataatgaaatctctctccctttcattgcattggatagtttttgcccagtgcaacttgaaaaatggggttgatgtttaggaagatgcacaatatcattgcataaacttagatgggcaaggggatgaggggccttctcaacctgtgcacaggggcttctctggtctagcttt

SEQ ID NO: 948344 - DNA, 596 bp, Homo sapiens
gagcaaatttttggagaagaaacactttttctacaaaagaatgatagttaataaacatagaaagcgtaataatattttaaaatcatgtttttctgacccccccacattgaaataagtaattcaggcaaaaattatttgtaaagattaaaacaattaggtaaaatgttgctagagtataagatatacacagttgccaaaggaaaacatacctttaagtggaaaggtttgctcgtcatcacatcaacagagtgatcaaacttagcctcactaacatttgggtatgccaacatgtgtacctcttgatatgatgtaaaatgaaatacaaagcattacttattaaatattgtccaaaatgtttactgtatatctagtcaagtctttagatcaacctttcagttttccagaaataggagataaagaaaaaagataaacgtcaagaggaaactatcaaatacatttaggatgtgggacaatcagtgagaaaatggatttggtctttttaaaaagtcaatataaaaaattataataatggagaacagattagtggttgccaggggcattggagagggtsgaaacagcaggaagccgttgtggct

SEQ ID NO: 948345 - DNA, 606 bp, Homo sapiens
ctcatttttagaaaattctgcttagtctatactagaggttttctcaattatttagatgcataagaatggctgatatttctttaggacctcatacattttattattttaacacaggtatctgataagtctctttttagaatccaaagaattaacgggacacaggagattataacgacactctccccacatataccaactttacaaaaaagggtttaggacaatttcccaggtaaaaattcctgaagccgttatttaatattgactgaaactgtagtaaaagctcagttatatttctaagtaaaagaaggcatattaattctctactgctgtgtgacgcagcaccccaaaatttcttagcttaataaaacaagcatatattctcttgcattttctgtattttaggaattggggagcacattttttttctggttggttctcgttcagggtccctcctgggatcgcagtccagttgtcctcaagggctgtagtcatctgacacckgtaaggttcattcccacccttacccatgtaggcagcctacagtttttcaccattggagagagacctcagttccttaacacatgagactcttgactcctcatggca

SEQ ID NO: 948346 - DNA, 832 bp, Homo sapiens
tgggcagctgttcaggcagacactgagctagctgcaggagtatttttttcatacccmagtggcacctggaactccagggagacagaactgttcactcacctggaaagcgggcagaagccagagaaccaagttgtcttgctcaataggtcccacccccatagagcccagcaagctgagaaccactggcttgaaattcttgctgccagcacagcagtaagaagtcaacctgagatgatcaagcttgatggggagagagacgtctgccattactgaggcttgagtaggcagttctcccctgactgcactaaaaaggcctggaagtttggactgggcagaactaaacacagtgtggcaaagcggctgtggccagactgcctctctagattcctcttcattgggcagggcatctctgaaagaaagtcgacagccccagtcaggggattataaataaaattatagataaaactccatctcacggggacagggcacctgagggaaggggcggatgtgggcatagcttcagtggacttaaatgttcctgcctgccagctctgaagagagcagtggaccctgacaaggaggattctaccagcacagcgctcaagctctgctaaggaacagactgcctcctcaagtgggtccctgaaccctgtgcctgctgactgggcgacacctctcaacaggggttgacagacacctcatataggagagctctggctggcataaagccggtgcccttctgggatgaagcttccagaggaaggagcaggcagcaatctttgctgttctgcaggctcccctggtgatactcaggcaaatagggtctggagtt

SEQ ID NO: 948347 - DNA, 679 bp, Homo sapiens
atcaagactattgatcatacamttgatgctggccacaaagtccatttgctctagatgtttctaaaatgcttagtctcaagttccatatgtatcttgttgcagagcagcaacaatttgaggatatggttaattttatgtgtcaactcaactgggccaggtggtacccaaatatgtgatcaaacatcattttgggtgtttttttttaaaggtgtttttggatgaggttaacatttaaattggtagacagagtaaagcaggtgtcctcccctggtgtgggttggctacctcccattagttgaaggcatgagtagaacaaaaatgctgaccatcttccacattcaagagaactcatcttgcctgacagccattgaattgggacatcatctttttcttgccttcaaactcaaactgaatcaccagatcttcctgggtctcgagcctgttggaatttggactggaactacaccatgagatctcctggttctcaggctttcggactcagactagaactacacatcggctctcctgggtctccagcttgctgactcaacctgaagatcttggaacttgtcagcttccataatcatgcaagccaattccttacaataaacatagctgtatatgcacactctattggttctgcttctctaaagagccctgacaaatagaaggacgaaca

SEQ ID NO: 948348 - DNA, 454 bp, Homo sapiens
tgagaagagggtggacagaggtagtgtgatggtgacctggaaaccctgggcmctggatgaagtgctgaacaaatgccagggggtattaatatacaaaagaaatcccagccatcctgcctgaaatgctgaacaaagcacttcctagaggcatctaataaagcatgtacaaatgcctaaaaacaggaatgtgagtgacatcaacctgtagtcaaatgtgcatccctaatatccaaattatagaacccagtcatattccttgggagcatttgggggacagggttttctctttggcataattaaggcaaagtcctacagcatttcccaaagcagatacaagaataatggcatctgaatcaactgtggttttgttaaaatgcagattcctaggttatgccccctgtctgactgaactagaatcctaggcatgagactcaagcatatgaattataaacaa

SEQ ID NO: 948349 - DNA, 661 bp, Homo sapiens
agctgggattacaggcatgcaccatcacgcgcggctaattttgtatttttagtagagatggggtttctccatgttgttcatgttggtcttgaactcccaacctcaggtcatctgcctgccttggcctcccaaagtgctgggattataggtgtgagccaccgcacccggccctgcattgttttgaactcagacttccaaaagtcatgcaccttcagcctcctcccctggccgtatcatcctttctctccagatcttggtctcctttgcaagtggagggatggtcataaagccttcctcccttgctgggctggtcattaagcctcctatcctgaccaactgtgctgtccataatgtgtctatttcttccacttctgattggtagggcacgctgattggtcccagtgggcccactccacctccctaatttttccaccactcctgaacctccttcagtgacctcccccagcactggccccagctttgaaaagttttatgcctttcctaagcacacatctaaatgtaaaaacactacattaagtatcaagccctggtttagcgcttcaggccagtaaattaaaagttatagttcccacagtaaccatctctcttcctactatgcccwtatttagaaatgcgtgctactgcaagggctgacaaattt

SEQ ID NO: 948350 - DNA, 441 bp, Homo sapiens
ttcatgcaggaaattggtctcttgaagaatgaaagtgaaatataaaasagagggagttcagataaaagttatatttaggataatcttgaaagacatgtgtgccttgtgaatgcatagatggagatctggaaaaaatgtaggttgttatcagacaaaaacgtaacaataataataatagttagtgcccagaatagcaataaaacacaagttttctaattgtcgtatttcactattcccctccttatactaggaaggtaaactttccaagttattttccagatgattctttcacagaaccaaggtgaggagacaaagtagcaaatgtctgtaatatatttcaaacttgatattcacaaaacttttatcatgaaaaaccaaacattttttcatacatactcagaagttttatgagaagtacagaaattttaaagtcaagattca

SEQ ID NO: 948351 - DNA, 593 bp, Homo sapiens
gtgctacctcctggttggaggaaaaccaacaaaaaaccagcacactaaacaaaactacaaacaacagtccagagcccagtagctccactggatggtgacacccagragagaaaaaacaatcactgaagtttggcaagtttggcaagaaaccccagctctagaagaagagagagagcactatatcatgggagcaccctgtgggacaaaaaatatctgaacagcccttgagccctagatcttccctctaacatagtctacccaaatgagaaggaatcaaaaaaacaattctggtaatatgacaaagcaaggtactttaacacccccaaaagatcacacgagcccaccagcaatggatccaaaccaagaagaaatctctgcatttccagaaaaagaattcagaaggtcaattattaagctactcaaggaggaaccagagaaacataaataccaacttaaagaaatttaaaaaaaatgatggaggatatggatggaaaagtatccagagaaataaatagcatgaataaaaacatcacaatttctggaaataaagtacatttagagaaatgcaaaatacaccggaaagtcccagcaat

SEQ ID NO: 948352 - DNA, 472 bp, Homo sapiens
aatatgctcccaaatatacctttgcagattctacaaaaagagtgtttccaatctgctcaatgaaaagaaatgtttaactgtgtgagaagaatgcacacatcrcaaagcagtttctcagaaatcttctctctagtttttatctgaagatatttctttttcaacataggccacaaagcactcaaatttatccctgtgctcaaagtatcccctcccagattctacaaaaacagtgtttccaaacttctcaatcaaaaagaaggcttaactcagtgaggtgagtgaacacaccatgaagcagtttctcagaaaccttctttctaatttttattggaagatgtttccttttccacaataggtcacaatccattcccaaatatcccttcgcagattctacaacaacagtgtttccaaactgctcagtcaaaagaaaagtttaactcggtgagatgaatgcatacatcacaaagcagtt

SEQ ID NO: 948353 - DNA, 571 bp, Homo sapiens
ttgcgttcccaagtatgcttttgcagatgctacaaaaacagtgtttctaaactgcagaatcaaaagamagttttatctcagtgaaacaaatgcacacaacacaaatttgtttctgagaaagtgtccttctagtttttatgtaaaggtgtttcctttttcacagtaggtctcaatgcactccaaaatatcccatcacagattctacaaaaacagtgtttccaaactgctcaaatgtcagaaaggtgaaattctgtgagatgaatgcgcacatcccaaagcattttctcagaaagcttctttctagttttcatctgagaatatttcctttttcactgcagacctcaaagtgctcccaaatataacttcctagattctacaaaaacagtgttaccaaagtgctcaatcaaaatatttgtttaactctatgtgatgaaagcacacatcacaaagcagtttctccaaaagcttctttcaggtttttatgaagatatttcctttttcaccacagtcctcaatgcactccaaaacatccttttgcagattctacacagtgtttcaaaactgctaaatc

SEQ ID NO: 948354 - DNA, 604 bp, Homo sapiens
atgtaccagttgtcaaggctctgcctacagggacattgcgatgtatctctgcactgatcacctaggtcatgtaacacttttctagactctgcctacagtggatttgtgacatatctctgcactgatcatccaagtgatgtaaatcttgtctaggatctgcctaaagggactttgtgacataactctgcactgatcatccaggtgttgggtctttgctctacgctctgcctaagggggcattgtgacatatttctgcactgatcaccggtgtgatggactcttctcttggatctgcctatgggggcagtgtgacatatctctgcactgatcaccgaggtgatgtaactgttgtataagctctgcctacagtagaattgtgagagatctcgccactgatcacgcaagtgatgtaaccattgtctagactttgcctacagggggctttgtgacatacctttgcactgatcaaccaggtgatgtaactcatctaagttctgcctacaggagctytgtgacatatctctgcactgatcacttaggtgatgtaacgcttttataagcactgcctacagcgaattttgacaaaactctgcactgatcacct

SEQ ID NO: 948355 - DNA, 603 bp, Homo sapiens
gggagggaacacttgtttacgctctgcctacaggaggctttatgacttacacctscactgacaacccaggtgatgtaacacttgtctaggctctgcctacatggggattctcatatagatctgcactgatcactcaggtgatggactcttgttttggatctgcctatgggggcattgtgacatatctctacatggatcacccaggtgatgtaacagtttataagctctgcctacaggggaattgtgagagatctcgccactgatcacccaattgatgtaactattgtgtaggctttgcctacagtgggctttttacatacatttgcactgatcacccaggtgatgtagctcatctaaattcttcctacaggagctttgtgacatatctctgcactgatcaattaggtgaagtaacacttttataagaactgcctaaagggaattttgacaaatctctgcactgataacctaggtgatgtaactcttttctagcctctgcccaaagtgggcattgtgaaatatctctgcactgatcacccaggtgattcagctcttgtctaggatctgcctacaggggatttgtgacatatttctgtactgatc

SEQ ID NO: 948356 - DNA, 603 bp, Homo sapiens
gggagggaacacttgtttacgctctgcctacaggaggctttatgacttacacctgcactgacaacccaggtgatgtaacacttgtctaggctctgcctacayggggattctcatatagatctgcactgatcactcaggtgatggactcttgttttggatctgcctatgggggcattgtgacatatctctacatggatcacccaggtgatgtaacagtttataagctctgcctacaggggaattgtgagagatctcgccactgatcacccaattgatgtaactattgtgtaggctttgcctacagtgggctttttacatacatttgcactgatcacccaggtgatgtagctcatctaaattcttcctacaggagctttgtgacatatctctgcactgatcaattaggtgaagtaacacttttataagaactgcctaaagggaattttgacaaatctctgcactgataacctaggtgatgtaactcttttctagcctctgcccaaagtgggcattgtgaaatatctctgcactgatcacccaggtgattcagctcttgtctaggatctgcctacaggggatttgtgacatatttctgtactgatc

SEQ ID NO: 948357 - DNA, 577 bp, Homo sapiens
ggaaagcagatatcttcagatgaaaactagaaagaaactttctgagaaactgctttttgatgtgtgcattcttctaagagaattaaacctttgtattgaatgagcagtttggcaacactgtttttgcagaatctgtgaagatatatttaggaacacattgagggctatggtgaaaaaggaaatatcttcagaaaaaaatgagaaagatttcttagaaatagcattgtgatgtgtgcattcattcaacagagttaaatcattctttaattgaacagtttggaaacactgtttttgtagaatctgtgaagggatatttcggagcccattgagacctttggtgaaaaaggaaatatcttcaaataaaagctagaaagaagctttccaagaaactgcttttcgatgtgtgcattcatctcacagagtaaaacctttcttttgatagagcagtttggaaaaactgtttttgtagaatctgcaaagrgatatttgggggagcattggggtctatggtgaaaaaggaaacatcctcagatgtaaagtagaaagaagctttctgagaagcttttttgtgatgtgt

SEQ ID NO: 948358 - DNA, 583 bp, Homo sapiens
gtctatgtcaaaaaaggaaatatcttcagataaatactagaaagaagctttctcacaaactgtgttttgatgtgtgcattcttctcacagagttcaacctcacttttgattgagcagtttgaaaacactgtttctgtaaattataccaagggatatacatgagcactttgaggcatatggtgataaaggaaatatcttgagataaaaactagaaagaatctttctggaatctgctttgtgatgtgtgcattcatctgacagaggtaaaccgttattttgattaagcagtttggaaacagtttctgtaaattctaccaaggtatatttgggagttcattgaggtctattgtgaaataggaagtatattcagagaaatactagaaagaacgcttctgagaaactgctttgtgatgagtgcatccatctcatagagttgaactttcttttgattgagcagtttggcaaccctgtttttgaagaatctgagaaaggacaattggtagtgctttraggcctactgtgaaaaatgaattatgttagaaaaaactagaaagaagctttgtgggaaactgctttgtgattt

SEQ ID NO: 948359 - DNA, 490 bp, Homo sapiens
aaaaagtttctcagtatgcttytgtgtagtttttatgtgaagatatttccttttccacaataggtctctaagtgctccaaatatccacttgcagattctacaaaaagagtgtttccaaactgctcaatcaaaagaaagtttcaactctgtgagatgaatgcacacatcagaaagaagtttgtcagaatgcttttgtctattttttatatgaagacaattccttttctgcagtaggcctaaatgctctccacatatacacttgcagaatataaaaaagagtgtttcaaatctgcttaatgaaaacaaatgttcaaatccatgacatgaatgctcacatcagaaagaagtttgtcagaatgcttctgtctagtttttatgtgaggatatctaattttccaccataggactcaaagctgtccaaatatccataggcagaaactacaaaaagagtgtttcaaaactgctcaatccaaagaaagtttcaactctg

SEQ ID NO: 948360 - DNA, 490 bp, Homo sapiens
aaaaagtttctcagtatgcttctgtgtagtttttatgtgaagatatttccttttccacaataggyctctaagtgctccaaatatccacttgcagattctacaaaaagagtgtttccaaactgctcaatcaaaagaaagtttcaactctgtgagatgaatgcacacatcagaaagaagtttgtcagaatgcttttgtctattttttatatgaagacaattccttttctgcagtaggcctaaatgctctccacatatacacttgcagaatataaaaaagagtgtttcaaatctgcttaatgaaaacaaatgttcaaatccatgacatgaatgctcacatcagaaagaagtttgtcagaatgcttctgtctagtttttatgtgaggatatctaattttccaccataggactcaaagctgtccaaatatccataggcagaaactacaaaaagagtgtttcaaaactgctcaatccaaagaaagtttcaactctg

SEQ ID NO: 948361 - DNA, 558 bp, Homo sapiens
ggaaactgacccatgactcaattacctccacctcgtcttgcccttgatatgtggagattatgggaattacaattcaagatgagatttgggtggagacacaaacctaaccatatcattctgcccatggcccctcctaaatctcatgtctccttcacatttcaaaatcaatcatgtcttcccaatagttccccaaagtctttattcattccagtactaacccaaaagtctaagtccaaagtctgatctgaaacaaggcaagtcccttctgcctatgagcctgtaaaatcaaaagcaaattagttacttcccagatacaatgggggtcacaggaattgggtaaatacacccattccaaatgggagaaattggccaagatgaaggggctatgggccccatccaagtctggaattcaatagggtagtcattaaaccttaaagttgcaaaatgatctcttttgactcygtgtctcatatccagggcacacagatgcaagaagtgggctcccatggccttgggcagctcctcccctctggctttgcagggtacagcccacctatt

SEQ ID NO: 948362 - DNA, 615 bp, Homo sapiens
ctacatctttaaatcaggcaaccctggcttcagtgtgaattcccttgccgcactccctcaccttacccaggtgcatgttaaatcagtattaatgacaatatcattcttgtgcagtcatctcctgcctgcaatttggttttaattacccgccgcgttgtctttccccctcactgacagccattaaatagggaatgacaccggagccatagttgtgtggaatattcacttcgccagatttcatccccttcataaagcaggctgcagtgcctcctagtggcagagatcagaaagggaacggtggactttctgggcactctgtaggtgaatttggagatctgggcagatttgtaactgcaatgactatatttaaagaaaaaaataaagtttaaagagcacatattaattaaaggacaataagtgcgatttggttaagttgttttagaaattgatatatagcaataaatcgatgcactatttaagccttgtctgaccatctataaaagtgaaaatgaggattcagaaacaacaaacttgtggaataaaacgtaactgacaaagttctcaaggccagttgttcaacagaggtgagctgcragtgcccagtgagttagaact

SEQ ID NO: 948363 - DNA, 479 bp, Homo sapiens
tattagattccagctttgtctaattcttttcaattattattattttctacaattagattctagccttgcctaattcttttcaatttttactattgtctaccatttggacaaawtcagtccaaaataatgttttcaatgtttttcctttttttcttttccttttctccccacttttcctgatttgaaaacatgaaaaattaagttctgctattcttaaagccctgtgaactgaagctaacaacttaaacttcagaagacaataacagcatcccatttatatacacaaaccactttcatacctacctactgatgtgtagacttcagggtaatatgacctatttcagttttccaggcttgttcttccctctttttttgttttgttttgttttgttttgtttgtgtgttgttttatttctctcttgttcccactatattttcctcatgggacatgagactccacaacctgctaaaaatgagct

SEQ ID NO: 948364 - DNA, 682 bp, Homo sapiens
gtggctcagggtcaagaggcgaaaatttcatctggtgatggccgggccccctggccccaccctggtcctgtgaagctgcccaggtctcctggatgataccccaggtaaaccccggggcccaaggggctcccctgagctgaggggctctaagtcttgggggagtgtcctaagctttggcagctggggctctgaggggctcacataccctgggagggcactctggggcacatgggatggaggcgccccttgggtggggtggacaccgaggccagagaagtggccagagctgcacctgttcccgggtcaggagggcggggaagcacccccgagatagcccagggctaccctttttggggtttggggcgcagcctcgagctgttgctaaggcttcccctctctaactggggctggcttagcccaaagtaatctgcttccccaggtgagcgcctgcggggggaagaggggcaggcaggtggggaggctgtggccctggggaagctgcacggaggcaacatcactgccaaaggcagtgcaggcctgggccccaggcctaggctgtggggatccctccctttgtgctgtgatggtaggggacaaggacacgtgccygccacccccaaggtcaccaagggccccaaattgttgccacgctggcagcccccagtggcaggagggtgcagac

SEQ ID NO: 948365 - DNA, 634 bp, Homo sapiens
catttgctattttttttgtgtttcttataatagccattctaattggggtgaaatgatatcttgtggtggttttgagtggcatttttctgatgattagcaatgttgaacatttttccatayacctgttggtcatttatatgtcttcttttgagaaatgtctacttatattctctgcccacttattaatagcagtatttgttttttgccgatgagttgtttgagttccttgtatattctagatattagttccttgttagatgattagtctgcaaatattttctcccattctacaggatgtattttcactctgttgattttttcctctgttatgcagaggcttttgagtttaatatagtgccatttgttcctttttggttttgtttcctgtccttgtgaagtcctagccataaaatatttgcttagagtaatatcctaaagtgtttcctttacattttcttcaagtagttgtataggttttaatcctatgtttaaatttttaatccattttgaattgattgttgtatgtggaaaagataagggtctagtttcattctttagcaagtggatataaagcttgagaaacaccatttgttaaagaaggggtgctttcccaaatgtgtatttctggcagctg

SEQ ID NO: 948366 - DNA, 589 bp, Homo sapiens
cacctcgcccagctaatttcttttttaatttttttttttttttgtatagacaaggttttgctgtatttgccaggctggtctccaactcctggcctcaagtgatcctccagactcggcctcccaaagtgctaggatgacaggcatgagtcattgtgcctggacctccatggtagttattaattaaaaagggaactagagtaactttatggtgggggagctcccaacctctgccacttatttgacctgcgactttgagcaagtattttcctgtctgtgcctctgttcctacatccgtccaatgaacataccgctaggagttcccgaccttagggctgagggttaagtgatatccactatataaagcacccagcactcagtctggaacaaagttagccctccatagataggaatagagagagaaggcaaagccacccttccccctgctcacagcagatcctgtgatgatgtggacaggccctcgcgggttrgtgtagggcatctctcggctgccgttaaatacctggggaagggaacaacgttgggtggcaggcagtcactcgaggccatgcctgggccttctgaccaccct

SEQ ID NO: 948367 - DNA, 765 bp, Homo sapiens
ctgtgttgggttctgcccagtccgaacttccagctcttcttagcactgtcagaggaaaaccgcttactcaagcctcagtartggcagacacccctcccccagactaagctctataattccaggccaacttcagactgctgtgctggcagtgagaatttcaagccagtggttcttagcttgctgggtttcatgggagtaggacctgctaaatgagaccacttggctccctggcttcagccccatttccaggttctgtctcactgcaatatgaaaaaatactcctgcatctagcttggtgtctgcccaaaaagccaccaggttttgtgcttgaaacccagcatcctggtgatgtagggatatgagggaaactcctggtctgtggtttgcaaaaactgtgggaaaagcatagtatctgggcctcataggagagtccctcacagcttcccttggctgagaaagagaggctccccactctttgcacttcccaggtaaggcaatgccccaccctgcttctgctcactttccatggtttggacccactgcctaaccagtcccaatgagatgaacagggtacctcagttggaaatgcagaaatcactcgcctttgcactggtctcgctgggtgctgcagaatatagctgttcctattcagccatctcaccagatcccacacttctatgtttctattgacatatttttctcctggttatggagatgtgtcctgctatttcatttgtctaccaatttttatttgaatgccagatg

SEQ ID NO: 948368 - DNA, 646 bp, Homo sapiens
gaactaagtcttcagagatgaagtgtttgccaggcagacagcatgagggtcagaatgctggtccctgggaatattctgcctgagtcatgaggcgccattgccagaatacttggtccctgtgcctacaccatgaaagtggaggtggagggacccacccaggactcctgccctaccaccatggcctccatggctattgggagcacctaagggtgggggtgcccacagagtctttctcccagcgtgtaagttctgacagtgctcccccaatctcctttctcttttccagaatggacagacctcaggggaagaagctggacttcagccgtccaaggtgaggaccatggccagcaccctgagcgaggggctgtgggggatcctgtttgcatggctttggaggaggttgagggctccagcctctagcccctttgcccaactcagccgtccttctcagggcccaccgaatccttgtggcaaccctgggcatagaaatcacttgttccaaccttcctattttgtaggtgaggcgactgtggcccagaaagggtcaggagcagaatccaggtcagggctctggttacctgtcmcccaggccaggatgcccctgcagtttatttactcatggaatttgggctggctctaaggagtg

SEQ ID NO: 948369 - DNA, 646 bp, Homo sapiens
gaactaagtcttcagagatgaagtgtttgccaggcagacagcatgagggtcagaatgctggtccctgggaatattctgcctgagtcatgaggcgccattgccagaatacttggtccctgtgcctacaccatgaaagtggaggtggagggacccacccaggactcctgccctaccaccatggcctccatggctattgggagcacctaagggtgggggtgcccacagagtctttctcccagcgtgtaagttctgacagtgctcccccaatctcctttctcttttccagaatggacagacctcaggggaagaagctggacttcagccgtccaaggtgaggaccatggccagcaccctgagcgaggggctgtgggggatcctgtttgcatggctttggaggaggttgagggctccagcctctagcccctttgcccaactcagccgtccttctcagggcccaccgaatccttgtggcaaccctgggcatagaaatcacttgttccaaccttcctattttgtaggtgaggcgactgtggcccagaaagggtcaggagcagaatccaggtcagggctctggttacctgtcacccaggccaggatgcccctgcrgtttatttactcatggaatttgggctggctctaaggagtg

SEQ ID NO: 948370 - DNA, 691 bp, Homo sapiens
catttttgcctctgaattattcgcactgcagatcttttttctactagactatcagaattttttcctatttgattgtaaaagctgtttagacatacaggctttttttttcccctcatttttwaaaaaattaattgaatataactgctggctgaaaatagatgattcttcattctgctgaagcatccttactttcctaagaatttccacaactggcatttacatctggaagtgattctgatactgggtgaaagtgaggctcttatgtgatgttttccaaatagctctttgtgtcttagaacaccccttcctgttagcttggtgtttccttttctccgtccttatttttatttggatctgtttttggggactcattcatcccttcccactgcagggcctgtggatttctgtgctggtgccgccttgtttgaaacactgcagaagctccctggctggactggtggctccatcttgctgtgttggctggtgccatgacaaacaccaggggagaaggcgcgtctcttcagaagcctgggcctttttgcttttaacagtagagtctctcttattttttccagttaaacttactgtaattatgtgtttgatgaaaatttatgcaaacataaaatttgagtgagagatgagaattatcatttctgtgaaaatgaagctgaatactttgagaagatggata

SEQ ID NO: 948371 - DNA, 602 bp, Homo sapiens
ttaaagtttattaattgtgatagtatatagttaagtcttgtttttttatttagcctgataatttgtgccttttaatttgagggcttatttctacgctgtcaaatactgcattgrccacatgtggcttgaaatgtgactgttcagacttgatatatattgtcagtgtaaaatatggggcatttattttttagtttttatttttttagagatgaagtcttgctgcgttgcctagcctagcctcaaactcctgggctcaagtgatgctcctgcctcagccttctaaacagctggaactttaggcacatgctactatgcctggccagagtggttcttaatatcttactacaaaaaagtaatacatctaatttataaatttttctaatcattacacattgaaatattttgagcatattgagtttaatattaatatattattaaagttagatttacttgtttttcacttttgaaaatgtggctattagaacatttgaaaatatatatgtaagttgcattatatttctgttgggcagccctgtattagactctccaacttggataggttctagttcttctaatcttctcatcctgaagacctgccaaaa

SEQ ID NO: 948372 - DNA, 545 bp, Homo sapiens
tactatcaaccttatctttgaaaaacagatagcaataaatattatattttttatgtgaggttaaaagtaccgtagsatgaatgagtactttctattttgtgataaagtgacttttttcagcgacatgggtcagtaggagaaagaatacaatgtatattaaatgtgcattaaaatcctggatttcaaccatctgataacatttcttgtcaaactattctaacagctcctattgttttcagaaatgtttaaataaaatcttaacaaaaataaagaaaatgagctttttcccttctctatgcttcgtgccagaagacaaaggtctatattttaccttcctgttagcaggtacctaaagaatttagaatgtgggctctatccaagaggaacactcccaaaagttgctaaaaaaatataaaaatattgtacattcaagctgcatttagaatgttctgcagcttaaaaggatgtttggagtgggatttagtgtaataggtttggcaacaaaatcagtgcagttcatgcaactgatgacttgatgcagaccc

SEQ ID NO: 948373 - DNA, 644 bp, Homo sapiens
ctgtgacttaaccctagttatcagcctaaaatctaggagacaaaatgkggtcatttcctgaaatgagtgcctgatgccttgtgaggaagaatcctttgaagaatcttcctgcatgaggtcaaagttagcctttaatagggaggactgggccatttttataagttctgtctcagggtgtcctcagagccacagttcacaaggacacccatccagacacctttttaccatgttttcccaaacagggccttgtctttagcattgcaaacattatcttagctgagcattatcttgaaagcaagataatgataattattgctttcaatagtctttgaaccttctcagttttaattatgagatttggagtttgttcattagttgggtctgctctcctgttctgaaaaacataagggcttctttgtaagtgactaaacaggccctctagttctcacacttagttttcaacctttttaactgcctttagtgtctcttgacccctctgtagttagttaatgcaacttattaataaccagccaattctactttccttgtatatattgttactcttattatcttttaaatgcctgagttgtcccactggcaaaggtatacctccatcagaatatttatcttgtcctaaacaccag

SEQ ID NO: 948374 - DNA, 675 bp, Homo sapiens
aagaatgtcaaatctataagtgaaatgacaaatgaaagcagttgcttgtctcactgtgttgcaatctctagggacctggcttgmacctatatctctcccagtaactctaagagagctacattagcgacatatgttttgggtaaaaaatacaattttgtctaaaagtggacttcatttaatgctttttatttatgtattccagggagccctggaacgtaatgaaagcaagattcttcatttccagcttgaactcttggaagctaaagcagaacttgaaagaaagctttcagagaaagatgaagaaatagaaaattttaggtatttaagatgattttgatgtgtaacaattatgtatttctgaatccttgactaaacagagctcattatgtctggctgcttttatggcccctgttggagcattaccaaagaaacttagtgtaactctatattattttcttttatatacaatatctataatcgtgtatagatattcctttatacacaattagatatccttttatacacaattgtgtatagatattcctttatacacaattagatatccctttatacacaattgtgtacagatattcctttatatcaatagtggtgagcttactagctatctatatacgattattgccagattttataattttcttatatttgaggagc

SEQ ID NO: 948375 - DNA, 675 bp, Homo sapiens
aagaatgtcaaatctataagtgaaatgacaaatgaaagcagttgcttgtctcactgtgttgcaatctctagggacctggcttgaacctatatctctcccagtaactctaagagagctacattagcgacatatgttttgggtaaaaaatacaattttgtctaaaagtggacttcatttaatgctttttatttatgtattccagggagccctggaacgtaatgaaagcaagattcttcatttccagcttgaactcttggaagctaaagcagaacttgaaagaaagctttcagagaaagatgaagaaatagaaaattttaggtatttaagatgattttgatgtgtaacaattatgtatttctgaatccttgactaaacagagctcattatgtctggctgcttttatggcccctgttggagcattaccaaagaaacttagtgtaactctatattattttcttttatatacaatatctataatcgtgtatagatattcctttatacacaattagatatccttttatacacaattgtgtatagatattcctttatacacaattagatatccctttatacacaattgtgtacagatattcctttatatcaatagtggtgagcttactmgctatctatatacgattattgccagattttataattttcttatatttgaggagc

SEQ ID NO: 948376 - DNA, 835 bp, Homo sapiens
ccactaaaaatctgctcatcccagcactggaaatggtttgaaacagagagcagtggtaatggttaagggttaccaccaaaaggatgttgaggaaggtctgaattttaggagtgggaggacagccagagactaaatggaatgattcttcaaaattatataaaattattatgctatgtgaaaatattctaacagatttttaaaaactcaaatgtttcccaactccttttacaatgctagcgtaactctgacatcaaatctgatggtcataataaatgcaaaggggaagggataacacacaaaagttatgagcttaactattttgaagtgaacagttcagtagcgtgaagtgcattcacattgttgtgcaaccaatttccagaactcttttcaatttgcaatgttgaaactctgtacccatggaacaactccccactctgccttctccccagcccctgacaaccaccattctacttcctgtccctatgaatttgaatatactaggtatctcatgtaagtagaatcacatagcatttgtctttttataactggcttatttcatttagcataatgttctcaaggttcatccatattgtagcatgtgtcagaattgtgttcctttttaaggctgaatagtatgatattgtatgtctataccatattttgtttatccatttatctttcaatttgttgcttccaccttttggatattgtgaataatcatgctatgaacatgggtgtacaaatatctcttcaagactctgctcagttcttttggatatatacccagagtggaactgtcagtcaaatgstaattctatttttaattttttgaggg

SEQ ID NO: 948377 - DNA, 494 bp, Homo sapiens
  misc_feature 227, 267: n = A,T,C or G
caatgctggcttgggcagcctgcttttattctcttatctggccccacccacatcctgctgattggtagagccsagtggcctgttttgtcagggcgctgattggtgcgtttacaatccctgagctagatacaaaggttttccaagtccccatcagatgagttagatacagagtttggacacacaggttctccaacgtccccgtccagagcagctagatacagagtgtngattggtgcatttacaaaccttgagctaaacacagggtgntgattggtgtgtttacaaaccttgagctagatacagagtgctgattggtgtatttacaatccctgagctagacataaaggttctccacgtcctcaccagagcagctagatacagagtgtcgattggtgcactcacaaaccttgagctaaacacagggtgctgattggtgtatttacaatccctgagctagatataaagactctccacgtccccaccagactcaggag

SEQ ID NO: 948378 - DNA, 591 bp, Homo sapiens
aacttttggggctagtcaatcgttagagataataaatggctgagcaggcagcatgtgtttaataygcaaactaaccaatagagagccatatctcttctatctggcccatacacctcaggggaaattattcctctaaattaatcatcccaggaccagacaccaggcaactagagaccatatctttagcttagagcccaccagaagtattcaaactaaccagtcctacactgttcactttgctctgccttgcctttcctgcagaaacccaaataaaggctctggcctaatgctttcccttcactccatcttctgcctcttgactgccccagtgtctttcctgtgctgctctacatggcatgccatgcctcctgtctcaaggattgtgagtataataaagtttgtatacctgagcttctcttatgtctcctcttgtgccttcacacaactagccatcactaatagaacagagatctctatggccaatatgacaaaagaaaaaagagaaaacacacttcataaaattagttgggaaaagtcagtaaacaaacaacaatcacaacaagcagcaaccacacatcatggacatgagtg

SEQ ID NO: 948379 - DNA, 685 bp, Homo sapiens
aatcaaagcgtccactggtagatgaatggataaactaaatgtagtatatatgcaatggagtattattcaactataaaaagaaagaaattctggagcatgctacaatgtggatgatctgtgaagacawtatgctaagtgaaataagccagacacaaaggaaataacatatattgtataattccacttatacgagttgtctacaatagtcaatgcaagaagataaggtagattccaaagcccagcactaccttcaaacgtgtcactgttgagacaagtgctgacatttattgtcactccatttgctaagaaataagaacaaaaaaccattcaaaacatcaataaatacaggagctttttttggtaaaaaataatgaaatagactgctagatagactagtaaagacgaaaagagagaagattcaaataaacacaatcagaaacaacctggggaatataaccctgacccccacagaaatataaacaaccaacagagaatattataaacttatctatgaatatatactagaaaatctaaaagaaatggatacatttcaggacacataaccctcccaagactgaaccagaaagaaattgaatctctgaacagatcaataacaagttctgaaattgatgaagtaataaatagcttaccaaccaaagaaaaaaaaaaagaaaaagcccaggac

SEQ ID NO: 948380 - DNA, 617 bp, Homo sapiens
  misc_feature 3, 30: n = A,T,C or G
tcntatatgagtctaatatgcaacatctantagatgcttaaaaaaatttaccccattaaaaaagtggacaaaagacatgaacagacgcttctcaaaagacatacatgctgccaacaatcatatgaaaaaaaaaaaactcaacatcactgatcattagagaaatgcaaatcaaaaccacaatgagattctgtctcacagcaattagaatgactattattaaaaagtcaaaaaataacagatgctggctaggttgtagagaaaaggtttgcttatacactgtcggtgggagtgtaaattagttcagccgttgtggaaaacagtgtggtgattcctcaaagacctaaagacagatatactatttgactcagaaaccccattattgggtatataaccaaagaaatataaattattctattataaagacaaatgcacgtgtatgttcattgcagcactattcacaatagcaaagacatggaatcagcctaaatttctgtaaatgatagactggataaagaaaatgcggtacatatacattatggaatacaatgcagccrtaaaaattaatgaaatcatgtcctgtgcagagacctggatggagctggtggcttagcaaactg

SEQ ID NO: 948381 - DNA, 556 bp, Homo sapiens
tagtgtgataaatcttaggattgctacatctacatccaactttttttttaattttcagattttattttagattgaaggggtaawctgcaggtttctgacatgggtacattgtttgtcatagaaggttggtgtatagataattttgtcacccatgtaatcagcataatacccaataggtaaattttcaatcctcaccttccttccaccctccaccctcaagtacaccctggtgtctattattcccttctttcggtccatgggtactcaatgtttatctcccacttaaaagtgagaacatggagtattcagctttctgttcttgtgttaattttcttaggataatgatttccagatccatgcatgtttctgcaaacatgatctttttcattttaaggccgcatgatattccaatggtgtgtgtgtgtgtgtgtgtgtatatatataaacatatacatatatatatacatatatacacacatatatgtatatatgtgataacatatcacatatatcacatatatatgtgtatatatcacatatatacgtatatgtgtga

SEQ ID NO: 948382 - DNA, 613 bp, Homo sapiens
tttctaaatctcccaaacattgttcattttctattcttttcttttttttccctcacctctgagtgtgtattttaaaataacctgtcttaaagctcactgactctttctttctcttgattgattacrcagttgagacactgtgatgcatttttcagttcataaattatatgttttaccttcaagatttctttttttcgatttctggagaggtcacacatctacatcactccagtgtcactcactagtgccttatttagtccttatttggtgaggtcatattttcctgaatgttcttgatgattatggatgtttgttgacaagtctgctaaataaagaattagttattttttctgatcttcacagcctctctttgtttgtacccagcctttccaaagggctttcaaaaaattcaaagggaattgactgttgcattccctgtctgtgatcattacagccagtttagcacttaagggcacctaacatccaattatgctctgacccttttgaatactcttagatactcagacctgatgtacttgagggtgatcagggagaattccctgtgttcccaggaaaaactcacacttatttccctctttgccccaccctctaa

SEQ ID NO: 948383 - DNA, 613 bp, Homo sapiens
tttctaaatctcccaaacattgttcattttctattcttttcttttttttccctcacctctgagtgtgtattttaaaataacctgtcttaaagctcactgactctttctttctcttgattgattacgcagttgagacactgtgatgcatttttcagttcataaattatatgttttaccttcaagatttctttttttcgatttctggagaggtcacacatctacatcactccagtgtcactcactagtgccttatttagtccttatttggtgaggtcatattttcctgaatgttcttgatgattatggatgtttgttgacaagtctgctaaataaagaattagttattttttctgatcttcacagcctctctttgtttgtacccagcctttccaaagggctttcaaaaaattcaaagggaattgactgttgcattccctgtctgtgatcattacagccagtttagcacttaagggcacctaacrtccaattatgctctgacccttttgaatactcttagatactcagacctgatgtacttgagggtgatcagggagaattccctgtgttcccaggaaaaactcacacttatttccctctttgccccaccctctaa

SEQ ID NO: 948384 - DNA, 596 bp, Homo sapiens
cagtgacacaacaataacaacaaaaaaacttcaagccaatatccttaatgaacattgatgcaaaaatcctcaacaaaatactggcgaaccgaatgcagcagtatatcagaaagctaatccatcatgaaccagtaggcttttaccctggtatgcaagattggttcaacatatggaaatcaacaaatgtgattcatcacataaacaagattaaatataaaaaacacaggattatctcaactgattcagaaaaggctttagataaaattcaaaatggatttatgttaaaaacgctcaatatactaggcaatgaaggaacatgcttcaaaatagtaagagctatctatgacaaacctgcagccaacatcatactgaatgggcaaaagctggaagcatttcccttgaaaaccagcacaaggcaaggttgccttctctcaccactcctattcaacaaagtattggaaatcctgacsagaaatatcagtcaacagaaggaaataaagggcctccaaataggaagagaggaagtcaaactatccctgttggaagatgacacaatcctgtatctagaaaatcctatagtctcagctcataagctc

SEQ ID NO: 948385 - DNA, 572 bp, Homo sapiens
ttcagcatatgcaaaaattaaatcaagagggattaaaattctaaatgtgagaccctaaactataaaaatcctacaagcaaacctataaagtaccattctcacatcagccttaagaaagaatttatgactgtcctcaaaaacaattgcaacaaaaccaaaaattgacaagtgggacctaataaaactaaagaactttcacacagcaaaagaaactatcaacagagtaaacagacaacccacagaatgagagaaaatatttgcaaactatgcatctgacaaacatctaatattacagagagcttaaatgattcaacaagcaaaatacaaataatcccattaaaaagcaggcgaaggacatgaacaaacacttcgcaaaagaagacatacaagcggccaacaaacacaaaaaggacactcaatatcactcatcatcagagaaatgcaaatcaaaacctcaaygagataccatctcacaccagtcagaatggctattattaaaaagacaaaaaataacaggtgttggcaaggctatggagtaaaagggatgcttacatactgttggtggaaatgct

SEQ ID NO: 948386 - DNA, 587 bp, Homo sapiens
ctgatcaaaaagaccattgttttttcatttgtttccagtgatatcagttggtaaattgaaatcagtcagccaggagcagtggttcacaccttggaagcactttggaaggctaactcaggcagatcacttgagcccaggagttcaagaccagcctggctaacgtagtgaaaccctgtgtctacgaaaactacaaaaaaattgctgggtatcgtggtgcgtgcctgtagccccagctagctgggaggctgaggtgggaggatcacctgagcttggggaggtcaaggctgcagtgagctgtgattgtgccactgtactctagccttagcaacagagtgaggctctgcctcaaaagaagaaagaaagaaggaaagaaagaaagaaagagaaaaagaaagagagagagaaaaagagaaagaaagaaagaggaaggaaggaaggaaggaaggaaggaaggaaggaagraaggaagaaagaaagaaagaaagaaagaaagaaagaaagaaagaaagaaagaaagaaagaaaggaagaaagtcataatgacaaaatttgtcacatggaaatcagcaaacactcccaccaggaccc

SEQ ID NO: 948387 - DNA, 556 bp, Homo sapiens
ccatttccagaaccaaccgaaagcaggaagcattgagacaagtaataattcaactcttcagttggcttccaaaattatccacatttgagtcccttggcatttgtaccaaaggtcaggagttattctgattttatctgttccaggtcttcaacttgtttttgagtgaaccaaatgcttctcactgatggaggtattttatgtcttcctcctcaccccagtgtatgctgaacaagcctcccagtgatgagcaattccatacaattagcagaaatcccttagcttgaggttgtccaccattaacctggaaataaaaactttaaaattctgctccttggatttagatcaccttggtacaattctcagctctgccatttattagctgtgtgaccgtggggaaacttttaacatttgctatgtcttggtttcctattctataaaatgaagaagctccatacccaytaggatggctactcattcaaaaaagttaaaagaaaaaacacacaaaaaaaaagcattggcaaggatgtggagaaatcatcaaaatggttggatccat

SEQ ID NO: 948388 - DNA, 554 bp, Homo sapiens
catacctgtaatcccagcactttgggaggctaaggcaggcagatcacttgaactcagaagtttgcaaccatcctgggcaacatggcaaaaccccatctgtacaaaacacaaatactgagcccagcagaaggtcgagctgtgatcatgccactacattccagcctgggcaacagagtgagaccctgtctcaaaaaaaatctgtgaaggctgggtgcagtggctcactcttataattacagcactttgggaggccgaggcaggcagatcatgaggtcaggagttagagaccagcctggtcaacatggtgaaatcccatctctactaaaaatacaaaaaatagctggcatggtggcatgtgcccagctacttgggaggctgaagcaggagaatcgcttgaacctgggaggcggagattggagtgagccaagattgtgccactgcactccagccwagatgacagagcaagactccatctcaaaaagaaaaaaaagatctattaaaaattatgtatgtgatagtttgtcctggaaggccaaaggtagataattctagaa

SEQ ID NO: 948389 - DNA, 634 bp, Homo sapiens
ttctcccatgctggatgcttcctgcactcaaatatcagactccaggttctttggcttttggactcttggacttactccagttgttttccaggggctctcaggccttcatccagagactcaaagctggcctgtaggtttccctacttttgaggtgttgggactcggactgagccaatactagattccttgttcctcaacttgcagacagcctgttgtaggacttcgattgtgatggtgtgattcaattctccctaataaactccctttcatatatatatatatcctattagttctatccctctagagaaccatgactaatacagattttgatactgaggtaatggagtattgctataagatacctgagaatgtggaagtgactttggaactgtgtaatgtgcagagtttggaacagttggcaggactcagaagtagaccagaagatgtgggaaagtttgtaactgcctagagacttgttgaatggttttgaccaaactgctgatagtgacktggacagtgaagtccaggctgaggaggtccgagatggagatgaacaacttgttgggaactgaagtaaaggtcactcttgttatgctttagcaaagagactggtggcattttgcccctgccctac

SEQ ID NO: 948390 - DNA, 618 bp, Homo sapiens
cctgagcccctgctcacctctgcctacccagccatcccaggatggtgtgggctcaagctctgggggtaactgaagagccactttaagaaggcacagtctagaagtgagcagcattgagtcactgttgtctcccagtcctgggaacatcctgtgccacagtttgctgagctgtcttaatcaccagtgggtccccatctcccacccctggaatcccagaggacagctcagagttgtgattggtgcctcttcccagcgtctctctacacagctcccggctgtgcttcagcatcctccaccgaaaggtgggcctgtcgctgcatgtgaatggcaaggaggtcactgtggggaagcggctgcctcctttctctttcctgggcccctggtgcctctctcctgggggtaaggcagttgagcctacccacaagtccaggcaggaaggcagccccaccccagcacccagaaattagaaaaactagctgaggtgtgagagggggaatggtgacagccctggaagtcaggataaaaaagagacgaagcctccaggccgccatcctcaccagtgcccrccgggccctgaagctctgcagggggtggcttatgggctcagaggcttgtgga

SEQ ID NO: 948391 - DNA, 765 bp, Homo sapiens
gcagaagagtgtgttgtttaatttccacatatttgtagattttccatatttcttctgctattgatttctaattttattcccttgtaataaaaaatgattgtaatattttaatcttttttttgaaacagagttttgctctgttgctcaggctggagcacagcggctcaatcatggctaaccagagcctcgatctcccaggctcaagcaatcctcccccgtcagcctcctgagtagctggacgcacaggcatgtgccattatgcccagctaatttttaaattttatattttctaaagagagggtctctttatgttgcccaggctggcgccgaactcctaaactcactaatcctcccacctcagcctcccaaaatgctggaattataagaatgagccacaatgcctagcccatattttaacattttaaaatttggtaaaacttgttttgtgtcctagtaggttatctactcaggagaatgtttcatgacctattggaaaaagtgtgtattctgatattgttgtgtgaagtgtttttttttttcttttttttcacttctatttgtagcctacacagacctattggactgaacaaagcagggtgaatgcaggaataaaagacaagagacaaaggggtatatttggaaaaaggggtcaggggcaccttgcctctagtgaacaaggtacmtgagctttacacagccctccatatttattaggtaagagagatagtgagaagcggggggtggttttccaccagcagcttgatt

SEQ ID NO: 948392 - DNA, 701 bp, Homo sapiens
cgcgcatgtgcacacacatggatctgcttggagccttgaggcccacaygtgagtctcaggttaagagctcctggcccagagagttgtggattctccttccgcagcccccactgctccttggctgtggattcttgaagcaagaagtgtgactggctgcaggcacttccttggtgttctttccaggatggagtttcttcccatctggcatgctttgtcgttcttctatgaattccgagggagtccctggctgatgtgagctaatctgacagcctcggtgagttggggcaagagtctctactgccatagcctcgttcatggcctgcctatcttggcacggccaggagctggggttcagggtgccctgccatatagtgcccctggccctgccgcccaagcagcgcaaagggcttgatgctgcagggcccaccagggacccccgggtcaggttctgctcccccatggcacacgtcctactccctccggcccaggctgccctcggcagtctcctggtcctccttccatgagcaggagcctaaatcacagtcatcagcttctctgtgcccgggaggaagagataaaacatagggaagacaggtcacagagggcctgggaggcctgggtgtcctggccctgtcacaaggctgtgctgccttcaagttctctgctgctgccactttgaggaggagagaagaggctgtggc

SEQ ID NO: 948393 - DNA, 599 bp, Homo sapiens
actttctgagccttgttcagctacarctgctgccacaagggcccctggtgcagtatttggtgaggagaccaatctagctcctcggggacccccaggctgggcatttcccagaggtggggattggctcctctatcagaacaagggctccctcagcacagagaccacatcccttcccttttctccctccccacaggattggccaagggtttcaggacaggaaggaggtgattgatgatacactgtcttttattctcttttaagaccatggagacctgtgaggatggcaacgatcttgtcttcttctatcaggtttgcgaaggtgttgcgaaggccagccatgcctcccacacagctgcccaggctgggcttcctgacaagcttgtggctcgtggcaaggaggtgatgagatccaaatgtgcaaccacctccacatcagagctccctttcattcctagtcctactgggcctgggtctaggtccacaggatttctgacccttatttccccttctcttccccactccccttactcctcccaccttcttgcttgttcctaggtctcagacttgatccgcagtggaaaacccatcaagcctgtcaa

SEQ ID NO: 948394 - DNA, 619 bp, Homo sapiens
  misc_feature 1, 2, 3, 4, 5, 6, 7, 8, 9, 10, 11, 12, 13, 14, 15: n = A,T,C or G
nnnnnnnnnnnnnnnatgcactagggaccctttattgaatcatcatatacagtgaaccaaggtcccctaatctaccttttgggtgaatcggtttccctctcctcccttgaggggtgtttaaagcacggaccaccctactgggttgagaatgaggctttcctccgagtgggaactgagttgacattaatcatcatctgtcctcacctccccatactcaacggcgagacttacagaaataggattgggttccctagtggcagagcctgggtctgtgagttgggtagggggtcgcatgtcacttgtcagttgcgcacatcatgaactgacggtctgctctcaggagaaacagtaagggactgagggaagccaaacggagcaagtccttggcctagtctcccagggagctttgtcccactggagagtttgggctggagagttgtgccctctgcctctgtcattggccactctaggttagggggaagtgggggttgtaccctgccaggcgtctctggttcttatcagccaagggtagttctccagaggtataaaccgtgagcagcctatatccacagcagctaggaagaggggtgcyggctgtaacggggtctgggtgggacag

SEQ ID NO: 948395 - DNA, 599 bp, Homo sapiens
tggccttgcttctcctgctcagccctggcagtttgggtctagcacccacaggaaggggtgggtggctagcaaggctgctaggagaaggctcccgcttgcgtgtcccgggccccagaggcctctccctggggcttccaggccagtggttcccatgcttgtctgcacgacggcatcacctgggaagagggtctttaaaaaatcccaatgggccacactccagacccatcacagcaccatcccaggaggtagaacgcaggcactggcacttttggaagctcccggggggttccccatgtgccgatgtctgggaacaactgtttgaggctgtggcacccagctctccactcccagtggggagagacaggctcctcgctacctcccacctggggctctgcttctccagcaaatcagagctgagtgattcttgtcctctgagagccccaaaggccctggggacaggaaggccaccaagttgaccatatttagatggagaccttgaggatgtctccccataaccaacactcagctytatccccttcccagggcagagcaccttcctcagactgggagctgtttcttggcacctcgtgccccaactc

SEQ ID NO: 948396 - DNA, 186 bp, Homo sapiens
ccctaaggaggtgaagtgcagttcatgaactacagcaagtcctcgctgaacttaagggaagacttccatatttgtagcataagatggaaagcaagaaggttaaatcattctcccaacagcactaggtatgtgaggggattcaratgaaaatgcctgcccccaaaccaggctgaggccccgctctcc

SEQ ID NO: 948397 - DNA, 629 bp, Homo sapiens
atgatcacctacctcagctttcagtagagcttgagcgttacttcccaatcaccaaatacccccgaactgagaaggaatggatctgcgacgcgtttatgaatcagccaggtgaactgactttgtccgygctggaagaggatcaccatcattttgcttgagattgcaaatgatgtggccttggaagtatgtttgagacaacttcaaatctccatacattctggattgttaaagaatatcctgagattgccacaaaagcactgaaaagcctgcttccattttcaaggtcctatctttgtgaagcagggttgtctgcagtgacagcaaccaaaatgagattagagttgagtggacataaagcaacacacttcagggtcactgtctccatcacccccagatgggaccatctagttgcaggaaaacaagctcaaggctcccactgattcttcatgatggtgagtggtataattatttcattatatattacaatgtaatcataatagaaataaagtccataataaatgtaatacgcttgaatcatcccaaaaccatcccccagcccactcggtctatggaaaaatcgtcttccacaaaaccagtccctggtaccaaaagggttagggatgggacca

SEQ ID NO: 948398 - DNA, 753 bp, Homo sapiens
aacatggcatccttctgatccactctgtcctcatatctcttcctctcctccctcttctgccccctcttccagttctaaggacccttaagaccacatcgtgctctcctggataccccaggacaatctccccatcttgtttattattattttttttgagacagactctcactctgttacccaggttggagtgcagtggcgccatttcagctcactgcaacctccgcctcccaggttcaagtgatcctcccacctcagcctcccgagtagttgggaccacaggcgtgcaccaccacacctggctaattttttgtatttttggtagagatgggggtttcaccatgttgcccaggctggtcttgaactcctgacctcaagtgatctgcctgcctcggcctcccaaagtgctgggattataggtgtgagccaccgcgcccagcctatttttatattttgagacaaggtatcactctgtagcctggagctggagtatagtggtgcgattatagctcactgcagcctcgacctcatgggctcaagcgatcttcctgcctcagcctcctgagtagctgggaccgcaggtgtgggccatgatacctagctaattttatttttgtaaagtttttatagagatgttgtttcaccatgttgcccaggctggtctcaracacctggcctcaagtgatccacctgcctctgcgtgttaaagcaatgggattacaggtgtgagccactgtgcccggcccaatttctgga

SEQ ID NO: 948399 - DNA, 626 bp, Homo sapiens
tttgtgcgtcatctgtttttataaggataccagtcacttcatttagggcttgcctactccagtgtgacctcatcttaacttggttccatctgcaaaaccctgtttccagataagatcacattcacaggttcagggtggacatggatttggagagcggggatgatattcaccccagtaaactccccaagggcctgcactgggtgaaatacattccctgtttccccacataatcttcacagcagcctgtgaggcaggtgcagtcagttcccactgcatggatgaggaaactgaggctcacagaggctgagtatcaagtgcccaaagctgcacaggctgggggaggaaaatggcttggaactagataaaggtgaatggattaaataccactgaactgtacatgctgcaagggttaattctatgtcatgtgaatattacctggtaaaaagtgttctatcttggtacctttccactgtctaaaatccacgctgctagagggaatctgtggtcttgagatgtgaaacccatcatygagccacttcctgtggtgggagtctttgtgtccgggaggcctcggttatagtgcagatgagcttcctggaaggtggggactgtgtgctgagcgcctc

SEQ ID NO: 948400 - DNA, 779 bp, Homo sapiens
acacttttgggtggtgcccacacatcgtgcagaaccatctgtgcatcaggccctagtcttctcttcctctgtcaactcatcatagggaactccccatgaggccactggtgtggrctgggggaaagaaggcagtgtggcaggagtggagaccatgggcatttgagccacttcctcacgtaacttatttgtgccttcaggaccggctcgagcccgatcacatatataccacttccatttgatgatggaatgctactgtgcatgacccactttatggttagatgggtcagaaagcacccagttcatgataggcagttcaggtcgcatggtgacttgatgacccatagtcaaacattcagttttcaccaaagtccagtaacaagccaagagctgcctctcaaaaggagagtagttatctgcagaagatagcagagccttgttccaaaatcctagatgcctccactatgattcatctattggggcctgccaaaggctccaaacagcatccctatctaccactgacacctcaagcacaattggatctgctgggtcatatggccgaagtggcagagcagcctggacctgttgcagagccttctcctgttctggacctcactcaaaactggcagcctttcaggtcactcaataaatgggctagagtaacacacccagatgaggaatgtgttgccttcaaaatccaaataggcccattaggcatcatgcctctttcttggttgtaggaggggccaagtacagcaacttatccttcaccttaggactat

SEQ ID NO: 948401 - DNA, 658 bp, Homo sapiens
cagaattccatcttgttggaggaagtcagtcttttgttcttttcaggcctttgacagatcagatgaggcccaccggtactagggarggcaacctgctttactcacggtgcacagattaaaatggtaatttcatccaaaacaccctcacagaaatatccagaattgtgtttgactgcatacctggacaccatggcccagccaagttgatacagaaaattaaccatcataatctctaatctctccctccttccctctgtctctgtctccatctttctctctctctctctctctctcacacacacacacacacacacacacacacacgagcaaagtttatcacaaagtaaggaagaaatgcagggtgcagtggctcacgcctgtaaccccagcactgtaggaggccaaggtgggcggatcacctaaggtcaggagttcgagaccaacctggccaacatggcaaaaccccatctctactaaaaatacaaaaattagccaggcatggtggcacacgcctgtagtctcagctactcaggagctgaggcaggagaatctcttgaacccgggaggcggaggttgcagtgagccgagatcgcgccattgcactccagcctgggcaacagtgtgagactccatctcaaaaaacaaacaaagtgaggaa

SEQ ID NO: 948402 - DNA, 646 bp, Homo sapiens
aggttccaaagccccgccccaaagatactgagaaaagaggtctggaaggggctgcattttactgtttccaagacaatgcttaggtcaggttaaaagcttcccagcttcttttattcttagtgtttgtctcagagcagatgatttactggctgggggtctgagctaaggattcaaaacaatacaaaatgaggttgcgatgaaagggaactaagacatcatctaacctactgggtttcaaacttttgtgaccttaacccacattaagaaataccttttacaatacaactcaatatgcttgtgggtttggttccagacaactgcaataaagcgagtcacacaactttcttggtttcctagtgcatataaaaattatgtttacactatacgttacatggtacatttatcctatattgtagtttattaaatgtgtggtagtatttgtctttaaaaatgaacacaccttaatttaaaaatactttattgctaaaaaaaaaaaaaaagaaaagaaaaagtgctaacatcatctgagccttcagagagtcgtaatctttttgctggtggagggtcttgccrcgatgtggatggctgctgactgctcagggtggtggctgcttgaaggctggggtggctgcggcaatttcttaaa

SEQ ID NO: 948403 - DNA, 570 bp, Homo sapiens
tttaagaattttttattttaagggcagtccaaattcaactctgaggctacgtaatgtctatacagaattttaatacaatagcaacccagagtaagtcagtgagttaatgtactccacttattaagcagaccttcctctcttgtattcttgacctgtaaatgttcaaagacatttgtttagggagtaagtagggtcccattatattctttttatcaactgccttataggcacctgttatcccagaatactgatattattaatagcattccctctcattcttaaaaatatggtgagaggccgaagcgggaggatcacttgagcccagggactcgagaccaacctgggcaatatagtgagaccttgtctctacaaaaaatttaaagaattacctgggcgtgcatccactacaggtggacatacacctgtagtcccagctactcaggaggctgaggtgggaggaycacttaagcccaggaggtagaagttgcagtgggccaagattacacctctgcatcccaccctgggcgacagagcaagactctgttcttgggggaaaaaaaaaaagaagaa

SEQ ID NO: 948404 - DNA, 538 bp, Homo sapiens
tcattagtgaaagactgagtgtttgcttctgtgttgggtaatatgacaagtagtccatctcgccacttttactcagcattttgctggagagcacagccagagtaaggagataagaaagatcattaaaaacaaaaaggttggtaagaaaaagtaaaacttattctatttgaagatggcaaaattgtgtgtagaaaatacttaaaaatctaccccctaaaattgctatttgagctaagagtgcctgtagcaagttagtaggacaacaaagtcaatacacaaaataattgcatttctatacaccagaaaaaagctaaaaaaggtttttgaaaaatgccccatgtaatagcattaaacaacacgaaatactgtgggataaagtaacaagacagggccggccgtggtggctcatgcctgtaatcccagcactttgggaggccaaggcgggtggatcacaaggtcaggagatctataccatcctggctaacacrgtgaaaccccgtctctactaaaaacccaaaaaattcggcgggcatgttgg

SEQ ID NO: 948405 - DNA, 538 bp, Homo sapiens
tcattagtgaaagactgagtgtttgcttctgtgttgggtaatatgacaagtagtccatctcgccacttttactcagcattttgctggagagcacagccagagtaaggagataagaaagatcattaaaaacaaaaaggttggtaagaaaaagtaaaacttattctatttgaagatggcaaaattgtgtgtagaaaatacttaaaaatctaccccctaaaattgctatttgagctaagagtgcctgtagcaagttagtaggacaacaaagtcaatacacaaaataattgcatttctatacaccagaaaaaagctaaaaaaggtttttgaaaaatgccccatgtaatagcattaaacaacacgaaatactgtgggataaagtaacaagacagggccggccgtggtggctcatgcctgtaatcccagcactttgggaggccaaggcgggtggatcacaaggtcaggagatctataccatcctggctaacacagtgaaaccccgtctctactaaaaacmcaaaaaattcggcgggcatgttgg

SEQ ID NO: 948406 - DNA, 538 bp, Homo sapiens
tcattagtgaaagactgagtgtttgcttctgtgttgggtaatatgacaagtagtccatctcgccacttttactcagcattttgctggagagcacagccagagtaaggagataagaaagatcattaaaaacaaaaaggttggtaagaaaaagtaaaacttattctatttgaagatggcaaaattgtgtgtagaaaatacttaaaaatctaccccctaaaattgctatttgagctaagagtgcctgtagcaagttagtaggacaacaaagtcaatacacaaaataattgcatttctatacaccagaaaaaagctaaaaaaggtttttgaaaaatgccccatgtaatagcattaaacaacacgaaatactgtgggataaagtaacaagacagggccggccgtggtggctcatgcctgtaatcccagcactttgggaggccaaggcgggtggatcacaaggtcaggagatctataccatcctggctaacacagtgaaaccccgtctctactaaaaacccawaaaattcggcgggcatgttgg

SEQ ID NO: 948407 - DNA, 604 bp, Homo sapiens
tgagatgggagaatagcttgaacctgggaggcggaggttgcagtgagccgagatcgtgccactgcactccagcctgggtgacagagtgagactccatctcaaacaaacaaacaaamaaaaaatctctcttccatagatttaacattagttcccaagatccttctgactatggaaaaacccagtactgcaacataaatgaataaagcattataatcattgtgtctaaaaagtaatcaagactaaaaaaaagttagctgaattgaaccacattggaaactattctgaaacatatacatgatcatagcaccaatatagctgagtgtagtcctggatatggtccaagttgcttcctatgaaaatcaccccaggaatgtcagttccagcagctggacccatgttatactagcaaggctggagcagtgtcagaggaagtctcaaagaactcttaagtaagaaaatagcagaagtgaccacagtcagtgaaataaagcaacagggaagtattcgagcatcttggaggtgctttccttgatcctaaccttcctgcctttccattcttggaattttctatatccaataaaactgtctctttctggcacaagtc

SEQ ID NO: 948408 - DNA, 604 bp, Homo sapiens
tgagatgggagaatagcttgaacctgggaggcggaggttgcagtgagccgagatcgtgccactgcactccagcctgggtgacagagtgagactccatctcaaacaaacaaacaaacaaaaaatctctcttccatagatttaacattagttcccaagatccttctgactatggaaaaacccagtactgcaacataaatgaataaagcattataatcattgtgtctaaaaagtaatcaagactaaaaaaaagttagctgaattgaaccacattggaaactattctgaaacatatacatgatcatagcaccaatatagctgagtgtagtcctggatatggtccaagttgcttcctatgaaaatcaccccaggaatgtcagttccagcagctggacccatgttatactagcaaggctggagcagtgtcagaggaagtctcaaagaactcttaagtaagaaaatagcagaagtgaccacagtcagtgaaataaagcaacagggaagtattcgagcatcttggaggtgctttccttgatcctaaccttcctgcctttccattctyggaattttctatatccaataaaactgtctctttctggcacaagtc

SEQ ID NO: 948409 - DNA, 556 bp, Homo sapiens
ttgacggcgattttgcgttctgaggctgcagcgtcggcatcttgagctgccggttcgcgagttcgaggccaggttccgcctgtcgtgggttcgcaccccggacgcgatgctattcgacaakgtgaaagcgttctcggtgcagttggacggcgcgaccgcgggcgtcgagcccgtgtttagcggcggccaggccgtggcgggccgggtgctgctggagctgtcaagcgccgcgcgtgtgggtgccctgaggctgcgcgcgcggggccgcgcccacgtgcactggaccgagtcgcgcagcgcgggctcgagcacggcttacacgcagagctacagtgaacgcgtggaggtcgtgagccaccgcgccacgctcctggcgccaggtacggatggaggacccctgctccaacaccagttgtgtgcctcccaccacctggacggcggtacctccgtcagccctgggaccccagcgcaaccgctcagtcgcctcctttttctcctacctgcagataccggggagaccacgacgctgcctcctgggcgccatgagttcctgttc

SEQ ID NO: 948410 - DNA, 596 bp, Homo sapiens
atcacatcaagtatcatttctgaccacaatgaagtaacactataaatcaaatcaataacaagataaattttctaaaatgaacaaatatatamaaatgagacaatgagcaaataaacaaattaagaagcaaattaaaaaaatttttgaagcaagttaaaatagaaatgccacataccaaagcctgtgtgatccagcaaacacaatattagcaagaattttgataataaatatcttcatcaaaaatgtagaaaaagttcaaataaaacctgcacaacataacaaaatctatagggtactgaaaaggcaataataacaaggtagtttagtagtaactacctacatcaaaaaaaagagagaaagatttcaagtaaaacttaatgcatttcaaggaactaaaagagcaaatacaaaccaaacccaaatttagcaggaggaaagatataataaagatcacagcagaaataaatgaaattgagactaaaaaatagtatagaagattaacaaatgaagagttggttttgttaaaagaaaaaaaatcatcagaccattaactagattgtgaaaaaagacccaagtaaataaaaccagaaatgaaa

SEQ ID NO: 948411 - DNA, 531 bp, Homo sapiens
ttggggcaggcaggtcacatgggtgcagctcgccctttctccttctccccatctgtattagtctcttttcatgctgccaataaagacatacttgagactctgcagtttacaaaagaaagaggtttattggacttaaagttccacgtggctggggaggcctcacaatcacggtggaaggtgaaaggcatatctcacatggcggcagcaagagacagaatgagagccaagcaagacaggtttccccttatcaaaccatcagatctcgtgagacttattcactaccatgagaacagtgtggggaaaatccctcatgaatcaatgatctctcactaggtgcctcccacacatgtgggaattataggcatacaattcaagatgagatttgggtggggacacggagccaaaccatatcaccatcctctcttccctccctgtcctctcctgtcttttcctccccgccctgttctctccctcttccccctgttcctcagtcttcctgcctctcytcttccttctccatttctccccttc

SEQ ID NO: 948412 - DNA, 685 bp, Homo sapiens
aattttaagtgacctatatttaagttcagagattctttcttctgctcgatcaagtctgctattgacactgtccattttattttttaaatttcattcattgaattcttcagttgcaggatttctgttttttaattattattcctatcgctattgaatttctgattcatatcataaagtttatctgattttattgaattgtgtctgtattttcttttatcttgtcgagtttccttaagattagtagtttgaattccttttccataggtcatttatttccttttcattgatgtcttttaccagcaagttattatgttcttttggtaatgtcatatttccttgcttttaaatgtttcttttggcacttcagtgttatctgtacatctggtggaacaattgcttctttcaaactttttagagttgctttcataaagtaagactttcccctccagttggatattcttgtgccagttggcaagaaattggtgactgtttccaaattagtatagtggtatggtctacatgtagtttccttatctgtgttgaatgttatcaataactatgagtgaccccatggcctagactgcagatgtttgtgacagtggttgcttaggttgttarcatcattggtcaaggctttgggggccttccaattcttatttttctgctcagcaccacaggggaaggg

SEQ ID NO: 948413 - DNA, 595 bp, Homo sapiens
ccagaggtacaaagaggagctagtaccattccttctgaaactattgcaatcaatagaaaaagagggaatcctctctaactcattttatgagggcagcatcatcctgataccaaaggctggcagagacacaacaayaaaaaaaagaattttagaccaatatcgttgatgaacatcgatgcaaaagttctcaataaaatactggcaaaccgaatccagcagcacatcaaaaagcttatccaccacaatcaagttggcttcatccctgggatgcaaggctggttcaacatatgcaaatcaataaacgtaatctatcatataaacagaaccaaagacaaaaaccacatgattatctcaatagatgcagaaaaggccttcaacaaaattcaacagctcttcatgctaaaaactctcaataaactaggtattgatgggatgtatctcaaaataataagagctatttatgacaaacccacagccaatatcatactgaatgggcaaaaactggaagcattccctttgaaaactggcacaaggtagggatgccctctctcaccacccctattcaacatagtgttggaagttctggccagggcaa

SEQ ID NO: 948414 - DNA, 712 bp, Homo sapiens
ccccaggacgaagcccactcagccagtgmttttccactgtagctggcttttccccttggggagggtccccagattgtacaaagtgcagaggggtcccctgtccctgtcccacagggtccccacaccaggctttctcaatgtctccctgtctctctcagacaaggagggcagaggcagccacaaggccggtcccagccacaatcacacccgcatattcagataatcacagacgcttgtcccacacagtcacacaccccaacctcaggtaccaaacaccccacacactcccgacagcgcattctactcacacacacacaatcccattctcacacatgtgcacccaagcctctcgccccacatacaatgtgacaggccactgggccacctgcgggtcccagtgcacatggatgcctgcagtgcacagccacctagatcctgcaccaccggacaggaagggggcgggtacctggcagatgccacctgctgcgcccactgggccaccagaaactccacctctccccgactctccaggtcccagccaagccacgcccaccgggcctgcccccaggaccctgagtttaaagaccccatctccccaaatgccagagggagaggattccgcaccaccccaagtgtaacccacaccctagtcggccctgaccccgcactgcatggcgcccacctgagccctggcgttgctgggcctcctgct

SEQ ID NO: 948415 - DNA, 620 bp, Homo sapiens
gtagcaaggtagcttgcacaaggccacagccctgagatagggcacagcamgatccaaacatgtctctggattctgcaggcgatgcctctcctgaggatctgcacatgctgctgtacgtgaatggtggggggtactaagaagttgtagttcatacttccccaccacataccactgatttctagaaagaggaattttctcttgtaatacttgatgtaactctaggactctggacagacagtgaccctatcagcaggaagagaaggcctgaagaatcccaggattccacgatcttccatgtcagtgtgccacagccatgtggttgagagtccaagtatgtgagactgggggatagttaatacaactgtgctaggagggaagcgactatatcagtacttcagactcagctgaactctctcccaggccctgcaaaggtgtctagatgggtcctatccttcttagtggccttcctagcttggtcccaaagagcctcctgcatccactgggtggtgtgggcagacaagtcatgtgacaaatggaagttcacccttgcagtaccaaaagtccagcccatgataatgcaggctgcaggaaacactcctgtcccaggctgtcatttggac

SEQ ID NO: 948416 - DNA, 616 bp, Homo sapiens
gcccaccgagcttctaaggaaagatgctccacccacagcagtttattgggagccaggccacacccactgagccttctaaggaaagatgctccacccacagcagtttattgggagccaggccacacccactgagccttctaaggaaagcgtattgggagccaggccacgcccaccgagccttctaaggaaagatgtcattccttcagatgagccaagattatacctggcacatgaacccttataaaaaatcagcctgttgacatgggcctggagggcggagccatggggaagcaggaaccacaacggagaccgctgtggggggcagagggactactggggtggggccggaggggccaaggaccatgagagtgacagaatcaagaggagctgatgggggcgtgggaaacaaaggggtctggggggcttggccccaaggaaatggctgtgaaccttgtgggtccccgccctcacctgcctgcagggctgtgtcagcagctccctgcgcggctcaattggcttctgctggtggaaggtgaccagggcrtccagcgaggtgtgggccaccttctccccggggatcatgaaagtcccatcatccaagagcttcaccatgaaa

SEQ ID NO: 948417 - DNA, 709 bp, Homo sapiens
ggttgcagtgagctgagatyatgccactgcacttcagtctgggtgacagagtaagaccttatttcaaatataaaataaaataatggtgaagaatccctgtccaggcagatcccactcccagtgcactcacaggggtttgtgggctcagggatggctgggcgatctcaagcccctccttggcccctgtcactcgtctggcatcattccttactggttccctcttgcggttgctcagcttcacctgctgcaggtcacctcctggctgactacagtcccagctcttctcccatttcctctcttcatcaactgctcaccctctctctcggagactccatggcttcccatgtgccaggatcagtgagttgttctgggcagccaggagtcaggctggagttggagcctgtctcaacctcagtgctctttgctgttcctggccaggccagttcactagtgttctcaagtccccctcctccggatgttcttccgcactctcccagcaggcagcgttagtcttggctggggtcacagtgttgtctttagtctctgtgttttcgtccgtgttgtctctcaggcagtctcccagctcacgagcctgttccatggatgttcctgaggacctgccatgtgctgctgtttgtgctgtggatgcagcaaagaatgacaggaaaggctgagccctcactcagcatctgggagatggaagtcttga

SEQ ID NO: 948418 - DNA, 542 bp, Homo sapiens; identical to SEQ ID NO: 945863

SEQ ID NO: 948419 - DNA, 623 bp, Homo sapiens
gctagctaactccctggagtctcttttataagagtgctaatcccattcttgtggacagagccctaatgacctaattaccttccaaaggccccaccttctaatactttcaccctggtgatgagttttaacgtgaacttttggggggatgcaaacattcggaccatgcctatccttctaaggaagccatgagaagacagagaaacacacacagattgaagcaggtcatgtagtgatggaagcagagactagagttatgtatccacaagccaaggaacaccaaaaattgctgacaaccaccggaacttaagagacaaatgagacatattctctctccaagtttacaaaagaaaccaattgtattagtctgttttcatactgctatgaagacctgccttcatagactgggtaattaataagaaaagaagtttaattgactcacatttcagcatggctggagtggccttaggaaacttacaatcatagtggaaggcgaaggggaaacaaggyaccttcttcacaaggcagcaggaaggagaaaagctgagcaaagggaaaagccccttataaaaccatgagaccacatgagaactcactcactatcaccagaacagcatgggggaaac

SEQ ID NO: 948420 - DNA, 619 bp, Homo sapiens
tgagtgctgccacttaaatcctgcagtcccgagatccggttataaccaatgcatttagatttttcatttcggtggcaacaatcttcattgtaagttctgtcctacagagaagtgtggtgatcaagctcttyggagatactgggactcctctcacaaatgtatgtctcacagttatgatgaatggtgtatctcctggatcttcctcagttgagtatgttttaaaggaaaaatacactttatcattcaaatctttcaaagcttttgaatcactttatagcaaaccaatgaagatccagcatttcattctttcttttcttttttctttttttttttttttttgagacagagtttcactcttgttgcccaggggctggagtgcaatggtgcgatctcggctcaccgaaacctccacctcccggcttcaagtgattctcctgcctcagcctcctgagtagctgggattacagacatgcaccactacacccagctaattttgtatttttagtagagaaggggtttctccatgttggccaggctggtctcgaactcccaacctcaggtgatcctcccacctccgcctcccaaaatgctgggattacaggtgtgagccaccgcacct

SEQ ID NO: 948421 - DNA, 571 bp, Homo sapiens
aatcaacaaagaaacattggagttaaactacattttagaccaaacaggcctgatatttacagaacatttcacccaactgctgcagaatagatattctttccatcagcacatggaacattctccagagtagactatatcttaggccacaaaccaagtctcaataaattcaaaaaagtaggaatcttattaagtatcttttctttttttaaaagagatagggtcttactctgttgcccaggctggagtgcagtggtgagatcatagttcactgcagcctccaactcctgggctcaaatgatcctcctcgctcagccccccagatagctggggttacaggagtgccccacaatgcccagctaattttttttttttacttttgtggagatggaatctcactatgttgttcaggctggtcttgaactcctggcctcaagtgatcttcccatcttggcttcccaaagtgttgacattataggcgtgagccaccaggcagggcgtaagtatatttttyttaccacaggggtataaaactagaaattaataatgagaggaatcccagaaaacacaccag

SEQ ID NO: 948422 - DNA, 674 bp, Homo sapiens
atgagacagaatccacaagggacacacatccctggggcagggctaagactagggtgaggagagtgaggttgctggtctttgtgctgtagtgggttgaatagtggtccccaagaagactgtccaagtcctaacaccctagaacctgagaatgtaaccttatttggtcaaaatctttgcaaatggaattaagcatctccagataagatcatcctggattaagagtgggccctaaatccaatgtcaggtgtcctaccagaggaaggcagagggcaagctgacacacagagatgcagggaggatggccatttgattaaaatgaagtcagagattggcctgatgccaccagaagccaatgaacaccaagagccaccaaaaactgcaggaagcaaggaaaatcctttcctcgtggcttcagagggagtgcggccctgccaacaccacaatttcaaatgtctggcccccagaaccatgagagaataaatttctagtattttaacccacccagttgtttgtggtaatttgtcacggcagcccttagaagctaatataggtacaaaatataagagagtgccaaaaaaccctgtaatcaacagaaacaatgttttgatgyaatcttttttaaaaattaaaattaatgtttaaaaagccaaactcattataaacaaaatgtagaa

SEQ ID NO: 948423 - DNA, 804 bp, Homo sapiens
aagtgctctatgacttctatttttttaaatgaatgtaattctgtttggagcctctgtgccatcaggtagtagaaatttaatctcagacaactcaagtttatgtctccatctctacctctttttctccaaatctgtgtctacatgcttaggaggttgtgttgtgctcttcactaggctaaggggaagaaactcgttttccacccatctggctgccctgttttgtcatcctttctggtcactagagggccatccaaggttactgctggcctcactcaccaggcttaacacaaggttccccatctctgttcttctatgattccagggccattcctgagcatgctaccccatcaaactgcctctgcagctacctccagggccccttgggaatttttctgttgatcatgctcaacccaggaccatggccacactgactttgcctagggccccatctacttatatgtgcttgtagccattattactgcagggtcttgctacctcctcagagttctctggaaaagaccatgtgatcttctctgctgtggatgagtaggacaagaggggaaacggcagagtctatgttcctccctagagatcctccagcatctcatggccatctttctgattctctcctgtccccaaggactaggaagatttttttttcctagttgtagcaagagaggagcttagagcagatatgcttttccttaatagacattctctcaagtctactgtttgtgccttttctctgagctttgarcttgtaaaatcagggccagcttttcttgagtcccctgcttggtgctg

SEQ ID NO: 948424 - DNA, 559 bp, Homo sapiens
cagtaataacttggtgttttcacagaaatagggwtttctgtttttccactgtgtggagagctctctctcccactccacaggagtagagacaggagatacactgtgatatctctgattctagcatagtgcctggtggttgctcagtaaatgttctttggatacctgtaattgccatttagtaaaactaataggagtaaaatgtaatatattttatttaaatatatatttaggccaggcgcggtggctcaagtctgtaatcccagtactttgggaggctgaagtgggcagatcatttgaggtcaggagttgaagaccagcctggtgaacatggtgaaaccctgtttctactaaaaatacaaaaattagccaggtgtggtggggcatgcctgtaatcccagctacttgggaggctgaggcaggggaattgcttgaatctgggaggctgaggtttcagtgagctgagatcatgccactgcactctagcctgggtgacagagtgagactctgtctcaaaaaaaaatttatatatatatatatatatatataatatttaatatgt

SEQ ID NO: 948425 - DNA, 559 bp, Homo sapiens
cagtaataacttggtgttttcacagaaatagggatttctgtttttccactgtgtggagagctctctctcccactccacaggagtagagacaggagatacactgtgatatctctgattctagcatagtrcctggtggttgctcagtaaatgttctttggatacctgtaattgccatttagtaaaactaataggagtaaaatgtaatatattttatttaaatatatatttaggccaggcgcggtggctcaagtctgtaatcccagtactttgggaggctgaagtgggcagatcatttgaggtcaggagttgaagaccagcctggtgaacatggtgaaaccctgtttctactaaaaatacaaaaattagccaggtgtggtggggcatgcctgtaatcccagctacttgggaggctgaggcaggggaattgcttgaatctgggaggctgaggtttcagtgagctgagatcatgccactgcactctagcctgggtgacagagtgagactctgtctcaaaaaaaaatttatatatatatatatatatatataatatttaatatgt

SEQ ID NO: 948426 - DNA, 578 bp, Homo sapiens
taaggaagatgatttttcacgaatctacataggacctatcaactataaggaaatatattagtaaacactgtttctacatcctgatgcttgtaggtttccttgatgttgaaatagtgttagcacagatttgttatttttcctctttctgattaatccaaacctggagtgtggccctggttctccggctgcagagaagtcagtccatcttttgtaggctccttttctgttttacatttgtcgggctcactacttgagcttactcagcaacctttaaagctctaaatcctcgttagtcttaaactccccagctcatatttggccggcaactctacttggcatttcagtaatttcccacttgccagctcatcttttaccaagaatcaaaaaccattctgatctttaaagaaatgcagatgaggccgggtatcgtggctcacgcctgtaatcccagcactttgggaagcygaggagggtagatcacgaggtcaggagttcgagaccagcctgtccaacatggtgaaaacccatctctactaaaaatacaaaaattagttgggcatggtggtgcgtgctcatag

SEQ ID NO: 948427 - DNA, 762 bp, Homo sapiens
gtttttaattctagatctttctttgtatcaacaagagtgttttttgtttttttttttttttttttttgagatggagtttcactcttgtcgcccagactgsagtgcaatggcatgatctcggctcactgcaacctccgcctcccgagttcaagtgactatcctgcctcagcctcccaagtagctgagattacaggcatgcgccaccatgcccagctaatttttttgtattattaccatcttggccagggtagtctcgaactcctgaccacaggtgattcacctgcctcggcttcccaaagtgctgggattataggcgtgagccactgcacccggccaagattttttaaaaagtgaaagtaagttcaaaattaaggatttgagttctgagttccaaaattattttgttttaaagtgggaaagggggtagatatcctaatggcatttaaaacacaaaatatatgaaaaggcaaaaacgttgaacagtgggtaaatgactaaaataacaactaacactggaggtaaattggctcccttaatggataaaatataaattcaattgaagtcaaaggatatttgcctatttgtggagcacgtcttctgtcccagtgactgtgcagaatccctgtagagtccaatgacctccaagcatctgactctggttaagcatggtcccccagacctcctctctgctagctgactaatgaaacctaggtggctttaattttaatttaaaaacagctcaggtcagctgcacctcctact

SEQ ID NO: 948428 - DNA, 246 bp, Homo sapiens
acctttaccaaacagttgatgttggagaagcatgtccagctgacgcatggcatcaaggaccctgacctgaaagaaatgayagacgccatcaatgaggaggaaacagaaataaaagaagaccccaaggtccccagtcccaagtggaagttgaaagaaccggttctggagttcaggcctcccagaggagcaatcactcaaccaaagctggaaatcaatgtttttaaggttcacaagtgtgccgtgtgt

SEQ ID NO: 948429 - DNA, 246 bp, Homo sapiens
acctttaccaaacagttgatgttggagaagcatgtccagctgacgcatggcatcaaggaccctgacctgaaagaaatgatagacgccatcaatgaggaggaaacagaaataaaagaagaccccaaggtccccagtcccaagtggaagttgaaagaaccggttctggagttcaggcctcccagaggagcaatcactcaaccaaagctgraaatcaatgtttttaaggttcacaagtgtgccgtgtgt

SEQ ID NO: 948430 - DNA, 464 bp, Homo sapiens
gttggatcttagtttcttattccatgaccacgaaatgagttggaggacggaaggagttaatttgtgtgtcagagaagcaagggcaaccccacagcttgcaaaaaaaaaaacaaaaataagtgcattttatttaaacaacggaacaaacatcagagagcatcccctgcaaagcccccaccccagagcctgctgatggaagcggggctgcaggacgctctgccacaacggcagcatctccaactgcacaaagaccccttgctgccagggccgggcaccggcctagctccttgcctgcctgcctgaggcagccgtggaatcagggcaggggtggcacaggtagaaaagacagatggaaacaatgcccatgaatatacccaaagtgtcccaggaggataaaagccgtcatgaggaccagaagccaacccagtctttttttggcctccyggagaagctgtttttgagac

SEQ ID NO: 948431 - DNA, 653 bp, Homo sapiens
atttacatgactgccttgtagaaaatggacctgcagagatttaaatgatgcagaaaatacccaggattatcactagagttggtgcaccacataagctattcccaaagcacacatgatgaaacggagttttctatgtagtgggctgatgcttaaaaggcatctgaggagatcaacagccagttggatcttagtttcttattccatgaccacgaaatgagttggaggacggaaggagttaatttgtgtgtcagagaagcaagggcaaccccacagcttgcaaaaaaaaaaacaaaaataagtgcattttatttaaacaacggaacaaacatcagagagcatcccctgcaaagcccccaccccagagcctgctgatggaagcggggctgcaggacgctctgccacaacggcagcatctccaactgcacaaagaccccttgctgccagggccgggcaccggcctagctccttgcctgcctgcctgaggcagccgtggaatcagggcaggggtggcacaggtagaaaagacagatggaaacaatgcccatgaatatacccaaagtgtcccaggaggataaaagccgtcatgaggaccagaagccaacccagtctttttttggcctcccggagaagytgtttttgagacctgagactcc

SEQ ID NO: 948432 - DNA, 656 bp, Homo sapiens
tcttttttatttgtgtgcgactgtaattgtgtggaactcaggagatattaaaggctattcaggatgtgacaataaagcgggaagaaacaaagaagaagatagagaaagagaagaaggagtttttgcagaaggagcaggatctgaaagctgaaattgagaagctttgtgagaagggcagaaggtaactgatgttaagaataaaaaccctgtgtgtatgtatatatgcatgaggggccagacccgtttgtatttgtagtttctttcccttcggtttaatttttatttgaaaaacaagtgtacaagtaaaaactctccaatgactttagctttttcagtatcaaacattagacttaatagaaaaaagttcagagatttattaaatactttgaaataataacagttaattgttgagtcccaagtgtggtcaagagttcgatacgggctggacgtagcggctcacacctataatcccagcgctttgggacaccaaggtgggaagattgcttgagggccaggagtttgagaccagcctgagcaacctagcaagaccccctckctacaaaaaatattaaaaaaaaattagctggttgtggtggcacgtggctgtagtcctagctacttgggaggctgaggtggaagaatcacttgagcccagg

SEQ ID NO: 948433 - DNA, 641 bp, Homo sapiens
atttctagttctagatccttgaggaatcgccacactgacttccacaatggttgaactagtttacactcccaccaacagtgtaaaagcgttcctatttctccacatcctctccagcacctgttgtttcctgactttttaatgattgccattcgaactggtgtgagatggtatctcattgtgattttgatttgcatttctctgatggccagtgatgatgagcattttttcatgtgtctgttggctgcataaatgtcttcttttgagaagtgtcagaaataacagtatttcttttacagagtttatataaaagttcaataagatcatgggtaacacatttagtacagagtctgcatcatgtgttcaggaagtatttacttgctatgataattactattaacaataaagatcttaaataatttcatatatagaatgtctttgtaaggccgaattgtcagcattgaaaactaattttccaaaaccatttttatcatcttctgtttataaccttcctgtcgtatccackcataaccctaaggacggaacgtgccgcagatctgaggtctgttgagaggtatggcactgtccttggccccagcaagtcatatcccactcttaagacctgtgacctggcctggcacggt

SEQ ID NO: 948434 - DNA, 826 bp, Homo sapiens
tcaccctggttttcattgtccatatcattattaggattttggtcaaagccattcaacaagtctctaggaagttccaaactgtccaacatttttctctcttcttctgagccctccaaacttttccaacctctgactgataccctgttccaaagtttcttccacatttttcaggtattttttacagcagcaccccactctaccagtaccaatcttactgtatttatttattttcatgctaccgataaagatacacccaagactgggtaatttataaagaaaaagaggtttaatggatcatagattcactgaaaccatctcagcaaaattctgaccaagacagtgaaagagatccaacttaaacaactccatcttgccactaacctccaagctgtccttgtttattcctgggcataggctaaactaactttgggaggaacttagtttatagtttaaaacagagacagtgaaagtccttttccaaaacaaacctccttctttcctggggactagactactaacattagccacaagattaggaattatggctttgaagtcacactgctgaaggctacaagattctgaccctccctaaactgatcctaaaatcagtgcttgagatattttgcagacactgcacttgatggatcaaccggcacccctcagattgagaaactggccaatctgatcttgtgaccttcccacccaggaactgactcagtgcaagaagacagtgacatyggatgatttcatctccaacccaaccagttagcattccctgactcactgcccctcatcctgaatacttgggagacatatttgagtaata

SEQ ID NO: 948435 - DNA, 826 bp, Homo sapiens
tcaccctggttttcattgtccatatcattattaggattttggtcaaagccattcaacaagtctctaggaagttccaaactgtccaacatttttctctcttcttctgagccctccaaacttttccaacctctgactgataccctgttccaaagtttcttccacatttttcaggtattttttacagcagcaccccactctaccagtaccaatcttactgtatttatttattttcatgctaccgataaagatacacccaagactgggtaatttataaagaaaaagaggtttaatggatcatagattcactgaaaccatctcagcaaaattctgaccaagacagtgaaagagatccaacttaaacaactccatcttgccactaacctccaagctgtccttgtttattcctgggcataggctaaactaactttgggaggaacttagtttatagtttaaaacagagacagtgaaagtccttttccaaaacaaacctccttctttcctggggactagactactaacattagccacaagattaggaattatggctttgaagtcacactgctgaaggctacaagattctgaccctccctaaactgatcctaaaatcagtgcttgagatattttgcagacactgcacttgatggatcaaccggcacccctcagattgagaaactggccaatctgatcttgtgaccttcccacccaggaactgactcagtgcaagaagacagtgacattsgatgatttcatctccaacccaaccagttagcattccctgactcactgcccctcatcctgaatacttgggagacatatttgagtaata

SEQ ID NO: 948436 - DNA, 641 bp, Homo sapiens
ttcatatagcctcaaacttcaggtggacaaatattatgtaaatgttttctcactctccctcttgaggttccacttgctactgctcagacgtgtacattgcaaaaactagagaaggtatgatgtctttgaatatcaagttgtctgctgccaaaaacgtctcatcttactaatgtcctctattcagtggaaaagagttactacttgtctatggctttagaaggtaaaagtaacttatttggaagaaaggttcaaaatggctgactagagacaacttgcactcacctcctccacaaagaagaaccaaattagataaatagtagattatcttactttgaatagcacatctaagagaacaccgtggaaagcagtagagacgggaaatacctgaggcatggcagaagagccaagtaaggcagcctgcttacccaggattggctgggagcctggaaagtttccccagtacagggaaagagtaagtgagggatccccagtagcccatattcccatcatggactcatgyaatcttatccattggagagcccctcaactctcatgagccttgagactagtacagggagctgcctggagtgctcatgacagcattgctccggaggggaagctcaattgggttctacacacct

SEQ ID NO: 948437 - DNA, 649 bp, Homo sapiens
tcttcaggctccatttgttattctagtaatcttaatatttctaccatatctgcagttacttcctccagtaaagtcttgaacgcctcacaaaatcattcaccataatggttgaaatcaacttctaaactctatttaatgttgatattttgacctcctctcatgaatcatgaatgttcttaatgtcatttagaaggatgaatcatttctagaagattttcagtttactttgcccagattcatctgcagaatcattatctatgacacctatagccttacaaaatatatttcttaaattaaaaaacttgaaagttaaaattactgcttgattcatggacttcagaatgaatgctgtgttactaggcatgaaaacaacattaatctccttgtacatcttcatcagagcacctttgggtgactaggtgtattgacaatgagctgtaatattttgaaaggaatcttcttttcatagtagcaggtatcaactacttttaagccagtgggcttaaaatgttcagtaaatcgtgctgtaaacatgtgctatcatctgggctttgttgttcygtttatagagcacaagaagagtaggcttctgcataattcttaaggacataggatttttagaatagtaggtgagcatgggcttcaactt

SEQ ID NO: 948438 - DNA, 788 bp, Homo sapiens
tccttcaatgcgtacttcaacacaaaccaagtcacttaagcttcaattgcctaagaaacaaaatcaagaattaacaaatcaatttaggcatttgtaaaaattatctactttcatctgacaccaaatcgtaatcataattgtttatcttaagaacagatttactcggtatgatgaaacacaacactgtttgcttccattaaatattttaagttcctaaagctaatggctgatttacacacacacacattatataaaatataacatttaattttactttttaatgttttcattatcattgcacacagttctggcatagcaaaaatggtaatgcttccgtcgaattttagtttttaaagactagtcataatattcagaagtgtttaagtctctctataagtggtttgtaaccagagtgatctatgaaactttgagttgtgcataggccaaaatgttcaattttcttttcttcttttcttctttctttctttccttccttcccctttcccttcctcacttatttctttctttcctccccttctttttctttttgtctttgtctctttttttgctcttctttgtcatttttgtttttgttgtttcattttgctttgttgccgagtaggcattcaattatattatgatgagaaatatcatcagaacacattttaaaaactattttaatgtgttagatttmtattagatgtttaatcatttttctaaagaatgtaatgtccattacgttttcctgaatatgaaagagaaatgaaagcattttaagttgggcatgc

SEQ ID NO: 948439 - DNA, 653 bp, Homo sapiens
cagcttcttaagtgtttttatttggttttctttgtttctttattttttgagacarggactttctgtgtcacccaggatgtagtgtagtgacacgatcataactcactgcagtgccaacctcttgggctcgagtgaccctcccactttagcttctggaactataggtgtgcaataggtggctttttttttttaaagtttttgtagaactggggtctcactatgttgccccggctggtcttgaactcctagactcaagcgatcctcttgcctcaacctcccaaagtgctggtattaaaggcatgagccaccacatccagctaatttttgtttgtttgtttgtttgtagagatggggtctctccatattgcccaggcttgaaaactccaaacttctaatcacggcttggtctttctggtgaccaggcccatctaggagccaccaagagttgcttcatgagaacaaaagacgttcctctcactcagaaaattccgagggttgtagagctctgtgccaggaactggggggcagagatcaagtatagatttcttattgtatcacagtatcacagcagccctctggggtcccttctataagggcactaatcccacgacctaatcacccccaagtccctctcctagtaccatcactttggt

SEQ ID NO: 948440 - DNA, 643 bp, Homo sapiens
gataagcagactttacatttcggtgttttcctgcatagtaggtacaatcggtgatgggattatttttctctccccyattcatgcctgcttctttaagattttaatattaagaattgttttatgaaattaatgttaaaatactacagtgttctcttccctgggggtgcaatagacaggtcggtgttcctgggattccttctgagtgcccatcatccagcctcacttccctttgcctccacactggccccagtggccttctttggaggatgcccatgggcccctggagctgcttggggaaaggtacagagagccagaagtgcctgggggtttacattcgctctgaggcggccagtagcggagaaccgaatatgggagtgacaaaggtcagtggccttgcttcaatgtgggcccatttatgctttggaatctggcagaggctgggccggaatctcacctgtgcttggctttttccccatttctgttctgttcccctcatcccctttccgttttctcctgggagcactttattgatatataactgacaagtgaattgtagtctccagatctgattctgggggacccattttaagatgggggtggcagaaggtggggggatggcatgagagtgtagatcgtagataat

SEQ ID NO: 948441 - DNA, 621 bp, Homo sapiens
ccatctggtccaggcctttttttggttgctaggctttttattactcaatcaatttcagatctcattactggtttattcagartttcaattttttttcctggttcaatcttaggaggttttatgtttctaggaatttatctctttatactaggttttctagtttgtaggcatagcattgctcataatagttactgaaaggttcttgtatttctgttgtgctggtggtaatgttccctttgacgtttctaattttatttgattattttgttttttctttattaagctagctagcaatccatcactcgtatttattctttcaaaaaatgaactttgggttttgctgatcttttgtatggtttttcatgtctcaatttcatttacttgagctctgattttgattatcctttcttctgctagctttgaggttggtttgctctttttttctacttcctctagttatgacatcaggttgttaatttgagattttcttcacttttttatttttatttttaagttctggggtacatttgcaggatgtgcaggtttgttatgtaggtaaatgtgtgccacggtggtttgccacacctatcaacccattatttaagtgttaaaccccacgtg

SEQ ID NO: 948442 - DNA, 604 bp, Homo sapiens
cttccagacctgttacaaagttatgtgtctgttcttttaccagtaccatgctgtttggttactgtggccctgtagtgtagtttgaagtcaggtagcrtgatggatgcagctttattctttttgcttaggattgctttagctatttgggctcttttttcatctgatattaattttaaaatagttttttctagttttgtgaagaatgacaattgtagtttaatggggacagcactgaatctataaattgctttgactagtatggccattttatgatattgattcttcctatccatgagcgtggaatggttttccatttgtttgtgtcatctctgagtcctctgcacagtggtttgtagttatccttgtagagatctttcactttccttgttagctgtattcctaggtagtttattctttttgtggcaatagtgaatgggagttcgttcatgaattggctctctgcttgcctgttgttggtatataggaatgctagcgatttttgcacgttgattttgtatcctgagactttgctgaagttgctaatgagcttaagaagcttttgggctgagatgatggggttttctagatataggatcatgtcatc

SEQ ID NO: 948443 - DNA, 572 bp, Homo sapiens
gttgatagtttcttttgctgtgcagaaggtctttagtttaattagatttcatttgtcaatttttgctttttttacaattgcttttggcatgttcatcatgaaatctttgcttgtgcccatgtcctgaatggtattgcctaggttgtcttccagggtttttatagttgtgggttttatatttaaatctttaatccatcttgagttaatttttgtatatggtgtaagaaaggggtccagttttaatcttctgcatatgactagccagaagacaatgtggtgattcctcaaagacccaaagacagaaataccatttgacctagcaatcccattactggatatatatacccaaaggaatataaatcattatattataaagacacgtgcacacacatgttcattgcaatactattcacaataggaaagacattaaatcaaacttaatgcccatcagtgatagactgtrtaaagaaaatgtggtaaatatacaccatggaatactatgcagccattgaaaaatccagggtttaaatccaaatctctctgcggagctcatatgatttgactctgtgtcc

SEQ ID NO: 948444 - DNA, 600 bp, Homo sapiens
gtgttgtgtgcattcatctcacagagttgaacctttcttttgacagagcagtttggaaacactcttttttcagaatctccaagtggatattttgagtgctttgaggcctatcatggaaaaggaaatatcttcacatgaaaactacacagaagcattctgagaaactactttgtgatgtgtgcaatcatcttacaaagttgaaactttcttttatttgaacagttggaaacattctttttgtagtatctgcaagtggataattggagcgctttgtggcctatggtggaaaaggaaatctcttcacataaaaactacacagaaacattccgagcaacttctttgtgatgtgtgcattcaactcacagaattgaacctttcttttgattaagcagtttacaaacactctgtttgtagaatctgcaatgttttattggagtgctttgaggcctttggggaaaaggaaatatcttcacgtgaaaaccacacagaagcacgytgagaagcttcttggtgatgtctgcataccattcacagagttgaacctttcttttgatatagcagttttgattctctctttttttgtggaatctgcaattggat

SEQ ID NO: 948445 - DNA, 539 bp, Homo sapiens
ccactgtacctcacagggtaaggcccaatggcctggaactccagccactccccaccggggctctcgggctagcagcacctctgtacctccctgggacggagctcgccgagggagaggcaggcccctattttggctgtcctccagccctcgccactcttgccctcaggctgtggaggatgcacggtgactagcgactggcatggaccccagcacacctgccccacggaaaacctgccagactgttctccaagtggatcccagttcccagtgtccctcactgggcggggcctcccgaccagcgactcgtgcctctgcctgaagacctcaggtggaggtggctctgtatttctctacggaggaaatcccagaagcagcccacatcccctccgtcattgcagcagcagtggtkccgccccaaccaccctcaggctggggaaggacaaagagcctggtcgctgggctggcacctccagcacactccaacccaatacagagatgagcccaagttctcttccctgtgaggccccacaccccgccat

SEQ ID NO: 948446 - DNA, 667 bp, Homo sapiens
agggaaggttagcctcccttgcacacccccaggaaaggggccgaatccaggaggctgagcaacgactgactgccagccttgcctccactgtacctcacagggtaaggcccaatggcctggaactccagccactccccaccggggctctcgggctagcagcacctctgtacctccctgggacggagctcgccgagggagaggcaggcccctattttggctgtcctccagccctcgccactcttgccctcaggctgtggaggatgcacggtgactagcgactggcatggaccccagcacacctgccccacggaaaacctgccagactgttctccaagtggatcccagttcccagtgtccctcactgggcggggcctcccgaccagcgactcgtgcctctgcctgaagacctcaggtggaggtggctctgtatttctctacggaggaaatcccagaagcagcccacatcccctccgtcattgcagcagcagtggtgccgccccaaccaccctcaggctggggaaggacaaagagcctggtcgctgggctggcacctccagcacactccarcccaatacagagatgagcccaagttctcttccctgtgaggccccacaccccgccattcttcagcaggcgggccccccacctcaggaccgcagatgagccg

SEQ ID NO: 948447 - DNA, 664 bp, Homo sapiens
ttgaatgtttggtggaattcacaagtgaagtcatccttgggttttcctttgtgaggaattcttatttactaactcagcctctttacttgacatagttctatttagattttctatttcttgagtcagttttggaagtttgtgtctctctaggaatttgtatattttatctaagatacataatttgttggcatacagttattcacagaattttttttttctggagggttgactttactaatttaaatctcttttttcttagtcaatctagctgaaactttgccaatttttctgatgttttcaaaaaaccaatgtttggttttgttcattttttaattgtttattcttaatatcattaagatcttccctaatctctattgtttccttctttctgcttgtcttaggtttaatttgctcttctttttccagtgtcttagggtggaatgttaaattattgatttgtgatctttctccttttttgtaataagtagttacatcttatcttagtccatttgtgttgttgtaaagatatccctgaggctgggtaatttatatataaaaaaagaggtttattttggctcacagttctgcaggctatacagcaagcatggtgwtggcatctgcttttggtgaaagactcaaggaacttacaattatggcagaagat

SEQ ID NO: 948448 - DNA, 589 bp, Homo sapiens
aagaataaaatagacccacagtcttttacaggagacagcaggtgctgtgggaaggctcaggcttggaggcgcacaggcagctttggattctccagacagccacctcctagacgcatgttacaggacaaatcacctgcctaattttgcttaagtagaaaattggaattaataataacaataaaaacacttcttggggttttggagcccattgagagactactaagtttctgataaaaagagagaatttaaaatgattgttattagtaggtttttttcccaagtgaacctgaaatgaatgggtactttagtattttattttcatttcaaaataagacaagagaaaaagtatgagagtgtgtaaaaaagtcagtcatgcattttaaggagttaacacagatgatagatgaacacaatgtcatcagccttcatcacaaagtgaccataaaatatatatttaggaaaatgtaaaagtagggtctatcaaagcattttccaccatcatctattcaggacctcttctgctgttaagtagargtgagaaaagaacagttacaatggcaataaataatgtcatatagttctgcctttt

SEQ ID NO: 948449 - DNA, 461 bp, Homo sapiens
agttctgccttttagagacctgaggaagcaggtaatttaggattaacatgtacagaaaataagactcctctytctagtaagaacaaagagacacatcccaaagtctgaaacaaacaaatgaaaacaaaagtaaaggaaaaaacacaaactgaaaacattcagaaaggtcagtatacatgggaggtaagtcttaactttggattatttttcttaagaaaaaagaaaaaaaagcctttgtttttaatacactcactaagagttgtacagtgaaaattttgtggaattattttaaagaaaaggcaagctcaattgctttgaaatgggtgtttctgccaagctgtgtttattcatgcaatcagcatttgttgtagccctactagatgtgagggcctgtactgcacaatagcatgaggggagggaagtaaggaattagaaccactctcccggcaagcatcagagat

SEQ ID NO: 948450 - DNA, 661 bp, Homo sapiens
agatgcaggggtgcctacctccctgtgggtgttcaccacaatgacagaggcagcatagctgggtggagtggggggyccctgctggagattatgtgtgtggttgtactggatatggtattggcttggggcagggtgctggctggggcaggtttgggtgccttctctgtgccctgcaagcaggagtgatccctgagggtgtgggggtgtccgctgttctctgtgcagtattagtataagggcagggtgctggcaggggcagggcttgctggctttatgcccaccaaagctccatctgcagtggtggctgggggctgggtgggtgcagactacactccagtgtgctggcagggcaaggaaagcaaaacctatctgtgcagacatgtgccagcaaagtgatgtagggcattgccatgggccccggggaagctgcagtatggggagggagcatgtgcatggctgtataggccacacctcactggacttctccaccagtcaggcaaggttcactggcacagaagctatgctgtgggcccccaaggtacccaagactgccctctaagcaggtgtggccaggctggggccccagaagaggccaacagactaaggggtgcacaggtcagaccagccccatctgatgtgcaagaccacccttcagcgatca

SEQ ID NO: 948451 - DNA, 648 bp, Homo sapiens
atgtgtgagtaaacgtaattagtccamacaaatccagttttctgtctccataccaaggcaaagcagcctttgtaattaactgggcctttttccccaaacccaaaatgagaacacacagtttattttgttcacaaggaggtatgaaaactgctgaacgtggcagacaaagctgggagtgtttgctgtgccaggtagacagagctgaactctttctctccaggaaggaatgggagcaggctccaaatgtgagagacgggctggggctgggccgggtccctctgccgctatccagccatgttttggaggtgctggactgagggctgagccggcggcctctggaggcgagtggacatttcttagcacggtggaatcaaaagagtacagacactgggggcagataatcttgaattcaaatcctttctctttgtcttaccctcatgtcactatgcaacagcccctgagctctccaagcctcagatttcacactcatttaacagtcttcattgagcacctactgtgtctttgtgctaactactaagggtgtgaagaccaatgagatacagttaatttctgccccatgatgaaatcggagcaaagactttagcctcaaggccatggaccaattaaatgaggcatagatggaacagc

SEQ ID NO: 948452 - DNA, 596 bp, Homo sapiens
atgagcacttagaaactcaccagttactttcctgttaggtaatgagtaatgattcttgaatcatttaaaccacccagacctagtagtaawttcaacaacacagtcaagtcaaaccttctctttcatcactgcaaacaactttttgctttggtcatgattatcatggtgctaagaggagtacacttctgtgtctggccttcagtctacatgattagaagtttctccatatctgatataggcccttcccaaatttttgttagtctcattgccttcagtgaaggagattatctcagagcttctattagttagttcttgtactttaagatcatagttatagtggaatgagatctgtctgacaggtgagcagtaatcatcattgatgttctacctttgtagttcttaatcacttctaattttgttttcaggtcaatcacttgttgtagcttcttactggcaatattagcagtaggctttttatactcagaggccctgatgaacaaaacaaaatgagattaaatcaagcacaaaagaaaatgatgtaattaagagacacagtaaataggagaaatatgatcctgctgctagaataacatagc

SEQ ID NO: 948453 - DNA, 559 bp, Homo sapiens
tgcagctggcttgaattgcttccctggaaatggacttttttttctatcacatggccaggcttcaaactttccaaacttttatattctgcttcttccttaaatatagtttctgttttatgccatttctttgytcatgcatatgagcataggctgttagaagcaaccaggcaacatcttgaacactgccacttagaaatttcttctgccagataccctaaatcatcactctcaaggacaaacttccatagatctcttgggcacgggaacaatgttgccaggttctttgctaaggcataacaaacatgaccttagctccagttcccagttaattcctcatctccatctgaaaccctctcagcctggccttcattgtccatatcactaccaccattttggtcacaacaatttaacgagtctctaggaagttccaaattttccctcatcttcctgtcttctgagccctccacactcttccaacttctgcttgttacccagttccaaagttgcttcacattttcagatatctttatagaaatgccccattctttggtaccaattt

SEQ ID NO: 948454 - DNA, 560 bp, Homo sapiens
caagtccagaatccaacagagcagtagttaaatcttaaagctctgaaataatctccttttactctatgacttacatccaagtcatgccaatgtaagaggtaggctcccacgacgttgggcagctctgatcctgtggctttgcagagtacggccccatcctggctgctttcacaggctggcattgagtgtccgcaccttttccaggtgcacagtacaagctgtcagtggatctaccattctggggtctggaggacaatagccctcttctcacagctccacaaggtagtgccccagtggggactctgtgtgggggctccaactcgacctttcctttccgcactgccctagcagaggttatgcatgagagctccgcccctataccacacctctgcctggacatccaggctttcccatacatcctctgaaatctaggcagaggttcctaaacctcaattctgtcttctatatacctgcaggaccaacaccacatggaagctgccaaggcttggggcttgcaccctstgaagccatggcacagcctgtatcttggccccttttag

SEQ ID NO: 948455 - DNA, 580 bp, Homo sapiens
tctcttcatttcttctctttttcttctttcttttttggggatttatcctgcttggtgttctcttaacttcctggatctgtggtggggtgtctgaaaccaatttcaggaaatccctagtcattataactttatttattgcttctattcttttctcttttaattttcttgatgtttccattatgcatatgctacattttctgtagttgttccatattcttgcatattattccattttttccgtcttttttctctttgcttttcagttttgtaagtttctagtgacatgtccttaagctcaaagatactttgctcaagatgtgtccagtatactaatgagctaatcaaatgcattcttcatttttgttagtgtttttgatctctagcactttttaattctttctcagaatttccatctctttgcctacattaaccaaccattgttgcatgttgcctaatttttccactagcaccctcagaatattaacrgtggttgttttaaattcctgatccgataattccaacattcctgccatatctgagtctgtttgtgatgcctgctctgtctcttcaagctgtgttt

SEQ ID NO: 948456 - DNA, 659 bp, Homo sapiens
ctgtcttgagatttctgaaatctaccctgtatcaacatatgagttaacatttcatagaacctgtgctcccctcttaccctcccaggtgatagttgtgctccctcatagtaaacaagaaacaaaggaactagaatgtaagaggaattttcacaacgtattactttttaaaataacagcttcattgagatataattcacataccatagaattcacccatttaaagtgtacaattaactggttttagtatattcagaactttgtacatcaccactatcaagtttagaaccccctaaagaaaccacatactcattatcagtcccgcccccgctaccccacattatccatggactccctctcccctcactaccactaatctactttgtgtctctccaaatttgcctatgctggatatttcctataaatagaatcacagaatacctggtattttgtggccgatttcttttatttagcataaagttttcatggttcattcatgatacagtttttgccatgactttgtccctttttagtccagaataatattccattataaggatataccacattttatttaycctttcatcattggtagagatttagccctcccctccccttccctttcttctagagacatggtctttctctcccttccctttctc

SEQ ID NO: 948457 - DNA, 586 bp, Homo sapiens
cttcctgctctgtcccctttcagctccccttcctgctgagtgccaytttaatcagcaataaaatcccccacatttactatctgcaattcgtttatgcaacctcattcctcctggatgccggacaagaacttgggtatgggagcaaaatgctgttgcactgaccttccactgagctcttaacacttaagccatccacagacagcaaagctaaaagagcgttaaatataacactatttctggagcttcaagggttgcaggtgcccccctagatgctgctgcagggctgcatggagctttgctcctgctgatgcccaaaagtgctcgtcctggctcctgcaccctctcacctgtgcctcccatcctgtgagggttggaacatagcaggaccaagtgagtggagtctgcccctgctggtactaaagcagccagatagttctagtactaatgcactccagttcctgcctgcaaaggggtcagggaaaatttcctgcttcattttgaaggattgtctggaatacatcagaagggtgagtacatgcaaaaaggtagatctctctcttcctgccctcagactttcctgtgagct

SEQ ID NO: 948458 - DNA, 586 bp, Homo sapiens
cttcctgctctgtcccctttcagctccccttcctgctgagtgccactttaatcagcaataaaatcccccacatttactatctgcaattygtttatgcaacctcattcctcctggatgccggacaagaacttgggtatgggagcaaaatgctgttgcactgaccttccactgagctcttaacacttaagccatccacagacagcaaagctaaaagagcgttaaatataacactatttctggagcttcaagggttgcaggtgcccccctagatgctgctgcagggctgcatggagctttgctcctgctgatgcccaaaagtgctcgtcctggctcctgcaccctctcacctgtgcctcccatcctgtgagggttggaacatagcaggaccaagtgagtggagtctgcccctgctggtactaaagcagccagatagttctagtactaatgcactccagttcctgcctgcaaaggggtcagggaaaatttcctgcttcattttgaaggattgtctggaatacatcagaagggtgagtacatgcaaaaaggtagatctctctcttcctgccctcagactttcctgtgagct

SEQ ID NO: 948459 - DNA, 586 bp, Homo sapiens
cttcctgctctgtcccctttcagctccccttcctgctgagtgccactttaatcagcaataaaatcccccacatttactatctgcaattcgtttatgcaacctyattcctcctggatgccggacaagaacttgggtatgggagcaaaatgctgttgcactgaccttccactgagctcttaacacttaagccatccacagacagcaaagctaaaagagcgttaaatataacactatttctggagcttcaagggttgcaggtgcccccctagatgctgctgcagggctgcatggagctttgctcctgctgatgcccaaaagtgctcgtcctggctcctgcaccctctcacctgtgcctcccatcctgtgagggttggaacatagcaggaccaagtgagtggagtctgcccctgctggtactaaagcagccagatagttctagtactaatgcactccagttcctgcctgcaaaggggtcagggaaaatttcctgcttcattttgaaggattgtctggaatacatcagaagggtgagtacatgcaaaaaggtagatctctctcttcctgccctcagactttcctgtgagct

SEQ ID NO: 948460 - DNA, 589 bp, Homo sapiens; identical to SEQ ID NO: 946752

SEQ ID NO: 948461 - DNA, 609 bp, Homo sapiens
gatacttcaaaatacttaaagtacggaaaaagtacttaaagcttaatcggtatgtatagatactattcttatttaaaaatttaactgctgttttataaattcttaacattttaatkattttttaattccttcccaaactcggagtagttctaaggtttcgttaacttactgggtttaataatttttttctaatgtcaaccctcctggactgctgcattgcagatcttttgaatatattttgtcactgtttttaagacagtatgtacacgcttgacactatactgttctttgtttctgttgcattttatgatagttaacacagtacatgaaatttttaaaaaattaagtgagatttttttattcttactacttttttttttaataggtccatctgtcattgtagttacagaatcatcacaaaagagtgctgacgtaataatgtatgctaccagagtcaggtattcccttgttgatagataatctcatttaaagcagaatttaatgagtgatatattttaaacacagtaattgtgtcagacccacccattatatgtattaagggagcaaataaagggagtctaacatcaaagaacagatttcaaatccagc

SEQ ID NO: 948462 - DNA, 555 bp, Homo sapiens
tggcgaagtctcaggatacaaaatcaatgtgcaaaaattgcaagcatttctatgcgccataatagacaaacagagagccaaatcatgggtgaactcccattcacaattgtacaaagagaataaaatacctagaaatacaacttacaagacacatgaaggacctcttcaaggagaactacaaaccactgctcaaggaaataagggaggagataaacaaatggaaaaacattccatgctcacggataggaagaatcaatgttgtgaaagtggccatactacccaaagtaattgatagattcaatgctatccccatcaagctactgttgactttcttcccagaattagcaaaaacttctttaaatttcatatggaaccaaaatgagctcatataaccaagacaattctaagcaagaagaacaaagctggaggcatcactctacctgactttaaactatactacaaggctacagcaaccaaaacagyatggtactggtaccaaaacatatatatagaccaatggaacagaacagaggcctcagaaataatgccacacat

SEQ ID NO: 948463 - DNA, 604 bp, Homo sapiens
agaaataaaattcagaatttggataggaatgaagataattgagctacaggagtacattgaaacccaatgcaaggaagctaaaattcatgataaaacaattcaggagctgacagacaaaataaccagtacataaaagaatgtaactgacctaatagagctgaaaacacactacaagaatttcataatgcaatcacaagtattaatagcagaatagaccaggtggaggaaagaatcacagagcttgaagactggctttctgaaataagacagtcagacaagaatagagaaaaaatgatgaaaaggaatgaatgaaaccttcaagaaatatgggactatgtaaagagatcagatctatgactcattggtgtccctgaaagagatggggagaatggaaccaacttggaaaacatatttcaggatatcatccatgagaacttccccagcctagctacagaggccaacattgaaattcaggaaatgcagagaccccccagtaagaaattttacaagaagatcatccccaaggcacatagtcataagattttccaatgttgaaatsaaagaaaaaatattacagacagctagagaaatgtcaagtcaccta

SEQ ID NO: 948464 - DNA, 604 bp, Homo sapiens
agaaataaaattcagaatttggataggaatgaagataattgagctacaggagtacattgaaacccaatgcaaggaagctaaaattcatgataaaacaattcaggagctgacagacaaaataaccagtacataaaagaatgtaactgacctaatagagctgaaaacacactacaagaatttcataatgcaatcacaagtattaatagcagaatagaccaggtggaggaaagaatcacagagcttgaagactggctttctgaaataagacagtcagacaagaatagagaaaaaatgatgaaaaggaatgaatgaaaccttcaagaaatatgggactatgtaaagagatcagatctatgactcattggtgtccctgaaagagatggggagaatggaaccaacttggaaaacatatttcaggatatcatccatgagaacttccccagcctagctacagaggccaacattgaaattcaggaaatgcagagaccccccagtaagaaattttacaagaagatcatccccaaggcacatagtcataagattttccaatgttgaaatcaaagaaaaaatattamagacagctagagaaatgtcaagtcaccta

SEQ ID NO: 948465 - DNA, 757 bp, Homo sapiens
tccacctcctgggttcaagcagttgtcctgtctcagcctccygagtagctgggattacaggtgcacgccactacacccagctaatttgggtagttttaatagagatggggtttcaccatgtcggccaggatggtttcgatctcttgaccttgtgatctgcccgcctccgcctcccaaagtgctgggattacaggcttgagccaccgcaccaggccaattttttattttcaaatgttgtagaggtggggtcctcactacgttgtgcaggctggtttagaattcctgcactcaagcaatcctctcaccttagcctctcaaagtgctggggttataggcatgagccactgtgcctagccaagacaagcttctagaataaggtagatcagttttacaatatgcccactggttgggggaccatgagagcaggagcttctttttttttttttttttttgagacaaggtctcactttgtcacccaggctggagtgcaatggcacaatcacagctcactgcagccttgacctcccaggctcaagtgatgctgccacctcagcctctggagaagctggaactataggtgcatgccaccacgccctaagaatttttgtattttttgtagagatgaggttttgccatattgcccaggctggtctgaagctcctgggctcaagtgatccacccgtcttggcctcccaaagttttggggttacaagtatgagccactgcgtccggcccaagagtaggagcttcttgagcc

SEQ ID NO: 948466 - DNA, 607 bp, Homo sapiens
tatgtgagagctcacttaaaattacagttgacccttgaacagtgctggggttaggggcactgaaccccagcccactcccactgtgccccacagtcaggaatccaagtgtaactttttttttttttttgagatggagtcttgctctgtcacccaggctggagtgcaatggtgtgatcttggctcactgcaacctctgcctcccaggttcatgggattacaggcgcgccgccacacccagctaatttttgtatttttagtagagacggggtttcacagtgatggccaggctagtctcaaactcctgacctcagatgatccacccacctcggcccgccaaagtgctgggattacaggcatggaccactgcacctggccccaagtataacttgactccccaaaagcttaactactactagcctactgttcactggaagcttcaccaataacatgattggtcaataactatatatatatatatatatatatatatawagctctttaccctcatcatcctcactttgggctgaggaggaagaagaggggttgatcttgtttgggtagcagaggcagaaaaaaacctgtgtacaagtggacctgtgcatttcaa

SEQ ID NO: 948467 - DNA, 566 bp, Homo sapiens
cagtgctaagcccctcactgcccggggctggccrgcccgccactccaagtgtggggtgccaagcccatgcccatccggaattctagctggcctgcaagcgccacgcgcagccccggttctcgcccgtgcctctccctccacacctcctcgcgagctgagggagccggctctggccctggccatcccaggaaggggctcccacagtgcagtggtggctgaagggctcctcaagtgcagccagagtgggtgccgaggccctctaggaggcgccaagagcgagcgagggctgcgagggctgccagcacgctgtcacctctcaatttcaaagtttttgaatttattgagacttgttttatggccaatcatgtgttcaatcttaggttgtgttctgtgcacagatgagaaggatgtatatcctgtggttggtgggtggagtattctgtagatgtctattaagtccaattgatcgagtgttgaatttaagtccagaatttccctatttttctgcctttataatttgtctaatgctgtcagtggcatgttgaagtccccaactattattgtgt

SEQ ID NO: 948468 - DNA, 566 bp, Homo sapiens
cagtgctaagcccctcactgcccggggctggccggcccgccactccaagtgtggggtgccaagcccatgcccatccggaattctagctggcctgcaagcgccacgcgcagcccyggttctcgcccgtgcctctccctccacacctcctcgcgagctgagggagccggctctggccctggccatcccaggaaggggctcccacagtgcagtggtggctgaagggctcctcaagtgcagccagagtgggtgccgaggccctctaggaggcgccaagagcgagcgagggctgcgagggctgccagcacgctgtcacctctcaatttcaaagtttttgaatttattgagacttgttttatggccaatcatgtgttcaatcttaggttgtgttctgtgcacagatgagaaggatgtatatcctgtggttggtgggtggagtattctgtagatgtctattaagtccaattgatcgagtgttgaatttaagtccagaatttccctatttttctgcctttataatttgtctaatgctgtcagtggcatgttgaagtccccaactattattgtgt

SEQ ID NO: 948469 - DNA, 443 bp, Homo sapiens
tgctcagtgggcaagggacagagagaagggctcaccaggtgtgcacactygcacaggtaaggacagcagcttgaggggctccattctgaatctatgagctgctcacatttgcccagtgggcccggggaatacacactcacaagtaagtgtgccagctggagaggctcagttatggactgggtgcttatgtctcccacaaattcacgtgttgaattttacccccaaggttatagtattaagaggtgagacctggaaggtgattaggtcaggatggtgcagcccttatagaagatgctccaggagctctctctgctctccatcatgggaggacacggtgagaggatggccctccacaaggcaggaaatgagctctcaccagacaccatctgccaggcgcttcattttggacttcccactctccagaactgtgagaattaagtgct

SEQ ID NO: 948470 - DNA, 443 bp, Homo sapiens
tgctcagtgggcaagggacagagagaagggctcaccaggtgtgcacacttgcacaggtaaggacagcagcttgaggggctccattctgaatctatgagctrctcacatttgcccagtgggcccggggaatacacactcacaagtaagtgtgccagctggagaggctcagttatggactgggtgcttatgtctcccacaaattcacgtgttgaattttacccccaaggttatagtattaagaggtgagacctggaaggtgattaggtcaggatggtgcagcccttatagaagatgctccaggagctctctctgctctccatcatgggaggacacggtgagaggatggccctccacaaggcaggaaatgagctctcaccagacaccatctgccaggcgcttcattttggacttcccactctccagaactgtgagaattaagtgct

SEQ ID NO: 948471 - DNA, 620 bp, Homo sapiens
aaataaggaaacagataatttgaagaacattatacaccaattcaacctgagagacattgacataactctccgccccccaamagaatacacattttctcaactgcacatgaaacattcttcaagacagaccatatattaggccacaaaacaagtcttgataaatgtaaaagtttgacaccataaaaatatattttccaactacagtctagatcataataactagacatcaatagcagtataaaaagtgaaaaaagcctgaggcgagaggatcacttaagtctagaagtttgagaccagcctgagcaacatggtgagactctgtctctaccaaaaaaacaaaaaacaaaaaggctgggccgaggtgggcagatcacttgaggtcaggagttcaagaccagcctggccaacatggtgaaaccccggctctactaaaaatataaaattattcgggcgtggtggtgcatgcctataatcccagctacttgggaggctaaggcaggagaatctcttgaacctgggaggcagaggttgcagtgagccgagatcacgtcattgcactccagcctgggcaacaagagggaaactccgtctcaaaaaaaaaaaagtatatatttgctagt

SEQ ID NO: 948472 - DNA, 724 bp, Homo sapiens
atgttctctctcagggttcactaagggttttttgtgtgtgtgtggttttttttttttttttttgagacggagtctcgctttgtcacccaggctggagtgcagtggcgtgatctcagctcactgcaacctccgcctcccgggttcacgccattctcctgcttcagcctcccaagtagctgggaccacaggtgcccacaaccacacccggctaatttttttgtatttttagtagagacagggtttcaccgtgttagccaggatggtctccatctcctgacctcgtgatccaccggcctcggcctcccaaagtgctgggattacaggcgtgagccaccgtacctggcccactaaggtatttttgaaagacagtgtttaccccagtgatgatggagtgaatcagaggcaggggactgggggtgttgcagacattgttatgaggagcagggcttcccctgggaccaccttaaggagaaaaggagaatcaaagagagaaagaaaatctgaggctagagttaggaagaacagaatcaaggcttcttggtcctataggtcctcttcagtgggaaattctcattctggggctaaacctgggagatttygagatttactttctttacccagggacacaactttcataagttcttgtggaacgtttggtgagatactctgtattttgtaagctgcagatgtgtagacttaaggctgaccacattgcatcaagctg

SEQ ID NO: 948473 - DNA, 429 bp, Homo sapiens
atgtcagagccggcctgaaaaccctgggagttcacatcctcagtcctcatcccctccagccaaggtgctacattgtgaagcaactggaagcagatggtatgatagaaaaaacatgcacaggcaccyacgctcattgtctttccttatgggtaaaacgtaggaaaaatgcctgggtttattgtaagaattaaattagttcacccacataaggcgtctaacacgcctctcacacaagttggaggcatctaacacaaagttggcacccaataaatgttagctcctttgcacctagtgcagagcccagcataaagtaggtttaacctttgttcattaatttgttcaacgtgattttttatgctctcactgtggctagtcttcatgcttgactctgggtgtaaaaaggaatgaatattaaatggtgtgaaattg

SEQ ID NO: 948474 - DNA, 429 bp, Homo sapiens
atgtcagagccggcctgaaaaccctgggagttcacatcctcagtcctcatcccctccagccaaggtgctacattgtgaagcaactggaagcagatggtatgatagaaaaaacatgcacaggcacccacgctcattgtctttccttatgggtaaaacgtaggaaaaatgcctgggtttattgtaagaattaaattagttcacccacataaggcgtctaacacgcctctcacacaagttggaggcatctaacacaaagttggcacccaataaatgttagctcctttgcacctagtgcagagcccagcataaagtaggtttaacctttgttcattaatttgttcaacrtgattttttatgctctcactgtggctagtcttcatgcttgactctgggtgtaaaaaggaatgaatattaaatggtgtgaaattg

SEQ ID NO: 948475 - DNA, 429 bp, Homo sapiens
atgtcagagccggcctgaaaaccctgggagttcacatcctcagtcctcatcccctccagccaaggtgctacattgtgaagcaactggaagcagatggtatgatagaaaaaacatgcacaggcacccacgctcattgtctttccttatgggtaaaacgtaggaaaaatgcctgggtttattgtaagaattaaattagttcacccacataaggcgtctaacacgcctctcacacaagttggaggcatctaacacaaagttggcacccaataaatgttagctcctttgcacctagtgcagagcccagcataaagtaggtttaacctttgttcattaatttgttcaacgtgattttttatgctctcactgtggctagtcttcatgcytgactctgggtgtaaaaaggaatgaatattaaatggtgtgaaattg

SEQ ID NO: 948476 - DNA, 429 bp, Homo sapiens
atgtcagagccggcctgaaaaccctgggagttcacatcctcagtcctcatcccctccagccaaggtgctacattgtgaagcaactggaagcagatggtatgatagaaaaaacatgcacaggcacccacgctcattgtctttccttatgggtaaaacgtaggaaaaatgcctgggtttattgtaagaattaaattagttcacccacataaggcgtctaacacgcctctcacacaagttggaggcatctaacacaaagttggcacccaataaatgttagctcctttgcacctagtgcagagcccagcataaagtaggtttaacctttgttcattaatttgttcaacgtgattttttatgctctcactgtggctagtcttcatgcttgactctggrtgtaaaaaggaatgaatattaaatggtgtgaaattg

SEQ ID NO: 948477 - DNA, 335 bp, Homo sapiens
tcggcttacacatgtttttaagaggcataaatacgaaggtcagtgttgtcatgaggtcaggcaggggtkggcaaactatggcccacaatccagatgaagcccccctcctactgtgaataaaggtttattggagccacagttcctcccctgtgttcacttcttgtctggggctgctttggggctgcagtggaaagctgagtaactgctgagtaggtgcaacaaagaccacagggtccacgaagcccaagatgcttactaccaggtcctttgcagaaaaatcttgctgagccctggggaggggccaggtggcaccagggaggccattggggaggctg

SEQ ID NO: 948478 - DNA, 599 bp, Homo sapiens
tttcttgggttaggagtctggaccttgcttagtagagttgaaaccggaggagttcccttatccgcctcaccgggcgtgtgacaagggtgtggttcgcttcttcggtgccccgctgttcaaactccaagggggaacatgaagatgggtaggttttggggagtgttttggggctccatctccacggcatcgtctagggttgagtgtttgcaggtcccaaagcctcagtgggtgtgtgttacagagtgctctttcagttttgccatctgcaggcagcttgtgttaatcagctcagttagaccctctgccttatcacaaggacagagggctttctgtatcctggttcttgccctagtgtacaggaaaaatcagatcacacatgggcttggaggatgggtgcgaggtttaattgagtggtggaggtagctctcagcgaagtggatggggagcaaaacggggatggagtgggaaggtgtcttcccctggagtcaggccrgccagtggctggactctcctccgactgccctcgaccaaattctgtgtcatcccgccgtcagtggcctgccagtgtctgctggtgtctgttggtgtgcccttctcct

SEQ ID NO: 948479 - DNA, 599 bp, Homo sapiens
acagagcagagacccctccctcttaaggggacaccagcactgccaccctaccccacacaaggagataraggaaaatcttgagtcctttcaggggaacttccaggtacccagctaggcctgagaagtaaatgagcagcttgataagcaagaaggtaatagtaacataaaacaatagccaaggaagttagagtcagatgtttggttccctatagaaactgaagataagatcttcacgtatgtccctgagttgtttttcagcaccacactctaaccaactgagctaaccggccaccgaccctgagcttttcaaaaacctggacccccaccacatggagtctgctggcacatagactccagagaacggggagctgagcactgaactctgacctcttgctgttctttgatctacatttcttcctgaggggcctgaaagaagccacatccacaggccagaccttaacattcctttctgctgaccccaagtttttagacaaagtctagattccttaatcaatggcaaatcagagagtctttgaatctacctatgacccagaagtgcacccacttcaagacatcccacgtttttaggccaaaccaat

SEQ ID NO: 948480 - DNA, 815 bp, Homo sapiens
atcggaccacaggctgaggaggggacagagcagagacccctccctcttaaggggacaccagcactgccaccctaccccacacaaggagataaaggaaaatcttgagtcctttcaggggaacttccrggtacccagctaggcctgagaagtaaatgagcagcttgataagcaagaaggtaatagtaacataaaacaatagccaaggaagttagagtcagatgtttggttccctatagaaactgaagataagatcttcacgtatgtccctgagttgtttttcagcaccacactctaaccaactgagctaaccggccaccgaccctgagcttttcaaaaacctggacccccaccacatggagtctgctggcacatagactccagagaacggggagctgagcactgaactctgacctcttgctgttctttgatctacatttcttcctgaggggcctgaaagaagccacatccacaggccagaccttaacattcctttctgctgaccccaagtttttagacaaagtctagattccttaatcaatggcaaatcagagagtctttgaatctacctatgacccagaagtgcacccacttcaagacatcccacgtttttaggccaaaccaatgtgtagcccctgtatattgatttatgattgtacttgtaacttctgctttcctgaaatgtacccctgtctttaagaagccttgtttgtaagccactggggaggttgggtctcaagtatgagctgtccccattctccttgcttggtgccctgcaaataagtgccctctcttctcctgctgcaaaacctcagtgt

SEQ ID NO: 948481 - DNA, 630 bp, Homo sapiens
agtcaacaaaattacaaaggaagagagcaagaaaagaaaaggactaaagagctacaagacagacagaaacaactaagaaaaggcaattgtaagtactcacttatcagtaatcaatttaaatgtaaatggttgaactctttgatcaagagaaatagaatggctaaatgtatttaaaaaataaaaataagattcaactatgcaatctctacaagagacccactttatatttaaagaaacacataggctgaaagggaaaggaatggaaaaggtattctatgtaaatgataataaaaaattagaaatggccaaacttctctcagacaaaatatactttgaatcgaaaaatgtcacaaaagacaaagatatcatagaataacaagagtcaaattactaggaaggtaaaacacgtatatttactcaacttcagaaaactcacttatatatgacaaacaccgacttaatggaaggcagaaataaaatgtaacacaataatactaggggagtttcaaccccgctttcaaaaacggatagagaatccagacagaaaatcaacaaggaaatagcagatatgaaaacrctgtagaccaatggtacctaacagtcatatacggaacattcccctaacagcag

SEQ ID NO: 948482 - DNA, 446 bp, Homo sapiens
actcttagagccaggtgctggacactgccaaccagggtccccttcccactgtagtggcccttactaacttagctagcaggtatgtttcatacaattttttttttaatatggagtttcactcttgttgcccaggctggaatgcaatggcgcaatcttggctcactgcaacctctgcctcaggttcaagtgattatcctgcctcagcctcctgagtagctgggattacaggcgtctgccaccatgcctggccaattttttttttttttttttttttgagacggagtcttttgcccaggccggactgcagtggcactatctcggctcactgcaagctccgcctcctgggttcacgccattttcctgcctcagcctccmgagtagctgggactacaggcgcctgccaccgcgcccgtctaattttttgtatttttagtagagacggggtt

SEQ ID NO: 948483 - DNA, 600 bp, Homo sapiens
atcgagtggtttctgtgtaccaggcattgtgctaaatccttgccttaaaccygctcagcaacactaaaaagtagatgtggtaggcagaatcatactcccttctcccaaaagataggcacatcctaattcctggagccctacatggcaaaaggggctttgaagatgtaattaagttaaggatttggggctggggggtttattattatcataacttgggtgtgtctttaaagcggaagaggggtcagagaaggagatgtgatgacaggatggtcagagagatgctgtgctgcaggcttggcagacagaggttaagggaccatgcgccaaggaatgtgagcagcctctagaagctggaaaaagcaggggaaatgattccccccgaagcctccagaaggaacgcagacctgctgacgccttgcttttagccccatgagacccatggcggacttctaacctatggaattgtaagattataaatttgtgttgtttcaagccattaaatttgcgacaacatgttacagcagcaatgaaaaacaaatacagtaggcaatgctatcctgctactttataggtgaagaaatgggagctcagagacggaca

SEQ ID NO: 948484 - DNA, 669 bp, Homo sapiens
agggacttggaaggaacatgattggaaaattggtgacaaagaatttggagaagaggtatgtagatggacctccctgaatggactacaaaagtgaaaataattgtgtctcatgataatgttcaccaaagaatgacctcaagagaaaaactgaataatcaagtggattggatgacccattctctggatattagtcagtctcttttcccagccttgccattactttataaactcatgagcaaagtggccatgaaggcaaggatggaggttaggtatgggctcagcaacatggaattttactcaccaggctagcctggttatgccaaacatggaatgccgaatgtgtcagcagcagagaccaagagtaaaacttcaatatggcaccatcccctggtgtgatcagccagcagcctgatggcaggtaaattacactggactgcttccattatgggaggggcatcattgtgtccttcctggaataggctctctggatctggatttgtcttccaagcattcagtgtttctgccaaaactaccatccatagacttatagaatgcttttttacactgccattttattccacacagcattgcttttaaccrgggtacttatgccacagccaaagaagggtgtcagtggagtcaggcttatgaaatttcctggtcctacaa

SEQ ID NO: 948485 - DNA, 669 bp, Homo sapiens
agggacttggaaggaacatgattggaaaattggtgacaaagaatttggagaagaggtatgtagatggacctccctgaatggactacaaaagtgaaaataattgtgtctcatgataatgttcaccaaagaatgacctcaagagaaaaactgaataatcaagtggattggatgacccattctctggatattagtcagtctcttttcccagccttgccattactttataaactcatgagcaaagtggccatgaaggcaaggatggaggttaggtatgggctcagcaacatggaattttactcaccaggctagcctggttatgccaaacatggaatgccgaatgtgtcagcagcagagaccaagagtaaaacttcaatatggcaccatcccctggtgtgatcagccagcagcctgatggcaggtaaattacactggactgcttccattatgggaggggcatcattgtgtccttcctggaataggctctctggatctggatttgtcttccaagcattcagtgtttctgccaaaactaccatccatagacttatagaatgcttttttacactgccattttattccacacagcattgcttttaaccggggtacttatrccacagccaaagaagggtgtcagtggagtcaggcttatgaaatttcctggtcctacaa

SEQ ID NO: 948486 - DNA, 615 bp, Homo sapiens
actagcctttgcaaagtttccagtgtgggaaaagcaaaaaactcccaggtacatctcttagataatgacttgtggttatattcaataatatttgcaattaccccttcactctatcatattttatcccttaaccagagagtcactattgatcctttttgtgcttctagtgaattataccattctctacactataatcctatatttcactcacattaaactatttgctattttttggattaaatgtgttactctctagtgtgcaggctgctgattctttatttgaatgatagtcacttatttcttttcagttagagaatatttacatgattccttttttatcctgttacacttagacttttaaagaacctaatgaggttatgattcaaactaagtcaactaaatagcttcaaggttagagatggctgtggtgtgaaacaaatgtttttcttggagagctattggtttaacttcttgaaaacaggaaaatgatcttttaagcttttgaggcagatataatgagttaaaaaataasgtgcaaatgttccttgctcatcagttattcattagtttataagtaattgtatttataatttattgagaccatttgttttcttt

SEQ ID NO: 948487 - DNA, 615 bp, Homo sapiens
actagcctttgcaaagtttccagtgtgggaaaagcaaaaaactcccaggtacatctcttagataatgacttgtggttatattcaataatatttgcaattaccccttcactctatcatattttatcccttaaccagagagtcactattgatcctttttgtgcttctagtgaattataccattctctacactataatcctatatttcactcacattaaactatttgctattttttggattaaatgtgttactctctagtgtgcaggctgctgattctttatttgaatgatagtcacttatttcttttcagttagagaatatttacatgattccttttttatcctgttacacttagacttttaaagaacctaatgaggttatgattcaaactaagtcaactaaatagcttcaaggttagagatggctgtggtgtgaaacaaatgtttttcttggagagctattggtttaacttcttgaaaacaggaaaatgatcttttaagcttttgaggcagatataatgagttaaaaaataaggtgcaaakgttccttgctcatcagttattcattagtttataagtaattgtatttataatttattgagaccatttgttttcttt

SEQ ID NO: 948488 - DNA, 615 bp, Homo sapiens
actagcctttgcaaagtttccagtgtgggaaaagcaaaaaactcccaggtacatctcttagataatgacttgtggttatattcaataatatttgcaattaccccttcactctatcatattttatcccttaaccagagagtcactattgatcctttttgtgcttctagtgaattataccattctctacactataatcctatatttcactcacattaaactatttgctattttttggattaaatgtgttactctctagtgtgcaggctgctgattctttatttgaatgatagtcacttatttcttttcagttagagaatatttacatgattccttttttatcctgttacacttagacttttaaagaacctaatgaggttatgattcaaactaagtcaactaaatagcttcaaggttagagatggctgtggtgtgaaacaaatgtttttcttggagagctattggtttaacttcttgaaaacaggaaaatgatcttttaagcttttgaggcagatataatgagttaaaaaataaggtgcaaatgttccttgctcatcagttattcattagtttataaktaattgtatttataatttattgagaccatttgttttcttt

SEQ ID NO: 948489 - DNA, 590 bp, Homo sapiens
atgaaaatcattgagctaaggaagtaccttgaaacccaattcatggaagctgaaaatcacaataaaacaatgcaggagttgacagatgaaatagccagtatagaaaagaatgtaaccaacctgacatagctgaaaaatcaccccagaagactttcataatgcaatcacaagtattaacagaacagacatagtggaagaaagaatctcagagtttgaaaactggctttctgaaataagagaggcagacaaacatagaaaaaaatgaaaaggaatgaagcaaacctcagaaaaatataggattatgtaaagagactgaatccacaactgattgttgtccttgaatgagatggggagaatggaacgcatatttcaggatatcatccatgagaacttccccaacctatctagagaggccaacactcatattcaagtaattcagagaaccccagtaagataatttacaagaagattatcctccragacacacaaatatcagattctccaaggtcaaaatgaaagaaaaaaatttaaaggtagcttgagagaaagggcaagtcacttacaaagggaagtccatcaaattaacagca

SEQ ID NO: 948490 - DNA, 552 bp, Homo sapiens
gttcaaaccacaagtgggtactccaaccccagccctatcctttaacaatcatggtaccccaagccwgtcatctattccagttctctgaagctgcatttgaaccagctagagaagtctaccctgctttctccataaagcctcattatgtaataaacattttcaggccatttgagtgtatggcatcatcattatcaatatccaaaccaaacctcaggtagactttagacaagttccagtacagtgggcaaaagttaaaattaccaaaaaaaaggtatgaaggtgaatatatgaaatttctagtcagtctgccaaaagaaaacaatactcattttgtgtgttcattcttgagaaaatgtatgaagattagtattttcagattaatgtcactaatacgaaaaagacattattacagtatttttacccttaacctcatacctttttacatcttatttttcatattactatattggtatacttcatataaatgaaagtgcatgccatgggtcttatttggcatacacacaaaaaggcacatagaaatataataatatg

SEQ ID NO: 948491 - DNA, 590 bp, Homo sapiens
atttgcatgaggtagtgggtttgaaggggacccctccaggatggacagaatgggggagacggcttacwctgagaactattatccttggaggctgttatggttaaatgatgaagtcccaagatttagtagaaggcatatctggacctatgtccctattctctctgccattcttgacacaaccaaagggaaggcagcaccttctgaatgtatttgtgcagcttgtgactctgagcaactgaaaccaatgaaacaccagcagcagttacagagccacataccgtagggacattcaaggccaccgttacattcaaagcctcagggccgtagtacccttgtactatagcactactagcactatgggctggataactctctattggaggtgacagcaagctgtcctgtgcattgtgcagtgcccaggagcatctctggactcgatccactaaatgccaggagcatcctttctttagttgtgaccattaaaaatgtttccagcaggcacagtggctcacacctgtaatcccagcactttgggaggctgaggcgggcagatcacctgaggtcaggtgtttgagacaagcctggccaac

SEQ ID NO: 948492 - DNA, 611 bp, Homo sapiens
tggagatgagggtgatccaatctctccatgaggaaacacgtagcttcccagacttgttcttcatcttccatcatgttattttattttactttatttttattatttgtagaaacaggatgttsctttattgcccaggctagtgttggtctcctggcctcaagtgatgctccaatcttggtctctcaaagtgctaggattactggcatgagctacgtcgtctagccaatcatttattattattattatttttattattattattttgagacacggtcttactttgttacccaggctggagtgcagtggcatgaatatggctgactgcagccttgacctctcgagctcaagagattctccccactcagcaccccaagtagctgggactacaggcacatgcctagctagtaataatttttgtacgttttgtagagacgggtttttgccttgttgcccaggatggaaatcatgttattttaaagagacaatttaagaaagtctcttgggcccctgcctgatgtttcagccgcatcttattctgccatatagacagactagaagaggtatggatagcttcacactccaacaaattgtgcatggattctggagcactt

SEQ ID NO: 948493 - DNA, 576 bp, Homo sapiens
gctgtggtgtcagccacctcctcatcagtcatcctgtgggtcacagtctcrggagatcatattgttcacactcgtgccctgacacgttcctcctcagatgccacttatggggtctagtaacaaactggcttctagccaactttatcagaccgtcaaggaacatagggccccatacaatggaatgagatgcaacttgtattaagtcgtggttttggagtccgtttaatggcgtgaggccgtgtgtgtaataaaatgtcaggaaccaaaagcaggcaaaaaattgttcttaagcaatcccaattttgtatctacccatgacgctgttgcttttgggggattctttggaagttccatctgaaaactctgtctcaaaattacatcagccaggagagcattcctgaacctcatttataacaggaatcaggtactagcgtaagggaacagacactccgtactgatggcgtttaatgtgctgatcaaataataaaatgtgctcattctcccggtgtaaaaagaggagtcgtgttttgtgaagttggtgaacatcctccttcctcttctgggctgatgtgaagc

SEQ ID NO: 948494 - DNA, 571 bp, Homo sapiens
tttgtcagatgcatagtttgtgaatattttctctcattatgctagttgtttgtttattctgttgatagtttcttttgcttcacagaagctctttagtttaattaggtcccacttgtcaatttttgtttttgctrtattagcttttgaggacttagtcataatttgttttagtttttttttaatttttgtaatttaattttaaattccaggattatgtgcaggacgtacaggtttgttacatagataaacgtgtgccatggtggtttgctgcacctatcagcccatcacctaggtattaagccccacatgcattagctatttatcctgatgctctccctccccattgtgtattgttccgctctctgtgtccacatgttctcattgttcacctcccacttataagtgagaacatgtggtgattggttttctatttctctgttagtttgctgaggataatggtttccagctccatcgctgcccctgcaaaggacatgatctctttccttttaatggctgcatagtattctatagtgtataggtgccacatctttctttatccagcctatcattg

SEQ ID NO: 948495 - DNA, 745 bp, Homo sapiens
ctgttggagtttgctggaggtccactccagaccctgtttgcctgtgtatcagcagcggargctgcagaacagcgaatattgctgaacagcaaatgttgctgcctgattgttcctctggaagcttcatctcagaggagtacccagccgtgtgaggtgtccatctgcctctactgtgggatacctcccacttaggctactcgaggttcagggacccacttgaggaggcagtctgtccattctcagatctcaaactccatgctggaagaaccactactctcttccaagctgtcagacagggacatttaagtctgcagaggtttctgccaccttttgtttggctatgccctgcccccagaggtggagtctacagaggcaggcaggcctccttgagctgtggtgtttccacccaatttgaaacctccagactgcttagtttacctattcaagcctcagcaatggcgggcaccctcccccagcctcgctgctgccttgcagtttgatctcagagtgctgtgctagcaatgagcaaggctccgtgggtgtgagaccctctgagctatgcacaggatataatctcctggtgtgccatttgctaagaccattggaaaagtgcagtattagggtgggagtgacccaatttcccaggtgccatctgtcacagcttcccttggctaggaaagggaattccctgaccccttgtgcttccccggtgaggcaatgccttgccctgcttcagctcatgctc

SEQ ID NO: 948496 - DNA, 611 bp, Homo sapiens
tttgggttccactactcttttctgttgtttttctattctctatttcatttatttccagcctaatctttattgttttmttatttctttttgctttgtatttagattttttttctagtttcttgaggtaatgtttaagatctttctacctttctaatatacacatttacagctataaatttccctctgaccatcaatttagctgcactttctaagttttgatatattatcagcttttttcatctaaaagtattttctatttcctttttccatttctcctttgacctattgattatttagaaatgtattgtttaatttccacatatttgtgaatttcccaaatttacttgtttttaatttctaattgcattttattgtggttatacaatacacttttgtgtcattttgatcattttaaatttattatggcttgtcttgtggcataacatatggtctacccaagacagctccatgtggtgtgggatgggatgttcaatagatgtctcttaaatcttgttggctgatagtgttgttcacataatttattttcttgtgattttctacctgttgttccagctattgttggaagtggaatattgagttcgacatctatt

SEQ ID NO: 948497 - DNA, 611 bp, Homo sapiens
tttgggttccactactcttttctgttgtttttctattctctatttcatttatttccagcctaatctttattgttttcttatttctttttgctttgtatttagattttttttmtagtttcttgaggtaatgtttaagatctttctacctttctaatatacacatttacagctataaatttccctctgaccatcaatttagctgcactttctaagttttgatatattatcagcttttttcatctaaaagtattttctatttcctttttccatttctcctttgacctattgattatttagaaatgtattgtttaatttccacatatttgtgaatttcccaaatttacttgtttttaatttctaattgcattttattgtggttatacaatacacttttgtgtcattttgatcattttaaatttattatggcttgtcttgtggcataacatatggtctacccaagacagctccatgtggtgtgggatgggatgttcaatagatgtctcttaaatcttgttggctgatagtgttgttcacataatttattttcttgtgattttctacctgttgttccagctattgttggaagtggaatattgagttcgacatctatt

SEQ ID NO: 948498 - DNA, 598 bp, Homo sapiens
tcctgagtagctgggattataggtgcctgccaccacacctggctaatttttgtatttgaatagagacggggttttgccatgttggccaggcttgtctcgaactcctgacctcaggtgatccacctccctcrgcctcccaaagtgctaggattacaggcatgagccaccatgcccggccaacacatgggtggttttacaggcagtggagatccaatgaaatgtttttcgagggaggaagatataatctatttgtatactttctgctgcccagcagagagtggattgggtggacaattggagccagcatcctcgtccaacttggacatgatggtagcttgggccagagaggacatgggtaggactcattacttcactccagtgaatatcctggggatggactcctgcttgtctggtggtggaatagtccataaggaattcaaaatgcaaataaatatatgcttacaaattggccgagtgctgtgaaacaagtgcatggggtgctgtcagagattctcagtgataggaggggcatccttgcatttgatgcccaaaaaagggccttctgaggaggcattacttcaactgagacttaaagggt

SEQ ID NO: 948499 - DNA, 643 bp, Homo sapiens
tgcatttcagtatggaacacgaggtagacttttaagatttttggctccagtctctggctccttgagggcacatctggacctacscagggtgtggggcaacttggttccctgaaaggaaggacacaagcatgggctggcttcaccatctactgattgtagcaacataggtccctcagcaaacataggcagtagcccaagtggtgttcacagcaggccttgggtgagacttagtgctatgctggctcaggtctgacacagtaaagtcccagtgttgatggccacaaagatgcttctgtatctctccccaagctccaggcagctcagcacagaaagagagactccatatgttttggagaaagtaaaataagagaacaagagtctctgactggtaatctagagaattcttccagatgttatccaaggtactgctatgaatctgcaagaaccacagcattactgggcttgaggtgccccataaggcatacatggcttagatcacaatactgaagtcctttttgaatacctggaaatccttctcaagaaggacaggtataaagaagcctagactatgaagactacaataaatacctaattcttcaatgcccagaaacagatgaacatccgcaagcatcaggaccatcca

SEQ ID NO: 948500 - DNA, 631 bp, Homo sapiens
aaataattatgatgcagaactcattgccaaaaggcaatactggagacatactagtaattaaagcattgtgyaatataatttattattttctcattattgcccacatggctctctcttattgcccacatacttccctcttatggcactagaatatttttacatgcctgtctctccatattatgatcacttttgaaaggaagaacagtatatttgaacactatgcttagtgcctagtacagtaactggtaaacaacaatacttactaaatatatattgaattaattgaattctgaaatgtgtgctgctgaagagtctcacaaaaggattatccttttaggggagaaagatttcttttctcatctgatatgagttgcatctgtgtccctgcccaaatctcatgttgaattgtagttcccagtgttgaaggtggggtctggtaggaggtgattggatcatgaggttagatttcttctttggtactgtccttgctatagagagttctcatgagatctggttgtttaaaagtgtgaggcacctcctccttctgtcttcctcctgctcctgccatttgaagtgctggcttcccctttgccttctgccacaattgtaagtctcctgaggcctccccaga

SEQ ID NO: 948501 - DNA, 761 bp, Homo sapiens
taatcaaacataccttactactgactagataatgacatgaataatgttattgtaaccagtatccccactattccaagagatagtttatttttctctctcttcttttctctttccttcatttccctacttcctacctgcctctttagaaatgtaactatagccttttacctcatcttccccagccatccctacagggcaagttcatctaatagtgtgcttagaagctccagaatggaattctcacccaccaggaagttgcctcaagagacaacagtcaatttacaacccaaagtatacctgctagagtttccagccacctttacaatctatttctgccaatgaagatgccaactcaactgcctggtagatgaggcactgaagactccccacctgctaacttctgcccctgcatcggcctacctttaaaagcacctgctttctgccccaaaaaggaagcagtacccttaaggcaggaggtctgtacttattcccctagttttagaactaagcaatgtacttattcttgatttagaataaaaagtcactttcttcacacttgacctcactcttgtaaattagatctgtaagtggtgaatgacagaacctgcattttggtttcaaatttgatggcctatatggggaaaacacagggtgctctggatgagccggcacttgacaggtgggttttgctaccaggcaagayctgtgggtgccaactgcttgtggttagtgtacccatgacagaaatgctagtgaacttc

SEQ ID NO: 948502 - DNA, 582 bp, Homo sapiens
cttcttttttttaaattattgattcaaggagcacatagtcttcttagttacatgggtattgtatgtgtaatggtgggggttggscttttagtgtacccatcacccaaatattgaacactgtatccaatagaagcattttcagtgcacacatccttcctactctcccctcttttggagggagtccccatagtttatactcttcatttttgtgtccctgggctaattccattaccaaatgatccctgggccacatccttggtttcctctcctgaacacaggtgttcactatttacatgaccaagctgagagttttctaaactttttgttctgcttccatttcagattataaatctatctttaaattgtttctttgctgctgaatcagtgcaagcagccaaaagtaaacgtgcagctccttctaaattttgcttagtaatttcctctgctagatatgttagtattcatctctctgaagttcatccttccacaaagcccttatggacatagttcagacaagttatttgccaatttataacaacataaagctggtctttactccagcttccaataccttggttcctc

SEQ ID NO: 948503 - DNA, 605 bp, Homo sapiens
ttcttttttttaaattattgattcaaggagcacatagtcttcttagttacatgggtattgtatgtgtaatggtgggggttggccttttagtgtacccatcacccaaatattgaacactgtatccaatagaarcattttcagtgcacacatccttcctactctcccctcttttggagggagtccccatagtttatactcttcatttttgtgtccctgggctaattccattaccaaatgatccctgggccacatccttggtttcctctcctgaacacaggtgttcactatttacatgaccaagctgagagttttctaaactttttgttctgcttccatttcagattataaatctatctttaaattgtttctttgctgctgaatcagtgcaagcagccaaaagtaaacgtgcagctccttctaaattttgcttagtaatttcctctgctagatatgttagtattcatctctctgaagttcatccttccacaaagcccttatggacatagttcagacaagttatttgccaatttataacaacataaagctggtctttactccagcttccaataccttggttcctcagttctatctgagacctggttaga

SEQ ID NO: 948504 - DNA, 650 bp, Homo sapiens
actgaaattgtcaaactgatctgaaaatttatagggaaatacaaaggacccagaatagccaaaatcatcttcaaaaagagcaaatttgamgagctcacactttctgatttcaaatcttactacaatgctacagtcatcaaaactgtatggtactggcatataaatagacacatggataaatggaatagaattgaaagtccagaaataaacaccaagtaatggtcaattgattttcttttttaaatttttgtaagtttttaattattctggatacgcaatagtgtacatatttatgaggtacatgtgatgttttgatgcaggcatacagtgtgtaatgatcaaattagggtaattggggtatccatcacctcaagcatttagcatttctttatgttaagaatattccaattctaccattttagttattttaaaatatataataaactgttgttaactggagtcaccctactgtgctactgcatactagaacttattcattctatcagcctgtattttgtacccattaaccctctcccgactacccttcttagcctctgacaaccatcgttctactctctgtctctgtaagttcatttttaagctcccacgtatgaatgagaacatgcaatatttgtctttctgtgcctggc

SEQ ID NO: 948505 - DNA, 461 bp, Homo sapiens
ccagctgccatttttactgaaattgtcaaactgatctgaaaatttatagggaaatacaaaggacccagaatagccaaaatcatcttcaaaaagagcaaatttgaagagctcacastttctgatttcaaatcttactacaatgctacagtcatcaaaactgtatggtactggcatataaatagacacatggataaatggaatagaattgaaagtccagaaataaacaccaagtaatggtcaattgattttcttttttaaatttttgtaagtttttaattattctggatacgcaatagtgtacatatttatgaggtacatgtgatgttttgatgcaggcatacagtgtgtaatgatcaaattagggtaattggggtatccatcacctcaagcatttagcatttctttatgttaagaatattccaattctaccattttagttattttaaaatatataataaact

SEQ ID NO: 948506 - DNA, 593 bp, Homo sapiens
ttttcctgttaagtggcattttgcatgaatgtgaactgaaattgaagtttgtgcaccttttgaatgttattgccatcatagtcacggggacacactttatttctgaaaacctgggatgagaattttgaggcaagtaattacaagcaatccttgttggtattaagaaataatcagattatttacaaggattacacatcttgaaaaataaaagaatgcttcaggagctagtgacatagaaagtattttcattttcttcaagttgcgcctaaaagcagtaacttttttttttttagccatgcttcaagtatactttctgttaaatatttgaaacctggtaccaataactttttgtttgcctttaagacaaaattgactcacttgatagagtcttctctctttcagagttggaaggtttaggtgaagaaatgtctgaagaaaatttcatttctcagcacatatttctgagcctgtttgggagtgacagtaatggcattayaaggtattgaagcggtgttcctggaagctagtagagaggtcagagcagtgtgaaaatttccagcaaatctgtcaagcatcctgcagctctggaacat

SEQ ID NO: 948507 - DNA, 421 bp, Homo sapiens
ttgttgtggtgtaataaaaatggccctttacctctgtatttttcttcccaataactcrtaaaaccagtcttatcatgtgaaaaatattagataaattcccatagaggggcatcctacagaacatttgaacagtatgccccaaattgagaaggtcatcaaaaacaaacagagtcagagaaactatcatgaccaggaggagcgtaaggagacatgaggactgaatgtcatgtggtatcctgagacagaaaagagaattctgtaaagactaagaaaatatgaataacgtgtgggctttagtataggataatgtatcagtattgattcattaattgtgacaaatatcccataataatctaagatattaacaataggggacactgaatatgggctatatggaaacactgtgtactctctgcttatt

SEQ ID NO: 948508 - DNA, 595 bp, Homo sapiens
tggagacagtctccctttgttgctcaggctggagtacagtggcacgattttggctcactgcaacctccgcctcctggattcaagcgattctcctgcttcagcctcctgagtagctgggattacaagcacccaccaccagacctggctatataaagtttttttgaggtttagattagtgaattaatgcaacacacttaaaatggtgcctggcatacaacagtagttattggtgtacgtgcctgcaccctgtcttgtcattcagatgttaactgcagtaacattttatcaccacgaagagtgttttaatcttactcctgtcctccaacagtcaaatgatcataaaactgcatactgatgatctttattcccttgggaaccaacattcagtcaatctattttattattctttttttgaacattatagaagtaatttgttaagtctaatttactgtctgaaaaattgattaatcataacatctcaytcctgaatgagcatgagagagaccagagggatttatggtaataactgcctctttagacaatatgggacagctacaggtttttaaaattcttccctcctttctttcccacggtc

SEQ ID NO: 948509 - DNA, 639 bp, Homo sapiens
ggctgggatgattataaaaacctcatcaacattatcatcttcaacaagaacaacagtcattatttatttaataggaaactatgagcgtcaattcattatcaaaattatcttcacaatggtcttgataggtaggtactattatcattcctagtttaaacagttactttctcaaggttacatatcttgtcaagggaaagccggcaatccaacttctttttgccgatctccaagcccaagcaattgccagtactttaaaccaccatttttcctaacagaagaactaactagatctagcggttttggttaccctacaacaatcatagccttgcttgaacttgatttcatgtctgtaaaatgataatgttgaattaaacattcttgtcacaatctttcagagcaattgtactatgatattgtgttatccatgcaggctgcaacaaaatagtggaaagaacaagatttgccatatggaaataaaaacactcaggagcttggtcctgatggggataatttttgcgttttatcatattagtgttgrtccatcacagagctctgacttcatctcaggataaactacaaggcccttaactttgttatcaaagctgtctacaaatggctctagcgtatgtcttcagatac

SEQ ID NO: 948510 - DNA, 636 bp, Homo sapiens
tagctccctggcaccttggcccagatcaaagagaaccgcacatctccacacgcagacaggagagcacgcatacctttcgtgcacaccaacacacatgagctcacatggccccagacacgtgcacagaatgggcccgggaggcctgtgtgctcaagcagacccgcagacccactgctgcacagggtacctggatttttcttatttcctcacctgagctcaccttttaacccacatcttttcttattatttcctgaaatgcgtttgctctcccattgtcagggatccaaggcaaagaaaacatccctctgtgacctgcccccccgacaaatcgaacctcatttttctgtgtccctgtgagtccttgtccataagcagaactcacttttctttttttccaaggcatggattgcagtttaccgtctgctttttgtacttgaccttattacatagccatgattttcttactttccagttgtaatgggagcacagttgtccatcttgcagctctgctgtgcttttttttttttttttttgrgacggagtcttactgtgtcacccaggctggagtgcagtggcacagtctcggctcactgcaacctcagcctcccgggttcaagcaattctcctgtctcagtc

SEQ ID NO: 948511 - DNA, 554 bp, Homo sapiens
aaaaataaataaataaaattctgcttggtctagtcttttggtaaagctctagcttgtacttatttacttattcattgaattcttccactccaggatacctgttttgttcttttttatggtatttatcttcttgttgaatttcttgttcaagtcatgaattgttttcctgatttcatcaaattgtctagctctattatcttgtatctcactgtaagattactattttgaattctttttctgtcattttgtatatttctctatcattggggtctattacacaggaattattgtattcctttggaggtgtcatgtttccttgctttttcatgttcgatgtatccctatgttgatgtctatgcatctggtggaataattgcctcttccaattttatgtggtaggttttgcagggaaagaaatatttgtatgaatggatcttggggtgttggttcagtgrgatgcattggctttggttccaggtgggcatagtagtgtagtttttgtgtagtttctttaactgtaatccatgccagtgacatttgtgagtgtctcagtg

SEQ ID NO: 948512 - DNA, 809 bp, Homo sapiens
gggaagaccctgctcagactcagcctgaaaactggccagggccactggctgcctacgaactggcattcgcttttcccggctcctccgtgctgaccagggccaacttcatcccaagatgggcttccctggaggctgcagggtcctgctggcagtcggggtccatggttcctccccaccaggccaactgacaaaagtcctgtgggacggagccagccgtgctggtggacagggttgctggcctccctgctcctgtgagcataaccgcggccaaggccttgggtgcacgaaaggcccatctccgttcccaggagcccagccagcctgggagagggttctagaatggtttgcctacctctttacacatgttcctttttcttcctgattccacccagctccattgcgactgcgtgagggcctgtcctgagccgcctggtcactctagctctgtctggagttaggctgcattaagtactctgcagcttctcttccttcgtggccacgctgtgctttttctatttcaatgaaatgttcaaagtcttgcctcacccagacggagtgaccagtgtggctcgaggggactgtcggctggtggcactcaccccgtagtgatgcctgagggaccacgtggggagctcccaggcagttcagggtgtcaccgggagtgggcaggagtgctgggggcagcgtartgttgggggccaggcagagaggtgctcagagctgctgctgaaggaccacacaagtgccctcttccttgtatgcttttgtgtccctgcagagccccccaaaattaaacgaggtcagttcag

SEQ ID NO: 948513 - DNA, 683 bp, Homo sapiens
aaacctcaagcaccactggatctgctgggtcttacagcccaagtggcagagcagcttgcacagcagtctggacctgttgcagagccttctcctgttttggaccccactcaaaattggcagctttttgagttactcaataaatgggccagaataacacacccaaatgaggaatgtgttgcctccaaaatccaaataggcccaccaggcattgggcctttttcttggttgtgggaggggctaaatgcaggaacttatccttcaccttaaaaggaacatctcgacaggccaccatacctttggacctctacaaattttactgaagtagaaggtccctgaattttagtcagatttatttcccatcctctgacatgcaaatatctccccagtaagtgcagtgtgtttgctactgcttgctcattggatccaattagcatgatgtcatcaatgtaatggaccagtgtgatattttgtgaaagcaaaagcaatcaaggtctctcaaataagattatgacacaaagctgggaagttgatataccccatcgtaggacagtaaaggttggccttgtcagttgaaggcaaattgcttctggtgggcctaatggacaggaatggagaaaaaggcatttgccaagtcaatggctscataccagataccaggagatgtgttagtttgctcaagcaat

SEQ ID NO: 948514 - DNA, 600 bp, Homo sapiens
agtgattgacatgatttccrtcatgatctcatttctactgatatttttctaggttatctttgttgtctcaaggtgggaaatatttctactttaaaacagagatatcaacaaaaacaaatacttatagatttagtgttattaaagatgagatattctactctaaactctaaggttgtctgccagtgtacagttgtgcttcctatttcttaatactctgaaatgagagagagagtagcagaaatatattaatacccaatgcacattgctgtctttagctctctcttctttttcctgtagtctcttctaactttcatatatatacacttacatggtttgattttaggaaacactgctcttgttaccctatacaactgtctatgtacagcagaattataaatgtccaattttctgattagtgagaaacttatttatctaggaaagtggaaaaactttagacaatataacacatttctttctgaatttttggaagaataatggacagtcataaactaattctagtaatgatttcactaatatattttcttaacccaactccatagttcataaactaatatatttttaccacattatgtttattgg

SEQ ID NO: 948515 - DNA, 607 bp, Homo sapiens
  misc_feature 605, 606, 607: n = A,T,C or G
aagtgagcacctgaccaaacagggaggaactttttaaaacaaaattatgggagaccattgttttggattcagctcatgcactacacctcaacagaccaaaccaaacaaaactggagtcactcatgctaaaagtaacataatgaaactgagactttaaggaaacacatagatcttagaccagaacagaccaggttttgtttctctcctgtaaacagggcattctagcataaggggaagttccctctactcagtgtttgttcctacctttacaaaactcattgttctactgattcccagtgggtttcactaccaaataagtacatctactatggtgatagtgacatcaatgactaaagttttggtaaatctctctcaaaaatggagaaaatgaccaaaaggggggaattggtaaagcaaactagaaggcctgagaaggactccatacttctttatttgagtcattgtggacaaactgcaacctaacttcataggtagacaaaattgaaaatctaactttggagtatgtgcctgtaacaatagctgagtcttctccaatcccagtggccgttcttccaccattcttacmctgctaagtgttcaaactnnn

SEQ ID NO: 948516 - DNA, 464 bp, Homo sapiens
gcccgcctcagcctcccagtgtgctgggattacaggtgtgagccactgcgcccrgcccatatctaaggagattttgtccagtatatgttgctaccaagatttggctttccatattattcttgcactttggttttctaaaccatagtatagaatttgcttgtgttactggtacgtcttactatattcagcccatcaagcagagcttgagatgtcagtgtgcatctttgttctttaatctgtgttttcagaattgctgcctccccttaagtgatccctacatcctgacactatttacacaataccatccttcatttcagagaaaaaaggggactgggttctctgcattgaaactggttcactgattttttttttaaggttgtgagaatttgtgtggtaaataattcagcaaattacacctcttgccctgtctagtctacaagatcagacagtgtggaatcctgcca

SEQ ID NO: 948517 - DNA, 464 bp, Homo sapiens
gcccgcctcagcctcccagtgtgctgggattacaggtgtgagccactgcgcccagcccatatctaaggagattttgtccagtatatgttgctaccaagatttggctttccatattattcttgcactttggttttctaaaccatagtatagaatttgcttgtgttactggtacgtcttactatattcagcccatcaagcagagcttgagatgtcagtgtgcatctttgttctttaatctgtgttttcagaattgctgcctccccttaagtgatccctacatcctgacactatttacacaataccatccttcatttcagagaaaaaaggggactgggttctctgcattgaaactggttcactgattttttttttaaggttgtgagaatttgtgtggtaaataattcagcaaattacayctcttgccctgtctagtctacaagatcagacagtgtggaatcctgcca

SEQ ID NO: 948518 - DNA, 592 bp, Homo sapiens
tgctatgctttagcaaagagactggtgggattttgcccctgacctagagatctgtggaactttgaacttcaragagatttaggatatctcatggaagaaatttctgaacagcaaagcattcaagacatgacagagcataaaagtttggaaaatttgcagcctgatgatgcaacagaaaagatttattgaatgccccactggatttcagacttgcatggattctataacccctttgttttggccaatttcccccatttagaacaggtgtatttacccaatgcctgtacctccattgcatcttgcaaggaactaagttgtttttgattttacaggctcatggtgaaagtaacttgccttgtctcagatgagagtttggactttggacttttgggttaatgctgaaatgagttaagactttgggggactcttgggaaagtatgattgtcttgaaaatgtaaaaatgatgtgagatttgtgaggagccaggggcagaatgatatggtttggctctgtgttctcatcaaatcttaaattgaattgtaatccacataatccccacatgttgagggaggaatctggtgggaggtgaatg

SEQ ID NO: 948519 - DNA, 608 bp, Homo sapiens
gcagtggttctgagcctttctgggacagagctttcaggggaagtgatgggtcaccatctttgctgtttcatagccttagctgttgttgccttcagggtctaaggagtctgaggtgactgaggactggagcagtcccccggcacagcacagcagctccacaaagaagtggccagactgctttttcacccaggtcttggatctcatttcttttcattgtgtggagtcacccgactgaggtctacaaccacccctgtcagtgtgtttaggtcagtaacaggtccatacctctctgggatggaattcccagtgggaggggcaggctgccatctttgctgtattgcagctttcactgttggtaccttcaggtgctggaaaatctggggtggctagggactgcagcagacccctagcacactgcagcagccctactcatacataggtccctgatcctgtatctcctcactgggcaggtcctcccaacctgggtcttcagctacccacygctgaggtcattgagtctatagcagctctgcaactcactgaggcagagttcccagaggaaggggaaggttgccgtctttgctatttcacacttctcgcctttgctg

SEQ ID NO: 948520 - DNA, 568 bp, Homo sapiens
cttcagataaacatatttcagcagtgactctcaagattcactcatctgctggattttggggtggtagtttgccctgtggcctcagttttctgagagatctaagaaaatttgtttatttttagcttgttcagctttttcttattgtaaggataagagtaataacttctaagatctttacatattggagctgaaaccaaatatttatcaaatcatacatgtgcagaacatgcaggtttgttacataggtatacgtgtgccatgatggtttactgcacccatcaacctgtcatctacattaggtatttctcctaatgctatccctcccctagcccccaaccccctgacacgccctggtgtgtgatgttcccctccctgtgtagtgaactcccattcataattgctacaaagagaataaaatacctagggatacaacttacaagggatgtgaaggacctcttcaaggagaaytacaaacaactgctcaaggaaataagagaggacataaacaagtggaagaatattccatcctcaggaataggaagaataaatatcatgaaaattgacatat

SEQ ID NO: 948521 - DNA, 639 bp, Homo sapiens
catggtaggcaaaaagtagaaacaactcaaatgtccatcaactgacatatggataagcaaaatgtggtatatctgtaggrtggaatacgatcagtaatgaaaggaatgaagtacatgatagagcatagatgaatcctgaaaacattatgccaagtgaaaggaggcagaaacaaaaggacacatattgtataattccattggcaggaaatgtctagaacacgcaaatccagagagacaaaaaatagattagtggctggcaggggatggaggaggggaagtaactgcaaatgggtatggggtttcttttgagggtaatgaaatgttctggaattagatattgttgatggttgcacaactttgtaaatacatgaaaaaccactgaattgtaaccttaaaagggtgagttttacagtatataaattatatctcaataaagctgttacaacaaagaggaagatcaagtgtgtcaaatgccgctgacagggcgaataatgaaatctgagaactgaccactgaatttggcaatgtgctgtttcattttgtagtagggattgattagagtgggttccaggcaaaaaaagaggaagtgaaaacacagagcttaaatagttctttttttttctttctccattttcaaag

SEQ ID NO: 948522 - DNA, 582 bp, Homo sapiens
gaccaggtggctttacttgtgaattttaccaaatacttaaagaattaacaacaatctttctcaaactctttcaaaaactacaaaaggagggaacacttcctcacacagtctataacacttcctcacacaatctttaagaccctgatactaacccagaaaagaatatattaaaaaaaaatcagagatcaatattttatatgaatatagatgcatagttcctgaacaaaataccagtaaactgactccaatagcatattcaaatgattataaccaatgaccaggtagaatctgtcctaggagtgcaagggttcaacatatgaaaatcaatcattgtaatgcaccataattatagaacagaggggaaaaaaagcacacatcatctcaattaactaagaatagtcatttgacaaaatccttcatattaaaaacagtcaccctccctccggcccctgcmggagaatacagaactgagaccccaaagagaataatctcaacatgataaactacatttatagaagcccacagctagcatcacactcagtggtgaaagtctacaagctttcccccatgatcaggaacaag

SEQ ID NO: 948523 - DNA, 469 bp, Homo sapiens
gaattagaaaaaaaaatcctaaaattcatatagaaccacaaaacagcccaaatagcaaaaaaagtccttagcaaaaagaaaaaaagctgaagatawcacattttctgacatattctactaaaaggctgttgtaatcaaaacatattggtactggtataaaaataggcacatacattaatggaccacaatagataacacagaaaaaaaccccacatatctatagccaactgatctttgatgaaataaacaagagcatacacttgggaaaggacaacctttcaataaatggtgccaggaaaattgggccaccagatgcagaaaaattaattcggacccctatctctcaccataaacaaaaatcaatgcaagatggattaaaaacttaaatataagacctaaaactacaaaaatcctaggataaaacctgggaacaactcttctggacacaggtttgtgcaaagaatgcatg

SEQ ID NO: 948524 - DNA, 590 bp, Homo sapiens
gatgtacaaatagtgtgccctgacttgcatgggactctcctttctattggttatataccattcctttttcttttttttttttaattktagtaaggacctttaacatgagatgtacccacttaaagaatttttaggtgtacaataccgtattgttaattgtagcctcagtattgtacagcacatcactagaacttattcatcttgcataattaaaactttctatccagtgaatagcaactacccctaccactttccacacagactctagcaacctttattctattctctgcttctttgaatttgactactctaggtatcctatataagtggaatcacagtatttgtgttactgcgtctgtcttatttcattgagaataacatccttaaggttcatccatattgtcacatgaggcagaattttcttctttctaaaggctgaataatattacattgtatgtttataccacatctatttatccattcatcggtcactgaacatttagtctatttccacattttgaccactgtgtataaagcttcattgaacgcaggagtgtaaagaagacataataatggccaataggtacatg

SEQ ID NO: 948525 - DNA, 601 bp, Homo sapiens
gggcaacatagcaagatcccattctccacaaaaagggagaaaaaataatgtaaagaggttctaagaccaaacrttttgagatccactattttatgaatatattttctaatgtataacttgttcatgttgaattcttttgaattcaactgtattcaactgaaaggggagaccttctctctctacaaaaaatttgatttttgcctttcttctctctctagcaaatgagcaggacacacagagcccttcataatagcgactgaattataagagagaggataaaaccagatgatgacagaatgaaacagacatgttaaataaactcctttgctgacatggaataatatctactcataagcaaatttaagtgctttcctttaatctatgctacaaagtcaactctgagatttaaacaagccgtaactatattcaatgctatatatacgctatatatactatatactaatgctactcaggcaagtagcctgtttttgcaaataaagttttattttacacacacacacacacacacacacacacacacacacacacacacacaaattgaagctagaggtaagctgaccatgaaatcaactgagcagcc

SEQ ID NO: 948526 - DNA, 588 bp, Homo sapiens
attattattatcctatccagtcaccactcatttatatttgtctacatatttctcccgtccattacttttaattcattcctgaaccttaaagctgccgttttaggayattttccgtcttcttaaggaatgatctttactgttttcttcagaacaagctgctgaagacaaatttcataattttgatttttctgtacatttttttttttttctgagatggagtctccctgtcccccaggctggagtgcagtggcgtgatctctgctcactgcaagctccgcctcctgggttcatgccattcttctgcctcagcctcctgagtagctgggactacaggtgtccaccaccacgcccggctaattttttgtgtgtgtgtgtgtgtatttttagtagacacggggtttcaccgtgttagccaggattgtctcgatctcctgacctcgtgatccacccgtctcggcctcctaaagtgctgggattacaggcgtaagccaccaaaaccggccaaatgtttttgtttaattatcattttagaagactattttattgaacatagaattctagttgatacatatcctttccttactttga

SEQ ID NO: 948527 - DNA, 438 bp, Homo sapiens
aatgacttttgacacaagatgatcggacatttgtgcggtggattttcaaaggtagtaaaatgaatgagattagtaatctaaacgtttctagcatgatgttttggagttagtrtatatcagttggggctcaatcacgttcaaaatcctcatatatgtgttttataggatgttttctaatgcaattttagcagctgtttttccagtctctggaaggctattgtcttctcatctgatgctggagctggaagagtaggcagttggtaagaaaagatggaaggtgttggagaccaagaacaagctagaaaccacacatacaagctgcagaccttaaggatgctccgaagccagtgttagtatttgttctcattgacctctgtggtataagcgtcctgaagaagctgggccctttatcatggaggtaaatatgcatagctgccc

SEQ ID NO: 948528 - DNA, 445 bp, Homo sapiens
taaaaagttgcctgatctcactgtgtttyggtctgatttgtttacatatgtgcagcagaaggtgctggttgacatactttgtaatacggtcagcaaatcaaaagtcacatagtgttaaataactaagaccaaaaaggtaatttctatttagagattttgaaagaaactggggattggatttttaatatgctttattgttctagggatttattagctcatagtagtagtattaatatttgctcttatattaaatgcatatgagaccaaaccccagaaattcattttcaacaaattttatctgcagtatcaataaacgtgtttgaaatccccctctaaaatctgctaagtaatttacctgatagaaaatgacttatcctctgacgtgtaaggctgggacactgttagttacagagctgtaccagaccatttgcctacgagggctttc

SEQ ID NO: 948529 - DNA, 445 bp, Homo sapiens
taaaaagttgcctgatctcactgtgttttggtctgatttgtttacatatgtgcagcagaaggtgctrgttgacatactttgtaatacggtcagcaaatcaaaagtcacatagtgttaaataactaagaccaaaaaggtaatttctatttagagattttgaaagaaactggggattggatttttaatatgctttattgttctagggatttattagctcatagtagtagtattaatatttgctcttatattaaatgcatatgagaccaaaccccagaaattcattttcaacaaattttatctgcagtatcaataaacgtgtttgaaatccccctctaaaatctgctaagtaatttacctgatagaaaatgacttatcctctgacgtgtaaggctgggacactgttagttacagagctgtaccagaccatttgcctacgagggctttc

SEQ ID NO: 948530 - DNA, 689 bp, Homo sapiens
  misc_feature 569: n = A,T,C or G
gggtccggagctggtaatctaggagacaggagggaggcgtcatgctgggtctgcaccctccctgctttcgggacccgacccgatggctccaccctgggggcagccacagaggacccctcagtacaaccccaccccacgggtagggcctcactcacctccattctgcgtgatataacgcacccagggcagggcctggtacccactcttctcaatgatcttcaggtagcgcacctggggcacaggtagcagggccctgagcaccgcagtcccgccctgttggtccccccttaatctttcctgctggggcagcctggggctggcaggggaggccatgacgacaggatgagcacaggcctcaggggggtgaaagggatttgtctggaccatgcaaatgtgtgggaggcagagccgcctctggaagtggtgagcagccaggatgtgcttgcagacacggcctcagcagcctgcttgggggcccgccagaagcccctgctctctggagcctctcctccctctgtgggcttttgagggggtgccagggaaaagaggtcccatggggcatgagtggnacgcagagcctcaaaygctagtttggggcagaatgagtgagctttgagctcaggggtcagggctgagcagaggcagcctggcctcaccctgtctgtggggaggcagaggcccacagcaca

SEQ ID NO: 948531 - DNA, 706 bp, Homo sapiens
tatacaaaatgaataatttctgaagatctgatgtacagcaatgtgactatagttaacattattgtattgtagacttgaaatttgctaaaagggcagatattaagtgttcttgccatatatacacagaaaaagaggcaactatgtgaggtgatatatatgttaatttgactgtggctaatattttatgacacatacatcaaatcaagttgtataccttaaatatacacaattttaactgtcaaatatacaataaaactagaaaaagaatagggcccctttataaccttttaagtggagactggagcacagaagatgcccttggatggggaaatcaccatcagtaaatacagttcatgctgagggtgatgggaagatacaggctgtggggtcaggccgcctgcctctgcctcttattggctgtaggaccttaggcacttatgttaaaagactgagctttattcactcacccataaaatggaaatattacaattacctacttaataagggtgctatgagagtgaaagggatgtacaaatgcttagcacagtgcctggtgcagaatccccacttaataaatgctggctattatcakaatcccgttaatacattttattaataacaaattataattgcaataacaacttctccagagctaagcccaaattcgaagatgagttagtgctccaagtggccccacttaaccatg

SEQ ID NO: 948532 - DNA, 706 bp, Homo sapiens
tatacaaaatgaataatttctgaagatctgatgtacagcaatgtgactatagttaacattattgtattgtagacttgaaatttgctaaaagggcagatattaagtgttcttgccatatatacacagaaaaagaggcaactatgtgaggtgatatatatgttaatttgactgtggctaatattttatgacacatacatcaaatcaagttgtataccttaaatatacacaattttaactgtcaaatatacaataaaactagaaaaagaatagggcccctttataaccttttaagtggagactggagcacagaagatgcccttggatggggaaatcaccatcagtaaatacagttcatgctgagggtgatgggaagatacaggctgtggggtcaggccgcctgcctctgcctcttattggctgtaggaccttaggcacttatgttaaaagactgagctttattcactcacccataaaatggaaatattacaattacctacttaataagggtgctatgagagtgaaagggatgtacaaatgcttagcacagtgcctggtgcagaatccccacttaataaatgctggctattatcataatcccgktaatacattttattaataacaaattataattgcaataacaacttctccagagctaagcccaaattcgaagatgagttagtgctccaagtggccccacttaaccatg

SEQ ID NO: 948533 - DNA, 706 bp, Homo sapiens
tatacaaaatgaataatttctgaagatctgatgtacagcaatgtgactatagttaacattattgtattgtagacttgaaatttgctaaaagggcagatattaagtgttcttgccatatatacacagaaaaagaggcaactatgtgaggtgatatatatgttaatttgactgtggctaatattttatgacacatacatcaaatcaagttgtataccttaaatatacacaattttaactgtcaaatatacaataaaactagaaaaagaatagggcccctttataaccttttaagtggagactggagcacagaagatgcccttggatggggaaatcaccatcagtaaatacagttcatgctgagggtgatgggaagatacaggctgtggggtcaggccgcctgcctctgcctcttattggctgtaggaccttaggcacttatgttaaaagactgagctttattcactcacccataaaatggaaatattacaattacctacttaataagggtgctatgagagtgaaagggatgtacaaatgcttagcacagtgcctggtgcagaatccccacttaataaatgctggctattatcataatcccgttaatacaktttattaataacaaattataattgcaataacaacttctccagagctaagcccaaattcgaagatgagttagtgctccaagtggccccacttaaccatg

SEQ ID NO: 948534 - DNA, 567 bp, Homo sapiens
cttgaatgttcttgtcttaagtttgaaatttttaaatttttaaatttttataatagagatgggatctcactatgttgaccaggctggtggtcttgaactccaggcctccagtgatcctccagccatgatctcaccttgacctcccaaaatgttgggattaaagacatgaggcactgttcctggcctgaatgttcttaacagctttatttataagccaaaaactggaacagcccaactgcccaccaactagtgaatggtatagtacatctatacaatgtaatactacttagcaattaaaaggaactcactcctattaaataccctctaaataaatctcaaaatcaatgtgataagtgaaagaagtcaaacaaaaggctaagtgcaatctgattttattcatataacattatagaaaagacaaaactatagagtcaaatggcagatcattggttgctagtgcccagtggtggtaggttgggattgatttcaaaatagcaggagtcarcttttggggatgatggaaatgttctctgtgctatccagtatggaagctcccaagccacatgt

SEQ ID NO: 948535 - DNA, 474 bp, Homo sapiens
agactgtcccagtagacctttggtgccaaactgaatcctrttgactaaggattcaagtcactcctctggactcaggcaccaggctagccttgatgtatacaaactgtcaaataaagagtataaaattattattttaagcaagatcagtggaattcaaaaaatacagaaaaacaattgaatgaaattagaaaaacagtacatgatgaaaatgagaaatttaaaagggtaattgaaattacttagcaaatcaaacaaaaattctggagctaaaatatataatgaagtggaaaaagcaatggagagcctcaaaagcataattgatcaagaataaagaatctgtaagctcaaagacattatttgaaaatctacagtcagaggaaaaagaatgaaaagaaataaagaaacttatggaatttatgaaacagcagaataagaaaaattgtttgaattatagaagtttgtgaagaagagaca

SEQ ID NO: 948536 - DNA, 621 bp, Homo sapiens
gaattatgccgagataggtaacagatgaggatgaaatttgggcttgactgaagtaatgggggctgtctgtgaagccctgtggcagtacagcccaggtaatttgctgagcctaatgggtgtcagggtcagtctaagtgaaagcaaagagaggcttggatgaagggtgcaaaggaatagtaaagaaagcatgtgtgagacccagaacaaaataatgggtagtagagtgaggtattgaggataggagagtatatgggtttggcaccacggggtggataggcaaaacaatttggttgataaggctaagattctgaactaactcgtaagccttgtccagttttaggacaggtaaaataggggaatggtaaggagagttcataggctttaaaaggccatgctgtagcaggcgagtgataacaggctttaatcattttaaagagtgctgtgggatgggatcttggcattgagcggggtaagggggattaggttttaatgagatagtaaggggtgcatgatcggtcgccaaggagggaggagaggtatcttatacttgtgggttaaggtggggggatwcaagaggagaatacaaaggaggctttggattgggaaaaagggtggcaatga

SEQ ID NO: 948537 - DNA, 676 bp, Homo sapiens
ctaaaaccataaaaactgtagaagaaaacttaagcagtaccattcgggacataggcaagggcaaagacttcatgactaaaacgccaaaagtaatggcaacaaaagccaaaattgacaaatgggatctaattaaactaaagagcttctggacagcaaaagaaactatcatcagagtgaacaggcaacctacagcgttgggattcactcaggttggtggcagaaatattaaagggaaatattagagaaagttatggggaatagtcacaaacctttttggaaggccgaaaggttacatagctgtaataattgaacaggctgaaagcgactgggtcttaccttacagcattaggtcatagggtaaatgctagggacaacagagtcttccccagttaaatctctttaccctacctccattaactaacttttgagccagatggccctctggcggggaggtcaaccaggaaaattgcccccaatagtatttactctagagcaccggtacctgagctttaatcattcctagaactactctcttaaccatgttaattatccacaagtgtgtttactcaaagtttctgttgttaattctatactaaataaaygcttggagtgcggagctgctcagggtggcggctgcattctttacatgactctcctcggagtctgtgagtggcct

SEQ ID NO: 948538 - DNA, 444 bp, Homo sapiens
aacatggcacatgtatacatatgtaactaasctgcacattgtgcacatgtaccctaaaacttaaagtataataataataataataaagaaatatttacattttttccatttgacataaatacagtaagagacaatgatctttaaaaaaaagaaagaaagaaaaatcagaccgaaagcgtatagagactgttggaattattaagacaataatagtctttacatttctctatgtaagtattcattaactttataatcagaagcactatttatgctattcacattaggagaaaaaagcaaatgaaaaataatatgatttctaaaaataaagctggaagattagaaaaaattcatcagttgtctctatttcataaatgaaactccaggcccaactatgcagagatacaaaaatatcttaaataatagcttcaagcatctatggtgtgt

SEQ ID NO: 948539 - DNA, 538 bp, Homo sapiens
gctaaaagggcacaaaatacagctcaggctgttgcttcaggtggtgtaactcccaagccttggcaacatccatgcagtgtttggcctctggttgcacagaagtcaagaattgagggttaggaacctctgcctagattttagaggacatatggaaatgcctggatgtccaggtagaagtttgctactggggtgcagccctcatggagaacctctggtaggggagtgcagaaggaaaatgtggggtagaagcatccacacagagctcccactgggacactgcctagtggagctgtgagaagaaggccatcgtcctccagaccccagaatggtaaatccaccagcagcttgaaccatgtgcctggaaaagctgcagaaactcagtgcaaagcctgtgaagacagcctgtagaggaatcgtaccctgcaaagctacaggggcagagttgaccaagactgygggagccaacctcttgcatcagcatgacctggacgtaagacatggattcaaagaagatcattttggagcttttaggtttaat

SEQ ID NO: 948540 - DNA, 538 bp, Homo sapiens
gctaaaagggcacaaaatacagctcaggctgttgcttcaggtggtgtaactcccaagccttggcaacatccatgcagtgtttggcctctggttgcacagaagtcaagaattgagggttaggaacctctgcctagattttagaggacatatggaaatgcctggatgtccaggtagaagtttgctactggggtgcagccctcatggagaacctctggtaggggagtgcagaaggaaaatgtggggtagaagcatccacacagagctcccactgggacactgcctagtggagctgtgagaagaaggccatcgtcctccagaccccagaatggtaaatccaccagcagcttgaaccatgtgcctggaaaagctgcagaaactcagtgcaaagcctgtgaagacagcctgtagaggaatcgtaccctgcaaagctacaggggcagagttgaccaagactgtgggagccaacctcttgcatcagcatgacctggacrtaagacatggattcaaagaagatcattttggagcttttaggtttaat

SEQ ID NO: 948541 - DNA, 584 bp, Homo sapiens
gcagtggctcatgcctgtaatcccagcactttgggaggccagcgtgggtggatcacttgaggccacgagtttgagaccagcctgggcaacatagaaagacgtcttctctataaaaataaaaattgaaataagtaaattaaataaaaaagaggggctgtcatgctgagctcctatgtggacggggggatctgggcagtgactgtcccgatgcctgagtggtcaagtgttgaatgtgaggagtgctccagagaaatatccaggctggtgacagcaagttgtcacacgtatccaagtggcagttctaccaatgtagaagacagggaagcagagagagaggttagaggcaggatgccaggaagccaggcagggaggggtagggagcagccacaaggaggtctcagtgatagggttaagctcggctgcctgtggtgggacatatgtcactggtgaccttgggacacaaagcctgcccaygctagggtagggtaggggaaggacagggaggcgaggcagaaacagcagcaggggaagactgggtggcattgggcatggcattgggcgtgctcagcctctgtgtgactgtg

SEQ ID NO: 948542 - DNA, 590 bp, Homo sapiens
gcagatgcctttggaattgacaagacagcaacttgcaggacagtagcagtcaaaatgttgaaaggtaaaagcaaaattatgtggtgatctatctttctgttttatctagtctttaaatatgttgcaaggcttgtatcagtagctttgtgcttatgtgggcctactagccacacatgcagtcagcctaaataatgcccttgtgcaaattggaaaaaggatcctcctttgtagctttatgccaggatgcatggtctggcaagcaaagttgggaatggctttcaccttcttgcctggttaccctcgtgcagggctcagcaacacagttgtacttagtggttctgggtacagggaaaaaggactgtggttatattaaaattgtttcttaatatattgtggaatcagataattatagaccatctagagacatggaaaggaagatagtgaaatacaaaaatagcatgttctccagaattggaatatgtaaaagatgttcatatgtaaaagataatttgcaaaacaagaatggttgtgttagaaaaaaatataatgggttatattttttaawttaaaagctttataaataattgtta

SEQ ID NO: 948543 - DNA, 586 bp, Homo sapiens
atttaatggtgaaaaattgaagagttttcctctaatatcaggaaggaacaagatattgatgcccactgtcactacttctgttaaatatatgagtgaaagtcttagataggagaattaggtaagaaaaagaaataaactgcatccaaataggaaaggaaaatgtgaaatgatctctctttgctgatgacctaattttataaatgaaagaccctataaacttcaccaaaaaaaaaactgttagaacagataaatttagtaaaattgcaggatataaaatcaacttataaaaatcagtagcatttttatgtactaatgacgtactatctaaaaaagaaattggggaggttgcaagatggctgaataggaacagctccaggctacagctcccagcatgagcaacacagaagatgggtgatttctgcatttccaactgaggtactgggttcatctcactggggcttgtcagacagwgggtacaggacagtgggtgcagcccacagaccatgagctgaagcagggtgagcattgcctattcaatatgggcaggcaggcctccttgagctgtggtgggttccatccagtttga

SEQ ID NO: 948544 - DNA, 589 bp, Homo sapiens
tgtagctaatttgctagttctaaaaaagcagtctcgtccccaggcaggaagggggtttgttttgcgaaaggkctgttattgtctttgtttgaaagctaaactgtaaactaaatttcttccaaagttagttgggcccacgcccaggaatgaacaaagacagcttggaggttagaagcaagatggagtcagttagatcagtcataattttctcatttataatttttgcaaaggcggtttcagtaacatccttggactgggacttgaaagacacactcggccgggtgcggtggctcatgcctgtaatcgcagcgctttgggaggccaaggtgggcagatcatgaggtcaagagttcgaggccagcctggccaacatggtgaaaccccgtctctactaagaatacaaaaattagccaggcgtggtgacatgtgcctgtagtctcagctactcgggaggctgaggcaggagaatcgcttgaacccgggggcagaggttgcagtgagtcgagatcatgccactgcactccaacctgggtgacagaacaagactccgtctggagaaaaaaaaaaaaaaaacagaaagacacactca

SEQ ID NO: 948545 - DNA, 629 bp, Homo sapiens
gccgaggtgggcagggattggattctacagactattgtatgctacattaagaatcttggccttttttctaaagcacatggagagtcatcaagaagtgtaggcatgggagtatcagactataatttgctacagctcagatgatggactggagtgaagcaaaattggatgtggggaatccagttaggaaattttggtgatcagagttgtggtgagatacagggagaaatgaatgaatataagaaataaataggaagtaaaatcaagtggatctggatatgggaaatgaaagagacaggggtgtaaagaatgactctcaatgtctgggatgtgcaactgtgagtatgatggtgtccatcagtaaggtagggaaaattggaggggcatcagggtttgaagtagaaatataatgagttcagttttgggctttagagaaatatgagtggacactttcaagtgtgcagtagaatacatggagctggacttccaagaaaaggtcagggctggagatacgcatttgagagtcatccaagtatagttagtaactgtagccactggcatggatggaattttcttgggagactgyagacatttaatctagcatgttgactgaatacagaggatagtttctg

SEQ ID NO: 948546 - DNA, 603 bp, Homo sapiens
attgaagagaatgatgtcacagaagcccagagaargagtggtggagccaggtaactgctgatggcatagaatgcatctaacagttcacatgaactctaaacttgttccttggatttaatgacttctgtgatgaagactcaacttcttagcatgacatataggaccttgctaaggaaacttttaaggttttatttttgtttttaaccttctaatatttttcactaaaaataaaataggaattataaaaaggtattaattttataaagcataataccttgctgtataaaacacaatattatttattccactaaaggtatcagaaaataagggagagaacatttcaaaatagaattggatgtcaggactttactcaggaacataatccatacgaatcccattttttctttgaaaaatcagagttattttaactcacagcactttttatagcacatctattataattatttatttgtaaatcaaatttctgtatatattggaatatgtataattatatatgtaatatatatgaaaataaaaaatattattcaaatgtattctgacagtttctctgaatcacatatctgtttccaattgtcagttttt

SEQ ID NO: 948547 - DNA, 603 bp, Homo sapiens
attgaagagaatgatgtcacagaagcccagagaaagagtggtggagccaggtaactgctgatggyatagaatgcatctaacagttcacatgaactctaaacttgttccttggatttaatgacttctgtgatgaagactcaacttcttagcatgacatataggaccttgctaaggaaacttttaaggttttatttttgtttttaaccttctaatatttttcactaaaaataaaataggaattataaaaaggtattaattttataaagcataataccttgctgtataaaacacaatattatttattccactaaaggtatcagaaaataagggagagaacatttcaaaatagaattggatgtcaggactttactcaggaacataatccatacgaatcccattttttctttgaaaaatcagagttattttaactcacagcactttttatagcacatctattataattatttatttgtaaatcaaatttctgtatatattggaatatgtataattatatatgtaatatatatgaaaataaaaaatattattcaaatgtattctgacagtttctctgaatcacatatctgtttccaattgtcagttttt

SEQ ID NO: 948548 - DNA, 603 bp, Homo sapiens
attgaagagaatgatgtcacagaagcccagagaaagagtggtggagccaggtaactgctgatggcrtagaatgcatctaacagttcacatgaactctaaacttgttccttggatttaatgacttctgtgatgaagactcaacttcttagcatgacatataggaccttgctaaggaaacttttaaggttttatttttgtttttaaccttctaatatttttcactaaaaataaaataggaattataaaaaggtattaattttataaagcataataccttgctgtataaaacacaatattatttattccactaaaggtatcagaaaataagggagagaacatttcaaaatagaattggatgtcaggactttactcaggaacataatccatacgaatcccattttttctttgaaaaatcagagttattttaactcacagcactttttatagcacatctattataattatttatttgtaaatcaaatttctgtatatattggaatatgtataattatatatgtaatatatatgaaaataaaaaatattattcaaatgtattctgacagtttctctgaatcacatatctgtttccaattgtcagttttt

SEQ ID NO: 948549 - DNA, 614 bp, Homo sapiens
aaaggagctggtaccacttcttgtgaaactrttccaaaaaactgaaaaggagggagtcaataaacagttattggtgggacatatcttaaaataataaaagctatttatgacaaactcacagccaatattatattgaatgggaaaaagctggaagcattccctttgaaaaccggtacaagacaaggatgccctctgtcaccactcctactcaacatagtcttggaagtactggccagggcaatcaggcaagagaagaaataaaggatattcaaataggaaaagaggaagtcaagttgtctctgctggcaggctacatgattttatgtttagaaaaccccattgtctcagcccaaaaacttgaactgataagcaacttcagcaaagtctccggatacaaaatcaatgtgcagaaatcagaagcattcctttacaccaccaataggcaagcagagagccaaatcaggaatgaactcccattcacatttactacaaagagagtaaaacacctaggaatacaggtaacaagggatgtgagggacctcttcaaggagaactacaaaccactgctcaaggaagtcagagaggaaacaaatatatggaaaaacattccatcc

SEQ ID NO: 948550 - DNA, 616 bp, Homo sapiens
catgaattaacctctttctttactgcaattcccctgtcttgataaattagctctgtctgggcagtgggcaaaatgaacccattgggcaattacattcccactcttaactggttaaagtgayttactgtgtctagattgtttgtacaaataatatggtttatgtttcagggtcctccagagaagcagaatcacggggtgggaggggtgtattttaaggaaatagctcatgtgattatagagctggcaagttcaaaacctacaggtaggccaccaggttggagacccaggcagagccaatgctgcagttcaagtccataggctgtctgctggccaaattccttcttgctcaaggaaggtcagtcttttttttcttttgagacagagtttcgctctgttgccctggctagacacgatctcggctcactgcaagcgggttcacgccattctcctgcctcagcctcccgagtagctgggactacgggtgcccgccaccaagtctggctaatttttttgtatttttagtagacgcagggtttcaccgtgtgagccaagatggtctcgatctcctgacctcgtgatccacccgcctcggcctcccaaagtgctgggattatag

SEQ ID NO: 948551 - DNA, 557 bp, Homo sapiens
tatatagagtcatactataatcacatattgtcaaaattgcaaagagaattttgaaagcaacaaaagaaaagtgactgaggtggagccaagatggccgaatacgaacagctccagtctgcagctcccagcatgagcaatgcagaagacgaatgatttctgcatttccaactgaggtactgggtgcatctcactggggactgtcggacagtgggtgcaggacagtgggtgcgggacactgggtgcagtgcaccgagcctgagccgaagcagggcgaggcattgcctcacccaggaagtgcaaggggtaggggaattccctttcctaggggtgacggacggcacctggaaaatcgggtcacccccaccctaatactgcgcttttccgacagtcttagcaaacggcacaccaggagattatatcctgcacatggcttggagggtcctacgccaatggagcctcactcattgctagcacagcaatctgagattgaactgcaaggcggcacaraggctgggggaggggcgcccgccattgctgaggcttgaggaggtaaacaa

SEQ ID NO: 948552 - DNA, 596 bp, Homo sapiens
gagagatcaattctgtaactcactcaggatcttgaacttctaaccactatgcttcactgactctcctgaataaagtcacattattatacctcaatactgttctttttctttcttccttttttatttatttatttwtttttttcttgagtcagagtttcactctgtcgccctggctagagtgcagtggcgcaattttggctgcaacctctgcctcctgggttcaggtgattctcctgcctcagcctcccaagtaactacgattacaggcatgagccactgtgcccagcctaatactgggttttcaaatcaagtttttaaccatgaggacttggaacatccaagtttcttcaaataatgaaatccaaacatgttgtaagagtagaccaaatctttccttaatatcagatattttgcagaagaggaaactaaggcccaggtgcttaaataatttcctcaaaggcaaatggccaataatggaaagagctggtacccaggttggtacaacttaaaaaggcattggtctttttaccttaccctgataccttccagaacacagaaccatcctttaagcaatacatacgttatgtaatacatga

SEQ ID NO: 948553 - DNA, 540 bp, Homo sapiens
tgtgatcactccaagcagcaaaaacttcagctatccgttgacaggtgatgctctttgcgccctgtaggacataatcttcatcacaagagaactgcacagttgatccaaggctaaagttaaataaaagagaaaaaatatgataagaaagatgcaacataataactaggcttcacttctgctggcaatatccaataggtcaaatatgtactatagtgacaaaaagtattttggaaaacaaaatgtgaaagtatgacttgtagaaatgtaaagctatcatcaaatttaatcatcttgttaatagatgtagaacgaaggtcaaataattcactaagtttaccatgctaagtagatggtaaatgtgaatcaaaatgtggctattctgacttgaattccagtacagtgcttgtgttcatatcatattacggtgtttttctggcatgtatttacatgtgtatgtttgcagatgtgtctctacatgtgtatgcatttacacatgcayttgtgtctataaacatgcatttaatgtatttagagatgcaa

SEQ ID NO: 948554 - DNA, 457 bp, Homo sapiens
gctgaggtgggagaattgctygagcccaggaggcagaggctgcagtgagcaaagaccatgccactgcactctagtctgggtaactgacagacacctcagggaggggaaggggaaggggaagaaggagaggaaggggaaggggaggttaagttcagtggttgcctggagttggggtggagattaaggattaactgggaagaggagcaaggagccccacccaactctcacttaatccccactgttggaggtggggcctcctgggaggtattgggatcatgggggcggatctctcatgaatggtttagcactatccctttggtgctgttcttgtgatagtgagtgagtttacacgacacatgatcatttacaagtatgtggcacctccccacctactgatatgcctcctcccccttgccttccaccatgattacaagcttgaggcctccctagaagctga

SEQ ID NO: 948555 - DNA, 566 bp, Homo sapiens
gaaatttatagaactaaatgcctacatcaaaaagctagaaagatctcaaactgacatcctaacatcacarcgaaaagaactagagaaccaagagcaaacaaaccccaaaactagcaaaagacaagaaataaccaagaccagagaggaactgaaggagatagagacatgaaaaacccttcaaaaaattagcaaatccaggagttggttttttgaaaaaaaataatgaaatagaccactaactagactaacaaagaagaaaagagagaagaaccaaatagacaataaaaaatgataaaggggatatcaccactgaccccacagaaatgcaaacaaccatcagagaatcctataaacacctctatgcgaatgaactggaaaatctagaagaaattgataaattcctggacacatatatcctcccaagactgaaccaggaagaaggcaaatccctgaatagaccaataacaagttctgaaattgaggcaataataaatagcctaccaaccaaaaacaaaaataaaaacaaacaaacaaaaacaaaaaacaaacaaagaactacccaggac

SEQ ID NO: 948556 - DNA, 748 bp, Homo sapiens
acctacccttttaacaaatatattttgcaaaatacaatgctgttacctatacacattatgttacgcagcagatttctagaacttgcttatcctgcataactgaaactttactcttattaaccacaactccacatctaccctttcccccagcccctggcaggcaaactcctttcccacagcccctggcaaatttcattctactctatgtttctgagtttgactcttttagacaactcgtataagtggaatcacacaatatttgtctttctataactagcttatttcacttagcatactttcctccaggttcatccatgttgctgcttgtgagagcatttacttccttattaaggctgaatagtattccattgtatgctcataccacattttctttattcatttgtccattgatggacagttaggttggttcagtatcttggctattatgaataatgctccaatgaacgttggagtggagcggaggtatctcctcaagatcctgattttaattcttttgtacatatactcagaagtgatattactgaatcatatggtagttgtatttttaatgttttgaggaagctccatattgtttttcatacaggctgtaccatcttasgttcccacccacattatataagggttctaatttctccgtatcctagctaacatttatcttttgttttagattagtcatcattatattaattatattatatatgcttttatatgtgaggtgatatctcat

SEQ ID NO: 948557 - DNA, 698 bp, Homo sapiens
tcagtatataacttaatatcacagcttgtctgcacagtgactgtaagaagcagtaaccatcytgctaggaagaagagcagcttatcctggcgttgcccgttgttaagggcaccccgactgaacatgtgtagactccagtctctacaccaaatcctagacctggagattaacctcaagagaaagatgtgaagtagagaacagggatctgggccaaatacctgagctcagttcttggctgcacacttattaactgtgggccttgcttgtcacttaatattcacatactccatgaaaagttccctttgccacaagaaggcactgtagactcatccttgtccagaaactcggtttgaactgtccctgcagtcatgtaggcactgggctgatgctggagagccccacaccctcagtccctcccctgttatctactcatacaatagttaaggcaagaaggttctgcctaaggctacacagcacagctacacacaatggtttagagagtacttgagcctacagctgggtacccaagccagcagaaataaccagccagagacaaaactaaagatgctagcagggatgaaagtaagtagagtaattaaacgcccccatgaggattctgtgataaggggaaaggtgaatggtagcatggtgggcaaaagctatccagtggctactttcaaattaggaaaacaaacaga

SEQ ID NO: 948558 - DNA, 701 bp, Homo sapiens
aaagctagtatttctgacccctggtacaatttttcaatagattctgtactcaaaagaggaagacagggcattattcttctgcacaacaccactaaagcagcagtatgtactrggaagccatccttctctgatctgagtcccaagcagagatatgtggggcagagctgatctgacctggagccccaagccgagcaacctcagccaatatgtggacatgtgagtgagacatgcatgtctgttactacatgatactgcattttggggtggatggttaggcagcattaatatagaatcactgactagtaagagagggataatagaaatccagaatgagattaaaaagggaacacatgagtagaaatattcataatagaaattatgagtgtattagtcaggttctccagagaaacaaacattagggggtatcttttatagatctatatctatatcatcaacagatttcttataaggaattcgctcatgcaattatggaggctcacaagtttcaagatttgcagtcaacaagtgggagaaccaggagacccaatggtatagttctagttcacaggttatcaggattgagacccaggaagagccaatgtttgagctggaggcagaaaataggaaaaatctgttttagtttgaaggccatcaggtagggggaattccctcctactcaagggagaatcagtctttttgtc

SEQ ID NO: 948559 - DNA, 660 bp, Homo sapiens
tgaaaaatacaatgaataatgtgaaaatgcaatagagagcatgtaaggaaaatggctgcgctccactcaggagtaggcctaggcagacatccagtgcagcatgatacagtaggtttggagtgcaggcgcacaatcccatgcactatgtaatcacatcgcagccctttaactcgtttgtgtgagctcatatctggctttgagcactatgtaatcacatgcagccctttaatataactcgtttgtgtgagctcatatctggctttcagctactgttgtctgtgaaaaatataactgcacttctgactctgtaggggagatgggggagaataaagccatgtcccaagtgcctatggtccctcaagtgttctttcagctacccaccacccatccaccagctccctttggaccccaacttaggttgaaacctgaaaattggcatagtcagcaggatcctgagttgagagagccctcagcccctgatgatcctgggtcagccatgtggccgcaacatgggttgtggtacccagtggcagccgtgctgctcagatgggccccagtggaaacatgggcagtggtagacagctccyccatgagcctagagaaggcactgaagcacctggaagcacagagcactaggaaggagcctgtctttgctggcaa

SEQ ID NO: 948560 - DNA, 626 bp, Homo sapiens
tgcctgtggtcccagtactttgggaggccaaagtaggagaactgctggaggcgaggagtttgagaccaacctgggcaacayagcgagttcccgtctctgcaaaaatagccagatgtggtggctcacgcctgtaatcccagcactttgggaggccgaggcgggtggatcacttgaggtcaggagttcgagaccagtgtggccaacatggcaaaaccctgtctctactaaaaatataaaaattagccaggcgtgctagtgcacgcctgtaatcccagctacttgggaggctgaggcaggagaattgcttgaacctgggaggcagaggttgcagtgagccgagatcgtgttattgcactccagcctgggggacagagtgatactccatcttaaaaaataaataaataaaaataaataaataaaaataaaaaataaaaaataaaacttagctgggtatggtggtgcatgcctatagtcccagctacttgggaggctgaggtgggaggatcacctaaggccaggatttcaaggctgcagtgagctaatgatcacatcactgcactccagcctgggcaacagtgcaagaccctgactcaaaaaaaaaaaaaaaaagaaaaagaaatcctaaa

SEQ ID NO: 948561 - DNA, 590 bp, Homo sapiens
ttggagtttgctagaggtccactccagaccctgtttgcctgggtacccgcagyggtggctgcagaacagcagattttcgtgaaccgcgaatgctgctgtctgatcattcctcgggaagttttgtctcagagaagtacccggccggccgtgtgaggtgtcagtctgcccctactcgggggtgcctcccagtcaggctgctcgggggtcaggggtcagggacccacttgaggaggcagtctgcccgttctcagatctccggctgcatgctgggagaaccactgctctcttcaaagctgtcagatagggacatttaagtctgcagaggttactgctgtctttttgtttgtctgtgccctgcccccagaggtggagcctacagaggcaggcaggcctccttgagctgtggtgggctccacccagttcgagcttccctgctgctttgtttacctaagcaagcctgggcaatggcaggcgcccctcccccagactcactgccgccttgcagtttgatctcagactgctgtgctagcaatcagcgagactccgtgggcgtaggaccctcccagccaggtgtgggatatagtctcctg

SEQ ID NO: 948562 - DNA, 561 bp, Homo sapiens
aaaaaaccattttggtaagtttctatttttctgagagttttatgaatacttaatttgtttgagtgctcatttactcctaagccaatttgggtattttagatttgyaatgccattgaatgtagaaaaatatcatgtatacctatcatacaaacatagatatatacatgtacacatacataaacatacagacagatgcaaccagatcttatggcattttattttaaaaattttagtcacggaataaataacagatggtgatgagaatacagagaaaagggaacacttatacactattggtgggaatgtaagttagtacattcagtacgaaaaacagtatggagtttactcataaaatgaaaactggaactaccgtatgatccagccaatcccactgctgggtctgtagccaaaagaaaggaaatcagtacatagaagagctaactgtactcccatgttcattgcagcattatttacagtagccaagaaatgacattaacctaagtttcatcaaaggatgactaaataaagacaatgcagtatatatacacaatgtagtactat

SEQ ID NO: 948563 - DNA, 643 bp, Homo sapiens
atcttagctttcaaaagagttcgagcattactacccaaccacaaaagaaccctgaactgggaatgaatgtatccatgacccatttgtgagtaagtcaggtgaatcgattttgtcygtactagaagaggatcaattgcttgagatcacaaatgatggtggccttaaaagtatgtttgagacagcttcaaatcccatgttctggattaaactcaaggtgggatatcctgagattgccacaaaagcactgaagagtctgcttccatttccaacatgctatctttgtgaagcaggattttctgcagtgacagcaaccaaaacaagattacggagtagactggacataagcaacacacttctggtgtcactgtctcccaccgttcccagatgggaccttctaattgcaggaaaacaaggtcagggctcccactgattccacattatggtgagttgtataattattttattatatattacaatgtaataataatagaagtaaagtgcgcaatacacgtaatgtgcttgaatcatcctgaaaccgtctgccacccggccctggtccatggaaaaatcctcttccgtgaaactggtccctggtgccaaaaaggttggggaccactggtttatccagggtcatccaggttgg

SEQ ID NO: 948564 - DNA, 619 bp, Homo sapiens
ttgtacaaagaagaacactaccaatcatattaaaatgattccaaaawattgaggaggagaattcctccctaactcattctatgaaaccattataaacctgataccaaaatctggcaaaaacaaaaaaacaacaacaaaagaaaactacaggccaatatctctgatgaccatagatacaaaaatcctcaacaaagtatgagcaaacccaaatccagtagaacatcaaaaagttaattgaccactatcaagtgagctctgttcctcgaatgcaaggatggttcatcataacaaattaataaatgtgattcaccacataaagagaaatatatacaaaaaacatatgattatctcaatagacacagaaaaagcacttgatgaaactcaacatccctttatgacaagagtcctcaaacactagacatcaaaggaacatacctcaaaataataaaagccatctatgacaaacccacagccaacatcatactgaataggcaaaaacactacccctaagaactgaaacaagacaaggatgtccactctgatcactcctattcaatacagcactggaagtcctagacagagcaattgggcaagaaaaagaaataaaaagcatccaaat

SEQ ID NO: 948565 - DNA, 600 bp, Homo sapiens
agccagtgatgagggaggaatgccaggagatattgtcacttaagaaattacctcggctgggcgcggtggctcacgcctataatcccagcactttgggaggctgaggcgggcggattacaaggtcaggagattgagaccatcctggctaacacggtgaaaccctgtctctactaaaaatacaaaacaaaattagccgggcgtggtggccggtgcctgtagtcccagctactcgggaggctgaggcaggagaatggcgtgaacccgggaggcggagcttgcagtgagccgagatcgcaccactgcacgccagcctgagcgacagagtgagactccgtctcaaaaaaagaaattaccttgttaaacccaacactgcccctcttttgtccattcacttctagttgccttcattcttgcctgatgtgctggacttgggttttatcaagttgcttggcacgtccttaaagaatttaaatctccacagtgcctcctggacaatgactgcagggtgaccccygtctctcctctacacgatgactcttcaaacagttgacgattgcagtttttctttccttccttctttcagtggcttctctggtgctg

SEQ ID NO: 948566 - DNA, 446 bp, Homo sapiens
tggctctcctcgaaagcattctggttccatttaaaagagtaaatatggccaggcgtggcagctcacgcctgtaatcccagcactttgggaagctgaggcgggcagatcatttcaggtcaggagctggagaccagcctggccaacacagcaaaaccccatctctactataaacacaaaagctagctgggcgtggtagcgcacgcctgtagtcccagctactctggaggttgagccaggagaatcacttgaacccagaagccagaggttacagtgacccatgatcgcgccaccgcactccagcctgggtgacagagagagactctgtctcataaaaaataaataaataaataaatagtaataaatattaccaacctctackgcttcaagggttctgagttcagaacatcttaacataagccaaaatgctaagttttactcctcacaga

SEQ ID NO: 948567 - DNA, 639 bp, Homo sapiens
ttgaactcaggctgaccccacctgccagccccacagcacctcctggggtgttgggcatctggggccaactgcctgggtcccagcagcmagcgcctggctcttgggctgtttgatcttggtcagtgtatctaatctctgtatctgaattcctgcatctgatcaactcaattaagttcttcctcgcatactgcatattttgagaacatgcctgggttcttccttcctttccttctctccccttattgaaaacgaactgctgtcttgtgactagtgtggccttggcagttttcacctggggcatttccaccgaggcagcttcctccacttcctcccacgcggaaagacagcacattagcagctaattcatgggacaaaaggaagaggcagtgcagatcagtgagcctgggagcagatgatgaatgccagggggtgtcttcgctgcaacaagcactcagccctgcagcgtgactcagagagtggcctcgggcaatccaccagcctgaaaccacaggacaggactggcaatctcagcacagagcactgatcctgtcatcatttaaagactcagaagcggtcacaagggggagtggatcagagccattctggacttctcacggccagctcagacgctcgcatatg

SEQ ID NO: 948568 - DNA, 589 bp, Homo sapiens
gggtcgggtatctgaaccccatgctcggaactgggagacgctggccttgggaccatcaccttctgaccacagaatctccctggggactggacagagggccccgcccctggccgatcccaggtcctgaaaaggcccttctggtctcccaagaggcggggtcagccctacgaagagctaaatccccgggaaggaggtgcaggcattccgcattccggattgaaagtggggagacaatggaaagaccggagcacctccgaggccttactgattaaatctttccttctgtggccagtgccacatctgcaaataataaagaaccatgatgtgacattcttgtcacggccggctgtagcctccagtcgtctctcttcctgtgacttgggttctgcggctgcaccacgcatgtcagctcctgggagctctgcatctgctcttgggaaggggtctcaaatgccctgtgcatttctcaccttcagctkctgctccacagccccagcctcattcccgactcaactgccaggccaggaagtgacacgctggtgccgcctctggcggagggctgggggaggctgggttctgttcatttgtc

SEQ ID NO: 948569 - DNA, 598 bp, Homo sapiens
gcgacagagcatgactccatctttaagaaaaaaaaaaaaaaaaagaggctgggtgyggtggctcatgcctgtaatcccagcactttgggagcctgaggcgggtggatcacaaggtcaggagatggagaccatcctggctaacacggtgaaaccccgtctctattaaaatacaaaaaaaaattagctgagcgtggtggcgggcgcctgtagtcccagctggtggcgggcgcctgtagtcccagctactcaggagactgaggcaggagaatggcgtgaatacgggaggcggagcttgcagtgagccaagatcgcgccactgcactccagtctgggcgacagagcaagactccgtctcaacaaaaaaaaaaaaaagaaagactagttggggtgggtgtcaccctttgcatggggataccaaaagattgccttctctgagaaaacaagaaaattaaccctcatgagggctacagcctggcttcagtcatcagtgtggctcaggagacctcaatttctgagctggattaaagagaatgtttatgctatgaacctgccagaagcaagtctctgtaaaaataacaataataataataacaataat

SEQ ID NO: 948570 - DNA, 614 bp, Homo sapiens
aagcaatattttaaaagataatggtggacatgaggcaggactagactgtagctccaacttggaagaacagagcagcgtgcggaggctygcatcatgaattttagatccagaatgactgcaggaataaaccaggaatctatagaccctctgaaagaagcagactgctcctgcaggacctggtagatgccccaaatactgggagtgcccaaactgcagaagcaggaaagggaaatcctctgcccccaaacacacactctcactggggaaactgaaggtctagtttgtgggagaagtttctgaccttacctggagcagagtcaatttagagagctgagcgaaatacaggggtagaggaggcagcgggaaaggccctgggagctcactgggtccccaagcaggccattcttgcctgtcaccacagggatcggggggcagtcagaggcaaaggaaaaggaagtctcaagctgaactttttaacaatttgaactgggcaagagcctcctggccagaactcaggggaaggcgcgaatctgacgtgtagcctccacaggatggggaggaactaaagcccttttcttttgcatctgggaggtggatagcctggggtaagttct

SEQ ID NO: 948571 - DNA, 511 bp, Homo sapiens
ctccaaaaaagacccactccttctgcttgaggagaggagagggaagagtggggaggactttgttttgcatctagaataccaattcagccacagtagcatagagcactggtcagagttgtgaggcttcttttccaggccctagatcccaggtgacatttctagagacaccctgggccagaaggaaacccgctgccttgaaggaaaagacccagtcctggcagcatttatcatctgctgactgaagagcccttgggccctgaataagaagaagtgatactcaggtactacgtcgagagccttgagtgagcctctgagacttgctggctttaggtgagactcagcacattccaagctgtggtggctatggggaaaaattcctttggcttgagaaaagcaggcgggaaagtraaggggactttgtcttgcaccttaggtaccagcatagccacagagcagtagagcaccaaatgggctcttggagtccctgattccaggacttaactcttagatg

SEQ ID NO: 948572 - DNA, 660 bp, Homo sapiens
ccacaaaagctgtggctatgggcccagggatctctgcactcttggggacccaggragccgccgcttcccttgcaggcttggaagtgcctgctcccactgtctggtttctccccactgttggctcccactccggttgcccaatccaatcttgaagcaaagttggggctgaacccgagtgctgttgcagcctggcagggtgtgcacaggcttggggcagtgctgacacagcagcacctgccatctcagacccctccggactttgggtgccgacaaacatgagagagaggccaagggggtactgaggacagcccagcactggcctgcaggcggcccttggcatgaacagcctgggcatcatgaacaatggcaggaggcagacaggctcctggatggaagggggtgggtccctggtgaagcgccaccttcaagcccattgggcctgaagcctgggggccaggctgcccatccctggggccagagtgggaacttgtggtgctttgacctgggcccgcccatggccacccatagaccaatcagcccacacttcctccccctgaggcccatacccccacctcattcagctagacttgaggtgaggatggagagacacgggacaaccagcttccaagaggggctaccctctctgctgagagctgaaca

SEQ ID NO: 948573 - DNA, 630 bp, Homo sapiens
aggcagacaggctcctggatggaagggggtgggtccctggtgaagcgccaccttcaagcccattgggcctgaagcctgggggccaggctgcccatccctggggccagagtgggaacttgtggtgctttgaccygggcccgcccatggccacccatagaccaatcagcccacacttcctccccctgaggcccatacccccacctcattcagctagacttgaggtgaggatggagagacacgggacaaccagcttccaagaggggctaccctctctgctgagagctgaacactcattggtataacctgcctgtagagaagaggtaccctctctactgagagctgagcactcacagggaaaatctgcctagcagagaggagctaccctctctgctgagagctgaacactcatcagggcaccctggctatggagaggagctacccactgtgggtctcctctgagctgttccatcactcaataaagctcctctttgtcttgcttatcctccacttgtctgcatacctcattcttcctggatgcaggacaagaactcaggacccgctgaatggcagggctaaaaagagctgtaacacaagcagggctgaaacatgtcccttgttcgccacattgag

SEQ ID NO: 948574 - DNA, 581 bp, Homo sapiens
cttcctcccttttttcaggcctttctattctctgagacttaagattattgagattaggccaattaataaccctccagtggcctctaaactttcaagtgaaaggaagaattgcatgtctctcactttaaataaaaaactagaaatagtcaagcttagtgaggaaggcatgttgaaaagctgagataggcccaaagctaagcctcttgcactagttagacaagttgtgaatgcaagaaaaagttcttgcaggaaattaaatatagtactccatcaagcacacaaatgataagaaagtaaaacaacctttttgctgatatggagaaagtttgagtggtctggatagaagatcaacccagccacaacattcccttaggccaaaatgtaatctagggcaaggccctaacacatttcaactccatgaaggcggaaagaggtgaggaagctgcagaataaaagtttgaagctagtagaggttggttcataaaagaagctctctccataacatayaagtgcaaggcgaagtagcaagtgattgtgtagaagccgcaacaagttatccagatctaggtaagataattgat

SEQ ID NO: 948575 - DNA, 726 bp, Homo sapiens
cggagggggtcccctctgaaggaagttcgcagtcctctgagcttccccatgctcagcgcctcctctgccccaggcctgcctggctccatggggagggatctgaagggccccttgcacycgcaccaggagcccctctgggaaggcccagcttctgctggggcatttcagtggtgcaaacctctgcctctggagacatccagaagccactttttgacagctttgaaggagcagaagtgattccctgccctatacgggggagcatcagcctccttgaatcctccagactcgagtcccaggcctgggttctaaggcctcatagaaaaagtcttgaagaacacagctaacatggctgcagctacctcaggaccaggttacccagcagaccccttcccaagtggcttgcccctccccactctggccctgcagcctcaggggcctcccattcttctgcccaacttccccctcacctccacccaggacttctcactgccctgaaacctaatgcttggcgtctccttcactctggcccagacaaatcatctgctgtagccccagatcacagagctcctgagtgtcagcctgggtgacagcagaggcccctgtctttagcataagcatcagatccctcaacttgtctcactctgtcactatgttgaatttaccggagacatggagcacccctgtggctctacctgtagataggaccctttctttccccactcaaac

SEQ ID NO: 948576 - DNA, 483 bp, Homo sapiens
aatttttgtgtatggtgagagataaagtccagtttcatccttcagcatatgactatgtaatttttctagcactatttatttaatagagtgtcctttccccattgtctggagtcaacctaagtgtccatcaacagatgattaggtaaagaaaatgtgtatatacacgcaggcacacacacacacacacacacacacaccaaggaatactatgcagccatacaaatagtattgtgtcttttgcagaaacaaggatggagttggtggccattattctcagtgaaattattcagaaactaaaaatcaagtattgtatgttctcacttacaagtggacctaaataacgggtatacaagaaaatacagaggaaaataatagatactggggcttccaatagagggccaggtaggaaggggtgagarttgaaaaattacatagtaagtacaatagtcactattcagatgataggtaaatgcaaagcctaaa

SEQ ID NO: 948577 - DNA, 613 bp, Homo sapiens
aatttattttattttattttattttattatttttttttgagatgaagtctcactgtgttgctcagcctggagtgcagtggcacaatcttggctcactgcaacctctgcctcccaggttcaagcgattctcctgcctcagcctcctgagtagctgggattacaggcaggcgccaccacgcctggctgatttttgtatttttagtagagatggggtttctccatgttggtcaggctggtctcgaactcctgacctcatgacccgccccattggcctcccaaagtgctgggattacaggcatgagccaccgtgcccagccctgaatttttaaaaagatttgaaattgcacattaaaggaggatactctgtaccagacaatatcaaaccagaatgatcatgaccaaaatatattggaataaaatttctgagctctaaagaaaaagaagatattttgggggatcacggcaaaaagaccaggtgacttaaaagggaaataaaatattggacaataattcattawgccagaaaaatgacatgaaagcattttaaggaaaatcaagtaaagaaaatattactcaaagattttatatccagtaaaactaaatttcaagtaga

SEQ ID NO: 948578 - DNA, 467 bp, Homo sapiens
tatcatctcagaccagtcagaatggctattattaaaaagtcaagacataacagatactggggaggctgcagagaaaagggaatgtaaattagttcagacactgtggaaagcagtttagagatttctccaagaactgaaaacagaactgccatttgacccagcaatcccattgctcattataaatctgtattagtcaggcttctgtagagggacagaactaataggatagatatatatacatataaaggggagtttattaaggagtactgattcacacaatcacaaggtcccacaataggccgcctgcaagctgaggagcaaggaagccagtccaagtcccaaagctgaagaacttggagtccgatgttggagggcagkaagcatccagcacaggagaaagatgtagtcttggagactaggccagtctagccttttcacgttcttctgtctgcttttattctggccac

SEQ ID NO: 948579 - DNA, 605 bp, Homo sapiens
tgtcctaatactccatggcactacagacctcctacttggtktccaaggtatacaatgattaccatcaatggcccatatcaggtagaacagaaaccaattccttgaacattctccaggaaaatccagaatgttaaacacaagtttcattcttttcattccttcctgatggaggatccagaaattaggaagttttctacttcatcttgcctcactatatcaaatacaagaatgtagagcaaagatgagaaaagtgctatcaaattcctactctcctcaaattccttcttggctatttgttcaactgagtgttctatcttcttaaaatatttaattggattttggcaaagaccaaactccaactaaaactgtttcatgtgtattctcttatgatatgagaatcccttgtcttatgataataaaattataataaaaatcacatgcaaagtaataataattgtgatggttgatactgagtgtcaacttaattggattgaagggtgaaaactatggattctgggtgtgtctgtgagggtgttgccaaaggagattaacatttgagtcagtgggttgggcaaggcagacccacccttaatctgggtaggcac

SEQ ID NO: 948580 - DNA, 677 bp, Homo sapiens
ttatagcttgggttctgaactgagctactttgatatgaatctaaaaagacatgccatattaaaatatgcctttagtctacggccaattaaagaaattagtgttaaaagaagaaatctgggtgattctgagatttagtttataatctgggaggagtgcaaatattattaatattataaattagtagtatgaaccataataataaaaataataaagcttctcatgtaaactccccaaatataataattatgttttataggtatctgactcagggcagaaaatagatcagctttataatattgactgtctaatgactacaacttcctttgttttaataaaaaattaagatggccaaataacaatgaaattgtgacattcaaatatacttttcaattataagcactgaggcaccccaaactctgtgggcacaactttttttgttttactccaactttaacaatatttttttttaatcactcaaataaagaattaaattaaccaagtcaagatggattaaagacttaaacataagacctaaaaccataaaaaccctagamgaaaacctaggcaataccattcaggacataggcatgggcaaagacttcatgactaaaacaacaaaagcaatggcaacaaaagccaacattgacaaatgggatctaatcaaactaaaaagctt

SEQ ID NO: 948581 - DNA, 617 bp, Homo sapiens
ctgaagaaagcagaaacaaagaatttaaagtggattggctattttaaagctggttaaagttgcaaaagacaggaatagggaaacagaataataaataactggttggttaacatcaggttactcttttgtaaggatgccaattgaaactggcctgtttggaaaattagatttttaggttattaggttattatctctctctcctgatttttccaaaggccagataagaatgtagtttctgtttggtgacttgaaactttatcgtgggtgattccattttgaattttagtctgttctgtttgggcctagtgcaggagcttagtgcaaaacaatagcctcctaaaatttaaaagactttaaagaacatacatgagtttttcatcagataatatttatttgtattcattaatttatttgattggttaagtcttggctcccgagaatctttgctcagaggaatttttcaatccttggctattattctccttatagttattgtatttacctccccggtgtattgaattatcctatgggttttaaatgctttcctgcasccacctggacgtcaaatgattgccatcagaaagagacaacctgaagaaaccaacaatgactatgaa

SEQ ID NO: 948582 - DNA, 513 bp, Homo sapiens
agggaaatttctcatggagccactgtataaggtttgcattaactctgcatcatttattcaacttattcacctctttattattattattattattatttttgagacagagtctcactttgtcgcccaggctggagtgcagcggcacgatctcagctcattgcaagctccgcttcctgggttcatgccattctcctgcctcagcttcccaggtagctgggactacgggctcccgccaccccgcccggctaattttttttgtatttttagtagagacggggtttcactgtgttagccaggatggtctcgatatcctgagcttgtgatccgcctgcctcggcctcccaaagtgctgggattacaggcgtgagccactgcgcccggccttttttttttttttttttttttagacggagtctcgctctgttgcccaggctggagttcagtgrcacaatctcggctcaaggcaagctccgcctcccgggttcacgccattctcctgcctcagcctcccta

SEQ ID NO: 948583 - DNA, 630 bp, Homo sapiens
ctctctttctttctctctctcwctctttcctatcaaaaactcatgctgatatgagttggctgtgtccccacccaaatctcatcttgaattcccacatgttgtgggaaggacccagtgggaggtaatcaaatcatggggcaaatccttcccgtgctgttctcatgatagtgaataagtctcacaagatctgatggttttaaaaagaggagttcccctgcacaagctctctctcactttgcctgctgccatccatgtaagacctgacgttctcctccttgccttccaccatgattgtgaggcttccccagcagtgtggaactgtaagtccagttaaacctctttttttgtaaattgcccagtttcgtgtatgtcttcatcagcagtgtgaaataaactaatacacatgcttagcactttttctttttttgtttgtttttttgagacagagtcttgctctgtcatccaggctggagtgcagtggcatgatcatggttcactgcagtctcagactcctatgctcaagcaaacctcctgcctcaacctctagagtagctgggactacaagtatgcatcacaatgcccaactaatttacatttttttttgagacaggtcttattatgctgcctagg

SEQ ID NO: 948584 - DNA, 603 bp, Homo sapiens
ggctgactgtgctggtctttggaccctctcacgtgcctggggccttggctataacagcttgtctctattccacatggtttttccttctccagatggtgggcacaggcttttctccatggaagttgcagggttccaagagagagaggaggaggatacaaagtctcttgagaagcaagcttagaacgcacacaatgtcacttatattctactggctaaagcaaatcacaaaggcatccaaattcaagacattgaaaaatagattacacctcttgaagggaggtactgcaaagattgctattttgcaatatgctatatgtatacataatcaagaaagaagacatacatagctttcctttttccattacattttacccttcaattgaccactgtgacatggatttttacttgattccataggtacccactttttgagcagtgatccaaaatgatttttgagtccctagaagcattgatttggtctagtgtacggtcacctatcaaatgcaggcaggcatgtctcargaagatctagaaaacttttacagtattcagttgtggcagtgttgaagagtactttctcaaaaggacccagtcttccttttg

SEQ ID NO: 948585 - DNA, 595 bp, Homo sapiens
ggggtggcatcacatatcggtaggactgtgatgcccacctgagccacaaaaccagcaggtttttattaaggacttcaaaaggggaggggktgtatgaacagggagtaggtcacaaagatcacgtgcttcaaagggcaaaaaggagaacaaagatcacatgcttttgaggaaacaggaccagggcaaaatcagaaactcctgataagggtctatcttcagcagtacacgtattgtcttgataaacaacagaaaacagggttcgagagcagagaactggtctgacctcaaattcaccagggtggggtttttccccaccctagtaagtctgagggtactgcaggagaccagggcatatttcagtccttatctcaaccgcataagacagacactcccagagtggctgtttatagacctccccccaggaatgcaattattttcctagggtcttaatattaatattccttgctaggaaaagaatttagcaatatctctcctattcgcacgtccatttataggctctttgcaagaagaaaatatggctgtattctgcccaaccctgcaggcagtcagaccttatggttgtcttcccttgttc

SEQ ID NO: 948586 - DNA, 712 bp, Homo sapiens
aatcttgacatcttttctgcttttaatgccccactccacccctaggctcactcacaaacacagcaagttttagctcagtggggttggaaatatcttgggttcagtgaaattgctgtgaagtcgaggggtcataggaaagtagcaaggtccccttgtacttggagtaaaatccattactccagagtgtcctcctagatgaactagcccctgctcacctcatgacctcactctttgtgatatggacacatttaccgtcttccagttccccaaacaggctgatcccttactcccctcagggacttttcttactggtcgtgtcccgtggatgtctgtctttgcatggcctgtgtattagtttgctagagctgccttaatgaattaccacaaactgggggcttaaacaaaagaaatttatcgtctgaatttgggaggctggacgtccaagatcaaggtgctggcagggttggttctttctgagagctgaaggagaatctgcttcaggcctctcccctagctgctgggtgtttgctggccatgtttggtgttccttggcatatagaagcatcaccccaatctttgccttcatcttgacatctttgcctgtgttatccctgtgtgcacatgggtggctgtgtccaaatttccctgttttataaagacacccatyatattgaattaggggcccactctactccagtatgactccatctta

SEQ ID NO: 948587 - DNA, 600 bp, Homo sapiens
gcctgatggtgtcagtgatgtgagatgtgrcatatagtggacagcagactcttcaccaaacactatcttttggagtagttttggctgtggttatatctgtttaggctctgagcctggttctccaggtttcccagtgtttctgtgaactgctctgtagcttaaattattcagaatctatttccgttgcttgcaactgagaactagcaaatacagcatttcagaaagctgtcctcagttctctttccctataccacctagaatcacaccaatctctatattttctaaacttgtattgcattattaaagaatccatgcaagttagtgcattatcatttactatctcatactttttcattttcatatgtttatttatagtccctcttatatctataaatgatgtctctccaacaataccacgaatcatgaaagaaattaaaatgtcatatcgggcggggtgcggtggctcacacctgtaataccagcattttgggaggccaaagcgggcagatcatttgaggtcaggagttcgagaccagcctggacaacatggtgaaaccctgtctctactaaaaatacaaaaaatgagctgggcctagtggc

SEQ ID NO: 948588 - DNA, 754 bp, Homo sapiens
agcccctttctgcagccaaggtgttccgatgagtgttcagccctcagcagagaggacgaggcactggtgttggtggctcctctctgctcctggttgtcccctcatctctgcagttcttagcagagaggccctggagtgagttgctcctctctgcaggcaggtcatccctggagtgggaagctcctctctgctgctggtcacctgggtgtctgctctgctctgctgagtccagggtgtttatgggcttgagtggggaagtgcatactgactggtccatgggcagccatgtaggggcccaggaaaaagcactatgagttccccctcctgtaggcaggactggtagcctggcccccaggtcacaggacttccttagcttgaaggtggggcttcaccgggactgccctcttctgcccaggagccattgcctcctgccaccaacatccatggcactcaggttacttgtgccaacgggcatctgcaggccagcactgagctgccctcagcaccccctcagcttccctcctgtgctcattggtgcccaaagtctggagggggacgaggcagcagggggctggcatgtcagtgcgtcctgagtgtgcacccacccggcagggctgccacagcatccaggctcagccccacccttgctccrtgatcggagctggtgctggaagcggggagagggcaggcagcagcagcaggcacttctgagcctgcagggaggaggggggccttccaggcccccaagagcaca

SEQ ID NO: 948589 - DNA, 605 bp, Homo sapiens
taaattggcatgtgagtgtgtgtgtctgtctgtgtaagtggatggatggatgctcagatggatatgttagtgtatgtgcgcatgggtgtgtktgtgtctgtctgtctgtctaagtggatggatggatgcccagatggatatgttagcgtgtgtgtgtgtgtgtgtgtgtgtgtgtgtgtgtgtgtctgtccatctctctttctaagtcaatggatggacatgcgagtgtgtgtgtatgtgtgtatctggatgaatgcatacagagatgggtgtatatgaatatgtgtgtgagtctacatgattagatgaataaatgaatggatggacacgtgagtgcatgtgtgtgtgtgtgtgtgtgtctgtctgtctaggtgaaaggatggatggatggatagatggatggatggatgaaaggacatgtgcatttgtatgtgtgtttgtggaggtgtgtgtgtctgttagtgtaggtgtacagatagatggatgaatatatgagtgggtgtatgggtgtgtgtggatggatagacagtcaaatacacacatatatgtacatatacacacaagcctttaactttattaaagatccaccatatgctggacccacc

SEQ ID NO: 948590 - DNA, 614 bp, Homo sapiens
ggctagagtgcagtggcgcaatctaggctcactgcaatctccgcctcccaggttcaagcaattctcctgcctcagcctcccaagtaactgggattacaggcacctgccaccacacctggctamgttttgtattttcagtagagatggggtttcaccacgttggctaggctggtctcaaactcctgacctcaggtgatccacctgccttggtcttccaaagtgctgggattacaagtgtgagcaaccatgcccggcacaggcacattacatttattgtgcactttatttctattattattacattgtaatatataataattatacacctcaccataatgtagaatcagtgggaaccctgagcttgtttttctgcaactagaggtcccatctgggaatgatgggagacagtgacagatgcacacactgcagggggattgcattagatcatcagacatcagattctcataaggagcgtgcagcctagacccttcacatgttcagttcacattaagattggtgctcctatgagaatctaataccaccattgatctgacagcaggcaaagctcaggcagtaatgcaagtgatggggaatagctgtaaattcagatcaag

SEQ ID NO: 948591 - DNA, 574 bp, Homo sapiens
aaaaggccttcacatatttttttttttctcctaggaccttgtctctctytttttcttttttagttaaagatttttttttctcagttgactgagttctgttttttgttttgttttgttttgttttatttacttctgctgcctctcctttctcttgcaccctctgctgcttgagggacctaaactattatagtttataatagcctggctttccttcaagaaagcagagaaggcaccagactcctttttggggagaaacctgtttttccttatgaaaccccaagagtgtaagcagataagttcatctcagctcttaaattgcctgcttttgtattgtgttacctgacttattgactaaaagggttgttgcaccaaagcctactctggtttttaaggaagagtgtagtttacacattagaagtgtcttcgtttaaaaaaaaattttaagtgcactgaaaaagcatcacatggtctagcctcataataattctcccttttgggagattcaggattcagtgtgggctctgcccagagctcagagatctagtcaaaagacaggtatttcctacataaataa

SEQ ID NO: 948592 - DNA, 574 bp, Homo sapiens
aaaaggccttcacatatttttttttttctcctaggaccttgtctctctctttttyttttttagttaaagatttttttttctcagttgactgagttctgttttttgttttgttttgttttgttttatttacttctgctgcctctcctttctcttgcaccctctgctgcttgagggacctaaactattatagtttataatagcctggctttccttcaagaaagcagagaaggcaccagactcctttttggggagaaacctgtttttccttatgaaaccccaagagtgtaagcagataagttcatctcagctcttaaattgcctgcttttgtattgtgttacctgacttattgactaaaagggttgttgcaccaaagcctactctggtttttaaggaagagtgtagtttacacattagaagtgtcttcgtttaaaaaaaaattttaagtgcactgaaaaagcatcacatggtctagcctcataataattctcccttttgggagattcaggattcagtgtgggctctgcccagagctcagagatctagtcaaaagacaggtatttcctacataaataa

SEQ ID NO: 948593 - DNA, 566 bp, Homo sapiens
ttatttatgtaggaaatacctgtcttttgactagatctctgagctctgggcagagcccacactgaatcctgaatctcccaaaagggagaattattatgaggctagaccatgtgatgcttttwcagtgcacttaaaatttttttttaaacgaagacacttctaatgtgtaaactacactcttccttaaaaaccagaggaggctttggtgcaacaactcttttagtcaataagtcaggtaacacaatacaaaagcaggcaatttaagagctgagatgaacttatctgcttacactcttggggtttcataaggaaaaacaggtttctccccaaaaaggagtctggtgccttctctgctttcttgaaggaaagccaggctattataaactataatagtttaggtccctcaagcagcagagggtgcaagagaaaggagaggcagcagaagtaaataaaacaaaacaaaacaaaacaaaaaacagaactcagtcaactgagaaaaaaaaatctttaactaaaaaaaaaaaaaagagagacaaggtcctaggagaaaaaaaaaaatatgtgaa

SEQ ID NO: 948594 - DNA, 540 bp, Homo sapiens
accagaagtaaaaagaggagctggtaccattccttctgaaagtattccaaacaattgaaaaggagagactcctccctaacaaattctatgaagccagtatcatcctgataccaaagcctggaagtgacacaactaaaaaagaaaacttcggaccaatatccctgatgaacattgatgcaaaaatcttcaataaaacactggcaaactgaatccagcagcacctcaaaaaacttatccaccatgaacaagtgggcttctttccttgatgcaaagctggttcaatgtacacaaatcaataaacataatccatcacataaacagaaccaaagacaaaaaccacatgattatctcaatagatgcataaaaggtctttgataaaattcaacattgtttcatgttaaaaacgctcagtaaactagatattgatggaacttatctcaaaataataagagccatttatgacaaacmcatagccaatatattgaatgggcaaaagctggaagcattccctttgaaaactggtgcaagacaaggaagccc

SEQ ID NO: 948595 - DNA, 597 bp, Homo sapiens
ctgctccacaaaagtgtggtcagactgcctccytaagcatgtccctgatctattccttcttgctgggtaggacttcccaactagggcctccagccgctctcactgatgttttctggctgtcagaggtttgaaaacttcctgggacaaagctcctagacagaggggtgggctgccatctttgctgttttggcaacttagccattccagcctccaggttttggagagcccaagctgactaagggcagaattagtaccccagcacagcacaactgctctatgaaagcatggctagactgcttctttaagcaggtccctgatcctgttcctcctgactgggtgaggcttcccaacctgggtctccagccacctcctacaggtgcatttgggctggcaacgggtctatacccctctgggatggagtccccagaggaaagagcaggctgccatctttgcttttttgcagccttcactgctgatactgccacatactgaaaaatccataggcaactaggggctggagtggaaactcagcaaaacccacagcagccctatagaaaagtggccagactgaaaaaacaaacaaacaaacaaacaaac

SEQ ID NO: 948596 - DNA, 588 bp, Homo sapiens
aattcagctgatttttgtacatcagtttgtattgaaactttactgaagttgtttatcaagtctagggtcttttggaggaatctttagggttttctggttacaagatcatgtaatcagtgaacagagatagtttaaacctgacaaaatcctgaatagacccatagctaatttcatacttaacggccaaagactagatgcttttcccagatatgaggaacaagacaagaatgtctgctcttgccacttctagtcaacattgcagtggaggaagtaaggcaattagcaataacaagaaataaaaggcatccagattgaaaaagtagaagtaaaactgtatttgcagatgacatgatttcatagaaaacataaacatatagaaaacataaacatatagaaaacataaacatatagaaaaaatatagaaatccattaaaattatagggatgaataaatgagtccagacaacttgtaggatataggataaatataamaagtcaatggtatttccttgcactagcaatgcaaaatctaaaaatgaaattaagaacacaattccatttacagtaatatcaattttttaatgctgat

SEQ ID NO: 948597 - DNA, 631 bp, Homo sapiens
tcctggagacctctctccagtccttcaacagtctcctacatctcagaaccagtcgcatggtgttgaatccttctcatactcccatctctttgaccttttgtcattgcacrtctctctgtcaccatgtagcagggaaagcttcttgacttttaagtgcacagtcacccatgtgactaggttgggctcacctggataatccaggataatcttcccaactcaaggtccataaccctcatcacatctgcaaaatccctttcaccatgcgatacaacatattcacagggattaaggcaagggaatctttcagagacagttgttttttcagcctcgtctgaaatgtgctaagtgctttatatacatgtttaaagttatctccattttgccagaagaaataaagtcttagaaaaattgggcgaattggctaccttcctatgaaatgacagtcattatttaaacccatgtctacttgatcctaagtcatattgctcttaattcctataccatgctgtgctgtgtgtatatcctactatatatgtgcagcacacacacacacaccccaacatgttatgaactgagtgttatttgaaaaatcatcttgggccacataaaatgtatagcttacaccgtttct

SEQ ID NO: 948598 - DNA, 743 bp, Homo sapiens
ccctttccagcttctggtagcttttagcattcctgagcatgcggcagcattaacttcacctctgcttcacctccatcttcacacagctttcctttctgcacttttcygtgtccaagtattcttctctttttggtcttttatgaagacaccagttattcggatttaagaaccaccttaagtccaggatcttgagatccttaaataattatatttataaaaatcttggccgggcacagtggctcacgcctgaatcccaccactttgggaggttgaggtgggcagatcacgaggtcaagagatcgagaccatcctggccaacatggtgaaaccccatgtctactaaaaatacaaaaattagctgggtgttgtggcatgcaactgtagtcccagctactcaggaggctgaggcaggagaattgcttgaacccgggaggcagaggttgcagtgagctgagatcatgccactgcactccagcctggcaatagagtgagactctgtctcaaaacaaaacaaaacaaacaaacaaaaaattatttccaaagaaagtcacattctgagattctagatggacatggattttgggaaatactgttttactctttgcaggaccttggtatccttaaataactataactataaagatcctatttccaaacaaggtcataatttaaagttctggatggacatgaattttgggaaatactattttactacagtgtgtaaaatctacatgagaaaaaat

SEQ ID NO: 948599 - DNA, 743 bp, Homo sapiens
ccctttccagcttctggtagcttttagcattcctgagcatgcggcagcattaacttcacctctgcttcacctccatcttcacacagctttcctttctgcacttttctrtgtccaagtattcttctctttttggtcttttatgaagacaccagttattcggatttaagaaccaccttaagtccaggatcttgagatccttaaataattatatttataaaaatcttggccgggcacagtggctcacgcctgaatcccaccactttgggaggttgaggtgggcagatcacgaggtcaagagatcgagaccatcctggccaacatggtgaaaccccatgtctactaaaaatacaaaaattagctgggtgttgtggcatgcaactgtagtcccagctactcaggaggctgaggcaggagaattgcttgaacccgggaggcagaggttgcagtgagctgagatcatgccactgcactccagcctggcaatagagtgagactctgtctcaaaacaaaacaaaacaaacaaacaaaaaattatttccaaagaaagtcacattctgagattctagatggacatggattttgggaaatactgttttactctttgcaggaccttggtatccttaaataactataactataaagatcctatttccaaacaaggtcataatttaaagttctggatggacatgaattttgggaaatactattttactacagtgtgtaaaatctacatgagaaaaaat

SEQ ID NO: 948600 - DNA, 780 bp, Homo sapiens
tattttaaaatatctttgcagtgaagctttttgagaatcctatatgtatttgccatgctaacaaacaaaacgcsatttgattatccatttgtttcatatctctttgggcagcttgaaactgtgccactcagcattataaactgcaagtaaagcccttttgagaaaggcaacaaatcagaaatgcaaaatgccatcactgattaatttatgaaaacgaagttttcagtctacaggaaccaggggcaaaatgaaacaataactcaccaggggggctgtgagccctgaagtgtagtgcttggccatgtgtaactctttatcactccaggtctcaaatctgaatgatatcaatcatcgtgcttgccagggcaccaactgaatataaattggcctttgtgggcatcaataggcctctttctgccgagtaatttgatagttcttttattttaaaacacttagagcggattatagaatgaaagcacacacttcggagccatttagaaaaatcaattcaagccacacttaacgacaaagaaaaatccttgtgttctttgtggtgacatattactcaatagaatagtcccatggagatgcaaatacttacacaaggtaaatttagacagcaatgtaattgttaatgcgtgtgtcatgacttaatatttgtacacgctgaaccttcacatttactgcgaatgctcaaaatgtttttgtaaccctggtttagatgtaggtcctcaaatctttgagtaaatttctaaagtttaggggtgaatttttctgttt

SEQ ID NO: 948601 - DNA, 781 bp, Homo sapiens
tctttttgatgatattatagatgaaattattttcttaatttccttttgggatagtttattgtttgtgtatagaaatgcaacatttttgtatgttaattttgcaccctgcaactttattgtttattagttctaatttttttttttggtggagactttctatatataacatcatgccatctgcaaagagagatcatttacctcttttttctgatcctttttctttctttcatttttctcttcctgcctaattgctctggcttggcaaacaaatggccaacaggcatatgaaaagattttcaacattactaatcatcggtgaaatgcaaatcaaagccttaatgtgatgttaggaagtgtcaaagacaaacaaacaataaaacccaaacccaaaagatcacaagtgttggtaaagatgtagaggaatttgaacctgtatacactgttggtgggaatataaaactgtgaagctgttatgaaaaacattatgaaggtttcttaaaaaattaaaaatagaactaccatatgatcccacaatctcatttctggatatatatccaaaggaaatgaaatcagtatgtcaaggaggtatgtgcattcccatgcctattgcagcattattcacgatagtcaaggcatggaaacaacctaaatgttcatcaacaggtaaatggaaaaagaaaatatggtatatatgaaactkcccaatgggttcactttgcctgttgcctagacagagtcaacttatcaagacaggggaattgcaatagagaaaaagtaattc

SEQ ID NO: 948602 - DNA, 584 bp, Homo sapiens
tctaaccacaatatgcaatccttcccattcttctctccccattccaaaggcagaggagcctcaccttatagccactgccaccactggatacaaagaatactgccagactaccactgatgttcccttaatgcccaaggtctcttaagtcagtttgtgatgaatactgcctgtcctggtactcacacttcagggcaatgggcccccctctggcccacagcaggttcagaaattccattcgagagtcaagccctggcatcagggacctcaagagcccacttggtgctctaccctactgtggccatgttgggacccaaagccagcaagtctcagagggtcaccaaggccctgtatatagtagctgggtatcactgctagttactcagggcccaaggactcttcatttagcgggtgatgaatactggaagaaccgaagcttctccttcaaggcagtagctttccttctgayccagggtgtatctagaaatgttgtctgggatctagggcctgcacatggcctcatgattctgaccagtgccctatcctgctgtggctgagctggtatccaagatgcagacaaagtcctc

SEQ ID NO: 948603 - DNA, 647 bp, Homo sapiens
acaaggtccgaaaaatccctcaaacwacaatcttaggttttactgtattaataggttatctataggagccgctggggaggttaatagtcttgtggcctctggctttatgactcctgagtaatactttctaatcttgtggttattttcgtgtgtttgcaggagtggtctagtccccaaacaatgaggggatttgtttcagggaggttctcttgtcatcttcgtttcaaagttaagctagcaactaaattcctcccaaagttagtttggccttttcccaggaatgaacaaaggcagcttagaggttaaaaggcaagatggcgtcaacttaggtcatctctctttcactgtcataattttctgttaccatttttgcaaaggcaatttcaggataagcataatgtacacattccctttctaaaagagagaaatggacaaaaagtaacagtcttcaagcaaatttgaaatcgagcagggcaaccattacatcttaaagctggggaatatttttttgactctttctctgactcctgaacacactggggtaaaggttggactcacaggccctcgggtactatcactcctatggctttgcttggtacattctccgtgggtgcttgtacaggttgcagtcaggtacatgaagtttt

SEQ ID NO: 948604 - DNA, 647 bp, Homo sapiens
acaaggtccgaaaaatccctcaaactmcaatcttaggttttactgtattaataggttatctataggagccgctggggaggttaatagtcttgtggcctctggctttatgactcctgagtaatactttctaatcttgtggttattttcgtgtgtttgcaggagtggtctagtccccaaacaatgaggggatttgtttcagggaggttctcttgtcatcttcgtttcaaagttaagctagcaactaaattcctcccaaagttagtttggccttttcccaggaatgaacaaaggcagcttagaggttaaaaggcaagatggcgtcaacttaggtcatctctctttcactgtcataattttctgttaccatttttgcaaaggcaatttcaggataagcataatgtacacattccctttctaaaagagagaaatggacaaaaagtaacagtcttcaagcaaatttgaaatcgagcagggcaaccattacatcttaaagctggggaatatttttttgactctttctctgactcctgaacacactggggtaaaggttggactcacaggccctcgggtactatcactcctatggctttgcttggtacattctccgtgggtgcttgtacaggttgcagtcaggtacatgaagtttt

SEQ ID NO: 948605 - DNA, 893 bp, Homo sapiens
caagatggcgtcaacttaggtcatctctctttcactgtcataattttctgttaccatttttgcaaaggcaatttcaggataagcataatgtacacattccctttctaaaagagagaaatggacaaaaagtaacagtcttcaagcaaatttgaaatcgagcagggcaaccattacatcttaaagctggggaatatttttttgactctttctctgactcctgaacacactggggtaaaggttggactcacaggccctcgggtactatcactcctatggctttgcttggtacattctccgtgggtgcttgtacaggttgcagtcaggtacatgaagttttccagggcagacattgcatgctgtaggtgactacacatttctggggggtcccggtagtggtaccacttcctcaactttgctaagcattacccacatggaactctgcagtgacctcactgctgtggcttcacttagcattgccctggtgggcaccccttgcagtagctctaaccccacatttgtgtttggcatccctctatttgggactctcttcagtggatctggccctgtgacaagtgtctttttggacttccaggctttcagagaaatcctttgaaatttgtagaaactgccaagcctctacatatcttcatttctgtaagcctacatgattagcaccacatggacacctccaaggtttagggcttgtacctcccagagctctgggacataagctccacctgggtttatggtaagcatctggaatgagcagagcaacatcctracaatgtgcagggcagtggcccaggctgtccccagaaaccaccctgtccccttaggcctgtcggcctgcaatggatgaggcagcctagaaaatgactgaaatggttgtaggg

SEQ ID NO: 948606 - DNA, 682 bp, Homo sapiens
ggggtaaaggttggactcacaggccctcgggtactatcactcctatggctttgcttggtacattctccgtgggtgcttgtacaggttgcagtcaggtacatgaagttttccagggcagacattgcatgctgtaggtgactacacatttctggggggtcccggtagtggtaccacttcctcaactttgctaagcattacccacatggaactctgcagtgacctcactgctgtggcttcacttagcattgccctggtgggcaccccttgcagtagctctaaccccacatttgtgtttggcatccctctatttgggactctcttcagtggatctggccctgtgacaagtgtctttttggacttccaggctttcagagaaatcctttgaaatttgtagaaactgccaagcctctacatatcttcatttctgtaagcctacatgattagcaccacatggacacctccaaggtttagggcttgtacctcccagagctctgggacataagctccacctgggtttatggtaagcatctggaatgagcagagcaacatcctaacaatgtgcagggcagtggcccaggctgtccccagaaaccaccctgtccccttaggcctstcggcctgcaatggatgaggcagcctagaaaatgactgaaatggttgtaggggcctctttcccgttgtc

SEQ ID NO: 948607 - DNA, 611 bp, Homo sapiens
ccagctgcctttttgtgcagtaataagctgatgtgaaaatctatatggaaatgcaagaggtctataatagctaaaacaatctaaaaacaataacaaaattggagtactctactcctacatcctgatttcaaaacttactacaatgaaacagtaaacaatacattgtaatactggtgtaagagtaaacatatagatcaatgaaatagaatcaagtgtacaaaaattaacccttacatttatgatcaactgattttacaatattaccaagacaattcaatagggtaaaagtttgtttcaacaaatgtgggacaaatagatacccatatgaaagttatactcctccctgatactatgtacatgttagactgaaaacggatcatagatcaaaatgtaggcgctaaaaccacaaaacccatgaaagataatatatgagtcaatcttggtggtcttaggttacacaatagtttctatgacatgacaccaaaaatacaagtgacagaaaaaatatatggcyatattgaacttaacagaatttttaaaattattattcaaaatacaccattaacaagtgaaaatacaactcagaaactgaataaaaaatttgcaaaaca

SEQ ID NO: 948608 - DNA, 579 bp, Homo sapiens
aggcatgtcaatagtctaagcactcttggtatgttgtaattgagaggtgaagccggctgggcttgagtcaggtggggacttggggaacttttctgtctagctaaaggattgtaaacacaccaatcagcactctctgtctagctaaagatttttaaacgcaccaatcagcacactgtaaaaacagaccaatcagcactctgtaaaatggaccaatcagcagggtgtgggcggggccaaataagggcataaaagctggccacccgagccagaagcggcaactgctggagtccctttccaggtgtgaagctttgttctttcgctcttgctgctgctccctgtttaagtccagactacctttgtgagcttgtaacacagtgagggtctgtggctttattcgtgaagtcagctagaccacgaacccaccaagaaacaattctggacgtgccacctttaagagctgtaatacttgctgcaaaggtttgtggcttcrctcttgaaatcagcaagaccacaaacccacggaatggagaaactccagacacaccatctttaagagctgtaacactcaggataagggtc

SEQ ID NO: 948609 - DNA, 563 bp, Homo sapiens
gtcaattttcatgatatttattcttcctattcctgaggatggaatattcttccacttgtttatgtcctctcttatttccttgagcagttgtttgtarttctccttgaagaggtccttcacatcccttgtaagttgtatccctaggtattttattctctttgtagcaattatgaatgggagttcactacacagggaggggaacatcacacaccagggcgtgtcagggggttgggggctaggggagggatagcattaggagaaatacctaatgtagatgacaggttgatgggtgcagtaaaccatcatggcacacgtatacctatgtaacaaacctgcatgttctgcacatgtatgatttgataaatatttggtttcagctccaatatgtaaagatcttagaagttattactcttatccttacaataagaaaaagctgaacaagctaaaaataaacaaattttcttagatctctcagaaaactgaggccacagggcaaactaccaccccaaaatccagcagatgagtgaatcttgagagtcactgctgaaatatgtttatctgaa

SEQ ID NO: 948610 - DNA, 595 bp, Homo sapiens
ggatcatatttatttttttacttctgaagcttactttggttgaatatgaaatttcaggttggagctcttcttttaaggatgttgaatattggcccctaatctcttttgacttgtaggatttcagatgaaaggtttgttgtttgtctgataggctttttttggaggttacctggcttttctccctagctgcctttaaaacattttttctttcattttgaccttggagaatctcatgattatatgtcttggggatgaccttctcatgggttatcttactggggttctccacatttcctgcatttaaatgttggcctctctatctgagttagggaaattctcatggacaatatcccaaaatatgtatttcaagttgttttcattatccttattactttcaggcattctctttaattgtagatttgctttcttacataatcccatatttcttagaggttttgttcgttcctctttattcttttttcactcctcttgtcagtcttatttcagaaagcgagttgtgaagctctgagattctttcctctgyatggcctattctgctgttaatgcttgtgattatattatgcagtttttgtat

SEQ ID NO: 948611 - DNA, 579 bp, Homo sapiens
tgctatgttggtcaggctggtctcactctagtgatacacctgtcttggcctcccaaattgctggaattacaggcatgagccactgcacccagccccaaatggcttttttttttttttttggatagaagyttatgaaaaaatttggttttacaatttatatttatgctgggtacagtggctcacacctataatcctaggacattgggagtctgaggtgggtggatggcttgagcccaggagtctgagaccagcctgggcaacatcgtaaatccctgcctctacaaaaaatacaaaaattagctgagcacgtatctgtagtcccagctactcaggagactgagatgggaggatcacgtgagcctgggaagtccagactgcaataagcagtgattgtgtcactgcgctccggcctgggtgacacagcaagaccctgtctcaaaaattgtatttaacagcataggacctacaatagctaaaacaacttaaaaataacaaatttggagaggtcacactacctgcaaggctcacttcaaagctacaggaggagattgatttgagtaataataaaactccgatctc

SEQ ID NO: 948612 - DNA, 617 bp, Homo sapiens
caggaaggaacacacctggtgggtacaaygagcagtaaggtggccaggaatatccgagagggagactgggaggcgatgcagtcagagacacgatggggaccttgtgagcattgaaatgactttgaccctcaccctgagtgaaacgggcagccattggaaggttttgttttattttttctgagactgagtctcaacctattgcccaggctggagtgcagtggtgtgatctcggctcactgcaacctccacctcccaggttcaggagattctcatgcctcagcctcctgagtagctgggattacaggcgcccgccaccacgcctggctaatttttgtatttttagtagagatggggtttcagcatgttgatcaggctggtctgaaactcctgacctcaagtgatctgcccgcctcggcctcctaaagagctgagattacaggcatgagccaccacacccagcccattggagggttttaaacagagaggtgatgtgatctgaattaatatctagtaaagatcagcccaatcatttaagtatttgagcctttttcagaaatcatgcactgaaatccggaaagagacatagctgccctcctttccaagggtccccagcaggg

SEQ ID NO: 948613 - DNA, 588 bp, Homo sapiens
aataaaagttattttcttatctacatggggaagcacaattgaaagaatacatgtgaagccgggcgtggtggctcacacctgtaatcccagcactttgkgagaccgaggagggtggatcacgaggtcaggagatccagaccatcctggctaacatggtgaaaccccgactctactaaaaatacaaaaaaattagccgggcgtggtggtgggcgcctgtagtaacagctactcaggaggctgaggtaggagaatggcgtgaacccgggaggtggagcttgcagcgagccaagatcgcgccgctgcactccagcctgggtgacagagcgagactccatttcaaaaaaaaaaaaaagaatacatgtgaaactgtaccataaactctcaaatgctggtagactccaggcctttaccttaggtagatctgcctccagaactcagcatctccaactctttctcttgttcaaccgcattctaatgccagcttctcttcttgccttctgagttcttacattctccttgccttcattctctctgtgtaagaaatgggaattatattatctacctgatgcaattggtataagggcaacc

SEQ ID NO: 948614 - DNA, 599 bp, Homo sapiens
aggaagactgggtccttttgagaaagtactcttcaacactgccacaactgaatactgtaaaagttttctagatcttcytgagacatgcctgcctgcatttgataggtgaccgtacactagaccaaatcaatgcttctagggactcaaaaatcattttggatcactgctcaaaaagtgggtacctatggaatcaagtaaaaatccatgtcacagtggtcaattgaagggtaaaatgtaatggaaaaaggaaagctatgtatgtcttctttcttgattatgtatacatgtagcatattgcaaaatagcaatctttgcagtacctcccttcaagaggtgtaatctatttttcaatgtcttgaatttggatgcctttgtgatttgctttagccagtagaatataagtgacattgtgtgcgttctaagcttgcttctcaagagactttgtatcctcctcctctctctcttggaaccctgcaacttccatggagaaaagcctgtgcccaccatctggagaaggaaaaaccatgtggaatagagacaagctgttatagccaaggccccaggcacgtgagagggtccaaagaccagcacagtcagcc

SEQ ID NO: 948615 - DNA, 582 bp, Homo sapiens
gtggttttttttttggtggtggtggtggtggtggtttttttgtttgtttgtttgtttgtttgtttgttaacatggagtcttgttccatagcccagactggattgcagtgacgcaatctcggcccactgcagcctctgcctcccaggctcaaatgattctcctgcctcagcctcccaagtagctggtactatgggtgtgcaccatcatgcccagctaatttttgtatctctactagagatagggtttcagcatgttggccaggctggtctcaaactcctgacctcagataacccacccgcctcagcctcccaaagtgctgggaccacaggcatgagccacctcccctggcctaaaaagtcatttcattccatgtaagatgatatatttgcagctttcagtaaataagacatcctttggggtaccattatcttgccctccactgtctacataacaaaccactgcaaaatataatgactaagagaatcccactttattttatctggtaattctttgaattgasttgggttgattttatatatttttttccctaccttcctggtgtgttgaagtcagtcactgtat

SEQ ID NO: 948616 - DNA, 642 bp, Homo sapiens
gggtttttctgtctcatccaggaggcccatgctagcaygcccatttctctgagccttttcatccttccctccactttgcagtggtagttctggcatctctacattgttcagtgtgggtcattactttttccatcttttaagagccatctgggcagcacatctgaaccatccccttgagctcttgccagggtgttagatcctgtgacactggagagagcccctgcacatcaacaaactctaccttacccagttaatacttcaccccccttgaggcatcccccagaatcctccacagtcactcccatcccacccggccattgcaagtttgggcttgtacacgttggtcaggtctgatatacaatccctttctttccataacaggcccagtatttcctgagttgatctaggcagacacttttcgcctgggttatcagtttggtggctaggagaagaggtggggccaatcccgagggaggtcagcattgttttataaggcacctgccctatttaaggcctctgcatggtattccagtaagacgcatggaggtgggggctctgtcatccagcaggggttacaaggacacttctgcagtttcaaagggttcaggagtacctggagattcaaagttcttatgtttatac

SEQ ID NO: 948617 - DNA, 618 bp, Homo sapiens
gaagataaatgtttgagacctgtcacagcaagggctccttggcatttctatctctgtgtggcctctgcccaaggtctctccagcatggtggcttcaargcagctaagcttctcacattcaggaattccaaggtggcaggaggaggcacggggagagattgagatcaaggcagcaattgtattatctgtgtttgtagccttgtggtatctagtctccaaaatgatgcagcatgatttctactgccttttatttattacaagcatgttagtaaaattgacccacgtttaagaagagtggaaattagatttcaccctttgtgggaagaatgttgaagaatttacaaacatgttcttaaaccaccacagatgatcaattcagtttcacagacactgagtttgaatttctgggtgccttagtctggttcctgagcaaacaagagtcttgggtaaggattaatccttatgctttatttgagaagtacacactcaaggcagtgaaagtaaggaaaaacgaaaaaaaaggcagggaaggatggaaagcaattcaagatgatgctggtcactactacccaattaccgcaaagagacagggcaggtggcttggtaggagtgatgcgac

SEQ ID NO: 948618 - DNA, 740 bp, Homo sapiens
aacctgcctgaagagaggatctacccactccagggtctcctctctgctgagagctgaacactgatcagaacgtcctgcctgcggagaggagctacccaatgccggtcttctctgagctgttctgttgctcaataaagctcctttttaccttgttcaccctccacttgtccacatacattattcttccaagatgcaggacaaaaacttgggacctgccaaatggcagggctaaaagagctgtggcacaaacgaggctgaaacactccccttgctcaccacgttgtgggtgacaaggagagaagaaagagggagagaagagctgtggcccttcacggagcccagacgtaggagctctgggaacaaccaatgctgtggcacccactttggggatctgtagtccctggcatctccaagcttctgggcatcaccacatttcctggtgccagttgtggaagctgcttgcagtacgcctggtccagtcgcagcctcgcagggagccagcttccatcctggtgcctggagctgcacatcctgccgcagccagcctgccttattgtgcacagtggccggacgccatgcttcctcactctcacacacctcttgctgcccgtcatgctcttggcaggcgtggtatccawgccagtagcacaagccaagcacagcctgccaggtcgtatgggcagaatgagcccagcaggcccaagcaaaattcaggcaaaggagctactggacacagaagt

SEQ ID NO: 948619 - DNA, 721 bp, Homo sapiens
tgcccattagagtgatccagttctgttgctgagaaatccatttttccctacatgtgcaatgaatcttaacctcttcaggaagaggaaaggcagtttcctattttctctagagattaggatgtctcccacctcaccctaatatcccaattatattaggagcgtatgttttcacagttgcactagcatctattccactttcttctttgtacatctttcccatttgttttactacctaatttactctcatcattcaagattcaattaaaccaatatattgtgttgaaatattattctctcaagcacatcagatactcctctctgaaatttctgcattatggtgttgatcaaactttttaccgtattcttaaaagctgcatttcctacaatgagatgctttgtccagaagcctgggtcattaaactttagcatctaattagcaaattttcagtatatgaagagttcgtgataattcttgtgaaggcctcaattcctaagaaaaatatgtcacctattttaaaacttgaatatagtttccatgttgcattagccaattaagatgatttatctaaatccgcagataatgaaagagaggcacctgactcaagcaatggatgttggagcagaagactagaaggcaaagcaagtacakgctacctgtctgggcaagacctttcagtgcctttccatatttcaatgggtagtcatctgcacaccttccagt

SEQ ID NO: 948620 - DNA, 627 bp, Homo sapiens
tccatatcactatcagtattttggtcaaagccattcagcaagtctctaggaagttccagactttcccacatcttcctgtcttctgagccctccaagtctctrggaagttccaaactgtcctacgttttcctgtcttcttctgagccctccaaactgttccacatttttgagtattctaatagcagcacccatctctgcttgtaccaatttactgcattagtctgttctcatgctgctaataaatacatactcaagactgggtaatttataaaggaaagaggtttaattgactcacagttcagcaaggatggagaggccccaggggaaacaaacatgtccttcttcacatggtggctgcaaggagaagaatgagagctgagtgaagggggaagcgtcctataaaaccatcagatctgatgagaacttactttcaggaggatagcatggggaaaactgccgtcatgattcaattatctcccactggatccctcccatgacccatggggattatgggaactataattcaagatgagatttgggtggggacacagccaaaccatataagtattaaaattataataaatagtaacttaattatacattttaaaattactaaaagaatgtaat

SEQ ID NO: 948621 - DNA, 567 bp, Homo sapiens
ccccagcagtgccagcccactggygctgcgctcgatttctcgctgggccttagctgccttcctgtggggcagggctcgggacctgcagcccgccatgcctgagcctcccaccctctccgtgggctcctgtgccgcccgagcctcctccacgagcgccaccccctgctccacggcgcccagtcccatcgaccacccaagggctgaggagtgcaggcacacggcgcaggactgccaggcagctccacctgcagcccgggagcgggatccactaggtgaagccagctgggctcctcagtctgctgggcatgagcagagtctttaggtctagctcagggattgtaaacacaccaatcagcaccctgtcaaaacagaccactcggctctaccaatcagcaggatgtgggtggggccagataagagaataaaagcacgctgcccgcgctagcagcggcaacacgcgggggtctccttccgcacagtggaagctttgttctttcactctttgcaatgactcttgctactgctcactctttgggtccacactgcttttatgagctgtaacactca

SEQ ID NO: 948622 - DNA, 567 bp, Homo sapiens
ccccagcagtgccagcccactggtrctgcgctcgatttctcgctgggccttagctgccttcctgtggggcagggctcgggacctgcagcccgccatgcctgagcctcccaccctctccgtgggctcctgtgccgcccgagcctcctccacgagcgccaccccctgctccacggcgcccagtcccatcgaccacccaagggctgaggagtgcaggcacacggcgcaggactgccaggcagctccacctgcagcccgggagcgggatccactaggtgaagccagctgggctcctcagtctgctgggcatgagcagagtctttaggtctagctcagggattgtaaacacaccaatcagcaccctgtcaaaacagaccactcggctctaccaatcagcaggatgtgggtggggccagataagagaataaaagcacgctgcccgcgctagcagcggcaacacgcgggggtctccttccgcacagtggaagctttgttctttcactctttgcaatgactcttgctactgctcactctttgggtccacactgcttttatgagctgtaacactca

SEQ ID NO: 948623 - DNA, 762 bp, Homo sapiens
gccaaagccttagacaagtgctgggcccatccttgtgctgcccccaactgtaatgagcctgcctatgtggctggctggtgaaggcccttgttgctgagcaccagatcaccctaattaaggttgatgacaakaaactaggggaagggatggaccactgtaaaactgacagaaggaaaaccccataaagtggttggctgcagttgtgtagcgttaaggactatggcaaaggatgtcatcaaagagtttttttgttgttgttttttgttttgagacagtctctctctgtcaccaggctggagtggggcagtggcatgatcttggctcactgcagactccacctcctgggttcaagcaattctcctgcctcagcctcccaagtagctgggattacaggcacacaccaccatgcccggctaatttttgtatttttgtatttttagtagagacagagtttcaccatgtggctcaggctgatcttgaactcctgacctcaggtgatctgcctgcctcggcatcccaaagtcctgggattataggtgtgagccactgcgcacggcccttctttcatgttttaattcaatggagttttgcatgtactaagttttcaaaaatacatgttgaaggaacatttttatctgtactccgacacacacccaattgtcaaattgtcttcacagctctcagacttatagatttagaatctcctcagggacttgatcttaattgaagacaaaggagatcctaaagtgactttttgtccta

SEQ ID NO: 948624 - DNA, 432 bp, Homo sapiens; identical to SEQ ID NO: 946827

SEQ ID NO: 948625 - DNA, 550 bp, Homo sapiens
acagaaatacaaagaggagttggtaccattccttctgaaactattccaaacaattgaaaatgagggactcctccctaactcattttattcagccagcatcatcctgataagaaaacttggaagagaaacaacaaaaaaagaaaacttcaggccaatattgctgatgaacattgatgcaaaaatcctcaataaaatactggcaaacccaatccagcagcacattaaaaagcttacccaccatgatcaaatcatcttcatccacggatgcaaggctggttcaacatatgcaaatcaataactgtaatccatcccattaacataaccaaagaaaaaaacacatgattatctcaacaggtgcagagaaggcctctgataaaattcaacatcccttcatgttataaactttcataaactaggtattgatggaacatatctcaaaataataagagctatttatgacaaacccacagccaatatyatattgaatgggcaaaagctggaaacatttcctttgaaagccagtacaagacaaagatgccctctctcttca

SEQ ID NO: 948626 - DNA, 582 bp, Homo sapiens
gaggaaaaaataatttcccctctctactcttataagttcttggctggaacccctgtaacaaaagagagattagtaagagaaaaatgaaaagaagtttattaacatacatatctcatatgkgcatgggagaaaactcagggaaagagtaactctcaaagaggtaacttagaactcttgtttatatggcatctttaacaaagaataatacatttttagaaaagtgacaagggccaggtgtggtggctcacccctgtaatcccaccattttgggaagctgaggcaggcagatcatctgagtcagaagttcgagaccagcctggccgacatggtgaatccccatctctactaaaaacacaaaatttagctgggtgtggtggtgcccgcctgtaatcccagctacttgggaggctgaggcaggaggatcacttgaacctgggatatggaggttgcagtgagccaagatcccaccattccactccagcctgggtgacagagcgaaacttcatctaaaaaaaaaagagaagtgacaagacaaaggagaaggatcctgagtctctaggggtggcaaattgtctcaagtca

SEQ ID NO: 948627 - DNA, 773 bp, Homo sapiens
ctggattgatagaatagtggaatggccttttgaaatcacawttacaatgccagctaggtgacaatactttgcaggtctggggcaaagttctccagaagactgtgtatgctctgaatcagcacccaatatatcgtactgttttcccattgccaggattcatgggtccaggaatcaaggggtggaagtggaagtggcaccactcaccgtcacccctagtgacccactagcaaacttttttgcttcctgttcccgtgacattatgttcgacaggcctagaggttttagtttcagagggaggaatgctgccaccaggagacacaacaatgattccattaaactggaagttaagattgccacctggacactttgggctcctccttcctttaagtggacagcttagctaagaaggctacgatgggagttacagtgttggccagggtggttgacctggactctcaagatgaaatcagtctactactccataatggagataagaaagagaatgtgtggaatacaggagatcctttagggcatctcttagtatcaccatgccctgtgattagggtcaatgagaaactacaacaacccaatccaggcaggactacaaatggcccagacccttcaggaatgaaggtttgggtcactccaccaggaaaaaaaccatgacctgctgaggtgcttgctgagggcaaagggaatacagaatgggtaatagaagaagcttgtcatcaataccagctacaaccatgtgatcagttccagaaatgaggact

SEQ ID NO: 948628 - DNA, 584 bp, Homo sapiens
tggactccagctggagcacgaatcaaggccgtttctgtgggagatgacggggcatctgagggaagcccaaccttatcccaaaatgcccccgtttcgtcttctagggagcccaatgtcctgggctctacctgctcactggggctgggtgtagtggctcacgcctgtaatcccagcactttgggaagctgaggcaggaggatcccttgagcccaggagtttgagaccagtctgggcaacatagcgaggccccgcctctacaaaaaaaatttaaaaactagccgggatggtggcactttcctgtagttccagctacttgagaggttgaggcaggaggattacttgagcccaggagttcaaggctgcagtgagccatgatcatgccactgcactccagagactgggggatggagtgagagcttttctaaaaagaagacagagaaagagacagagagagagagagagagagagagagagagagagagrgagaaacctgtgggtgtgggaagagctagagagccaggtttagttggaatcgatcttgggataagcagagtaaacttgtagcccagaccctggtacagcag

SEQ ID NO: 948629 - DNA, 794 bp, Homo sapiens
cctctgtggcacacaataattttaatataaattattactgattataattattactgataatgtacactaagttatatcaaaatgataggagtttcacatgatttggaacacataccaatgacatatttatctaaagaaagccaaacaccatttaatatttgacaatgcttcctgtttaatttttataccaaataagccaaattttacctttacattagggtactattaatgttaaacccaattcttaataaactttatagacatatttacccaattttaatgtttgaccataaggtaagacttttatagaccttttataacccttaacaatttttgttaaagagcagattagtgctctaagagaaacccattgtgcttttaatgctcaatttacagaaaaactggatgatactccttcaactttagccaatatgtttacacacagaatttcctttactattaaccttccacagcttgcgtaaacctttatttctattttatccaacttaaaacaatcctttaaccttttaatctaggtaaaaatccatattcaccttcctccttataatctttttaaccaaagtatattttactttccttacgtaccttgcatgtaaactcttttttcaatagtcttaaatacatgctacactgttaactcttagcaacctttacttttggtgaaaaccttggtaaatttgagattttaattatgtactaggcmtggagcctaggacctagacagaagtgcagataaggtctgacttattccagcatctaactccatgtgtccc

SEQ ID NO: 948630 - DNA, 583 bp, Homo sapiens
gtcaggagatcgagaacatcctggctaacacggtgaaaccccgtctctactaaaaatacaaaaatattagccgggcatggtggcaggcacctgtagtcccagctactctagaagctgaggcaggagaatggcgtgaacccgggtggcggagcttgcaatgagccgagatcatgctactgcactccagcctgggcaacagagcgagactccatctcaaaaaaaaaaaaaaaagtgtgtagcacagctctcccttttctctctctttctcctgctcctgtgatgtaagatgccttgctcttcttttgccttctgccatgatgggaagcttcctgaggcttccccagaagcagatgctgccatgctccctgtacagcctgcagaaccattagccaattaaacctctttcattataaattacccattctcaagtatttctttatagccatgcaagaatggactaatacagaacctrtggaattggaatgtattggagacatagtgagaagaaggagtgtgagaaaatgtttttcaactctggggctcactactaaattgtcacacatgaacttattctaattacata

SEQ ID NO: 948631 - DNA, 566 bp, Homo sapiens
tcgtgctgtgaatataaaactatgtatctactctgttttgatactagttttgatatggtttggctgtgtgtccccactgaaatctcatcttgaattgtagcycccataattcccacatgttgtgggagggacacagtgggagataactgaatcatggcagtggttttatccatactgttctcatggtagtaaatacatctcatgagaactgatggttttataaggggttcctcctttcactcggttctcattctttcttgcctgccaccatgtaagatgtgacttttgtcttccaccatgattgtgaggcttccccagccagtggaactgtgagcccattaacctctttttctttataaattgttaagtctggggtatgtctttatcaggagcatgaaaatggactaatacaagttgcttatagttctgtattatttccttttttttttttttttttttctgtgagacagagtctcggctctgttttccaggctggagtgcagtggtgtgatctcggctcactgcaacctctgcctgctgggttcaagcgattctcctgcctcagc

SEQ ID NO: 948632 - DNA, 628 bp, Homo sapiens
cagtctggccacagccgctttgctacgctttggtgaattctgccgagtccaaacctcccagtctccttrgcactgtcaggggaaaattgcctaccaaagccacagtaatggtggttgccactttctccaccaaactcagtcatccaagccagactccagactgctctgctggcagtgagaatttcaagccagtcgttcttagcttgcttggctttatgggagtgggacctgccagtaagaccacttggcttcctggcttcagcggcctttctaaaggacaggatgtttttcctgtctcactggagttccagacgctgctggagtttatatataaacagctgcagctcagtgcctgcccaaacagctgccttgttttgtgattgaaacccggagccctggtggtataggctcaggaggtaatctcctgatcggcaaattgaaaaaacaaattgtgggaaaagcatagtacccctcaggagtagcagtgcctcacggcttcccttggctgggggagggagatcccccggctcagtgcacttcccacgtgaagtgatgccctaccctgcttctgctccctgagttgcacccactgcctaagcagtcccagtgagatgaactgagtacctca

SEQ ID NO: 948633 - DNA, 609 bp, Homo sapiens
tgtttacaattcttaaaatctgttaactcctgacatcttcacaactatcttatggaatagtsactatgaatatgatcaatatgcagataagaaaactgaggcatggagaaattaagtgacttgaatcatttcacacaatagtggacttagaatccaaacccagctctttgtttctagaatctgtgcttttaaacactatgctgttgtagacaaatgaggaaacatttcaaaaactatttggaaatatctatattacattcattcaccccaattattatcagcgtttaagtgaaaacatgtctggacctttatgtatgtatatgtgtttgtgtttgtataaatgtatgtatattcatagatatatatgattcatatatgaatgaattcatgtatgaatgtatgatttatgtatgtatatatgcagattttatgttcatatttgcagacatttacttatacatgtgcatatttttaaaaatgaaaaatagatgtgtatttaccatttaaccagggccttgaataacaatggcttgggacatgtacaaactatttactcaggagaactatttatttgccttgcttttggctgacatctcagtgggcatccat

SEQ ID NO: 948634 - DNA, 574 bp, Homo sapiens
catgccttgcttccccttcaccttctgccatgattgtaagtttcctgaggcctcttcacccatgtggaactgtgagtcaattaaacctcttctgtttataaattaccttgtctcaggtagtatctttatagcagtgtgaaaatggactaatataacttatttggcaagatactttatatctacatactatatacctatatgatatctactccctgaaacatctgttttcccagttaaaatcatgtaatgcagcaaaatactactccttttttagaaccctgttttaaaaagtaaaagttatgtattaatctttagaagactgcaagacagagaccatgtatatcatttagaattactttgatttcaactaacacagaaccaaactaaaaatggcaataagggtagcaagttagactcttccagttgtgttggcccactgaactggccactctggaagagtccgttctggtcacccagaagagtctaacttgctaccyttacacagtaagtcacttgtcagcactttcctaaaatagtcttactgtttaggtgaccagttcagtgggcctacatg

SEQ ID NO: 948635 - DNA, 438 bp, Homo sapiens
tgcaaggggtcagggagttccctttcctagtcaaagaaaggggtgacagatggcacctggaaaatygggtcactcccaccctaatactgcgcttttctgaagggcttaaaaaatggcacaccaggagattatatcctgcacctggctcggagggtcctacacccacggagtctcgctgattgctagcacagcagtccgagatcaaactgcaaggtggcagcaaggctgggggaggggtgcctgccattgcccagacttgcttaggtaaacaaagcagcctggaagcttgaactgggtggagcccaccacagctcaaggaggcctgcctgcctctgtaggctccacctctgggggcagggcacagacaaacaaaaagacagcagtaacctctgcagacttaaatgtccatgtctgacagctttgaagagagcagtggtt

SEQ ID NO: 948636 - DNA, 675 bp, Homo sapiens
tttggaggcaacatatccatttattgagtgaccatttattgagttacctgaaaggctgccagttttgaggaggtccagaagaggagaaggctctgcaacaagacaaggctgctttgcaagctgccctgccacttgggccatatgacccagcagatacaatggtgctggaggtttcagtggcagatagggatgctgtttggaagaccctcataagtgaataacagtggaggcctctaggattatgaagcaaggccctgccatcttctgcagataactactctccttttgagagacgcatgctggcctgttaccagactttggtggaaactgaacatttgactatgggtcatcaagtcaacatgcaacctgaattgcctatcaaaaactgggggctttctgacccatctagccataaaaggtgtcatgaacagcattctatcatcaaatggaaattatatatacgtttttgggctcaagcaggtcctaaaggcacaagtaagttacatgaggcagtggctcaaatgtccatggtctccactcctgccaccctgccttctctcctccagcctgcaccratgtcctcatgggaagctccttatgttcagttgacagaggaagagaagactagggcctagttcacagatggttctgcatgatatgcaggcaccacccgaa

SEQ ID NO: 948637 - DNA, 579 bp, Homo sapiens
gctccataatcactgaaacttgttggtaatgcaggtcactcatctcagtctccatactgctccttccatcactggagaccagtgagttgtgagagtttcattcctgggagagtggataatgaccatgcccgttcattcaacggcacgaaactaaagataagagaagctcctggcaagtgctggctcaccatggatacatccatgctgaagggttatccctttctgaagggtcactggccacagccttctctggggcaccccatgatgtcactcacaccttcttctctcatgctttccaaatgtacccttctgctctcaagaagtgtggaaaacacacaaaaacccagcaattgcatagagtaactagaatactgcattaaagagcctctagacttacattgcttcagaagttcagaaagatggtaacatcatcattaattctgtcttcacattactaaccaggatgacatggagggtgggaagcagaaggctagagaccatgatctgtgcatgtctggagtcacacgtttttttgcacactgaygctgttgcaaacatttttcactgtagaccccagca

SEQ ID NO: 948638 - DNA, 753 bp, Homo sapiens
tctcaaaaagaaataaattaaaaaaataaaataaaaatgtcaacacctgtgagattttccattctaaatatggagcttaatctatggggcatggccaaccacagaatgctgttttgttttggttttaaaacggcagtttcattgtggtcaacctaatatttcaaattctgtttctcctcactctcacatccactgactctggtcgttgtcatcttagatgtctgatttacttccacaacctcaaagccagtctcctttcttgccctctgctactttatttcccacaaaatgagcccgtcattctgcagcccatatctggccttggagctctgcctgtcagagcccaggtgcatcctcactgccccaagaacaaagcccaaggccttcacatgcatttccaggtcctgccttacttgccctggctgctggcttctgctcctgctccccctgtgggctccaacaagagtgcagccacaccacacacaacacgcacacacacacacaacatacacaacacacacacagacaccacacacacaaacacacacgtaagccacacagacatacacaagccacacacaccacacagacacacccacagagacacacatcacacacmcatacccaacccaacccacacccacaaacacacatccaatacatacacacacagatgcagacacacagacataattctgcctatttctaccatgtagcaaaacccacatgtactatgtgaaattgattccctat

SEQ ID NO: 948639 - DNA, 573 bp, Homo sapiens
gttctgtgtcctgattgtggcagttctaataccaaggtatctaaatgctaaaattcagtaataaattcaaccaaaaagaaacttgagtttcataatgtgaaaatatttagaaaagaataatgaaagagaacacagttgagaggaaacaaataaacaaaaaaatcccccagaaagtttaaaataataataaagtcattaaaattaatgaccttacatttatagaaacaagagatgtgtcagttttatcattaatctggggataataaaggctgaatcttatacaatttttttgattagaaagtgaagagaattatttgcattccttttaaagcacttgataatacctagaaaaatttctttgtgccaatttctgatggtaaatatttttatatgtgcttctgtagatcattcactgataaccacagaaacactgacagtaaaaagcaattttggccaagcrcagtggctcacgcctgtgatcccagcactttgggaggctgaggcgggtggatcatgaggtcaggcatttgagaccagcctggccaacatagtgaaactctgtctctactaaaa

SEQ ID NO: 948640 - DNA, 641 bp, Homo sapiens
agatttattaccataaacatttctcttactactacttttgctgcatctcataagttttggtgaattgtgtttcagttttagttggtctcaagatgttttttaatttcccattggatttmtttttgactctggttgttcaagaatgtgttgtcaattgcaacgtatttgtgaatcttccagtctttcttctgctatcaatctctagtttcattccatatgtattagaaaatttacttggtatgattactatcttcttaaatgtgttaaaacatattttgttgccaaatgtgatatattctaaataatgttctatgtgcatttgaaaagaatgtgtattctgctgttgttgggtggcatgttctctatatgtgtctttggttaatttgatctagagttttgttcaagttaaatgttacttttttgtttttctgtctagttgttttatccattattaagaatggaatattgaaatatgctactactgttgtcttgctatttctttttttagttttatcaatgtttgctttatatatttttgtgctctgatgttggatgcatgtatatttataatagttatatctttcttgtgaattggcccatttatcattatataatgttcttcttgtctcttgtgacatgtt

SEQ ID NO: 948641 - DNA, 581 bp, Homo sapiens
aaattatgagaattcactaaaacataccttcctsttttccttagaatcagggttttgacagagagaaagagtgagagacagatgaacagagagagagacagacagaaagagagaaagggagagaaaaagaaaaaagagagagagtaaaatagggcctagtagagaaaaagtcacaatccctttataatcagtcttggaagtaacatctcttttttcatattgcattcatttgaagtgagttacatggtctagtccatgctcaagaggaagggattccacaatgacaagatttggggattggttgggggccatttagaagctgtatatcatagtaacatcctttctggatggacagatgaatgaacgaattaattttaagatgtagcaagactagtgaaacaatgtcatgcttaccatgcattcttacaataatggttacatttgagtcataagcgtacataaatctttaatcctgaattttttataaaattgcagggtgtattttttgtttgtctgtagcaaaaaacaaagctcattacattattgatgttttaggtcttaaggcctttgtggtaatctaa

SEQ ID NO: 948642 - DNA, 597 bp, Homo sapiens
cacagagggagcatttagaccagacctagccagagaggaatcacccatcatagtagtcagagcttgagttccagcaagcctcgccactgcgggccaaagggctctggggtcataaataaacttaaaaggctgtctaggccacaagaactgcaactattagcaagtactagtgctgagctgggctcagagccagtgaatttgacaccagctacggttgctaaaggagcacttatgccacccctcccccaaccctagtttgcacagttcgaggctcaaaaagagatcccttccatccacttgaggagaggagaggaaagagtaaggagaactttgtcttgcagtttggataccagttcaaaaagagtaggatagggcgctgttagagttgtgagtcccacgttctagatcctagctctcggaaaacatttctagatacaagttgcttcagaagggaacccactaccttgaagggaaggacacagtcctggaaggatccactacctgctractaaagagcctttggtccctgaataatcactagtgatactcaggtactccataagccttgggtgagactctgaaatgtgctggtttcag

SEQ ID NO: 948643 - DNA, 597 bp, Homo sapiens
cacagagggagcatttagaccagacctagccagagaggaatcacccatcatagtagtcagagcttgagttccagcaagcctcgccactgcgggccaaagggctctggggtcataaataaacttaaaaggctgtctaggccacaagaactgcaactattagcaagtactagtgctgagctgggctcagagccagtgaatttgacaccagctacggttgctaaaggagcacttatgccacccctcccccaaccctagtttgcacagttcgaggctcaaaaagagatcccttccatccacttgaggagaggagaggaaagagtaaggagaactttgtcttgcagtttggataccagttcaaaaagagtaggatagggcgctgttagagttgtgagtcccacgttctagatcctagctctcggaaaacatttctagatacaagttgcttcagaagggaacccactaccttgaagggaaggacacagtcctggaaggatccactacctgctgastaaagagcctttggtccctgaataatcactagtgatactcaggtactccataagccttgggtgagactctgaaatgtgctggtttcag

SEQ ID NO: 948644 - DNA, 582 bp, Homo sapiens
ttagagagcagacaaccggtctgactagaatttgccaggctggaatttcctaatcctagcaagcgtgagggcactgcaggagacaagggcatatttcatcccttatattcaactgcataagacagacactcccagagttgccgtcaacagacctacccctgagaatgcattccttccccagggttattccttgctggtaaaggaattcagcgatatttcttctattcactttctgcaagaagagaaatatgagtctgttctgcccggacccgcaggcagtcagaccttatggttatctcccttgtttcctgaaaatcgctgctaacctgttcttttttaggatgcccagatttcatattgttcaaacacacatgttttacaaacaatgtgtgcagttaaggcaatcatcacagggtcctgaggcaacatacatcctcagttgacaaagatgacaggattaagagattaaagacaggcataggaaattataagactgttgattgsggaagtgataaatgtccatgaaatcttcacaatttatgttcagagattgcagtaaagacaggcataagaaattataaa

SEQ ID NO: 948645 - DNA, 568 bp, Homo sapiens
agaggagcacattggtggaggaacatacaggtggttggacatcgagaggagggatcgaggtaagaagatacaagtagctggacatcgagaggacactgaagggagcatgtgtggaagaacacacgacaggcaccagcacaccggcaggccattcaccagcagaatctggcagagtttggccaggacagcagtcagaggagagcccaactccaggggaaaccatctcccttctggctccccatctgctgtagagctactttcactcaataaaaccttgcactcattctccaagcccgtgtgtgatctgattcttctggtacaccaaatcaagaacctggaatacagaaagccttctgtcctagcgacaaggtagagggtctgactgagctggttaacacaagctggctatagacagtaaaactaaaagagcacatggtagcacccacccactggggcttcaggagctgtaaacatccacccccagatgctgctgkgggcttagagccccacaacctgcccatctgtgtgctcctctagaggcttgagcaacaggacactgaaggagtga

SEQ ID NO: 948646 - DNA, 635 bp, Homo sapiens
ggataaatttattactcaggcaactcctgacatcaggaggaagttgcagaagtgggccctgggaccagatagtacattagaggacctcctgaaagtggccacctcggctttmtacaatagggacaaggagacacaagaaaaagacaggagctttaatggccactgtgcaagcccacaaacccccaaattcccagggtactcctattaactgctaaagatatggcaagaatagttatctctcttctaaagtttaactgctcccatacaaggtttaatttatttcactagggtgagacagctcagggtacaatgttgttagtatattttacttcttatctctgtaatctttggtactaaattctttcctcatataatacacatgcaacttaaccttatgacgcaaacttaaccttatgaaactttttttctctcatgcctaagaagcatcaaactccgaaaaggcaacccaagcctcggacgatggcccccctttgctaggaacccttagatagacctctgggaggagtctgactgctgttttccccaaaataatgccccctgtcaatagcaagcagctaagaccagtcattgtccatagtctaacagcaattagatatactttatcagagggaaga

SEQ ID NO: 948647 - DNA, 617 bp, Homo sapiens
ggccccatccaaagccctgggagtggtcaagcagtgggtccacataataatgttatttatacattttgtgaaagtatcttaactgcaaacattttataatgytaggtttttttttcaactttagctatcactccattacattttccatgatgttaggtgtcaagtgtctttggaatggtcagggacatttttggcaatcagctaaggggtcatcaagttggaagtacatttagttggtctccagaaatatatcgatatgatttgcagtcccctctatgagtagttactgtggccatttggaagcaggaatggcttcagataataaactaatgacctctttttttattcatcacttatttaaaattgtgcatttttttttcttcaaaattatactgcaaatcatttcaggctctacaaaacctgtctagtattctttgttctacactatgttaaaaatagcttcagtgaggtccttctccttatctgttcttaaatctaacaaattagatatagaaaacaatcccttaattattatatattggataaccctatttttacattactatcctaagcatcatggctacaaagaggaattcaacaagattccttcctttaag

SEQ ID NO: 948648 - DNA, 535 bp, Homo sapiens
gtttgtgtttaagctaagagttattacaaaaaagtctaaaagctacataattaaaatgtatataaagtaagaaagtcacaataaattaaggttgatttattatcraagaaatacattttaataataaatttagtgtactctaagtgttaaatgtttacaaagtgatgtcctaggccttcacattcactcaccacttaccctctcactcacccagagcaacttccagtcctgcaagcttcatttgtgttgtgtcctatattccattttttatcttttacaccatatttttactgtaattttgctgcaattacctacagcattcagtaaagtaacatgctgtacagtgttgtagcctaggagtaataggcaacaccacatggcccaggtacagtaagctgcatcatctaggtttgggtaagtacactctatgaggctcacacaacaaaatctcctaacaacccatctctcagaacatatcttccttattaagcaatgcatggtggaagattgatttgtaaaactcttcccaaccact

SEQ ID NO: 948649 - DNA, 599 bp, Homo sapiens
atcccagcagttggaacttcagttcctacaagcttcaccactgtgagataaaattctctggggccctaaataaacttggaaggtagtctagaccacaaagattgcaactcctaggtgagtcctagtgctgaactaagcccagagacaacgcactggaatgacaggtgacctactgagacaccagtctgaaaagctaaaaaggagtgctggcatcaactcttccctaactctgggctgcacagcccatggctccgaaagagacccgttccttctgcttaaggaggaaaaagagaatagtggggaggactttgtcttgtttcttggatattagcccagctacagcaacccagggtaactgtcagagtcatgaggtcccttttccaagcccagctcctagacaacatgtctagacacaccctggatcagaagggaagctgctgccttgaagtaaaggactcagtcctcacaggattctcacctgctaactaaagagctctagggccctgaataaccagcagtgacaaccaggcactacgttgagggcgtttggygaaactctgaaacttgctggattcaggtcagactcagcacattcccag

SEQ ID NO: 948650 - DNA, 508 bp, Homo sapiens
aggattctcacctgctaactaaagagctctagggccctgaataaccagcagtgacaaccaggcactacgttgagggcgtttggcgaaactctgaaacttgctggattcaggtcagactcagcacattcccagttgtttcgactgcaaggtgagattccttctacttgagaaaagtggagaccagaataaagggggctttgtcttgcaccttaggtaccagctcaaccacagagggttaaagcagtaagcaggctctggaggttcctgattccagaatgtggctcttggacagcatttctggacctgccctaggggagcccactatcctgatggctgagtcccaggccaggtagcattcaccacaagttgactgaagaatccctgagccataaggtagcattggtggtagtctggcagtactcgctgtgggcctgtgatgacagtgaccatgagrcgagggtcacctgccattcaaaagggaagaaaaggatagaaaggactatgtatt

SEQ ID NO: 948651 - DNA, 613 bp, Homo sapiens
atttaaatctttttggatttattaagaattattttggggcccaacatatgatctatcatggaggatgttctgtgtgtgcttcaggaaaatgtacattctgttgctgttgatagattgttctgtatacatacatctgtcaggttcatttggtctaaagtactttaagtccagtgtttccttattaattctctatctggatattatgtcaactgttgaaagtggagtattgatattccctcccattattgtattgctgtctatttctccctgcacatctattaatacttgctttatatatttaggtgttccagtgttgggagaatatatagttacaatttttatatccttttgataaattgacacctctttcattacataacaagcatatttgtctctttttacagtttttgacttaaagtctattttatgtgatagaagtataaccacttctgctctcttttggtttccatcagcatagaatatattgtttttaatccttcacttttagtctaytgtattagaaaataaactgtaactgaaagtttccgacataccatggagacattttctccactgtcttggtgattagcatttggctcctcattacttatga

SEQ ID NO: 948652 - DNA, 646 bp, Homo sapiens
cctctctgttcagacaattctatcataaccttcacaagagaatttaaaacctgttgtgtaactgtagcytttacagtagaatcttctataaagcctatcacaaaggatagatttctaatcattgcttcttttattccaaactatggaaaaaggacctaacaaatgatgcccttctagaagagtgaaggcctcttggcaatgtgctctttaacccataatatgagtttagaggagtgaaccaatgttctgtttctgattgattataatatataaggttatccatatataggctggctgaaaactccttcacaaataaaagtctaccccataagcccacataacagacacgtttttccacttctattgttcatagaggcataagcaaggaaaaaaaattcaaagataagtctcttaatagtagagaagtcttgacccatgatcttgggaaaagctgttcagatcaaggatgccatcttttctggggagtaactttcctgattagctttaccttaagggtttcagggggtgtacagtcccaagagtgtgatgggacactgctcaattgtgagattatgaacccaaggtttaaggtcctgaagttttgccgtattgtggatatcaaggacagtctttctctgatgttctc

SEQ ID NO: 948653 - DNA, 690 bp, Homo sapiens
tagggaagcgtcacgcaacagatgccaggcgcaggatccaaaatttatttctcatggttatgaaagctggggagttcaagatcaaggcctatggcaaggctgaaatgagatgagcagaagaatgtcctgggctagactccagagcctggggagtaatttctggaatgctgcagtggtcagttttaggtgtcaccttggctaggctataatccccacactatgatctgaatgtttatgggcccctcaaattcacatgttaaaatcttcacccccaaggtgatggtattaggagtgggaactttgggaggtaactaggtcatgagggctttgactaggtcataagagattagtgcccttataaaagaatccccagagacacccttcaccccttccatcatgtgaggttgtattggaaagatggccatctaggaaagggacccttaccagacaccgaatctgccagggccttgattttgaacttcccagcttgtagaactgtgaaaaataaatttctgtgacttgtgacctacccagcttgtagtattttgttatagcagcccgaatggactaagatacccccgtgattcaatcaaacrctaactgaggtgtgactgtgaagatattttgtacatgtgattcacttgaaaaatcatttcagagagaagtaaaggttatcctaaagaacctggt

SEQ ID NO: 948654 - DNA, 639 bp, Homo sapiens
cctaaaacaaatacatctaaaacagagcacttattcttccccaaactgctcacttgatgttctttccccatttcaataagtcgtacctttattgacccagttgctcttgaagaagcccagtagtcatcattttgacccctcacacaagccattaatagatcatatcatttctgctctgaaatagatttttgaatctgccattttcactgccactatctcagtccaagccaccatcatgtctcatgtagatttctgcaataaccagctaactggagaccttgtatctatttgccctgtgtccagtaatttctccattcaaccatcagagagattcttaaaaatatatatatcaaactgtgatgcattccagtaaaacccttcagtggtttaccattgcatttagaatagaaatttagaatccttaacatggcctacatgacctgcatgatctgaccctcactcatttctccaacttcatactgttctaacattttctttcactgcactagccttaaggacttgctgtctgtttctcaaacatctaagctatttttgattcagggccttcagatgtattgttccctgctacctggaatagycttcctttagactttccctatggaagtactaattatccta

SEQ ID NO: 948655 - DNA, 616 bp, Homo sapiens
caggaaggaacacacctggtgggtacaaygagcagtaaggtggccaggaatatccgagagggagactgggaggcgatgcagtcagagacacgatggggaccttgtgagcattgaaatgactttgaccttcaccctgagtgaaacgggcagccattggaaggttttgttttattttttctgagactgagtctcaacctattgcccaggctggagtgcagtggtgtgatctcggctcactgcaacctccacctcccaggttcaggagattctcatgcctcagcctcctgagtagctgggattacaggcgcccgccaccacgcctggctaatttttgtatttttagtagagatggggtttcagcatgttgatcaggctggtctgaaactcctgacctcaagtgatctgcccgcctcggcctcctaaagagctgagattacaggcatgagccaccacacccagcccattggagggttttaaacagagaggtgatgtgatctgaattaatatctagtaaagatcagcccaatcatttaagtatttgagcctttttcagaaatcatgcactgaaatccggaaagagacatagctgccctcctttccaagggtccccagcagg

SEQ ID NO: 948656 - DNA, 575 bp, Homo sapiens
cgggtatagggtgaggtgctgaagggacattgtgagaagtgacctagaaggcaagaggtgagccttctgtcacgcccgcataagggccacttgagggctccttggtcaagcggtaacggcagtgtctgggaagacacccgttacttagcagaccgcaaaagggagtctcatttccttggaggagtcagggaacactctgctccaccagcttcttgtggaagcctggatattacgcaggcctgcccgcagtcatccggaggcctaaatcccctccctgtggtgctgtgcttcagtggtcacactccttgtccacttttatgcttctcccgtactcttggttcctctttgaagttcgtagtagatagcggtagaaggaatagtgaaagtcttgaagtctttgatctttcttataagtgcagagaagaaaacgctgacgtatgctgccttccctctctgtttcggctacctaaaaggaaagggccccctatcctgtaatcacgtgaattgcttcaccttttcaatcacttagaagattcaccctccttaccmtgcccccttgtcttgtatgcaataaa

SEQ ID NO: 948657 - DNA, 514 bp, Homo sapiens
  misc_feature 479, 480, 481, 482, 483, 484, 485, 486, 487, 488, 489, 490,491, 492, 493, 494, 495, 496, 497, 498, 499, 500, 501, 502,503, 504, 505, 506, 507, 508, 509, 510, 511, 512, 513, 514: n = A,T,C or G
tcaaaaaaaaaaagtctgaaagagcacaaataaagaatctaaagtcacacctcaaggaactagagaaacaagaacaaaccaaatccaaacccagcagcagaaaaamaataatcaacgtcagagcagaactaaatgaaattgaaacacacacacacacacacaatacaaaagataaatgaaacaaaaagctggttctttgaaaagataaacaaaattgatagaccattagtgagattaaccaagaagagagaagattgaaataagctcaataagaaatgaaatggaagatattacaatgaacatcacagaaatacaagataattcaaggctacaatgaacacctttatgcatgcaaactagaaaatctagaggagatggataaattcctggaaatatacaagcctcctagactaaatcaggaaaaaataaaaactctgaatagaccaataacaagcagtgagattgaaatggtacatttnnnnnnnnnnnnnnnnnnnnnnnnnnnnnnnnnnnn

SEQ ID NO: 948658 - DNA, 654 bp, Homo sapiens
gaccccaacccaagcacccccttctgcagggcccagctcatctgcctcttcctccctttgctctcctctcttcgcctctgtgggaaatccgggactcagcagtaaccctcaggaagcagggccgaggtgccrtttaataggaggcttcgtcacaatgaaactcttagaaagacttgactacgatgatgaccgtggcgtggctgtgaacactgtcagctcccacagttgccgcagcaaaaaatgtccatagacagggtgggggcccggggtcatctgctgtcctgctcagcccacagcatgcatggaaaatctgaggtgccacacctgacacccagaccagaacatgcctccctccagggtgacctgccatgtcctgcattgctggagggacaggggcagcctgtgaggatctggggccaggagatgaatcccattaacccagaggaaaacaagcaggacctgagcaccctccccattgaagctgacctgcgcagaggggcctgggcccaccccacacactggggcggaatgtgtgcaggccccagtctctgtgggtgttctgctagctggggcttccagtgctcaccccacaaccaaagtgagccacagcctccagagcccccaaaggagatcctgcccacaagcccagccccc

SEQ ID NO: 948659 - DNA, 654 bp, Homo sapiens
gaccccaacccaagcacccccttctgcagggcccagctcatctgcctcttcctccctttgctctcctctcttcgcctctgtgggaaatccgggactcagcagtaaccctcaggaagcagggccgaggtgccgtttaataggaggcttcgtcacaatgaaactcttagaaagacttgactacgatgatgaccgtggcgtggctgtgaacactgtcagctcccacagttgccgcagcaaaaaatgtccatagacagggtgggggcccggggtcatctgctgtcctgctcagcccacagcatgcatggaaaatctgaggtgccacacctgacacccagaccagaacatgcctccctccagggtgacctgccatgtcctgcattgctggagggacaggggcagcctgtgaggatctggggccaggagatgaatcccattaacccagaggaaaacaagcaggacctgagcaccctccccattgaagctgacctgcgcagaggggcctgggcccaccccacacactggggcggratgtgtgcaggccccagtctctgtgggtgttctgctagctggggcttccagtgctcaccccacaaccaaagtgagccacagcctccagagcccccaaaggagatcctgcccacaagcccagccccc

SEQ ID NO: 948660 - DNA, 709 bp, Homo sapiens
cctgtaaaatgaaaaacaagtcagttacttccaagacaaaatgggggtacaggcattagatacatgctcccatttcagttgggagaaatgggccagaataaaggggctacaggtcacatgcaagcccaaactccagtggggcagtcatgaaatcttaaagcttcaaaataatctcctttgactccattcctcacattcagggcatgcttatgcaaagtgggggctcccacaaccttgggaagctctcaccctgtggctttgcagctctgatcccatggctgctctcatgggctttgcagagttcagccctcctggctgctctcattgagtgcctgcagcttttccaggtgcacagtgcaagctgttaatagatctaccattctggggtctgaaggatggtggccctcttctcacaaccccattagtcactgtctccggtggggactctgtgtgggggttccaaccccacatttcccttctgcactgccctagcagaggctctccatgagggctttgcccctggcacagacttctggctggacatccagtcatttctataaatcctctgagatctaggcagaggatcacaaagctgractcttctcttctgcacacccataggcccaacatcatgtagaagccaccaatgattggggctttctgaagcaatggcctgagctgtacattggacttttttagccacagctag

SEQ ID NO: 948661 - DNA, 592 bp, Homo sapiens
agttaatgggtgtagcacacaaacatggcacatatatacatatgtaacaaacctgcacgttgtgcacatgtaccctaaaacttaaagtataataaaaaawttaaaaaaaaagaaacacctgctttttcctgttttccatttgctttgttgatttttctccatttttttactttgagcctgtggatgtcactgcatgtgagatgggtctcttgaagacagcatacatttgggtcttgcttctttatccaacttggcaattctgtgccctttaattggggcatttagtccatttacattcaagattaatattgatatgtgcatatttcatcctgttatcatgttgttagctgctcaatatgcagatttgattgtatagttgatttatagtggcaatcgttatgtacttaagtgtgtttttgtggtggtcagtaacattcttccattatcatatttagcaatcccttaaggacctcttgtaagggaaatatagtggtgatgaatacccttagcatttgcttgtctgaaaaggatcttatttctccttcacttgtgaagcttagtttggctagatatgaaattcttgcttggaatt

SEQ ID NO: 948662 - DNA, 652 bp, Homo sapiens
ttgcagaaggaccctgtttcccatttcttccccctgccttttcacccaataaaacccagctttattcaccctttaagccatctccaagcctaaattttcctggccgtgggatggacaagaacccagtctttagctgaacgaaggaaaagtcctgcaacattcttggcatgcaacgtgggggctcttgaagagatgtatcagaattccacaatgcatatggttcttgggcaagtcactgaaatgtgggtcagatgttgaaagctgctgtactatgatgtgaaaataaagcccaccgcagctcaacaaggcctactgcctctagactccatctctgtgggcagggcataactgaacaaaaggcagcagacaacttctgcagacttaaacgtctgaagagagcagtggttctcccagcacggcatttgagctctgagaacggacagactgcctcctcaagtgggtccctgacccccatgtagcctaactgggagacacctcccagtaggggctgacagacacctcatataggcagctacccctctgggacgaagcttcyagaggaaggatcaggcagcaatatttgctgttctgcagcctccgctggtgatacccaggcaaagagggtctggagtggagctccaacaaactccaa

SEQ ID NO: 948663 - DNA, 483 bp, Homo sapiens
gagaggccccgctgcaggcaccctgctgctctaggcctgggaagtgcaggagaggygggtacagctttcagcctaattgagctctcacctgaaaagaaacagcagcgttggcgccaggtgtcaaggcaacgcatgcagcagactcacgccttcgatgatcaaaatgcatcttccgggaactgcctggaatgaagggaggtttgaggtgacatctgaatgactttcaaggcattttctgtccggtcgtcgccttctgtctgtctcagggtgcagcagaactcatcactgcactttcccgactcttccaaagatctcgaggttgctggagaattgtgctttttaaagaaagtgcctcttaattgtccttgacaaatacataacccaaccacagggatgtttatctctggccaaggcagctcatctgtaagtcattctgtcagttcgggctgagccagtttctgactttcagacaactgcctttcc

SEQ ID NO: 948664 - DNA, 660 bp, Homo sapiens
actactgtaaatcctagctaaagcaatcagacaagagaaataaataaggggcattcaaattataagggaagaattgaaattatctctatttgctagtgatatgatcttatatttggaaaaacctaaaggctccacaagaaaattattagatctgacaaactaattcagtaaagttgcaggatacaaaaccaatatacaaaaatcagtatcatttatatatgccaacactgaacaatgtgaaaaagaaatttaaaaagtagtcccatttacaatagccacacataaatatctaggaattagccaaagaaatgaaagatttctatattaaaactataaaacactgatgtagaaaattgaagaggaaaccaaaaatatggaaagatatttcatgttcatggatcgcaagagtgaatatagttaaaatgtccatactgtacaaggtaatccacagattcaatgcaatgtctatcaatataccaatgacattcttcacataaataaagaaaaacaatcctacaatttatatggaatcatagaagacccagaatagccaaagttatcctaagcaaaaagaataaaattgaagaaatcacattacrtgactccaaattatataacagagctgtagtaaccaaaatagcattgtactgacataaaaac

SEQ ID NO: 948665 - DNA, 602 bp, Homo sapiens
gctagctaactccctggagtctcttttataagagtgctaatcccattcttgtggacagagccctaatgacctaattaccttccaaaggccccaccttctaatactttcaccctggtgatgagttttaacgtgaacttttggggggatgcaaacattcggaccatgcctatccttctaaggaagccatgagaagacagagaaacacacacagattgaagcaggtcatgtagtgatggaagcagagactagagttatgtatccacaagccaaggaacaccaaaaattgctgacaaccaccggaacttaagagacaaatgagacatattctctctccaagtttacaaaagaaaccaattgtattagtctgttttcatactgctatgaagacctgccttcatagactgggtaattaataagaaaagaagtttaattgactcacatttcagcatggctggagtggccttaggaaacttacaatcatagtggaaggcgaaggggaaacaaggyaccttcttcacaaggcagcaggaaggagaaaagctgagcaaagggaaaagccccttataaaaccatgagaccacaatgagaactcactcactatc

SEQ ID NO: 948666 - DNA, 818 bp, Homo sapiens
tcccagcactggaaatggtttgaaacagagagcagtggtaatggttaagggttaccaccaaaaggatgttgaggaaggtctgaattttaggagtgggaggacagccagagactaaatggaatgattcttcaaaattatataaaattattatgctatgtgaaaatattctaacagatttttaaaaactcaaatgtttcccaactccttttacaatgctagcgtaactctgacatcaaatctgatggtcataataaatgcaaaggggaagggataacacacaaaagttatgagcttaactattttgaagtgaacagttcagtagcgtgaagtgcattcacattgttgtgcaaccaatttccagaactcttttcaatttgcaatgttgaaactctgtacccatggaacaactccccactctgccttctccccagcccctgacaaccaccattctacttcctgtccctatgaatttgaatatactaggtatctcatgtaagtagaatcacatagcatttgtctttttataactggcttatttcatttagcataatgttctcaaggttcatccatattgtagcatgtgtcagaattgtgttcctttttaaggctgaatagtatgatattgtatgtctataccatattttgtttatccatttatctttcaatttgttgcttccaccttttggatattgtgaataatcatgctatgaacatgggtgtacaaatatctcttcaagactctgctcagttcttttggatatatacccagagtggaactgtcagtcaaatgstaattctatttttaattttttgaggga

SEQ ID NO: 948667 - DNA, 574 bp, Homo sapiens
aaaaaaataaataaataaaaataaaaaataaataaatatagacacaaaaaccctcaacaaaatactaacaaaccaaatccagtggctataaaaaacaattacataccatgaccaaatgaaatttatcccagggatgcaagattggattaacatacaaaagtcaatcaatgcactacaccacaccaatagaataaaagacaaaatccacatgatcatctcaacagacacaaaaaaagcatttgaaaataccaacatcctttcatgataaaaaatcacttaacaaactagtaatagaaaggaatttcctcaacctgataaaaagtatctaaaaaaaatccacagctagcatcaatacatcctgtaacaacatacagagcaaggctgaaggtttttatcctaatgtcaggaataagactagaatgtctactcttaccacttctattcaacattgcactggctattctagccaggrcaattaggcctagaaaagaaatttttaaaaagtatccagattggaaagaaaaaataaaactatccctatttgcagatgacataatcttgtaaatagaaaatt

SEQ ID NO: 948668 - DNA, 621 bp, Homo sapiens
atgaaccactgggctttgaaaatacacatagaaaacaaacacaaagaaacactakagaagtgtgtgcgtgcgtgtgtgtgtgtgtgtgtgtgtttaaaatcactctggtgattcctcaatcactgggccatggtaattatccaggaaggtgtttgaagatatgctccgctgaaggggagttataacaacctttagaaactgtttaagccccaggaactaaaatcagcctgatagtggctgcacacgataggaagaaatcatcattgaaattagacccaaggaagagcacatgaagtgtgtttgccatcagccacgagcatcagaacacttcaggccccggtagcaggcgttttacctgcgatgaatagcttgctctgaggcactcctgttgagttggtgtctctttcccagtattgtgtggcattattgccccacgttcacaatgggctgtcagatttgccagagcagaggccaatttctgaagcatcctaatcagcctagaaataatagtccagttacctgattttttacacagttctttaccttttcccagcaccaaggagttttgtagctaacattattcacatcaaacaactgtggaggttaaagttatctcagatt

SEQ ID NO: 948669 - DNA, 628 bp, Homo sapiens
tatctcccaccaggtccctcccacaacatgtgrggattatgggagctacaaggtgagatttgggtggggacaaagagccacaccataacagacctggaagcccctgtttcaagttgttccacctttctggatcaaagcagtgtatatcttcaatgtatttgattgatgtctaatgtctccctaaaatggataaaaccaagctgtgccctgaccagcctgggcacatgttctccacctcctgaggctgtgtcatgggccatgatcactcatatctggctcagaataaatctcttcaaatattttacagaggttgactcttttcttcaacaaaactaggatgcaaggagactaagacacgtgcccgagacccttcagccagggagagcccaagtcgcatgaaaacctgccagacctggccctggggtctgtgtcctggaccatgaaactgccccgcctcactccatgacagactgaatgaccagggagggctttctggggaacatgaggctgggctgaaccttcaacaagtgcgtgtgaagcacctactatgtgttgatccagggtgaatgaccagggagggctttctaggggacatgaggctgggctgaaccttcagcaagtgtgtgtg

SEQ ID NO: 948670 - DNA, 519 bp, Homo sapiens
ccagagtgatggcaggtcaggggcaggcatgagaacaccccagccccagacctggtggatcccgtcatccccccatttcgcagttggggaaactgaggcacacagcaatggcaggcggagagtgacactgcaggtttctagtcccaatgtccatgctgctaatgactgccctgtggcctggctggatcccccaacttctctgagctctggtctcatctgtggagtggggtgatgggcaccactgtcagaagatcactggggattacggaagaagacgcgtactgtgtgtgtgcccagcccagcttagaccacagggctgaccgggtctccccccgtcatcagggcttgggtctgatgcccaaggtgcctgtgtccatgactgtggggccaccctggggtgggcctcagcactctgaacccagccctgcccttgatcattgrctacctcatgccctgtgcccagtcccaggccaagggctttggaaaacatcccagggagctccccactccctcattcaa

SEQ ID NO: 948671 - DNA, 519 bp, Homo sapiens
ccagagtgatggcaggtcaggggcaggcatgagaacaccccagccccagacctggtggatcccgtcatccccccatttcgcagttggggaaactgaggcacacagcaatggcaggcggagagtgacactgcaggtttctagtcccaatgtccatgctgctaatgactgccctgtggcctggctggatcccccaacttctctgagctctggtctcatctgtggagtggggtgatgggcaccactgtcagaagatcactggggattacggaagaagacgcgtactgtgtgtgtgcccagcccagcttagaccacagggctgaccgggtctccccccgtcatcagggcttgggtctgatgcccaaggtgcctgtgtccatgactgtggggccaccctggggtgggcctcagcactctgaacccagccctgcccttgatcattggcyacctcatgccctgtgcccagtcccaggccaagggctttggaaaacatcccagggagctccccactccctcattcaa

SEQ ID NO: 948672 - DNA, 769 bp, Homo sapiens
gagggatatatgacaatgttgctggctctgaagatggaagaagaaggtcatgagcttaagatatcctctaaaagctgaaaaacgcaaggaaatagattcacccttaaatcttccagaagagaaygcagccctgcaggtgacttattttttatgcaagtgaaatcatgtgggatttctaacctacagaactgtaaaacaatacatttgtgttaagtttgtggtaatttattatggcaacaatagaaaactaatacagaatttttttttttttttgagatggagtctcactctgtcacccaggctggagtgcagtggcgcaatctcggctcactgaaagctccgcctcccgggttcacaccattctcctgcctcagcctcccaagtagctggcattacaggtgcccgccaccacgcctggctaattttttgtatttttagtagagacagggtttcaccatgttaaccaggatggtctcactctcctgagctcatgatccacctgcctcggcctcccaaagtgctgggattacaggcgtgagccaccacacccggccactaatacagatttttatcaaagtcccagttgaaattttttgaggattttgtaatcttagtctaaaatctataatggctacaaaaaattaattcagcattgaaaaagaagagtgaagagaaggagtcattcattacctgtattaacatagtataaagccatagtaataactgtatgaaatgcatgtaaaaacagacaaatagaccaataagatgg

SEQ ID NO: 948673 - DNA, 594 bp, Homo sapiens
atagtcccagctgctcggtaggctgagacaggagaattgcttgaacccagaaggcagaggttgcagtgagccaagaytgcgccactgcactctagcctgggcgacacagcaagactcaaaaaaaaaaaaaactcaagaggaaaaaaaaatcacttgataaaaagaatgtgaatggactgactttcataagatgacaaaagaaaccaagatgacaaaagaaaaatgcttttagaattccaaagaaaaatgatgcccaacaaagatctgtatacccactctagaatgtttttaaaagatcacttttttaaaagtatattaaaaataatgtcaataactgagctacctcaacagttatctctgaaatatctaggcccccagaacctaaagccatgtttcctccaggccagatcctcagtctgtagcatcagaataccatacatttcagatatactggcattgtttggccataaaactacacagttctccttatacttttaaaaccagctaccagaaccaatttgctggtcctccacatcacaatcctctcaataccttccatcccctttagagagcttactttcaatatttgaatct

SEQ ID NO: 948674 - DNA, 600 bp, Homo sapiens
aacctcaagtaagcttactgttgttaccctaatgaaataccattttaagtaagttatatagaaaaaatgcataaatatattctccttacaaaaatgaaaaactttgatgtcatcttaagataatttactgaggccgagcgcagtggctcacacccgtaatcccagcactttgggaggctgaggtgggcggatcatgaggtcgggaaatcgagaccatcctgtctaacacggtgaaaccctgtctctactaaaaatacaaaaaaaattagctgggcgtggtggcaggcacctgtagtcccagctacttgggaggctgaggcagcagaatggggtgaagccgggaggcggagcttgcagtgagcagagattgcaccactgcactccagcctgggtgacagagtgagactccgtctcaaaaaaaaaaagaagataatttactaaatctaaactccttttaaaaattgctgaggactgcccgggcacggtggctcatgcctgcaatcsgagcactttgggaggctgaagtaggcagatcacctgaggtcaggagttcgagaccagcctggccaacatggtgaaaccctctctctactaaaaata

SEQ ID NO: 948675 - DNA, 654 bp, Homo sapiens
tttatattcctctgggtatatacccagtaaygtgattgctgggttgaatggtagttctgcatttagctctttgaggaattgccatactgctttccacaatgttccctttttctgcaacctcgccagcatctgttattttttgacttttcagtaattgacattcagactagtgtgtgatgatatctcattgcggttttgctttgcatttctctaatgattgatgatattgagctttctttttcatatgcttgttggccatatatatgtcttcttttgaaaagtgtctgttcatatccttattcaacttatttttaatgtagttattgataatggtgggcttgattccatctcttcaattttttttttaaattttgtcatgtgttgtttgtttttgtctttctcttgtcctgaatttttggtgtaaattttttgttgtttttttaaaaaaattattttattctcattgacgtttttaactacggctctatgtttaattttttaattgttgctctagtattacaatatatattttcaaattaacactcacacctctgaattaatactatatgcaattttcaatctaaaacacttgcatcctggacacaaatatttatatttttcccatatgcccatatactcactgtctactccaaa

SEQ ID NO: 948676 - DNA, 645 bp, Homo sapiens
cctgttgctccacatccttctccagcatttactattttcagtgttttggattttgctgattctaataactgttgttttaatttacaaatccttaatgatatatgatgtagagcatgttttcatgtgcttatttgccacataccatttttggtaaggttttcatttatgtcttttgcccattttttattcaacttgttcattttcttattgttgagtgtaattggttagatctttttcttattatttattttcctatagttgagttttaaaggttaaaaatgtcagttatttccaaaatgagctatagtttcaatgaaatctcaattaaaacccagcaaattatttaatgtacattgacaaacggattcaaatttatatgggaaggaaaaaaatacagagtagccaacataatattaaaagagaggaataaagtcacagtgttacatgatccttggggtatagtttttctggccagaaaggtgcctctgaagccaggggcgcctttggctgcattttgccttggatctgcaaggcttgttttgcccactcagcytatcaagctatgctcagctcaccctagaggcctcagtctcacacctgccaagggagagtcaagtatggaacaaagaggggtgtgtgagtgaa

SEQ ID NO: 948677 - DNA, 634 bp, Homo sapiens
cgcagtgcctcacacctgtaatcccagcactttgggaagacaaagcgggcagatcacctgaggtcaagagtttgagaccagcctgaccaacatggagaaacccagtctctactaaaaatacaaaattagccggacatggtggcgcatgcctataatcccagctactcgggaggctgaggcagaagaatcgcttgaacccaggaggcagaggttgcagtgagctgagatcgcgccattgcaatctggcctggacaacaagagcaaaactccatctcaaaaataaataaataagtaaaaataataatctcacagaaatggccagggacaatggctcacgtctgtaatcccaacactctgggaggtggaagcgggaggattgcttgagcccaggagttcaagaccagcctgggtaacatagagagatcaagtgtctaaaaaaaaaaaaaaaaaagcaataaacaacaacaataataataaaaaaaactcacagaacgctcatatcagatggggccactctgaccrcgatggagtaggacaaaaccaagctcgctccataatcttgcctgagcacagacaaaatcaaggtcactgtgcaaaccacaaaaatgaccacgcatcccctcaccggctcaga

SEQ ID NO: 948678 - DNA, 588 bp, Homo sapiens
cgtggccaggacctgggaggtggggtcccagagagcctgctgcagcagcgggtgtggtacgggatgagggagaggacacaaggaggacatgaggaacacgggaaggaggcagagacagagaagtcaaataaaaagagacagagagactggggtggtggctcatgcctgtaatcccagaactttgggaggccaaggtaggcagatcacctgaggtcaggagttcaagaccaacctggccaacatggtgaaaccccatctctactaaaaatacaaaaattagccgggcgtggtggctcacgcctgtaatcacaactacttgggaggctgaggcaggagaatcgctggaatccgggaggcggaggttgcagcgagctgagactgtgccattgcactccagcctgggtgacagagtgagattccgtctcaaaaagaaaaaataaaaatacaaaaatacaaaaattagccaggcatggtggcgggtgcctgtaatcccagctactkgggaggctggggaatcgcttgaacctgggaggcggagattgcagtgagccaagatcgcgccactgcactccagcctgggtgacagag

SEQ ID NO: 948679 - DNA, 549 bp, Homo sapiens
ctgtgtggcaggccctttgtggccaggttgggtcagatgtggcccctgccttcaaggagctgaaagtctgggggggggagagtggcagtcccccaaatgagtcattgtggtagaagcattctgccaggagtacatgcagggacacaggggtctagtccagtctgcaggggcagggaaacttctggaggagacactgccagagctgaatcctaaaagatgaggaggaggggctgggcgagagaggtcatggaggccagctatcaggatgggaatgccaggctgagcttagacttgacccacaggctcatggacagttttcaccatggatgtgcaagagtcagcctgttaagaaggtggccctggtggcaggtggagaagagaaggggaggttcagttgcaggcagcagggacagtgaggtggctgaaggaycagaactggtgcagggcttgtctatgcagagcgagaagcggaaccaagacctcctgcctcccagtaaaggtatctgggctggccagcaattccccaaagcacagtcctcaggacccgat

SEQ ID NO: 948680 - DNA, 630 bp, Homo sapiens
ctcacacctgtttgcccatttctaaaatggggaagggamggcacttgccccacagctgttgcagaatggtgagctagagcccgggaagcgcctacagcaggtctcggcctggagcagggcctcgcggctcagggtagtggctccctgtgcctgaggaggacaggcaccttggtttcttcaccatctcagtatccgcagggccgaggcatgtgtctggcacatgctagacgtcattgctagtggccctgcatgcaggacagaggaaggctgagccatggctgatccccgtaatccctttggaagggattctgaagcttcttgcagcttctgaagacaccacggcaagctgggaaccccctgatggggactccgggagcagggtagcagcatttagacggggctaagggagatggccacagagaccgcgttggcttccccgggagctgggatgcaagcacaaagaggaggtcaggcagtctcacctttcaacccaggcctgccatgtgctggggtggtgccaataaggactgcgtgcccgcacgtgactgataagtgaatggaggctctgagaagccaggtgtcctggcaaagccagccaggacagcagcaagagggaggagctcggtgcca

SEQ ID NO: 948681 - DNA, 570 bp, Homo sapiens
atctgcttgatagttttgaaaaggcctggtcctgtaaataatgatttggccatctgatgggtgctatcaatgcctaagtgaaaagtttggtgaagggttttaagtaattttcactggttagctgcaggcaggagtatttttccttctttggtggctagccttcctgaggggaggaaactatgtcctcgtgagtttccccatcctatttcttctgctgagtactggggcttggtttcccggaggggattaccccatgctaggggtccttctataagcatttctaatggagcgtcctgccttgaggctgtttttgctttaatatccgcttggtgattctcttttatttccctttcctttcctttctgatgaccccagcagtgtaagactgccacctctttaggtttctgtacagccaataataatctcctaatggcttcctgttgtttgataggtgttccctcagaagttaggaattccctttctctccatattgctgtgtgggcatggaggactaggtaagcatacttagagtcttctctcttttycttctcctaattttagtgcctgagt

SEQ ID NO: 948682 - DNA, 614 bp, Homo sapiens
ctaataccacaatagtacagaagttcataagagattacataaaaatatatgccaatgaattgaataaactaaaagaaattgtcaattttttagaaacaracaacctatcaagacagaatcatagaaaacagaaaatatgaacacaccaataatgagtaagaagatgaatcagtaatcaaaagtctcccatcaaaataaataaataaatgaatgaataataaataaaagagctcaggacctagtggttccactggggaaatctaccaaacattttaaatgagaattactaccaatttttctaaaactctcccccaaaattgaagaggatggaccactcctaaacttgttttacaaggtcagcattaccctgattcaaaagccagacaaggacaccataagaaaagaaaatacaggccaatatcgctgtcaaacaaagaagcaaaaatcttcaacaaaatgttagcaaaccttatttcacagcacattaaagtattatacatcccaaacatttatccttgggatgcaagaatggttcaacatatgcaaataaataaatgtgatacatcctgttaacagaatgaaaagagacaaaaaccacatgatcatctcaatag

SEQ ID NO: 948683 - DNA, 571 bp, Homo sapiens
gagaaattaccctcttttgctttttcttcaaccttggaaatgtagctatagagtaaccctagtacatagttccaatttataccagtaagaacataatgtaatatgactggtgtccttatatgaagaggaaattggacacagacatatagagaggtgagatgactgggagaatattgccatctacaatccaggagagagaccttgaatacattcttccctgctggctcccacaaaaagccaacattgcagacattttgacttccagcctccagaactgtaaaaaaataaatttcagatgtttaaatcatccaatctgtggtaacttgttaaggcagccctagcaaacaaatacacaccaatttattccatttttctttcctcgatcatgattttggcattttatctaaaaaactagtaccacaccttaatcagctaaatctttttcccctgttttatttttttctattattatttctattttttctttcagtaatttgaagatttcaatttgcataayaaaagcttccatcctggcttttgaactttaggtttctccagacatacttgtttt

SEQ ID NO: 948684 - DNA, 668 bp, Homo sapiens
gggggctgtaccctgcaaagccacagggrcagagctacccaagaccttgggagctttcctcttgtatcagcgtgacctggatctgagatctcataggagatcattctggagctttaaggtttaatgactgccctgttgaatttcagacttgtatgggacctgtagcccctttgttttggccaacttctcccacttggaatggatgtatttatccaatgcctgtacccccatagtatctaggaagtaactaacttcctttcaattttacaggctcatgggtggaagggatttgccttgtctaggatgagatgttgaacttagatttttgagttaatgggttaagactttgggggactgttggaagggcatgattctgttttgaaatgggaagacatgagatttggtagggtccagaggcaaaatgacatgatttggctgtgttcccactcaaatctcatcttgaattatatttccataatccctgcatgttgtcgaagggacccagtgggaggtaatttaatcatggggacagttaccctcctgctgttcttgtgatactgagtgagttctcatgagatcagattgttttataaagggcttttctatttttgctgagcacttctctttcctgccaccatgtgaagaaggacgtgtttgcttccttttct

SEQ ID NO: 948685 - DNA, 620 bp, Homo sapiens
ctgtctttatccatttatccactaattattttctataacttatttacttaaagttatacaaactgctggtaatttgttaaattccatagakgtttatcaaagtaattcttagtcaatctcctctggtagtgtttgaggctcaatttaaaattatttttgaaatatacacaccaacattccacaatatatctataactcttataaaatggttttccattttctatctttttgttttgtgtgtgtgtgtgtgtgtgtgtgtttgtgtgtgttcatttgtttttactgtgatcttcttccatttccctaattctgcaaactatttctgaagtatttaaaacaatactttttaacttgccacaaaataactttggtatagctaacgggggaatgtcaatataaatttgataggtagaagatcaaaggcagagtagattttttaaaaaaggacagacatgtgtgatatacacatagtaaaatcccgtggtttggaatcctgtgatctgagtttagttagattcgcggtcttttgtttttccctcttggaactcttatatccactacatgagtctattcttctctgtgttaatacttttataagaatactgatggccattttttta

SEQ ID NO: 948686 - DNA, 595 bp, Homo sapiens
ataagattgagaatcagcatgaccttrggttcctcatcaatgttggaagcttaaaggccatagagtaatgatttcaaaatcctgttggaaagttatttctgagcttcaaatctgtagccagacattattaaacacatatgagaataaagacatttcaggcactcacatttcacaaataatttgtcttccatatacacatgctttggaaactattatcaggatatattccaccaaaatgagggagtgaataaagagaacaacttggacattaaatgttggagcaaagaaaactggaatcatcataaaagagcccagggagatctcacgtcagtagctgagttgcaggcctagaaaacagcagtatatttggaagaccagcaggaatgtctttatcgaaaacaacaacaaactggaatgaaaagtttatttaacgtgtgaccatgtagaatgtagtgttcagaagggttcagagttctgcctgagtatttgaaagaactggtaacaaaggaataaatgataactaataaataatgaccattattaattccagaagaaaatatgttgcacaagaaagaaaatatgtatctcttgattt

SEQ ID NO: 948687 - DNA, 591 bp, Homo sapiens
ccagctgttccaataaatacaataaactgtaagtaggacatattatgagggaactatagtagaattatgtgcaaggtgcatccccatttrtatttctctgggaatagggaaggatattggagctatgcactcaaacaagaaggctgcctgttcttgatctttctttaaaattttacttgctataagtagcactggatatctggtaccatctggaagtcttaaaaacacctttagtagtgtattttgacttatctcccttttcattctggattctgtcactcagcttctgactttcgtccttttcttccatgaggaaatcactcagaaacacaaaagtaactcttctccttcctttccacctttccatcctccatcttccccaccaataggatcctggcataaatttctgttcaatctacttcagcatcacatgtgtattcactgtgataccgtcagcaccatggccttagtttaagtgcacatcagcaggcactggggctattatgatagtattcttgatgttctccataccccaaaattaattttccctaactgctgctagagaaatctttcttcctggaaagtcaaata

SEQ ID NO: 948688 - DNA, 607 bp, Homo sapiens
gagcagacaccgagctagctgcaggaagtttttttttttgtaccccaaaaatgactggaaccccagcaagatagaaacgttaattcccctggacagggggctgaagcaagggagccaagtgktctcgctcagtggggtcccaatcccacagagccctgcaagctaagaaccactggcttgaaattctaactgccagcacggcagtctgaagtcgacctggtatgatcaagcttggtgggctgggggcggggggtgggcgcatccgccattactgaggcttgagtagaccgttttcccctaacagtgctaacgaagcctggaagttgagactgggtgaaactcaacacagtgcgacaaagtggctgtggccagactgcctctctagattcctcttcactaggcagggcaaatctgaaagaaaggcagcagtccgagtcaggggcttatagataaaactcccatcttcctgtgacagagcacctggggaaagggatggctgtgggcacagtttcagcagacttaaacattcctgcctgccggctctgaagagagcagtagatcttgacaaggagggttcttccagcacagcactcgagctctgctaagg

SEQ ID NO: 948689 - DNA, 607 bp, Homo sapiens
gagcagacaccgagctagctgcaggaagtttttttttttgtaccccaaaaatgactggaaccccagcaagatagaaacgttaattcccctggacagggggctgaagcaagggagccaagtggtctcgctcagtggggtcccaatcccacagagccctgcaagctaagaaccactggcttgaaattctaactgccagcacggcagtctgaagtcgacctggtatgatcaagcttggtgggctgggggcggggggtgggcgcatccgccattactgaggcttgagtagaccgttttcccctaacagtgctaacgaagcctggaagttgagactgggtgaaactcaacacagtgcgacaaagtggctgtggccagactgcctctctagattcctcttcactaggcagggcaaatctgaaagaaaggcagcagtccgagtcaggggcttatagataaaactcccatcttcctgtgacagagcacctggggaaagggatggctgtgggcacagtttcagcagacttaaacrttcctgcctgccggctctgaagagagcagtagatcttgacaaggagggttcttccagcacagcactcgagctctgctaagg

SEQ ID NO: 948690 - DNA, 602 bp, Homo sapiens
ttgtacctctcttagaatttggctgtgaatctgtttggtcctggtcrttttttggttggtaggttatttattactgactcaatttcagagtcgttaatggtctatttaagggtttgacttcttcctagtttagtcttgtgagggtgtgtgtgtccaggaatttatccatttcttctagattttctagtttatttgcgcagaggtatttatagtattctctgatggtagtttgtatttctgtggggtcagtggtgatatcccctttatcattttttattatgtctatttgattcttctctcttttcttctttattagtccagctactggtctatctattttattaatttttttagccagctcctggattcattgattttttttgaagggttttttgtgttctatctccttcagttctgctctgatcttcattatttcttatcttctgctagtttttggatttctttgctcttgcttttcttgttcttttagctgtgatgttagagtgtcaatttgacatttttctagctttccagtgtggctactcagtgctataaatttccctcttaatactgctttagctgagtgccagagattctggtac

SEQ ID NO: 948691 - DNA, 740 bp, Homo sapiens
tggtgacttcttttgctcaagggttcacaagggcagcagactgatctgcacaagagggactgagcctggctgcggccgcacctgatgcctgtgcacacctgtccctggtggtctctcctgtggtgacttcttttgctcaagggttcacaagggcagcagactgatctgcacaagagggactgagcctggctgcggccgcacctgatgcctgtgcacacctgtccctggtgcaggcccttcccccgcagccccgtgaccttgtcctgtgaggctcacggtgcctgctccttctcagagtcctcatttctccctttaacgcacgccctgtcagcgcctccgtctagcccgtgtcctccagaccttcgaggtcaggggcctcaattcctggcacagcccctccactccaggcctcccagaaacagactagagcatcaggatgtgcgccgcctggggtcccacagagtggtgcccccttttagtgtcttctaggccccttagtgacagactacagaaaatacctctcaggtcacaggtcacccctctttggtgaagagtccatagaattctctgctgcgctttgcaagcactttctcttctgcacgtttggaacctaccccggcctgtcgtgtctttctcctggcctcctcgcgagccgaacctrctgtccggtcccgggaccccctgcccagggtcagaggggcgcctacctagctcacggtcttgggccggagggaatggag

SEQ ID NO: 948692 - DNA, 848 bp, Homo sapiens
cagtttcggaggcggccacgcgaggatcaactgtgcaacgggtggggccgcggctgaccgtggtggtcgcgggggctgagsgccagaggctgcggggggggggcggcgggatgagctaggcgtcggcggttgagtcgggcgcggagtcgggggcagggggagcgggcgtggagggtgcgcacgaggtcgaggcgagtccgcgggggaggcgggcagagcctgagctcaggtctttctgcgtctggcggaacgggcctgggagggaggttttgccagataccaggtggactagggtgagcgcccgagggccgggacgcacgcacgggccgggtaggatggcgctggcgtcgatgcccgcgcgcttcagggcctggtctggccgcccctccatccttgtcggtttctcgggtcgcggaccccgcgcggcgccgggcgatgctggcctgcccgtggccaccacctcgcttcattcccgtctctttgggccgccgcattcgtccacgtgcccgtctctccctgcgcaaaattccaagatgagcaaatactgggctcacggtggagcgccgcgggggcccccctgagccggggcgggtcgggggcgggaccagggtccggccggggcgtgcccgaggggagggactccccggcttgcgacccggcgttgtccgcggtgctcagcgcccgcccgggcgcgccatggggaaccgcagcaccgcggacgcggacgggctgctggctgggcgcgggccggccgcgggggcatctgcgggggcatctgcggggctggctgggcagggcgcggcggcgctggtggggggcgtgctgctcatcggcgcggtgctcgcggg

SEQ ID NO: 948693 - DNA, 848 bp, Homo sapiens
cagtttcggaggcggccacgcgaggatcaactgtgcaacgggtggggccgcggctgaccgtggtggtcgcgggggctgaggrccagaggctgcggggggggggcggcgggatgagctaggcgtcggcggttgagtcgggcgcggagtcgggggcagggggagcgggcgtggagggtgcgcacgaggtcgaggcgagtccgcgggggaggcgggcagagcctgagctcaggtctttctgcgtctggcggaacgggcctgggagggaggttttgccagataccaggtggactagggtgagcgcccgagggccgggacgcacgcacgggccgggtaggatggcgctggcgtcgatgcccgcgcgcttcagggcctggtctggccgcccctccatccttgtcggtttctcgggtcgcggaccccgcgcggcgccgggcgatgctggcctgcccgtggccaccacctcgcttcattcccgtctctttgggccgccgcattcgtccacgtgcccgtctctccctgcgcaaaattccaagatgagcaaatactgggctcacggtggagcgccgcgggggcccccctgagccggggcgggtcgggggcgggaccagggtccggccggggcgtgcccgaggggagggactccccggcttgcgacccggcgttgtccgcggtgctcagcgcccgcccgggcgcgccatggggaaccgcagcaccgcggacgcggacgggctgctggctgggcgcgggccggccgcgggggcatctgcgggggcatctgcggggctggctgggcagggcgcggcggcgctggtggggggcgtgctgctcatcggcgcggtgctcgcggg

SEQ ID NO: 948694 - DNA, 848 bp, Homo sapiens
cagtttcggaggcggccacgcgaggatcaactgtgcaacgggtggggccgcggctgaccgtggtggtcgcgggggctgagggccagaggctgckgggggggggcggcgggatgagctaggcgtcggcggttgagtcgggcgcggagtcgggggcagggggagcgggcgtggagggtgcgcacgaggtcgaggcgagtccgcgggggaggcgggcagagcctgagctcaggtctttctgcgtctggcggaacgggcctgggagggaggttttgccagataccaggtggactagggtgagcgcccgagggccgggacgcacgcacgggccgggtaggatggcgctggcgtcgatgcccgcgcgcttcagggcctggtctggccgcccctccatccttgtcggtttctcgggtcgcggaccccgcgcggcgccgggcgatgctggcctgcccgtggccaccacctcgcttcattcccgtctctttgggccgccgcattcgtccacgtgcccgtctctccctgcgcaaaattccaagatgagcaaatactgggctcacggtggagcgccgcgggggcccccctgagccggggcgggtcgggggcgggaccagggtccggccggggcgtgcccgaggggagggactccccggcttgcgacccggcgttgtccgcggtgctcagcgcccgcccgggcgcgccatggggaaccgcagcaccgcggacgcggacgggctgctggctgggcgcgggccggccgcgggggcatctgcgggggcatctgcggggctggctgggcagggcgcggcggcgctggtggggggcgtgctgctcatcggcgcggtgctcgcggg

SEQ ID NO: 948695 - DNA, 606 bp, Homo sapiens
tctctttgggccgccgcattcgtccacgtgcccgtctctccctgcgcaaaattccaagatgagcaaatactgggctcacggtggagcgccgcgggggcccccctgagccggggcgggtcgggggcgggaccagggtccggccggggcgtgcccgaggggagggactccccggcttgcgacccggcgttgtccgcggtgctcagcgcccgcccgggcgcgccatggggaaccgcagcaccgcggacgcggacgggctgctggctgggcgcgggccggccgcgggggcatctgcgggggcatctgcggggctggctgggcagggcgcggcggcgctggtggggggcgtgctgctcatcggcgcggtgctcgcggggaactcgctcgtgtgcgtgagcgtggccaccgagcgcgccctgcagacgcccaccaactccttcatcgtgagcctggcggccgccgacctcctcctcgctctcctggtgctgccgctcttcgtctactccgaggtgagccgcgtccggccgcacgagcatcctcayctgctcctcggttccccgtccctgtccctacggaggacccggcgcgacccggcccctttctggtgcg

SEQ ID NO: 948696 - DNA, 611 bp, Homo sapiens
acggggcagcgcggccgggctgaagccctggcgtctggtggctcgtgtagtccaggaggtcttcgttccttctgttccacgagaccctcgtggctgctgggaggtgcagcaggcctacggcccttcccgccaggtttcggggcacatggtgcctcctgtgccctggctgcttgagcgagcccgacggtccagcacggcctgttcagtccacgtgtacagcttggtggcctcggtccagggatccacacgcagagcctcatggcctcctggtctcccccttgtttctcatggccctggcgccaggtgaggagaaagggctgaagcctgtggggggcacaagggggcgtgtccagcgtgtttgggcactgggctgggcctgaacatgggacccccctgccctcctgaccaagagcgctgctggagcagcatcactcttgttctggaagcttctgccctcatggcctgtgttctctgcacacagaaggctccatggctgtggctgccttggggcgagaaagtacasactcagcaacagctcagcaggcacctggggtagggtggcagcgccaggaggaacctgcaccagtgattctgatgtttgcctctgaagc

SEQ ID NO: 948697 - DNA, 786 bp, Homo sapiens
tgtgctctgtggcctgtttcctgaygggccttgggccgggctcccggagggcagtgctcggggctgcaggcagcccttgaatccttcttcccctctggacagactgcctgagtttcgctgaaaagaaactggagctaaaaaacaaaaaagtcaatggcaatcatttcccacccactcttcttaaatgtcagtggtttaatttttatcacaactggttttctgtgaggtcgtgcgctttaaactcctgtctgcctgttgaggtggacacctcgcctttccacacccggagagctgcttcaacagccactctgtggatgacaaagtacagtgcctgaggccatcaggacacgatattaaccaggggcgggggcagtaccccatcaggacatgttcttatgaacatgaagctgtggggctgggtaagaactcggagctaactgagaaactgctcaagaagggaaatcaatgcagaaaaatggctgaggaatggtccccccaacttcagctacatcttccgtgactgagacatgggctgagtgcttgcgaacagcctgaggaccagcagcccacagaggaaggggccgtggcagggaaggcactcacccgccctcttggcgctgagggagccgtcgcggtggatgatgacatcactgctgcccagcatcaggaggctctggcccgacaggatgctgcccagcaggtcaggcactggctcctcctccaagtctggctctggcaccgcggcagggaggcgcctcctgtgggcacagacccaaggccctgccg

SEQ ID NO: 948698 - DNA, 483 bp, Homo sapiens
gtcaaaggcccagtggacagcccacagcactggaacagtgaggggcctggacatgaagtcaggcctgcagcaggcacccagtcgacaccgcgaacgagaacctaggatgggtttggaaaatggacttcttagaaacatgtctcccagccaggcgggttggctcacacctgtaatcccaacactttgggaggccaaggcaggcggatcacgaggtcaggagttcaagatccgcctggctaacgtggtgaaaacccatctctactaaaaatacaaaaaaaaaaagaaatagccaggcatggtgtgcgcttgtaatcccagctacacaggaggcagaggcaggagaattgcttgaacccaggaggyggaggttgcagtaagccaagattgctccattgcactccagcctaggcaacaagagcaaaactccatctcaaaaaaaaaaaaattagctgggcttgggcttgggcttggcggtgcatgcct

SEQ ID NO: 948699 - DNA, 677 bp, Homo sapiens
ggtgcctgtggcgaccaggaccaggtctatcatgccayggtctctcaggccgtgtccagcgattccaggccagcccaggcccttccttcacatgcccagagtggccgcagccacaggtaaagaggacaaaagaggaccagtcctacacatgggcatggagtgctgagccacccctccacctttttttttctttttaagcattctgcatatattcacggtgtaagtcagtaatcaacagccaataagcactgtgcccagggctgcaatgaccaggctgctgggatagtcaaggcagcagccctgcccttcagactcacagcaaccaactcagtgcctgccggggcaactggcagcagacgctcccaggaaccctgaggaggtgaggaccgtcagggcagagcactcaggaaactcacaaaacatggatttaggctcagactcgtgagaaaggagggacggcgaggtgtctgcgaatgtgagcagaggcgtggctatctcccggctgctgggagcagagggcaggaccaagcaggggctggggacctggaagggccggcggagcgcactgcaaggcccctgtactcccacaggccatgaggaggagggcgaactgacgatgagacaaacgtggtggccgcctgcaggacccccaaggaggcccctgcagtgtctgcaaa

SEQ ID NO: 948700 - DNA, 821 bp, Homo sapiens
tctccttccaacaggctttgtcctgactttccttgctctgatgaggtcaccatccatgtcctaatccccagaattcatggcacacccttgtggataacaatgaccatcctcaagtgcccagaggacacacggaggatgctgagtttcgggggaatatttcatatgatgctggtagtgaaaagaggtttcttcggcctgaaaactggtgttatagtagaaacgtggcacggcagctatagcccgcaggggcttctcctatctctggacatccttcctttctctgcatgacacctctgcatgctggctgagcacctgctgacctcagaggggcatccttctgaggaagtttgtggtcagaccagaaggcataactctcatagaggcaaaatcactttggaaaatacaagtaactttaataaatcccttccaatttgagaacagattatcatgtctttattgaatcccatataaaatgatagaagtttattttcattaaacatggactacgtgccaggcactctaaaataccctaagtaatgcatttaatcttcacaacaacccactgaggaaagtgccagcatcatgcccgtggattggtgagagaactgaggcacagagaggtgaaggaacttgcccaggtcacacagcttgtcagtggtggggccagatttgaatataggtagtctgaatttggtgctgtttctctccaaaatgaaaggtcttggctggcaccttggagtcatattgkaggaaaaacacatatcttcaagtaccggagtcagagactacggtaagctatttccctgcaagaggcacagggg

SEQ ID NO: 948701 - DNA, 821 bp, Homo sapiens
tctccttccaacaggctttgtcctgactttccttgctctgatgaggtcaccatccatgtcctaatccccagaattcatggcacacccttgtggataacaatgaccatcctcaagtgcccagaggacacacggaggatgctgagtttcgggggaatatttcatatgatgctggtagtgaaaagaggtttcttcggcctgaaaactggtgttatagtagaaacgtggcacggcagctatagcccgcaggggcttctcctatctctggacatccttcctttctctgcatgacacctctgcatgctggctgagcacctgctgacctcagaggggcatccttctgaggaagtttgtggtcagaccagaaggcataactctcatagaggcaaaatcactttggaaaatacaagtaactttaataaatcccttccaatttgagaacagattatcatgtctttattgaatcccatataaaatgatagaagtttattttcattaaacatggactacgtgccaggcactctaaaataccctaagtaatgcatttaatcttcacaacaacccactgaggaaagtgccagcatcatgcccgtggattggtgagagaactgaggcacagagaggtgaaggaacttgcccaggtcacacagcttgtcagtggtggggccagatttgaatataggtagtctgaatttggtgctgtttctctccaaaatgaaaggtcttggctggcaccttggagtcatattgtakgaaaaacacatatcttcaagtaccggagtcagagactacggtaagctatttccctgcaagaggcacagggg

SEQ ID NO: 948702 - DNA, 631 bp, Homo sapiens
ctaaaccccattacatcaagttccactaggacagtgaccgtatctgtttcttgtaccagggggtccccaggcccaaggttgtttgaatgaatgaagtctctgcccttaaggaacttatggaagtaagcagaagtaaagaagaattacagaaatacaactgatagaaataactgattgccctgagagaaacaccaaaaagtatactttggaaatttgaagaagtgggagacctggctggaggggtgagggaaggtagcatggcagaggcaccacttgagctgggtcttccttgggaagagatgtaggatttgtacagacaagtgacggagaaggagatgactccgggaagcaatacgcagcctcagaggttgagggaacagaaggagtgtagcttgctgagccttgcaggatccctgaagggaaagagtggaagaaaaccttgtaaactagactagcaccaggtcagagaaggcctgaagaactgcagctatatttgataggaaatcgagaatcgtctcacattttcgagcacagaaacatcagagccctctctagaaatattaaaagcagattaaagggatgcatacrgacttaactgagacccctgagttacaacagaacttcgggtaag

SEQ ID NO: 948703 - DNA, 472 bp, Homo sapiens
tcagctgtagtcagtatctttctggagcaataacatcaaaacagtgatgtttcatcagcattatagacttgttctggtgtcagattttcttttctttttttttttttttttccttttgagacagagtctcgctctgtcacccaagctagagtgcagtggcacaatctcagctcactgcaacctccacctcctgggttcaacaatcctcccacctcagcctcctaagtaactgggattacaggcacacaccaccacaccttgctaacttttttgtatttttcagtagagacggggttttgccatgtaggtcaggctgttatcaaatcttggcttcaagtgatccrcccactttgacctcccaaagtgctgggattacaggtgtgagtcatttcacccagtctggtgtcagattttaatcagcgatgactttggcaaactcataaatgaatttcagtactattttatggtcagt

SEQ ID NO: 948704 - DNA, 758 bp, Homo sapiens
aaagcaggtccctcaaaggcgagacagcaccgactgacatggggaaatcccttcatgggaggcttacaaggttattcgtgaagcggcagraacaggcattgctgtgaagcatgttttaagtggtcccctggatgcacacgtgctattggtgtacatgctagtacacacatcacgtctcattagcatcttaactctccacccaggggcgtgtttgttactattataataagcataggtcagcccaaggacactaagcatgggtttctgtgcttgcgtgaattcggggattttcagccgggcttggtggctcatgcccgtaatcccagcactttgggaggccaaggcaggtggatcacctgaggtcaggtgttcaagaccagcttggccaacgtagtgaaaccccatctctactcaaaatacaaaaattagccaggcgtgatggcgggtgcctgtaatcccagctacttgggaggctgaggtggcagaatcatttgaacccaagaggtggaggttgcagtgagctgagatcgcgccattgcactccagcctgggcgacagagccagcctctgtccctaaataaataacgaggattttcccctcttcccttctccctccttgctacaggatgttctagctgtcaacccttgagatcccaacattgctgggaaccgagcccaggctgcagtttgcacactgtcaggtggtttgttctctcctcctatttggcaagtttttttctcctttaagggagtctatg

SEQ ID NO: 948705 - DNA, 594 bp, Homo sapiens
aatttgagagctataactttatataaagcccttagaagaaaacagagaggaaaatctttatgtccttcaccttggcaatggtttcttaaatataataccaaagacacaaataacaaaagacagataaactggacttcattaaaattacaaacttttgtgcatcaaaggaaagtatcaagaaagtgaaaaggcaacccacagaatggaagaaaacatttgcaaatattttatggtctaatattcagaaaatatgaagaactcctacaactcaacaacaaaaagacaaacaatccagttaaaaaatgggcaacagacccaaatagacatctctctaaagaagataaaaatgacaaagacattcaacatcattaatcattacagaaatattagtcaaacctcccacagaatgccattttataccactaggatggctataaaaaaaaaaaagaaaaatctcaagtgttggcaaagatgtagagaaattgaaatccttgtgcactgtgggtgggaatgaaaaacagtgcagttactrtggaaaatagtttggtggttcctcaaaaagttaaacatagagttacaatttgactcagcaat

SEQ ID NO: 948706 - DNA, 588 bp, Homo sapiens
ctcccttccctacacatcaagcttgaggatttgccgcccaggactggcaaattggctttactcaacatgccccgagtcaggaaactaaaatacctcttggtctaggtagatactttcactggataggtagaagcctttgccacaaggtctaagaaggccaccgtcatttcttcccttctgtcagacatattcctcagtttggccttcccacctctatacagtccgataacggactggcctttattagtcaaatcacccaagcagtttctcaggctcttagtattcagtgaattaacggtcttttaaaaacacacctcaccaagctcagtcaccaactgaaaaaggactggacaataccacttgcccttctcataattcaagcctgtcctcggaatgctacaaggtacagcccatttaagctcctgtatagatgctctttttattaggccccagcctcattccagacaccagaccaactaggactgagcccmaaaaaacttgtcatccttactatcttctgtctagtcatactcctattcactgttctcaactactcataaatgccttgctgttgtttacactgccagt

SEQ ID NO: 948707 - DNA, 546 bp, Homo sapiens
tggtgtccacccagattaaggatgggtctggctttcccagcccactaacacaaatgttaatctcctttagcaacaccctcacaaacacacccaggatcaataatttgtatttttcaatccagtcaagttgacactcagtattgaccgtcacagattctcttaagaattcctggggggtggagccaagatggtcaaataggaaaagctccagtctacagctcccagagtgagcgacccagaagatgggtgatttctgcatttccaactgaggtaccaggttcatctcactagggagtgctggacagtgggtgcaggatagtgggtgcagtgcactgtgcatgacccaaagcagggtgaggcatcacctcacccgggaagtgcaaggggtcaaggaattctctttcctagtcaaagaaaagggtgacagatggcacctggaaaatcgggtcactcccaccctattactgtgcttttccaatggrtttaacaaatgcataccaggagattatataccgcccctggcttggagggtgctacacccacaga

SEQ ID NO: 948708 - DNA, 629 bp, Homo sapiens
gtagtcccagctactcgtgaggctgaagcagaagaatcgcttgaacccgggaggcacaggttgtggtkagccaagatcgcaccattgcactccagcctgggcaacaagagtgaaactctatctcaaaaataaataaataaataaataaataataaataaataaattaaattaaaaagaaagaattgaaatcagatcttgaagagatacattactctgatgtcattgcaggattatgcacactagccatgatgtggaaacaacctaaatgtccatcaaaagatgaatgaataaaatgtgggatacacatacaagcaaatactattcagtttttaaaaaagaagggatttttgcaatatgtgacagaatacatgaatcttgaggacattatactaagtgaaatgggccatttaacagaaagacaaatattgcatgattctgcttatataaggtatctaaaatgtcaaatttgtggaatcaagagtggaatgttggctatagggtcaatgatggggagactgatatttgggagaaagtaaatagtcaccaatgaatgggtgtaaagttctgttaagcaagataaatatgccctacaaatctgctatacaatgttgtacatatagtctacaat

SEQ ID NO: 948709 - DNA, 629 bp, Homo sapiens
gtagtcccagctactcgtgaggctgaagcagaagaatcgcttgaacccgggaggcacaggttgtggttagccaagatcgcaccattgcactccagcctgggcaacaagagtgaaactctrtctcaaaaataaataaataaataaataaataataaataaataaattaaattaaaaagaaagaattgaaatcagatcttgaagagatacattactctgatgtcattgcaggattatgcacactagccatgatgtggaaacaacctaaatgtccatcaaaagatgaatgaataaaatgtgggatacacatacaagcaaatactattcagtttttaaaaaagaagggatttttgcaatatgtgacagaatacatgaatcttgaggacattatactaagtgaaatgggccatttaacagaaagacaaatattgcatgattctgcttatataaggtatctaaaatgtcaaatttgtggaatcaagagtggaatgttggctatagggtcaatgatggggagactgatatttgggagaaagtaaatagtcaccaatgaatgggtgtaaagttctgttaagcaagataaatatgccctacaaatctgctatacaatgttgtacatatagtctacaat

SEQ ID NO: 948710 - DNA, 578 bp, Homo sapiens
atggagaagaagaaggaagtaaagatcgcaaaacaattagaacatgaacaaccaaatggcaggagtaagtgctaacttatcaataataacatcacatgtaaatggactaaactctccaatcaaaggttatatggctccaatcaaaggctaaatggataaaaacaaggcccagaaatctattgcctacaagacacacatagattgaaattcaagagataataaaacttattccatgcaaacgaaagccaaaacaaaccagtagtagctatacttacattggacaaaataaatttcaagaaaagaatctataaaaaagagacaatgttattgcataatgaaaaagaagtcaattcagcaagaggatttaataatggtaaatacatatgcactaaacactggagtacccagatatataaggcaaatattattagagctaaagagagagagatgccaatctaataatagccaaataattcaacaccctgcttttatcatttcacagatcatcagacagaaaattaacagaaataytggacttaattcataaaatagaccaaatagacctaatatttacgaac

SEQ ID NO: 948711 - DNA, 623 bp, Homo sapiens
accaatgcagaatgtgggtgatttctgcatttccaactaaggtacctggttcaactcattgagactggttagacagtggatgcagcccatggagggcgagcagaagcagggtggggtattgcctcattcgggaagtgcacagggtcagggaactccttcccctagccaagggaagccatgaaggaccatgctgtgagggacagtgctattcagcccagatactatgcttttcccatggtcttcgcaacccatagaccaagagattcactcgggtgcctataccacaagggccctgggtttcaagcacaaaactgggtggccatttggccagacactgagctagctgcaggagtctttttgtcataccgcagtggcacctggaacgctagaaagacagaaccattccctcccctggaaagcgagctgaagccagggagccaagtggttttgcccactggatcccatccccacaaagccgagcaagctaagatccactggcttgaaattcttgctgccagcacagcagtctaaagttgacctgggatgcyccagcttggggtaggggaaaggggttcaccattaatgaggcttgagtaggcggttttcccctcacagtgtgtaaa

SEQ ID NO: 948712 - DNA, 605 bp, Homo sapiens
ttatatggatggatttatttctgacttaaattacccctgcccccaagtaaatgaaggtagaaccaaattcctgcagtgcaatatgaatggmagccactagagggcaagcttaccgcgtgctgtgattagataccacacaactgcttgaaattagaccacatttaagcaactaaggtgacctcagaggaggttacaaagagcccattactgcaaaaggagaggtcagtctctcaagtgacagaggtgaaatatcatttgagtctctttgaagtcacgctgaccaattatacccatcaaagcccaaaagtaatgaaaaccagagaggtgaaggatatcattttgatggagatgacctttagagggaggtaggagtaaggttaaccaattttatttttatgtgaaagagataggagcatatttcaaacgcattgaattggcctttgaaagcgtggtctaacctagtgtattcctaacagaaatagaacaaagtgggtgatgctgttttaactgagaatcatggctaatctgctgaagtataactccttagggaatatccattttatggaagtttatttgtttagaaacggatccctatttgaacacca

SEQ ID NO: 948713 - DNA, 605 bp, Homo sapiens
ttttatgtattactaaataatattccattgtatggctatactacatttgtttatatattcaccaattgttgagtatttgggtcgtttccagtttttgactattatgaattaaacttctgtaattattcatatacaagtctttgtatgaatgtatgttttaatgtctctgtcataaattcctgagagagaaatttctggagtatatagtaattgtacctttgtacctttaactttataagcaattgcaaactgtttacaaacgtgattgcaatattttacatttctaccagcagaattatgataatcccagtgacttcacattcttgacaacacttggcattgtcaattcttttaataatattcattctaatgtgtatgtagtagtgagaggtgacagcgtgctggcagtcctcacagccctcactcgctctcagcgcctcctctgcctgggctcccactttggcggcacttgaggagcccttcggcctgmcactgcactgtgggagcctctttctaggctggccaaggctggagcccactccctcagcttgcaggtaggtgtggagggagaggcgcgagcgggaaccggggctgcctgcggcgct

SEQ ID NO: 948714 - DNA, 563 bp, Homo sapiens
ctccaggacacagctaaagcagtgttaggaggcaaatttatagcactaaaatgcccatatcagaaagctggaaacatctaaaatggacatcctagcatcacaattaaaagaacaagagaagtaagagcaaacaaatttaaaagctagcagaagacaaaaagtaactaagatcagaactgaaggagatagagataccaaaaacccttccaaaaataaatcattgaatccaggagctggctttttggaaaggttaccaaaatagattgaccactagccagactaataaagaagaaaatagagaagaatcaaatagatacaataaaaaatgataaagtggagattaccactgatcccacaataatataaactagcatcagataatactataaacacctctatgcaaataaactagaaaatctagaagaaatgaatacattcctggacacctacaccctcccaagactaaaccaggaagaagttgaattcctgaatagaccaatarcaaggtctgaaattgaggcagtaattaatagcctaccaaccagaaaaagcccaggaccaga

SEQ ID NO: 948715 - DNA, 563 bp, Homo sapiens
ctccaggacacagctaaagcagtgttaggaggcaaatttatagcactaaaatgcccatatcagaaagctggaaacatctaaaatggacatcctagcatcacaattaaaagaacaagagaagtaagagcaaacaaatttaaaagctagcagaagacaaaaagtaactaagatcagaactgaaggagatagagataccaaaaacccttccaaaaataaatcattgaatccaggagctggctttttggaaaggttaccaaaatagattgaccactagccagactaataaagaagaaaatagagaagaatcaaatagatacaataaaaaatgataaagtggagattaccactgatcccacaataatataaactagcatcagataatactataaacacctctatgcaaataaactagaaaatctagaagaaatgaatacattcctggacacctacaccctcccaagactaaaccaggaagaagttgaattcctgaatagaccaatagcaaggtctgaaattgaggcagtaattaatagcctaycaaccagaaaaagcccaggaccaga

SEQ ID NO: 948716 - DNA, 573 bp, Homo sapiens
ggttatctctggaatgcgagtttaagcatgaaagagaggctttgctatcctggggcctgaccccaaggcatggctatttaaggactggtgcccgcgttcaacagagcaaacctggcctgactaccactgagggtagtcccacctcagagtcttcagatcagaggcctggaaaagtggaatcagaattgcaccttccttcttttgtttcccatattctcatgtagcttcctaatactcactgagtaaatactctggttgagagattggcaaaggtatggtgcttttgtgggtttcaaacttaatctcatgcccactgaccttacagattgaagaggcttttcttttaaggtcatagagaataacacaccccaatggttctgtagatgccaaaactgtaacccccctgacgcttgtaaagtccttgttgctgctcatcgttttgaagggtttgsaaatgctcccaagggagcaggaatgaaatggctgctgtttagtgccccttcttggcatgctttcattggtctttgcctgagtttcttctttgcaaagatacatttctctgatcctaagata

SEQ ID NO: 948717 - DNA, 671 bp, Homo sapiens
cccaggcttactgagctagtttggctcattgcatcattctcaggaacttacatcactgggactcaggctgcccagcccattctcttgctcagaatccttcccagactcagtgccctgggaagaccgtggatgggatggatgaatccagatctccaggcgagtggtgtcatctccaacatgccggaaagtagacttctttcctttccgccactggtcagggctcaggtcaaattcctcatgttgcttcttttccatctgttctgcctatataacatacaaacacattagctcatggcctggtgtggtggctcacgcctgtaatcccagcacttagagatgcggaggcaggcggatcacttgaggtcaggagtttgagaccagcctgaccaacatagtgaaaccctgtctctactaaaaatacaaaattagctgggtgtggtggcgcatatctgtaatcctagctactcgggaggctgaggcatgagaatcacttaaatccgggaggcagaggttgcagtgagccaagatcgcatcactgcactccagtctgggcaacaagagcgaarctctgtctcaaaaacaaaaaacacacatgagctcagactttcctgagactcagcttacaaagagaaaagcctcacctcaccggtatttatttgacaataaaaata

SEQ ID NO: 948718 - DNA, 542 bp, Homo sapiens
gctgaggcaagagaattgcttgaacttgggagatggaggttgcagtgagctgagatcatgccattgcactccagcctgggtgacaagagcaaaacgccatctcaaaaaataaataaataaaataaaataaaataaattttaaaatgttaaggactgttacttttcaggaaatggttctatgctaatgaaatgaatcaaaagtgtttggagatgaaaagaattctaatatgccatccagtcaaatctcacgcctatttctcagtttcctctatgctcagaccctgtttaacactttagaacaagggtacccactgcctcacaaggcaccatatcttgctgttagaaagctagcgttatcacactgaactgaaatatgctaagatgcctgcagaaaccaggtgaataacagttccatgaagtctgccaggagyagtgaggattgtggcaaatgaacaagctcttgcctggactaaaagaatacctgctgttccacaactgatcgttgtcatttcacatcaggaagcaggccccatgttgcccaa

SEQ ID NO: 948719 - DNA, 596 bp, Homo sapiens
tattagacattcaaagaaaaattgataccattcctattgacaggattccaaaagatagagaaacagggaatcctccctaaatcattctatgaaaccagtattaccctaatactgaaaccagaaaaaaacataacaaaaacagaaaatttcaggccaatatctctgatgcgcatagatgcaaaaatcttcaacaaaatactagctaactgaatccaacagcttatcaaaaagataatccacaatgaccaagtgggtttcataccatggatgcagagagggtttaacatccacaagtcaataaatgtgacatacaacataaacagatttaaaaacaaaaatcacatgatcatcacaataaatgcagaaaaatcaggtggaaaaatccagcatccctttatgattaaaatcctcatcagaatcagcatagaagggacataccttagggtaataaaagccatctacgacaaactcacatccaacattatactgaatggggaaaaattgaaagcattccccctgataagtggtacaagacaaggatrcccactttcaccacctctattccacataatactagaagttctagccagagcaga

SEQ ID NO: 948720 - DNA, 595 bp, Homo sapiens
atatgggtgtaggtatggaaaccatctcaaccaaaagataaaagttaacatcaccagaaatgtgatgtgtgtctcctgaaatggtgcasaatacagcatcatatttgaagtgttcctgacaaacatgcatgatctcattcatgaggaaatatcagataaacccaagttgaaaaacattctataatgtaactgacctatactcttcagaaaagtcaaaaccatgataaggaaagactgctggactgttccaaattgaagaagacttaaagagacattataactgaatgaaatttataaatctggagtatatcctggacatcattaggacaactggaaaaagttcaatgaattctgtgaattagtaacaacgtatcaatgtaacttccgattttgatggctgtactgtggttatatagaattgtctttgaatgaaatatgttctaaagtatttagaggtaacaggcagcatgtctgcagttatatcactcagggctctccagagagacagaactaataggatataagtatataggaaagggagattattagggagaattaactcacatgatcacaaggtaaagtcccacaatagacc

SEQ ID NO: 948721 - DNA, 463 bp, Homo sapiens
caactactaatttgcaacagtaagaggaaaagccatagacaaacaggactctctctgctagttatcctagactgcatttcttttccccttatttcaatcctcaaacatgccagagtggacttaacctagtcccaaaaataatccattaagcaagtctgtcctcagtagtgtcaccgtccacccagttgtacaagccagaaaccaagtcattcttgacacttcttttgcctctctaaaattcaattcacaaagtccttgcaattttacctgctgaaaagctttcagatccatgccaacctcccattttttgcagcagcagccttgtctaaactaccataacttcttgtttggcrtgacacaatggccctgaaatggcccagttgtatctctgctgctccccccactctctccccacaatattttcaaaatgaatatctaaaaatgtgaactctgtttaaaatcc

SEQ ID NO: 948722 - DNA, 463 bp, Homo sapiens
caactactaatttgcaacagtaagaggaaaagccatagacaaacaggactctctctgctagttatcctagactgcatttcttttccccttatttcaatcctcaaacatgccagagtggacttaacctagtcccaaaaataatccattaagcaagtctgtcctcagtagtgtcaccgtccacccagttgtacaagccagaaaccaagtcattcttgacacttcttttgcctctctaaaattcaattcacaaagtccttgcaattttacctgctgaaaagctttcagatccatgccaacctcccattttttgcagcagcagccttgtctaaactaccataacttcttgtttggcatgacacaatggccctgaaatggcccagttgtatctctgctgctccccccactctctcyccacaatattttcaaaatgaatatctaaaaatgtgaactctgtttaaaatcc

SEQ ID NO: 948723 - DNA, 607 bp, Homo sapiens
ctggccggcagctccgagtgtggggccgccaagcccatgcccacccggaactctagctggcccgcaagcgccgggcgcagccccggttcccacctgtgcctctccctccacacctccctgcaagccragggagccagctccagcctcggccagcccagagaagggctcccatggtgcagtggcaggctgaagggctcctcaagtgcggccagaatgggcgctgaggccaaggaggcaccgagagtgagtgagggctgcgagggctgccagcacgctgtcacctctcaccacctctcagccattgcttttgctgggcttcttaaaaactccctcaagtgtgaacagttcagggccagttaagaattaaaggagagtttatacataaaatttggggcttccctctgtgggtctgccctttctaagatttgctctattactttccaactgttttgtcagccctgaactccatgctctgagtccccaaatcaagagaattgtggctttcttctagagtcagagatgccccatgcgtaatagtctgatcttttcaaagagtcactctaaaaatctaattcagatcatatccatgttctgctgaaaactctat

SEQ ID NO: 948724 - DNA, 548 bp, Homo sapiens
tttcaaacaggaggaaaaagcatggggattttccttgactgttgatattctctagctctgtgcttttttggaatttcatgccatatatgagtattttgtgttgggtatatatagagggcaacattcataaataggaaaacttcaagatttagaggtgttacttcatgtatttctgttctgagaatggaggttcttggacaaatgtatttgaagtacagagcacagagggttaatacatataatattcaaataactattaccaaatatcaaggagacaatgagcccaatgcaaattatatcaaaaaacaaatcaaacgcattcaagtggaaaatgaatatgaaaaaatatcagatttactagttgtcagaatgtaagttatatttacaattaattattttatagccattaaatttaacagaataattttaaaatcagtaacatcaattgctattggggatgcttgaaaaattcatatrttgctgttagaaatgtgagttttcacaaaattttaaaaaccattgtaaatatctactaaaattaagataaa

SEQ ID NO: 948725 - DNA, 438 bp, Homo sapiens
ctcaacaaaaaccttatcagctagaagagattgggggcctatttttaccctcttaaagaaaaaaacatgccagccaagaatttatatccttcaaaatgaagcttcataatcaaatgaataacgawgtctttcatagacaaacaaatgctaagagatttctagaatggccctataataaatgttcaaaggaattctaaacatggaaatgaaaggacaatacttgctaccataaaagcacccataagtacaaaattcacagatcctgtaaagcaattatacaattgagactacaaagcaactagctaacaatactatgatgggaacaaaacctcacatatcaatattaaccttgaaggtaaacagcctaaatactccacttaaaagacaaaaatggaaaatcggattaaaaaaaaagagagacccaaccatctactgcgt

SEQ ID NO: 948726 - DNA, 557 bp, Homo sapiens
ataaaaattaagacccaactatatgctactcacaagagatttacctcagtgttaaagacaagcatacactgaaagtaaaaggatgggaaaaatatttcatggaaagaaaatcaaaagcagatgtaaacagccaacttacctcaaataaaatagattttaagtcaaaaactgtaaaaagagactaagaagttcatataatgataaagataaatttaaaaagggagtataaaattgttaattacatctataagcaaatttagagcacttagatatataaagcaaatattattagacataatgggagataaactggaatacaataacagtagggaaaatcagcagcccactttatttatttttttaactttttcttaaattaagtttttatttttattttacttatttatttatttttattgaggcagggtttcactttgtcactcaggctggagtgcagtggtgcaatcttggctcactgcagcctcaacctcctggsttcaagcaatcctcctgcctcagtccacaagtagctgggactagaggcacacaacaccaat

SEQ ID NO: 948727 - DNA, 582 bp, Homo sapiens
tgtccatgattcaatatggagcatgggcaagtaaggttacgctgaggaactgtgtgacataaaatgctgtgtgacatatagaaaacgtcagcaataggaccaatcttatacaaaaagaggagtaacatcttgctgaacacaccataaaaacttattttcctgttgcctcctgttccactcaggaaaaaataaatagaccatgcttatcattgtgagacttaatattttattagttttttagaagactgagcactgagctctgtgccgttcttagtcctttcaatctaggtaggacccatgccatctagagggaaaaatgttttgcctatactaaattctgtaatacattgtgctcgtggggagggaaagtctaatagaattcccccttggctctcctttgcagagtttatactctgtggcactttgtacaaatgcatatcatagaacttttatcgtaactactgacttataaaactgtkctcctcctcaatatgcttatgcatacttccaaggcaaagacaatatcttttactggatttgttgcagaattcaggatcgcaatttaacaatgtgtatctgtta

SEQ ID NO: 948728 - DNA, 594 bp, Homo sapiens
atcctcccctcaccctaacatggggggatgttagaactctcagctcattcttcagtgtctacatttatttggccagatgtaatggctctgctagggttcacaaaaacttttcttaaacatcttttttacaagttctgattaagtgagctagaacctcactttgaaatgtgaaaactcttaaccacccattttcttggagattagcctaaactgaggcagaaagtcccattttaacatactgttatactataatttattttttaaaaaggacaagtggttttaaacttttgctacaacataagccattatcctcatttcacctatgtataactaaggggaattcaaaaaacttaaatatgtttccaatggaatagtaggctttcctgtgaattaccacagataaaaaggagaagacaaagtttatttcaaaagtcttacagaaatttttctttagagtcacagaggccaggaaagtatgcctaccttatataaataaaagccctgtcacaacccattttcaaagmagatgtatagcaggatccagcaggggtttgcatctgtttcatgtgtgctggccttcctctgtagaagctc

SEQ ID NO: 948729 - DNA, 628 bp, Homo sapiens
aaataaggcttgtgccaatagtattgcaagatccttactcatattccccttttttttttttgttttctgagcatatttttmaggatggaatggacacgttctactatggcctgtccttgggggttatacaggatgcctgtggaatgttggatgttccacatgtgaccaaattgttgaaattgtgagctggcgtaagccggaccattgtcagatttaatttttgtgggctgccccataaatgcaaaagttaaaagaagatgtttaatgacatattgggtgaactctccaggaaaagcatgagagctaattaagtgagaattggtatcaatggatacatgtacatatttaagttttccaaattcagggacatgtgtaacatctgtttgccataacggatttggttctagtcctctagggttaacacctcttgaaggaggggacatgcttgtgagctggcaatctgggcattgcaggctaatttgtttagtctctgggtaagttgaaattgttaggtaagtttctccagttttggtggaaaaattgatgtgactgggtggcttgaccaagcactgatgtcataacttgtaggtttgcttgatcatcgacataaaccaatgggccaggcagt

SEQ ID NO: 948730 - DNA, 628 bp, Homo sapiens
aaataaggcttgtgccaatagtattgcaagatccttactcatattccccttttttttttttgttttctgagcatatttttaaggatggaatggacacgttctactatggcctgtccttgggggttayacaggatgcctgtggaatgttggatgttccacatgtgaccaaattgttgaaattgtgagctggcgtaagccggaccattgtcagatttaatttttgtgggctgccccataaatgcaaaagttaaaagaagatgtttaatgacatattgggtgaactctccaggaaaagcatgagagctaattaagtgagaattggtatcaatggatacatgtacatatttaagttttccaaattcagggacatgtgtaacatctgtttgccataacggatttggttctagtcctctagggttaacacctcttgaaggaggggacatgcttgtgagctggcaatctgggcattgcaggctaatttgtttagtctctgggtaagttgaaattgttaggtaagtttctccagttttggtggaaaaattgatgtgactgggtggcttgaccaagcactgatgtcataacttgtaggtttgcttgatcatcgacataaaccaatgggccaggcagt

SEQ ID NO: 948731 - DNA, 723 bp, Homo sapiens
catttgtctggctattaagctaggttacagtttaaccacaaggactcaaatatagaaatacggaatctttttaggccatatttagtttgttttaacagatggaagaatctgataccaaagttgttataatatattatctaaaatgtccagttttctggcagagcaggaacatcaccatctcagataggcactgccattttaagttccccttgattaaaaactgcctaaatccagcccaaaaaacatcaccctaatggctaatgtcagcataatcataaacctcaaaagacacctctgaccagaaacattccaaccctgagataaacccccctccaaccagagacatgccagcccctaggtaacttcccctccaaccagagacattccaaccctgcaataaaactctcctccacacaaaaacattttcagcctgtgaaaagctctcttcctaaacccttaaatacccttaatctgtaagagagaatgctcctgaccaaaatcagccagaagcccctcttgggtttattctccaaaataaacctgtctttgaattgttgatctgcttttcgtgtttcttttttctatcttcaacttcacattttcrataacaacataaacaaaatacaagacataccaaaaaataaaggaaaatataccacatatacagaaagaaaagtacagccaacggaaaacataccttagagggtacagatattggtctta

SEQ ID NO: 948732 - DNA, 499 bp, Homo sapiens
cataacaatacaattagatcagtatctaatactacatayaaaaatcaactcaaataagttaaaattcaaatgtaagacttgaaactataaaactactagaaaaatacagggaaaagtttcatgacattggtctagacaatatttttttggataggaataaaaaagcagagacaacaaaagtaaaaatagaaaaatgggattacatcaaactaaaaatcttttgcacagccaaaggaacaatcaatagagtaaagggacaacctataaaatgagagaaaatatgtgcaaaccatacatatgataaggggttaacacctaaaatatattaaaaactcaaaaaactcaacagcaaaaaatgaatagcctaattaaaatgtggactagaatacatatttttcaaaagaagacattcaacctgtatatgaaaaaatgttcaatcatcagagaaatgtaaactaataactaatcatcatagaaatgtaactaatcatcagtgaaa

SEQ ID NO: 948733 - DNA, 499 bp, Homo sapiens
cataacaatacaattagatcagtatctaatactacatacaaaaatcaactcaaataagttaaaattyaaatgtaagacttgaaactataaaactactagaaaaatacagggaaaagtttcatgacattggtctagacaatatttttttggataggaataaaaaagcagagacaacaaaagtaaaaatagaaaaatgggattacatcaaactaaaaatcttttgcacagccaaaggaacaatcaatagagtaaagggacaacctataaaatgagagaaaatatgtgcaaaccatacatatgataaggggttaacacctaaaatatattaaaaactcaaaaaactcaacagcaaaaaatgaatagcctaattaaaatgtggactagaatacatatttttcaaaagaagacattcaacctgtatatgaaaaaatgttcaatcatcagagaaatgtaaactaataactaatcatcatagaaatgtaactaatcatcagtgaaa

SEQ ID NO: 948734 - DNA, 499 bp, Homo sapiens
cataacaatacaattagatcagtatctaatactacatacaaaaatcaactcaaataagttaaaattcaaatgtaagacttgaaactataaaactamtagaaaaatacagggaaaagtttcatgacattggtctagacaatatttttttggataggaataaaaaagcagagacaacaaaagtaaaaatagaaaaatgggattacatcaaactaaaaatcttttgcacagccaaaggaacaatcaatagagtaaagggacaacctataaaatgagagaaaatatgtgcaaaccatacatatgataaggggttaacacctaaaatatattaaaaactcaaaaaactcaacagcaaaaaatgaatagcctaattaaaatgtggactagaatacatatttttcaaaagaagacattcaacctgtatatgaaaaaatgttcaatcatcagagaaatgtaaactaataactaatcatcatagaaatgtaactaatcatcagtgaaa

SEQ ID NO: 948735 - DNA, 605 bp, Homo sapiens
aggagccagcaaaaaggcagaaaagacaaacacattaagtcaaaggaaaatcaaagggaagttgatgtcacagagtccaagggaagatagtattataaatagaactaygaaaataaccttcatacacgaggtgacatgagaacagataatccaccattagatttggcaaaggaaggatcattgatcttaacagtagctactgctagaactaccaccataaaacagaaaaaaagcaattggagaaaataaatgtaatctttttgtgaaaagttttacactaaaaggaagcaaagaaatagggagtatcaaaacttctttgtttttattttaagctaacgtttatcttagcatgttaattatgctaaagagaatgattcagtaaaatgtaaaaatgtatgatgcttggaaaggaggtagcaattatgggattgatgcctttgagaaagtgagaggggatgcaatctagcaaataagcagaaggattggccttatgtaaaagcccatttttaaaagagagaaaacctactagatgagtgggttggtagatttaatggtacaagcatgtgaaaattctcttcttctcttctattttctcctgaaataag

SEQ ID NO: 948736 - DNA, 610 bp, Homo sapiens
actgggtaaaccattcctgttccaaaagagagaaatttgccaaaagaaagggggctataggccccacacaagtctgaaattcagcagggtagtcattaaatcttaaaactccgaaatagtatcctttgattccatgtcccacacccagggcacactggtgcaagaggtgggctctgaaggccttgggcagctctgcccctgtggctttgcagggtaaaccccctcaactgctctcacaggttgttaagtgcctgtggcttttccagatgcagggtgcaagctgctggtggatttaccattctggagtctgaaggatggtcgcctccttctcacattcctccactctgtgtggggcctccaatcccacatttcccacccccacccctcactgccctagtagagattttctgtagggactctgaccctgaagcaggcccctgcctgggcacctgggatttttcatacaacctccaaaatctaggcaggggctgccaagcatttttcactcttgtactctacacacctgcaggcctaacaccacatrtaagcagccaaagcatacagcagcttgcagtctccagagtggtgacataaccaaaacctagggccc

SEQ ID NO: 948737 - DNA, 546 bp, Homo sapiens
gtcttggacttttttttagttggtaggctatgaattactgcctcattttagaacttgttattggtttattcagggatctgacttcttcctggtttagacttggtgggggtgtatgtatccakgaatttatccccttcttctagattttctagtttatttgcatggaggtgtttatagcattctctgatggtagtttgtatttctgtggaatcagtggtgatatcccctatatcattttttattgcatctatttgattcttctctcttttcttccttattagtctggctagtggtctattttgttgatcttttcaaaaaaaccagctcttggtctcattgattttttttgaagggtttttcgtgtatctccttcagttctgctctgatcttagttatttcttgtcttctgctagattttgaatttgtttgctgttgcttctctagttcttttaattttgatgttagggtgtcaattttagatctttcctgctttctcttgtgggcatttagtgctataaatttccctctacacactgctttaaatgt

SEQ ID NO: 948738 - DNA, 628 bp, Homo sapiens
tcttataagtgccatctcctggcaggaggccaaacagcacaagactagtgcaataaacaaaactattaatacaactaaggatcctcacagggttcatttcactcccctgccacctccaccagaggaggtactgctatccatgcctgagagacctgaaggtggttcacatcacaggactctgtgcagatacctcccagtactagtctggagcccagtagctccacttggtggctatgtccagaagagaaatgacaatctctgacgtttggctctcaggaagccacatccctagggaaaaagggagagcactacatcaagggagcacattgtgtgacaaaataatctgaactgcagcccttgagctccagatcttccctctgacatagtctacccaaatgagaaggaatcagaaaaataattctgataatataacagaacaaagttccttaacaccccctaaaaaatcacactagctcaccaacaatggatcccaaccaagaagaaatccctgaattgccmgaaaaagaattcagaaggtcgggtattaaactaatcaaggaggcatcagagaaaggtgacgtacaacttaatgatatcaaaaaaatgatacaagatatgaagggaaaat

SEQ ID NO: 948739 - DNA, 571 bp, Homo sapiens
ctgtcttataagtgccatctcctggcaggaggccaaacagcacaagactagtgcaataaacaaaactattaatacaactaaggatcctcacagggttcatttcactcccctgccacctccaccagaggaggtactgctatccatgcctgagagacctgaaggtggttcacatcacaggactctgtgcagatacctcccagtactagtctggagcccagtagctccacttggtggctatgtccagaagagaaatgacaatctctgacgtttggctctcaggaagccacatccctagggaaaaagggagagcactacatcaagggagcacattgtgtgacaaaataatctgaactgcagcccttgagctccagatcttccctctgacatagtctacccaaatgagaaggaatcagaaaaataattctgataatataacagaacaaagttccttaacaccccctaaaaaatcacactagctcaccaacaatggatcccaaccaagaagaaatccctgaattgcccgaaaaagaattcagaaggtcggktattaaactaatcaaggaggcatcag

SEQ ID NO: 948740 - DNA, 529 bp, Homo sapiens
gaaacccagtacccaatcattatcttttctgctcctctccctcctcccactctccacactcaagtctgttgttttcttcgtgaaacaatattttaaatatgctgagagaaaataaccatcaacctaaaactgtatatgcagtaaagatagttttcaaaaataagagtgaagttaaaaaatttgaagtaaggaaaaacagacagtgattaaaggaaatgctgagggcttgtcttaagcagagggaagacaattcaagttagggatattgagatgaaaacatgatgagctaagaaagtggcaaatacataagcaaatctttaaaaaattgactgcataaaacaatggcaataaacttctgtaagtagagggatagacatgaaatacaaagcaacaatagcatacaaattgygagatgtaagaggattaaagtgttctaagttcatgtaatgtaaagaaggagagtaaacctattaattaaatttagaatatgagaagttcaatatgcttgttaacattctaggatgagttc

SEQ ID NO: 948741 - DNA, 542 bp, Homo sapiens
attcttgaagaataatgggagttgggtaggagtgaggaagagttccaagcagcagaaagagcatgtgaaaaggtccacaggcaagacaggggacatcaragaaattcatacttgtcagcgtcgggggcgggtgacaagagatgaggctagagagagataagcagaggccaagtagtgaaggtataccaattttttttttttttttttttaagacggagtcttgctctgtcgcccaggctggagtgcagtggcgcgatctcggctcactgcaagctctgcctcccgggttcacaccattctcctgcctcagcctcctgagtagctgggactacaggcgcctgccaccgcccctggctaatttttttttttgtatttttagcagtgacggggtttcaccgtggtctcgatctcctgacctcgtgatccacccgcctcagcctcccaaagtgctgggattacaggtgtgagctaccgcgcccggcccaggtataccaatgttaaagagcttgcccatatcccgagataagggagccagtgaaggg

SEQ ID NO: 948742 - DNA, 590 bp, Homo sapiens
ctacaggtgcacgccgccataatagccattctgactggtatgargtggtaatctgattgtggttttgatttgcacttctctaataatcagtgatgttgagctttttttttaatatgcttgttggccacatgtatgtcttttgaaaagtgtctcttcatgtcctttgcccacgttttaatggagttgtttgttttttccttgtaaatttaagtttctgatagatgctggatattagatctttgtcagatgcataatttgcaaaaagttttctgccattctgttgtaggttgtctgttcactctgttgatagtttcctttgctgtgtagaagctctttggtttaattagatcccatttgtcaatttttccttttggcacaattgcttttggtgtcttgcataatgaaatctttgcctgttcctatgtccagaatggtatttcctaggctgtcttttgggtttttatggttttggattttacatttaagtctttaatccatcttgagttggcttttgtatatggcataaggaaggggttcagtttcagtcttttgcatattgctagccagttatcccagcaccatttattgaa

SEQ ID NO: 948743 - DNA, 462 bp, Homo sapiens
aaatacatgtaaatcaaacacatgctcctgaacaatccacgggtcaatgaataaattaacagtgaaattaaaaaattccttgaggcaaatgaaaatggagatttaacataccaaaacctatgggacacagcaaaagcagttctaagagggaagtttatagcaataaacatttatctaaaaaaaaagtcttaaattaacaacctaacattgcacattaaagaagtagaaaaacaagaacaaacctaaacctaaaactgatagaagctagtaaatcgtaatgatcagaggagaaaaaataaaacagaaacttaaaaaatacaaaagaccaatgaagagctagttttttttttaattgaccagataaacaaaatccacaagtttttatctacagtaactcagggggagaaaatwtatagttccctcttagaactcagaacccaaacaaataaaatcagagatgaa

SEQ ID NO: 948744 - DNA, 611 bp, Homo sapiens
gtactaagggaattctatgatctctctttatttggccatcacaaaagactcctactctacacatggtttctaagaatatccacttatttatttagttagttcaactattccatacaaaattaatgaaatctcctgaactgtgtcccttaaatccagttttcactgggtatactaaaaacccaaataattaaacacttacctcaaatgttgtgtttaaaatacacaatgggttacagaggctggaggtggggagaatgagatgatggtcaaagggtacaaaatctcagaaatgtgggattttttttcccttttgagttctattgcacagcctggtgaatatagttaataatagagtatgcacatttcaaaatctaaatttcaaatgttctcaccataataaatgttaagtatttgaggtgatggatatattaactggcttaattattccacactgtattcataaattataacatcactttgtaccccataaatttatacacttatgaattgttaatttacaatttaaaaagttaaacccmgttctctgttagaagaaaaagagaaaatacacacacaatgatattgattccaaagtgattaagatactaaca

SEQ ID NO: 948745 - DNA, 638 bp, Homo sapiens
ccagctgcacaactggactaagtagggggtatagcccccacacaaggtcastctcacttctgacaccagttgaatgtttagggatgggagcggatttccaaaaccacctttgtatttgataattcactggaaaggctcaccaaactctctaaaagctgttatactcgtgattatggattactacaaggaaaggatgcaaattaaaatcatccaaggaaagaagtacgtaagacagagtccagggaaggtggcacgaagagagcttctgctgtcctcccccctggcatcatggacacattcctttcccagcaccaatgtgagacaacatgcatggagtattgccaaccaggaaagctcacccaagattttgttgtccagagattttattgcggctcaatcacacactgctgtgtggttaatctttagtctccaggatttgccagaagtcatactgacatctttaacctccagttccctccagagacaaaactcaaaccacatggccaaaagtcccatcataaatcacgttgtcagactgtcagatggtcaaagcctccaggcaaacaaagaccctcctcccctcaggcatgaaatatcaggcatttagatctcaccttccagtagcttagggcaaagtc

SEQ ID NO: 948746 - DNA, 637 bp, Homo sapiens
tctctttggccttaaaattgtatgatatgaagcactttcacatgaatacattaaattagtgtattcagagaaaaggctttgctttgtttttgcttctcttggtaggtctttttgatgatgctcattgcacagggcaggggactgtttagagcgctggaagttgacacgggagccgccaagatcctaatgctgtgtagttgttgagacattcagctgttagtggacagagcattcaacagagttaagtagaactaagtgccttcctttttaatataatgactgaaagaagagaaaaaaagcacaagataaaagagcaaatctgcatgtcaccaaccaaaaacaatggaggtagcatatttccaaggagttgaaatgcttcttttatattttttcaatttataaagaatagaaatttattatttatggttctggaggctggaaggtccaaggtgccagcagatttggcaattctgattccaagatgacactttgcacactgcatgctttagagggggsgaacactgttcctcacatggcagaagagtagaagggcaaggagagggtaagagaaggcaagagggggccagactctaccagtcccatccatgagggtggagccatggcctaatcacctccc

SEQ ID NO: 948747 - DNA, 615 bp, Homo sapiens
atcaagcagaagaaaggatattagagattgaagatgaccttgctgaaataaagtgtgcagactagattacagaaaaaagaatgaaaaggaacaaacaaagcctccaagaaatatgggactaggtgaaaagaccaagcctgtgtttgattggattacctgaaagtgatggggagaatggagccaagttgagaaacacacttcaggatattatccaggagaatgtccccagcctaacaagacaggccaacatttgatttcaggaaatacacacaacacgactaagatactctatgagaagatcaacctcaagacacataatcatcagattctccaaggttgaaatgaaggaaaaaattttaagctcagccagagagaaaggttgggtcacttatgaaagaaagcccatcagactaacagtgtatctcgctgaagaaaccctgtaagccagaagagagtgggggccaatattcaacattcttaaaggaaagaattttcaacccagaatttcatatccagccaaactaagtttcataagtgaaggaggaataaattsctttccagacaagcaaatgctgagggattttgtcaacatcaggcctgccttacaagagctcc

SEQ ID NO: 948748 - DNA, 370 bp, Homo sapiens
agccctacaaaatgcatttcttaaataataagacttgaaagacaaaattacatggatttatgagctgcagaatggatattttgttagtaggcatgaaaacaacattaatcttacacatctccatcagagctcttgagaaatcaagtgcattgtcaatgagcagtaatattttgaaagcatttttttttctctttctgagaataaggtctcaacagtgggcttaaaatatttagtaaaccatactataaaccaacgtgctgtcatccaggctttgttcttttatyaattaaacacaggcagagtagatttaacataactcttgagggcttagaatttttagaaagataaatgaatactggtttcaacttga

SEQ ID NO: 948749 - DNA, 678 bp, Homo sapiens
ttctggctcaaaggatcaccacttacatggccatttatgatgtgggctttatttacctctctaccttatctgttgataatttctccttgtttactctgctaaagggacattgtgttggtgctgttycttgaacctgccaaggatactcctgcttcagggctgttacttcacttgccatttcttttacttcatatagtctcactttaaataactcatggcttgttccccatattattatgctagggctgccataacataataccactgactgggtggcttaagcaagagaaatttatttactcaaaattctggaggctaaagtctaagaccaagacatcagcaggatcagtttctcctgaagcctcacttcgtggctttcatatggccacctcctcactgtgttctcacaaggcctttcctctgctcatgcacactcctggtatttcttcctcttcttataaggacaacagtcttattggattaggacctcaaccttatgacctcatttaaccttaattatgtctttaaaattctcatcttcacatagtcacattagggttggtacatcaatctggaatttagggaggacacaaatcagtttatgacatttatttattctttttataccttactaccagtctttgaaaaccgtactctccttacgatcaaattttatgc

SEQ ID NO: 948750 - DNA, 604 bp, Homo sapiens
tatgtcttcttttgaaaaatgtctattcaggtcctttgcccakttttaaattggggttacttgcttttctgctatatagttggaattctttatgtattttggatattaacccattatcagatgcatagttcacagatgttttctcccatttcaaaggcttttttcttcactctgttgtttcctttgctgtgcagaagccttttagtttaatgtaatcccatttgtcttttttgttttgtttgcctgtgcaggttatagatatcttaaacagaacaacccttcctctatttctttgtaaagaccatggcaaaacacagagtacgtggtaggtacacaattaatacatgttggctaattccctctataaaatagtgtttattccataactaatccatgaagaataattttaatctatggcatgctttgaaataggggctttacaagagagaactgggaggagaatattcctttagtgcacaatcctttggcctaggtcaaacttggttttagggcatctacttagatgacatctttctcctcaaaattcctgatggtgcatcatcacacaagtaatactcaataaaggctgtttctttttccactc

SEQ ID NO: 948751 - DNA, 616 bp, Homo sapiens
tttttttctttatttttaaattttattttatgttccaggatacatgtgcagaacatgcaggtttgttacataggtatacacgtggcatkgtggtttgctgcacctattgacctgtcctctaagttccctcccctcgtcccccatcccacaacaggccccagtgtgtattgttccccaccctgtgtccatgtgtttttattgttcagctcccacttatgagtgagaacatgtggtgtttggttttctgttcctgcattagtttgctgaggatgggggcttccagcttcatccatgtccctgcaaaggacatgatcttgttcctttttatggcttcatagtattccatggtgtatatgtaccacattttctttatccagactatcactgatgggcatttgggtggattccatgattttgccattgtaaatagtgctgcagtaaacatacatgtgcatgtgtctttatagtagaatgatttatatttctctgggtatatacccagtaatgggattgctgggtcaaatggtacttctggttctagatccttgaggaatcaccatactgtcttccacaatggttgaaccaatttacattcagagggaattttttttgttcc

SEQ ID NO: 948752 - DNA, 582 bp, Homo sapiens
tggtcctgggattctttttttttttttttcctttttggttggtaggctctttattcctgcatcaattttagaactcgttattgttctattcagrgatttaatttcttcctggatcagtcttgggagggtttatgtgtctaggaatttatccatttcatctatattttctaatttatgtacatagaagtgtttatagaggtgtttatagtaggtttgatggctgtttgtatttctatgtggtcagtgtttatatccccctttttatttctggttgtgtttatttgaatcttctatcttttcttctttattattctagctacaggtctatctattttattaattttttcaagaaaatagttcctggattcattgatttttttaaagggtttttttgtgtctctatatcatttagttcagctctgatattggttatttcttgtcttttgctagctttgggcttggtttacttttggtcctccagtttttttagttgtcatgttaggttgttaattgtgatctttctagctttttgatgcgggtatttaatgctataaatttccctcttaacactgctttagctgc

SEQ ID NO: 948753 - DNA, 692 bp, Homo sapiens
aattccacctgagtctgcccaccactgttacctggacctgggaagttggatatctaaaaagtaaaagtttccctgctatgctctgatccaactctagttgccaagctcccaaggccacagcgaggtaaaagggattccatttttaagcaaggagaccatatgtgatgccttctcctagatcacgcaagagaaaaacaactgccttgtctgtgaaggtgggactactgcccccttctggaaaacaaagattgtctgaccatctccatgggatcggggggaaaatatctctatagacccaacttgacaggaaagaataaacatcacaccccagagggcctctgtttgtgccccaattgggctcatttttgtttgtggccatgaatgggaagaagtcacacctcataactcctgactccccagggagtcacctcttctttaggaacagctttcccttgtatgtcaaaaaacttggaatagaggtgaattacattggttaccctagcccctccagggatcactgtctataaccccttaagacacaggaataccagaagtaaacaagcaataggrttaattctggcaggaatcagggcagcgaaaggactagcagcaccctggggcaaccttgcctaccatgagttaaccctaaagaatttaactcaaaccctagaatccttagccaccaacactgg

SEQ ID NO: 948754 - DNA, 388 bp, Homo sapiens
atcatctggttagtggcttctgactcagaggaccttcatcccctggggcaatgggtcttccagtgattcccttgacataaggggcatggacgagggggtggcttatttctacttggacaatcttttttaaagtgtccttgtagaccacactggaaataagccctattaggcatttgatttgcccagcttttcccttttccagagcctccaaagtctgattgcctgagggccgtgactaaagcggtggccctttttaaatcccrtttgtcccattctgcctgctcctcctgatctctattataaaaaaccgaggttgccaagttcaatagggtttctaagttttgctctgggcctaaggtggacttttgaagttttttctaatgtctgc

SEQ ID NO: 948755 - DNA, 667 bp, Homo sapiens
ccacccagactgagggtaagtctgcctctcccagtccactgactcaattgtttatstcctttggcaacatcctcacagacacacccaggcacaatactttgcatccttcgatccaatcaagttgacacacaatattaaccatcacaagcctatatgtggaagagtggcaataacgaggaacagaaaaggtatatggatggccagtaagcacatcaaaagatgctcaacaccattagtcatcagaaaaatgcaaattaaaaccacaatgagggctggcgcggtggctcatgcctgtaatcccagcagtttgggaggccgaggcaggtggatcacatgaggttaggagtttgaaaccagcctgaccaacatggtgaaaccccgtctctactaaaaatagaaaaattggccaggcacagtggctcacgcctgtaattccagcactttgggaggccgaggggggcagatcacgaggtcaggagatcgagaccaccctggctaacacggtgaaaccccgtctctattaaaaatacaaaaaattagccgagtgtggcggcacgtgcctgtagtcccagctactcgggaggctaaggcgggagaatggcgtgaacccgggaggcagagctttcagtgagccgagatggcgcccttgcattccagcctgggcaac

SEQ ID NO: 948756 - DNA, 626 bp, Homo sapiens
aataataggtttatcactgcgggccttaagttttgcaaggatttataacagcaacagaaataagagacaaaagctggtagatgctaccagctaaaatataattaccatgatgcataatcctcttaatatgctgctgcattcagtttgctagaattttgttgagaatttttgcatgtatactcataagggatattggtctactgttttcctgtgtttatctggctttggtatcaaagctagcctcatagaatgctagcctctgaataagttgggaagtgttcactcctctattttttggacaagtttgagaagcattggtgttaattctttaaatgactgatagaattcaccagtgaagccatctggtccagtccttttcactgtcagatttttaaaaattactgaatcaatctttttgttattaatatgttcaaactttttattacttcttgggtccatttggtagtttgtatatttgtaggaaatcattcatttaatccaygtcatctaattttttggcataaattggtcatagtattctcctataatcctttctatttccgtgaggtctgtagtaaagtcaataatttcatttctgattttagttatttgaatcttttttaatg

SEQ ID NO: 948757 - DNA, 600 bp, Homo sapiens
gacaaattgtaaagaacattgacactacgaagaaactacatgaactaacaggcaaaacaaccagacagcatcacaatgataggatyaaagtcacacataacaatattaaccttaaatgtaaatgagctaaatgccccaattaatatttacagactggcaaattggataaagagtcaagacctatcagtgtgctgtattcaggagacccatctcatgtgcagagacacacataggctcaaaataaagggatggaggaaggtctaccaagcaaacagaaaattgaccacaaaattggaagtaaaacactcctcagcaaatgcaaaagaatggaaatcataacaaacagtctctcagagcacagtgcaatcaaactagaactcaggattaagaaaatcactcaaaactgcacaaatacatggaaactgaacaacctgctcttgaaagactactgggtaaataatgaaatgaaggcagaaataaagatgttcttgaaaccaatgagaatgaagacacaatataccagaatctctgggacacatttaaagcactgtgtagagggaaataaaagcactaattgcccacaagagaaagcaggaaaca

SEQ ID NO: 948758 - DNA, 441 bp, Homo sapiens
atataggtcaaatgtgaattccttacaattttttctgaatgggaagtttagggaacgactccaatgttcctgtagtcgctctaagtcgtttaggtgtgctataggatgaaaagaagaataatgaaactgtggtatatgcatgccgtgggatatcattcagtcatacaaaagaagaaagtcctaccatttgtgacaatatggatgaacctgcaggatattatgctaagtgaaataagacagtcacagaaggacagaaactgcaggattccacttatatgaggtatctaaaatagtcagactaatagaagcagagtagaatggtgatttgggggagcagaaaggggaaatttattgctcagtgggtataaagcakcaattatatgggaagaaaaagttctagagatgttttgtacaacttagtgcttttaggtaacaaaactg

SEQ ID NO: 948759 - DNA, 573 bp, Homo sapiens
tcccacttttggaggaaggacttggtcagaggtgactggatcatgggggcggatttcccccttgctgttcttgtgatagtgagtgagttctcatgagatctcatggtttaaaaatgtgtggcatcccccccttctctctctctctctcctgtcacatgaatacgtgtgtgcttccccctttgccttctgtcgtgactgtaagtttcccaaggcctcacccagtcttgcctcctctatagcctgaaaaactgtgagtcaattaaacctcttttcattataaactacccagtcaaggtagctctttatagcaatgtgaaaatggactaatacacttggttaggggtattcctaggtattttattctttttatagcaattgtgaatgggattgcattcctgatttggctctcagcttgactgttgaaagctggaggcatcatgctacccaacttcaayctataccacagggctacagtaaccaaaatagcacagtactggtacaaaaacagacacatggaccaataaaacagaatagagagcccagaaataagcctcatacctaacatccatctgg

SEQ ID NO: 948760 - DNA, 542 bp, Homo sapiens
cctccactgtacctcacagggtaaggcccaatggcctggaactccagccactccccaccggggctctcgggctagcagcacctctgtacctccctgggacggagctcgccgagggagaggcaggcccctattttggctgtcctccagccctcgccactcttgccctcaggctgtggaggatgcacggtgactagcgactggcatggaccccagcacacctgccccacggaaaacctgccagactgttctccaagtggatcccagttcccagtgtccctcactgggcggggcctcccgaccagcgactcgtgcctctgcctgaagacctcaggtggaggtggctctgtatttctctacggaggaaatcccagaagcagcccacatcccctccgtcattgcagcagcagtggtkccgccccaaccaccctcaggctggggaaggacaaagagcctggtcgctgggctggcacctccagcacactccagcccaatacagagatgagcccaagttctcttccctgtgaggccccacaccccgccat

SEQ ID NO: 948761 - DNA, 605 bp, Homo sapiens
gaataagtctcacatgatctggtggttttaaaaggggagtttccctgcacaagttctcttctcttgtctgccaccatgtgagatgtgactttcaccttccagcatgattgtgaggcctccccagccacatagaactgtaagtcctttaaacttctttcttttgtaaattgcccagtcttgggtatgtctttatcagcagcatgaaaatggactaatacactgccattatacttctttcacagatgaggaaattgaaccttgcagagattaagtgatttgttcaaaatcactcaggcaataaatggcaaagtcaagatttgaactcactttctctgaggccaattctccctacactcttccaagctacttttaaaaagtatcactaaaaaaggcagatgggagcagtggctcatgctgcactttgtgaggctgaggcaagaggattgcttgaggccatgagttcaagaccagcctggccaacatattgagatactyatctctacaaaaagcaaaaaaattagccaggcgtggtggcctgcacctgtactcctagctactaagtaggctgaggtgagagagtcacttgagcccaggaggtagaagct

SEQ ID NO: 948762 - DNA, 605 bp, Homo sapiens
gaataagtctcacatgatctggtggttttaaaaggggagtttccctgcacaagttctcttctcttgtctgccaccatgtgagatgtgactttcaccttccagcatgattgtgaggcctccccagccacatagaactgtaagtcctttaaacttctttcttttgtaaattgcccagtcttgggtatgtctttatcagcagcatgaaaatggactaatacactgccattatacttctttcacagatgaggaaattgaaccttgcagagattaagtgatttgttcaaaatcactcaggcaataaatggcaaagtcaagatttgaactcactttctctgaggccaattctccctacactcttccaagctacttttaaaaagtatcactaaaaaaggcagatgggagcagtggctcatgctgcactttgtgaggctgaggcaagaggattgcttgaggccatgagttcaagaccagcctggccaacatattgagatactcatctctacaaaaagcaaaaaaattagccaggcrtggtggcctgcacctgtactcctagctactaagtaggctgaggtgagagagtcacttgagcccaggaggtagaagct

SEQ ID NO: 948763 - DNA, 552 bp, Homo sapiens
aatagccctcactcgggcactagaattagaaggaaaaaaggtaagtatatatacagactctgagtatgcttacctagycctccacgtccacgcagcaatatggagagaaagggaactcctaacttccgagggaacacctatcaaacatcaggaagccattaggaggttattattattggctgtatagaaacctaaagaggaggcagtcttacactgctggggtcatcagaaaggaaaggaaagggaaatagaagggaactgccaaaagagccacaaagtgggaccctccattagaaatgtttatagaaggacccctagtatggggtaatcccctctgggaaaccaagccccagcactcagcagaataaatagaatggggaacctcatgaggacgtagtttcctcccctcaggatggctagccaccgaagaaggaaaaatacttttgcctgcagctaaccaatggaaccttacttaaaacccttcaccaaacctttcacttaggcattgatagcacccatcagatggccaaatcattatttactggaccaggt

SEQ ID NO: 948764 - DNA, 575 bp, Homo sapiens
taccctcccattagaaatgccatgtgaatgcaactgatacacccagggccagcaaggggacccaattttttgatgttcakttggctcactttccctttcttgattaattgcccccaatcctagaatactatattatacttctgggctccaaatcggcccccaaaccatagcattctacttcctcttcctatagagatggacaggacagctagggtatcaacattctagtaagagctgactagaaactgttccacataataagagctctccatgccagccattgactttggcatgttactgacattatccctaactttgctatatctctgcaaggtaggtgctgcagtttccaagttatagaccaaaagaaggttacttcactttttaaagctcttacagcctgtaaattagagagctgggcttcaaatccagccctatgtgacccaaagcccagcccatggtcttcttatcataacccactgtctcttcttctcagtttccaacaaccaaaatctgtttagctttcagcttgaataattcaagtagactttcctctacttgggcacatttctcta

SEQ ID NO: 948765 - DNA, 652 bp, Homo sapiens
cccaggtgtttcatatgtacatgaagttgagaagtacttctctarcaagacaaatatcattaacaccatcttcctccatggggtaagtatgctttagagagagaggataacttgtctaagtactcacaggtagtaaatggtggtccaggatttaactgaggtctatttatggagtggagttcatgctttttcccctgcaccttccctcactacttctttttaataggtatatttcataatctgttttacagaaaaaaaaaatacaagaaatcagtcagctcccacttgaatgcactttgaaagcatttacccagacagacaggctgagtataaacacctggtccaaagaagaaggatgggaagatgataattgagtttgtgtgtggctgtgggtggatgagtcacatgctcccctgctctcttgaggtaatctgcctttctgttgaattagggaacccaagggtaattgttggcaggattctcctaaaattctgctctgatgagcagaagacaagagcaaatggggaaaggcagaccatggcctgaggagatgaacaaactggcgtatgagacagggaatgtctttttttatgagcaaagaggtatttttatggtttgccttgagtgagtagcctctgatgctgggaaaaca

SEQ ID NO: 948766 - DNA, 603 bp, Homo sapiens
gagtcattgtctttcaggtgccaaaaatatcacctatcatattccccagagttcaaaaaaaagaggaaagaggagaaaaagcaaagaacaagttgaggataaaggtaatgtaaagcttctctagtcacagaaattattaaaaatagctataataactataacaacaataataatagcaataagaactagcattcaataacaatgaacaaaacagggctttctcacatgactttcctaatctacctaagagggagggagaatagtatccttagcatcttcattttacaaacaaagagacaacatcagagaaatcaagtaagtgactggcccaaagccacacagctatacttaagccaggccatcagacttcaaatcctgggcccaataccctattcaaacagccttaccagtgatttatcaagccactcccacatggcgtcattttggtgaaaaatctgccccttttctaccactgtgggcctaatggggtccttaggacttcacttctacaaagagagaagaaacaaagtacatttctagctttggggtgaaggttytaggtatatagacagtaaaaccttacttggaaggccaggcacggtg

SEQ ID NO: 948767 - DNA, 614 bp, Homo sapiens
tgtgctgcacccactgacctgcgcccactgtctggcactccctagtgagatgaacctggtacctcagatggaaatgcagaaatcacctgtcttctgcgtcrctcacactgggagctgtagaccggagctgttcctattcggccatcttggctccttcccccaccaagttgcttcttatggatgagcaaataaagtgatttctttgagaaggaatctactcctggttaacattgttgaaatgacagtaaataattgagaatcttccataaaccttacttgataaagcagtgcagggtttgagaggattgactctaattttgaaagaatttctattgtgggtaaaatgctaaaaaatcaaacagcattgcatactgcagagaaatcttttgtgaaagtaagagtcaattgatgtggcaactttatttttattttattttaagaaattgccacagccaccccaaccttctgcaaccactaacctgttaagtcagtagccatcaacatcaaggcacaacctgccaccagctaaaatattgctacttacttaaggctcagatgattgttagtatttttcagcaataagggattactttttttttttttttttgtagaga

SEQ ID NO: 948768 - DNA, 797 bp, Homo sapiens
cccatctgatgataagagaggcgtttggcacataccattttgttgtagatttagccaatgccttcttcagcatcccccttgccccagagmgtgaagaccaatttgcattcacctgggaaggagaacaatgaacctttatcatcttgccccaggaatatttacatagtccctactatctgtcttagcctagtggccacagatctcagcggatgaaccaccctgagcgggtatgtgtttctgttacactgatgacatcatgctaacttctgagtctttttccagcttacaaactgcagcccccaccttgctgtttcacttggtcagtaagactaatgttgttctgtctgccattatgggtaaggtataggcctcctttaagggactcaccaggtggccactgcaataggaagctcaggattgtaaaactgaatggtagtagggcaccccctttggggtgctgacacatggaaggacattccccattatatccagggcatgcatataacagtctaccatgaggatgcccacactgcatctacaccacctggaaatcaacaggcagatgagctagcctgcatatgtcttcttgaggaagttcccacagaagacgtggcccattggctacataagatgacactggggacaatgtaccctttgagccacagtgaagaactggggcctgctactactaaataaaaacatagtaggtgtctgacagtaatgttctacttgtgcacagggaggcctccaggcccttgccacatgataggcacagatcacttggggccagagcccag

SEQ ID NO: 948769 - DNA, 607 bp, Homo sapiens
ctatttggcccctgtatggttgtaaaatcagttccttaaatgcaggatamtcagagagctctgcatgtagcagcaccaatgagcatacaaatatactaataaagaggtcctcagaaaacaagtttgctctaaaatgtttcttccttaacgtctaatgatttttgtttcacatttgagacagtatactactttcataacactgttcatggaaaatctatcccgagagggaccctatttagaaaatataaactctatggaaataaagtaagggagttatacaaaaaaataattattcgatctgcagattccagaggccaataacttttcaatgagaattttacaatttattatcaaggtttttcatttcctgacttttagaaggtgggcagtgacataggtatggatttcccatctgtcaggtccaaagtgaaacctcatcttgtcaagaaaagtctccctgacccttccaattcataacagtctccaccttctctgaacctctgaatacattgcattatcattcttcttgtcaccataataagaatgcacagctgtatgtaatttcataagcatattaccctgattaaattttatactagtgaaaggc

SEQ ID NO: 948770 - DNA, 606 bp, Homo sapiens
ctgctcaacccctcgggggagggagcacaccagtgagggaggggaagggagcgagcaagtgcaagaactggcaggtggcctggcaggagcaaactccccttcactcagatctgcagggctccaccccatgtaggagggaccatgcaagtggaacaagtgcacgaactggccagctacttcaacactggcaggagcaatgtccatgcagtccccgccgcggcatcccattgtggtgcttgcgaccccaaggcccaagagggcgttttacaatactctattagccccaccatccacagatagtagtgtattatcagcttagtgggccctttgcgtcatcacgtggggtggttgacctctcccagcagggcaaagggccaatgtgacagcctttcagggtacctgtacttggtgcctcttgaattcttgtccattgcccaagagcaatgaggtcacatggatgaattgaaagatggtgaatgtggagaattttactgcttgatgaaagaggctctcagtggagaggggagmtggaaagaagataggaagtgcaggtcgctctccctggaagtcaagctgcctctctctctctcctgaagtcaagttgtt

SEQ ID NO: 948771 - DNA, 787 bp, Homo sapiens
acaggttgtgccgatgagtgtccaactcttggtagagaggagacccatagtgggtagctagctcctttctgcaggcaggtcatcctgacatgtccaggagacgcaaagtgggaagctctttcccacaactgttagtcccaatgtctgtgtgaatctggctgtgtctggggtttttatgggctcagaagggaggacatgtgctgattgattcatgggcagccatgcgcaggccaggaagaagtaccataaattctcactctgggctgcagactccacccagaactggcagcctgtcccctagacttcaggtcatacttaccttgaagatggggcttcactgggcaccctctcttctccacccaggaacctgtctgtctcccgtcaccatcaacatgctgtacacagcacccaggctattcatgccaaggagcgcctgcaggcccatgccaagccaccctcagcaccctgagcatccctcccatgattgtcagcacccaaagtctggagagggtaaagtcagcaggggtctagcatgtcagtgatactccaagtgtgcacacacctggctgggtcatgacagtgcctgggctcagcttccactttgctccaaaatcatagcaggtgcctggagcagggagaggccagagagcaggagcagagccccttctcagtggcccaggaagcctgcctttccccacttctgagcctgcaggagcttcctgggcccctaagactgcagggatgcccgagtctggaactgcarctggctggcttcagctgtacccgg

SEQ ID NO: 948772 - DNA, 600 bp, Homo sapiens
ggagtgcaatggcacaatattggctcactacgacttccgcctcccaggttcaagcgattctcctccctcagcctcccaagtagctgggaatacaggccaccacatgtgctgccatgcccggctaaytttgtatttttagtagaaactgggtttctccatgttggtcaggctggtcttgaactcccgatctgaggtgatctgcccaccttggcatcccaaagtgctagaattacaggtgtgagccaccgtgtccagccttcattctgattttatttgtgtcttctttttttccagtagtctagctaaaggtttgtcaattttatcttttcaaaaagtagctctttgttttgttgatttcttagttttgtttctttagtttatgtttttttatgctctggtattatttcttctatttgtgtttagtttgttcttttttgttagttccttgaggtgcaatattaggtattttatttgagatccttcttcttttgtagacatttattgcttgatattatttggatctttgtcccttccaaatctcatgtaaaaatttgatccccaatgttgaagatgggacccagcaagaggtgatgtgtcttg

SEQ ID NO: 948773 - DNA, 583 bp, Homo sapiens
acatgtacccttgaacttaaaataaaaatttgacaaaataattttaaatttaataactgtttttattaattgctatgacaaatagatgaagaatatagagtacttgtacaccactatcaaccacatctcttcaaaattttactagatgttccagccattgcaaaaataagtaaaatgcatacagagattggagaaaaagtaaacattttccgaaagtttgtagatgacagaattgtttatgcagaaaatattaaggtaactataaaactcctatcagaactaaaatatgtacttaacaaggcttgaaaatataagtcccatacttctttaaaaaacagttttttctagatggtaagaagtatcatgaagaagcagaaatagagaaaaaaagagatgatgctatttacagtagcatcaaacaccatcttcaatgacattaaaatcataaaatacttatggtattgatgtgaagatagacaagcacattaatggaagacaagggagtccgtaaaaaggtacacatgattatatacacacatctttaagayaacttacttagcaagtgcaaatagtcttttcaaat

SEQ ID NO: 948774 - DNA, 566 bp, Homo sapiens
tttaaaaaggatgcttttttaagaaagaatgttttcctayaatatatttttattggaaaataaccaaataatgaactaactttaggaaaaacttagtttataggttagcttataacaaagatgataacagtcctttcccaaaacaaacccccttcctgcctgaggactagactgtctaaagccacaagattagaagttatggttattttgctaaacaattcaagatttagctgttttcattaggccaatatcattgtcttatttattaaaaattacacaagcaaagatccttctgttttgggctgggtttatagttttgtaaccgctatgccagattttgacaccttgtagtatttcgcagggataagtgtgaaattgcttgatcaataaataaatacaaaaattgtatgctggcaattaagacatttttaatattacttggctgataatttttaagctatcttatttattaaagagtttacttagtcacataaacttgaaaaaggatttgaccagtctttccttttttctgataaagtatttgatttaaatgcttttacttttct

SEQ ID NO: 948775 - DNA, 612 bp, Homo sapiens
aatccattttagaaggttttctacaaggataacagattgtatgtggaatcattttgtacattccaaagaatgtttgtttctatgtttccagacacaaattatgtgtgtggaaagtttccccaattcttttctcagtaattatctattttctatctctaggagaaaaaaataaaatagaagttgattatagatgaaatcattcatttgtgagcatttttgaaagttaatgtttcaaatcagacccattgttgtgctttttctattgtttgtgcatgactgtaattactagaaattgtgacatttggaggctaattgaactgctgtcttgtctgacaggcacaagtgttctgggtagaaattcagacactaatatagtgggtgatgaacattatgtgaacatcatagagcctttctccccactgaattgagctgctctcgaggaaacacacacacatcactaaccagaattgtagttagttcagcatcacaatgtaggcatggtggcagagcttggcatggtcctgggtctcacttcccatcacttcytcagccccatcctctcttggcctgccggagctgcctcacctggccaggctccagaatggctgggag

SEQ ID NO: 948776 - DNA, 584 bp, Homo sapiens
actgcccaattgcctcggaagccctctggaccatcagggatgctgagctttgggtaactcttacagtggggcgtaagtccatcccctgtttaaytgatacaggggctaaccactccacattaccttcttttcaagggcctgtttcccttgcctccataactgttgtgggtattgatggccaggctcctggaccccttaaaacttcccaatttggtgccaacttgaacaatattctgttatgcactcctttttagttatccccacctgcccagttcccttattaggctgagacattttaaccaaattacctgcttccctgactattcctggactacagccacatctcattgccgcccttcttcccaacccaaagcctccttcacgtcttcctcttgtatccccccaccttaacccacaggtatgggacacctctgctccctccctggcaactgatcacacacccatacctaatcacccttaccctgctcaacaccagtatcccatcccacaacaggctttaaggggattaaagcctgttatcactcgcctgctacagcatgagcttctaaagtctaaaaactcct

SEQ ID NO: 948777 - DNA, 584 bp, Homo sapiens
actgcccaattgcctcggaagccctctggaccatcagggatgctgagctttgggtaactcttacagtggggcgtaagtccatcccctgtttaactgatacaggggctaaccactccacattaccttcttttcaagggcctgtttcccttgcctccataactgttgtgggtattgatggccaggctcctggaccccttaaaacttcccaatttggtgccaacttgaacaatattctgttatgcactcctttttagttatccccacctgcccagttcccttattaggctgagacattttaaccaaattacctgcttccctgactattcctggactacagccacatctcattgccgcccttcttcccaacccaaagcctccttcacgtcttcctcttgtatccccccaccttaacccacaggtatgggacacctctgctccctccctggcaactgatcacacacccatacctaatcacccttaccctgctcaacaccagtatcccatcccacaacaggctttaaggggattaaagcstgttatcactcgcctgctacagcatgagcttctaaagtctaaaaactcct

SEQ ID NO: 948778 - DNA, 603 bp, Homo sapiens
aaggatgttctctgtatttaaccagccatagtgcattcagagataaacagcttttatggactatttgcccagraattttcagtaaacaactaagttcaggccctgattttatttcggtcagtatgtgcacatattcacttgcaattacccagaaagaagagaaactggttaacaagaaacctaccattatgtcagatgctggaaatcaatctttagctacataatatttacaggaagcattttaagattcataatcgactgggcacggtcgtcacgcctgtaatcccagcactttggtaggccgaagcaggtggatcacgaggtcagatcaagaccatcctggctaacacggtgaaaccccgtctctactaaaaatacaaaaaatttgccgggcatggtggcaggcacctgtagtcccagctactcgggaggctgaggcaggagaatggcgtgaacccgggaggcggagcttgcagtgagccaagattgtgccactgcaatccagcctgggagacagagcgagactgcgtcaataaataaataaatgaatacagataaaaaaatcataatccactttttcagtctgtctattatatttcatta

SEQ ID NO: 948779 - DNA, 572 bp, Homo sapiens
aggccattatcctaagcaaattaatgcagcaacagaaaaccaaatactgcatgttgtcacttataagtgggagctaaacactargtactcattggcataaagatgggaacattagacactggggactactaccgaggggagagaggggaaggaggtggaagggctgaaaaactatccattgagtactaagctcactacctggctaaggtgacaatttgtaccccaaacctcaatgccatccaatatacccatgtaactaacctgcacatgtacctcctgaaactaaaataaaatttttaatttatttaaaatttttgtttaatgaaagttgtgatttttgtctaaagtccacactaccaaatgggtatcataccttaccttacccttagtatgtgccatggccccagtaggagcattaatctaaaagtttccactacttctgccttaagacaagaaactatatgttctctttggattgccgtaactttgcatgtgccatgatcatggttaaagaaaaataaatgttaacacattaaagtgtcttaagtatcttaaccgaatcaaaatatgaa

SEQ ID NO: 948780 - DNA, 713 bp, Homo sapiens
tctttgtaggtctctaaggacttcccttatgaatctgggtgctcctgtgttgggtgcatatatatttgggatagttaggtcttcctgttgaattgaaccctcctttaccattatataatatcattctttgtcttttttacctttctggttaaaattctgctttgtctgaaattagaattgcaacccctgcttttttctgttttccatttgcttggtagattttcctccatccctttattttaagcctgtgggtatcatgatgtgtaagatgggtctcttgaagacagcataccattaggtcttatttttttcttcagtctgccactctgtactttttacgtggggcatttagcctatttatattcaaggttattattaacatgtgtggatttgatcctactattgtgctgttagttggttactatgttggcttgtttgtgtggttgctttagagtgtcactggtctgtatgtttaaacatgttttatgttagctggcagcagtctttcctttccatatttagtgcctctttcaagatctcatgtaaggcaggtctggtggcaataagctctctcaacatttgcttatctgaaaaggatattatttctctttaacttgagaagattagttggttggatatgaaattattggttgaaggtttttytctttacaaatgttgaatataggctcccaatcttttctggcttgtagggt

SEQ ID NO: 948781 - DNA, 407 bp, Homo sapiens
tgtctactaatcctttatcaaagtagagataaaagtttgggccttggagtcagataacctgtgttcaatcatattttcactacttctaagctatgtgaccttgaacaaattatatcacttctctaaccttcagtttccatacctatgaagtgggaacaatggtaagatctagctcatagaattgttgagaaaattatatgtagcgatagtcataatgtactcagcatagtgcttgacattgagtaagcactccttaaatattacattataagcaatgtttattagtttacatagaggtaatatagtctaaaaaaatcagtatattcattgttcagttcccaactgtaagtgagaacaggcagtagtttggttttytgttcctgtgatagtttactgagaatgatgat

SEQ ID NO: 948782 - DNA, 584 bp, Homo sapiens
ttctccaaggccccatcagagcagctaaatacagagtgtcgattggtgcactcacaaaccttgagctagacacagggtgttgattggtgtgtttacaaaccttgagctagatacagagtaccgattggtgtatttacaatccctgagctagacataaaggttctccaaggcccccccagactcaggagcccaagtggcttcacccagtggatcccgcaccggggctgcaggtggagctgcctgccagtcccggtgccctacacccacactccccagcccctgggcggtcgatgggactgggcgccatggagcagggggcggcgctcgtcggggaggctcgggctgcacaggaacccacggaggcgggggaaggctcaggcatggcaggcttcagtcccgagggctgccccgcgggaaggcagctaaggcccggcgagaaatcgagcacagcgcaggtgggccggtactgctggggsacccagtacaccctccgcagccgctggcccggatgctaagtccctcattgcccggggccagcagggctggccggctgctccgagtgcggggcccgccaagcccacgcc

SEQ ID NO: 948783 - DNA, 664 bp, Homo sapiens
agatgcaggggtgcctacctccctgtgggtgttcaccacaatgacagaggcagcatagctgggtggagtggggggyccctgctggagattatgtgtgtggttgtactggatatggtattggcttggggcagggtgctggctggggcaggtttgggtgccttctctgtgccctgcaagcaggagtgatccctgagggtgtgggggtgtccgctgttctctgtgcagtattagtataagggcagggtgctggcaggggcagggcttgctggctttatgcccaccaaagctccatctgcagtggtggctgggggctgggtgggtgcagactacactccagtgtgctggcagggcaaggaaagcaaaacctatctgtgcagacatgtgccagcaaagtgatgtagggcattgccatgggccccggggaagctgcagtatggggagggagcatgtgcatggctgtataggccacacctcactggacttctccaccagtcaggcaaggttcactggcacagaagctatgctgtgggcccccaaggtacccaagactgccctctaagcaggtgtggccaggctggggccccagaagaggccaacagactaaggggtgcacaggtcagaccagccccatctgatgtgcaagaccacccttcagcgatcaggt

SEQ ID NO: 948784 - DNA, 582 bp, Homo sapiens
agctaaatttttgtggagatcgggtctccctgtctttaccaggctggtcttgagctcccggcttcaagggaccctcccacttcagcctcccaaagtgctgagattacaggcatgagccactgtgcccagcccatagcagactcttgaaagccgattatttgaattacaaattttgctttcaagtttgataatacctgtttaatttcatattttgtttttacctgaattcttctaagtggaagtttgcatgttgtagcagggaagtcctttaaattcttaacatttatcaatcctgtatcctctaagaaaaaagtaaagaggactattcctagtttagtgccaaatattgatgaggttttactgcccagtgataaattatatatacatgctgtgcatggtggctcatgcctgtaatcccatcactttgggaggccgaggcaggtgaatcacttgaggtcaggagtttgagactagcctggctaacatggtgaaatcctgtctctattaaaaatacaaaaattagctgggcttggtggmgcaggcctgcaatcctagctactctggaggctgaggcaaaagaat

SEQ ID NO: 948785 - DNA, 513 bp, Homo sapiens
cgcgacgggctttgtccgcggccgcccccgcccgcccgcctgcsggggacagggaccctaggacccgggccgggctcacctctctgccggcactgcgcggcgacacacagcagcaagaccaggagcacgcccccgcgcatctcgcctccgccgccactcggtgggtctggggagaaagccgcgcgcccgcctggaacgctccacgggacgcgagtccgcgctgccctggccccgccgctcctggagtcctgccgcccctccctccagccgccctcggacacacccctcggctgcgccccgccccgccccgtcccgccccggcttggccccgccacccagacccctcccccgggggcgcccagcttggcctctgggtcccggcgcacgcggaccccaagtcggggaggccgggctgaccgcggccgcctccccggctccgggtaggaggtgggcagagaaggtgggctgaggggaggagaaactgggctgcgggggtccgggagggtggattcc

SEQ ID NO: 948786 - DNA, 513 bp, Homo sapiens
cgcgacgggctttgtccgcggccgcccccgcccgcccgcctgcgggggacagggaccctaggacccgggccgggctcacctctctgccggcactgcgcggcgacacacagcagcaagaccaggagcacgcccccgcgcatctcgcctccgccgccactcggtgggtctggggagaaagccgcgcgcccgcctggaacgctccacgggacgcgagtccgcgctgccctggccccgccgctcctggagtcctgccgcccctccctccagccgccctcggacacacccctcggctgcgccccgccccgccccgtcccgccccggcttggccccgccacccagacccctcccccgggggcgcccagcttggcctctgggtcccggcgcacgcggaccccaagtcggggaggccgggctgaccgcggccgcckccccggctccgggtaggaggtgggcagagaaggtgggctgaggggaggagaaactgggctgcgggggtccgggagggtggattcc

SEQ ID NO: 948787 - DNA, 583 bp, Homo sapiens
tgggctggcttcacatcagcccagaagaggaaggaggatgttcaccaacttcacaaaacacgactcctctttttacaccgggagaatgagcacattttattatttgatcagcacattaaacgccatcagtacggagtgtctgttcccttacgctagtacctgattcctgttataaatgaggttcaggaatgctctcctggctgatgtaattttgagacagagttttcagatggaacttccaaagaatcccccaaaagcaacagcgtcatgggtagatacaaaattgggattgcttaagaacaattttttgcctgcttttggttcctgacattttattacacacacggcctcacgccattaaacggactccaaaaccacgacttaatacaagttgcatctcattccattgtatggggccctatgttccttgacggtctgataaagttggctagaagccagtttgttactagaccccataagtggcatctgaggaggaacgtgtcagggcacgagtgtgaacaatatgatctccygagactgtgacccacaggatgactgatgaggaggtggctgacaccacagc

SEQ ID NO: 948788 - DNA, 602 bp, Homo sapiens
aagtgctccagaatccatgcacaatttgttggagtgtgaagctatccatacctcttctagtctgtctatatggcagaataagatgcggctgaaacatcaggcaggggcccaagagactttcttaaattgtctctttaaaataacatgatttccatcctgggcaacaaggcaaaaacccgtctctacaaaacgtacaaaaattattactagctaggcatgtgcctgtagtcccagctacttggggtgctgagtggggagaatctcttgagctcgagaggtcaaggctgcagtcagccatattcatgccactgcactccagcctgggtaacaaagtaagaccgtgtctcaaaataataataataaaaataataataataataaatgattggctagacgacgtagctcatgccagtaatcctagcactttgagagaccaagattggagcatcacttgaggccaggagaccaacactagcctgggcaataaagsaacatcctgtttctacaaataataaaaataaagtaaaataaaataacatgatggaagatgaagaacaagtctgggaagctacgtgtttcctcatggagagattggatcaccc

SEQ ID NO: 948789 - DNA, 704 bp, Homo sapiens
ttcagtaattttggggtggtgatctatcctctgccatttaagccaagtcacactgatgttgagtccaccctgaagaatgtgtcaggatattctcattccaaggaaatagaaaaaggcattaagttcaaaatagcacgtgatattccaaaccaagactttgttatgatcttctcgggcaataatatgattatcaggtttttttttcacaggcaagttgattctaaggtcattaattttatctgtatccagtggaaattgtgttcattttaaattaaaataaaatgaacggtgtccatctgtttgtggaaacctgatctactaaggttgatataatcaggctatttacaagttcactgtgggtcagacaacagtatttatattcatgcacacagaaaattcgattagatagtgccgaggaagagcacacaccgatgggccgattaccctgaattcaggcagctcagattctccattcgcttgaatgtcatattagctggggatatcccttttgtgacgcagaatcttgcagcgaaacagttgggtgtagcctcctgtgagaaagaaatgcttgcagcakggattttccaggccggcatctcaattgcacagaaaaacattttgggaatgtttccatcagcccggcagtctgaaggtttgagcggaatggtgagaaggttctaaccaggcgtccttgggggtggagg

SEQ ID NO: 948790 - DNA, 704 bp, Homo sapiens
ttcagtaattttggggtggtgatctatcctctgccatttaagccaagtcacactgatgttgagtccaccctgaagaatgtgtcaggatattctcattccaaggaaatagaaaaaggcattaagttcaaaatagcacgtgatattccaaaccaagactttgttatgatcttctcgggcaataatatgattatcaggtttttttttcacaggcaagttgattctaaggtcattaattttatctgtatccagtggaaattgtgttcattttaaattaaaataaaatgaacggtgtccatctgtttgtggaaacctgatctactaaggttgatataatcaggctatttacaagttcactgtgggtcagacaacagtatttatattcatgcacacagaaaattcgattagatagtgccgaggaagagcacacaccgatgggccgattaccctgaattcaggcagctcagattctccattcgcttgaatgtcatattagctggggatatcccttttgtgacgcagaatcttgcagcgaaacagttgggtgtagcctcctgtgagaaagaaatgcttgcagcagggatttkccaggccggcatctcaattgcacagaaaaacattttgggaatgtttccatcagcccggcagtctgaaggtttgagcggaatggtgagaaggttctaaccaggcgtccttgggggtggagg

SEQ ID NO: 948791 - DNA, 575 bp, Homo sapiens
tgttgatttttctgtctcatttatttgtctagtgctgttaggagagtactgatgaaccccactgttattgtactgctatgtatctatttttttagctctagtaaaatttgttttatgaatctggatgctcaggtgttgggtgcatatatatttaggattgttatattcttttggtgaattgatcttcttgtcattaaataatgactttctttaatttatttaactgttttctgtaaatttttttgcttaaagtctgttttatctgacttaagtatagatactcctgcttgctttgggtttgtttgcatggaatatctttttccatccctttactttcaggctatatgtgtttttaccagtaaggtgagtctcttgtaaatagcatatagttgcatcatattttatttcaatccatttcaccaatctatgcattttaagtgaggatttacgccatttacrttcagggttaatttttatatgtgatgttttgtttctctcatattgctggttgttatctatttgttttattgttttttaaatttttctgtctttgtggtttggtggagttcagctgt

SEQ ID NO: 948792 - DNA, 608 bp, Homo sapiens
gtcacttttttttgtttgtgttttgaatttactttytttagggtgggacatttttttttcctgaagatgtgactatgatgtatattgaattgggctatttggctctgcttctagatatgttcggtggcaaagactctgtatgatttttctttgttatgaatagccttagtaggatgactttttcaaatttcagttttaacagtagtgtaccaggcagatgagcaggctcataacctcttgagtagctgaggtgacaagatgcaatggttgtagtagaagttacaaaaagcttatctatcttgttcccatgtggtatgcacttgtgtcagcaaatgttgtaatgaatgggctgtgtgggtcaacctccaggccaataggtggcatttgcagataggaaatggctgtggtggtagcagtggaatttatacttgacctttgtgatcccggagaagtgctttggtgtcccaggtgatgatttgggccatggaacattctctggtctgggtcccatgttctgtctcagtggagggtcagggagggagcctggactccagtagagctggactgggcaagcctgcacttgggcttcccaatggcaggcacaagca

SEQ ID NO: 948793 - DNA, 584 bp, Homo sapiens
aggatcttttttagacaagcaaaaactaagaaaattcatcaccacgagaccagccccacgtgaattgcataagagagcctgacacgtggatgtgaaaggatgatatctgccattatgaaaaamcacaaaagtataaaactcactggtacagcagatgcacaagtaagaaagagaaagaagtaaaatgatctcactacagaatacctccatactgcaatgttaaacaataagaggcagagaagaaaacaaagggtttacaacacaaccagtaaacaattaacaaaagaacaggagtaaattctcaacattcaataaaatctttggtaaatggtttaaattatcaaattaaaagttttgctgactgggctatatagatttaaaaaattgacctaactatatgctgcatacaagaagctcactttacctggaaatacacatgcagactgaaagtcaaagaatggaaaaagttattccttgtgaatggaaaccaaaaatgagcagaagtagctatacttatatcagataaaatactttaagtcaaaaaacattaaaagagacaaagttattatataatgataaataaa

SEQ ID NO: 948794 - DNA, 620 bp, Homo sapiens
ccagatgacttcactgctaaattctaccaaatttttaaagaactaaaatcagttctcacaattttgcaaaaaagtaaaaaggagtacaaactttcttactcattttataagggaagcattaccctgataccaaaaccagacaaggacacaacaataaaagaaatctacagaccaatattttgaatgaacatagacgcaaatatcctcaacaaaaaactaacaaatgaaatccaacagcatatcagaaggattatacattgcaattacgtgggattatttttctaggaatgcaaggatagtttaacatatgcaagtcaataaatgtgatacatcacagcaacaattgaatgatcacctcaatagtggcagaaaaagcatttgataaaattcaacattacctcatgaaaaaaaaaaaaacacctcttaacaaattaagtatagaagtgtacctcaacacagtaaaggccacatatgacaaaaccacagctaatatactgaatggagaaaactgaaagcttttccttgaaaaactgggataggacaatgatgcccactttcaccactcttatttaacatagcactggaagtcctarccagaataattaggcaagagaaaggaa

SEQ ID NO: 948795 - DNA, 556 bp, Homo sapiens
gcaatcagggtctaaaagtgatattagcactcccatgttaactaagagatggaatcaactcatgaactagagaatcaagagcaaacaaaccccaaagccagcagaagacaagaaataaccaagatcatggtggtactgaagaagatagagacatgaaaaatcttccaaaaaaaaaaaaatcaaagaatccaggagcttttttttcggaaaaaaaaaaaaaaaaagataggccactagctccactattaaagaagaaaagagagaagaatcaaatagacacaattcaaaatgataaaggggatatcaccactgaccccacggagatacaaacaaccatcagagaatactataaacacctctatgcaaataaactaggaaatctagaagaaattgataaattcctaaacacacacccactccgaagactgaaccaggaggaaatttattcccttaatagaccaataacaagttctgaaattgaggcagtattaaatagcctactaacaaamcaaaacaaaaataaaaaaaaaaaaaaaagcctagggccagacagatt

SEQ ID NO: 948796 - DNA, 586 bp, Homo sapiens
atttgactgaggactggcaacccctaggtagctttaggatggagactggtcaccaaaagatgaccaaggcagaattagaaggttgggattttcagtcccacccccaacctccagggatgggagacaggctgaaagttaagttgctcaccaatagccaatggttttgtcagtcatgctttcgtaatgaagcctctgtaaacacaaaaaagactaggttcagacaactgctggagagccaaatgtgtggaggttcctggagggtggtgtgcccaggagggaagctccacatcctttgccccatgtctttccttacgtatcttttcatctgtactctgtaatatcctttacaacaaactgagtcacgtctttttctgagttctcttagctactctagcaaattcattgaacacaaggaaggggtcatgggaaccctgatttatagacaattggtcagaagcgcatgtaaaacaacccagggcctgtgactgccatgtgaagygaacggtggtcttgtgggactgagcctttaagctgtgggatctgatgatatctccatccaggctgtgttggaattaaactggatgac

SEQ ID NO: 948797 - DNA, 581 bp, Homo sapiens
gctaaaggcatagtcaaggttaatgctcctttttctttatctgacctctcccaaatcagttagcgtttaggctctttatcrtcaaatataaaaacacagcccagttcatggcctgtttggcaacaacccttagacactttacagccctagaccctgaagtgtcagaaggccatcttattctcaatatgcattttattacccaatctgctcccaacattaaataaaactccaaaaattatattctggccctcaaaccccacaacaggacttaattaacctcaccttcaaggtgtacaataatagagaagagttgcaattactttcctctgctgtgagagaaaccccagccacatctccagcacacaagaacttcaaaacgcctaagccacagcagtcaggtgttccttcaggacctcctcccccaggatcttacttcaagtgctggaaatctggccactgggccaaggaatgcccacagcccagggttcctcctaagccatgtcccatctgtgcgggaccccactggaaattggactgtccaattggcccaaggctctgactgactctttcccatatcttct

SEQ ID NO: 948798 - DNA, 581 bp, Homo sapiens
gctaaaggcatagtcaaggttaatgctcctttttctttatctgacctctcccaaatcagttagcgtttaggctctttatcgtcaaatataaaaacacagcccagttcatggcctgtttggcaacaacccttagacactttacagccctagaccctgaagtgtcagaaggccatcttattctcaatatgcattttattacccaatctgctcccaacattaaataaaactccaaaaattatattctggccctcaaaccccacaacaggacttaattaacctcaccttcaaggtgtacaataatagagaagagttgcaattactttcctctgctgtgagagaaaccccagccacatctccagcacacaagaacttcaaaacgcctaagccacagcagtcaggtgttccttcaggacctcctcccccaggatcttacttcaagtgctggaaatctggccactgggccaaggaatgcccacagcccaggrttcctcctaagccatgtcccatctgtgcgggaccccactggaaattggactgtccaattggcccaaggctctgactgactctttcccatatcttct

SEQ ID NO: 948799 - DNA, 378 bp, Homo sapiens
tggggagtaaaaaaagaatttaatagtctgattggraaataagccacatttgagtgaaaataaaccacacaaggctatacataagtaattaatgtaataaagatttaagctgggccatatatgtgaccagacgatgattttaaaatgttattataagtaattgtgatggaagtatattgtttaaatggaaataaatacacttcattttaatttcatgactattatgctgcttattctagggcatacttctaattatgtctcttgctcataagaacaaactgtcttctgcactatctctaagtccagtgctttctctatgacattttgggggacaactaagctgtctagaataaatgcacatacagcagaagggaagaa

SEQ ID NO: 948800 - DNA, 617 bp, Homo sapiens
ctgctttcacaggctgctgtcgactgacagtggcttttccaggtgcacggtgcaagctgtcagtggatctaccattctggaggctggaggatgatggccctctactcacagctccactaggcagtgttgcagtggggaccctgtgtgggggctccaaccccacacttctcctccacactgttctagcagagggtctccatgaggactgtgcctctgcagcagacttctgcctgaacatcctggcatttccatatatcccctgaaatctaggcagaggttcccaaagcttaactcttgtcttctgcacacctgcaagcctaacaccacatggaggctgccaaggcttgaggcttgcaacctctgaagcagtggcctaagctgtaccatggccccttttagctggaggagcagggatgcagggtgccatgcctcaaggttgcacagagcagtggtgacccacaaaaccatttttccctcccaggcctctgggcctgtgatgggagggactgctgtgaatgtatctgaaattccctggagacgttttctccattatcttggcaactaacattcagctcttctttacttatgyaaatttctgcagccttcaatttctccct

SEQ ID NO: 948801 - DNA, 620 bp, Homo sapiens
ctgagcatcacattcccttctcamcccctaccaccgtgatgaacaccactgtggtgtgttccggtgtgctgctagtttcctctatttaagcaccaaaatgtgggtgcttgttcatgataaaatttggcaattcctgaatttaggtgaaagttagttcagagagttagttgcagattgaattaaacttttaaatcaaaaggttttttttaatttaaataactttctgaccatacctcttccctgttaacttcttttcaaggtatcttaccttgttttcctttctgcaatttattcatgagataaagtttcctttctctttttgcttaagcatttgggctcccattgacttaaagaagtccctgatagagagattttagaatgagcaataccagtgtttttcatgtcatcatggtggctctccacattttatgtggcaatgtctggaggattcacactgtatgattgacttggggccttggactgacccggctctgcaaatctcagttccaaggctgagttctgtatgtagagatgagttgctatgtgtccactttattagggctggtccagggctcctcaagggtagctacactgaggacagccctcctttgagtggatga

SEQ ID NO: 948802 - DNA, 639 bp, Homo sapiens
aaatctgcctttgaatctctctagtaaatgtttcaattgttgtctttttcagcccagaaaggttattttttggtttcattttaggttttctatctctttattgatatttacatcatgtttatacattgttttcttaactttcttcacatcttcctttagttctttgagcattgttaagacagttattttaaataaagtgtttagtagttctgccattggttctttttcagcaagagtttctgctgattaattatttcctttgaataggccacactttcctgtttttttttttttttggtatactttgtaattttctaattggaaattggatatttgaatctaattatgtggtaactctggaaattagattcttccccttctccagggtttgattatgtatttatttatttgttatgattgtaggctgtcttcaggattagcctgaggtgagaacttagggtcctctcaagtcttttctgagcctgtgccttttcctgacttgcacagtcactttctrattttcactatatatgcaatggcttttgaatgtcctagtatttaatgtctagcttccaaaaggggaaataaaataaagggggagggcagggaaattggaccagccctttaaattctctggaa

SEQ ID NO: 948803 - DNA, 762 bp, Homo sapiens; identical to SEQ ID NO: 948427

SEQ ID NO: 948804 - DNA, 603 bp, Homo sapiens
gccccattaccaactgtttttgtcttagaagtccctctttgattatataaaccaacattatttcttgttctgttatgaatgaacattgctttagtccttcagtaagcccatcacaamttttcaccatgtcatttataggcactttctctgtagtgttaacatcatcttcattgtcactgattatcacgatcaacttgattcaaaaccatttcagctacttcatcattggtcagcgaatgaacaactggagcctcattatccatgataaacattgtttgatattcacttcttccagcttacagacagacagacattgggggtatattttttgcatgtgtgagtagatcagccgttattttttttctcacttgacatacacaatccttcaaagtcactaccttgtttatcatcactgaacatagttgcaggccagagattgtgccaggcatgcacaactttgtctatagtcactatgttccaagcataggcaacagcatatatggcatcctgcagactaaaatttttttcttttttttgagatggagtttcgctcttgtcacccaggccagagtgcaatggcgtgatctcagctcactgcaacct

SEQ ID NO: 948805 - DNA, 761 bp, Homo sapiens
cagcgaatgaacaactggagcctcattatccatgataaacattgtttgatattcacttcttccagcttacagacagacagacattgggggtatattttttgcatgtgtgagtagatcagccgttattttttttctcacttgacatacacaatccttcaaagtcactaccttgtttatcatcactgaacatagttgcaggccagagattgtgccaggcatgcacaactttgtctatagtcactatgttccaagcataggcaacagcatatatggcatcctgcagactaaaatttttttcttttttttgagatggagtttcgctcttgtcacccaggccagagtgcaatggcgtgatctcagctcactgcaacctccgccttccaggttcaagcaattctcctgtctcagcttccggagtagctgggattacaggtgcccgccaccatgcctggctaatttttgtattttttagtacagacaggatttcaccatgttagccaggctggtcctgaactcctgacctcaggtgatccacctgcctcggcctcccaaagtgctgggattacaggcatgagccactgcattcggcctcatactaaactttttttgaaaacctccacgcccattcttctgtttattgctgctagcatgctgttcaakaaagtatttttatatttatccttcaatgctttaaggatatcctggtcacatagctgaatcaataaagtcacatttgtggggaagtacatggcataaacatg

SEQ ID NO: 948806 - DNA, 655 bp, Homo sapiens
tccaggaaaaaaactggaaaacaatgtgtgccacattaaataagctctttctgcctgcagccagccctctgagagcaatgagcacaaggtcctcctatcaatggtaaactttgtttaaatgtaaggctgttaaaattcacgagaagagtaataaaactccagggcagaagtcaagaaacttgccaggtgccagacggcaaatactttgggctttgcaggccaagaggcaagatccataatatgatgtaggtacttatataatgagaggatacaaataatcacacaagtttttattgacaaaaatcaaaatataacaattgggtataattttttctaatacttggcaaagatactctcgaccaaacctttagtcaggttcccttgagccctcttctcaagggggcctctactttagccttcagtgtctgtcccttcagagttgtagcaagaatcctccgaagtcagtttagagagaatgctcccacccacgatatctggtcaaacccctctcttccaacatccaccaagtgatatctgatcatcccgtactgccttcaacaagaatcctcagggtmctttaagcgagaatctcgctacccttgatgtcttcctcttagtaatttcccatccactgactctccaacctcttcagcta

SEQ ID NO: 948807 - DNA, 891 bp, Homo sapiens
catattcagagtaagtgtttattccagaaaggacaaaatttcacttcttccaggatggaagttgtccagtgtaatcaacctaccactagatacctggatgaccacctcagggaatgatgttatgtcaggagctcagtgttggtgtctactgctggcatatgggcactcagcactgaccaaagccagattagcctaggtgagtagaaattcatgttgctgagtcaatgctgccaccatggccactttacttatgagcccactgggcagtgatgagtgactgaggaaagaagctgattggtttccacagaatggatcattctatccatgtgattattaaaatcctcctctgctgagacatccttttgtgaacaatcaaacgggacacaaatatcttcatgttttttcccccattccgagacatctatccatataccttttcactcaatttctttgtcaccaattttcttttaatgttactttcaagtccctgatcatccagccaaactttgactacagcccatgaatcagtacacaatcccatgtctggtcatttctcctcccaagcaaagtatacaaccaggttccctgcccaaagttatgcctatacctaacccacaaattcataaagtggggagtgcatagcacactccattatcaaatggaagtggtatgtgtgtgatagggcctgaacagcccctgaaggcacaagtaagtttcattaggaagaggcccaaatgcccatggtacccactcttgctacactgcctcatttctccaaacgctcacctatggcatcatgaggagtttcctacgatcagttgacagagaaagagaagacctggtcatggtttacatacrgttttgcagaatatgcaggtaacacccaaaagt

SEQ ID NO: 948808 - DNA, 539 bp, Homo sapiens
tctttgctccctagccatcacactacactgggatgagacacaacaagcacccaaatgacacagtgaccatttcttttggtcactgaggttcacgagatgggctgtttttctwtttcaatcgaggagctgaaatcctaccagccacctaacaattaacaaccccaaccctgtccacggttaaaatcaacgaaaaaagcaaggccaacttcttgtataacttccttcatacgggaaaaacatcaagttcaacgtgtgttaatcaagtgtcaggtcaatgtaccacgcaaatatatttgatgttttttgctaaggccaatactaaactgttaaacacagagaatatgaggaaaaacaaggttaaaaaaagtgtatagatgtccaaccctcttttaataattccaaaaaaacacaaagctacttaggcaaaaataaatcacaaatctattcaggagcactgtaaaacggaagagaattatctaaagggattcaccggctactgactaattttaatatgaaatgcctcacaaatctccctgtgc

SEQ ID NO: 948809 - DNA, 613 bp, Homo sapiens
cacagtaaaatgctgctgatgaggcacctctcatgaagggccatcccatcaacacatttatcaactctgcagcaagatctgaggcatagcacctcactgtggacttggcatcctagagggcatatttccatcaagtcacaccagcatggcatcttaggcaccccggtgactcctccatcatccagtgagccataccatgccctcttcaatgaattttgaatctcagtccaggaaggaggaatctcttttggttactcttagctcagccctagggatagtggttgcttcttatatttgctacccctatcttctttagggtcctctttaactcttactctacaattccctgttattccaatctccagttaatatttctttatattgggccagaggcagtggctctctcctgtaatcccagcactttgggaggctaagctggaagaattgcttgagcccaggagttcaagaccaacctgggcaacaaagacggaccccatctttatagaaaatttaaaaaattagccrggcatggtggctcacacctgtagccccagctacttgggaggctgaggtgggaggattgcttgagcccaggaggtcagggctgcagtga

SEQ ID NO: 948810 - DNA, 593 bp, Homo sapiens
agatacacccaagactgggtaatttataaagaaaaagaggtttaatggatcatagattcactgaaaccatctcagcaaaattctgaccaagacagtgaaagagatccaacttaaacaactccatcttgccactaacctccaagctgtccttgtttattcctgggcataggctaaactaactttgggaggaacttagtttatagtttaaaacagagacagtgaaagtccttttccaaaacaaacctccttctttcctggggactagactactaacattagccacaagattaggaattatggctttgaagtcacactgctgaaggctacaagattctgaccctccctaaactgatcctaaaatcagtgcttgagatattttgcagacactgcacttgatggatcaaccggcacccctcagattgagaaactggccaatctgatcttgtgaccttcccacccaggaactgactcagtgcaagaagacagtgacatyggatgatttcatctccaacccaaccagttagcattccctgactcactgcccctcatcctgaatacttgggagacatatttgagtaataataaaactttgg

SEQ ID NO: 948811 - DNA, 593 bp, Homo sapiens
agatacacccaagactgggtaatttataaagaaaaagaggtttaatggatcatagattcactgaaaccatctcagcaaaattctgaccaagacagtgaaagagatccaacttaaacaactccatcttgccactaacctccaagctgtccttgtttattcctgggcataggctaaactaactttgggaggaacttagtttatagtttaaaacagagacagtgaaagtccttttccaaaacaaacctccttctttcctggggactagactactaacattagccacaagattaggaattatggctttgaagtcacactgctgaaggctacaagattctgaccctccctaaactgatcctaaaatcagtgcttgagatattttgcagacactgcacttgatggatcaaccggcacccctcagattgagaaactggccaatctgatcttgtgaccttcccacccaggaactgactcagtgcaagaagacagtgacattsgatgatttcatctccaacccaaccagttagcattccctgactcactgcccctcatcctgaatacttgggagacatatttgagtaataataaaactttgg

SEQ ID NO: 948812 - DNA, 592 bp, Homo sapiens
ctaagagtttagattgaagtttctctacccttycaaaatgtttggcttttatcattgctaacactgttgttggttcccccaggagctataatcaatgctggatttacccaacagctatgctaagcagatacttaacaatgccaacagagtgaagacaccaaaatcattttttctaatttaatttaatttaattttaagttctgggatacatgcgcaggatgtgcaggtttgttttataggtaaaagtgtaccatggtggtttcctgtacctatcaaatcgtcacctaggtattaagccccacatgcattagctatttatcctgatgccctccaggccccagtgtgtgtagttcccctccctgtgtccatgtgttctcatttttcagctcccacttataagtgagaacatgtagtgtctggttttctgttcctgtgttagtttgctgaggataatggcttccagctccatccatgtccctgcaaagaacatgatcttattcctttttatggctgcatagtatcccattgtgtatctgtaccacattttctttatccagtatattattgatgggcatttgggttgattccatgc

SEQ ID NO: 948813 - DNA, 582 bp, Homo sapiens
atttgcagcctgatgatgcagtagaaaaggaaaaccaattttttgaggagaaattcaagctggctgcagaaagttgcatatatagtgaggagcctaatgttaacyccaaaatcagggggaaaatgtctccagcctatgtcagagaccttcatggcagcccctcccatcacaagcccagagacgcaggagaacaaggggtttcacgggccaggcccagggtccccatcctgtgtgcagcctagcgacttggtgccctgtgtcccagctgctccaaccatggctgaaaggggctaacatagagcttgggctatggcttcaaagggtggaagctccaagccttggcagcttccacatggtgttgagcctgtgggtgcacagaagtcaccacagaagtttgggaacctctgcctagatttcagaagatgtatggaaatgcctggaggtccaggcaaaagtttgttgcagaggtggggctctcataatagtgatagtgagtaagtctcatgtgatctgacgggtttatcatgggtttccgcttttgtttcttccacatttttctcttgccaccaccatgtaagaagt

SEQ ID NO: 948814 - DNA, 576 bp, Homo sapiens
tttcaaaaatttttaggcattcaaacaatcggttaaatataactgatgataagaaaaatcaatcaatatacactgatctagaaatgctatactatagrtaataaaattattaaacaagtccaataatacggtttcagttatattttgtatgtagaagttgctgaaggaaagattgactgcataaattagagacatggaagctataaaaaatctcaaatcaaacttttagaaatgtctgggtaaacaaaatatgctggagaggattaacactagattatacatggcaaaagagaagatgagtaaaatgaaaaatatgtcagtagttattaccccatgtgaaatacagaaagaaaaatgacaaaaaatttacctgagcatcagtgagctatgtggcaacttcaagaaacctactgtatacagaattggagtcaatgaggagggagagaaagtgaggagaccaacaatatatttggaaaaatcacagccaatttttactgaaaactatacaactacagaagcagaaaattcaataaactccaaattcaaaaagcataaaataaaataattaaattctga

SEQ ID NO: 948815 - DNA, 649 bp, Homo sapiens
tcaggcccacagaaggcaagtgttggtaccagccatgacaggcagggcaggttgatcctgaggttcccaaatgatgtgtggcaggcactggtgctggcaacacggggggcgggcctgtcctcaaactcctcaatgatgcacacaagtccccagtgctattgatggtgtcagtggcagggtggacctgtcctcaggccctcagatggcatgaatgactgccaataatggcaggcagagtgagttgattaccaggctcctggatagcatgctcaggcagcagtaggggtgggttgaacaggactgttgtcaggccccttgatagtgtatgtgggtgtcagtggctatgggtggagcaagtcagtccccaggcccctaggcagtgcagcaatagaataccaccagtggtgctgataagtgggatgggcctgtcatcaggtcccctgatggtgtgcatgggctggcagaggcaggcctggttggctgatatctgggcccctggatagtgtgctcgggtgccaacagtgatggcagtgggtggggtaggctgctcctcaggcccctgggtggtatgcacaggtgccagtagtggctagtgggtggacytatcatctggccccaggatggtgctcaggtgggccagtccccaggc

SEQ ID NO: 948816 - DNA, 649 bp, Homo sapiens
tcaggcccacagaaggcaagtgttggtaccagccatgacaggcagggcaggttgatcctgaggttcccaaatgatgtgtggcaggcactggtgctggcaacacggggggcgggcctgtcctcaaactcctcaatgatgcacacaagtccccagtgctattgatggtgtcagtggcagggtggacctgtcctcaggccctcagatggcatgaatgactgccaataatggcaggcagagtgagttgattaccaggctcctggatagcatgctcaggcagcagtaggggtgggttgaacaggactgttgtcaggccccttgatagtgtatgtgggtgtcagtggctatgggtggagcaagtcagtccccaggcccctaggcagtgcagcaatagaataccaccagtggtgctgataagtgggatgggcctgtcatcaggtcccctgatggtgtgcatgggctggcagaggcaggcctggttggctgatatctgggcccctggatagtgtgctcgggtgccaacagtgatggcagtgggtggggtaggctgctcctcaggcccctgggtggtatgcacaggtgccagtagtggctagtgggtggacttrtcatctggccccaggatggtgctcaggtgggccagtccccaggc

SEQ ID NO: 948817 - DNA, 594 bp, Homo sapiens
ccaggctgctctcaaactcctggactcaagtgatcctcttgcctccgcctcacaaagatttgggattacaggcatgagccactgcacctggcctaacctggacactttatttatttatttttattatttttatttttttgtcacagtcttgcttctttttctttctttcttttttgagacagagtctcactctgttgcccaggctggagtgcagcggcctgatctcagctcactgcaacctctgcctcccaggttcaagcgattctcatgcctcagcctcctgagtagctggaattacaggcgtatgccaccacgccaggctaacttttttttgtatgtgtatttttagtagagatggagtttcaccatgttgaccaagctggcctcgaactcctggcttcaagtgatctccctgctttggcctcccaatgtgctgagattacaggcgtgagccactgtgctcagccctgawatagtctttgattataaaaaagaacaaagtactgacacatgctacaatatgagtgaatcctgcaaacactacccggaggggaagaagccacacacagaatatcacataggattctattgata

SEQ ID NO: 948818 - DNA, 594 bp, Homo sapiens
ccaggctgctctcaaactcctggactcaagtgatcctcttgcctccgcctcacaaagatttgggattacaggcatgagccactgcacctggcctaacctggacactttatttatttatttttattatttttatttttttgtcacagtcttgcttctttttctttctttcttttttgagacagagtctcactctgttgcccaggctggagtgcagcggcctgatctcagctcactgcaacctctgcctcccaggttcaagcgattctcatgcctcagcctcctgagtagctggaattacaggcgtatgccaccacgccaggctaacttttttttgtatgtgtatttttagtagagatggagtttcaccatgttgaccaagctggcctcgaactcctggcttcaagtgatctccctgctttggcctcccaatgtgctgagattacaggcgtgagccactgtgctcagccctgatatagtctttgattrtaaaaaagaacaaagtactgacacatgctacaatatgagtgaatcctgcaaacactacccggaggggaagaagccacacacagaatatcacataggattctattgata

SEQ ID NO: 948819 - DNA, 706 bp, Homo sapiens
tttgcaagctgctgtagcaaagtgccacacactgtgtgtttcaacaacagccacttactgtctcacagtaggtggaagtccacartcaacatggcagcagggaagggtttgctccaggcctctctccttggctttatgcttatttatttatttatgaaacagaatctcactccctgacccaggctggattgcagtggcataatctccgctcactgcaacctctgcctcctgggttcaagagattctcatgcctcagcctcccaagtagctgggactacaggcgtgtaccaccacacccagctaattcttgtacttttagtagagatgggatttcaccatgttggctaggctgttcttgaactcctgacctcaggtgatcgacctcccaaagttctgggattacaggcgtgagccaccatgcctggctccccttggctttagatgagcatcttctccctgtgtctcttcctagcagcttccctctatgcagacctgtgcccaaatttccccttttcataacgacactcgtcatagtggataaagggctccccctactccaatgtgacctcatccttcctcaactgattacacctgcaacaaccccatttccaaataaggtcacattctaaggcactaggcattagggcttcacaacatgaaatctcggggggacacagttccacctctaacaagcgggtactccccc

SEQ ID NO: 948820 - DNA, 553 bp, Homo sapiens
ccaccatgccaggctaatttttgtatttttagtagagatggggatttgccatgttggccaggctggtctcaractcctgacctcaagtgatctgcctgccttggcctcccaaagtgctgggattacaggctgagccaccgcacccagcccttttgcctcttcccaaccataacttctagctgcttcagtgttccgaacttatgaaaggcaggaacacgtagtcagcaaatagttactgagctccttctttgtgccaggcactggactaggcccttgggatacagcaatgaatcagacaggaggagtcccataccttgtgatgctgacattctaggctctctcctccataggcttaaagtttagtcgtagaacagaggcaaatacacaacaatgtctgaagaagtcctgaaatgggacaatataatagggaattctgaacctcccctctagtggttcaaggctccaaggtgaaagatttgacgctgttggctgtgagatttggagattctgtgggcttgcatgaccccagctcctggttgccaggggtaaccca

SEQ ID NO: 948821 - DNA, 764 bp, Homo sapiens
tttaaagatgatgttaggccaagggatgacaggagggaaatacacacrggatattgtgacctaacatggttcaggaggtctggcatcctcatctgcagcccatctcctgaggtcagagccaaagggaccttcggggccacctagttccttctcagccaggttcaggagagaatcctgccctcaggccctaatgtgaccactgcatgtagcagattgacttttctcttgtgcatctaggatgtaccatccttgggagaactgagaaaattgtccattaatcctcttctgggtgctgtggttcaggtgggagaaaccctggctgacagaggcttcctctcagctaacagaggacaatgaagcaccaagcaggcagcctcctacccaaggtcacacagccagcccaagcttgtcttctgagttccaagccagtcgtcttctcttttctcacaatagcattaacatcctcccctccgctgctccaatctcgtgagcatggaggaagctctgatccaaagagatgagcctatccctgtctctctctctctctctctcacacacacacacacacacacacacacacacacacacacacacacacacacacacacccctgagtctgcaggacagagacatcccagaagcttggcattggacaagccggtagtcctgaatttgtgtctaggtcatccacgtgagcctgcatttcgccacctgcaagaggagatcataatgcctacttgatggagttactggaaggactgaaa

SEQ ID NO: 948822 - DNA, 698 bp, Homo sapiens
tactttttaccctttatatcagaagaggccatttattatttatttatttcagaattatttctttcctatttttattgtatgtatttatcatgtacaacatgatgttttgaagtaagtatacattgtggaatggctaaatcaagctaagcatatgcattacctcacatacttatcttttttttgtggtgagaacacttaacatctactctcatgtttgagttccttatgtatgttagatattaactccttatcagatatagtttgaaaatactttctaccttttgttgtctgtgttggcaattttcaagaatacaatacattgttattaactatagtcatcacattgtacaatcgggtctcttgaatttattccttctgtctaactgaaattttgtatcctttgaccaacatctctctaatcccattctactctctacatctatgagttcagctttgtctattatacacacaagtgagatcgtgtagtgtttgcctttctcttcctggcttatttcaatcctgcagttccatccatgttgtcacaaatgataagattttcttctttataaaggctgtatagttcttcatcatgtakatgcaccacattttaaaaaatcctttcatccattggtggacactgagattatttccatatcttggtttggaacaggaattaaaggaaattaaagaatgtgtaa

SEQ ID NO: 948823 - DNA, 595 bp, Homo sapiens
gacaccaatgagaacaaagagacaatgtactagaatctctgggacatagctaaagcagagctaagaaggaaatttatagcactaaatgcccacatcaaaaagctagaaagatctcaaattgacacccaacattacaactaaatgttgtagagaaccaagagcaaacaaaccccaaagctagcagaagacaagcaataaccaagatcagagtggaactgaaggagacacagacacaaaaaaccctttaaaaaaatcaataaatccaagagctgctttttttgaaaacattaatcaaatacatagactgctaactagaccaataaagaagaaaagagagaagaatcaaacaggcacaataaaaaatgataaagggatatcaccactgaccctacagaaatacaaacaaccatcagagagtactataaacacctctatgcaaataaactagaaaatctataagaaataaatacattcctggacacatacttcctcccaagactgaaccaggaagaakttgaatccctgaatagaccaatatcaagttctgaaattgaggcagtaataaatagcctaccaaccaaaagaagcccaggac

SEQ ID NO: 948824 - DNA, 488 bp, Homo sapiens
ttgaccaacattttattttatttttgagacatggtctcactgttgccaggctggagtgcagtggtgcaatcatggcctcgacctcccaggctcaggtgatcctcccacctcagcctcccaagtagctgggactacaggcacgtgccaccatgccaggctagttttttgtattttttgtagagacagggtttcaccatgttgcccaggctggtcttgaactcctgggctcaagcaattttcctgccttggcctcccaaagtgctgggattagaggcatgagccttggccaacataataatctaactaaatgctgaagacaacctggataaatgagaagctatacactcctggtgggtgttcgtrtacatatatgggggaaatgattattttaatctgcagaaaaggttgtttttctcttgagaaacacagcagaaggaaatgcagagctgttctgtagatccttgctcctgtgccctgctccttcccca

SEQ ID NO: 948825 - DNA, 550 bp, Homo sapiens
ctcaacctcctaagtagctgggactacaagggcacgccaccacgcctggctgatttttgtgtttttagtagagattagagttcactatgttggtcaggctggtctcgaactcctgacatcaagtgatccaccagactcagcctcccaaagtgctgggattagaggcgtgagccactgcgcctggccttgatctttctggatctgtttggacccacacaatgtctagagttactcttttaaacaagttttaccatgggattcgtctgcttaagggcatctagttatttcctcactcaatcagaataaaagatgcagttttccttctgcttttctgggctctacagtctttttaaaggcgacttcttaaacctcagcttcttccatgcccctctttttctctctattccagtcacagtggatgccaaaccgttcttttaacacacctaacatgtgcctgcctcagggcctttgcacrtataaatctatccgcttttaatcctttcctcacggttttccatgttatgtactataaacttctgtcatatttctg

SEQ ID NO: 948826 - DNA, 644 bp, Homo sapiens
caatataaataataaattgttgatatttgatttatgatttaatacaaaataatagtaacagaatagaaaagttggacaaatgatatattagatagtcaaaaatgtgaaaaaaaaagatcattatatactagatgataatttagtactatcattcaaagtatgaaatctgtttatatacttaatgagaaatggcatcaccaagaatgtatcattaagaaacacacaatacgttaaaataatgcattgttttaaaaaataatttgtaacatagcaaaacaaaagtgtaagcaattaaaatgttcattaagaggcagagaaagatggtggagtaggaagctccaccaactgtcccctgcacaaggacaccaagttaaccactatctacacaaaaaaaaaaacaccttcataataaccaaaaatcaggtgaatgctcacagtacccggttttcactttatgtagctgaaagaggcactgaagagacagaaaaaacaggcctgaagtgctgatgtcacmcatcctccgccccttggcagtggctgcaaggtgcagagagcatctctcggcactgtaggagggagagtacagcaacggtgaggcattgaactttgtgctgccctgttaagagtagaaaggaaaaccagac

SEQ ID NO: 948827 - DNA, 614 bp, Homo sapiens
gtctggtcaagggaaggtaatcagggaaatttacagattcctccaacacatgttcagttaaagactccaggggaaatagtaaaaagaaagcaataccctattcctttagaaggaagaatagggttaaagcctgtaatcaaaagacttattaaagatgggctattgaaccttctatgtctccatacaatactccaatgttaccagtcaaaaaaatcagatgaatcataccaattagtgcaaaatcttagagctatcaatcaaatagttcaaaccactcatcctgttgggcctaacccctacactattcttagtaaaattccatatagtcatcagtggttcacagtaatagacttaaaagatacattttaggcatgtcctttggctaaagacagccaaaatatatttgcctttgagtgggaggacccctatttaggcaaaagcaacaatacaggtggacagtttttaccccaaggatttacagattttcccaatcttttttgtcaaktatttaaaaaaaattattgtcccaaaacagttatgctttcttcaatatgtagataatattcttacatctaaggaagagatagaaaaggtagctggactttctacaaaag

SEQ ID NO: 948828 - DNA, 652 bp, Homo sapiens
gtctctgtgtgcctctctgtctctgtgtttctctgtctctatctctgtgcctctctatctctgtgcttctctgtctctgtctctccgtgtgtctctctctgtctctatctrtgtctctctgtccctgtctctttctctgtgtctccctctcggcgtctcttgtctctgcgtgcgagtctctctcgctgtctctctgtccctgctctgttctctgcttccttccctccctacctccctgcgcgccctggtcctcccctcccaacacctgctccgcgccgccttctcaccgcagccacccgccagggggcagcagagaccggcccccgcgctgcgctggcccggccgggctgggtggggctgggctccagtccggcctccggacctggtcactccccgcgtccttgtcccacttcccctatctccccagcctcctcgcgtctttgtgtctctcgctcagactcgggccctttgtctctcccagcggctcgccctcctccctacccccacctacctcttcgcattctttgggctgcccagggggagctggtgaggccgcccggggggcgggatgagggcgcgaaggaaggtcgggggagggggtgcaaggaagcgccagtctgggccaaattcgtcagggcaggagcgcggatgc

SEQ ID NO: 948829 - DNA, 619 bp, Homo sapiens
catcaaatctcatcagactcagtcattatcatgagaacagcattggggaaaccacccccatgatccaattacctctaccttgtcctgcccttgactcatggggattatggggattacatcaaggtgagatttgggtggggacacagccaaaccatataattctgcccctctcaaatctcttgtcttcacatttcaaaacacaatcatgcccttccaacagtcccccaaagtcttaacttgttctagcattaacccaaaagtccaagtccaaagtcttatctgagacaaggcaagtcccttccgcctgtgagcctgcaaagtcaaaaacaagttagttacttcctagatacaatgggagtacaggcattgggtaaatatacccattccaaatgggagaaattggccaaaacaaaggggttacaggccccatgcaagtctgaaatccaaaagcatagtcattataccttaaagttccaaaatgatctcctttgattccgtgtctcacatcsaggtcatactgatggaagaggcaggctcccacagcttttgccagctccacccctgtggctttgcagggtacagcccccatccaagctgctttcatgggctgtggcttttc

SEQ ID NO: 948830 - DNA, 619 bp, Homo sapiens
catcaaatctcatcagactcagtcattatcatgagaacagcattggggaaaccacccccatgatccaattacctctaccttgtcctgcccttgactcatggggattatggggattacatcaaggtgagatttgggtggggacacagccaaaccatataattctgcccctctcaaatctcttgtcttcacatttcaaaacacaatcatgcccttccaacagtcccccaaagtcttaacttgttctagcattaacccaaaagtccaagtccaaagtcttatctgagacaaggcaagtcccttccgcctgtgagcctgcaaagtcaaaaacaagttagttacttcctagatacaatgggagtacaggcattgggtaaatatacccattccaaatgggagaaattggccaaaacaaaggggttacaggccccatgcaagtctgaaatccaaaagcatagtcattataccttaaagttccaaaatgatctcctttgattccgtgtctcacatccaggtcatactgatggaagaggcaggctcccacagcttttgscagctccacccctgtggctttgcagggtacagcccccatccaagctgctttcatgggctgtggcttttc

SEQ ID NO: 948831 - DNA, 617 bp, Homo sapiens
ttctggagaatcttgactaatctactacccttttgttctatttgaatttatttttaaccatattatttcacaaaagaagatattggatttcagggtaagatagatgtggggcaaactctttgatgcctcctcattcaatctctgagccatgcgatcatggggactgctagtcgcacagacagtttggaagccactggagtatgtcaccttgtggcttccaaccagacatgtgctaactagattccaattccaagagttacttttggctcccaaattgtgtcagttgtaaaaatttaaaataccttttagtgataatctgggacctatcatatatcatcaggaaatcattaaattgctgtagtggaatatgtgatattgtctatacaagcacttaatcttttgaagtgcagagatgactttggggtatcctaagcaactgtttaatctgagtcattagtagggatagatctagccacttaagagctgtctcatcctggcaaacccccyacctttctgggcctcatttcttcttgaaaatgagaaagttagaagtaagttgtcttttaaatttactctcaagttccacaaagtaaaaagccccatgaatattgcactgc

SEQ ID NO: 948832 - DNA, 585 bp, Homo sapiens
ttatgagagcccataaaatctagctcatgtacctgatgtaggctcctttggggaagaaattaatttctataatctgttctcagatacttgctctcatgcaaccaactgaaaattgaaacctatgygacaacttcaaacagtgttccacctcacctttctaacttgggacacaaatatttgtgattaccatgattattacttaatttttaaagctctggagaatccacatggcttaaaacctattaaaaaagataaattataactatacagaacttattgtgtgccattcactgtgttaattaatttatattcactcatttaatatggtttgaggttagtacttggtatggtttggatctaggctcagaatgcaagagtaaaggagccttgacaacttccacctagatttcagaagatgtacaatatggtttggctatgggtccccacccaaatcttatgtcaaattgcaatccccagtgttggaggtgaggcctggtgtgaggtgattggatcacaggggtgggtttcttatgaatggttcagcaccatcccctcagtgctgttcttgtcatagtgagttattgt

SEQ ID NO: 948833 - DNA, 615 bp, Homo sapiens
  misc_feature 427, 431: n = A,T,C or G
aggggtggatcacctacaaagggaaccccatctggctaacagtgcacttttaagcagaaacccacaagccagaagacattggggacatgtattcagcwttcttaaagaaaaaaaaattccaaccgggaattccatgtccaaccaaactaaacttcataagtgaaggagaaataagatcctttttcagagaagcaaatggtgaaataatttgttacgactagacctgccttacaggagctgctgaaggaagctctatggaaaggaaagaccgttaccagcaagtacaaaaacacacttaagtacacagacaagtaaactataaagcaaccacaaaaaagagtctgtatttaacatcaacaactaccatcacaatgacaggatcaaatccacatgtatcaaaactaaccttcagtgtaaacaaaagggngggnctaaatgcccccatttaaaaggcacagagtggcaaggtggataaagaaatgagaccaaatgttatgctgtcttcaagagacccacctcatatacaataacattcttaggctccaaataacaggatgaagaaaaatatacaaagcaaagaaaacacagaataaagcagagattgtaactgtaatt

SEQ ID NO: 948834 - DNA, 624 bp, Homo sapiens
aggcatggtggctcaagcctgcaatcctagcactttgggagaccaaagcaggaggatcacctgaatcgcttgagttcaagagttcaaggttacagtgagctatgatagtgccactgcactgcagccygggtgaaagccagaccctgtaagtaaataagtaagttaagtaaggaaattaattaagccaaagaataaaagaaggggagtgcccagattctcaggaatctggtccagaaattactgttccatcctcttctccagggttcactgactttccagcagagttcttaaaaagggaagatgtgcaaagcctcctgcctgaatagccattaattgatggctatcataaatacatattgacagattgaaatgcctgatgtaggagatttggttactttaagtattttttgaagggtatactgtttaacttcccattgcaacaggggataacttatatgattatttcagcgatgattttttgaatatttttccattaaaagtacaactgtgtgaaacaaggcaaagacatttctcacacacaaagcagatgtcattagccactctgatacactatgctgctgattcataaaataggtaagagcagatcgttttcttcatcagaaa

SEQ ID NO: 948835 - DNA, 695 bp, Homo sapiens
gtagctaggcaatttatcaaggcttaactttgtggttaattacctagaagttacagaattagctagttagtcatcgacccatgtagggccaggccatgtggccagatctatgagaggaagaacaaccttctccaaccaggtacagggttgaacagtaatctgttattgcctgccccagtacccctaaaggcaggggaacagaaaaacctggtgttagccatggaccctccaagcacctcattgcagatggttggctatcatagccccctggggggaggggctgcagtataacttacatgttactccttgggtatttaatgtgtggcctccacaattaaccatgcataggggaacggccagggaagagactctcctccagagggcatgtgtactgtctgtgtggcttagcataagctcccctgtgtgtttggcatgggtacagcacccaaaaggaccacagggagctgataaggtgtggtatcatcacccagggcaaatgcccttggtggctgcactgttatcgagaggtgaaaagttggcctgtattttgcctgagggacatgatttacccctgttagtacctgtgcttgctttgtcattccagccataggtggcatgctccaacagcatcatgttctgggcccacasctacactgaggtgaccaatgtcttcaactgttgtatctgcaccaccc

SEQ ID NO: 948836 - DNA, 594 bp, Homo sapiens
ttcaagaatgcatcggtaagggcccataaatctgacctccctcggtcctccttgtggtctaggaggaaaactagtgtttctgctgatgcattggtgagcacaactattctgatcagcagggtccagggacaattgcaggttcttgggcaagaggtgtttctgctgctgcatgggtgagtgcaactattccaatcagcagggtccagggactgttgtgggttcttgggcagggggagaaacaaacaaaccaaaaccatgggcagttttgtctttcagatgggaaacactcaggcatcaacaggctcacacttgaaatgcatcccaagccattgggaccaatttgacccacaaaccctgaaaaagaggcagctcatttttttctgcaccatgtcttggccccaacattctctctgatggggaaaaatggccacctgagggaagtataaattacaatactatcctgcagcttgaccttttctgyaagagggaaggaaaatggagtgaaataacttatgtccaagcttccttttcattgaaggagaatacacaactatgcaaagcttgcaatttacatcccacaggaggacctctcag

SEQ ID NO: 948837 - DNA, 594 bp, Homo sapiens
ttcaagaatgcatcggtaagggcccataaatctgacctccctcggtcctccttgtggtctaggaggaaaactagtgtttctgctgatgcattggtgagcacaactattctgatcagcagggtccagggacaattgcaggttcttgggcaagaggtgtttctgctgctgcatgggtgagtgcaactattccaatcagcagggtccagggactgttgtgggttcttgggcagggggagaaacaaacaaaccaaaaccatgggcagttttgtctttcagatgggaaacactcaggcatcaacaggctcacacttgaaatgcatcccaagccattgggaccaatttgacccacaaaccctgaaaaagaggcagctcatttttttctgcaccatgtcttggccccaacattctctctgatggggaaaaatggccacctgagggaagtataaattacaatactatcctgcagcttgaccttttctgcaagagggaaggmaaatggagtgaaataacttatgtccaagcttccttttcattgaaggagaatacacaactatgcaaagcttgcaatttacatcccacaggaggacctctcag

SEQ ID NO: 948838 - DNA, 640 bp, Homo sapiens
aatgaaagtgtctttaaaataatttttattttagaaaatgccaaagatatggaatggctgctgggttgggatcaaaatctttttttttttttttatgttgagggtattatagcatgtgcatttgctaatgggaataatctaatctagagagaggtacaaactagttaaacaggagaggagtatatttgaggaggccatgtcctggagcggattagaggaaattagatagagcatacaaatgggaagtttggtgttaagaacgtggagtaattctctataaaaacagacagaataacatatgggtatccattagacacatagatatgatggaaccagtggatggcagttgtcttataattacatatcttttgtaagtgaaatagaaaaacccccgcaatctcaacagataaggcagagctgaataagatatgaaaattttgaagatagctaatgtatgggattattcagtagaatgtttgtgatttaatcagggaaaaatattaatttccctatggtagagttggcttggctacattaaagcccatatgaggttcagagtcaagaaactgaagtgagaccagatagcaatgggtgtgtttwctcaaagcctgatcaagagtgtaggtgcagacatggagca

SEQ ID NO: 948839 - DNA, 602 bp, Homo sapiens
ggctcaggcctgtaatcccagcgctttgggaggctgaggcaggcagatcacctgatgtaaggagatcgagatcatcgtggccaacatgttgaaaccccgtctctactaaaatacaaaaaattagccaggcgtggtggtgcgtgcctgtagtcccagctacttgggaggctgaggcaggggaatcacttaaacacaggatgcagaggttgcagtgagccaagatcgcgccactgcactccagtccggcgacagagcaagactcagtcttaaaaaaaaaaaaaaaaaaaaaaagatatggaaaaaaaaagatatggaagtcccttaaggactgtgcctccaccctggggaccctctccctgacagcaaggagtctagggctctgccttctctgtgtattccctccctctatcccagcccaggactctggtcataggaaaaaatatttttcttaaagcagatagacaaatatatggaaaaggaaaggttcaggaggcagagtaraaactcgagcctctcccaacatgtccagaccctctcttggtctctcctagatcctattctaagagctgccgtcccttggccaggagggggcctctcccagc

SEQ ID NO: 948840 - DNA, 602 bp, Homo sapiens
ggctcaggcctgtaatcccagcgctttgggaggctgaggcaggcagatcacctgatgtaaggagatcgagatcatcgtggccaacatgttgaaaccccgtctctactaaaatacaaaaaattagccaggcgtggtggtgcgtgcctgtagtcccagctacttgggaggctgaggcaggggaatcacttaaacacaggatgcagaggttgcagtgagccaagatcgcgccactgcactccagtccggcgacagagcaagactcagtcttaaaaaaaaaaaaaaaaaaaaaaagatatggaaaaaaaaagatatggaagtcccttaaggactgtgcctccaccctggggaccctctccctgacagcaaggagtctagggctctgccttctctgtgtattccctccctctatcccagcccaggactctggtcataggaaaaaatatttttcttaaagcagatagacaaatatatggaaaaggaaaggttcaggaggcagagtaaaaactcgagcctctcccaacatgtccagaccctctcttggtctctcctagatcctattctaagagctgcygtcccttggccaggagggggcctctcccagc

SEQ ID NO: 948841 - DNA, 593 bp, Homo sapiens
aggtctctaagcctttgttcatttttcaatttttaaattctctctgttcttcaaatggcataattttattgatcattatgtttattgagtctttttataatcacaaatcttctgttgaggtcatctagtgaatttttaagttcagttgttgtactcttcagctctagaatttccacttgtttctttcttcaattttattaatactttcaatttctttgttgagatttactcattaatgcaatttttaaaaattccttgaacttatttatattatttcatttagagaactttctgataaatatataataatatctgggccccacttgatatctgtttgtattggtgcctccttttttctctgatatggatcagtcttttctgtttatttgcatctctggtgatttttgcttgaagactgaacatcatacataatatgctatagtgactctggattctgtactgttcttcaaaagatgyctgaggtttctgctctaatatacaactaccttgtctggactccagctacgaaatctgaattctcatgaatgacagtttgttgttgttgtttttcctggcttccagctgcttgaaag

SEQ ID NO: 948842 - DNA, 335 bp, Homo sapiens
tttatattatttcatttagagaactttctgataaatatataataatatctgggccccacttgatatctgtttgtattggtgcctccttttttctctgatatggatcagtcttttctgtttatttgcatctctggtgatttttgcttgaagactgaacatcatacataatatgctatagtgactctggattctgtactgttcttcaaaagatgtctgaggtttctgctctaatatacaactaccttgtctggactccagctacgaawtctgaattctcatgaatgacagtttgttgttgttgtttttcctggcttccagctgcttgaaagtttatt

SEQ ID NO: 948843 - DNA, 556 bp, Homo sapiens
gtgaaggagaaggggttgaggggtacttgcccctgccccaggaaagcaggacttgctgctaagggtgaaggaccaaggcaggcctccctgcaatgattaaacaccaagggaaggctgccttcccagtccgtgaccagcgccggagttttgggtccacggataaaacgtgtctcctttgtctctaccaaaggaattgaaaggaattgaaattaagagaagggagagattgaagtgtggcaccaagactgaaaggagaaagaggttgagggatagtgagggaggttggagaagagagtaaaaagaggccacttactggatttgaaattggtgagatgtttcttgggctggtcggtctgaggacttgaggtcataggtggatctttctgatggagcaaaggacaagaggacaggagattgatctcccaagggaggtcccccgatccgagtcagggcaccaaattttatgagcgtcggtgtgaagagaccaccaaacaggctttgtgtgggcrataaagctgtttatttcacctgggtgcaggtgggctgagtccaaaaa

SEQ ID NO: 948844 - DNA, 553 bp, Homo sapiens
gaatagaaagctccaccaatggttcccawtccctgcaaggacaccaaactaacaactatctacacacacacataaaaaaatttcataagacctaaaaagcaggtgagcactcataatacctggttttaacttcacagcactgcaagaggaaattaagattgaaaaaaacagtcttgaatcatcaatgccacacccttccccaccccacagcagaggcatggtacagggagcatcttcgggtgctgggagagagagaacacagcaattgtgaggcaaccaacacagtgctttcctgttagaaagaaaggaagatcagaccaaactcagctaagtgcctgcacatggagggagcatttaaacaagctctagccaggaatcgctgacctcagcagtcagaacctgagtgtctgcaaacctcaccacagagggctacaacactgtgtgtctccaagtaaacttgaaaggcagtttagacaataaggactgcaactcttaggagagtcctagggctgaattaggcctagagacagtagagtatgagtagggcacacaa

SEQ ID NO: 948845 - DNA, 692 bp, Homo sapiens
agataaggcaagtcccttctgcctatgagcctgtaaaataaaaagcaaggtagttatttcctagatacaatggggctacagacattgggtaaacacagccattccaactggccaaaacaaaggggcttcagaccccatgcatgtctgaaatccagcagggcagccaaatcttaaatctccagaatgatctcctttgactccatgtctcacatccaggtcatgctgatgcaacaggtgggttctcattgtcttgggcagctccaccactgtagctttgcagggtacagcctacctcttggctgctttcacaggctggcattgagtgtttgcagcttttccaggcacacagtgcaagctgtcagtggatctaccattctaggggctggaggacaatggcccttttctcacagttccagtaggcagtgccccagtaggtagggactctgtgtggggccccaaccccacatttcccttccacactgccctagcagaggttctccatgagagccccaccactgcagcaaacttctgcttggacatccaggcatttccatacatcctctgaaayctaggcagaggtttgcaaaccccaattcttgacttctgtgcactggcaggctcaacaccatgtggaagctgccaaggcttgaggcttgcaccctctgaaggcacagcccaaggtctacgttggc

SEQ ID NO: 948846 - DNA, 692 bp, Homo sapiens
agataaggcaagtcccttctgcctatgagcctgtaaaataaaaagcaaggtagttatttcctagatacaatggggctacagacattgggtaaacacagccattccaactggccaaaacaaaggggcttcagaccccatgcatgtctgaaatccagcagggcagccaaatcttaaatctccagaatgatctcctttgactccatgtctcacatccaggtcatgctgatgcaacaggtgggttctcattgtcttgggcagctccaccactgtagctttgcagggtacagcctacctcttggctgctttcacaggctggcattgagtgtttgcagcttttccaggcacacagtgcaagctgtcagtggatctaccattctaggggctggaggacaatggcccttttctcacagttccagtaggcagtgccccagtaggtagggactctgtgtggggccccaaccccacatttcccttccacactgccctagcagaggttctccatgagagccccaccactgcagcaaacttctgcttggacatccaggcatttccatacatcctctgaaatctaggcagaggtttgcaaaccccarttcttgacttctgtgcactggcaggctcaacaccatgtggaagctgccaaggcttgaggcttgcaccctctgaaggcacagcccaaggtctacgttggc

SEQ ID NO: 948847 - DNA, 612 bp, Homo sapiens
ctagggtatggatgtaccataggttgtttaactaattatcactgaaggacacctagattgtttctagttttgtgcattacaaaccaagagctataaacattcatgtacaatatttcgtgtgaatgtaagtttttatttttctgcaataaatgtccaagagtgtaattgctgggtcatgtaagtgttgcatatttaatattttcagaaattgccaaactgttttttagagaggctgtaccacttttattcccaccagcaatgtatgaatgatccagtttctctgcatccttgctagtttttggtgttgtcattactttttattttaaccattctggtagacgtctagtgatatctcattgtggtttttaatttgcatttccctgattgctaatgatcttgaacatcttttcatgtgcttaattgccatctgtatatgtttttcagtgaaatatgtcatcatgttttttactcattttctaatcagttggtttggtgctggtttttttaaattcagttttgagaattctgtagttctatyagtccattctcatgggtcttgggcagctctaccccatggctttgcaaggaacagtttccctcctggctgctttc

SEQ ID NO: 948848 - DNA, 586 bp, Homo sapiens
tttttagtagagacagggttttgccatgttttccaggcttgtcttaaactcctgagctcagatgatccacccacctcaacctcccaaagtgctggtgttacaggcatgagccaccacacccagccgcatgtggccgttttcataaggacacccgtcattaagttaggggggccactcactccagtatgacctcgccttaactaattacatctgcaacaaccttattttgtcaccctataaaggggttaggactttgtgtgtgtgtgtgtgtttttagggttgggacacaattcaacccttaacagtaaaaaccaacttttattgatatagaaagataaatattctttctatatacgtttcatagtctaaacaaatggcataattggagaagggggatgaaaagaggttggctaatggataccaagttacacctgtaggtaggaataggtgctggtgttcagkagcactataggttgaatatacttaatatcttattattttcgagggtttttctaacttttatgttaggttcaggggtacatatacactggttatacaggtaaactcgtgtcacaggggtttggtg

SEQ ID NO: 948849 - DNA, 618 bp, Homo sapiens
cttgcttttaacctccaagctgtccttgttcattcctgcgtgtagagtgaactaactttgggagcaacgcagtttagagtttaactttgaaacataaaataacagtcctttcccgcaaccaaccctcttcttgcctttgttagactgcctttgcagtactaacaaattagccagaagactagaaattatagtttaggagtcactgttgtaaaacctgagattagtgtttgagatactttgcagagtctacattctaatgcaccagctgatgccacccagatctataaactgcctcatctggtcttatggcccccatccaggaactgactcagcgcaagaagacagctttgactccctatgatctcatctttgacctgtccaatcagcactcccgactttctgacaccctacccaccaaattatccttaaaaaccctgatccctgagttttcaggaaaattgattagaatattaactccatctccaacatggcgtggccagcatcgygacacttaagctcttcctttactgtaatgccatggtcttagtgagctgattttgtttgtgcagtgggcaggaagaacccattgggtagttgcaatatgatcaaagtgaggct

SEQ ID NO: 948850 - DNA, 603 bp, Homo sapiens
tgtttaaattcaaacatgacaatgaatttattccctgaataagaaataatcttataaartaagaatctttccatttctttttagatagtctatgttagcagtattataaaaatatcatgggtaaaaggcacctgaaacatgttaataatacattgcttatattggtattttttaaaaatacataaagctctacctgacattggtaagactgatttcccagtctacctgacttgggtaagactgatttccatacatatgcatgcatgtacatgcatacaagtgtgtacatagagaaagaactacattttaagaagaaaaaatctatagcaaattttataagttaaataagtccttatttactaataggttgttttatcaaattacagaataccatgaatagttgctttttttattccaaaacaacatataaccctaaaaagtttctatgtatgtaaaaagaaatgtgatcatagctgggcacagtggctcacacctgtaatcccagcactttgggaggccaaggtgggtggattgaccacttgaggtcaggagtttgagaccagcctggccaacatggtaaaacccagtctctactaaaaatac

SEQ ID NO: 948851 - DNA, 702 bp, Homo sapiens
agattaggctctgtaaaatagtttcttctgagggagggctttgttgagaacagactactctgggccagtgcagtggctcagacctgtaatcccagccctytgggaggccgaggtgggcggtcacctatggtcaggagtttgagaccagcctggccaatatggcgaaaccccatctctactaaaaatacaaaaattagctgggtgtggtgtggtggcgcacacctgtaatcccagctactcgggaggctgaggcgggagaatcacttgaacccaggaggcggaggttgcattgagccgagattgcgccactgtactccagcctgggtgacagaattagactccatcttgaaggggaaaaaacaaaacaaaacaaaaaaaacagactactctggcttatttagaaatggttacttttaccctcctactcctggaaggactggggggtttttctccaatattcactgtgagaactttgaagaactcctggaactaaaactcacagaagtgtgaggacatcctctccatgcctgcaatgacagggttccctggagtttttgactctcagacttgcccacactgagccgccagcaattcgtcaattacagctcaggttctcccaccccagcactggttccagcacaggtttctcctctggttcccatggaggtttctgtttgtgggtttctgttccagtaagttgtg

SEQ ID NO: 948852 - DNA, 619 bp, Homo sapiens
gaggaggagtatgtggaaaatttaatttaaccaactgttgcctagaaatcgatgataatggttgagctgtcatggaaatcaccgctagaatgcacacattggcccatattccagttcagacttggtctgggtggtccccggattccttgtttggaggatggttctcagcctttagaggattcaaaagcctcattggtgggttcttggttattcttggcatctgcctcatcctcccttgccttttacccctgtttattagaagtattcagtcaactatggaggcaatagtggcctgatacactaccatgcagatgatggcattaaccagatatcagtcgctgctggtagaagcagcagctcagctccacgaagacgtggcaaatagtggtgctttctgttaacacatttgttataaaaagcaccaaaggggggaatggaacaggaattaaaagaaattaaagaatgtgtaagcaaaaactcagttgtatgtaagaaaacccaattccccctgaggaagagaaagaactggagtcctttaaaaattaactgcctgtttttcygtggctagtgagccttatctctccctttcccaggcattgtgaagaccctgtttctctag

SEQ ID NO: 948853 - DNA, 447 bp, Homo sapiens
aaggaaaactaataaatatgtgataatttaacaatacatttttgaacaaccaatctgcaaagaataaatcaaaagggaaatttaaaaacacattagaataaatgaaaacaaaaataaagtctaacaaaacttatgggatgtagtaaaagtagggctaaaagaaaagtttatagtgatgaatatctgcattaagaaaaaagaaaggtctcaaacaatgcactttataccttgatatggtttggctgtgtccccacccaaatctcatcttgaattgtagctcccataattcccccatgttggtggagggacccagtgggagataattgaatcatgggggtggtttcccccatactgttctcatggtagtgaatcagtcttatgaaatcwgatggttttataaggggaaaccccctttggcttggctttcattctctcttgtctgccgcc

SEQ ID NO: 948854 - DNA, 645 bp, Homo sapiens
accgatttaattacatatacgtgcatgaaagttcccaaagaatcgttactcaaggaggcagttagaattgagggcgtatatatcatcttaggctagacaaaggraaagggattcacttctggagcatagggagaatgtgagggcagggaggtgagggcagcatggggagtgaggagaggaaatgtatggtaaataagggttgtttagtatgtttgctacacagataagcatcctgtccagtgctaagagttgtctctggagtagttctttttcgagcatgagaggagatacctttaaaaatggaaattcacggcctgcttttagacagaaaatgggggcaccgagagttaattgccttcacctcaaaacaatcctgatgccaaactggcatgttttggggagacatattctgttcctcttcctacctttagtctccagttccccagaagtcagaactaatgctgtgtggctcaagactcccaccataaaccatagcattagactgtccagtggcccaaacttctaggaaaacacacatgcctatgaggtaggacattctaggcagggggcctagaggtgatcttccaattgctgaggcaaaggttggacctttatttcactaaggttctttactgcataaatata

SEQ ID NO: 948855 - DNA, 496 bp, Homo sapiens
aaggggagcacatcagcagaagaagatgtagtggctggacgttgagaggacgccagtggaaaagcacaccgacagacgtcagcaaggcagcagaccatcgactggcagaatgacacagggtttgattggggtggacagaagaaagcccgcatcactgagcaacccaactccaggggaaaacaaccttcccactccatctcccttctggctaccccatctgctgaaaactaccttcactcaataaaaccttgcactcattctccaagcccacatgggatccaattcttccagtacacaaaggcaagaacctcgggatacagaaagccctctgtccttgccataggcagggggtctaattaagctgactaacacaagcagcccrcagatggctaaactaaaagagcacatgataacacacacccactgcagcctcaggagctgtaaacattcacccctagacactgccatggggttggagccccacaacctgcccatc

SEQ ID NO: 948856 - DNA, 653 bp, Homo sapiens
tttggtttctaatttcatgtattgtctcccacttaattacagaggttctatcaaaagttttaccactttttttttctttttgtttcatctgctagtttctatcactatattttaagttcatggattgcctctaacataatttctaacctgcttctatttcttaaagtatttttaacttgagatattatattttttcatctccagaagtccatttgaatcttttaaaaatatttcccacatttctattcattatttcatgctttcttttaaattcttgaacattaaaaactacctagattatttaaagttttttcctgctaagatcatatctgtcatttctaggtatgtttctgttgaccagttatatattatattgtttctatttttcttctgttaatgtgtcacattttcctgcctctttgtatgtataataaatttttactagattgtcattttcatgctttcaagtgctgtattttattgtatttctttaaatggtattggcttttgttctggcaattagttaaattacttgtgatcagttttatccttttaagccttgttttcaagctttttaagagaaggtttagagtaatkttactctaaagactgtttagcaccactatcgaggcatgacttttctggagtcttta

SEQ ID NO: 948857 - DNA, 422 bp, Homo sapiens
ctattctaggtggttagaacttaaatatttcccagacctgtgtaaaatctaggaactatttatcttacaaattcacaacactttttttggtctagcctcatagggttctatcctcatgaggcagcataatagtcaacagtcatttaaatggaacccctaatgcgtatttttagagctctttatgcatttcccactttctgagtattcttctctaaacatgtctggcacctcagcctccctgaactcttttctctgtcttcttgattcagccagtctgccatgctttatttggtatatcccccctacactgagctgyataaaagtctctaagcagagaacaaagactgtcgtagaactcacatcattcatttgccttctctcaggaatcagtcctctgatgtctattgaccactgcctaaaaa

SEQ ID NO: 948858 - DNA, 626 bp, Homo sapiens
ccaggtgtcaggttccactttgagctggggcccgaggggagtgggtggacgggtggcaggtagctgaaagaacactcgagggaccgtaggcagttgggacatggctttattctctctctctcctacagagtcagcagtgcagttatatgacttatagacaatagtggctcaaagccaggtataagctcacacaaacaggttactttaaatggctacataaatatgatcacataatgcacagagttgtgtgcctgtgctctagacccgctgtgtcatgctgtactggatgtctgcctcggcctgctcctgactgaagcacagccattctttttacactccatcctctagaccgggagaaaatgtgcccacagggaggaaccctgaacttataggtcacagtagcaatacagggagcaacaactcattactaatactcccatggtgctgcctataattattagggtccagcacaggccagagcccagagacacccaccgtgtctgtaggaggttgtcaataaggctctcaactgccttgatttcctggggaascccctgcaaagctgctgttacgttttgttgattgtcagggatgaaagtacaacattgagttccccaaagagcaca

SEQ ID NO: 948859 - DNA, 747 bp, Homo sapiens
agtccatcgcgggggccacatattaaatacctaaggagtgacatgtaaatcatactgtagccccccacccccatccccctgccaccagggagctacaatagccaaccattgggaatgtggggctaggagggtccaggaccaaagccaggttttctcttcccctgccttcagggccgttggggcaggcaacaacagattactgttcatccccatacccagccgggggaggtcatccttggtgtgtgtctgtagctggatgcgggtggcggtccggtgtagcagtgcctccaccggggctgggccacctttccatggctgttcgttcaaggtttgcaacaccaggtccaaccttgaactccagccccacaaagataggggagtaacatacaagcgtaacctgtttttcaggagtcggttatgtcactcagtcataccagcagcttgtgggttatgtggaacatggaacctttactttacgtccatccattgtgcccactgttgtatctgctgttcagtaaaatgcattcccttgtccctttcaacagtcagaggacgaccgtatagggcacacaagtgctgcagggcctgaatggtatgttgctggtcggccgtcctgcaagggtaggcaagcaacagaccggtggccatgtgtatagctgtcagcacatgcctawgcccctgtaacctcggcagtggcccgacgtagtctatttgccatctagtcaagggaatctgccctaccgtcac

SEQ ID NO: 948860 - DNA, 579 bp, Homo sapiens
gttgttgttacagtaggtagctagttagatatgagcaggggaggagagggaccccctgcttttaaaataataattggycccagccagcaccagggaaaggcagtctcccaataaactaaaacacctgaaactggtgatcgccagctttccaataagatctcagtagctgggccagtaggctcaagcatgtgcattaagagaaaaaatggcagagtttaactggtatatgacctcctagggacatgtgacccgtaagggaataacacctcaagtgagcatgcatacatctccagaaacagactgcacatgcccctcttccaagtgctagcaggtcactgcacatgcagacagcccggccaaagggaagaatcaggaaagaaggaatgcaaaaccccaaaaacatgccagtatataaaacccaagacaaaaggtcaaactgtgcacttgatctctgaagtcgcccgcttggccctcttccaagtatactttacttcctttcattcctgctctaaagctttttaataaactttcactcctgctctaaaacttgctttggtctctccttctgcaccatgcccc

SEQ ID NO: 948861 - DNA, 656 bp, Homo sapiens
cccatgtgggcccttcctgcctgtatccctgacctgcccttgcctcttctggtcctggcagccggcggcggcagcagcaagacctcatgccacagtgccgtgactggagggcggtgaccrcgcaggatgccgtgaaccccatcgagagcctggacacctggaccgagtttgtggagggaaagaataaggtacaggccagccgcgctgctgagtgcccagggagaaggagaagggaggagagagaggccattactgccatgtggtttccacctggcttccagagtgctgggcagagcagccgagagcgggtgaccttcctgcagtctgtaggcctcggccaccctgcctgcagaaaggtcagagggccagtctccggctttgtgatggagggcggacctctggcggcttcccagacaaggaagctgacatgcaaggccacctggccaggccatgagcccctgaggcccacaggccccaggaccaggaggggacagggctggaggctgaccaggtctgcacagagggctgctgagccgctggcgcagcctgggggcaacgccgagaagggggtactgaacaaaggcacctacttcctccagtcacttcctgttttcctacacacctccagagcctcttcctgttccagtcctggacag

SEQ ID NO: 948862 - DNA, 502 bp, Homo sapiens
tggctcatgcctgtaatcccagcactttgggaggccgaggtgggtggatcatgaggtcaggagttcaagatcagcctggccaagatgatgaaaccctgtctctactaaaaatataaaaaaaaattagctgggcgtggtggtgggtgcctgtaatcctagctattcaggaggctgaggcagaggattgcttacacctgggaggcggagggtgcagtgagccaagatcgtgccactgcactccagcctgggtgacaaagtgagactctgtctcaaaaaaaaatctttgtgtgtgtgtggagatgagggtatgcactttgttggccaggttggcctcgaactcccagccaagcaattctgcctgggattacaagcgtgagccaccatgcctggcctcaaatattgttgaatggctagcagttaagtccttgggtttataagcatttcctcaactgtcctcccaagtccccataaracaaaaaactcataaaatcccaccttacag

SEQ ID NO: 948863 - DNA, 565 bp, Homo sapiens
gccactgtacctggcctagtaagtgtatttattaaggtataagactagaatacaggccaataaaaatatgaactatatttctatatattgcaatgaataattgaaaactaaaattatcttaaaaactaccatatgatcagtgaaagaggaataaaattaacatgtacaaaaatctacaataaaagctattgtattcattactgaaatttattaagcattaaaattaaaaaattaaatggaaagatatatcaatttctttcttttttgagataaggtcttgatctgttgcctaggttggagtgcagtggcaagatcaaagctcactgcagcctttaactcctgggctcaggcaatgctcccacctcagtctcccgaatagctgggactgtaggcacatgccctcatgtctggctggctaatttttgtattttttttgtagagaaatagctccagaaatctgcacatgaccaaatcytaagctgtgcatgtttactgtgaaaatccacaaagccaggaaatagaacatctgtcagcagaagaacaactaccagctacatggtccagc

SEQ ID NO: 948864 - DNA, 609 bp, Homo sapiens
agggtgacaccacattgttactttcaggtataggtaggagtccagtttaccactcagcctccattgatgcccaaggtgaggaaggctccgcacttcttggggaatgggagtttcagctccccacaagttctccaccggctgggagggggaggagtactgtgttactgcctccactccatgtggcctgtgctggtgttgtcaggggaggagcctcattactggtaggaagtggtgaaagtcctgactctccattaccccagtattctctgacactaccccagtgggaaaggagtggggcattactacaggatggttgagaaagtctaaggtcttcacttggtcttcagtgacatcatggatgaagaagggttctttaccacccaatagggatgaaactcctggctccatactcagccttctccattacaacttggcaagagtgggaggctaggctccccagtcttttttttttttttttttttttttttttgtagagatggagtcttggtctgtcgcccaggctggagtgmagtggcacaatcttggctcattgcaacctccgcctcccgggttcaagggtccaagcaattctcctgcctcagcctcccg

SEQ ID NO: 948865 - DNA, 615 bp, Homo sapiens
gtcttaatttcttcttaccgttagagcactcaataatcatattaagttgtgtgattgttttgcttakcttttttttgttgtttgtttctgtttttgttgttgtttcagtctttttcccattgagtttgaccaactgtatctgacatgatcaaatccaaaggaaagttccaaattatggggtacaaagcctctaaagtggctaaattcccacaaaaaagggctttatttacataacaaggccacttttttgctagccgggagaaaccaaaaaagcaatggctgtctcccaggctacagttccatagctaagattatgccgtgttttttcaccagcctgggtttggttcctaagtcaagctctggtttgatacctggtacttctgaagtagcatcaatttgtcctagctgaaatatggtaatgagatttaagaatattttttaaaggagctcagtggttaaaagtcagcttaattaaaagctaacatccaagatgtgtgtgtatgtgtgagtgtgtgtgtgtgcgtcttcgtatttaaaaggccttcatatttttgtttttgtttttcctctcctaggaccttgtctttgttgagcaaaagttttttcttctcattt

SEQ ID NO: 948866 - DNA, 615 bp, Homo sapiens
gtcttaatttcttcttaccgttagagcactcaataatcatattaagttgtgtgattgttttgcttagcttttttttgttgtttgtttctgtttttgttgttgtttcagtctttttcccattgartttgaccaactgtatctgacatgatcaaatccaaaggaaagttccaaattatggggtacaaagcctctaaagtggctaaattcccacaaaaaagggctttatttacataacaaggccacttttttgctagccgggagaaaccaaaaaagcaatggctgtctcccaggctacagttccatagctaagattatgccgtgttttttcaccagcctgggtttggttcctaagtcaagctctggtttgatacctggtacttctgaagtagcatcaatttgtcctagctgaaatatggtaatgagatttaagaatattttttaaaggagctcagtggttaaaagtcagcttaattaaaagctaacatccaagatgtgtgtgtatgtgtgagtgtgtgtgtgtgcgtcttcgtatttaaaaggccttcatatttttgtttttgtttttcctctcctaggaccttgtctttgttgagcaaaagttttttcttctcattt

SEQ ID NO: 948867 - DNA, 615 bp, Homo sapiens
gtcttaatttcttcttaccgttagagcactcaataatcatattaagttgtgtgattgttttgcttagcttttttttgttgtttgtttctgtttttgttgttgtttcagtctttttcccattgagtttgaccaactgtatctgacatgatcaaatccaaaggaaagttccaaattatggggtacaaagcctctaaagtggctaaattcccacaaaaaagggctttatttacataacaaggccacttttttgctagccgggagaaaccaaaaaagcaatggctgtctcccaggctacagttccatagctaagattatgccgtgttttttcaccagcctgggtttggttcctaagtcaagctctggtttgatacctggtacttctgaagtagcatcaatttgtcctagctgaaatatggtaatgagatttaagaatattttttaaaggagctcagtggttaaaagtcagcttaattaaaagctaacatccaagatgtgtgtgtatgtgtgagtgtgtgtgtgtgcgtsttcgtatttaaaaggccttcatatttttgtttttgtttttcctctcctaggaccttgtctttgttgagcaaaagttttttcttctcattt

SEQ ID NO: 948868 - DNA, 614 bp, Homo sapiens
gagaagggttctactgatagcacagggcagcccccaacaacaaagaactgtccagcccaaaatgtctatcatgatggggttgagaaactctaccctggtcccttgtcttccctttrcagcagacacagtatccattattcatcttgcttttaataatctaacctcccaagttttagttgggcacacagtcacttcattagactgcagtcctcagcctccattggagctgagtgtaggcatgtgtgccatgaagagttcacatagacaggctgagtctgctctccttagtaaggcctactatggaagggtgacctttggcttgattctaggaacctggatttcaggagggttctcaccagtccccagtatgagtggctcactgtaactaaactgtacaagaaatatagctaatgctgaatatcttctttcctctgagagtctagaatctggggatatgctcaggcagagagggccgacatgaccaatcccaattaaaagccctggtactgcatctctaattaactctcctggtagatagaattttatatttctcacagtttgttgcaggaggaattaagcacatcctgggtgactccactgggaaagcactctga

SEQ ID NO: 948869 - DNA, 599 bp, Homo sapiens
actgatagcacagggcagcccccaacaacaaagaactgtccagcccaaaatgtctatcatgatggggttgagaaactctaccctggtcccttgtcttccctttacagcagacacagtatccattattcatcttgcttttaataatctaacctcccaagttttagttgggcacacagtcacttcattagactgcagtcctcagcctccattggagctgagtgtaggcatgtgtgccatgaagagttcacatagacaggctgagtctgctctccttagtaaggcctactatggaagggtgacctttggcttgattctaggaacctggatttcaggagggttctcaccagtccccagtatgagtggctcactgtaactaaactgtacaagaaatatagctaatgctgaatatcttctttcctctgagagtctagaatctggggatatgctcaggcagagagggccgacatgaccaatcccaattaaaagccctggtactgcatctctaattaactctcctggtagatagaattttatatttctcacartttgttgcaggaggaattaagcacatcctgggtgactccactgggaaagcactc

SEQ ID NO: 948870 - DNA, 198 bp, Homo sapiens
gtatctattttggtatgtgaccgtgaaatagatttgaagttatcatgtccattttacagacaggaaatcagagaagacccttagagttttagttacagtcttactaggatatgctttctgatcattagttcaacttgtgtttyagtctttgctgctttgtgaacaatgcaattttccaggacaaccccatcattttaa

SEQ ID NO: 948871 - DNA, 548 bp, Homo sapiens
ataaaaaagaatgagatcatgtcmtttgcagggacatggatggagctagaggccattaatcttagcaaactaatgcagaaacagaaaaccaaataccacatgttctcatttacaagggggacctaaatgatgaggacacatgaacacatagaggggaacaacagtcattggagcctacttcagtgtggagggtaagaggagggagaagatctgaaaaagtaaaaaattggacaataggcttagtatcttggtgacaagctgcacaataaacccttgtgacatgagtttacctgtgtaacctccacatgtacacttgaacctaaaatataagttaaaaattcaaaaaagaaaatttaagattaaacaagaaatagagaaagctctttgtgttgtgtaatgttagaggctttgagaaggctcccatcccaactcctctcatcctcaaaattagggattagttgatagaattatagagtgctagacagagtcagattcaccttgaggttaatggagcataagcttgcacaggtccctttcaaagtcttgaa

SEQ ID NO: 948872 - DNA, 629 bp, Homo sapiens
aagtcctcccgcacacgttttttgcctgcgctgcaaccacgtaagacatgattttgctcctccttcactttccgccatgattatgaggcctcccyagccatgtggaactgtgagccaattgaactgccttcctttataaattacccagtctcaggtatgtctttattagcagtgtgaaaacagactaatacagtaaattggtaccagtagagtagggtgttgttataaagataactgaaaatgtggaagctaatttggaactgggtaacaggcagaggttggaacagtttgcagggctcagaaaaagataggaagatgtgggaaagtttggaacttcctagagacttggaggactcagaagagaggaagatgtggcaaagtttggaacttcctagagacttgtcgaatggcttcgaccaaaatgctgatagtgacatggacaataaagtccaggctgacgtgttctcagatggagatgaggaacttgttgggaactgaagcaaaggtgactcttgctgtgctttagcaaagagactggcagctttttgcccttgccctagagatacatggaactctgaacttgagagagattatttgaggtaaccggcagaagaaatttctaatcagca

SEQ ID NO: 948873 - DNA, 621 bp, Homo sapiens
ggtttcaccatgttggccatgctagtttcaaactcttgacctcaagtgatctgtccacctygacctcccaaagtggtgagattacaggtgtgggccaccacacgtggcaaggaaaactcgtagaagttacgcctgcattccactggactcaagctgaatgagcacatttctctcaaggtgtagcaggacgagccacagacaaaagccctcacacacagggttaaagaaggaagttgctttatttggccgggagcatcggctgactggcatctcaagaaccgagctcccccaagaaggagttcctggtccttttaagggcttacaactgtaaggggttccacgtgaaagggtcatgatagattgagagcacatgtggttagagttgggggttaatattttaacctcaggcctggtcatcagtggcaccagctggtcttgccactgacttcattcctgttgtttttcagcttttacttcagagacaggagacagtaagagaaatggcctctctcttcaaaggctcataattatttaaaggtcatagctttaaattggaattatttgatgtatgaattatttaatttcctactgagatacaggtactgtctcccttgtattttg

SEQ ID NO: 948874 - DNA, 599 bp, Homo sapiens
gggaatttcctcttcctaataagcctgggagtgctatgggagactggagtttatttcatctctgcagcctcgaccataagagacgacccacgccctcggggggccagttcagagacccacccccaggtgcacattctctttctcagggatgttccatgctgagaaaaagaattcagcgatatttctcccatttggttttgaaagaagagaaatatggctctgttccgcccggctcaccggcagtcagagtttaaggttatctctcttattccctgaacaattgctgttatcctgttcttttttcaaggtgctcagatttcatattgctcaaacacacatgctgtacaatttgtgcagttaatgcaattatcacatggtcctgaggcaacatacaccctccttggctgacaggattaagagattaaagacaggcataagaaatcacaagggtattgactggggaagtgataactgtccatgaaatcttcaaaacttatgtttagagattgtagtaaagacaggcataagaaattataaaagtattaatttagggaacyaataagtgtccataaaatcttcacaatccacattcttctgcc

SEQ ID NO: 948875 - DNA, 437 bp, Homo sapiens
ctgggaagcaagacaccaagtccctagactgcgcccagcacaggaaaactgggcctggcccacgaaaccatgttttcctcctaaacttctgggcctgtgaygggaagggcttcctcaaaggtctcttctgttaacataacctggagacattttccccattgtcttggtgattaacacttgactccttgttacttatgcaaatttctgtatccagcttgaatttctcctcagaaaatgggattttcttttctatagcattgtcaggctgcaaattttccaaacttttatgctctgtttcccttttaaaacagaatgcctttaacagcacccaagtcacctcttgaatgctttgctgctgagaaatttcttctgccagataccctaaatcatgtctctcaacttcaaagttccacaaatctctagggcaggggcaaaat

SEQ ID NO: 948876 - DNA, 715 bp, Homo sapiens
tctaagtaatccccatgccaactcttataaatggcagtcagtccttttgattttgcaggtttaagggaacactatcagagcaaaattaaagagaccctagataatttgttgtcatkaaatttctaccagaatagaatcagaaactggatttggccaaaagtcattgaagttccttgaagtaaattagcagaagagaagttcttccctgaatgttattggaaaatctggttagtgttatgaagctgtcattgctgttagaagttgctggagaactatgttcattctccgtatttggtagctatttgagaatttgtctgagtgttgtttatgaaatggggatgtttaaggtagtgaagttgacaggaaattactgtgtgacaaatgatctgagaattgttaagtgttgcacttctgttcaattcagatgtctctgctgcatacaaatggcagtgtgtatatagcatgtctcttaaatggataggttgatttgtcttataaattatgattgacattgttcactaatattcctggtcctctaatccttctgggagaataggagggttgcatgtctttgtcccattaaagttagacaaacatgtcatatgccctgaccaacaaagtgagagcaaagtgactggtggcacctctgagctaaagcacagaagatcatgtgcataatttcctttattccctttgtcaccctgctaaaacctgg

SEQ ID NO: 948877 - DNA, 432 bp, Homo sapiens
acagcagatggttggtgagttcttgcctattctgtggttctgtatcttttaaatggagcatttaggccatttacattcccatgttagtawtgaaatgtgaggtactgctgcattcatcatgctttttgttgctggtgtaatttggttttttgtttttgctttttaacttgtatttttgttttgtaggtcctgtgtgattcatgctttaaagaggttccgtttctatgtgtttccaggatttgtttcaagatttagagctccttttagtagttcctgtagtggtggcttggtaatggtgaattctctcagcatttgttcgaaaaagactgtatgtttccttcatatatgatgcttagttttgctggatacaaaattcttggctgaaaatagttttgtttgaggaggctaaagatagggccccaatctcttcta

SEQ ID NO: 948878 - DNA, 602 bp, Homo sapiens
tattgatacttgtgtatacttcatgaaatacttgtgctgtgtttttcagctccatcaggttatttatgttcttctctaaactggttattctagttagcaattcatctaagctttttttcaaggttcttatcttccttgcattgggttagaacatgctcctttagctcagaggagtttgttattacccactttctgaagcctacctctgtcaattcatcaaactaattctctgtccagttttgtttctttgctggtgaggagttgtgatcctttggaggagaagaggtgttctggtgtttggaattttcagcctttttgtgctggtttctccccatcttcgtggatttatctacctttggcctttgatgttgttaacattcagatggggttttggtgtggacttcctttttgttcatgttgatacaattcctttctgtttgttagttttccttctaatgggcacctctgctgcaggtctgctggagtttgctggaggtccacttcagaccctgtttrcctgggtatcaccagcagaggctgcagaacagcacagattgctgcctgttcattcctcatgaagcgtcatcccagatgggtaccca

SEQ ID NO: 948879 - DNA, 564 bp, Homo sapiens
aggccgaggtgggatgattgctagaggccaggagtttgagaccagcctgggcaacatagtgagaccctgtctctacaaaaaaaaaaaaaaatcaaaaattatccaggtgtggtggygtatacctgtggtcccagctactagggaggatgaggcagggggattgcttgagactgggagtctgaggttacaatgggttatgatcatgccactgcactccaacctgagtgacagagcaagatcatgtctctaaaaaaatacagtgctatataactgggtttttttttttttttttttttgagatggagtctcagtctgccacccaggctggagtgcagtggcgcgatcttggctcactgcaacctctgcttcctgggttaaagtgattctcctgcctcagcctcccaagtagctgggattacaggcacccgccaccatgcccggctaatttttgtatttttagtagagatggggtttccatgttggccaggctggtcttgaactgacctcaggtgatcccccccacctcagcctcccaaggtgctgggattacaggcgtgagccact

SEQ ID NO: 948880 - DNA, 631 bp, Homo sapiens
accctttacccctagggcctggggcctcacctgctggcattgggaggaaccaagccgcgaattctcagcaccgtgccagggcggatgccctcgggcagygaggacttgtgggggacgttctgcaagagtggggtgcaggggccactgtgagccggtgagaccgaaggagggaggcagaaggtgggtcacccctcagaggagccgaccagggctgagactggcagaaatcagtggaagaggaaagggtggcggagaggcaggaaagagaccagaaacagacagggaaacagatggggagagcaacaaagacaaacagaaagatcctcaaagagggccccagaggaagccacaaagaggtagaggggacagtcgggatgggggttacccggaggccacagcccaggccagtccgtggcacactcactgcccacttgctcctttgaaagaggagcccccagccccctccctgcttggccccgccccgggcccctggagcactcacggacatggctgggaccgggttgggcagccgtggtggtggggcctgctggggaccttaaataaaagcagggcggggctggccctgatgactcaccccaccccttcccacccaccacccacacctggcacg

SEQ ID NO: 948881 - DNA, 630 bp, Homo sapiens
gccagggtccgtgccaggtgtgggtggtgggtgggaaggggtggggtgagtcatcagggccagccccgccctgcttttatttaaggtccccagcaggccccaccaccacggctgcccaacccggtcccagccatgtccgtgagtgctccacggggcccggggcggggccaagcagggagggggctgggggctcctctttcaaaggagcaagtgggcagtgagtgtgccacggactggcctgggctgtggcctccgggtaacccccatcccgactgtcccctctacctctttgtggcttcctctggggccctctttgaggatctttctgtttgtctttgttgctctccccatctgtttccctgtctgtttctggtctctttcctgcctctccgccaccctttcctcttccactgatttctgccagtctcagccctggtcggctcctctgaggggtgacccaccttctgcctccctccttcggtctcaccggctcacagtggcccctgcaccccactcttgcagaacgtcccccacaagtcctcrctgcccgagggcatccgccctggcacggtgctgagaattcgcggcttggttcctcccaatgccagcaggtgaggccccaggccctag

SEQ ID NO: 948882 - DNA, 606 bp, Homo sapiens
tcttttagatggagtttcactcttgttgcccaggctggagtgcaatggcgtgatctcggctcactgcaacctccacctcccaggttcarttctcctgcctcagcctcccaagtagctgggattataggcacccaccaccatgcccagctaattttttgtaattttagtagagctgggaagtcaccatgttggccaggctggccttgaactcctgacctcaggtgatccactggcctcagccttccaaagtgctgggactacaggcgtgagccactgtgcccggccagcttagattttctaatacgatttttattctttatatatattttgtattttatatgtgtatctatatgtgtttagagatggggtcttactttttttttttttttttgagacggagttttgctcttgttgcccaggctggggtgcaatggcaccatctcagctcactgcaacctccacctcccaggttccagtgattctcctgcctcagcctcctgagtagctaggattacaggcctgcgccaacacgcctggctaattttgcattttttagtagagatggggtttctccatgttggtcaggctggtcttgaactcccgacc

SEQ ID NO: 948883 - DNA, 552 bp, Homo sapiens
ggcaggagaatcacttgaacctgggagatggaggttgcagtgagctgagatggtggcactgcattccagcctgggcgacagagagagattttgtcttggaaaaaaaaaaaaaaagaaaattacagcccccactgcctgactcctcattccttttcctgccttatttttctctccacctgacaataacaaaacaaacaaattatcaaaatgcagggccagatcaggtggctcatgcctgtaatcccagcactttgagaggcaagttgggcagatcacttgagcccaggagttcaagaccagcctgggcaacatagcaagaccccatttctgaaaaaaaattaagatatagagtctttgccactccctcatctccaccatgtccagaatattggctccatggagtgaaatttcttgtctactctgttctctgctgggatcccagtgtgtagttggtatgcagtgggcacccrataaatgtgaagtgatgtcagccatcctgggtccttatggctgcagcctgagaggttggacttggggggcggatggcgttgg

SEQ ID NO: 948884 - DNA, 477 bp, Homo sapiens
acaggcgcctccatcatacccgggtaattgttttgtagtttttagtagagatggggtttygccatgttcgtcaggctggtctcaaactcctgagcacaagtgatccccctgtgctggcctcccaaagtgctgggattacaggcgtgagccactgcaccctgccgattggaaactttttctgaaatagggcagaactgcttgggtgtttttttccatgtaacttaaggtagtaatgtaaataaaatagtagttggaaaaaaaataattcatgtgaagtggtgtgttagctgcattgttgatctccacgattcactcctttgtagttgtattacactctgtcttagtctcttggtgggttgagtgttcttttctcattgactttgggcttgggtgtgtgactttctttggctaatgggatattagtagaggaagaatcacaggcttgagtgaccttgcccagtagggtctgcctctttg

SEQ ID NO: 948885 - DNA, 599 bp, Homo sapiens
actgcccaattgcctcggaagccctctggaccatcagggatgctgagctttgggtaactcttacagtggggcgtaagtccatcccctgtttaattgatacaggggctaaccactccacattaccttcttttcaagggcctgtttcccttgcctccataactgttgtgggtattgatggccaggctcctggaccccttaaaacttcccaatttggtgccaacttgaacaatattcttttatgcactcctttttagttatccccacctgcccagttcccttattaggctgagacattttaaccaaattacctgcttccctgactattcctggactacagccacatctcattgccgcccttcttcccaacccaaagcctccttcacgtcttcctcttgtatccccccaccttaacccacaggtatgggacacctctgctccctccctggcaactgatcacacacccatacctaatcacccttaccctgctcaacaccagtatcccatcccacaacaggctttaaggggattaaagcstgttatcactcgcctgctacagcatgagcttctaaagtctaaaaactccttatgattcccccatt

SEQ ID NO: 948886 - DNA, 601 bp, Homo sapiens
gctgcccctttcccaaatctatgaaatcaaactatgacatgcctcgtgccaaatgacaaaagcaagttctcagtagtagaaataggagacctaaggcaaaccatagctattgaaacagggtataaagatgtaaatgcctggctaaaatggatcaaatattccctctgcatgttgaacaaaggcaattgttatgcttgtgcacatggcaggccagaggcccagattgtcccctttccacgagggctgtcctccagtagaccaggtgtgggctggatgctagctcttttccaggattctacatcctggggtaacaagttatgccaagctctctctgtctgctatatcccaaagttcgacaccctgtgggtcagccctccagggccatccagcttccaactcccaacactaagttcactttatgtccctcatgacagggaggaaacttaacattccttggagacctgaagggatgcagagagcttaaaatttttcaaaagtttaccaatcagycactctttattcatccctgagcagatgcatagtggtattatggtggacctttactggacactttactgagtaactgaagtggcacttatgc

SEQ ID NO: 948887 - DNA, 631 bp, Homo sapiens
ctggaaacaattctctggtaggaaaagagwcactttatgttgatctcacgcactttctctgatctctctttgtatctcttttcccactgttcctagatgctggctccacctggaccagggattcatgtggagtttccttggcccagtctgtgccattttctctgtgagtatgtgccttcgatgttcccaaactaggaagaaccaagagaagtgctgggtacaagatggtacaaggggcttgcatttccactgttgggtggtttgattttccacctgctaccaattcagtcccatgtacaagagggtaggactcctgtgtgcaatttaaagtggacaccatacattactttaacttgcactctgccttgtttgtgttggtcctgcaggcgaatttagtattgtttatcttggtcttttggattttgaaaagaaaactttcctccctcaatagtgaagtgtcaaccatccagaacacaaggtaggatgtgacaaatggtacttcctattccctttccttctgccagtccttcctacatatccatacacacgtacattcaacagccatgctcccaggactagcaagaccactgtaatcttccaccatcacagttaatgagaacctgagttagct

SEQ ID NO: 948888 - DNA, 468 bp, Homo sapiens
agaccctactgggcaaggtcactcaagcctgtgattcttcctctactaatatcccattagccaaagaaagtcacacacccaagcccaaagtcaatgagaaaagaacactcaacccaccaagagactaagacagagtgtaatacaactacaaaggagtgaatcgtggagatcaacaatgcagctaacacaccacttcacatgaattattttttttccaactactattttatttacattactaccttaagttacatggaaaaaaacacccaagcagttctgccctatttcagaaaaagtttccaatcggcagggtgcagtggctcacgcctgtaatcccagcactttgggaggccagcacagggggatcacttgtgctcaggagtttgagaccagcctgacgaacatggcraaaccccatctctactaaaaactacaaaacaattacccgggtatgatggaggcgcctgt

SEQ ID NO: 948889 - DNA, 623 bp, Homo sapiens
aaaatgagaaaaggaaagaaacggtacacagattggaaaggaagaaataaaacggtcccatttgcagatgtgattatctatgtagaaaatcccaaggcatctacaagaaaactcccagatcttataagtgaattcagcaaggtcacaggatacaggataaacatacaaaaatcaattgtatttctatataactaacaatgaatgtatggctactgaatttaaattgtcgtttacagtggctcaaaaaataaatgatatggtgtaaatctaacaaaatatgcacagaacttgtatttcggaagctacacaatgcagatgaaaaaaaattaaagttgtgctaaataaatgaagagatataccatgcccatggctcagaagactcgacataataaagatgtcaaatcttcccagattgatatacagttttgttgcaactcattaaaatcccagcaaggcattttgtacatatagggaagattattataaaacttatatggaaaggcaaaggaactagaatagctaaaasatttttgaaaaaaaaataaaggaaaatgggagcagtccatttgatttcaggacttatatgttattacataatttatacaagaatcaagaccttgtgg

SEQ ID NO: 948890 - DNA, 560 bp, Homo sapiens
tggctgtttcatcatacctgggaatccatattcggcagaaacctgttaygccaaggaaccatcatagttgctttagggttttgggataaggataggccagtataggctggatacgttcctcactgagggccttggtgtctttggataattttagccctaagtatttaacgtgctgtgagcagagctgagcctttcatctggaaacctgtagccacaggtagcgagaaaatttaagagtgcttgggtggcttgatggcacaaggtttcttaacaggtggctaaaattaaatcatctctgtaccaaaggacaagagtgtccaggtatgagagttggctcaagtcttgggctaatgcctggccaaatagatgggggctatacttgaacccttggggtaaaacagtccacgtgagttgagacgttgggttcaaaggatctttaaaggcaaatgagaattgagagtcaggatgtacagggatgcagaaaaaggcatccttaaggtccagaactgtaaaccactctgcttcctctggtatttgggaaagcagagtataagggctag

SEQ ID NO: 948891 - DNA, 649 bp, Homo sapiens
attcagcatgaaatgtgctatttggagtgctggtatcactttgatattttccccattataggtgacaaaactttttttttctggatgccttttgtattctatccttatcttcaaagacttttaaaataaatgttaccgctgtagatagatagatagtaattattacttatccttttatcccttaaatactgtactttttcctgcaggttctaggttttctgtatttcaaacatgtgttttcaaaaaatttgataaatttattctgttctttagtactatcaattatgcatatgtcctacttcctcatctgtcattcatatacaggcatacctcattttattgtatttctctattgtgcttcacagatattgcattttttttacaagctgaagttttgtggtaaccctgcgttcagtgtctattggtgccctttatccaacagcgagcatgtgctcacttcgtgcctctgttacattcttggaatattttcacaatatttcaaagtttttcattatwattatatctgttctggtgatctgtaatcaatgatttttgatgttactattgtaattttgttgaagtgtcatggacctcacccacataagatagcaaacttaatttataaatgttgtgtgtgttctgactgctc

SEQ ID NO: 948892 - DNA, 602 bp, Homo sapiens
gaagaaaagtttgtagtcatttgaaacttgaattgctgttcctctctttttaatgtcttttttgctggctgctctcaagattatcatttatcttttgtttttagctgtttgactatgatgtactcattattattttcttcatattttcattctcattttcttcatatcctgtttgggctttactgagcttcttcttcttggatctgtaatattatatctttcaataaaatgtgaacatgtacatccattatatcttcacacatatgttacaccttttgacatcctgcagctcgctgaggctctattcatgttttaaaatatcttttctctctttaagataggataattggtgcttatctatatttaagtttgtggactctgttctttgtcatttccattctgcttttatgcccatgtggtgaatttttaaatctacgtatcgtattttcgttttttttttaaatttttctatttatttatttttgttgagacggagtttcactcttgttgcccagtctggagtgcaatggtgygatctcggctcactacaacctctgccttccgggttcaagcgattcttctgcatcagcctgctgagtagt

SEQ ID NO: 948893 - DNA, 602 bp, Homo sapiens
gaagaaaagtttgtagtcatttgaaacttgaattgctgttcctctctttttaatgtcttttttgctggctgctctcaagattatcatttatcttttgtttttagctgtttgactatgatgtactcattattattttcttcatattttcattctcattttcttcatatcctgtttgggctttactgagcttcttcttcttggatctgtaatattatatctttcaataaaatgtgaacatgtacatccattatatcttcacacatatgttacaccttttgacatcctgcagctcgctgaggctctattcatgttttaaaatatcttttctctctttaagataggataattggtgcttatctatatttaagtttgtggactctgttctttgtcatttccattctgcttttatgcccatgtggtgaatttttaaatctacgtatcgtattttcgttttttttttaaatttttctatttatttatttttgttgagacggagtttcactcttgttgcccagtctggagtgcaatggtgcgatctcggctcactacaacctctgccttccgggttcaagygattcttctgcatcagcctgctgagtagt

SEQ ID NO: 948894 - DNA, 646 bp, Homo sapiens
tctctttggccttaaaattgtatgatatgaagcactttcacatgaatacattaaattagtgtattcagagaaaaggctttgctttgtttttgcttctcttggtaggtctttttgatgatgctcattgcacagggcaggggactgtttagagcgctggaagttgacacgggagccgccaagatcctaatgctgtgtagttgttgagacattcagctgttagtggacagagcattcaacagagttaagtagaactaagtgccttcctttttaatataatgactgaaagaagagaaaaaaagcccaagataaaagagcaaatctgcatgtcaccaaccaaaaacaatggaggtagcatatttccaaggagttgaaatgcttcttttatattttttcaatttataaagaatagaaatttattatttatggttctggaggctggaaggtccaaggtgccagcagatttggcaattctgattccaagatgacactttgcacactgcatgctttagagggggsgaacactgttcctcacatggcagaagagtagaagggcaaggagagggtaagagaaggcaagagggggccagactctaccagtcccatccatgagggtggagccatggcctaatcacctcccaaaggtccc

SEQ ID NO: 948895 - DNA, 609 bp, Homo sapiens
atcaagcagaagaaaggatattagagattgaagatgaccttgctgaaataaagtgtgcagactagattacagaaaaaagaatgaaaaggaacaaacaaagcctccaagaaatatgggactaggtgaaaagaccaagcctgtgtttgattggattacctgaaagtgatggggagaatggagccaagttgagaaacacacttcaggatattatccaggagaatgtccccagcctaacaagacaggccaacatttgatttcaggaaatacacacaacacgactaagatactctatgagaagatcaacctcaagacacataatcatcagattctccaaggttgaaatgaaggaaaaaattttaagctcagccagagagaaaggttgggtcacttatgaaagaaagcccatcagactaacagtgtatctcgctgaagaaaccctgtaagccagaagagagtgggggccaatattcaacattcttaaaggaaagaattttcaacccagaatttcatatccagccaaactaagtttcataagtgaaggaggaataaattsctttccagacaagcaaatgctgagggattttgtcaacatcaggcctgccttacaag

SEQ ID NO: 948896 - DNA, 453 bp, Homo sapiens
gtgtataccccttgtttagctcccacagataagtgagaacatgtaatatttgattttctgttcctgcattaattcatttaggataatggcctccagctacattcatgttactgcaaaggacataatttcattactttttacggcttcgtagttttccatggtgcataggtaccacatcttctttatccagtccaccattgatgggtatctaggttgattctataactttgccattgtgaatggtgctgcaataaatacatgagtgcatgtgtctttttggtagaatgattcattttccttcgggtacatacccagtaatgggattgctggatcaaatggcagttctatttttaggtctttgagaatactccaatctattccacagagactgaactcatttacwttcccaccaacaatgtgtaaacattctcttttctccttatcctgaccaac

SEQ ID NO: 948897 - DNA, 582 bp, Homo sapiens
aggctcggtctacccacttagcagttctgacaaggaaaaaaggaccacagaacacagaaaagatgggaagagtcaacttggaggtggaaagaggaagacaaacagcaagtccactgtgggagmataaggaggagcccccacagccttctccagctcttctcaggttccatttagagagttccaaatcccagcagcacccaacatctccccacaggaagttacactccccaaaattacagagcagagcttcttactgcaaaaatcttttaacatggcaataatacaattgtgatatattgccttgtctaccatgctaaatgatggtggtcttgcctaccattctaaattcactgtatggttttacaacttagaaatttttgaagctatgaaaaaactcagttatgtaaatgacatccataggccccagggtaaatggacaacacctatagagcagccttgccaattttatcatcccacacttgttatgcacagaaagccctttgcttgtttattttctataacacttgatattgtttgtggacctctaccccaccaagagaggaaaaaatacaaatttattct

SEQ ID NO: 948898 - DNA, 473 bp, Homo sapiens
gttaaatttgtttttcgcctgtagaaataagaacttaactttcacctatgaagcactcatcttatttcactagagcttttgtctcctggatgactatttctagcttttcacttgaataaactctamaattggattttgaggctttattgattattcagattatttcagattaacagtccttcatagcatctttcttctgcctttacttcctgactaaaccctctttcatgtgaacaaattgtacccaatgccactcgtcgggtgcctgattaaaatgcctactggaaatcagatgtccatgagttcaaggtcatggccttagacttggctgttgtaagggcaaatacaaattagaaataccagacttaaattatgaaacttgaagataaaaaaagacattttactctccttttaaaaaataatttaagaaaacttttatatgtaaatttattttgtgtctctattaaatgtat

SEQ ID NO: 948899 - DNA, 596 bp, Homo sapiens
tttgggtccacgctgcgtttatgagctgtaacactcaccgcgaagatctgcagcttcactcctgagcccagcaagaccacgagcccaccgggaggaatgaacaactccagacgcgctaccttaagagctgtaacactcaccgcggaagtctgcagcttcactcctgagccagcgagaccacgaacccaccagaaggaaaaaactccgaacacatctgaacatcagaagggacagactccagacgcgccaccttaagagctgtaacactcactgcgagggaacgcggcttcattcttgaagtcagtgagaccaagaacccatcaattccggacacactctcacttttgtccttagtagtagtagtagtacttatagtatataagcaccccattcttaccagacttgctatttcactgtatcttgttttgctacacctcatccatctatttgtaagtagtctctgaattaatccttgctaaatactcaatttgagttgccawttttttttctcctgtcaggaccccaattgaaaagccactattaaggctgcgcatgatggcttatgtctgtaatcccagcactttggtttgggaggc

SEQ ID NO: 948900 - DNA, 584 bp, Homo sapiens
caatttcccctctaaacaggacatcccaacattctctgctgttgggaattgagcaatgacaactctagctactccctgctggataggggtaaagaaggggccctgcagtggtagtgtcctccagaggggaacwctctaggctacccaaagggccagtgggtcggttcaggggtcctcggcagaagttgttagttgacctcatttggggttccatttctaagaccatctgtagcttgatggccttgatcctggaggaaacaaatttgacaaggaggttaaaaatacagggcctgaaggcgagtaatagcaagatggctgtcatggcaactagaaaggggagaagccatgtcacccaactccaaaggttggtagaagagtttgaaaggtgttgtctgatttcagaaaccttttcctgtacacgccgggtggtgtctcatactaacgctgactggtgagtataaaagcaacaatcttcccctaagaaggtgcaaagttctcctttctcagcagtgaggaggtctaggccttggtggttttggagagtcactcctgccaaagagtctatttgggattgtagagtaagg

SEQ ID NO: 948901 - DNA, 792 bp, Homo sapiens
ctgtcttactgtttctcagaggatccaatataacacactaaggttttaactgttttaaaattaattttaatgaagcagggcagagcatcgcctcacctgggaagtgcaaggtgtcgggggatttccttttcctagccaagggaagctgtgaaagactggaaaaacgggacaatcccgcccaaatagtgcacttttcatgaggtcttagcgactggcagacaaggcgattctctcccgtgcctggcttggtgggtcccatgcccacggagccttgctcactgctagtgcagcagtctgagatcaaactgcaaggtggcagcctggctgggggaggggcgttaccattgctgaggcttgagtaggtaaacaaagcagccaggaagcttgaactgggcagagcccactgcagttcagcaaggcctactatctctatagactccacctctgtacgcagggcatagcggaacaacaggcagcagacaacttctgcagacttaaatgtccctgtctgacagctctgaaaagagcaatggttctcccagcacagtgtttgagctctgagaatggacagactgcctcctcaagtgggtccctgacccccgtttagcctaactgggagacacctctcaatagggtccgacagatacctcatatagcggggtacccctctgggacaaagattccagaggaaggatcaggcagcaatatttgctgtttggcaatgtttgctattctgcagcctccgctggtgatrcccaggcaaaaagggtctggagtggacctccagcaaac

SEQ ID NO: 948902 - DNA, 593 bp, Homo sapiens
gttaaaaccaattttatgccaataaattcaatattttaaatgaaatgtcaaaattccttaaaatatgccacttcccaaaatgaattcgagaaaaagtagtgtctgaataatcctctacttataaaaacaattcaaaattaaaaactttcctacaaaaactccagtcactgaaagcttcactagttgattccattacagttaaagatactccatattttaataacataaaatattattgtggcatatcttaatagtatcaaaccttaaaaaaatgattttagaacacagagaaaaagtaaacatatcaaagctcattttaagagtccagcattattctgacatcaaaaccaggcatggaaattacaaggtgatatcagaaacgttccatatgagtgtggctgggaaaaaaacatatatatgttataaacatatgtatatgttataaacacatgcatgctgcatgttayaaacacatgcatgctgcatgttacaaacatgtatgctatatattataaacatgtgtgttacatatatgctataacatgttacttgtgttatacgcattgttacatgttataaacatgtgtacatta

SEQ ID NO: 948903 - DNA, 421 bp, Homo sapiens
tacctagtttgttgagggtttttaacacgaaagaagttgaattttattgaaagtcctttctgcatctacttagatgttcatgtggtttttgttttaagttctgtttatgtggtgaatcamatttattgattttcatatgttgaaccaaccttgcatcccagggataaagcctacaagattgcaggaattaactttttgatgtgctgctggattcagtttgctagtatttaattaaggatttttgcatgtatattcatcagggatattagcctgtttgttgttgttgttgttcctctgcaggtctgggtatcaggatgatgctgtcctcacagaatgagttagggaggagtccttcttcctccatttttgtaatagtttcaggagaaatgatatcagcaattctttatatacctcatagaat

SEQ ID NO: 948904 - DNA, 458 bp, Homo sapiens
tctgtctggtcctgggcttttctggttggtaggcttttttattactggtttaattttgggagtcattattggtctgtcagtgatacaatttctttctggttcaatcttcagaggttgtatgtttccaaaaatttatccatttcttctaggttttctagtttgtatgcatagaagtgttcacagtagtctctgagggttttttaaatttttgagggggtggtgggaatgtcccctttttcatttctaattgtgtttatttggatcatctctttttttctttgttagtctagctagtggtctatcaatcttacttatcctttcaagaaacaaattattggayttgttgaacttttgtagagttttcacatctcaatttccttcagttcagctctggttttggttatctattgcttcctgttagctttgggattggtttgctcctgttttttctaatttct

SEQ ID NO: 948905 - DNA, 646 bp, Homo sapiens
tctgcctgagatgctgaaatggccatctatatggcctggtgtccagcatccccacctgcaccaaaagtgacctgctcaatacttaactatggtgacgctgaccacgttattaaacattattcaatggcttctcattagtttgaggataaagctaaacatttttcatgttgtctgtgaagcaagtaaaggctgacatgaaccctcatgtagattccaccgcaatgaatcctgcacaccccagatgacaacttcagcaccaaggccacatgaaaatatttggggcatagaacatttatcttaattggctatgttaaagggataaaggaagtcttggatctttgggcttctggcccttccaatcaatagcacataaaatacgtaaagcattgcttttggttgacagtaagaacaataaatcctcaataaatcacattaatgagaagtcctcaattatagaaatcaataagactctcagaggtaatgcaaacataactcaggaacctggaataaactgggacatgaccatgtatttctatgcatacagaagttataaatatgcatgtgaacactgggtgggggttatccaaagatggtaggaaactcctrtgaatttcaaatcccctaaaaataattttgctgtgaagtc

SEQ ID NO: 948906 - DNA, 615 bp, Homo sapiens
gctattaacaattatatcagaaccatctaggaaagattgcactttatggttacctaagaatatgaaacggagagtttgggggtttggcagtggtgatgaggaaatgcaaaataaagttgtggggacaacccagaatagaccagagtacatggcccctgttcagcctggcagtgggtgggcgttcccatcaggcattgggaaagtaaggcttgggctctggctgtggtctggggaagaagggatgcaattggaacagactggaaggggcctgaatggctttggacagtggaggacatggtgggttctgggcacagtggcaaggccagtgctgggctttaggacgatcactctgtcattggcaaggtgagtggagagaggcaccacatccaagatggagaagccgaacccagccaccagtgccgggggtgggaggggcgggggctgagcaggccatgagccaggaagtggggtacattccggaggtttgttctccaggctcctcaggcccgcagcagggggtccttcttgaatgggcagctgaarctacactgtgccccctctaaggcctgtgctgtgcgagcagcttcatggagaaaagtggcccagccgggttct

SEQ ID NO: 948907 - DNA, 440 bp, Homo sapiens
agtcttctttgcaaaagggccaaaacatatggaactgtgctcattacgtatcagagaaataaaaagtataaccacaagaacatgccactacacactcaacataatagcaaaaataaaaaacactgctgctgcgtgcagtggctcacacctgtaatcccagcactttgggaggccgaggagggtggatcacttgaggtcaggagttccagaccagcctggccaacatggcgaaaacctgtctctactaaaaatacaaaaattagctaggcatggtggcctacacatgcaacctcagctactccggaggctgaggtgggagaattgcttgaacccaggaggcggaggttgcagcragacgagattgtgccaactgtgctccagcgtaggcgacagagcgagactccatctcaaaaacaaacaaaaaaaggccaatactaagt

SEQ ID NO: 948908 - DNA, 602 bp, Homo sapiens
tgtgctggtgggcgtgttttagcaggatgggctaacttcatggcrcagcagcaggcaggagggaagtctcagtaggctgggaggggacaggatctgattaacatacagattgctttggctttagaaaggagcatggatagtttatctactatgtcagaagagaagatgaagtatatgatcacagaggcagagaggctgggatatatggtggaggatatggaagttctcttctgaatacttttgttagtgaaataggcaagatcatcagctaaaagtgaaaatgagaaagggagtatcgaagattggaggagagaagaaaaagggtgatagagttgttttagagactgaaaggatagactgactagggaagtgtagtgggactctaggcggcattacagacctacttcaagtttgtggtcatgaatttaaagtgagaccagtcatcatggagctgcctcaactccttgcttgccggtgccaaggaagtggaaaggtggatttaaacagcatagggatgtgaaggtaggagaaagaggtgagggaattgaggtggttgaagtggtaggaaagggagtgggtgttatgatgggatcaaagccagg

SEQ ID NO: 948909 - DNA, 725 bp, Homo sapiens
gctgttagtcttatgggcttccctttgtaggtgacctagcctttctctctagctgcctttaacattttttctttcatttccaycttggagaatctgatgattatgtgtcttaggggatgatattcatattgagtatctcactggggttttctgcatttcctgaatttgaatgctggcctctctagctaggttgaggaagttctcaaggatatactgaaatatgtttttcaagttggttccattctccccatctctttcaggtacactgatcaatcgtagattcagtctcttcacataatctcattctttttcttgcaggttttgttcattccattttattcattttttctctctcgtctgcctgtcttatttcagaaaggcagtcttcaagctctgatattctttcctccgcttgttgtattctgctattaatacttgtgattgcattatgaagttcctgtactgtgtctttcagctctatcaggtcagttacagtcttctctatactggctactttgttagctcctgcaatattttagcatgattcttagcttccttgcattgagttacaatgtactcctttagttccatgaactttccatattctgaactttccatattctgaattctacttctgtcattttagctatctcagcctcatctgaaattttgctggagaggttatgtggtcatttgggagaaagaggacactttggctttttgag

SEQ ID NO: 948910 - DNA, 374 bp, Homo sapiens
ataatcttggtttacttactgcaacctctgcctccaggttccaacaattctcctgcctcagactcctgagtagctgggattacaggtgcgcgccaccacgcgcagctaawttttgtatttttagtagagatggggtatcaccatgttggtcaggcaggtctcgaactcctgaccttgtgatccgcctgcctcggcctcccaaagtgttgggattacaggcgtgagtcaccgcacccagcctatttttatttttgagacagagtctcactgtgtcgcccaggctggagtgcagtggcatgatctcggctcattgcaacctctgcctcccaggttcaagcgattctcccgcctcagcctcctgagtagctgggatt

SEQ ID NO: 948911 - DNA, 498 bp, Homo sapiens
gggaacacagtggcgcccagaagcttggagattccaggaactgcagagccccagagagggtgtcatagacctggcttaggagcccctaggtctgagctccccaraggtccacagctcttctctcctgtcttctctccttcttgttgctgcaatgtggcaagcaagagatgggtttcaggcctgtttgtgttacagctcttttagccctgccattcggtgggtcccaggttcttgtcctgcttccaggaagaatgaagtatgtggacgagtggagggtgagcaaggcaaagaggggcttccttgagtgacagaacattgaggggagacccgcagtgggtgcttctttctgcaggcagggcatcccatcaagtgagaagtgatgagccttcagcagagaggggaccctggagtgggtagctcctctccgccggcaggttgtctgcttgtctcttcaagtttggccgagtctggggatttgtatgggcttgagaggaggaa

SEQ ID NO: 948912 - DNA, 570 bp, Homo sapiens
tagccaggcgttgtggcatgcatttgtagtcccagctactctggaggttgagatgggagaatggtttgagcctgggaggcagaggttgcagtaagcccagatcacaccattgcactccagcctaggcaacagacccagaccttgtcttaaaaaaaaaaaaaaaaaaaaaaaaaaaacaaaacctgaacaaacatgccaccaaggaagatatacagtaatagacagttgacaagcaagcatatgaaatggttctcgatgtcatatgtcattagagaattgaaaatcaaaacaaagagataccactatacacctattaatataggcaaaatgcaaaatagtgacagcgccaaatgctggtgagtatgtgcagcaacaggaactctcattcattgcgggtgggaatgcaaaatgatacagactgtgatggttaatacttagtatcaacttgattggattgaaggatacgaagtactgatcctgggtgtgtctgtgaggktgttgccaaaagagattaacatttgtcagtgggctggggaagacagatccacccttaatctggcgggtgtaatc

SEQ ID NO: 948913 - DNA, 625 bp, Homo sapiens
gcagtgtggtgtttgttcttttgctctttgcaataaatcttgttgctgctcactgtttgggtctgcactgcctttatgagctgtaacasttattgtgaaggtctgcaggttgactcctgaggccagggagaccacgaacccaccggtaggaagaaactctggacacatccgaacatcagaaggagcaaactccagacacaccatctttaagaactgcaacactcaccggagggtccgcggcttcattgttgaagtcagcgagaccaagaacccaccaattccagatgcagtctcacctgtatatggaatttaataaagccagactcatggaagcagagagtagagcagaggttgccagaagcttggattggaggtaaatggggagctgttggtcaaagggttaaaaaaaggcaagagtgacaaattgtattaaaaaaattatttaaaatgtgttttgacacatcatttttatgataataatgtttatttatacctttaacctaatataattcaaatttatactgacatcctcccatctgctccttctgaaggacaaagtcatctgtcattgatttagagttcccagggtattatttaattagggctttgtaattaataacaacaa

SEQ ID NO: 948914 - DNA, 593 bp, Homo sapiens
tgtgacaatgaaatgcaatgtgtgagcctgtctcgaattggatcctagaccagaaaaaggacatttgaagggaaactggtgcaatttgaaagggacctgcagattagacaatagagtgcctcaaggtcagtttcttgatttcactcgttttgctgtggttctgtgagctgttaacctttgggaaatctgggtatgtggtgattctttgtactgtttttgcaacttttttgttaagtttgaaattatttcagaaaagaaatctttaaaaaatgatcataaggagaggacattcttactccccagaattcttggagcctgggaaaggtgggtttggtggggaggggtctgggaaagaagttctcagagcagatgcagttactcccagagagctagagtgtcgggggcgtggagtcggggggaacccagggctccggggaacatgggcttttggaaaggacatrgagtgaggagggagacgaggcaaggtggcagaaggacgtacctgaagtgatccttaaagctgcagtgaattcactaaccagatgacatacaagagtggcaagatttctgcttgaagaggtgaagggtccaac

SEQ ID NO: 948915 - DNA, 593 bp, Homo sapiens
tgtgacaatgaaatgcaatgtgtgagcctgtctcgaattggatcctagaccagaaaaaggacatttgaagggaaactggtgcaatttgaaagggacctgcagattagacaatagagtgcctcaaggtcagtttcttgatttcactcgttttgctgtggttctgtgagctgttaacctttgggaaatctgggtatgtggtgattctttgtactgtttttgcaacttttttgttaagtttgaaattatttcagaaaagaaatctttaaaaaatgatcataaggagaggacattcttactccccagaattcttggagcctgggaaaggtgggtttggtggggaggggtctgggaaagaagttctcagagcagatgcagttactcccagagagctagagtgtcgggggcgtggagtcggggggaacccagggctccggggaacatgggcttttggaaaggacatggagtgaggagggagacgaggcaaggtggcagaaggacgtacctgaagtgatccttaaagctgcagtgaattcactaaccagaygacatacaagagtggcaagatttctgcttgaagaggtgaagggtccaac

SEQ ID NO: 948916 - DNA, 609 bp, Homo sapiens
ccatctgtgccttctctgatttctttgagcagtgttttataggtctccctgtagagatctttcgcctccttggttagatgtatttgtaggttgtgtgtgtgtgtgtgtgtgtgtgtgtgtctgtgtgtctattgtaaatggggctgtgttcttgatttggttcttggctttagtgtattgctgtatagaaatgctactgatttttgcacattgattttgtatcctgaaactttatgaaagttatttactgttctagcagccttttgatggagccttcacagttttccaagtatagaaccatcttgtcatggaagagagataacttcttttttccccaatttggaggtattttctttctttctcttgcctgattgctctttccaggactttcagcactatattaaataggaggggcgagagtctgtatacttgtcttgttctggttcttaaggggaatgctttcagcttctgcccattgagtatgatgttagctgtgrgtttgtaatagatgtctcttactgttttgagttacgtttcttcaatgcctagtttgttgagagcttttatcatgaaagaatgttggattttatcaagcactttttctgtatc

SEQ ID NO: 948917 - DNA, 610 bp, Homo sapiens
gctgaagctgctgagatgcagggcaccaagtccagaagctgcatacagcagggggggctggacctggcccaggaaaccatttttctctcataggcctctaggtctatgatgggaggggctgccaagaaggtctctgacacatcctggagacattttccccattgtcttggcaattagcatttggctcctcattacttatgcaaatttgtgcagccagcttgaatttctcctcagaaaatgagtttttcttttctattacaatgtcagggttgcaaattttctaaacttttatgttctgtcacctcttgaatgctctgctgcttaaaaatttcttccactagataccctaaatcatctctctcaagttcaaagttccacagttctctagggcaagggcaaaaagctgccaatctctttgctaaagcatagcaagagtgacctttactccagttcccaacaagtttctcatttccatctaagaccacctcagcctggattkcattgtccatatcactatcagcattttgtcaaagccattcaacaagtctctaggaagttccaaactttcccacatctttcccatgtcttcttctgagccctcccaactgtt

SEQ ID NO: 948918 - DNA, 565 bp, Homo sapiens
aacttttccagaaaattgaagaagatagaacacttctcaactcattctatgagtccagcattaccctgatactctgataaaggatccaagaaaactactgaataatacaccctatgaatacagacacgaaaattatcaccaaaatattagtgaataaaatcaacaataaaccaaaagtataatcgattatgaccaacaggaatttatctcttgaacacagaactgatttaatatttgaaaatcagtgtaattcaccataacaacagactaaagaagaacaatacaatcatcttgatagatgcagaaaaagcctttggcaaaattcaaaaccactcatgatacaagctctcaggaaactaggaatagaagggaacttccttcacctggtaacaggtaatgtctaatggtgaaaggagaaatgccttccagactgggagcaaggcaagaactacactctttyttttttttcttttttcttttttttctttttgagacggagtctcgctctgccacccaggctggagagcagtggcgcgattttggctcactgcaaactccgccttct

SEQ ID NO: 948919 - DNA, 474 bp, Homo sapiens
gctgtctttttttagtgagcttggaaatttatgtcttgaaataaaattgtccacttaatctaagttgtagaatttattggtattaatttattcataatattcctcttatcctgttaatatctgtaggatctctagtgatgtcccttctcccactcctgatatggataatttgtcttctctcttattttgtctatcaatccatctcgaggtttatcatttttattgatctcaaaaagcagcttttcatttttatggctcatcaatttttttgttttctatttcattgatttatactgagatatctattatatccttattattactaacttttggtttaattkgttttttgtttgttttttgtttttgttttgagatggagtctcactctgtcgccaggctggagtgcagtggcatgatctcagttcactgcaacctccacctccctggttcaagagattcccctgcctcagcttc

SEQ ID NO: 948920 - DNA, 551 bp, Homo sapiens
tgtgaatttgttaggtgctggctatttttatattcctgtaaatattcttgagctttttcctgggatgctgttaagttacctaggaagagtttgatttgtttggatcttgcctttagarttttctgggtgggaagagcagtgtttactctggggcaagtgattccccactattgagacaagaccctctgaatactctatccagtgtcccatgaattgtagagttttccagtctggctgctggggacaggcgctgttttaggttctgtgtgagggccagttgctgttccctctaatcctttcaggtgattctgttccctgccttgagtagttttctcatgacattctcatcagtgttctgctgaatatttgagggggaccttctgtaggtctccagggttccctcttgtgagccctctcctctctgtgtcctgtgaattctagcaaccttggtctcctggatgctcagcaatatctcttcaactcatggagactgtcaggccacacctgggttcccttcctgctccatggcctggaaattctcctaggcagta

SEQ ID NO: 948921 - DNA, 619 bp, Homo sapiens
tctcaacactttggaaggccaaggcgggaggatcgcrcccaggcaacatagtagtaccctgtctctacaaagagtttaaaaattcagccagacatggtagtgcatgcctgtaagtccaagcttctcaagaggctgatacagaaggatcacttgagcctagaaggtcgaggttgcagtgagctatggtcgttctactgcattccagcctgggtgatgagtgagatcctgtctcaaaacaaaacaaacaaacaaagagaaagaaagagagagagagaaagaaagaaagacaaaagaaagaaagaaagaaagaaagaaagaaagaaagaaagaaagagaaagaaagaaagaaagaaaaagaaagaaagaaagaaaaagaaagaaagaaagaaaagaaaagagaagaaggaagttcctatttgtttctccttaagatttgggaaagactttatgcataataaaaatttaataacagttcaatcaatgacttggtatgatcaaattagaactataaaaataatctatataagcactaaaggttgccaataaacatacagctaggtcatatgtaacaatttaaaatgagatgaagtaaagcagtggagacaccatggctgtagca

SEQ ID NO: 948922 - DNA, 619 bp, Homo sapiens
tctcaacactttggaaggccaaggcgggaggatcgcacccrggcaacatagtagtaccctgtctctacaaagagtttaaaaattcagccagacatggtagtgcatgcctgtaagtccaagcttctcaagaggctgatacagaaggatcacttgagcctagaaggtcgaggttgcagtgagctatggtcgttctactgcattccagcctgggtgatgagtgagatcctgtctcaaaacaaaacaaacaaacaaagagaaagaaagagagagagagaaagaaagaaagacaaaagaaagaaagaaagaaagaaagaaagaaagaaagaaagaaagagaaagaaagaaagaaagaaaaagaaagaaagaaagaaaaagaaagaaagaaagaaaagaaaagagaagaaggaagttcctatttgtttctccttaagatttgggaaagactttatgcataataaaaatttaataacagttcaatcaatgacttggtatgatcaaattagaactataaaaataatctatataagcactaaaggttgccaataaacatacagctaggtcatatgtaacaatttaaaatgagatgaagtaaagcagtggagacaccatggctgtagca

SEQ ID NO: 948923 - DNA, 619 bp, Homo sapiens
tctcaacactttggaaggccaaggcgggaggatcgcacccaggcaacatagtrgtaccctgtctctacaaagagtttaaaaattcagccagacatggtagtgcatgcctgtaagtccaagcttctcaagaggctgatacagaaggatcacttgagcctagaaggtcgaggttgcagtgagctatggtcgttctactgcattccagcctgggtgatgagtgagatcctgtctcaaaacaaaacaaacaaacaaagagaaagaaagagagagagagaaagaaagaaagacaaaagaaagaaagaaagaaagaaagaaagaaagaaagaaagaaagagaaagaaagaaagaaagaaaaagaaagaaagaaagaaaaagaaagaaagaaagaaaagaaaagagaagaaggaagttcctatttgtttctccttaagatttgggaaagactttatgcataataaaaatttaataacagttcaatcaatgacttggtatgatcaaattagaactataaaaataatctatataagcactaaaggttgccaataaacatacagctaggtcatatgtaacaatttaaaatgagatgaagtaaagcagtggagacaccatggctgtagca

SEQ ID NO: 948924 - DNA, 570 bp, Homo sapiens
atgtactctgttgtgctgctgctgacactgctgccgacacgtgcaaagaggactgatctsactgccactgctctacaaagtgctttggctggcaccatccatcacagtgttgtgaccagcagtctgggagcattttggtccctccagtgcaacaggttcccaaccttgaggagccagagaacaaagctagggtctgataccagtcccctagagttagagcatgcagtcaggagtcctgagctgagctttggccccctaaagccttccagtaatgaaaacagtccactgaaccctccttataccacaatcaaacccccaaataagcccagagataaggttgcacacctaaaaccatctgatcttcgacaatgctgacaaaaacaggcattaggaaaggactccgtattcaataaattgtgctgagataactgggctagccatatgcacaagattgaaactggaccccttccttataccatatacaaaaatcaactcaagatgaatcaaagacttaaatataaaaccccaaactataaaaaccctgggagacaacctaggcaataccactgt

SEQ ID NO: 948925 - DNA, 571 bp, Homo sapiens
tgaactcctgggctcaagggatcctcccaccttggcctcccaaagtgctggaattacaggcatgagccactgcacttagcgctcttatttattgtctattgagcatctactttgtgtcctgagctaggcttggggaagttatcaaatactaaatcctatgtatagtttttttaattaaaaaaatattaatttatagagacaaggtctcactatgttgcccagattggtcttgaactcccgagctcaagcaatcctcttgccttggcctcctaaagtgctagggttacaagcgtgagccactgtgcctggtcatatgtgtaatgttaccctcaaaacactttagtttggctcctgctgggggataatgcaaagcacagtagtactaactctttatgttgttttctctgtgccaggcactgttctggaccctgggagtagcagggttggaatttgaaygcaggggtctggttctaaccaccctgcctctctgtacaagtaatcccagtgcaaaagacaaagcaagatgtgttctaataaaggggagatgaagaactatgagaattcagaggac

SEQ ID NO: 948926 - DNA, 637 bp, Homo sapiens
tgggctgagccttttgggccacatccctgcccccagagctccaggcctcactcagggctcctttccgtgccggctcctcagaagatgggagggttgaagggctcccctcacccacaggtgcccagcaaggacccctgggggccgaaggctccagccctcgggccctctgggctgcttgggaattgcagtttggtgctgactgtggacgtggctgcgccctctgccctgagcccgcttctctctgagctgagttctggagcctcttccttctcaggatcttgacactcaatgctggtccccgatccctgcggatctcagggtctctctgggggctaggaagggacgaactctcccagatagcaaggttacaggttaaagtggggcctttttcccaaattggcctatggggtgtgacagaggctctctgggcctgaagtgtcactcccaagggaaggggtcacgtcctggggccgggagcaagtgtgagccatgagaggtggcggcagagctagttccaygggttctgctgtgatggcagctcaggctgggagacttataaggaccgagactgaggcccacagctccacaggcctggcaggatgcggtcaacgtgtgggcacggagggaggcccccttg

SEQ ID NO: 948927 - DNA, 653 bp, Homo sapiens
cattatcctaagagaattaacacagaaagagaaaaccaaatactacatgttctcacttgtaagtgggagctgaacatcmggtgctcgtggacataaagatggcagcaatagactactagaaggagggaggaaaggtagggagcaagagttggaaaactaactgttgggtagtattctcagtacctgggtaatgggattattcgtaccccaaaactcagcatcatgcaatatacccaggtaacaaacttgcacatgtacccctgaatctaaaataaaagttgaaagataaataaataaactatactacatgtcatctaaattctatttagcaaagactgttttttatttattgtactttaagttctggggtatatgtgcacaacatgcatgtttgttacatatgtatacatgtgccatgttggtttgctgcacccattaactcatcatttacattagttatgtctcctaatgctatccctcccccatcccccaaccccatgacaggccccagtgtgtgatgttccctgcccagtgtccaagtgttctctttgttcagttcccacctatgagtgagaacaggcaatgcttggttttctgtccttgcgatagtttgctcagaatgatggtttccagcttcatccacatccctacaa

SEQ ID NO: 948928 - DNA, 461 bp, Homo sapiens
actaacatccttttgttggtccatatcaccakcatgctgtgtctggggtgttgcactgttaacagaaatcaacaatcctcctcacagctccataaagataagtgggtgagagattgtatggcacctgtagggctgggaaattttatctgaaattcccataagcaaaactgcagtaaagacctctttgccctttgttaattgaaaataaactactcctttttttggaggaggcctctgaaagctgccatggaaacaagctcactaaaggcttcagcaactgctcagatatttaatttcacccacagtgaatgtaatccaggcaagaagtgctcacaatatgaaaacattgattagcaggggactgcatgtgtaccttgctgggtacaggccccactttctttctctttgaggacgctgagcttgaacatccaaggggaaagacatccaaaaagcatcgccac

SEQ ID NO: 948929 - DNA, 507 bp, Homo sapiens
gactacaggtgcccaccaccacgcctggctcatttttttgtatttttaatagagacggggtttcactgtgttagccaggatggtcttgatctcctgaccttgtgatctgcttgcctcggcctcccaaagtcctgggattacaggtttgagccaccacgcccgacccctccttcttaatatatcaacttgatatattacctgatggcttcctgttctgatagctgatgacttggctgacactcacctcttaccccagtgcctgaaccactttccttatatggtgctctcattattttctttttcttttcttttctttttcttttttttttgagacagagtcttgctctgttgcccaggctagaatgcagtggcacaatctcagctcacwgcaacctctgcctcccaggttcaagtgattctcctgcctcagcctcatgagtagctgggattacaggcataagccaccatgcctggctaatttttgtattttagtagaagcggcgtttc

SEQ ID NO: 948930 - DNA, 347 bp, Homo sapiens
gtccattcatctattgatggacagttagattgattccatatcttgcttattgtgaataatgctgtcataaacataaaagtgcagatatcttttagacrtggccatttcattttttgatatatacccagcagtgaaattgctggagcatacaacagttctatttttattttttttaaaacctccataatggctgtactaatttacatttccaccaacagtatgcaagtgctccctttcctccccatgttgatcaacactagttatttttcatctttttgataatagccatttatacaggtgtgacataatatctcactgtgattttaaactgcatttctctaataatt

SEQ ID NO: 948931 - DNA, 496 bp, Homo sapiens
ttttaatgtgggtcaacgtattttattacacatgtgatatgatcttcaagtgaaagaagggaagatggaaatagctggtttgagtgtctattatatgctgtgttatgctaagtaagcattttatacataaaccatttcatctggtctcttcaaaacccttatgagaaagttgacaccattccaatattagaggaagaacactggaatttgagcaggttaaaatcacttgaccatgccactgcgctgggaattggcaagcaggactccaacccatacttgcttgactctgaaataaccaatatagcaagatgtttaatctttacccacataaaatacatccaagaatactgacatagcatctgggaatgatggctcaggcctataatcccagcactttgggaggctgaggcgggcagatcatctgaggctaggagcttgagaccmccatggccaacatggtgaaaccatgtctccacaaaaattacaaaaaaaaaaa

SEQ ID NO: 948932 - DNA, 617 bp, Homo sapiens
atattctacctacctggagatagcatcgaatcccacaggttaagggctcagaccacaagacagtctccaagccagtcacgagttcaggcctctggaaatttttaccaactttctatttagggtccccacaaccctttctgcaggtttgattcatttgctaaagcagttcccagtgtttatccaattattataaaagatattacaaaggacgtagataaatagccagatggaagatttgtgcagggcaaggcttgaaagaagggatgtggagcttctgtgccttctctggctgcacaacccttcgagatctcccatgtgttcagcagtcaggaagctcccagcagcctgtccttttgagattttatgaaggcttcattatataggcatgattgatgacatcattgaccactggtgatcagcttaaccttcagcctatctcttcttcccagaggttggagggtgaagctaaaagttccaactctctaatcctgccttgttctttctggcgaccttccctatccttactctccaggggtccycagccacctgtcatctgattagcattatcactctggagattccaagggtctttggagctgtatgttgagaaatgggaa

SEQ ID NO: 948933 - DNA, 641 bp, Homo sapiens
ctgggtcaggtggggacttggagaacttttctgtctagctaaaggattgtaaatgcaccaatcagyactctgtgtctagctaaaggtttgtaaatgcaccaatcagcactctgtgtctaactaatctggtggggacttggagaaattttgtgtctagctaaaggactgtaaacgcaccaatcagcactctgtgtctagctaatctggtgggggcttggagaacttttgtgtctagctaaaggattgtaaatgcaccaatcagcactctgtgtctagctaaaggattgtaaatgcactctgtcaaaatggaccaatcagctctctgtaaaacggaccaatcagctctctgtaaaatggaccaatcagcaggatgtgggtggggccagataagggaataaaagcaggccaccggagccagcagccgcaacctgcttgggtccccttccatgctgtggaagttatattctttcgctcttcgcaataaatctcgctgctgctcaatctttgggtctgtgccacctttatgagctgtaacactcaccacgatgatctgcagcttcattcctgaagtcagcaaggtcatgaacccaccagaaggaagaaactccagtcacatctgaacatctgaaggaacaaactcc

SEQ ID NO: 948934 - DNA, 597 bp, Homo sapiens
aagaggatcctaaaaaagaattaattaatacaaaagaaggcaaacaaagagggcaaaaggaacaaagaacagatagaacaaacaaaataaatagcaagatgatggatgtaaacctaacgcattaaatataaatggtttaaacaaccttaattaaaagacatgggctgtcatattagttgaaagggcaataactaactatatgttgcctacaagagaccctaactatatgctgcctacaaaattgtatattttaaatatacaattatgttaaaggtaaaggagagaaaaaagcacactaacattagtcaaaagaaagctgaagtagctcatattaatattagatgaagtagatttcaaattaacatatttttaccaggtataaagaagttcatttcataatgttaatggaatcaattcatcaacagaacataaatcataaatatgtattgacctaataagagattttcaaagtacatgaaacraaaactcattgaactgcaaggagaaataggtaaatatacagttagagtagagatttcagtacctctctctcaataatcaatagaacaagtagtcttaaaattattaaggatattg

SEQ ID NO: 948935 - DNA, 476 bp, Homo sapiens
tgctagcaaggatgccaaacaactggactcctcatacattgttgatagaaatgaaaaataatrtagatactttggaaaacagtttggcagtttctaataaagttgaacatatttttactctacaatccaggacacccgctcccaggtatttaccaaaatgaagtgaaaacttacattcaccccaaaacctgtgtgtgattgtccgtggtggctttattcttaattgccccaaactggaaacaaacccagatgtctttcagttagtgaatagctaaacaaactgtgtctagccacagaatggagtactgcaaaggattataaaggaaagaaactactgatacaggtaatgacatggatgcatctcggattcattatgccaagggaaagaaacaagacttaaaaaggtacatactggctacatactgtatgattccaattatatgacataaaggcaaaattatagacacagaaaacag

SEQ ID NO: 948936 - DNA, 476 bp, Homo sapiens
tgctagcaaggatgccaaacaactggactcctcatacattgttgatagaaatgaaaaataatatagatactttggaaaacagtttggcagtttctaataaagttgaacatatttttactctacaatccaggacacccgctcccaggtatttaccaaaatgaagtgaaaacttacattcaccccaaaacctgtgtgtgattgtccgtggtggctttattcttaattgccccaaactggaaacaaacccagatgtctttcagttagtgaatagctaaacaaactgtgtctagccacagaatggagtactgcaaaggattataaaggaaagaaactactgatacaggtaatgacatggatgyatctcggattcattatgccaagggaaagaaacaagacttaaaaaggtacatactggctacatactgtatgattccaattatatgacataaaggcaaaattatagacacagaaaacag

SEQ ID NO: 948937 - DNA, 580 bp, Homo sapiens
ctccttggtctagcagtaatgccagcgtctgggaagatgcccgtaccaagcggaccatggtctagtggtagcgtcagtgccaaggaaaagcacctgctactgagcagaccasgaaagggagtctccctttccccaggggagtttagagaagactctactccaccatctcttatggagggcctgacataagtcaggcctgcctgcagttatccagaggcctgaccgtctccctgtgatgctgtgcttcagtagtcatgctcctggtctgctttcatgttccatcctgtacacctggctctgccttctagatagcaatagcagaattactgaaagtattaaaagtctctgaaatgcagaaataatggtgtaagctgtctctcctctctctccgcctcggctgccaaacagggaaaggctccctttccagtggatgcatgacccacgtgaccttacctatcattggagatggctaacactccttaccctgcccccttgtcttgtatccaataaataacagcgcagcctggaatttggggccactactggtctccacgtcttggtggtagtggtcccccagccc

SEQ ID NO: 948938 - DNA, 705 bp, Homo sapiens
gaatcacttgaacccgggaggcggacgttgcagtaagccaagatcgcaccactgcactccarcctaggcaacggagcgaaactccgtctcaaaaaaaaaaaaagaacactcatttccagagtcaagttacgtgaccacaggtggcacagggcctgtgagaacagcctgcgacgacttcctgccagtcctcttcttccccatctgtgcccctactccacaggcacctgtggacaccctgacctgagctggtgaggcttcaccagtgcacgcctggctgcttccctgcctgccctccggccctgtgatcccatgtcctggaaagtgtaaactctttacaaaattccctgtcgttttagtgaggtttcagaagagagtagactcagataaatgtattccatcctccatctgtaatcataaagtaaaacattatttgtgatgtaatgcttttaaagaacaccatgagaaccctgacttgatttattgaatcgtagcacacatgtccagtgaaatttcaaacagttgacaatggcattacctatttgttggcatgtgagacatgctggacacgggggtgtgggtagagaacagaggagcccatgaagcctggctctcagtggtgcgctcgtccgcacacactcggagatgccagcagtgttctctctgggttggcctttcctgtgttgtttggatttttttttttctatt

SEQ ID NO: 948939 - DNA, 705 bp, Homo sapiens
gaatcacttgaacccgggaggcggacgttgcagtaagccaagatcgcaccactgcactccagcctaggcaacggagcraaactccgtctcaaaaaaaaaaaaagaacactcatttccagagtcaagttacgtgaccacaggtggcacagggcctgtgagaacagcctgcgacgacttcctgccagtcctcttcttccccatctgtgcccctactccacaggcacctgtggacaccctgacctgagctggtgaggcttcaccagtgcacgcctggctgcttccctgcctgccctccggccctgtgatcccatgtcctggaaagtgtaaactctttacaaaattccctgtcgttttagtgaggtttcagaagagagtagactcagataaatgtattccatcctccatctgtaatcataaagtaaaacattatttgtgatgtaatgcttttaaagaacaccatgagaaccctgacttgatttattgaatcgtagcacacatgtccagtgaaatttcaaacagttgacaatggcattacctatttgttggcatgtgagacatgctggacacgggggtgtgggtagagaacagaggagcccatgaagcctggctctcagtggtgcgctcgtccgcacacactcggagatgccagcagtgttctctctgggttggcctttcctgtgttgtttggatttttttttttctatt

SEQ ID NO: 948940 - DNA, 705 bp, Homo sapiens
gaatcacttgaacccgggaggcggacgttgcagtaagccaagatcgcaccactgcactccagcctaggcaacggagcgaaactcygtctcaaaaaaaaaaaaagaacactcatttccagagtcaagttacgtgaccacaggtggcacagggcctgtgagaacagcctgcgacgacttcctgccagtcctcttcttccccatctgtgcccctactccacaggcacctgtggacaccctgacctgagctggtgaggcttcaccagtgcacgcctggctgcttccctgcctgccctccggccctgtgatcccatgtcctggaaagtgtaaactctttacaaaattccctgtcgttttagtgaggtttcagaagagagtagactcagataaatgtattccatcctccatctgtaatcataaagtaaaacattatttgtgatgtaatgcttttaaagaacaccatgagaaccctgacttgatttattgaatcgtagcacacatgtccagtgaaatttcaaacagttgacaatggcattacctatttgttggcatgtgagacatgctggacacgggggtgtgggtagagaacagaggagcccatgaagcctggctctcagtggtgcgctcgtccgcacacactcggagatgccagcagtgttctctctgggttggcctttcctgtgttgtttggatttttttttttctatt

SEQ ID NO: 948941 - DNA, 592 bp, Homo sapiens
tgctggacaaaaggaataatgctaggagcccgaaggccaggctgaggctggggcaggagatgggggcagcacagagccctaaggctctcagatgccttttcccaggaaggaaggatggaccttcattctgagattctaaccttcttaccctgtgttaacagaaagtgaaaccaaattattttatgacataaatgtcataaaatcataaaaatggtcattttgattcccatctccccaccattggcaaaattagaaggtggcaaccctaggctgctctatttggttggttggttggttttttattggcccaagaaaaaaaaaaaaggaaaccaaaggtttctctggggaactagagacagaaaccagctaagggaagaaacaggagagaaagaagtgaacacagcaggtgtacactttttttttagactgaaggtgtggttccaggactgtggcaattrggatagcacattctagaccctacacctgaagccagactttctaggagaggagcctagcgatctgacttaacaagctcctcaggtgatcgtgatgcacaccaatcttaaagaacccgtgtacttgctcgtgaaga

SEQ ID NO: 948942 - DNA, 489 bp, Homo sapiens
agagagtggagaccagatggcaagrcacttcactagtcctgggcaggaacctggggaggggagatggggcactgggagggccacgggcaagaaggactcggagctttggggaaaagggatctggctgggagactgggtggacatggaagaggaagggtgccaagcctctcccaagcccagacttggtgggtcagggcaggtttaggggctaaatgagggtttcagttgggacatgttgagggcctggggcacctggagcatcagggagctgaggaggtagctggatttttgagtctggagtttaagagaaaagaaggacgaacatggaaaaacaggagtcaggggcatgcactgggctcctggaagcccagcagaggaagagcagcttaggggccctgggatgaggcccccacatttcaggaagcaacagagcagtctgcggagaatgaggagcagccagagacgtaggaggagcccctgaagaatggt

SEQ ID NO: 948943 - DNA, 572 bp, Homo sapiens
tttggcccgggctacctgaaatgtttctctgatttgggtattttaagtcrgcagattggatgatactcacagtgttagattccacaaatggaggacactacagtgagattggtaaactaaagcagagtaaagctcttcctcattgtgtgtgtctgtgttcttgttcctgtaagcatatgatatttttctctatagcaaaacctggttcaaacttcaacattgttaatcccctcaattcagcatatggctgtacttcctttaatttaatcatatggctgtacttcctttaatttgactgtatataataatgttggatggatgtaaaacaatccagattagattattattgagaatattttctttctctctctctgactattccattggagaaataaatttctcatttcaactgggattgctattataccttatattagtaatacctacaatattcatgtgtctttttgtgttccctcttgtgtttataccataactgtaagaagaccatgcccaggtagcctgctagtctcagaagaaagagaaacatgaggatcaggactaccctcagtaac

SEQ ID NO: 948944 - DNA, 591 bp, Homo sapiens
gaatttatctggtcctggatttttttttttgttggcaatttttaaaattaccatttcaatcttgccsctttttattggtctgttcagagtttcagtttcttcccagtttaatctaggagggttgtatatttccagaaacttatccatctcctctaggttttctagtttgtgtgtgtaaaggtgttcataatagccttgaataatctttcttatttctgtggtatcagttgtaatatctccagttttgtttataattgagcttattcagatcttctctcttcttttcttggttaatgtcactaaggtctatcaattttatttatcctttcaaagaagcacctttttgtttcatttatcttttgtaattttttgttaccattttatttagttctgctcggatttttgttatttcttttctctgggtttgggtttggtttgttcttgtttctctagttccttgaggtgtgaccttagattgtttatttttgatctttcagactttttgatgtaggttttaatgctaactttcctgttagcaccacttttgctgtatctcagagattttgataggttgtgttattgttattgttc

SEQ ID NO: 948945 - DNA, 659 bp, Homo sapiens
ctgcattttgcaggcatgttcaggcttctgcattagccatgtgtccctgggaattgtgctcaaatccaggctgcatcttacctcagcaattccttcttcttgggacttacatatccgtgattccasatcacacagcccaagactgtatatagtgccatataatagttgttttagtctgttttcttttattataactgagtaactggtcctgggcaatttataaagaaaaggaacttattttttacagttatgaaggctgagaagtccaaggtgaggggctgcatttagtgaagaccttcttgctggtggggactctctgcagagtttccaggcggtgcagagtatcatctagtgatggggttgagcatacttgctcaggtctctctttgtcctcttgcaaagccactaataatcactcttgtgataacccattaacacattaacctattaatccattaatctgtacatgagggctaagacctcataacacaatcacctcttaaaggttccacctttcagtactgccacattggggataaagtttcaatatgaattttggaggggagaaacgtttaaaccacttcaatagcatttggtcactgacaacttgacatgagatccctcagtactgtcaacctgtaacaaatgaggttcccact

SEQ ID NO: 948946 - DNA, 644 bp, Homo sapiens
tactatttttagtagagactgggtttgaccatgttggtcaggctggtctcgaactcctgacctcaaaagatcctcctaccttggcttcccaaagtggtaggattacaggcgtgagccaccatgcccggcctcatgagtatattcttaatgtcttattgtgtgtattttctgatcatgcttctctgactgtttcagatctttatatgcatacttccaagtcctttcaatctgatcatctgcaggcccagtcattggtttgtatatatattaaatctcaaatgagttatatctctctacatacctacttacagatccatcctcccacctctctgtgtgaaattcatggttcaaattggcaaactgaaagattaaggaccttctcaatgctctaaattagaattgcttctccaagtaatgttaacataatatacataattataaataacttcacagagagattatacagtccaagtgtttatacatatactttgttaactatgaagtgtatasttatgtagatcgctagcatcgttaggtttcactaactctgcaccaaatttagtatatccaaaaacatgaaaattttttatgttataataaattagtgattcatatcacacttggttcccaaggaaagtgccatc

SEQ ID NO: 948947 - DNA, 572 bp, Homo sapiens
accaaaagaaaatactgccatgtggttacaagatcaagttcccaaggacataaaacaaaatggagatctcatccagttttttgcttgtttcagggaactgcagcaaagtttgttactgaccagtttgccagactggcttgaacagcgggtttatgaggttctaagcccatgttttatcctacggtattcttccttatgatagaaccgtgcagaaagacacacaaaccacaccagattggctacagcttgactagcctcagaaatcattttttccattaatcaaaagtttacaggggataaacagtgatttttaccattcattcaaccagtttgcacagagagagagaccagaagtctgacttgtaagaaattcttatcgtttttgccagtatgtcaggtttctgggttctctttccctaagagagcccagcaaccctgtttgccataccatagctctggggtccatcctgcatcacaaagaaaaattatgaaaccacaggcaagcaamatcctcaattttgcaagttgctgaccaaggggttgcatagagtaaccaaattagcatttttctt

SEQ ID NO: 948948 - DNA, 572 bp, Homo sapiens
accaaaagaaaatactgccatgtggttacaagatcaagttcccaaggacataaaacaaaatggagatctcatccagttttttgcttgtttcagggaactgcagcaaagtttgttactgaccagtttgccagactggcttgaacagcgggtttatgaggttctaagcccatgttttatcctacggtattcttccttatgatagaaccgtgcagaaagacacacaaaccacaccagattggctacagcttgactagcctcagaaatcattttttccattaatcaaaagtttacaggggataaacagtgatttttaccattcattcaaccagtttgcacagagagagagaccagaagtctgacttgtaagaaattcttatcgtttttgccagtatgtcaggtttctgggttctctttccctaagagagcccagcaaccctgtttgccataccatagctctggggtccatcctgcatcacaaagaaaaattatgaaaccacaggcaagcaacatcctcaattttgyaagttgctgaccaaggggttgcatagagtaaccaaattagcatttttctt

SEQ ID NO: 948949 - DNA, 593 bp, Homo sapiens
ccgctgatgtagactaacaggaagctacacacggacaagaaacaatacttatctttgtatactgttttcaggtaggaaggtcctaggtttaaaatatcatttyaaagttgattcaaatcaactttatggcttaaatcctagttctacaacttgctatgtgaccttagataaattatttaacctaagttgctgattccccactttcaaaatgaagatgataattaaactgcgctaataattgcacagagttaataggatagtgtatgagtacaaagggtctgacacatagtaggacttcaactagagccagtataggtcgcctttcctcagcattagtgcattccacttagaaataattcagtcattctttactaaataaagaaacggtttaaaagcctgtagccgtgtatatgaatacatatatggtcatttccaatacttctgcttgcttataataaaatttcaattaagcaagagagagagaccaaactcttgtttgctcacaaatatcagggtaattaataatgatgggaaacaaataccctggtgtttaataggaaatttagcaaaatattatattttccctgtttgct

SEQ ID NO: 948950 - DNA, 571 bp, Homo sapiens
gtttgctggaggtccactccagcctaagtatcaccagcagaggctgcagaacagcaaataatgcagaacgacagatgttgcttcctgatccttcctctggaagcttcatctcagaggcgcacctggctgtatgagtagtcagtaggcccctactgggaggtttctcccagttaggctacttggggttcagggacccacttgaggaggcagtctgtccattctcagatctcaaactccatgctgggagaaccactaatctcttcaaagctgtcagacagggacgtttatgtcttcagaagtttctgctgccttttgttcagctatgccctgcccccagaggtggagtctacagaggcaggcaggcctccttgagctgcggtaggctccacccagttcgagcttcccagctactttatttacctactcaagcctcagcaatggaggacgcccctcccccagcctcactgccaacttgcagttcgatctcggactgctgtgctagaagtgagtgargctctgtgggtgtaggaccctccaagccaggcatgggatataatctcctggtatgcca

SEQ ID NO: 948951 - DNA, 589 bp, Homo sapiens
tgaaatgctaaaatggatactcattcttaatagcatcaagaaacaccaaatacccagcaaatatccaaagattatgttcaatgactctgaacmaggaaacaagcaaaaaattaagtgaaacatgaatgaaagaaattacagaaatctaaacaaaggtataatacacaatatcaatggattgtaaaactcagtagcttaaggatgctaaaatctcctcatgtaatgtcaataaaaattttagcaattttgaagaaattgaagaattaattctaaaatatatacaattcaaattacaaagtgtatgcaagtaatttatgactttactggttaattctatcagtatataaagaagaaaacatcttaaacaagctattacaaaaaatagtaggaaacacatagtattttgttttttgatgctagcataaccctgataacaaacctgacaaaaatacatcaaagaataaaaaagtacacatgaatatcctcattcacacagatacaaaaatacttaatgaatttatttaaaaaataaatccagcagtctataaaatgaataatgcattatgatcaagttggttttaccaagaac

SEQ ID NO: 948952 - DNA, 433 bp, Homo sapiens
caaacatcatatgttcttactcatatgtgggagctaagctatgaggatgcaaaggtataagattgatacattgggctttggggatcccagggaaagggtagggggtgatggggggtggcaaggaataaaagactatacattgggtacagtgtacactacttgagtgatgagtgcaccaaaatctcagaaatcactgctaaagaacttattcatgtaaccaaacaccacctgttcctcaaaaaccaattgaaataaaaaaaattattaaaaaataaaataaataaataaaacaaacccactgacctgaagagaaagactcaatcatggaaagattcatcacctactgactaaagagcatttrggctctaaatagcagcagtgatacacaagcagtactcatcatgggccttttgtgagactcaggaacatgttg

SEQ ID NO: 948953 - DNA, 596 bp, Homo sapiens
agctgcagagtacttgtcatcagcacatggaaataaactatacattaggccacaaaaaaagtctcaacacattttaaaaattctaaattatatcaagtctcttctcagcccacagtggaataaatctagaaataaataacaagaggacttcagaaactatacaagtaacctgaaatttaaacaacgtgctcctaaatgactatgagtcaatgaagaaattaagaaggaaattaaaaaatttcttgagacatgagaaccaaaaccaatgagatagaagaaaattagtgcagagagggctgtttatagcaataaacaccaacatcaaaaaagtagaaatacttcaaataaaacctaaatatgcaactcaaggaagtataaaagcaagagaaaaccaaagccaaaattagtagaaagaaaaaaataataaatatcagagaagtaaatgaaatagagactaaaaaaatacaaatgatcaacaaagcaaaaagctgacttttatgattcgataacaaaattgataaaactgctaagctagactaaccaagaaaaacaagagagggcccaaatragtaaaatcagaaatggaaaaggagata

SEQ ID NO: 948954 - DNA, 724 bp, Homo sapiens
gcccctgagactcctgtgggcaccagggaagcccttcctgccctgaccccaggcacctgcctgagacgctgggcgagggagagggtatgggtctggttctaatttgccagccctgagggctcctgtttggggcccagccctctgcccactgcactttgcctgggtgagagtgacttttctccttgtcacaagagaaagaacccagactgtggtgtggcctggtcacctggctgccagggagtgtcatggtgggaccccagggctgccgtctcctaaggacagagatagtccctctgacctcagtgcccctctgtgtgcaaaagctttctctgggggctgcagtgcaacgcatagatgaagttggcatgtcatccacaacataaagaaacatggcagaggctgtgctatctgctgggtgtagataaacacaaatgtgtggctacacacccactttttttttttttttttttgagacagagtcctgtgctgttgcccaggctggagtgcagtggcatgatctcggctcactgcaacctctgcctcccgggttcaagcgattctcgtgtctcagcctcccaagtagctggaactacaggcacgcgccaccacaccctggattagttttgcatttttttatacagacagagtttcgccatgttggccaggctrttctcgaactcctgagctcaggtgatccgccagcctcagcctcccaaagtgctgg

SEQ ID NO: 948955 - DNA, 539 bp, Homo sapiens
tgattttagaatacaatctatatgcagatgagaagaaagcatattctgatagtgctgggtggagtattctgtaggatgttttyggatccagttggttgagagttgagtttaagtccaaaatttacattttaattttctgcttcgatatctaacactgtcagtgagttgttgaagtcttccactatcatggtgtggctgtctgtttttagtttccttaggtctctaagaatcttttttgtaaatctgggtcctccacttttgactgcatatatatttagaatagttaagtcttctcgtttaatggaacactttatccttatgtaatacccttctttgtccttcttgatggtttttggtttaatgtctgttttatctgatataagaatagtgattactgccctgttttgttttctgtttgcatggatagatctctttccgttcctttactttgatcctgtgggtattgtacatgtaagatgtgtcttttaaagacaacagaaggctaagttttgtctacttatgaagcttgtcactcagtg

SEQ ID NO: 948956 - DNA, 750 bp, Homo sapiens
actgtgggagactggttccaggacctcccttgataccaaaatctgcatatgttcccatcttctatataaattggcatagtaactgcatataacctacctacaycctcctgtatactttgaatcatctctagattacttaaaatacctagtacaatgtaaatgctatgtaaatagttgttatattgtgtttttaaattttgttttttttttattgttgtactggttttttttttttttgagatggagtcttgctctgtcacccaggctggggtgcagtggcgcaatctcggctcactgcaacctccacctcccaggttcaagcaattctcctgcctcagcctccatagtagctgggactataagcgctcgccaccacgccttgctaatttttatattttttagtagagacggggtctcaaactcctggcctcaaatgatccacctgcctcagcctcccaaagtgctgggattacaggcatgaatcaccacactgggcctattttttatttttaaaaaatattttccatttgtgattggttgaatccatgggtttggaacccataaatacagagaaccgattgtatacactcctattctgtgaggacagaggcagcttcctataagatgcctcttggagtgacaggtgcacacccaggtccttgagcaacaacatcatctgcattatctccaagatactcaagcttaggggatagattggcatgccagcaaatacagaagccacaaggaaca

SEQ ID NO: 948957 - DNA, 570 bp, Homo sapiens
catatttggcttttattacgtttaggtatgtcccttctgtactcagcttttttagggwttttttcatgaagggatgttgaattttatgaaatttttcttgagcatcattgaaatgatcatttttttccttcattctgttgatatgatgtatcacattgattgatatataaatattgaaccatccttgtatcctagggataaatcccacttggttatgatgaatgatcttttaaatgtattgttgaagtttgtttgctggcattttgttgaggactttcgcataaatattcatcagagatattggcctgtagttttcaataatactggcctcgtagaataagtttggaagttttccctcctccatttttcagaatagtttgaataggattggtcttagttcttctttaaatttttgatagaattcgtcaatgaagccattgtgttctgggcttttctttactgggagacattttttttatggcttcaattttgttacttgttattggtctgttcaggttttggatttctttctggttcaatcctggaaggttacatgtgtccagtaacgtg

SEQ ID NO: 948958 - DNA, 611 bp, Homo sapiens
atgtaacatcacctgggtgatcagtgaagagatacttcaaaatacccccagtatgtggagcctagacaagagttatatcacctggatgatcactgaagaaatatgtcacaaagcccctgcaggcagagcctagacaagagtttcatctcctgggtgatcagtgcaatgatatgtcacaaacccccctgtagacaaatcccagaaaattgttacatcacttgggtgaccagtggagatatctgtcacaacactcctttaggggcagcttagacaagcgttacatcacatgactgatcagtgcagagatatgtcactatgcccccataggcagatccaagacaagagtccatcacctgggtgatcagtgcagaaatatgccacaatgccgccactaggcatatatagacaagagttatatcacctgcgtgaccactgcagagatgtcacaatgcccctataggaagagcctagacaagagtcccatcacctgggtgatcagtgcagaattatgtcacaatgccgccttttggcagagcctagaaaagggttacatcacctgggtgatcagtgcagwcatgtgtcacaagacccctgtagccagagcctagaca

SEQ ID NO: 948959 - DNA, 595 bp, Homo sapiens
tcagtgcaaaggtatgacacaaagccccctgtaggcaaagcctagacaatagttacrtcacttgggtgatcagtggcaacatctctcacaattcccctgtaggcagagcttatacaacagtttcatcacctgggtgctcagtgcagaaatatgtcacaatgcccccataggcagacccaagacatgagtccgttacctgggtgatcattgcagaaatatatcacaatgtccccttaggcagagcctagacaaaagccacaacacctggatgatcagtgcagatttatgtcacaaagtccctttaggcagatcgtagacaagagttacatcacttggatgatcagtgcagagatacgtcacaatgccactgtaggcaaagcttagacaagagttacatgacctaggtgatcagtgcagagatacatcgcaatctccctgtaggcagagccttggcaagtggtacatcacctgtgtgatcattgcagggatatgtcacaaagcaccatgtaggcagatcctagaaaagagttagatcacctgggtgatcagtgcagagatatgtcaaaatgccactgtaggcagagcctagataagt

SEQ ID NO: 948960 - DNA, 595 bp, Homo sapiens
tcagtgcaaaggtatgacacaaagccccctgtaggcaaagcctagacaatagttacgtcasttgggtgatcagtggcaacatctctcacaattcccctgtaggcagagcttatacaacagtttcatcacctgggtgctcagtgcagaaatatgtcacaatgcccccataggcagacccaagacatgagtccgttacctgggtgatcattgcagaaatatatcacaatgtccccttaggcagagcctagacaaaagccacaacacctggatgatcagtgcagatttatgtcacaaagtccctttaggcagatcgtagacaagagttacatcacttggatgatcagtgcagagatacgtcacaatgccactgtaggcaaagcttagacaagagttacatgacctaggtgatcagtgcagagatacatcgcaatctccctgtaggcagagccttggcaagtggtacatcacctgtgtgatcattgcagggatatgtcacaaagcaccatgtaggcagatcctagaaaagagttagatcacctgggtgatcagtgcagagatatgtcaaaatgccactgtaggcagagcctagataagt

SEQ ID NO: 948961 - DNA, 595 bp, Homo sapiens
tcagtgcaaaggtatgacacaaagccccctgtaggcaaagcctagacaatagttacgtcacttgggtgatcagtggcaacatctctcacaattcccctgtaggcagagcttatacaacagttwcatcacctgggtgctcagtgcagaaatatgtcacaatgcccccataggcagacccaagacatgagtccgttacctgggtgatcattgcagaaatatatcacaatgtccccttaggcagagcctagacaaaagccacaacacctggatgatcagtgcagatttatgtcacaaagtccctttaggcagatcgtagacaagagttacatcacttggatgatcagtgcagagatacgtcacaatgccactgtaggcaaagcttagacaagagttacatgacctaggtgatcagtgcagagatacatcgcaatctccctgtaggcagagccttggcaagtggtacatcacctgtgtgatcattgcagggatatgtcacaaagcaccatgtaggcagatcctagaaaagagttagatcacctgggtgatcagtgcagagatatgtcaaaatgccactgtaggcagagcctagataagt

SEQ ID NO: 948962 - DNA, 770 bp, Homo sapiens
cctgcaggaggctttatgacttatacctgcactgataacctaggtgatgtaacacttgtctagactctgccttcacgggaattctcacatatctctgcactgatcacacaagtgatgtaactcctatctaggttcagccttcaggagcgttttgacatatctctgcacagatcacccaggtgatgtaacccttgtctaagctctgcctacaggggcattgtgacagatctctccactgctcacccaggtgatgtaacaactgtctgggctttgcctacagggggctttgtgatatacatttccactgatcaaacaggtgatgtaacacttgtcaagcttctgcttacaggggctttgtgacatatctctgctctgatcaacctagggaggaaacacttgactgcactctgcatagaggagactttacgacttatcactgcgttgattacaaggtgatgtaacacttgtctaggctctgtctacacgttaattttcatatatctctacactgatcacctaagtgatgtaacccttgtctaggttcagccttttggggatttctgacatacctatgcacagatcaccgaggtgatgtaaatcatttccaggctttttgtactggcgacattgtgatatatctctgcactgatcaccgaaatgatgcaartctcccctaggctcctcagggtgggggcattgtgacatacttctgaagtgatcatccaggagatgtaactattctccaggctttgactaaagagcatcgcaag

SEQ ID NO: 948963 - DNA, 770 bp, Homo sapiens
cctgcaggaggctttatgacttatacctgcactgataacctaggtgatgtaacacttgtctagactctgccttcacgggaattctcacatatctctgcactgatcacacaagtgatgtaactcctatctaggttcagccttcaggagcgttttgacatatctctgcacagatcacccaggtgatgtaacccttgtctaagctctgcctacaggggcattgtgacagatctctccactgctcacccaggtgatgtaacaactgtctgggctttgcctacagggggctttgtgatatacatttccactgatcaaacaggtgatgtaacacttgtcaagcttctgcttacaggggctttgtgacatatctctgctctgatcaacctagggaggaaacacttgactgcactctgcatagaggagactttacgacttatcactgcgttgattacaaggtgatgtaacacttgtctaggctctgtctacacgttaattttcatatatctctacactgatcacctaagtgatgtaacccttgtctaggttcagccttttggggatttctgacatacctatgcacagatcaccgaggtgatgtaaatcatttccaggctttttgtactggcgacattgtgatatatctctgcactgatcaccgaaatgatgcaagtctcccctaggctcctcagggtgggggcattgtgacatayttctgaagtgatcatccaggagatgtaactattctccaggctttgactaaagagcatcgcaag

SEQ ID NO: 948964 - DNA, 798 bp, Homo sapiens
gctggtagggcctaatatgtggatttttggaagaaacatcaatgtagtattctaggggagtcttcctgctgtggcttttatctccccagcctcttccatttcccgcaatgtttccatccctgagtgcacgtgtctataaactacttaactggaaggctggtgcttggtaaaaagcattctgagttccatcattttgacgagcatgttccattaaatgatctactcccacaggtaatagaaggcatcaaggagtaagtctactgttttttttttttttttttttttttttttgcagttgcaagatttaaagaatgaaaacagagctcccatacaaagggaagggacccaaagagggtagccgttgtcacctcgagtgcctgggtttatatcctgatcattgtccctcctgctgaactctaaggggaaaaatgatgggctattcccttacctcctgttttggcctaattcgaatttaagaaagctccttttactacctgattggccggctggaacctaagttgcaagccccgtgttaaaagggggatggggccaccttcccaactaggcttagggattttaaatgggcctaggaaatccagttggtcctgtttttaagccccccctctcaataggaaaacccaagtgctggggggaggttgcctgatgaccactctaactgcttcctgctgaactggggtgtaatagaggacatgcasttgagatttccttggaaggggtggcttcgatgtcataaacattggagcatgggctaccacgctggaccaggggtccacagga

SEQ ID NO: 948965 - DNA, 761 bp, Homo sapiens
gatggtcagggacggcttcctggaggaaggtggagtgggggaagcaggcctacctgaagctagcctttcctaggggaaggaggaagggttgcattttaggtacacacacacacacacacacacacayacacacacacactaccaccaccaccacaaccaccacaactttgaatgaaagtctcctttttcttctcctggtgaagagaaaaagaataattttcataactttttggagctgtagactaagccctttacttcccaagtagggaaactgaggctcagagagatgaggtgctgcacccacggtcacacagcaagcagggcgtggggccagaagtctccccgccactgtgattcaagttgtgcctccccagccaggcattaccacgcagaagggagagaaaggcctctggaggaagtggaggcacggctccccctcccctggctgttcccaggagagaaggagctgggggagcagccagtcctgcgtggtccccagggagcatatttgccaagtgagacagcagggaggcagagcagaagcagcagtcacaatattaaggtccctcacggtaaacaggagctctgttgttccaacatcccctgccactcacctgcccctcccagaaccacccctggtggggagaagggctctacctcctcccactgggctctccttccccctccagaaatcccagcacatacatagctccctcctcaagagctggcagctctgaggcctcagaggtgggagggagatg

SEQ ID NO: 948966 - DNA, 494 bp, Homo sapiens
ggggtgacatcacatattggtaggaccgtgatgctcacctgagccgtaaaaccagcaggtttttattaaggatttcaaaaggggagggagtgtacgaacagggagtaggaacaaagatcatatgcttcaaagggcaaaaggcagaacaaagatcacatgcttctgaggaaacaggacaaagggcaaaaggcagaacaaagatcacatgcctctgaggaaacaggacaaagggcaaaaggcagaacaaagatcacatgcctctgaggaaacaggacaaagggcaaaaggcagaacaaagatcacatgcttctgaggaaacaggacaaggggcaaaaggcagaactcctgataagggtctatgttcagtggtgcacgtastgtcttgataaacaccttaacagaaaacagggtctaagagcagagaaccggtctgaccaaaaatttaccaggatggagtttcccaatcctaataaggctgagggtactgcaggaga

SEQ ID NO: 948967 - DNA, 534 bp, Homo sapiens
tgggcaaggttaataggtatataaaaatagaaagggtgaataagacctactatttgatagcacaataggtgactacagtcaataataacttaattgcacatttaaaaatagmtaaaagaatgtaattggattgtttgtaacacaaaagattaatgcttgaagggatggatatcccattctccatgatgtgattattacgcattgcacgcctgtatcaagacatctcatggaccccataaatatatatacctactatgtacccataaaattaaaaataaaaaagatgaaaaattatataccatgtaaacactaataaaagaaaaggtggagtggctactataatatcagacaaaatgaactttatttatttttctttttcaaaaacttttaagttcatggttacatgtgcaggtttgttacatgggtaaactcgtgtcatgggggtttgttgtatagattatttaatcactcaggtattaagtctagtacccattagttatttttcctgatcttctccctcctcccaccatccac

SEQ ID NO: 948968 - DNA, 534 bp, Homo sapiens
tgggcaaggttaataggtatataaaaatagaaagggtgaataagacctactatttgatagcacaataggtgactacagtcaataataacttaattgcacatttaaaaatagataaaagaatgtaattggattgtttgtaacacaaaagattaatgcttgaagggatggatatcccattctccatgatgtgattattacgcattgcacgcctgtatcaagacatctcatggaccccataaatatatatacctactatgtacccataaaattaaaaataaaaaagatgaaaaattatataccatgtaaacactaataaaagaaaaggtggagtggctactataatatcagacaaaatgaactttatttatttttctttttcaaaaacttttaagttcatggttacatgtgcaggtttgttacatgggtaaactcrtgtcatgggggtttgttgtatagattatttaatcactcaggtattaagtctagtacccattagttatttttcctgatcttctccctcctcccaccatccac

SEQ ID NO: 948969 - DNA, 811 bp, Homo sapiens
tacagcccctttccaggacatctcaaggacagyggtgaagggaaatcttccaaatggacagaaatttgagcagtgcacctgattgtgcactttgcatggaaggagacatggccagatgtgcgattatataccaattaattggctgtagccaatggtttggctggagggtcagggacttggaagaagcatgactggaaaattggtgacaaaggaatttggggaagaggtatgtggatggacctatctgagtggtcaaaatctatgaaggtatttgtatcctatgtgagtgttcacccatgggtgacctcggcagaggaggattttaataatcaagtggatatgatgacccattctgtgacaccactcagctctttcctgagccacccctgtcatcacctaatgtgctcatgaacaaagtggccatggtggcaggtttggaggttatgcatgggctcagcaacatggacttccactcatcaaggcagacctggctacagccactgctgagtgcccaacttgccagcagcagagaccaacactgagcccttgatatggcaccattccttggggtgatcagctagctagctcatggcagtttgattatattggacctcttccatcatggaaagagcagaggtttgtcctcactggaatagacacttactccagatacaggtttgcctaccctgcacacaatgcttctgccaagactatcatccatggactcacggagtgccttatccactgtcatggtattctacacagcattgtctctgaccaaggcattcactttatggctaaagaaatgcgg

SEQ ID NO: 948970 - DNA, 664 bp, Homo sapiens
ttaataatatatttgaactgccaggaaaaaatcagtgaacttgaagataaacgaagaagacagagaaaaatgaatgaagaaaaaatgaatggagcctcagagaaatgtgggacatcattaaacatatcaacatatgcataatggataccaaaatatacatactaacatatgcataatgcaatgtgcataatacaccacagtgagataaacagttgacttctcaccagaaacaatggaagtcagaaagcagtaggatgacatattgaaagtgctgaaagtaaaacaacaaaaaactgtcaacctatgcagaacaattctacggatgactatggaccaactgagtcctccccattttcttccttgccgttctcaagaatgactgcaaaatgtgctggaaatgcaacatcatgagatagggaggaaagggcagaaacaacctggactctgttgcagtccctgccttgtggtatgacgtgatgactgaagtgtagaacttgttgtgatgattgaactgcagaacttgtccagcacgtcatgtgcccgggtataaaacccagggtgggctgcttttctgggtgccccagccatgttgcatgcacagacaagacttcatccactcaggctgctgtattgagccttgtgcaccrgcccgtgatgattccta

SEQ ID NO: 948971 - DNA, 540 bp, Homo sapiens
ccctacctatctctaagtaataaasccacttcatgtaacttgtgtgtgggggttgctgtctcaccaaactcagacaagttgctaacctctgcacagtgaacccacttcacaagccaataatctctacccagtaaatcagaaccacaaaggatactacttcgtactcactgggatggctatttaaaaagagagaacaataacaagatttggcaagaatgtggagaaataggaaacttcagacattactagggtaatataaaatggtacagctaatatgaaaaatggtttgaaaattcctcaaaacgttaagtgtagagtttccatatgtcccagaaattacactcctaggtatttacccaagagaaatgaagacacatgttcatacaaaaacctgtacacaaatgttcatagcagcattattcgcagtagccaaaaaaagtaaaacaataatgtccatcaactgataaacaggtaaataaaatatgtggtatacttcagcaataaaaaaggataaagtactggtatgtgctgcaacgtgga

SEQ ID NO: 948972 - DNA, 540 bp, Homo sapiens
ccctacctatctctaagtaataaagccacttcatgtaacttgtgtgtgggggttgctgtctcaccaaactcagacaagttgctaacctctgcacagtgaacccacttcacaagccaataatctctacccagtaaatcagaaccacaaaggatactacttcgtactcactgggatggctatttaaaaagagagaacaataacaagatttggcaagaatgtggagaaataggaaacttcagacattactagggtaatataaaatggtacagctaatatgaaaaatggtttgaaaattcctcaaaacgttaagtgtagagtttccatatgtcccagaaattacactcctaggtatttacccaagagaaatgaagacacatgttcatacaaaaacctgtacacaaatgttcatagcagcattattcgcagtagccaaaaaaagtaaaacaataatgtccatcaactgataaacaggtaaataaaatatgtggtatacttcagcaataamaaaggataaagtactggtatgtgctgcaacgtgga

SEQ ID NO: 948973 - DNA, 616 bp, Homo sapiens
gctgccctacctatctctaagtaataaagccacttcatgtaacttgtgtgtgggggttgctgtctcaccaaactcagacaagttgctaacctctgcacagtgaacccacttcacaagccaataatctctacccagtaaatcagaaccacaaaggatactacttcgtactcactgggatggctatttaaaaagagagaacaataacaagatttggcaagaatgtggagaaataggaaacttcagacattactagggtaatataaaatggtacagctaatatgaaaaatggtttgaaaattcctcaaaacgttaagtgtagagtttccatatgtcccagaaattacactcctaggtatttacccaagagaaatgaagacacatgttcatacaaaaacctgtacacaaatgttcatagcagcattattcgcagtagccaaaaaaagtaaaacaataatgtccatcaactgataaacaggtaaataaaatatgtggtatacttcagcaataaaaaaggataaagtactgrtatgtgctgcaacgtggatgaatcttgaacacattatgctaagtgaaatgagtcagtcacaaaggccacatagtgtatgcttctgtttat

SEQ ID NO: 948974 - DNA, 610 bp, Homo sapiens
agctgcctgtctcaactatgtctgaaagcaacttagtttcccagatgagttcccagcaggctttgactattatttttatgctgatgccttctaaatctatcaagccggtattttcttctcacccaagctcttctatttcatttctattggccattagccctcattaacttatttaacaaatactactgagagtggccagaaatgtaaaattcaaaactataaaacttacagaaggagataacaaaggagaaagtctacgtaacttaggtttagcaatgagtttttagaggaaacaccaaaccacaatccatggactcaaaaattgataagtttgagttaattaaaaattaaaacatctactcttctaaagatactgttaagataattaaaagacaaaacacaaactaagagaaatttttttcaaaatatatgtctggtaaagaagttgtatccaaaatatacaaagaatacttagagttcaacaataagaaaacaaacaacayactttaaaaatgggcaacagccctaaacagacacctcatcaaagaagatacacataaggcaaatagacatattaaaagatgcttaacatcatatgtcattaggaaac

SEQ ID NO: 948975 - DNA, 597 bp, Homo sapiens
attgaaattcacagcaaatgaaaattttagatacctagacaattgtgtttcttttatgtttattcattcttagagtttattcacaactgagcccaagctccaggattaaaaaaaaaaaaaattctgaggccaggtgtagtggctcacacctataatcccagcactttgggagactgaggtgggaggatcacttgagccccagaattcaagacgagcctggacaacatagtgaaaccccatctctacaaaaacaaacaaacaaaccaactagcaaacaagcaaaaaaaaccataaaaagccaggcctggtggtgcacgcctatagttccagctttttgggaggctgaggtggaaggatcacttgatcccaggagtcagaggttgcagtgagctgagatcacaccattgcactccaccctgggcaacagagtgagatcctgttcaaaaaatatatatgtttcaggcaagagaataatgtaaacacaaacattttcaataccttaatataagtaattaaaactgtgaaaaccaaaatgagatcttttgcttgtattggtatagtagcccttggaccrtaacaaaattattttatttgaaa

SEQ ID NO: 948976 - DNA, 619 bp, Homo sapiens
ctatcaccataaattagttttgsctgttattgaacttcttacaaatgaaataataaatcataagtatgtattctttgatgtctggctttgtttgcttagcataatgttccatccagtctcctgttggtggacattggaggggttccagttttttggctataatgaataaaactgatacaaatattattttacaagtcatttctggttgtatcctttgatttttttcagatatgtgcctcagaatgaggttgctaagttgatggtgaaagtatacttaaccttttgagaaacagccaatcactttttcaaagtgattgtcctatattttgcattcccaccagcaatgtatgagagatccagttgctccaaattcttgatgacacttgatgttgccagtcatgttaatggcagccattgcagtgggtgtaaagtgatatttcattgtgattctaacacatcttcctgctaacccatgattgctgagctcctttctatggtttattggccagcacatattttctgttgtgagttttccttcaaatcttttgcctctttttaagattagattgtttttactatttgttttttttggattttcatccctggatacatattcttt

SEQ ID NO: 948977 - DNA, 587 bp, Homo sapiens
taattactgggcactgttacttagggtaggtattgttagctgttgtaatagacaatctccaaatcagtggcttcacccaacagaagtttgtatcttatcacatagtctaatcagggtttcttggccaagcagacttccaagtagggattcagtgacccaggctccttccatcttgttgttcctccctcttccatagtcctaaatcctctctaatcaaccaatagatggagaagaggatatggaattacgcatgggaggccttgcagggtgaccctggaagtacacccatcacttgtccccactctccagtggccagagtactcactcacatcgccataccaacacaggagaggccaggaaggctgacccagctgtgcacccaggaggaaagccctctctgtcaaagcaggtgccagcgctttatagacattatcttgtaaggtaggtgtaaaattcccattttaagatgagaaagccgaggctcagakaggtgaaacgtcctgcccaaggtgacacagctcatatgtgtcagagggagaatatctcctatcgttttctgcaattgactttttacttttacctttcat

SEQ ID NO: 948978 - DNA, 517 bp, Homo sapiens
gtttctattgcctgttttcttctcttgattacaactcacactttcccatttctttgtatacctagtaatgcttcattttatactggagggttttttttttgagayggagtcttgctctgtcacccaggctggagtacagtggcgcgatcttggctcactgcaagctccacctcctgggttcatgccattctcctgcctcagcctcccgagtagctgggactacaggcgcccaaaaccatgcctgactaacttcttctatttttagtagagacggggtttcactgtgttagccaggatggtctcgatctcctgacctcatgatctgcctgccttggcctcccaaagtgctgggattacaggcataagccaccactcctggcctatactggaggttttgaacagtaccttgtagagcctctggattcagttatcttcctttgaagagtgttattatttttgtttcagcaaggcattactttggttaagttcaaactccaaactcagtttttcttgtgtt

SEQ ID NO: 948979 - DNA, 561 bp, Homo sapiens
cctgttttgtcatattaccagaattatttttctggttccttcgcatttggctatttcaaaggaaagatctggggctcaagcgctgctgtcccatgggtactctcttgatgtgctctccccctttccctaggratggggcttcctgggagctggattgcagtgattgtcattgcccttctaggtttagccacccagcagagctaccaggctctggactggtactgggaagtgtctgcaaagagtcctgtgatgtgatccatcttcaggtctctcaatcatggttaccagcacctgctccagtggaggtagcaggggaaccatgtggactctgtgagggtccttggctgtagttttgtttagtgcaccagttttctcaaatgctggttgtgctagcagcgaagttgtcatgtggtcagactcaggacctctggttagccaggatgtggcaggcagtggaaatagctgttgttttctcctttcttggagcacggtttttcttttatgagttgctgtaatggcttgagttggttggccaccagccaggaggtggcgctttcaaga

SEQ ID NO: 948980 - DNA, 638 bp, Homo sapiens
atcttctgtgtgatctaccatcagtctgactgacacccctggccctggacagaatgtccgtctcctctcagacaaaggacttgaatgatttttttttttttttttttgagatagagccttgctctgtttcccaggctggagtgcagtggcgcgatcttgactcactgcaacctctgcctcccgggttcaagtgattctcctgcctcagcctcccaagtagctgggactacaggcgcccgccacacggccagctaattttctgtatttttagtacagactgggtttcaccatgttagccaggatggtttcaatctcctgacctcatgatccacccacctcagcctcgcaaagtgctgggattacaggcgtgagccacggtgcccagccaaggacttgaacgattttaaccttgtaggataggatgagttatgatgggcagtgggtggtgtcatttagtagagaacttgaaaagggaggttcccaaaagcagggctggcatgtgggtgaggcaagagaagtccctggaatctaaggcaccgctctctgtcagtctcatgcaggcaggcccatgagtgtgagtgcctgcttayatccacaccctgggcctcgctgtcctctccctagccccagcctgccct

SEQ ID NO: 948981 - DNA, 559 bp, Homo sapiens
tgctcaggctgctactgtgtccggaattggtgggttcttggtctcactgacttcaagaatgaagccacggaccctcccggtgagygttacagctcataacggcagtgtggacccaaagagtgagcagcagcaagatttattgcaaagagcgaaagaacaaagcttccaccatgtggaaggggaccggagagggttgccactgctggctcggcagcctgcttttattctcttatctggccccacccacatcctactgattgatagagtggtctgttttgacagggtgctgattggtgtgtttacaatccctgagttagacacaaaggttctccacgtccccaccagattagctagatacagagtgtccacacaaaggttctccaaggccccaccagagtagctagatacagagtgtccattggtgcattcacaaaccctgagctaggcacagggtgctgattggtgtgtttacaaaccttgagctagatacagagtgctgattggtgtatttacaatcccttagttagacataaaggttctccaagttcccatcagactc

SEQ ID NO: 948982 - DNA, 442 bp, Homo sapiens
tcgccctatcatccaggctggagtgcaagtgcagtggcaygatcatatttcactgtaacctcaacctccctggctccagcgatcctcccagctcagccttccaagtagttgggactacaggcatgtgccactgtgcccagccaattaaaaacaattttttggctgggtgtggtggctcatgcctgtaatcctagcactttgggaggccgaggcggatcacttgaagtcaggagtacgagaccagctctggccaacatggtgccccctgtctgtcctacccatacaaaactcaatcggatatggtggcagacgactataatcacagctgctcaggagactgaggcaggagaatcgcttgaacctgggagacggaggttgcagtgagccaggatcgcgccattgccctccagcctgggtgacaagagtgaaacttcgtctcaaa

SEQ ID NO: 948983 - DNA, 565 bp, Homo sapiens
tcttgaatccctctaagtcacccatgagggttggaataaacatcttacaagcttatattaattttgatattttgacaccctcccataagtccaaagtattctgaaggacatctataatggtaaatgctttccagcaggtattcagtttactttcaccagatctgtcagagaaatcactctttgtggcagccatagcattaggaaaaaatgtatttcttaaataataagacttcaaagtctaaattgccccttgatccatgtagtagcagaataaatgctgtgttatcagacatgaaaaaccacattcatcttgtaatactccataatagctattggattaccaagtgcattatcaatgataagtcatatttagaaagaaaccttttctgagcagtaggtttttaacagtgggcttaaaatattaagtaaagcatgctgtaaacagatgtgctggcatctggactttgttgtaccatttataaagcacaggaagagtagatttatcagagttmttaagggccctaggatttttagaatggtaaatgatcattggcttcaactcaaa

SEQ ID NO: 948984 - DNA, 606 bp, Homo sapiens
aagttccaaacatatcctcatcttcctgtcttctaaacacacactctctcttttgctcctgcttccaccatgtgagatacctggcacccccttgccttctaccatgattggaagcttccttatatstccccagaagcagaagctgctatgcttcctgtacagcctgcagaaccgtgagccaattaatcctttttttctttataaattttccagtctcaggtgtttttttagagcaatacaagaacaaaataatacaaatgcattctacattctttttttttgaactaaaggaagtgatagagaaatagaacatctgattcttggataaaaattgacaatgagtaagagttttaattcttattacaagagtaggcaaaattaggaaatatgctttgagactaacatgtcaatgttcttttcacctaagcgttctgtcctctgtttcattagcgagatctgagaatgcctgttcctgcaagaagaaggagcagtcctatgtatctgggctgtaatgctgaagagggccaagtggctccctgtgagtccagataaaggatatattattcaagagaaaaacttgtaactactctaaacttaagacagatt

SEQ ID NO: 948985 - DNA, 586 bp, Homo sapiens
caccctggctgtgagttgtgattagagtgtaggggtgagtgtagaagcagggaaatcatttaggagatttttgcagtaatccagatgacgagagtggcccaggtcagggtgataaccgtagggatggtgagaagtggttggattctgaatgcattttgaaggtaggccttacagtatttgctaggaattggatatggagagtgagatagagggagtggaggatgaaatcaaaggttttgcccaagctcgtagaagtatggagttctttaagccacgatgcaaaagataacaaatagagatgttgagtaggcagctagattcaggagtgagaagttctatgctatatgaatttggggatcatcagcagtggtacttaaaccatgagaataaatgttatccgtaaggaatgggtgtagacggaaagcagcagaggcctaaggactgtgtcctgtgatattaagagtttagcgaaaacgggatcaaccagcaaacagtattaagaargatgaacttgtgagttaggacaatccgaaaagggcagtgtcccagaagccaaggtaagatcctgtacgaaagaggagggagt

SEQ ID NO: 948986 - DNA, 744 bp, Homo sapiens
ttacaataggtgcaattatcagcgatcaataatgtgaattataaaatggatgaaataaggggaggaggtcgggcgcggtggtttacgcttgtaatcccagcactttgggagggcgaggcgggtggattaccggagtcaagagctcgagaccagcctggccaacatggtgacacctcgtctctactaaacaaacaaaaattagctgggcgtggtggcgcgcgtctgtaatcccaactactcaggaggcgagggcggagcggaggcggagttggagtttgcagtgagccgagatcgtgccattgcactccagcttgggcaacagagcaaaaactccgtctcaaataaaaggaaaaaggaaaaaaaaaaaaaaagaaaaagaaaaaaaagaaataaggcgaggaaaaatatccgaggcatcattttggggagttaggcctcagaagcgaccttagagtttggtaatatttgagtgtgaaaagctttacagcagtgcttctcttcactgggggaacggtcggtttatttttttcaattttcaattagtttttgacaagttaataaaacagaaaaatgaaaagacatacaaagtccaagtcaaaactttttatcgttagagttaacagccataaaattacctgcaaaattgacatagagttttctactctctctctgtkaaccatttgcaaacagttctcagaagagcccaggtctatagaccatggttagagtactcaaggtaaacta

SEQ ID NO: 948987 - DNA, 744 bp, Homo sapiens
ttacaataggtgcaattatcagcgatcaataatgtgaattataaaatggatgaaataaggggaggaggtcgggcgcggtggtttacgcttgtaatcccagcactttgggagggcgaggcgggtggattaccggagtcaagagctcgagaccagcctggccaacatggtgacacctcgtctctactaaacaaacaaaaattagctgggcgtggtggcgcgcgtctgtaatcccaactactcaggaggcgagggcggagcggaggcggagttggagtttgcagtgagccgagatcgtgccattgcactccagcttgggcaacagagcaaaaactccgtctcaaataaaaggaaaaaggaaaaaaaaaaaaaaagaaaaagaaaaaaaagaaataaggcgaggaaaaatatccgaggcatcattttggggagttaggcctcagaagcgaccttagagtttggtaatatttgagtgtgaaaagctttacagcagtgcttctcttcactgggggaacggtcggtttatttttttcaattttcaattagtttttgacaagttaataaaacagaaaaatgaaaagacatacaaagtccaagtcaaaactttttatcgttagagttaacagccataaaattacctgcaaaattgacatagagttttctactctctctctgtgaaccattkgcaaacagttctcagaagagcccaggtctatagaccatggttagagtactcaaggtaaacta

SEQ ID NO: 948988 - DNA, 744 bp, Homo sapiens
ttacaataggtgcaattatcagcgatcaataatgtgaattataaaatggatgaaataaggggaggaggtcgggcgcggtggtttacgcttgtaatcccagcactttgggagggcgaggcgggtggattaccggagtcaagagctcgagaccagcctggccaacatggtgacacctcgtctctactaaacaaacaaaaattagctgggcgtggtggcgcgcgtctgtaatcccaactactcaggaggcgagggcggagcggaggcggagttggagtttgcagtgagccgagatcgtgccattgcactccagcttgggcaacagagcaaaaactccgtctcaaataaaaggaaaaaggaaaaaaaaaaaaaaagaaaaagaaaaaaaagaaataaggcgaggaaaaatatccgaggcatcattttggggagttaggcctcagaagcgaccttagagtttggtaatatttgagtgtgaaaagctttacagcagtgcttctcttcactgggggaacggtcggtttatttttttcaattttcaattagtttttgacaagttaataaaacagaaaaatgaaaagacatacaaagtccaagtcaaaactttttatcgttagagttaacagccataaaattacctgcaaaattgacatagagttttctactctctctctgtgaaccatttgcaaacagttctcagaagakcccaggtctatagaccatggttagagtactcaaggtaaacta

SEQ ID NO: 948989 - DNA, 658 bp, Homo sapiens
acatcaaaaagcagtttctccaaaagcttctttctagtttttaactgaagatgtatcctttttaaccacaggccacaatactctccaaaatatgactttgcggattctaaaaaaaagtgtttccaaactactgaaagaaaagaaaagtttaatctgtgagatgaatgcacacatggtgtagcagtttctcagatagcttccatcctttttatcctgggatattcgattttctgccattggcctcaatgggctccaaaatgtcctttagcagaatggacaaacactctttccaaactacttaatccaataaaagggtttccaaactgttgaatgaaaagaaagatttaacactgcgagatgactgcacacatcaaatagcagtttctcagatagattcctgctactttttatcctgggatatttgctttttcaccattggcctgaatgagctctgaaacgtccattcacagaatggacaaaaaaagtgtttcaaaactgctaaattcaaagaaagatttaacactgtcagattaatgcacacatcactaagtagtttctcagaaagcttctttctagtttttatctgaagatgtttcctatttcaccgwaggcctcaatgctgtccaaaataaacctttgcaaattctacgtaacagtg

SEQ ID NO: 948990 - DNA, 571 bp, Homo sapiens
tgtaaagataagtataactctgtgagttgwatgcacacatctcaaagcagtttctcagaaatcttctccttgtctttatctgaagatgtttcctttttcaccataggcctcaattctctctgaaatatccctttgcagataccacaaaaatggtgttgccaaacttctcagttaaaagaaaggtttaactctgcaagattaatgcaccctttacatagcagtttctcaaatagcttcccagaatattcactttttcttgcaattggcctcaaagagctccccaatgtcttttgcagaatggactaaaacagtgtttccaaactgctgaacctaaagaaaagtttaacactgtgagatgaaagcacatatcacaaagcagtttctctgataacttccttctcgattttacactgggatattcacttttttgccagtgtcctcaagtgttctcaatgagctcacaaatgtccattcacagaatgaacaaaaacagtttccaaactactgaatccaaagaaagttttaagtctgtgatatgaatacactcatgactatgcagtttcccagaaag

SEQ ID NO: 948991 - DNA, 571 bp, Homo sapiens
tgtaaagataagtataactctgtgagttgtatgcacacrtctcaaagcagtttctcagaaatcttctccttgtctttatctgaagatgtttcctttttcaccataggcctcaattctctctgaaatatccctttgcagataccacaaaaatggtgttgccaaacttctcagttaaaagaaaggtttaactctgcaagattaatgcaccctttacatagcagtttctcaaatagcttcccagaatattcactttttcttgcaattggcctcaaagagctccccaatgtcttttgcagaatggactaaaacagtgtttccaaactgctgaacctaaagaaaagtttaacactgtgagatgaaagcacatatcacaaagcagtttctctgataacttccttctcgattttacactgggatattcacttttttgccagtgtcctcaagtgttctcaatgagctcacaaatgtccattcacagaatgaacaaaaacagtttccaaactactgaatccaaagaaagttttaagtctgtgatatgaatacactcatgactatgcagtttcccagaaag

SEQ ID NO: 948992 - DNA, 573 bp, Homo sapiens
tttttcaccatagacttcaattctctctgaaatataactttgttgattcttaaaataacatgtttccaaactgctgaaagaacagaaaggttcagctcagtgtgaggaatgcscacatcacaaggtggtttctcagaatgcttctttcaagtttttctgaagatgtttccttttacacatatgcctcaatgctctccgaaatatccctttgtaaattcttaaaaaaatccgtgttactaaacggctgaatgagaagaaaggattaattctgttagatgaatacacacatcacaaagcagtttctcagatagcttccttctagtttttaccttggaatattcgctctttaaccattggccacaatgagctcccaaatgtcaattttcagaatggacaaaaacaatgtttccatactactgaattgaaagaaagttttacctctgtgacatgaatgcacacataacacagcagtttatcagaaagcttctttctggtttttatctgaggatgtttcctttttcaccataggcctcaatgctctctgaaatatccctttgtagattctacaaaaac

SEQ ID NO: 948993 - DNA, 454 bp, Homo sapiens
ttcacaaagcactttctcagaaagcttctttctagttattatctgaagatgtttccttttacaccacaagactcaatgctctcccaaatatgccttagcagattcaacaaaaacagtcctccctaactgctgaaagaaaagaaaggtttaactctgagaaatgaatgcacacatagctgtgtggtttcctacttagcttccttctagtttttaccctagggtaatttgctttttctccattgcccctcattgagctaccaaatgacaatcacacaatgacaaaagagtgttttcatatagccgaattaaagaaagatttaactctgtgagatgaatgcacacatcacaaagtagtttctcagaaagcttctttctagtttttatctgagggtgtttccattgtcaatataggccacaaagygctccaatatctcccttcagagagtctacaaaa

SEQ ID NO: 948994 - DNA, 624 bp, Homo sapiens
tatcatattttattgcatctatttgagtcttttctcttttcttctttattagtcttgctagcagtctatcaattttgttgatcctttcaaaaaaccagctcctggattcattaattttttgaagggtttttgtgtctctatttccttcagttctgctctgattttagttatttcttgccttctgctagcttttgaatgtgtttgctcttgttttctagttcttttaattgtgatgttagggtgtcaattttggatctttcctgctttctcttgtgggcattcagtgctataaatttccctctgcacactgccttgaatgtgtcccagagatactggtatgttgtgtctttgttctcattggtttcaaagaacgtctttattagtcattcaggagtaggttgtttcttaatcctgagttctagtttgattgcagtgtggtctgatagatagtttgttataatttctgttcttttacatttgctgaggagtgctttacttccaastatgtggtcaattttggaataggtgtggtgtggtgctgaaaaaaatgtatattccgttgatttggggtggagagttctgtagatgtctgttaggtctgcttagtgcagagctgagttcaat

SEQ ID NO: 948995 - DNA, 621 bp, Homo sapiens
aacagctttgtggtgtgtgaattcatctcacagagttaaaccttgctgttgattmagcagattggaaccacacattttggagtctcagcaaaggcacgtttcagaacccattgaggcctaagaaagaaaactgaatatccctagatataaactagaaagaagctagctgtgaaactactttgtgatgtgtggattcatctcacagaatttggaaactctctttttgtagaatctgtgaagggacatttcacagccattgaggcctatggggaaaaagacaatatccccaaataaaaactagaaaggagctatttgtgaaactactttgtgacctgtagattcctctaacagaggtgaacattttttttttttattcagcagtttgtaaactttctttttggggaatctgtgtaaggacatttggtagctcattcttgcctaagggaaaaaaccgaatatccccagacaaaaactaaaaaaaagttatctgtgaaactgctatgtgatgtgtggattcatctcacagagttataattttctttgattcagaaggttggaaacgctgcttttgtagaatctgagaaaagacatttgggagcctaataaggcctataagtaaaa

SEQ ID NO: 948996 - DNA, 638 bp, Homo sapiens
  misc_feature 546: n = A,T,C or G
tggcaaagggtttgtgggttgtcttgggaatttccttctcagagaaatgcagagccaccactgactgaagtgttcaggcaggggcagggtggttgtgctgggggcccakgttgacaggcactgcccagtgaagagtagtgggggtggggaccccgtgagaaacagtctggcagcttctccataaggcagttgtgcagtgctgagggcccatgtcagttcccaaccactgcaccttcggttgaggctgagggcaacaggaatgatggctgtagaacagtcaaaatggcagcctgctacctctgggagctccgtcccaggaagtccagagctgtcatcagcccaagagcccatgtgggggatggctagagtcccaggttgggtggccctgcccagtgagaagtagtggggatggggacttgcttgcaaagtggtctggccatttttctgtaaggtggctgctctgtgctgggggatccacattagttcctaatcactgtgcaccctcccaagcctgagggcaataggagtgatggctgcagacaaaanaataggcagcttgctctccttccggaagctctgtcccagggtaatgcagactgctcctagcccaagacctcaggaggggctggggtggcctt

SEQ ID NO: 948997 - DNA, 638 bp, Homo sapiens
  misc_feature 546: n = A,T,C or G
tggcaaagggtttgtgggttgtcttgggaatttccttctcagagaaatgcagagccaccactgactgaagtgttcaggcaggggcagggtggttgtgctgggggcccaggttgayaggcactgcccagtgaagagtagtgggggtggggaccccgtgagaaacagtctggcagcttctccataaggcagttgtgcagtgctgagggcccatgtcagttcccaaccactgcaccttcggttgaggctgagggcaacaggaatgatggctgtagaacagtcaaaatggcagcctgctacctctgggagctccgtcccaggaagtccagagctgtcatcagcccaagagcccatgtgggggatggctagagtcccaggttgggtggccctgcccagtgagaagtagtggggatggggacttgcttgcaaagtggtctggccatttttctgtaaggtggctgctctgtgctgggggatccacattagttcctaatcactgtgcaccctcccaagcctgagggcaataggagtgatggctgcagacaaaanaataggcagcttgctctccttccggaagctctgtcccagggtaatgcagactgctcctagcccaagacctcaggaggggctggggtggcctt

SEQ ID NO: 948998 - DNA, 622 bp, Homo sapiens
ataatggctgaactaacttacatttgcactaacaatgtacagaagctcccttttctcggaatccttgacaacactttttttctagctttttgatgaaggccattctaacaggtgtgaggtaataycttattgtagtttttattcgtgtttagctaatgattagtgatgctgagcattttttaaatatacctattggccattgatgtggtttggctgtgtccccacccaaatcttatcttgaattcccactgttgtgggagggacccagtgggaggtaattgaatcataggggtaggtctttcctttgctgttcttgtgatagtgagtaagtctcatgagagctgctggttttataagggggaattaccctgccaagcactctttttgcctgctgctatccatataagatgtggcttgcttctctttgccttttgccatgattgtgaggcctccctagccacgtggaatggtgagtccattaaacctctttttcttctcaatctcaggtatgtctttatcagcagcataaaaacaaactaaaatagtaaattgttaccagtagagtgaggtgctgctgtaaagatacccaaaaatgtgaaagtgactttggaactgggtaaaa

SEQ ID NO: 948999 - DNA, 435 bp, Homo sapiens
tcttatttgtgaaatacttagaaaaactccaccaatctcctgacttcacctttcctttagggtaaatctattattttaagggagggtgggagtggagagagggactcaagtattccttgttccagtggaatttgtcccaacctcccacagcattgcctccagcccatcttgcattcttggcttttgaagaggaggggcaacccccttcttatctgggattgcctgcttaaacaaactcagtggtgtggaggtattgtcctttggaaacttggcctgggacactttaccaagtgtctgcaaacatttagacatggaaaactacccamtgttaacccagagctcattgtctctgctcagggctgctcttctctgaaagtggcttgtggttgggggtggaggtggtgagagtcggcccaagggaatccctcagttggg

SEQ ID NO: 949000 - DNA, 733 bp, Homo sapiens
attccagctactcaggaagctgagrcacaagaatcacttgaacctggaagacaaaggttgcagtgagctaagactgcgccattgccctccagtatgggtgacagagagactctgtctcaaaacaaaaaacaaaaaacaaacaaacaaaaaagacaagtcccaagacttatccccacagcccaacataccggctgtggcagtctgtggccaaagggcctcttcaggcctaaacctgacccatccttcctcattgggcggggcttccctggaggatctccaataactccagctagaggctcagggacagaatttggatctccctgggcctgagcccctaagtgggaggggtggccatagtctctgcggaccagcagacttagcctttcttcctggtagttctgaggaatctgggcaacgcagaggagtgggtttctccacagcgaagcacaccctctccaacaaaggacaaagtgccttgttaagcgggtcctgctccccgtgccacccaactgggtgagacattccaacaggggttgtcaggcaccttatacaggagtgatcctaccggcatcaggttggtgcccctcaaagtcagaggccccagagggaggagcaggcacccatctttgctgttctccagcctccctgagtgacatctccaggcacgggagagaatcagataaatagggcctgaagtgaaccccaacagactgcagcagccttgcagaagagg

SEQ ID NO: 949001 - DNA, 674 bp, Homo sapiens
gcgcgcacctgtaattccagctactcaggaagctgagacacaagaatcacttgaacctggaagacaaaggttgcagwgagctaagactgcgccattgccctccagtatgggtgacagagagactctgtctcaaaacaaaaaacaaaaaacaaacaaacaaaaaagacaagtcccaagacttatccccacagcccaacataccggctgtggcagtctgtggccaaagggcctcttcaggcctaaacctgacccatccttcctcattgggcggggcttccctggaggatctccaataactccagctagaggctcagggacagaatttggatctccctgggcctgagcccctaagtgggaggggtggccatagtctctgcggaccagcagacttagcctttcttcctggtagttctgaggaatctgggcaacgcagaggagtgggtttctccacagcgaagcacaccctctccaacaaaggacaaagtgccttgttaagcgggtcctgctccccgtgccacccaactgggtgagacattccaacaggggttgtcaggcaccttatacaggagtgatcctaccggcatcaggttggtgcccctcaaagtcagaggccccagagggaggagcaggcacccatctttgctgttctccagcctccctgagtgacatctcca

SEQ ID NO: 949002 - DNA, 739 bp, Homo sapiens
tcctgggtggagtggggacttggagaacttttgtgtctagctaaagaattgtaaaaggaccaatcagcactccataaaaacccmccaatagcgctctgtgtctagctaaaggattgtaaacgcaccaatcagcactctgtaaaaacgcaccaatcagtgctctgtgtctagctaaaggattgtaagcgcaccaatcagtactctgtaaaaatgcaccaatcagcactctgtgtctagctaaaggattgtaaatgcaccaatcagcacttaaaaacacgccaatcagcgctctgtgtccaaaggattgtaaatgcaccaattagcactctgtaaaaacgcaccaatcggctgtctgtgtctagctaaaggattgtaaatgcaccaatcagcactctgtaaaatggaccaatcagcgctctgtaaaatggaccaatctgcaggatgtgggcggggacaaataagggaataaaagctggccacccccccagccagcagcagcaacctgctcgggtctccttccatgctgtggaagctttgttctttcactctccagaataaatcttgctgctgctcactctttgggtctgtgccacctttaagagctgtaacactcaccacaaaggtccatggtttcattcttgaagtcagcaagaccaagaacccactggaaggaaccaactccggacacattaccagttggagaatggcctgcctttgaaagaccgttccaactttttgg

SEQ ID NO: 949003 - DNA, 494 bp, Homo sapiens
aacattcttatataagtctctggacagacatgtgcaccattttcctcgggtctatatctagcagttggatttttgggtcgtgggatggcacatrtttagcttcagtagataatgctaaactgattgagtattttgtaaacagatttctatttagtttaataaatgataatgacaactcaggggcatttaagtaagagcccccctgcttacttgtctttctcacccacttgacttaaagctccatggtggcatgaatcgtatctatcatcttttaagaagtttttatttttatttatttttaattttttttcagctagtcaaaatgaagcagtgggagtggagaaagaacaaagacatccataactgattgtgatcacgtcgttgtaaacaccactgcactcggaccagcctatcttcttcatgtagtgcagtgtatgtggtgcctatttgttgaaaaaaaaaaaaagagtataggccgggtatggtggctcatg

SEQ ID NO: 949004 - DNA, 717 bp, Homo sapiens
tattgtattgggatctctctctttagctctaataatatttagtttacatatctgcatgctccagtattagcataagtatttataagcctatcrtgttgctggattgacccctttatcattatataatgacctttttgtctcttacagtgtttgccttgaaatctattttgtctaatataattatagctactcctgctttatttgtttctaatagcatggaatatctttttctatccctttgttttcagtctatatgcatctttataggctaaatgtgtttcttgcaagcaatagatcattgggtcttgtttcttcatccattcagccactctttgtattttgattgtagagtttagtccatttaccttcaatgttattactgataagtagggacttactcctgccattttgttgttttctggttgttttgtagtcttcttttccctctttcctgcctccctgtctttcttttagtgaaggtggttttctctggtggtatgatttaatttcttgttttttatatttttttaatccattgtatatttttagatttgaggttactgaaaggcttactgcaagttataattcattattttaaactgatgacaacactgattgcataaacaagcaaaaataaaataaaaactctactgttgatctctcccagccaccccccaccgccaccctgccccaccatggccaccaccaatgggactg

SEQ ID NO: 949005 - DNA, 729 bp, Homo sapiens
tagaagtggtatatacataattgggctcaagcaggtcctgaaggcacaagttacatgagaaagtggctcaaatgcccatggtctccactyctgccttctctaccccagcctgcaacaatggcctcatggggggttctctatgatcagttgacagaggaagagaagactagggcctggttcacagatggttctgcactatatgcaggcactaccaaaagtggagagctgcagcactacagcccctttctaggacatccctgaaggatagcagtgaagtgaaatcttcccagtgggcagaacttcgagcagtgcacctggttgctcactctgcatgtaaggagaaatggtcagatgtacgattatacaccgattcatgggctgtagtcaatggtttggctggatggtcagggacttggaagaagcatgcttggaaaactggtaacaaatttggggaagaggtatgtggatggtcactctaagtggtcaaaaactgtgaagatgcttgtattccatgtgatattaaccaacatgtgacctcagcagaagagaattttaataatcaagtagatagaatgacctgttctgtcaacacaactcagcctctttcaccagccacctctgtcatcgcccagtgggcccatgaaaaaagtggccatggtggcagggatggaggttacgcatgggctcagcaacatgtacttccactcaccaaggctgacctggttatgg

SEQ ID NO: 949006 - DNA, 348 bp, Homo sapiens
caggctatggggcagaggcccatcaccttcctgcgccaggtgaggctcctgcactgcccggagcacccccccacccccagcccatgtgccctggcctcagcactccgtcttcccaggtcttggccctctgtgttaaccctgatcttctgagcagccccaacttccctgacgatgccaagaaaagggcggagcgcatcttgcaggcgtgtgggggccacagtctgggtgagagccagggccaggaggaagcagagggccgccctgccactggaggagggaagtcccttgggagrgctgaggagaacttcacctgtacttcccatcctgtcctgcccgagtccaggggcc

SEQ ID NO: 949007 - DNA, 592 bp, Homo sapiens
ctctctgaagcagattctgatataagagttcaaatgtgtaggaaagaaaaatgattgtwtcttcaaccgtcataatttcttggttggaatagacccctgtaacagataagagaaaaacagtttattaacatacatattttatgtagatgggagacacccaggaaatgagtagttctcaaagaggtggctttgaattccagcttaggtaacatcttcaacaaagaacagttacctttttagagaaggaacaacacaaaggaaaggattttgagtttctggggggcagcaacttggggaaggcaaataactggcagataaaggcttgttagtaaagctggttaatagatattcctctggtaccatctctaggctgataagggtctaaagttcttcagtggccaacgtttgttcttcctggtagaaacgggggccaggacatcttttgtctttgtaaatctgtgtcctgcttttacgcaaatagagggagaacagagagctttcctgtatttgttgcttcgaatggtctcagatcataatccttacaccagaagaggcgtattttggggtggcatgtttctggtctcctggaaat

SEQ ID NO: 949008 - DNA, 573 bp, Homo sapiens
cacatctggctaactttttgtattttttttgttttttgtagagatggggttttaccacattgcccaggttggtcttgaactactgggctcaagggatytgcctccctcagcctcccaaaatgctgagattacaggcatgagccactgcatctggcccttagcaaatttttattgagtgtctactatgtgccatgtattgctcaatgttcttgggatacatcagtgagcaaaaagtcacaaagatccctgctcttaggtgtttatgttttagtggggagaggggatatagccaataagcaactgatagagcagataagtaaatgatgcagtagattaaagagaataagtgctatgggagaaggaaaaaagcaaggaaaatgggatcaggagtgtcaggaggaggacatcttgtaattttgcatatggtgatcaaggtgggccttactgagaaggtggcacttgaacaaagatttgaaggaggtgaggaaatgggctgtgggtgtctggggaagagtgttccaggcagagggaatggccagtgcaaagaccctgaggactctgcatgactgagaa

SEQ ID NO: 949009 - DNA, 609 bp, Homo sapiens
gtgcaactactctggaaaacagtctagcaagttattttaaaactaaatatgcaaataccatagtatccagaaattacacttttragcatttatcacagagaaatgaaaactttttttcacataaaaacctttacataaatgttcataacagctttatttgtaatggcccaaaactgtaaacaacatagatgtcctttcacaggcaattgtttaaataagctatggtacacccatatcaaggaatactaccagtacagtaataaaaatgaatgattgatatatgctgcaagacaaaagccaatcataaatgtttacatactgtatgagtccatttgtaaaaaattcttgagatgacaacatataacaacagagaacagagtagggattgtcagagatcaagggtggggttgggaaggaaaggaggaaggggatatagttataaaagagcaacagaaggaatccctgtgctgatgaaattgttcagtatgttagctgcaataacgtcaatatcctggttgtaatattgtactatagttcggcaagatatagttattactggggaaaacaaggtaaaagtacacaagctcttcctttataatttcctacagc

SEQ ID NO: 949010 - DNA, 602 bp, Homo sapiens
atgccagtggtcagaacttaggttctggcaagccttgccattgaagggtgagtgctctagggtcctaagyaaatgcaagaagcaggctaagcataaggactgcgctcctgggcaagctttagtgctgtgtggactttggtgccagtgaacttggggagcatgtgacctagtgagatgccagctacatcagtcaagaaagagcttgtgtcacccctccccaccaacaccagctagtacagatcacagctttgtaagagattccttccctctgcttgagaggagagggaagagtaaagaggaggttctcttgcaacatggataccagctcagccacagtaggatagggcacctggcagagtcctgaggcccccattccaggccctagctcccacatgacatctctggacacactgggccaaaaagaaacctgtggccttgaagggaaggatcaagtcctggcaagattcatggcctgctaactgaagagcctttgggcctggaataatcagcaggaatacccaggcagtacccactgtgagcctaggtgagactcaaagatattctggcttcaggtgtgacccagcacattcccagctatggta

SEQ ID NO: 949011 - DNA, 602 bp, Homo sapiens
atgccagtggtcagaacttaggttctggcaagccttgccattgaagggtgagtgctctagggtcctaagtaaatgcaagaagcaggmtaagcataaggactgcgctcctgggcaagctttagtgctgtgtggactttggtgccagtgaacttggggagcatgtgacctagtgagatgccagctacatcagtcaagaaagagcttgtgtcacccctccccaccaacaccagctagtacagatcacagctttgtaagagattccttccctctgcttgagaggagagggaagagtaaagaggaggttctcttgcaacatggataccagctcagccacagtaggatagggcacctggcagagtcctgaggcccccattccaggccctagctcccacatgacatctctggacacactgggccaaaaagaaacctgtggccttgaagggaaggatcaagtcctggcaagattcatggcctgctaactgaagagcctttgggcctggaataatcagcaggaatacccaggcagtacccactgtgagcctaggtgagactcaaagatattctggcttcaggtgtgacccagcacattcccagctatggta

SEQ ID NO: 949012 - DNA, 609 bp, Homo sapiens
ccccagcccttcaagtatgatttagttaggtatgacaaaaatgacccaaattgtgtaattaactttataaccacaataggtattaacagatatgagtaggtgctattygaaagtatcccacaattaattacttgaggtgatgtggctgaagttattcgagcatcctggctgaagagcttctcagaacgcttattatataccaagaaactccaagagtgaggcattgtggtcaaaagaacactccaggtttatttgactatggaggttgtttgttttgcacctcttaacattctgcaagccaaatgtcttgaagaatacaactttggaaacttctagattggccagaatattgggccttgccaaggtaggaaaaaaaaaaaaattctccagagcagactttgttaccataacttcaggaatgtgacttctagttggtgcccttctcatcagctccagtcagaaaacacccatcagtcaaagaacccaaacttaaaaaaaaaagcacatggtggtataaggaaccaacaaatataaagagccatcacattcaagatcttaagccccttcaataaacaatgcatatgcagttgccagaaaatttacatgttt

SEQ ID NO: 949013 - DNA, 630 bp, Homo sapiens
aatggccactcacagggctgtcataactattaaatgaaataatgtatgtcaagcacgacgtgcactgcctgaggaccatgaccatggtggtgatactgaggatgacagtgaagatgatgatgtccttcctccttcctgggatgcagtgagtcatccttcctcatggaatccagtggagtaaagaagaaacattccttcccaaacccccagatctcacagtggtaggaacaaggacgatgacgatgacaatgaggactctaatgaaggtgaaggtagaggtagcaggaaagatgataaaggtggtgatggtggtgctgatgaagatggtgatgatggtggtgctgatgaagactatcacaacaatgatgcgatgacgatggcagtaatgaaaatgatgacaataacaatgatgatgataatgaaaatgatggcaggggatgatgaataagaggctggtgatagtagtaacgagaataatgatgacaatgatggtgaggataaggtgaggtaggagactggcaggacttgttttctgatcacaaccmtgctgatcaaaatgggatctggtccagacaggataaagtgaagaaaccggcaggaaccagtggatggtgatgaaagtgatccctt

SEQ ID NO: 949014 - DNA, 579 bp, Homo sapiens
ttttccagtgttatcttctagaaattttatggtttcaggtcttagatttaagtctttaatccctcttgatttgattgttgtataaagtgagagatgaggatccagtttcattcttctacatgtggcttgccaattatgccagcaccatttgttgaatagggtggcctttccccgctttatgtttttgtttgctttttcaaagatcggttgattgtaagtgtttggctttactgctggattatctattctgttccattggtctatatgtctgattttataacagtaccatgatgttttggtgtctatggtcttacattatagtttgaagtgggtaatgtaatgcctccaggtttgttctttttgctaggctgggtttggctatgcgggctctttgttggttttgtatgaattttaggattttttttccagttttgtggagaatgatggtggtattttgatgggaattaggttgaatttttagattgcttttggcagtrcagtcattttcacaatattgattctacccattcatgagcatgggatatatttccatttgtttgtttgaaataaatcatctat

SEQ ID NO: 949015 - DNA, 590 bp, Homo sapiens
gaagtgtgagtagtctggagaccccatttgtagctggaatgagatgtaggcgtagtcttgtggaactgagcccttaacctgtggggtctatgctagctctaggtagtgtcagaattaaagggagttgttggrcctccatttggtattggagaatgggttagagtcagaaaaaaaagcaaaaacccacaaaattagaattttcccaacaataaaaatgtgaattttcacataacctattctcatttaaattagaagaatttcaggagagttggggtaagatggtggaatagaaaacgccaccgatcatcccttcagcaagaacaccaagttaacaactatctacacagagaaaacaccttcataagaatcaaaaatcaggcgagcaatcatagcacctggcttcaacttaatattgctgaaagaggcactgaagagattaaaaaaaagtctagaatcacagatgccaccctttccctatccctggcagcagcagcagtgtggtgctaagagcagctctgggcactgggggagtgacaacacagcaattgtgtcactgaactcagtgctgtcttgttagagcagaaaagaaa

SEQ ID NO: 949016 - DNA, 623 bp, Homo sapiens
aagaaagaaagaaagaamgaaagaacgaaagaaagaaagaaagaaagaaagaaagaaagaaagaaagaaagaaagaaagaaagaaagaaagaaagaaagaaagaaagaaagaaagaaagaaaatcctttcatttgcaacaatagggtgaacctggaggacattatgttaggtgaaataagccagggcacagaaagacaaataccaaatgatctcatttatatgtggaatctaaaaaagttgaactcacagaagcagagagtacaatgagagtacgatggtagttacgaggggctggaggaatgggggattggggagatgttggttaaacaattcaaaatttcagttcaataggaagaataagtcaagagatctattgtacaatatggtgactacaattaataagaatgtattgtattatgtaaatcaataagaaaatagattttaagtgttctcaccacaaaaatgataagtatgtgaggtaatgcatgtatcaattcgcttgactgagccattctgcaatgtatacatatttaaaaatgtaatgtttatacaataaatataaacaattgttgtcaattaaaataaaataaaatggtaaataagttatcactgacatacaatt

SEQ ID NO: 949017 - DNA, 623 bp, Homo sapiens
aagaaagaaagaaagaacgaaagaamgaaagaaagaaagaaagaaagaaagaaagaaagaaagaaagaaagaaagaaagaaagaaagaaagaaagaaagaaagaaagaaagaaagaaagaaaatcctttcatttgcaacaatagggtgaacctggaggacattatgttaggtgaaataagccagggcacagaaagacaaataccaaatgatctcatttatatgtggaatctaaaaaagttgaactcacagaagcagagagtacaatgagagtacgatggtagttacgaggggctggaggaatgggggattggggagatgttggttaaacaattcaaaatttcagttcaataggaagaataagtcaagagatctattgtacaatatggtgactacaattaataagaatgtattgtattatgtaaatcaataagaaaatagattttaagtgttctcaccacaaaaatgataagtatgtgaggtaatgcatgtatcaattcgcttgactgagccattctgcaatgtatacatatttaaaaatgtaatgtttatacaataaatataaacaattgttgtcaattaaaataaaataaaatggtaaataagttatcactgacatacaatt

SEQ ID NO: 949018 - DNA, 774 bp, Homo sapiens
gagaacttgctgcagcttctccatcagcacttgctgtttcaccttgtacttttatgttgtggagacggygtcttaaacctcataaacaactctctgccagcttccagcttttcttccgcagctccctcacctctcacagccctcagggaattgagagtcagggccctgctctgaattaggctgcagctaaagggaatgttgtggctggtttaatcagtccccaccactcaaacttcctgtgtatcggcgttcttgtcatttgtgtgttcactggaatagtgctcttactttccttcgagaacttttcctttgcattcagaagttggctgtttggtgcaagatgcccagctttcagcctgtctcagcttttgacttgccttcctcactaagcttaatcatttctagcttttgatttaaagggagcaatgtgcaactcttccttgcattggaatacttagaggccattgtagggttatgaattggcctaattttagtattgttttgtctcggagtagagaggcctgagcagagggagagatgagagaaaggctggttggtggagcagtcataactcccacaacatttattgagtaagtttgtggtcttatgtgggtgtggtttgtgcctctccccaaaatgacaatggtagcatcagagatcacaggtcactattaacagacataataataatgcaaaaatccaaggtcaaggtgctggcaaaaagaaattaaaaaaaaaaaaagaaaaagtttgaaatattgcaagaattaccag

SEQ ID NO: 949019 - DNA, 886 bp, Homo sapiens
tcttctggagaacttgctgcagcttctccatcagcacttgctgcttcaccttgcactctcatgttatggagacggcttccttccttaaacmtcataaaccaacctctgccagcttccagcttttcttccgcagctccctcacctttctaagccctcacagaattgaagagtcagggccctgctctggattaggctttggctaaagggaatgttgtggctggtttaatcaatgcagaccactcaaagttccttcatatcagcattaggattgtgttcttatcattcgtgtgttcactggagtagcagttttactttccttccagaacttttcctttgcattcagaacctggctgtccagtgcaggatgcccagctttcagcctctctgccttcgacacatcttcctcactaagcttcgtcatttccagctttcaagtgagggacacgcaactcttcatttcaacactgagaggctgctatagggatgttaattggcctaatttcaacagtgttgtgtctcactcatgaagtcagaggcattaggagaaggtgagagacgaaggaacggccagttagtggggcagtcggaacacacacgatttatcgactaagttcactgtcttctatgggcaaggttcccagggcctcaaaaccaattataacagttacagcaaaagtcactgaccaccctcatataatcacaatgaaaaagtaagaagtattgtgagaatgaccaaaatgtgagagagaggcaggaagtgagcacgtgctgttggaaaactggcaccaacagacctgctcagccagggctgggctccacagaccttcatttgcaaaaaacatcaatctacggagtgcaatcaaacaaggtgtaagaaatagccacc

SEQ ID NO: 949020 - DNA, 560 bp, Homo sapiens
atcatacagatgaggaaaatgagtcctggaaaaattatgatgacagaactggtgaactctgacacttcgggttttgaccttggctaaattcttagattttgcccaagaacacactctaaggtttctcgctgtagtttgactgttttgttctgaggattttggaaatagtatctcctgacaggatttctgtgttttttgctgctcaactggctctgaaatttctgaacatgccttatgcagtttcaacattcttctgtaatctctgctgaaacatttttgtacctatattttatatcgatactttcagtgtgtgtgtgtgtgtgtgtgtgtatgtatgttctaggacccacttgagaaagattacccaaagttcatataaatgctgcatattgttaggtattgaataagtatttggtatctctttatgttatgaagaagtaaacagtgtatccgcatttaaatatgaagacagggttacagtggargcatgatgctatcatctagtgacactcatcttgcagtatcatatttttactagttaagtgttctttattttaagt

SEQ ID NO: 949021 - DNA, 606 bp, Homo sapiens
ccatctgggaatgcagcccaggagatttcagcctcattttacccagctcctatttaagatggagttgctctggttcacttgtctctgacaagttgaaaatgcatttaatacacctaacctactggacctcatagyttagcttagcctaccttaaatgtgctcagaacacttacattagcatacatttagcctatgtttgggccaaatcatgtaacacaaagcctattttataatgaagtgttgaatatttaatgtaacttattaaatactatgttgaaagtaaaaaacaaaatgcaatctttattattttagctaaagtaattgtcaatttattaaataaaaacaaaacagcccacaccatcattagctgcaaaatcattttgaaccattgtaagttggggactgtctaaagaattgagaattggctcaagtaatgacagaagctgattagtatggaaatttgaagtcagcaagttggagacccagcagaggtaaggtatagtccaaaagcttgcagccttgaggctcaagaagagccaatgttttcgttcatttaagaaggtaggaaaagaccaatgtcccagttcacacagtcaggcaaaagga

SEQ ID NO: 949022 - DNA, 775 bp, Homo sapiens
gatcaggcctgtcggaagtgactccgggggtgaactctggcatgcagatgaagggaacttggtggcgcccaaacaggaaagcamtcgactctgaagccccagaggggatgttacagccatgctaacagctcttttagtcccaccgtcagcagcctgacaaacgggcatgttaacaatgaatggggggtgtgttaacaactctgtcagtcctgttgcctgctcctgccggaggctccctggctggcctggccctgcactgcctctcatggcaaggggctgccactgggcacagatagtcggggaggggtggagggctatggtgttactgccttcttcataccctttgctgacaatggaagggtgaaaagggcagagaagagttttatgaagcaatgaaacagctctcagaggagaggggatgcaagggtggtccctgacctgaagttgggtggtctctctctcagcgtggctgggtccggggcttttatgggctcagaagtggggactgcatgctgattggtttacgagtatacaaaaaaggctaaaacaaaggaaccattcaaaggtggcatgacagtgtagaaaaccacctagggaagggtagatatatgtaaagtaagtgaagggtggggatcagtcagaggaaagtgcaccaacaggaagagatgttctcagctcggtccatggatttatccaagacttgtagcttagctttcgggctttaaactgcctttggtttgaaagttggatttcattggggacatgccactatctg

SEQ ID NO: 949023 - DNA, 467 bp, Homo sapiens
tcatggtttcattttagaatatccatggtgtaaataacacattacttcgtgcaatggagacaatattgcttgattgattctgtattactcaaaaaaaaaaaaggcgagaaaagaacttttatctgaggaatgtgagtccttttaaataatgaggcccagagagacattaaaatgaggcagcagtcaagtcctactccccgctttgagctaggtattcatctcctgaaactgcttattgccacaagtagctataaattaacctaataatgccagagcaaacgctataacccacaccctgtagcttaacaatgtatagccaatcactaatcaatgttatttctataaatcaataagaatgcctgacaaacaactttgtatcagccatgccttctcccycttttttgcctttaaaaatctgtttgtaacaaaggccaaactcatatccaaggttacacgggtccgagtcc

SEQ ID NO: 949024 - DNA, 538 bp, Homo sapiens
ggatcacttgagcccaaaacaaaaattagccaggcatgctggcgcacacttgtagccccagctacctgggtagctgaggcaggggaaccacttaagcycaggagtttgaggctgcagtgagccaagatcctgccactgcactccagccttgtctcaataaataaataatcagaatcaactttttcagaacactagaaactaatcaaaggcctgcagcaacccaggaagtgtttattcaagaaatggctgaatctcatgaagaaaagtgagctttgtgatgacttaacttactctattcccatctttccctccccagttccacagtaaccttgaaaactaaaagtacattaccacagtaaaaatcaatagcctggcagctacaagaggaggcagaaaaggattagatctcctttgaagccccattctcaaagaactgtcattatttgacctgtccagtggttccctggaagaccccactcataaagccttgtttattcgacctgtttcatagctgacccagtgtgaaaagcactggtgt

SEQ ID NO: 949025 - DNA, 573 bp, Homo sapiens
cagaatctctgggatgcagctaaaagagtgttaagagggaaatttatagcactaaatgcccacatcaaaaagctagaaagatctcaaataaatctttctaatatcacaactaaaagaactagagaaccaagagcaaacaaacccaaaagctagcagaagacaggaaatatccaagatgagagcagaactaaaggagatagagacatgaaaaagccttcaaaaaaaaaaatcaatgaatccaggatctggctttttgaaaaaattaataacataaatggactgctagctagattaataaagaagaaaagagagaagaatcaaatagacacaataaaaatgacaaaggggatatcaccactgatcctgcagaaatacaaacaaccatcagaaaatactattaacacctttaggcatgtaaattagaaaatctagaagaaatggataaattcctggacacgtacagcctcccaagactaaacsaggaagaagttgaatccctgaacagaacaataaaaagctctgaaactgaggcagtaataaacagcctactaaccaaaaaagcccaggaccaga

SEQ ID NO: 949026 - DNA, 740 bp, Homo sapiens
ttgggactggctagacagtgggtgcacccatggagggcaagcagaaggagggtggggcgtcgcctcaccttggaagtacaaggggttggggaactccctcccctacccaagggaagctgggagagactgccttgaggaacagtgcattccggcccagatactacgcttttcccatggtctttgcaacctgcagaccaggagattccctcaggtgcctacaccaccagggccctgggtttcaaacagaaaactgggccactgtttgggcagacactgagctagctgcaggagtttttctcataccccagtggagcctggaatgtcagcgagacagaaccgttcactcccctggaaagggggctgaagccagggagacaagcggtctagttcagtgaatcccacccccacggagcccagcaagttaagatccactggcttgaaattctcactgccagcacagcagtctgatgtcgatctgggacactcaagcttggtcaggggaggagcatccaccattacagaggcttgagtaggcagttttcccctcacagtgtaaaaaaaagctgacaggaactttggacaaggcagagcccaccacagtgctgccaagccactgtagccagactgcctctctagattcctcctctgtgggcagggcatctctgaaagaaagacagcaggcccagtcaggggcttctaratccaactcccatctccctgggatagaacacctcggggaa

SEQ ID NO: 949027 - DNA, 557 bp, Homo sapiens
actgttggtggatctgctattctggggtctggaggacggtggccctcttctcgcagctctactttgcagtgccccartagggactctgtgtgggggctccaaccccacatttcccttctgcactgccctagcagaggttctccatgagtacccaccccctgcagcaaacttctgcctggccatccaggcatttccatacatcttctgaaatctgggaggaggttcccaaacctcaattcttgagatctgtgcactcgcaggctcaacaccatgtggaagctgccaagacttggggcttccaccctctaaagtaacagcctgagctctacgttggcccctttcagccatggctggagtggctgggacacaggtcaccaagtcccaaggctgcacatagcacaggaaccctgggcgcagcccacgaaaccactttttcctcctgggcctccagatctgtgatgggagggactgccatcaaggtctctgacatggcctagcgacattttccccatggacttggggattcacattgggctccttgctaattatgcaaattt

SEQ ID NO: 949028 - DNA, 507 bp, Homo sapiens
actcctttcttgcccctttccatactgtactctttagagggatgtcactatgagcagccagcattcaagcaatgggcattgtgctctattttcttgagtaaggattatctacacaaattatttggaattctttggcatgggatatttatccattctttcctatttacttagttattcaatcatatattgatataagtaagaatattcattttatactttggctacaacccaatactacattacatgcattaggcatattatttgagcaatggcccctaagagttcttttagttggttcctctgtccctttgacatacgtccatcattctgggttttgaggagatttttttggaacacttcctttctttatgacacttcaaacattccakgatcagcagtcccagaatcagccattactccaagaactctggatactttaattggaagatgtattagaatgcaagttctggacactaggcattctcattgttactgggatgtcatggc

SEQ ID NO: 949029 - DNA, 653 bp, Homo sapiens
tttttctttttaggccttgtgatttttaaaaaaacacaactgtgcagtttgaatatttaaaggtggtaactctggaaattagattctcctcattcccctgggtttsctggtgttaatttttgttaattttttagggctctacttgtctatttggtgacttttccaaactatttttacaaagattgtattccttatgctgtatagttcttgaagcctatgtttcctatgcttcattatctcagcagtaagcaagtgacccgacagattttttttaatacatctggagttaaaaggtaatcctactctcctaatttgtgcagattacctctgagttgtatcacttcaataccaagccagactacccaggactgtgccctaaccttaatatttagcttttgtagagctcacagttatcccaaaggtgcatgcctagggttcactcaggtctattctgagcctgcttttagcccaggtcatacatattgcacaccctgtaaacagaatgagctgtctatgtttttatttcttcaaggaatttcctcctgagctttgtctttcccaggctttagagttgtctgatgcttgccttatccactgtttctttcttcaggcaggtacagtcagtgtatgtctttaaatattttgaaagatgc

SEQ ID NO: 949030 - DNA, 653 bp, Homo sapiens
tttttctttttaggccttgtgatttttaaaaaaacacaactgtgcagtttgaatatttaaaggtggtaactctggaaattagattctcctcattcccctgggtttgctggtgttaatttttgttaawtttttagggctctacttgtctatttggtgacttttccaaactatttttacaaagattgtattccttatgctgtatagttcttgaagcctatgtttcctatgcttcattatctcagcagtaagcaagtgacccgacagattttttttaatacatctggagttaaaaggtaatcctactctcctaatttgtgcagattacctctgagttgtatcacttcaataccaagccagactacccaggactgtgccctaaccttaatatttagcttttgtagagctcacagttatcccaaaggtgcatgcctagggttcactcaggtctattctgagcctgcttttagcccaggtcatacatattgcacaccctgtaaacagaatgagctgtctatgtttttatttcttcaaggaatttcctcctgagctttgtctttcccaggctttagagttgtctgatgcttgccttatccactgtttctttcttcaggcaggtacagtcagtgtatgtctttaaatattttgaaagatgc

SEQ ID NO: 949031 - DNA, 561 bp, Homo sapiens
cacccgcctcggcctcccagagtgctgggattacaggtgtgagccaccgtgcctggcctgtttaatttcttaatctacaacgtatgtataccagagaaacttaacaagatcttccrttgtgatcatacttggccatggtttttcagtgtaatactctaaattacttcttttatacactatttgtaaatgactttttctcctgagataatttcaaagcttccactgcattttcacatttctcacttccttgagtgacttaagtcagttaataattagaattttattttgggtgtagatcactttaagcgaacctgatttaaagtctagcttccaaatctttgataaatcagatgagcattatttagttttagtttggtacagtatgaaataaaagtttgtggtctaaagattatagcaagagcatattttaatgttatcagaggaaaaaattacatgtaaatacatatttcctcatatttacaagtaccccattttctggaaaaatgaaatgcttttggctccagatattgcttaggtaatgtctaacgtactgtaagcaaa

SEQ ID NO: 949032 - DNA, 656 bp, Homo sapiens
ttgaggtatcacagtgctgtgtttaaggagccctcattttacttaataatggcaccaaagcacaagaatagtgatgctggcttattgttagaattgttctatgttattagtagctatygttgttaatctcttaccgtgcctaatttataaactttattataaatatatatgtaaaggaaacacaatatgtatggtgtcctgtactactgaagatttcaggtgtccactgaggatcttggaaggaatcccctgtggataagggtgcaccactgtaaatatgttcagctttgagggcaacatagtctctgtcacaactgctctacctgcaacagcgccagacaaatctggctaaactttaatccaacaaagttatgagttggtctgagccctcaggctgaaggtcatgtaaactgagcatgcccagatgaaccaagtatgcaaccacaaggggaacagaagtgcccagaccaaggagaagaccaaagagcagggactgaattaagaagcagacgcagtatggaaggatccaggatccaatcaaattgagctctggcatcagcccattgtggaatcgaatcagatcatgcctcctggcatcatctcattgcagaattcaatcagatcacacctcattaccctatgcttataaaacccga

SEQ ID NO: 949033 - DNA, 737 bp, Homo sapiens
accactttgtctagcatatccatgccttatacgctacctgcccgttagtcacttagtagccttctgagttatcagattgactgttgaggtatcacagtgctgtgtttaaggagccctcattttacttaataatggcaccaaagcacaagaatagtgatgctggcttattgttagaattgttctatgttattagtagctattgttgttaatctcttaccgtgcctaatttataaactttattataaatatatatgtaaaggaaacacaatatgtatggtgtcctgtactactgaagatttcaggtgtccactgaggatcttggaaggaatcccctgtggataagggtgcaccactgtaaatatgttcagctttgagggcaacatagtctctgtcacaactgctctacctgcaacagcgccagacaaatctggctaaactttaatccaacaaagttatgagttggtctgagccctcaggctgaaggtcatgtaaactgagcatgcccagatgaaccaagtatgcaaccacaaggggaacagaagtgcccagaccaaggagaagaccaaagagcagggactgaattaagaagcagacgcagtatggaaggatccaggatccaatcaaattgagstctggcatcagcccattgtggaatcgaatcagatcatgcctcctggcatcatctcattgcagaattcaatcagatcacacctcattaccctatgcttataaaaccc

SEQ ID NO: 949034 - DNA, 612 bp, Homo sapiens
tgaggtatcacagtgctgtgtttaaggagccctcattttacttaataatggcaccaaagcacaagaatagtgatgctggcttattgttagaattgttctatgttattagtagctattgttgttaatctcttaccgtgcctaatttataaactttattataaatatatatgtaaaggaaacacaatatgtatggtgtcctgtactactgaagatttcaggtgtccactgaggatcttggaaggaatcccctgtggataagggtgcaccactgtaaatatgttcagctttgagggcaacatagtctctgtcacaactgctctacctgcaacagcgccagacaaatctggctaaactttaatccaacaaagttatgagttggtctgagccctcaggctgaaggtcatgtaaactgagcatgcccagatgaaccaagtatgcaaccacaaggggaacagaagtgcccagaccaaggagaagaccaaagagcagggactgaattaagaagcagacgcagtatggaaggatccaggatccaatcaaattgagctctggcatcagcccattgtggratcgaatcagatcatgcctcctggcatcatctcattgcagaat

SEQ ID NO: 949035 - DNA, 853 bp, Homo sapiens
gtggacgaggggcagccctcaggctagatgcactgatttagtacttttaatagtggcaggagtcagacaagcccgtaggcagatagtggcatgtccccaatgaaatccaactttcaaaccaaaggcagtttaaagcccgaaagctaagctacaagtcttggataaatccatggaccgagctgagaacatctcttcctgttggtgcactttcctctgactgatccccacccttcacttactttacatatatctacccttccctaggtggttttctacactgtcatgccacctttgaatggttcctttgttttagccttttttgtatactcgtaaaccaatcagcatgcagtccccacttctgagcccataaaagccccggacccagccacgctgagagagagaccacccaacttcaggtcagggaccacccttgcatcccctctccgctgagagctgtttcattgcttcataaaactcttctctgcccttttcacccttccattgtcagcaaagggtatgaagaaggcagtaacaccatagccctccacccctccccgactatctgtgcccagtggcagccccttgccatgagaggcagtgcagggccaggccagccagggagcctccggcaggagcaggcaacaggactgacagagttgttaacacaacccccattcattgttaacatgcccgtttgtcaggctgctgacggtgggactaaaagagctgttagcatggctgtaacatcccctctggggcttcagagtcgagtgctttcctgtttgggcrccaccaagttcccttcatctgcatgccagagttcacccccggagtcacttccgacaggcctgat

SEQ ID NO: 949036 - DNA, 630 bp, Homo sapiens
ttggaagtttctcaaaaaattaaacacagaattatcatatgacccagtgattctactcctgggtatatactcacaagaattgaaagcagggactcagatatttgtatgccmatattcactgcagtattatttacatttgtactaaaatagccaaaaggtggaaataacccaagagtccatcaacagaagaatgaattcagtatatgcatacaatgacatattatttagccataaaaaggaatgaggttctgatacatactataacatgggtaagacttaaaaacataatgctaagtgaaataagccagacacaaagggacaaataaatgtattattttctttacatgaaatgtctagaacaggcaacatcacagagacagaaagtaaagcagaagttgccagggactaggggaagggggaaatggagagtcattgcctgctgcgtacagaatttctgtttggggtaatgaaaaagttttggaaattgatagtggtgatgactgcacaatgctgtgactataattaatgtgactaaattacacactcaatataattaaaattgcaaattatgttattatattttaccatgataaaaaaatacattaaaaaaaagctctacagctatttctg

SEQ ID NO: 949037 - DNA, 627 bp, Homo sapiens
ctggatccccccttctgtcttttgttttcgtaattgagattttaaggtttagttagcccattcaacaatggcttggccttgagaatcatagggtattccagtactgtgctcagtgtgccattgttggaggaacacttgtaaagatttactacagtagcctgggccattgtctattttaatcttttgtgggatgcctatggcagcgaaacaggaaagtaaatgtttcttaatatgagctgctgcctcacctgtttggcaagttgtccatacaacacgagaaaaggtatctatagtaacatggacgtatgaaagtttcccgaatgaaggtacgtgggttacgtccatttgccacaacatattgggggttaatccctgtgggttagcaccagtccctgcatgtggcagttgtagtacctggcactgagggcaatgttgcacaatgtcctttgcctgtctccaagtaatttgatatttttgtttaagtcctgctgcattaacatgtgttagggagtgaaaatcttggacattagtaagcacagtggaaactagtaaatcaccttgatcrttagcccttacaacggtcccagggagattagtatatgctcgaatgtgcatgatatagaaagg

SEQ ID NO: 949038 - DNA, 570 bp, Homo sapiens
accaccactacaaccgagatactgaaaagttccatcactcctcccaaatccccttgtactctcaagtcaatccatctgccctgtcctgcccttagcaacgactgatctgttctctttacctggttttgctttttccagaatgcaatgaaatggaatctgcagcatggagatgtttgagtctggcttctttcacttaacacaatgcctatgggattcatccacgttattgagtttatcagtagttcattcttgttattgctgagtaatattccattgtacagatatacaacttatttatttatttgtttttgagacgggagtctcactccgtcacccaggctagagtgcagtggcaccatctcggctcactacaacctccacctctcgggttcaagcgattctcctgcctcagcctcccaagtagctgggattacaggtgcccgccaccacgcccggctaatttttgtatttttagtagagatgggattttgccatgttgcccagactggtctcgaactcytgaccttgtgatccacccgcctcagcctcccaaagggctgtgattacagg

SEQ ID NO: 949039 - DNA, 638 bp, Homo sapiens
ttacaagctggaaaagattgrtggtgcgggggctatatttagcatcttcaaagaaaataaattccaatcaagaattatatatccagccaagctaagctttgtaagccaaggagaaataaaatcctttccagagaaacacatgctaagggaatttgttaccaccagacctgccttacaagaggtccttaagggagtgttgaacgtgggaacaaaagactgttaccagccaccacaaaaacacacttaagtacttagaccattgacactataaagcaactacacaatcaagtctatataaaaaccagctaacaacatgataacagggtcaaatccacacataaatattactgtaagtgtaaacaggctaaatatctcacttaaaagccacaaggtgggaatttggataaagaagcaagactcaactctatgtatgctgccttcaagagacccatctcacatgcaatgacacccattggctcaaagtaaaaggaaggagaaatatctatcaaacaaacagaaaacaaaaaaagagcaggggttgctattcttattttagacaaaacaaacattaaaccaagaataaaaaggacaaagaagggcattacagaatgataaaggattcaattcaacaagtctta

SEQ ID NO: 949040 - DNA, 578 bp, Homo sapiens
tgaaagtagaactaccatttgactcagcaatcccagaaatgcatacatacccaaaggaatataaagcattataccatagagacatgtgtgcatatgttcatcacagcactattcacaatagcaaagacatggactcaatcttgatgcccaccaatggtggaccagatacagaaaatacggtacatatacactgttgaatacaacgcagccacaaaaaagacaaaattatatactttgcagcaatatgaatggagctggaggccattatcctaagtgaattaatgcaggaacagaaaaccaaatactacatgttctcacaagtgggagataaacattgagtacacatggacacaaagaagggaacaacagacaccaagggctacttgaggatggaggggtgggaggagggtgaggattgaaaaaactacctgttgggtactatgcttactacmtgggtgataaaataatttgtacaccaaaccccaataacacacaatttactcatgtaacaaacctgcacctgtacctgctgaacctaaaataaaacttgaaaaaaacacagttgcctattgatggtt

SEQ ID NO: 949041 - DNA, 553 bp, Homo sapiens
caatcccagaaatgcatacatacccaaaggaatataaagcattataccatagagacatgtgtgcatatgttcatcacagcactattcacaatagcaaagacatggactcaatcttgatgcccaccaatggtggaccagatacagaaaatacggtacatatacactgttgaatacaacgcagccacaaaaaagacaaaattatatactttgcagcaatatgaatggagctggaggccattatcctaagtgaattaatgcaggaacagaaaaccaaatactacatgttctcacaagtgggagataaacattgagtacacatggacacaaagaagggaacaacagacaccaagggctacttgaggatggaggggtgggaggagggtgaggattgaaaaaactacctgttgggtactatgcttactacctgggtgataaaataatttgtacaccaaaccccaataacacacaatttacycatgtaacaaacctgcacctgtacctgctgaacctaaaataaaacttgaaaaaaacacagttgcctattgatggttta

SEQ ID NO: 949042 - DNA, 590 bp, Homo sapiens
aaaatagttaggaatatacttaaccaaggaggcaatagagtcttacaaggaaaactgcaaagctagcactgctgaaagaaatcatagacaacacaaacaaatggaaacacatccsatgattatggatgggtagaatcaatatcgtaaaaatgactatacttgccaaaagcgatctacaaattcaacacaattcccatcaaaataccatcatcattcttcacagaattagaaaaaacaatcctaaaattcttatggaacaaaaaagagcccacatagccaaagcaagactgagaaaaaagaacaaatttgaaggcatcatattaccaaacttcaaaatatactacaaggctacagttaccaaaacatcatggtactggtataaaaataggcatgtagaccaatggaacagaatagagaacccagaaataaagccaaatatttacagccaactgatctttgacaaagcaaacaaaaacatagagtggaaaaggacaacctcttcaacaaatggcgctgggataattggcaagccacatgtagaagaatgaaactggattctcatgtctcaccttctacaaaaatcaagaagg

SEQ ID NO: 949043 - DNA, 617 bp, Homo sapiens
ccatctttcctttaatcccctgcagggccagcggtttgctaattctgtttctcttaggcatagggtacaatgtgcctatccctgctggcacatgtgttcagggtatggctgcctccacctcccagttcttcccttggcaccagcctggggaaagccataacaccaaggggctcagaactgatgccctggtcacgtgccccttcaaggtgactcagatcagtgtgatgccatctttctaaacccatccctacggaagagttcctctatttatggtactggagtcacctgtgacaaggattcttggcttggccaaactttagtcagactcctgaaccttctcttaggcccatctgtgcacttccttatgaagtccagttttagaaaaagaaccctgctaagtcagtgtaaccagaaacccccgtccttgacatctgatcatcctccatatctgatcaggttcctcatccaccaccatcccccagcagatgtctgatctccctggcctgccttcaatgacaatccccagaatcctgttaartaggtttagccagaatccccctcaccctgaaggtttcctcttggtaattttccatccactgaccccaccctgcccctca

SEQ ID NO: 949044 - DNA, 639 bp, Homo sapiens
aattgtaccattgtattaaacaattggtttgaatatagcttttaatcaagtatttgctaccaatttgaaggatgcatccatttatttagtttctctgaatttttaaaaacagctttaaatcagtaatgaatattaaattttatcagtttttttgcatctattgaaataattttgtgacttttttctttctctttaatttaatgctgtgatgtcctatatatatttccccctctatattaagccatccttacaatgttgggataaatgcttttattagtcagggtaagctactttctttgatgaaaactccaaattctcagtggctaaacacaaaaaaggcttatttcctgctcttgtgtcacttcagtgtttctggtgagggtgagaattttctggttttaaatataaagatagagagctcatactttaggcaaagaacaagaagggtctctggcaatgtttctgtaacttcccttgactctagacacttccttgtgttgccttcatctcaggctgattctttcattgcaccaagatggcttctgggctcattyataggtatagtcttcctcattcacgtccaggtacatctcttcccacaatcatttaacaagtcctgatacctccattcaggtgaac

SEQ ID NO: 949045 - DNA, 639 bp, Homo sapiens
aattgtaccattgtattaaacaattggtttgaatatagcttttaatcaagtatttgctaccaatttgaaggatgcatccatttatttagtttctctgaatttttaaaaacagctttaaatcagtaatgaatattaaattttatcagtttttttgcatctattgaaataattttgtgacttttttctttctctttaatttaatgctgtgatgtcctatatatatttccccctctatattaagccatccttacaatgttgggataaatgcttttattagtcagggtaagctactttctttgatgaaaactccaaattctcagtggctaaacacaaaaaaggcttatttcctgctcttgtgtcacttcagtgtttctggtgagggtgagaattttctggttttaaatataaagatagagagctcatactttaggcaaagaacaagaagggtctctggcaatgtttctgtaacttcccttgactctagacacttccttgtgttgccttcatctcaggctgattctttcattgcaccaagatggcttctgggctcatttayaggtatagtcttcctcattcacgtccaggtacatctcttcccacaatcatttaacaagtcctgatacctccattcaggtgaac

SEQ ID NO: 949046 - DNA, 433 bp, Homo sapiens
ctattctaggtggttagaacttaaatatttcccagacctgtgtaaaatctaggaactatttatcttacaaattcacaacactttttttggtctagcctcatagggttctatcctcatgaggcagcataatagtcaacagtcatttaaatggaacccctaatgcgtatttttagagctctttatgcatttcccactttctgagtattcttctctaaacatgtctggcacctcagcctccctgaactcttttctctgtcttcttgattcagccagtctgccatgctttatttggtatatcccccctacactgagctgyattaaagtctctaagcagagaacaaagactgtcgtagaactcacatcattcatttgccttctctcaggaatcagtcctctgatgtctattgaccactgcctaaaaaccactgcccta

SEQ ID NO: 949047 - DNA, 433 bp, Homo sapiens
ctattctaggtggttagaacttaaatatttcccagacctgtgtaaaatctaggaactatttatcttacaaattcacaacactttttttggtctagcctcatagggttctatcctcatgaggcagcataatagtcaacagtcatttaaatggaacccctaatgcgtatttttagagctctttatgcatttcccactttctgagtattcttctctaaacatgtctggcacctcagcctccctgaactcttttctctgtcttcttgattcagccagtctgccatgctttatttggtatatcccccctacactgagctgcatwaaagtctctaagcagagaacaaagactgtcgtagaactcacatcattcatttgccttctctcaggaatcagtcctctgatgtctattgaccactgcctaaaaaccactgcccta

SEQ ID NO: 949048 - DNA, 548 bp, Homo sapiens
agggtctggctctgtcacccaggctgsagtgcagtggtacaatcacagctcatggcagcctctaactcctagcctcaagcgatcctctcactgtggcctcgcaaggtgctgggattacaggcctgaactgcgatgctggcctacaagagggtttaagatgtatgagagcagtggttacaagacgctgtagggaagagagcagagaggaaagggtgccctgataatagcagtgctctctccaccctgaggcccgtgatgcaaatgaagagggaaacttattactcacctcaggttagaaagcggagagtttcatcaattgatattccagggacttggcagtctgagatttatggacttaatatagtttattcttttgtggcgtcattggttgggaaagtgcaagattccatgttaatgaaactcaaagcaggaataataaaccacatcccacgaggaacgggggattgcccgttgagactccccctgcatgggccccaacaaaccccctgcttggggcagaacaacagtccttggggtgttataaacag

SEQ ID NO: 949049 - DNA, 540 bp, Homo sapiens
taatgtgtttgtgttttaaactaagtgttattaccagagtcaaaatgtttttaaaaaagtaaaagttgataaagtttaaaagytacagtaagcaaaggttcatgtattattaaaaaagaattttgtaaatttagtgtcgcctaagtgtacagtgtttataaagcccacagtagtgtttagtaatgccctaggctttcacattcactcaccactcactcactgattcacccagagcaacttccagtcccacaaactccattcatggtaaatgccccatacagatgtatcatattttgtttttcatattgccttttagttgtttgtttgtttgtttgtttttgtttagacagagtctatctctgttgcccaggctggagtgcagtgacgcaattataactcactgtagcctcgcattcctgggctcaagtgatcctcctatctcagccttccaagtagctaagactacaggtacatgccaccatgcccagctaagttttttttttttttttttatattatgttttgtagagatacagcccca

SEQ ID NO: 949050 - DNA, 564 bp, Homo sapiens
gaaaattagtgaagagaaaaatcataaatttgatttgaatacrtaagaacattattaattttagccacttaaacgcgagccatttgctttttgctttttaggcctaatcactttggaacataagcacataattaaaaatatatgcaggtaaccttgttgtaaattgacttgattttagcagtatgctatttatttctgcccagctttcataacttactcattttgcatgaaactgtttatatctttaaaaaaaattagaacatactaataaccaggtgcttgtgagtacagccatgtaatatttgaattgttttgcttatcttattctgtatttctctgaaactgttttctgtttacctcttgctaaatgtcaaagtgagatactttttgtaaatctcttaccagaaaaactaaaagtccaagatagattaaaaagataagggaactgctgaagctgatagagtcagtccatgatcgttgaaaaattgctttcttccatctggtttctaatcattttcaaacactcagttgctgtagacctataaaagactcgttttacctttt

SEQ ID NO: 949051 - DNA, 763 bp, Homo sapiens
cagaccttatggttgtcttcccttgttccctaagaatcgctgttattctcttctttttcaaggtgcactgatttcatattgttgaaacacacgttttacaatcaatttgtacagttaacaaaattttcacaatggtcctgaggtgatgtacatcctcagcttatgaatataacaggattaagagattaaagtaaagacaggcataagaaattacaaaagcattatttgggaactgataaatgtccatgaaatcttcacaatttatgttcctctgccgtggctccagccagtccctccatttggggtccctgacttcccacaacaagaaataataagaggttaaggtggagaagagcaaggaagtccactttataaaggggtcaggaaaaagctctctgtggaagcaccatcttagctgagacctaaaggatggtctaatttggggaggtgcagaggaaaatcattccaggctgaagcagcaagtgcaaaggccctgttgtggagaaaggtttgaaagtccaaggaaacaaaggaggccagagtgtccgaaatagagtaggccaaggggaggagacaggagagggctggagaggcagcaggaacaggcagaagactcggggtctcgattttattmtatgtgccatgggcaggaaaggcagagatgagactcaatggacaccttaagatcactgaagctgccaggtgggaaatggattgctgagcatggagagcaggtgcagaggaccagttaagaccagttagg

SEQ ID NO: 949052 - DNA, 617 bp, Homo sapiens
cctttttcttttatttttattttttaagttctgggatacatgtgtagaatgtgcaggtttgttacataggtgtacatgtgccatggtggtttgctgcacctgttaacccgtcatctaggttttaagcccygcatgcattaggtatttgtcctaacgctctccctccccttgtcccccacctccgacgggccctggtatatgttgttcccctccctgtgtccatgtgttctcattattcaactcccacttatgagtgagaacacgcagagtttggttttctgttcctgtccacacctttttcttctgtgcacacaagcacatgtatttgcacataagtgtttattgtaaccttttttaaaaaaatggaataatgctatatttattctttggaaagcctgcttttcaggcagcatgtctttgacattgtctcacgttggaacctgggaaccaccttcttctcccagcagttattctgacgtgtggatgcaccacgcttcgtttaaccagccctgcaccgatacgtctttggatggtttctgccttttcccaatcacagacggtgttctgatgaatttcctcgcacacatcacttggtgctctgtgcgtgcatttctgtg

SEQ ID NO: 949053 - DNA, 675 bp, Homo sapiens
cagggaatctagcctccccacctggtctccactgacatcatggggggcaggaaggggtgaatttccagctagcaggaatgaaagtccaggctccttacttggcrttctctgataccatctagctggaatgttggggtgtcccactatagccccatgagagtggaagcccaggctcccaatttaatctttttcggcatcagtggtgtggcagggccatagttttttctgcggtgtttagctggggtgaagtatctattggctaaaggctttctgtctttctaggctgactctttctgatcctttggctacagagagaagattttgttgggattttttttgtgtgtctgtgcctactgtcatttctggattaccagcctttccaactctaagtatggggtatatgaggcagaaaaaaactcgagaactgaccacagtgtctttgcttgggtcctgagtcccaacaattagcctagcttatctgtccttttctctctgccttgcagattcttctcatgtttgttttacatacaatgtctagagtttttagttgtcactgggagtaatgggaaaaagcttatctactccatcttcctggaagcagaaatcttcacatcttttaaaaacatttttatttcctctctttatgactctaaatcagatgttgggctccctgca

SEQ ID NO: 949054 - DNA, 733 bp, Homo sapiens
accagcagcagcattagattctcataggagcacaaactctgttgtgaagtgtgcatgcgagggatctaggttgtgtactccttatgagaatctaatgcctgatattctgctactgtctcccatcaccccagatggacagtctagttgcaggagaacaagctcagagatcccactgagtctacgttatagtgagttgtagaatcatttcattatatattactatgtagtaataatagaaataaagtgcacaatatatgtaatgcacttgaatcatcctgaaattattccctcactcccagtctgtggaaaaattgtcttccacacactcagtctgttttttggtagaggcagggtcttaatatattgcccaggctgatctcaaactcctggcctcaagtaatatacctctctcagcctcccaaagtgctgagattacaggcataggccaccaccctcaaccaagactttcttaaaccagataaaaattaagtgagattacttgagcccaggtggtcaaggctgcagtgagcctgattgcaccacaactccagcctaggtgacagaatgagactgtctcaaaaaataaaataaaataaaatacaaattaaccctttatgacattcccagtaactttccctcctaagtgytccccacaagtctttgaattctgtttaattttcacataacatttaagacatgtaagaacttatgtctgtctgtgtcatccctttat

SEQ ID NO: 949055 - DNA, 315 bp, Homo sapiens
agaaactggatcccacccctaagagggctgcaggtacattgacagaaccaaagcatcaggccggaggcctcatggaagagttgctcccaccaagcgtgggtgagggcaggaaggatgccaactgtacttccaaatgcagtgtctgctccttagggaacagggagcaggtgggattgtttctcctgaagccaatcaagtaaatgactaattaaggmgatacaacattccaatcacaaccttaaaattcaacgcagtgcccaatgcctagcaggtgccttcatccttctgccagaagcaattctgatggagacacag

SEQ ID NO: 949056 - DNA, 572 bp, Homo sapiens
actataggtctgtagtataatttgaagtcaggtaatgtgattcctccagtttaattctttttgctgagaataacaaataagaactagtcttttttggctagctttggttattttgggtcatttgtggctcagtataaattttaggatttttttttccttttctgtgaaccatgtcattggtatgttgataggaattgcattaaatcagtagattgttttgggtagtatggacattttaacaatattgatttttccaatccatgaacatggaatatatttccattttttatgttctctttaatttctttcatcaatgttttatagttttcattgtaaagatctttcacttctttggttagcttaattccctgggtattttatttgtagctatcgtaaacaagattactgtttttaaattacttttgcagattgttcactgctggcatatggaaatgctactaattttygtgtgttgattttatatccttctgaatttgtatatccaactaaatttgtttatcaatttcaatacatttttggtcaagtttttagggtttttaaaaatataagat

SEQ ID NO: 949057 - DNA, 625 bp, Homo sapiens
ggttcagaagataaccccctgaccaatgctttgagaaatagatttgttagggcagcacctgcatctttgaagaggcctgtaattgctcttctctgtatgtcagatctaacrgtgggaactgcagtcactcaactacaaaatttaaatacaatgggaataattggatcccaaggtggcaggggtcaaccggtggcacaactatcaaaggcaaggtgggagtagctgctgtaatggatagtaatggaaagtgggaataagaatagtttgactcatatacagctctggcattggctaattaatcacggtttcctagaagtgaaattgataggatgcctactgcatttctacttaatttacataagcagaagacttctaggttgaatggacaaaaggctaattataaaaactgagtattataaactaattatatattatatttaaaaactaattatatataactaattataaaaactgaatttttctaattataaaaatggagaatcatggcccctcaatcaatttccagacttgagctagtttacagacccagaaccccttttatgactccattacattactgacaatttatgcaatgagactttctcccatccttccccaagcagac

SEQ ID NO: 949058 - DNA, 587 bp, Homo sapiens
agaggtggctcttttaatatcttggatctcaaatattgttaaacattgtaaaaacttttggaattttttatagatacagatttcagaaccccactgtcagagatycctattcagtaggtcttaactagagtaatctgactcctgtaagagcagcatagcaatttgataattaacctgccagagatttaaatgcaggttatttcaaaagtaaacaaaggatacagaaaacaagtctgattaattccaaaaatatctcaagaaaagaagccaatacaagtgttagtaaatgtttcttattgagaacatgtgtagtatggaatcttgctactcaaagtggcattgggtcagaaaaccagtaacatctgctgaccagaaagaatgttggaaatgcaaagttttaagccccacagaatcaaaatctgcattttaatcagacccccagggtacacattacattttttaaagaaacactgaaataaaagcaacagaagagttacatttgctctattcattttgcttttgatctggaaaatatgttgtcctataaggttatttctacagagaaataatctctatcattatatatg

SEQ ID NO: 949059 - DNA, 564 bp, Homo sapiens
aaatagtagctctcagcttgctaggcaagtctctccctcacaaaggcaaggggaagttaggcacatacagaaattgatgggttactttgwgtcctcctaatgagcaggtccacagtaggcagaaaacctgcttggcagagaccctgttgctccgattatatcaatggttttcttaaataagggggccgctggggtggttactactgagtgttcggcactggtatcgaccaaaaattcaatgtccttactccttattgtcatcctgaccatgggctccttgggggcatttgagcccagtccccttcactgtagtagccctttggccagattgaacaaagtcccttcgtctttatctgtggtcttttgctctgcatctccttgcttctcatttagttggggacatttatctttccaatgtcctatttctttacagtaggcacattgattatgctgcagatgggagtgattggactgggcattcatcccggaatccccctttccctgtccctagggggagattcccctaattgctgcagccagcaaatcaatgttccacctggcctg

SEQ ID NO: 949060 - DNA, 560 bp, Homo sapiens
tgtgtttggagtttcttccttctggtgggttcgccttcttaaggcggcgcttctggagttgttcattcctccyagtggattcgtggtctcgctggcttcaggagtgaagctgcagaccttcgtggtgggtgttacagctcacaaaggcagtgtgaacccaaagagtgagcagcagcaagattattgcaaagagagaaagaacaaagctcccacagtgtggaaggggacccgagcgggttgcctctgcttgctcgggcagcctgcttttattctcttatttggccccacccacatcctgctgattggtaaagcccagtggtctgttttgacagggcgctgattggtgtgtttacaatccctgagctagacacaaaggttctccacgtccccaccagattagctagatagagtgtggactggtgcattcacaaaccctgagctagacacagggtgctgattggtgtgtttacaaaccttgagctagatacagagtgctgactggtgtatttacaaccccttagctagacataaaggttctccatgtccccaccagactcaag

SEQ ID NO: 949061 - DNA, 560 bp, Homo sapiens
tgtgtttggagtttcttccttctggtgggttcgccttcttaaggcggcgcttctggagttgttcattcctcccagtggrttcgtggtctcgctggcttcaggagtgaagctgcagaccttcgtggtgggtgttacagctcacaaaggcagtgtgaacccaaagagtgagcagcagcaagattattgcaaagagagaaagaacaaagctcccacagtgtggaaggggacccgagcgggttgcctctgcttgctcgggcagcctgcttttattctcttatttggccccacccacatcctgctgattggtaaagcccagtggtctgttttgacagggcgctgattggtgtgtttacaatccctgagctagacacaaaggttctccacgtccccaccagattagctagatagagtgtggactggtgcattcacaaaccctgagctagacacagggtgctgattggtgtgtttacaaaccttgagctagatacagagtgctgactggtgtatttacaaccccttagctagacataaaggttctccatgtccccaccagactcaag

SEQ ID NO: 949062 - DNA, 618 bp, Homo sapiens
tcccagcacttcatgagggtgatgcaggcagatcacctgagatttttgaggacttattactacaaaaactggttggctttatattaaaatgatcawattttacatatattggggtaaataaaatagattaaataaaatatatttttaaaaataatttcactggtttctttttaatctttaaattttaatttgtatgtgtgtacctcacattgtatttcttttggacaaagctaattcagaatataaaagaactcttgaaaatcaacaataaaaagatgggaatctcaacagaaaaatgggcaacagatacaagcaggtaatttatagaaggaaaaatgaaaaaataatccaaaacaagcatatgactatctgctcaaaataattaagaataagaaaaatgcaaattaagaaaacaaaaaaatacagactggaaaatgtaagaaaattgaataatgccaagagtcactggggatttaaagaagcaggaaccttcttgcactgctggtgggagtgtggatgggtgtagccattggactgcacaatctgccagtacatagtcatattcaatataaacacatgttatggcccccaaattctacttctatatctacatatccc

SEQ ID NO: 949063 - DNA, 609 bp, Homo sapiens
atataaatattcttgagcttagttctgtggtggagtcaagtgacttggaaacagtttgacttctttcrggtcttgggcttaagatttgttagatggaaccaaagcaatgctcagtctaggcattcctcactactgaggcaaggctctgagttataaggttttacagtgcggctgatgggaataggcactgtctctggccctgtgtgagcagtgggcactgtttccttcaatcctttcggatggttctttccctggtcttggacattttccacacacatacatgctgatcagtactcagctgactactcagtaggagccctgtcctgatatccaaagttatctctccttgcatctctctctgtttctactccattttggcaactatctgccttggtttccctggactccaagctctctgtctcttcaactaaaaatgtcttctgggctccatctgttcctcctccttgtgccttgacctagaaattctctcaagttgggactactgtagagctcacctgtttcttgtctctcaggaatcattgtcctttgttgcctaatgttcagtgtcttcaaaaccattgcattttatattttgtaaatagttcgaat

SEQ ID NO: 949064 - DNA, 593 bp, Homo sapiens
ggctgccttgcagttttagaaccagttaaacacggcaatactgtaggcctctgtgatggctggttcttccggtcagaatatccttgccccaaatattcaggtaattcccgccctcacttttattcaggtctctgctcaactgtcactattttggaaagcccctctctaagcatcctaagcagaatagcacacctcataattcagtttcttcataccacgtatcattacgtgacatttaattctgtctatttatttgcttactgtctatttagaaaactgtgagagcagccgggtgcagtggctcacgcctgtaatcccagcactttgggagcctgaggcgggtggaccacttggggccaggagttcgtgaccagcttggccaacatggtgaaaccccgtctctactaaaaatacaaaaaattagctgggcatggtggtgcacgcctgtagtcccagctactcgggaggctgaggcaggagaattgcttaaaaccgggaggcagaagttgcagtgagccgagatcgygtcactgcactccagcctgggcgacaagagcgaaactctgtctcaaaaaaaaaaaaaaagaaaactg

SEQ ID NO: 949065 - DNA, 593 bp, Homo sapiens
gctgttgtggttttatttcggatgtggtttcatttaatgagacttctaggggtccagtggtatggggcatgtcaagatakctcttctaaggtgaaggacaccttgtagcatctggcccctcctacaaccaaaaaagaggtgcaatgcctagtaggcctctttggattttggaggcaacatgttcctcatttgggtgtgtaactctgccccatttaccaagtgacttgaaaagctgctggttttgagtggagtctagacaaggagaaggctctgtaacaggtccaggctgctatgcaagctgctctgtcacttgggccatatgacccatcagatccaatggtgcttgaggtatcagtgacagatagggatctgtctggagcctttggcaggccctcatgggtgaatcacagtggaggccttcaggattttggagcaagttcctgccatcattcacaaataactacactccttttgagacagctcttggtctgctactgggcctcagtagagactgaatgtttgaccatgggccaccaagttaccatgtgacctgagctgcctatcatgaactgggtgctatctgacccactaag

SEQ ID NO: 949066 - DNA, 629 bp, Homo sapiens
ggcctcaccctcacctacaaagtgactgtcatatacaaagggtaaacctcgggaacagcactacccaacagaaattaaatgtgagccacaggtgtgagccacatatgtaattttttttttttttttgkcagacggagtctctctctgccacccaggctggagtgcagtggcacgatctcggctcactgcaacctccgcctcctgggatcaagcaattctcctgcctcagcctcccaagtagctaggactaccggtgcatgccaccatgctagggtagtttttgtacatttagtagagacagggtttcaccatgttacccagggtggtcttgaacccctgaactcgcaatctgcctgcctcagcttcccgaagtgctaggattacaggcatgagccactgtacctggccggcgtatgtaatttttaatttgttagtagccacatttaaaaattttttcaataaacccatgaaattaattgttaaatatattttatttaacccaatttatcatgttaacatataatacaaaaattttgagataggcatgtagggaaaactctcaaactgtgtctttcctctaccatcataccacaacaatcatcaacacagaagacttctgtgacctaatg

SEQ ID NO: 949067 - DNA, 611 bp, Homo sapiens
tcttaatctggaaagaataaggaaagacagccataaggtcacactgccattttgcacttttttttttttttttttttttgagacaaggtctctcttgcccaggytggagtgctgtgacacaatcatggcccactgcaaccttaaactcctgggctcaagagagcctctcacctcagcctcccaagtcgctaagattacatgtatacaccatcatgcctggctaatttttaatttttttctgtaaagagagggtcttactgtgttgctggggctagttttgaactcctggcctcaagtgatcctcctgcctggacctcccaaagtgctgggactacaggtgcgagccaccacacccagcccattttgcactttatgggatgtcatttcctgattgctcctgaaggacatgtgttcctaataatatggaacacccacttaatccttgcagccctgtgaggtaggccttgttattcctgtctcaggaaaccacagcccagagagggtgctgacctgcccatggttgcgtagcacaaatggcagatcttggatttacatatgcttggctccaagctgttcctaccactccatcaccctgcctttctgtctggctc

SEQ ID NO: 949068 - DNA, 773 bp, Homo sapiens
gaccctccagacctcatcctgggcatctatttatatgctggtcctgactcgtatcctttataataaaactrtaatcctaagtacagcactttgagtcattctagtgaattattgaaactgaaggagtcatgcaaaccccgaatttgtggccagttggtcagaagtgcaggtagctttgggacccccaaacttgagactgattctgcagtaaggggtgacttttttttttttttttttgacaggatctctgctctgttgcccaggctggagtgcagtgacaagatcatagtcactgcagcttccaactcctaggctcaggcaatccccctgctgcagcctcctgggctgctgagactacaggtgtgagccaccaaacccagctaattttttaatttttatttttgtagagatagggtctcgctatgttgcgcaggctggtcttgaacacctatgctcaagtgatcctcttacctcagcctcctgagtagctgggaccacagatatgtgccaccatgcttgggtaattaaaacaatttttttttcagagatggggtctcactatgttgccgaggctggtctcagacgcctgggctcaagcaatcctcctgctccagccttccaaagtgctgggattgcaggcatgagccactgcacccggccagtgagggctgtcttgacggggactgtgccctcggtctgtggcatctgtgctaacgccaggtgattagtgtgagacttgaacggcagtagtacaggtttctatcactggatga

SEQ ID NO: 949069 - DNA, 605 bp, Homo sapiens
acgtggatatccagttgtctcagcaccatttgttgaaaatattattctttcctctattgaattgttttggcaacgctgtcaaaaagcaatttactctaaatgcgagggtttatttctggattcttaattttatttcattgatctgtaggtctatccttatgccaataccatactgtcttgattacttgtagctttatagtaggttttgaaattgggaaatatgaaccctccaactttgatcttctttttcttttttttagagacaggtctcactctgtcacccagaacggagtgcagtgtcatgatcacggctcaccgaagcctcaaactcctgggctcaagtgaccctcctgcctcaccctccctagcagctagaactataggtgcatgcctcttcacctggataattttttaaacattttttagagatgggggtcttactatattgctgaggctagtctccaactcctgtccccaatcaatcctcgtacctcagcctccccaagtgcaagggttacagtgttcttttkgaaaattgttttggctattctggatccttggaatttccatgtgaattttagaatcagcttgtcaatttctacaaa

SEQ ID NO: 949070 - DNA, 617 bp, Homo sapiens
aggcatggtggctcaagcctgcaatcctagcactttgggagaccaaagcaggaggatcacctgaatcgcttgagttcaagagttcaaggttacagtgagctatgatagtgccactgcactgcagccygggtgaaagccagaccctgtaagtaaataagtaagttaagtaaggaaattaattaagccaaagaataaaagaaggggagtgcccagattctcaggaatctggtccagaaattactgttccatcctcttctccagggttcactgactttccagcagagttcttaaaaagggaagatgtgcaaagcctcctgcctgaatagccattaattgatggctatcataaatacatattgacagattgaaatgcctgatgtaggagatttggttactttaagtattttttgaagggtatactgtttaacttcccattgcaacaggggataacttatatgattatttcagcgatgattttttgaatatttttccattaaaagtacaactgtgtgaaacaaggcaaagacatttctcacacacaaagcagatgtcattagccactctgatacactatgctgctgattcataaaataggtaagagcagatcgttttcttca

SEQ ID NO: 949071 - DNA, 618 bp, Homo sapiens
gtcttgagtaagagcccaggactgcttgagtttaaatgttctgtctrtttaggggagaagagaaagagaagacaggagagaggaactccttgcttttcctaccttctgaatgaaatcaacttaccaatagttaggtctgctatcttgcttcaaacgacccccttctgacaccaggaacctctttaaaagaatactgtgatctttcagttataaaatcatagaggaactagtaaaaacgaatggagggtatgctagtgatctggggcaacatcacccttacattctgtaggctaaattccaacatactcggaataataatataaagtcctgaataatatcattgtattctacccagcaatatgttggacggaagaaggaaagggaaggagagagccagagagaaaaggaagaagagaggggaggattttgcgttgaactcttgatatggccaacatagagcctaccattgtggagattacaagatacaattttcccaccttttctctcgccggcctttcctagtgatacagctccagtgagtggaggaacaccagggctcttgtttcatgtcgaattgtataaaacgacatggacacacgtggagtggttttaaggagt

SEQ ID NO: 949072 - DNA, 482 bp, Homo sapiens
ccatttttatatgttcttttgagaaatgtctgtttatgttatttgcccacttttcgatagtattgtttgtttttttcttgctgagttgtttgagttccttgtagattctgaatacaagttctttgtcagatgcctagtttgcaaacattttctccctttccatgggttgtttgtttactctgataattatcttttactgtacaggagctttttaaatttaaccaggtttcatttatttattttcatttttgttccatttgcttttggagtcttagtcatgaattccttgcctcggccaatgtccagaagagtttttccaaggttatcttccagaattttttatggttttaggtcttaggtttaagtcttggatcatyttgagttaatttttgcttaagggatccagtttcattcttctacatgtggctagccagttttgctagcatcatttattaaatggggtgtccttccccagtttacat

SEQ ID NO: 949073 - DNA, 553 bp, Homo sapiens
tattgaatagggaaaaagtgaaagcctttcctctaagatctggaacaagacaataatgtcccctttcaccactgttattcaacacggtactgaaagtcctcactagagcatttggataagagaaagatatttaggccatgctgaatggaaaggaagaagtcaaatgatcctgtttgcagatgatatgaacttatattcgggaaaacctaactactccacctgaaaactattataactgataaacaattcagtaaagttgcagaacacaaagtcaacatacaaaaatcagtatcatttctatatgctaaaagaaaataatctgaaaaaaatcaagaaagtaatctcatttacaatagctacaaataaagttaaataaccttgcatttaacttaatcaaataagtgaacaatctctataataaaaactataatgatggaagaaatggaacaggacaaaaaaaaaaggaaagatattctatgtcratgggctagaagaatcaatattgctaaaatattcatactacccaaagcaggttacgagtcaagacaatccc

SEQ ID NO: 949074 - DNA, 553 bp, Homo sapiens
tattgaatagggaaaaagtgaaagcctttcctctaagatctggaacaagacaataatgtcccctttcaccactgttattcaacacggtactgaaagtcctcactagagcatttggataagagaaagatatttaggccatgctgaatggaaaggaagaagtcaaatgatcctgtttgcagatgatatgaacttatattcgggaaaacctaactactccacctgaaaactattataactgataaacaattcagtaaagttgcagaacacaaagtcaacatacaaaaatcagtatcatttctatatgctaaaagaaaataatctgaaaaaaatcaagaaagtaatctcatttacaatagctacaaataaagttaaataaccttgcatttaacttaatcaaataagtgaacaatctctataataaaaactataatgatggaagaaatggaacaggacaaaaaaaaaaggaaagatattctatgtcaatgggctagaagaatcaatattgctaaaatattcatactacycaaagcaggttacgagtcaagacaatccc

SEQ ID NO: 949075 - DNA, 598 bp, Homo sapiens
ttgtctgctctggctagaacttctagtattatgtggaatagaggtggtgaaagtgggyatccttgtcttgtaccacttatcagggggaatgctttcaatttttccccattcagtataatgttggatgtgagtttgtcatagatggcttttattaccctaaggtatgtcccttctatgctgattctgatgaggattttaatcataaagggatgctggatttttccacctgatttttctgcatttattgtgatgatcatgtgatttttgtttttaaatctgtttatgttgtatgtcacatttattgacttgtggatgttaaaccctctctgcatccatggtatgaaacccacttggtcattgtggattatctttttgataagctgttggattcagttagctagtattttgttgaagatttttgcatctatgcgcatcagagatattggcctgaaattttctgtttttgttacgtttttttctggtttcagtattagggtaatactggtttcatagaatgatttagggaggattccctgtttctctatcttttggaatcctgtcaataggaatggtatcaatttttctttgaatgtctaat

SEQ ID NO: 949076 - DNA, 580 bp, Homo sapiens
tgaaagacaaaagtattaaaataactataatttaaaatatgtttatggatacacaatataaatagatgtaaaytgtgacatcaaataacatagtgtggtgagagagaattaaaagtgtagagtttttgtatgtgattgaagttaagttgttattacctcaaaacagacttataattataattttttttttgagacggagtctctctctgtcacccagactcaggtgcagtggcacagatctcggctcactacaatctctgcctcctgggttcaagtgattctcctgcctcatcctcccaagtagctgggactacaggcgctcgccaccacgcccggctaattttttgtatttttagtagagacagggtttcaccgtgttagccaggatggtctcgatctcctgacctcgtgatctgcctgcctcggcctcccaaagtgctgggattacaggtgtgagccactgcgcctggccaattataaaatattttatgtaagcctcatggtaaccacaatggaaatacctatagcagtttacacaaaagagaaaggaatcaaagcatatcggaaaaaaaaagaagaa

SEQ ID NO: 949077 - DNA, 616 bp, Homo sapiens
aagcccccactatacaaagtagatatattaaatgttaatcactttagctctaattaaatatttagtccttcaaagacctagaaaaagtgaaaaaggttgaagttgatacrtatttttttttctaaaaggcctaaaagatctactagaaacaactattttaaatcacatctctccccaaatggttaaaaatcgaactattaatccagtagtttacctttggtaccttctaggtgtaagaccgtttgggctgggcgcggtggctcacgcctgtaatcccagcactctgggaggccaaggcaggtggatcacaaggtcaggagatcgggaccaccatggctaacacggtgaaaccccgtctctactaaaaatataaaaaattagccaggcgtggtggcaggcgcctgtagtcccagctactcgggaggctgaggcaggagaatggcgtgaacctgggaggcagagcttgcagtgagccaagattgcgccactgtactccagcctgggagacagagcgagactccgtctcaaaaaaaaaaaaaaaaaaaggccgttttaaaaaacatcatcatcataaccacgatcaacattattgccatcatcattgctaatatttatt

SEQ ID NO: 949078 - DNA, 440 bp, Homo sapiens
gaattcatgtaataaaaatgtcattttaactttatcagttttgcaaaatatgacataatgagtcgaatayagtaattaaaacatttccaaaatataggttaaacccattcctatggaaccccaaggaaaataacttcgggtacacccaaggttttccaaaacactacttttactgtgaaaagtttaatgcatttacattaattcgtttaatgagactaactacatatttactaaggtacattgatagaattaaacaggctttggaaatgcatttgttattatctggctacttttgttagttcctcagatgctaatcaaactttctgcaggtattttcaattactatttaattattttacagtgtacttgctgtgtgcctctcatttaatcagcagccattgatttcatctgtccaaacacttcagatgagtttttttggc

SEQ ID NO: 949079 - DNA, 596 bp, Homo sapiens
tctaggttatgataaggggttgtagacaccaaggttttatcatgcagatgaagcctccaggtarcaggcttcagagagaattggttgtaaatgtttcctatcagacttacggctccggttgatgttaatgctagtcaggttttcctaaattccgaaagggaggagggtatacagaggcatgtttgagccccccttcccatcatggcctcaactagtttttcaggttaactttggaatgcccttggccaagaggagaggtctgttcagatgagttgggggatgtgtaggggtcttacaattttgtttctggtttacaataataactcagaatttagagcaaaatttatatgtgttcatttctatattttctcattaatgtaatcatgtattaggtatttatcaagtttatgtatgaaatcacactgttgtttgatgaatacaagtttagataagaaattttgtgtatccttaataaatcaagctgttacagtaaataggcagatatggtcaggacaggagaggtcccccacaaccaggaatgtcaggtgatgatcaggtaataggtggtttttgagctgtctctttaaaataataat

SEQ ID NO: 949080 - DNA, 548 bp, Homo sapiens
cggtgctgtgtcttcatgccagagcaggggccaggtgtgggcagctcagtgacaccctcccgagggctgggcgatcgtgtgcactctcaagcctctactggaaggcttggccctctcaggggccccctgcccctgtgcattcagccactggggttcgtgccctcagcttcccgccaggccctggccgtagcggtcaggaagagctgagcagtttttttgggagaattgagggagcgtcgccaggatgcactgagggtcggaggtggagccggcgcggctcagtgcaggcagtgccaggctggatgctggaaagccagcagcacctctcccggtggctcctgggaagttccacgtccttgcctggtcacagaggcccgggaatcagtgacatgagatagaagcttccagaacaggaggcagagcctttccgcagtttccctgcccacagcacacaccctgtgccctccgycccctggttcttggacactggggacatctggatgcggctagagcctgtgggggtggccgcagccctgggggactgttcc

SEQ ID NO: 949081 - DNA, 485 bp, Homo sapiens
aaaagcaggcagaagaacgtggaaaaactgacttcctaagtcttctggcctccatctttctcccatgctggatgcgtcttgccctygaacatcagactccaagttctccagcttttggactcttggacttacaccagtgatttgacagggccttttggacctttggccatgacctgaaggctgtactttcagcttccctatttttgaagttttgggactcggactggcttcctttctcctcagcttgcagatggcctattgtgggacttcaccttgtgaatgtgtgagtcaattctcctaataaactccccttcgtgtatatatctatcccattagttctattcctctagagaaccttgactaatataacctcaaatctgaagactatacattctttttattatctcgaggaacactctccaagataagacatatgttaggacataaaacaagcatcaacaaattttcaaaaataatgatatcaa

SEQ ID NO: 949082 - DNA, 580 bp, Homo sapiens
ggaaaaatagttttgtgggcagggcccagggccctgctcttctgtacaccctcgagacatgggaccctgcatcccagccactctagctctggccatggctaaatggggccaaggtacagcttgggatgttgctacagagggtgcaagccccaagcattggtggcttccaagtggttttgggtgtgcaggtgctcaggaagcaagagttgagttttgggaacttctgcctatacttcagaggatgtgtggaaacacctagatgtccaggcagaagtctgctgcaggggaagaactctcatagagaatctctactcaggcagtgcagaggggaaatgtggggttggagcccccacacagagtccctactgggacactgcctagtggaactttaaaaagagggccaccatccgcccgacctcaagatgttaaatccaccaacagcttgcaccatgcacttggaagagctgcaggcactaaatgccagsctgtgaaagcagtcttgggggctgtaccctgcaaagccacaggagcagagctgcccaatgtcgggggagcttgcctcttgcagcacatgccctgg

SEQ ID NO: 949083 - DNA, 613 bp, Homo sapiens
tgattgatggcgcttttgagttctactatgtctttaataatattctgcatgctgtatctatccatttcagaggaaggagtgtagaagtctcctactgtaatagtgaagtcaactatttctccttggtgttttatcattttttgctctacatattttaaccttatcttgtcactgatatactcattagtaatttctatgtcttctttgagaattattccctttaatcattattatgtatatctctatccttgataattgtctttgttctgaagtttgctctgttgcaaattaatatagcaattttccctttattttgattagtgttagtagagtatttatttatctatccatttacttttaataaatatgtatccttatgtattgttgttgcacttattatttttaaccaattcttatttgttaggtcatttaataaaaatcataaaagttcattttaatttaaccttcattgttgcgggaagtcagggaccccraatggagggaccggctgaagccatggcagaagaacataaattgtgaagatttcatgggcatttattagttccccaaatttatacttttataatttcttacgcctgtctttactgcaatc

SEQ ID NO: 949084 - DNA, 588 bp, Homo sapiens
accagacgtacaaagtgctggcagaatttctgctttctgcttaaactattcaaaaaaattgagaagagggactcctttctaacttatcctatgaggccagcatcatcctgatactaaaacctagcagagacacaacaacaataaaaaagaaaacttcaggctaatatccttgaagaacattgatgcaacaaaatactggcgaaccagatccaatagcacatcaaaaagcttatccaacatgatcaactgggcttcatcactaggatgcaaggttggtacaatgcacacaaatcaataaatgtgattcatcacataaacagaacttaagacaagaaaacacgtaattatctcaatagatgtagagaggctttcaataaaattcaacaccccttcatgctaaaatctctcaataaactaggtattgaaggaacatgcctcaaaataagagctgtctctmgcaaacccacagccagcatcatactgaatgggcaaaagctggaagcattccccttgcaaactggcataagataaggatgccctctctcaccacttctattcaatatattatttgaagtcttgtctagggaa

SEQ ID NO: 949085 - DNA, 571 bp, Homo sapiens
ccagtgtttgaagcaatggatgtcttatcttgatatgtttgggggtggattcttcttgttctttttttttttttttyttcttcaaccagggtcttgctctgttgcccagagtacaggggcgcaatcatggatcactgcagccttgacctccctgggctcaagcaatcctctcctgaaccacccccctgccccccactgctgggactacaggcatgcgccaccattcctggctaatatttttattttttgtagagacgaagtctcaccatattgcctacactggtcttggactcctgggctcaagtaatcctcctgcctcagcctcccaaagtgctgggattacagtgtgccactgcacctggcctggatggattcttaatgtcttcaaataaagatttcaagtactccatagcaaataaatccatgctcatttaggttcattaaaaaaaatcagaacagtatataacaattcttatatagcttttgcaaaaatgcaactcatcacctgcccctgccccccactgccatctctcatctccctaacccactgccatctctaatctccctaatc

SEQ ID NO: 949086 - DNA, 790 bp, Homo sapiens
cattttctgaaggtttcgaggagatattggatatgcaaatcaaatgtcctaaacacagcagaaaagatgactctttgggaaaggagattcaaaattctctttttttttctgtttgagacggagtctcgctctgctgcccaggcgggaatgcagtggtgtgatctcggttcactgtaagctccgcctcccaggttcccgccattctcctgcctcagcctcccaagtagctgggactacaggcgcccgccaccacgcctggctaatttttttgtatttttagtagagacagggtttcaccgtgttagccaggatggtctcgatctcctgacctcgtgatccacctgcctcggcctcccaaagtgctgggattacaggcataagccaccgcgcccggccccaaaattctttcataaagaatgagacaaaccagccaagcacgttaaagtcattgagctttcgggggaaaaatcagatttttccggtgactcggggtaaatgtggggacttagaaagctccccctagaaggcaaaagtagaagctgaaagtgtccccactcttgactgtcctgccttgtcagaaccctgcaatctgtgacaccgcacaggagccagtgggttttgatgactggtgtgttgctctctgctggaatacatctgtggrgtcaagaagcgggaggaggaaatgcctgtctcaaccactaactaatttgcctttattatcttttcctgaacatcagatcaattgtggaagaacataaaatgcaaaacatgaacttgcagaaaacaagag

SEQ ID NO: 949087 - DNA, 659 bp, Homo sapiens
tccatcgtatatgtataccacagtttttatccactccttgattgatgggcatttgggttggttccacatttttgcaattacaaattgtgctgctataaacatgtgtgtgcaagtatttttttcgwgtaatgacttcttttcctctgggtagataccaagtagtgggattgctgcatcaaatggtagttctacttttagttctttaaggaatctccacactgttttccaaagttgttctactagtttttattcccaccagcagtgtataagtgttctctgttcactgcatctataccaacatctattattttttgattttttgattatggccattctagcaggagtaaggtggtatcgaattgtggttttgatttacatttccctgatcattagcgatgtggagcattttttcttatgtttgttggccatttgtatattttcttttgagaattgtactactttttgatgggattgttcttttcttgttggtgtttgaggtcattgtagattctggatattagtcctttgtcaggtgtgtagattgtgaagattttttcctattctgtgggttgtctgtttactctcctgactgttccttttgccatgcaaaagctttttagtttaattaagtaccagctatttatctttgtttttactgc

SEQ ID NO: 949088 - DNA, 553 bp, Homo sapiens
cttttaaaaaccatcagatctcatgagacttattcactatcacaacaacagcacaggaaatacctgcccccatgattcaatcacctcccactgggtccctcccacaacacatgggaattcaagatgatatttgggtggggacacatatcattccacccctgacccctctcaaatcttatggcctcacatttcaaaagcactcatgcctcatttcagcattaactcaaaagtccacagtccaaaggctcatccaagataaggcaagtactttctgcctgtaagcctgtaaaatcaaaagcaagttagttgcttcctagatacaatgtgggcacaggcattgggtaaatacaaccattccaaatgggagaaattgattggccaaaacaaaggggctacaggccccatgcaagtccaaaatccagtggggcagtcaaacattaaagctccaaaatggtctcctttgacaccrtgtctcacatccaggtcacattgatgcaaaaggtgggctcccacagtcttgggcagctctacccctgtagctttgcagggtata

SEQ ID NO: 949089 - DNA, 612 bp, Homo sapiens
tagccaactatgataatttgctacttctttcccaatttggatgccttttgtttttttcccttgcctcattgttctggctaggacttgcagtacyatattgagtaagagtggtgaaagtgggtatccttatcttgttccaattcttagagggaatcttttcaacttttccccaattcagtattatgttggctgtggatttgtcatacatgacctttattatgttgagggatgttccttctctatctagtttgttgaggatttttgtcatgaatggaagatgaattttatcaaatgctttttcttcatctgttgggatgatcatctggtttttgtccttaattctgtttatgtgatgtataacacttactgatttgcgtatgttgaactattcttgcgtccctgagataaatctcacttgatcatggtgtatgatctttttgacatgctgttggattcaatttgctagtattttgttaataattttgcatcgatgtcatcagagatactagtctgtagtttttgtttttgtgttctttgtctggttttgatatcagggtgataccttgtagaatgagttagggagaattccctcctcagtagttttggaatagt

SEQ ID NO: 949090 - DNA, 602 bp, Homo sapiens
tcctcatttctggacaaacagaagtcaacaggatcaccatacttgttgctttggtgtggttgatataccattgagggatggggaaacagacagtaaatatcaagcacataccacttacgtgaattccttaagagaggtgagtgctgtggaacatgagccaaggtgtggtggtagacaatggcaagtgatgaggtcacagatgtaggaggcagcttcctgagggcaactaaacatctgagctgaagccaaatgatgagagggggccatccaattgcagacctcagaaaggagcagctcggggagagggaagagctggtaggactgtgatgatgatgacaatgagagggaggaagcctgtttatgagcacatacacaaattcatccattcatctatctgtcaatccaatcattccttgaatgagctcataccaatcctgtaactctcgtcctctgtcccaggctttctgactcagacccgtttcttgctcttaaaaactttgtaacctcatgaagaaaccacagccaggtaaatattctyctattttgttccattttgctcttctgtggtcattggtctgatttttggccttaagtgacactct

SEQ ID NO: 949091 - DNA, 657 bp, Homo sapiens
tgcttccttcctcactttgtttgttttttgagatggagtctcacactgttgcccaggctggagtgcaatggcgcgatctcggctcactgcaacctccgcctcccgggttcaagagattctcctgcctcagctcctgagtagctgagactacaggcgtgtgccaccatgcctggctaatttttgtatttttagtagagatggggttttgccatgttggccaggttggtctcgaactcctgaccttaggtgatccgcccaccttggcctcctacagtgctggggttacaggcgtgagccactgcaccctgcatttcttccttactttgtgataaactttgctcgtgtgtgtgtgtgtgtgtgtgtgtgtgtgtgagagagagagagagagagagaaagatggagacagagacagagggaaggagggagagattagagattatgatggttaattttctgtatcaacttggctgggccatggtgtccaggtatgcagtcaaacacaattctggatatttctgtgagggtgttttggatgaaattaccattttaatctgtgcaccgtgagtaaagcaggttgccytccctagtaccggtgggcctcatctgatctgtcaaaggcctgaaaagaacaaaagactgacttcctccaacaagatg

SEQ ID NO: 949092 - DNA, 729 bp, Homo sapiens
gaataactggctagtaattggagccatggaattcaaagtgaagttgtaactgattgcacctgggagagaaggccaatgagttttcttcttatgagaaaaatattggtttaacaacttgattctttgtaattatggcccacaaggcaaaggagaataattaatgtatgttatgttggctgtcttttgaaaaaatacttattgctaactacaactggaaatatgcagtgttctgtacattcctaatagcaaccatcacagacatcttgtcaattttgaatatatacgtaaacgctaaaataagaacctcaaatttagatgaataaataaactcagagaaaaattctagtaacataatttagtaaaatgtgcataacaaacataagcatagagaacagcttatgcaatagtttttttggaataaacagtctgatgagactaacagtatttcgaaaatgcccctgcacattttagtaatttaaaaaatatataatcatacctaagaatttaatcttatgttttaaaatattgatgtccattttttattaatttaatgtaaatgtttgaatgttgtctctatacctggtaagtgttcttgaataatggttgctccattaagcttattttacttgttcaagtataggagaattgctgtgttacgccaaatgattctggaatrttgaaaattattgggttgtttcttaaaccaaagtataggcttgtaggagacaa

SEQ ID NO: 949093 - DNA, 514 bp, Homo sapiens
ttggatagtggatgcgggacagtgggtgcagtacacwgagcatgagctgaagcagggtgaggcatcgccttacctgggaagtgcaatgggtcagggaattcccttttctagtagaagaaaggggtgacagacggcccctggaaaatcgggtcactcccacactaatactgcatttttccaacagtctttgcaaatagcacaacaggagataatatcccgtgcctggcttagagggtcctatgcccatggagcgttgctcattcctagcacagcagtctgagatcaatctgcaaggcggcagtgaggatggggcaggggtgcccaccattgccgaggcttgagtaggtaaaccaagtggccaggaaggttgaactgggtggagcccactgcagcttaaggagacctgcctgcctctgtagactccacctctggggtcagggcacagacaaacaaaaggcagcagcatcctctgcagacttaaatatccctgtctgacagctttgaagagagtagc

SEQ ID NO: 949094 - DNA, 545 bp, Homo sapiens
agggcaccacgtccctaggctgcatactgcacagggaccctggacccagcccacaaaaccattttttcctcctaggcctccaggcttgtgatgggaggggctgccatgaaracctctaacatgccctggagacattttccccattgtcttggggattaatattcggctcctccttatgcaaatttctgcagccagattgaatttctcacagaaaatgggattttcttttctattgcatagacaggctgcaattttccaaacttctatgctgttttccttttaaaactgaatccttttaacagtatccaagccaccttttgaatgctttgctgcttaaaagtgtcttctgccagataccctaaatcatctctctcaagttcaaagttccacaaatctctagagcaggtacaaatgccaccagtctcttagctaaaacataacaagcatcacctttgctccagttcccaacaagtttctcatctccatctgagaccacctcagcctgaatttcattgtctgtatcattatcagcattttggcaaagc

SEQ ID NO: 949095 - DNA, 828 bp, Homo sapiens
tccagaccctatttgcctgagtatcaccaggggagcctgcagaacagcaaagattgctgcctgctccttcctctggaagcttcatcccagaagggcaccggctttatgccagccagagctctcctatatgaggtgtctgtcaacccctgttgagaggtgtcgcccagtcagcaggcacagggttcagggacccacttgaggaggcagtctgttccttagcagagcttgagcgctgtgctggtagaatcctccttgtcagggtccactgctctcttcagagctggcaggcaggaacatttaagtccactgaagctatgcccacatccgccccttccctcaggtgccctgtccccgtgagatggagttttatctataattttatttataatcccctgactggggctgtcgactttctttcagagatgccctgcccaatgaagaggaatctagagaggcagtctggccacagccgctttgccacactgtgtttagttctgcccagtccaaacttccaggcctttttagtgcagtcaggggagaactgcctactcaagcctcagtaatggcagacgtctctctccccatcaagcttgatcatctcaggttgacttcttactgctgtgctggcagcaagaatttcaagccagtggttctcagcttgctgggctctatgggggtgggacctattgagcaagacaacttggttctctggcttctgcccgctttccaggtgagtgaacagttctgtctccctggagttccaggtgccactkgggtatgaaaaaaatactcctgcagctagctcagtgtctgcctgaacagctgccc

SEQ ID NO: 949096 - DNA, 602 bp, Homo sapiens
gcctgtagtcccagctacttggsaagctgaagcaggagaatcgcttgaacctggggggcagaggttgcagcaagccaagatcgtggcactgcactccagcctggacaacagagtgagacttcatcagaaaaaaaaaaaaaaaaggattacaataaatacaattaaatttattttagatagcatcttctttccacagtcaaggaaattaaagaaaacatatgaaatgaatgtcagatgaaagatagctgacacatcagaaatgtaatataagaaaacaaataatgccgtggtgggattaaaactgtactagaaaccataaagaacaaagtccacactggaaaatgttgacggttatattactgacaggttttataataaaaaatgagaattaaattgatatctgagaaaagatcatagatatggaggacataccacagaaacctaacatatgaatcattgtatctgaagaagatgataaatggggcaatagcaatattcagaaatatactttaaaggaaattttcttccaaataaatacctgaatctttaagatggaagggttaaacagatacaaaacaactattgaaatatatatattggaa

SEQ ID NO: 949097 - DNA, 704 bp, Homo sapiens
aagatcctctgaggctcaggcagggagtgaatgagccatggcctcccctggatatctgggaggaaggagcaggagttgagaggggagagagttcagaggtattaggtctctgaggcactgggcctctgccctttacttcaggaaggtcccagaacagtaactgcatctgggctgcagctactgtcctgtccttgggccctgccctgctctaccctgtggtctgcagctactgacctgtcctggggccctgccctgccctgccctgtggtctgcagtgctgacctgtcctggggccctgccctgccctgccctgtggtctgcagtgctgacctgtcctggggtcctgccctgccctgccctgtggtctgcagtgctgacctgtcctggggccctgccctgccctgccctgccctgtggtctgcagtgctgacctgtcctggggtcctgccctgccctgccctgtggtctgcaatgctgacctgtcctggggtcctgccctgccctgccatgtggtctgcagtgctgacctgtcctggggtcctgccctgccctgccatgtggtctgcagctaatgacctgtcctggggccctaccctgccctgcccaaccctgtggtctgcagtgctgacctttcctggggtcctgccctctcctgccctgtggkctgcagctactgtcctgtcctggggccctgccctgccctg

SEQ ID NO: 949098 - DNA, 555 bp, Homo sapiens
ttcagcattactccaatggtgtcaatgtagctgtgccccttaaagaaaatgtccatagtttctgaaacttgctaaaatattcttaagaagatatcttaatggattagcagcttgtagagtgtgtgtttccttgtctgttagatatccaaagagtcgtaacctaaaaagtcaccatacttcagctaaaatcatgatctctctttaatacattttttattctccacaacttcaactaacatgccactctccaagcgatactcctagaaataacttcagtctccctaattactttcaccctctccatccagataatcaacaaatcatgccaactttttcctggaagttcctcaatccatcttttcttttccatgcttgcacagctacaaccccggtttagactcatcatttctcacacatattactgaaaattcttactctctcatctccacccttgctccactccaatacatttttatcttactatgtctctataaaatatatgaatctagcttacttaaattaagaagaaaamcttttatttaagaaataaaaaac

SEQ ID NO: 949099 - DNA, 534 bp, Homo sapiens
cagagactggtgccagcgcacagcgcgggtcttccgtatgctgagygccggtcccctgggcccacttttctttctctatactttgtctctgtgtctctttcttttctcagtctctcgtcccacccaacgagaaagacccacaggtgtggaggggcaggccaccaccccttcatcttcattttacatttcttttagcatgctttgtaattggcctttagtgtaagattttaggctaatctggctaggggttgggctgtgtttaatgttttctgtacttgtacataccagaggtcacaaacccctctatatatattgcttgtctcccctgtgtgttttttttttttttttttttttggtttccctaagaactcctcctcagagagagtctgtgtcttgtgcctctttcagctataattctttgttatactgtgttctgttggtgtgttggtgtgttggtaaggtgttggggagggggaaggaacattctataattttacaattaaatctcagtctttacatgggcctgtgtcactc

SEQ ID NO: 949100 - DNA, 534 bp, Homo sapiens
cagagactggtgccagcgcacagcgcgggtcttccgtatgctgagtgccggtcccctgggcccacttttctttctctatactttgtctctgtgtctctttcttttctcagtctctcgtcccacccaacgagaaagacccacaggtgtggaggggcaggccaccaccccttcatcttcattttacatttcttttagcatgctttgtaattggcctttagtgtaagattttaggctaatctggctaggggttgggctgtgtttaatgttttctgtacttgtacataccagaggtcacaaacccctctatatatattgcttgtctcccctgtgtgttttttttttttttttttttttggtttccctaagaactcctcctcagagagagtctgtgtcttgtgcctctttcagctataattctttgttatactgtgttctgttggtgtgttggtgtgttggtaaggtgttggggagggggaaggamcattctataattttacaattaaatctcagtctttacatgggcctgtgtcactc

SEQ ID NO: 949101 - DNA, 588 bp, Homo sapiens
tttcagtgtaaaagctgacatgggctacgagacagacacagttaggtaaaggatcagtgcagagtgacrgtaactgttgatgacagtgataataactaggatgataagaatactaatggtaatagtaacaacagctaactctttttttttttttttttttttttgagacggagtctctctctgtcacccaggctagaatgcagtggcgcgatctcggctcactgcaagctccgcctcccgggttcacgccattctcctgcctcagcctcctgagtagctaggactacaggcgcccgccaccatgcccgcctaattttttgtatttttactggagacagggtttcactgtgttagtcaggatagtctacgatttcctgacctcgtgatccgcccacctcggcctcccaaagttctgggattacaggcgtgagccaccgcacccggccagcaacagctaactcttgagaggttaatacgttccacgctttgggctaagcaaattacatccattactttatgtaaacctcacaaagtctcactgaagtaataataaaaataattactaatgcatatttactttgtgttgaa

SEQ ID NO: 949102 - DNA, 701 bp, Homo sapiens
atattaagtgaattaacacaagaaccaaaaaccaattaccacatgttcttatggataagtgggagctaaccagtgggacatgaacacaaagatggcaataatacacactggggattactggaaagggragggaggaagcggagcaagggtttaaaacctaactgttgcatattatgcttattacctcagtgacaggatcatttgcatcccaaacctcagcatcacacaatatccccaggggatacatgtgcccccgaatctaaaatgaaagttgaaagaaaaatgaaaatgaaagtcacgtatacccaacagaaatgaacatctgtgttcaccaaaatgtgtgctctgaaatgttcataattgcaccattttaaactggaaacaacccaaattctatcaacagaaaatggataaacgacacaacgactatcacgaccataatgatgagcaaaagaactcacatgcacaatgtatgggttttacccatctaagtatcaaaagtatgatttcactcatctaaacatcaaaacagggacaatgacttgatggacctcagaggagcatttatcctcagaggatgctatgactgtgagggacatgagcagtggctctggggtattggtaattttctggtttttattctggtcgctcactatatggtatattcagtttgtgaaaattcattgatttgcacccttatg

SEQ ID NO: 949103 - DNA, 633 bp, Homo sapiens
accatttatttctttctcttgtctgattgctctggctaggacttccagtactatgttgaagaggagtggtgaaagtgggcctccttgtcttgttccagttctcagagagtatgcttttaacttttcccctttcagtattatgttggctgcgggtttgtcatagatggtttttatcacactatggtatgtcccttgtaggccaattttgctgagagttttaatcagaaagggacactgaattctgttgaatgcttttttttgcatctattgagattatcatgtgatttttgtttttaattctgtttatacagtgtttcacatttattgacttgcatatgttaaaccatccctgcatcccttgtatgaaacccacttgatcatggtggatttttttttgatatgttggattttgttagtattttgttaaggattttagcatctatgttcatcaaggatattggtctgtagttttgttttttgattatgtccttccctggttttggtrttagggtggtgctggcttcatagaaggaattagggagggttccttctttctctgtcttatggaatagcatcattatataatgtccctctttgtctcttaactgctattgctttaagtttgttttgtct

SEQ ID NO: 949104 - DNA, 564 bp, Homo sapiens
cagaaagcacaaggggtaagggaattccctttcctagtcaaagaaaggggtgacagatggcacctggaaaatcgggtcactcccaccctaatactgcrcttttctaacaggcttaacaaatggcacagcaggatattatatcccacacctggcttggagggtcttatgcccacagagcctcgctcattgctagcacagcagtctgagatcagactgcaaggcagcagtgagaatgggggaggggcgcctgccattgcggaggcttgagtaggtaaacaaagtggccaggaacctggaactgggtggaacccaccacagctcaaggaggcctgcctgcctctgtatgctccacctctgggggcagggcacagataaacaaaaggcagcagtaacctctgcagacttaaatgtccctgtctgacagctttgaagagagtagtgtttctcccagcacacagcttgagatctgagaatgggcagactgcctcctcaagtgggtccctgatccccaagtagcctaactgggaggcaccccccaagtaggggcagactgacacttcacat

SEQ ID NO: 949105 - DNA, 564 bp, Homo sapiens
cagaaagcacaaggggtaagggaattccctttcctagtcaaagaaaggggtgacagatggcacctggaaaatcgggtcactcccaccctaatactgcacttttctaacrggcttaacaaatggcacagcaggatattatatcccacacctggcttggagggtcttatgcccacagagcctcgctcattgctagcacagcagtctgagatcagactgcaaggcagcagtgagaatgggggaggggcgcctgccattgcggaggcttgagtaggtaaacaaagtggccaggaacctggaactgggtggaacccaccacagctcaaggaggcctgcctgcctctgtatgctccacctctgggggcagggcacagataaacaaaaggcagcagtaacctctgcagacttaaatgtccctgtctgacagctttgaagagagtagtgtttctcccagcacacagcttgagatctgagaatgggcagactgcctcctcaagtgggtccctgatccccaagtagcctaactgggaggcaccccccaagtaggggcagactgacacttcacat

SEQ ID NO: 949106 - DNA, 564 bp, Homo sapiens
cagaaagcacaaggggtaagggaattccctttcctagtcaaagaaaggggtgacagatggcacctggaaaatcgggtcactcccaccctaatactgcacttttctaacaggcttaacaaayggcacagcaggatattatatcccacacctggcttggagggtcttatgcccacagagcctcgctcattgctagcacagcagtctgagatcagactgcaaggcagcagtgagaatgggggaggggcgcctgccattgcggaggcttgagtaggtaaacaaagtggccaggaacctggaactgggtggaacccaccacagctcaaggaggcctgcctgcctctgtatgctccacctctgggggcagggcacagataaacaaaaggcagcagtaacctctgcagacttaaatgtccctgtctgacagctttgaagagagtagtgtttctcccagcacacagcttgagatctgagaatgggcagactgcctcctcaagtgggtccctgatccccaagtagcctaactgggaggcaccccccaagtaggggcagactgacacttcacat

SEQ ID NO: 949107 - DNA, 758 bp, Homo sapiens
gaaacttcctcaaaaaattaaaaatagaactatgatttgatccagcaaccccacttctggatatatatccaaaagaattaaaatcaagatctcaaagagatgttagcattcccatgtttactgstgcattattcgcgatagccaagatatggaaacaacctaagtgtcctttgatcagtgaataaaggaaatgtggtatatacagtagaatactcttcagccttaaaaagaaagaaatcctgctatttgtgacaacatggataaaccttgaggacatcaggctaagtgaaataagccacgcatagaaagacaaatactgaataatctcattgataggtggaatctaaaaaagttgaatccagaagcggagagtagaacagtcgttgccaggggctaaaggttgggggaaaagcaggaatgttggtccaaaagtacaaactttcaattataagatgaataagatctggggatctaatgtgcagcatggtgactatagttcgtaagactctaccgcacacttgaaatttgctaagagagtagaccttatttttttctcaccacaaaaaacctaatcatatgaggtgatgaatgtgttaatgatgtggtcatcattttacaaggtatacgtataccaaataatcacattgtactccctaaatatgtgacgtttttgtcaattatacatcaataaagctggggtgggggtggggaagaaaagaagcaggcagagaaaactcagcttatgaaacagcatatag

SEQ ID NO: 949108 - DNA, 703 bp, Homo sapiens
atgggagtaatagttggaatggccatggcaatttcttaaaataagtcaacaataaagtttgctgcattgatagactcttcctttcacaaaacgcttctctgtagcttgcagtgctgtttgacagcattttccccagagtagcatatctttcagaattacagtcaattctcccactcctttgtcaactaaatttttgtaatattcaaagttctttgttgtcattttaacaatgtgcacagtatcttcatcaggagtagatgccatctgaaagaaccattttatttgtttatccacaagaaacaactcctcgctgggcacagtggctcactcttgtaatcccagcactttgggaggccgaggcgggcggatcacctgaggtcaggagttcaagaccagcctgagcaacatggagaaaccccatctctactaaaaatacaaaaattagtcaggtgtggaggcgcatgcctgtaatcccagctactcgggaggctgaggcaggagaattgcttgaacccgggaggtggagtttgcagtgagccgagatcgagccattgcactccagcctgggcaacaagagtgaaactctgtctcaaaawagaaaagaaaaaacaactcctcatccattcaggttttatcatgagattgcagccattcagccacatctttaagccccacttctaattctagttgtggggatattttc

SEQ ID NO: 949109 - DNA, 590 bp, Homo sapiens
aagtttcaacacaaagtaaatatgcattagtaattatttttattattacttcagtgagactttgtgaggtttacataaagtaatggatgtaatttgcttagcccaaagcgtggaacgtattaacctctcaagagttagctgttgctggccgggtgcggtggctcacgcctgtaatcccagaactttgggaggccgaggtgggcggatcacgaggtcaggaaatcgtagactatcctgactaacacagtgaaaccctgtctccagtaaaaatacaaaaaattaggcgggcatggtggcgggcgcctgtagtcctagctactcaggaggctgaggcaggagaatggcgtgaacccgggaggcggagcttgcagtgagccgagatcgcgccactgcattctagcctgggtgacagagagagactccgtctcaaaaaaaaaaaaaaaaaaaaaaagagttagctgttgttactattaccattagtattcttatcatcctagttattatcactgtcatcaacagttacygtcactctgcactgatcctttacctaactgtgtctgtctcgtagcccatgtcagcttttacactga

SEQ ID NO: 949110 - DNA, 568 bp, Homo sapiens
  misc_feature 188: n = A,T,C or G
tgtttgggtaattagaccacctattcaaagaacctcaattttgctagtttagaaaattaaaatatgactattcctttttttataaattaaactctatcttataaaagtaagaaaacatttaagagtatctcagtacaacctgtggcaaagatgtatcagctatgcgctttatgtcttgtcagccttcntacaactccacacaccccctaaggacaaattagtgaaagaatattttgagagtggaagctatgatatcatcacagtaccgttgaatcacatctcactgatgtaaaaacacttgccagggttggctaattgaaaagtagatgatgactaacagtctatttgggaggcgtcccctagttagtacagacattgtattgccccacatgttgagaagccttgaacactactgtgacagtttacccacatayagaagaaattgcttcaaatattttatcaaaggctggcaaattttagattcaggtaatttttgttttgttttgttttgagacagagtctcgttctgtcacccaggctgcagtgcagtggtgcgatcttcggtcac

SEQ ID NO: 949111 - DNA, 549 bp, Homo sapiens
caatatgattaacctgcccccacctgaacactttagtcagtggtggctctgcatttctctgaggaggaaaccccagagacaacccagagcatgtatgacattgcagttgcagcagtactgccctgactgtcctcgggctggggaaggaacaaagggcctggttgctatgctgaaacctccagcaagctgcagctatcatatggagaggagcccagtctctttccagcgagctcccacaccccactcttcaccaggcaggggtcttgcctcaagatcactgaagagctcctccacccgcaactgagaattcccattgctaatggctttgtgtttccctggggaggtgatcccagaggcaaccaacagcctctctgtacctgatgccctcagtctggggaagaaataaagaacctgagggttttactcatacttctagcacaccacagttattatatagagagaagctcaggctctcctctctgtgagccctcaawcccccactcttcacccagtcgggccccaagcttgggccagcagttgcagtcaccc

SEQ ID NO: 949112 - DNA, 549 bp, Homo sapiens
caatatgattaacctgcccccacctgaacactttagtcagtggtggctctgcatttctctgaggaggaaaccccagagacaacccagagcatgtatgacattgcagttgcagcagtactgccctgactgtcctcgggctggggaaggaacaaagggcctggttgctatgctgaaacctccagcaagctgcagctatcatatggagaggagcccagtctctttccagcgagctcccacaccccactcttcaccaggcaggggtcttgcctcaagatcactgaagagctcctccacccgcaactgagaattcccattgctaatggctttgtgtttccctggggaggtgatcccagaggcaaccaacagcctctctgtacctgatgccctcagtctggggaagaaataaagaacctgagggttttactcatacttctagcacaccacagttattatatagagagaagctcaggctctcctctctgtgagccctcaaacccccactcttcacccagtckggccccaagcttgggccagcagttgcagtcaccc

SEQ ID NO: 949113 - DNA, 608 bp, Homo sapiens
ccagtcagtttccccccatgagccacctggcctctctgctcatcaatatgcagggccccctggcttgagtccacaatgcagccaccccaccccaggctgatagccccaactgggagtggctctgccattttctgatatggaaacctgagagacaagtgaaaggccctcttccacatgtccctacccatggcaaggtcccttctcctgctgcctcccagctagaaaggaacataaagcctgagctcacccagggctgcagtgtgcagccaagaagtgccaagccaagagctatagccaggacttgagtgggagaggattccacactcttagagcacagagagggagcatatcgcagtcatgaggaaatacaaagcagtgaagtgactaagcaagagcctacctactggtcattatgcttaagcaccacctacttgatcacaacccaaacttcaacaacaaaaatactttgctaatataggccaccttctgcccacactgtgaaaccaaggacaagaactcagccacaaataaagttcctgcacaaagcctcaaccctccraaaacatcctgaaaagaagtcaactgactgtactcaaactaaagcacat

SEQ ID NO: 949114 - DNA, 641 bp, Homo sapiens
gatgccaatgttcaaaatcaggaaatgcagagaatttctatgagatattacacaagaagaccatcctcaagatacagaatcatcagagtctcccaggtcaaaatgaaagaaaaaatgttaaaggcagctagagagaaggcataggtgacctaaaaagtgaaacccatcaaactaacagcaaacctttcagcggaaactccacaaaccagaagagattgaaggcttatattcagcatttttaaagaaaagaatttgcaaccaataattttatatctagccaaactaagcatcataagcaaaggagaagtaagacaagcaaatggtgatggaatccattaaccctggacatgccttacaaaaggttctgtaaggagtgctaaatatggacaagaaagaatgttatgcaccactacaaaaacacacttaagtaaactgaccactgagaatataagacaaccacaaaaacaagtctacataataaccatttaccaacaccatgacaggatcaaatctccacataccaatattaatgctgratgtaaatgggctcaatggcaccaattaaaaggcacagagtagcaagctggataaagaagcaagacccaatggtatgctgtcttctagagactcatctcacatgc

SEQ ID NO: 949115 - DNA, 633 bp, Homo sapiens
gttcttttctacactttaaatttgaagcaaaatcagaattattttataactagcacagatgtattcaatgcctaaaacactgacagtgatattggaccttggagataagagagagaaaaaaggagtcatgaagatgctttatctccttcggcttttcaaattgtactcactgctaacaaatattagattttccccaagaatactcaaaaaggtttctcttttaagcatataatattatctttagaaattaagtgtataaatctattgtttctaggagtgtaagtccaacacaaatcttacaaatagtcctcaggtctcttgctggctagttgttagatcaccaaaaccattgtaagtagaagaaatgcagtaacctatttttaattgtagatttctaagaccgatttcttttttttagctaaggttgtctataacattacttaggccataaagtaaacattgaggtttcggtgattgaggcctggtagaaagtggtggaaatgagtctcccaagacataaacaattctcamcattagctgaaatttcttggtggctctaaagcccttggggaaaaacgaaaggttgtcctcatgctcaaaataaacacaaatgccctactttcaaaccaaagc

SEQ ID NO: 949116 - DNA, 575 bp, Homo sapiens
agacttggaaccaacctaaatgtccaacaaygatagactgaattaagaaaatgtggcacatgttcaccatggaatactatgcagccataaaaaatgatgagttcatgtcctttgcagggacatggatgaaactggaaaccatcattcccagcaaactatcaccaaggacaaaaaaacaaacaccgcatgttctcactcataggtgggaattgaacaatgagaacacatggacacaggtaggggaacatcacactccagggactgttgcggggtgggggcaggggggagggatagctttaggagatatacctaatgctaaatgacgagttaatgggtgcagcacaccaacatggcgcatgtatacatatgtaactaacctgcacaatgtgcacatgtaccctaaaacttaaagtataataataatcaaattttaaaaaaaaatagaatagctctcgcgctattctctactaaattatggctgcttctctcaacatgtcgttttacaggaaaatgttccttgaataggaaatgtaaggaaaaccgaaaccaaaattatacagcaaagagaatacaat

SEQ ID NO: 949117 - DNA, 676 bp, Homo sapiens
gatagtggggaacatggtaagaccaatgaattccatgagcgtgagccagttgccacacttattttgctgtgaattccttgatcagaagtaatgctgtgtagaataycatggcagtggataaagcattctgtaagtccaaggatggtagttttggcagaagcattgtattcacagaaggcgaatttatatccaaagtaaatgtctgtttgggtaataacaaaatgctatcccttccatgatgtaagaggtccagtataatcaacttgccaccagggagctggctggtcatcctagggaatgatgccatattggggactcagtgttggtctctgctgctggcagattgggcactcagtgatggctatagtcaggccaggcctggtgagtggaagtccatgttactgagcccaggcctagcctgcatccctgccactacggcccattttgttcatgagcttattggatgataataggagtggctagggaaagagactgagtggcatctaatgaatggatgatggcatctaatgaataatcaagtggattctatccacttgattattaaaatcctcccctgatgaggtcactgtttggtaagcattcacaagggataccaatatcttcacattttttttgcccattcagagaggtctatccccatatctcttctccaaat

SEQ ID NO: 949118 - DNA, 391 bp, Homo sapiens
gaatggatgatggcatctaatgaataatcaagtggattctatccacttgattattaaaatcctcccctgatgaggtcactgtttggtaagcattcacaagggataccaatatcttcacattttttttgcccattcagagaggtctatccccatatctcttctccaaattttttgttcaccaattttccaatcatgttccttccaagctcctaaccatccagccaagccactgggtacagctcatcaatcagtatataatcacacgtctggacatctgracatttctctccaagcaaagcgaataaccagatgcactgctcaaagttctgcccagtgggaagattttccttcactactgtctttcaaggatgccctagacaggggctgtagc

SEQ ID NO: 949119 - DNA, 540 bp, Homo sapiens
cagtgatggctatagtcaggccaggcctggtgagtggaagtccatgttactgagcccaggcctagcctgcatccctgccactacggcccattttgttcatgagcttattggatgataataggagtggctagggaaagagactgagtggcatctaatgaatggatgatggcatctaatgaataatcaagtggattctatccacttgattattaaaatcctcccctgatgaggtcactgtttggtaagcattcacaagggataccaatatcttcacattttttttgcccattcagagaggtctatccccatatctcttctccaaattttttgttcaccaattttccaatcatgttccttccaagctcctaaccatccagccaagccactgggtacagctcatcaatcagtatataatcacacgtctggacatctggacatttctctccaagcaaagcgaataaccagatgcactgctcaaagttctgcccagtgggaagattytccttcactactgtctttcaaggatgccctagacagggg

SEQ ID NO: 949120 - DNA, 604 bp, Homo sapiens
acctagtttgaatagtagcaaatttgtttcaatagcatatggacacattgctcttctacatctgtattttccctccctttattttttattatcacgaatcacatctttataggctrtattcccatttacttagatttagatttacagttactgttttatgcattttccttttatttatttatttagttatgtatttatttgagacagagtctcactctgttgcccaggctggagtgcggtggcgtgatcttggctcactgcaacctctgcctcccaggttcaagcaattctcctgcctcagcctcccgagtagctgagattacaggtgcccgccaccacgcctggctaatttttgtatttttagtagagacaaggtttcaccatgttggccaggctggtcttgaactcctgacctcaggtgatccacccaccttgacctcccaaagtgctgggattacaggcatgagccactgcacccagccgcattttccttttaaatcatgtatgaaagaagtgagttatgagccaaagtacagtaatactgtcttttaaatgtacctgtatggttactttcaccagatttacttatttcttcttatggctt

SEQ ID NO: 949121 - DNA, 640 bp, Homo sapiens
aaataaaccttgctactgctcactcattgggtccgtgccatctttaagagctgtaacactcactgcgaaagtctgtggcttcattcttaaagtcagcaagaccacgaacccaccggcaggaaccaactccggacacaccagtgctttgagaggccaaggcgggtggatcatgaggtcaggagttcaagaccagcctggccaagatggtgaaaccccgtctctactaaaaatacaaaaattagccgagagcggtggcaggtgcctgtaatcccagctacttgggaggctgaggcaggagaattgcttgaacccagggggcggaggttgcagtgagcaaagatcgcaccactgcactccagcctgggcaacagattgagactctgtctcaaaaaaaaaaaagaaaatacaaaaattagccaggaatgatggcgggtgcctttaatactttaatactagctacttgggaggctgaggcaggagaatcgcttgaacctgggaggtggaggttgcagtgagctgarattgcgccattgcactgcagcctgggagacagagcgagactcagtctcaaaataaaagaaaagaaaagaaaagaaaaaaatgtgttcagtaagccttggtccccaccatcaaaactacc

SEQ ID NO: 949122 - DNA, 574 bp, Homo sapiens
taggaggctgaggcaaaaggattgcttgagcccaggtattaragccttcagtgagctgtgatcacaccactctactccagcctgggcaatagagtgagaccctgtgtctaacaaaaaacaagagtgagaaatgaaaacatattcacagaaacatttgcacataaatctttatagcagcattattcataacagccaaagcttggaaactactcagatgtccatcaaatgatgaatggataaataaaatgtagtatatctggccgtataatggactacatttcagtgataaaaaggattgaagtacttactgacacatgctacaacatgaatgaaccttgaaaatgttatgctaagtgaaagaagccagtcagaaaagacctaataatggataattctatttacatggaatgtccagaataggcaaatttataaaaacagaaagtagtttagtagttgcctagggctgggagggcctggtgggtggaaatgaagagtgactgctaatgaatacagggtatctatactatttggggtgattaaaaaaagttccaaaattgattgtggtgatggttgc

SEQ ID NO: 949123 - DNA, 613 bp, Homo sapiens
gttatctagggataaaaggttagcttgtattttgcctgaggggtgtgatttactcctgttagtacctatgcctgctctgtcattttgaccagaggttaacatactccaattgcattgtggactgggcccacacctacactaggtgaccaatgtttccaactattggatatgcactgcccttccagcagggctgcggatggcttgccttggcacatacatcttgtgtctgcagagaactggacatggttggagacttgggggtcccatggctgatgcctggaatgcaacatggcagctttggacaaaggatgctgcaagacacatggtgtgcccaacccctggctggcccatagcgtttatgatggggctggctagtggggaacatgtagtactcccagcccaagtgccacagtgcatagagcaacattggggtaacaccactgtgggatgggtacctgtcacagcctttgcaaacataacacatgtcactaccaaggtcaggccctgattgactttgtgccccctgggagtctatgggtctgtggggacacagagtagatttacctacccrcgaactgcactggacattgtacctgggggtggccttatgtgc

SEQ ID NO: 949124 - DNA, 556 bp, Homo sapiens
ggctataaaaaattggttgcttatatttcctgccttttgagacttttaatcttagaagccagttaccatgctgtggagcccaaactgtctttggagaggcccatgtggagatgaacagagacccccagctctcagccggcaccaacttgctaaccatgagtgagctgtgtgaaggagacaagctttctctaccaagccctagtaaatttcacacttttaagctaaaaataaatgatttttaaaaaacattattttaagccagtaagttttggtgagatttgttctgcagcaagacaaccgataatgattttgatacaccagaggcagggtgctgccttaacaaaatcctcaatcatagggctttggacttgagactaggtgatgggctgaagctggagggatctttaggagaatgtaagtgaaaactkaaaaggacttctagaagaatactagaggaagcctatggagctttgaggacttaaaaaaaaaaaaaggaaggaaaaatctcagacaaccctctgttaaacaatagggcttcaataaatcttaagggtgt

SEQ ID NO: 949125 - DNA, 573 bp, Homo sapiens
tcctgcagaggtattcctagcttttgggttgagattatggagttttctagatataggatcatgtcatctgcaaacaaaaacaatttgacttcctctcttcctatttgagtaccrtttatctctttctctttcccaattgccctggccagaactttcaatactatgttgaataggagtggtgagggagggcatccttgtcttgtgccagttttcaaggggaatacttcccacttttgcccattcattattacatcactatgggtttgtcatatatggctctctatcctgagatatgttccttcaatacctagtttattgagagtttttaacataataggatgctgaattttacagaaggccttctgtgcatctattgagataatcatgtgttttttgtctttcattctgtttatgcaatgaaacacatctattgattcgcatacgttgaacaaaccttgcatcccagggatgaagccaacttgatcacggtggataagctttttgatgtgctgtgggatttggtttgccagtattttattgagaatttttacatggatgttcatcaaggatatt

SEQ ID NO: 949126 - DNA, 573 bp, Homo sapiens
tcctgcagaggtattcctagcttttgggttgagattatggagttttctagatataggatcatgtcatctgcaaacaaaaacaatttgacttcctctcttcctatttgagtaccgtttatctctttctctttcccaattgccctggccagaactttcaatactatgttgaataggagtggtgagggagggcatccttgtcttgtgccagttttcaaggggaatacttcccacttttgcccattcattattacatcactatgggtttgtcatatatggctctctatcctgagatatgttccttcaatacctagtttattgagagtttttaacataataggatgctgaattttacagaaggccttctgtgcatctattgagataatcatgtgttttttgtctttcattctgtttatgcaatgaaacacatctattgattcgcataygttgaacaaaccttgcatcccagggatgaagccaacttgatcacggtggataagctttttgatgtgctgtgggatttggtttgccagtattttattgagaatttttacatggatgttcatcaaggatatt

SEQ ID NO: 949127 - DNA, 692 bp, Homo sapiens
cagaattacagagacagatctcaacccaatctaaggtagaatttttttaaccaagggggttgcttttttggaaagttggactgtgtgtgtgtgtgtgtgtgtgtgtgtgtgtgtgtktgtgtatgaagttttgtacattaaatttgtggactttttttgaccaaatgagtcagatatccaaattagtatgttgctttcaaaattgtcaccctagaaggttataaactcattccataaaggctgcccttgacagttttagaacacccttttgagaagagcctttgtagcctatggaccattttctcctgggatgcctctgtaatggcaaatccacaatactagattcttgaataggtcaacggatacccagacctatatctctctcataaataatgtgattaatagaggtagatgaatacttttgagggatcagaaagtcaaaatcaaaattaaagtgttactataaatgttgagatggagccgcttaagaggtttttgaaagcaattcttgctgagatgcccccaaacttctctttaaccctgctaactaacttggagaatggaggctcatccaagcaggaaaaatattcagtgtgttcttgactcataactcaagctaaaaatagaacaaaaaacattgcattacatatcaggtgtctgagttctatgagctcccaggaatggaaaagtat

SEQ ID NO: 949128 - DNA, 667 bp, Homo sapiens
agaaatatacctttatgtccaaccccatgggtatgtcaactctccagattagtgtcaaaatcttgtttggagagatctcaatcgttttttacttccatgagatatcacactggcscactaaattgatgacattgtgttgattggatccagtgagcaagaactagccaacaaactgaatgtattggtgagatatttgcatgccagaggatgggaaataaatccaactaaaattcagggatcttctacctcagtaaaatgtgtaggggtccagtggtgtggggcctgttgagatattccttctaaggtgaaggataagttgctgcctacaaccaagaaagaggcacaacacctggaagaccaattggattttggaggcaataccttcctcatttgggtgtgttactctggcccatttatcaagttaccccaaaggctgccagttttgagtggggtccagaacaggagaaggctctgcaataggtccaggctgctgtgcaagctgctctgccatttggtccatatgacccagcagatccaatgtgcttgaggtttcagtgcagataagaatgttgtttgtggcctttggcaggcccccttaggtgaatcagagtggagtcctctagaatgttggggcaaggccctgccatcttctgcagataactactct

SEQ ID NO: 949129 - DNA, 719 bp, Homo sapiens
acaacacctggaagaccaattggattttggaggcaataccttcctcatttgggtgtgttactctggcccatttatcaagttaccccaaaggctgccagttttgagtggggtccagaacaggagaaggctctgcaataggtccaggctgctgtgcaagctgctctgccatttggtccatatgacccagcagatccaatgtgcttgaggtttcagtgcagataagaatgttgtttgtggcctttggcaggcccccttaggtgaatcagagtggagtcctctagaatgttggggcaaggccctgccatcttctgcagataactactctccttttgagagatagctctttgcctgctactgggctttggtggaaactgaacgtttgcctatagatcatcaggtcaccatgcaacctgaagtgcctatcataaactgggtgctttctgatccatctagccataaagtgggtcatgcacagcagcattccatcatcaaatggaagtggtatatacgtgatctgtctctagcaggtcttgaaggcaccagtaagttacatgaggaagtgccacaaatgcccattgcctccttcacttttgccaccccgccttctctcccccagactgcatcgatggcctcatggagagttcctttgatcagttgacagaggaagagaagactagggcctkgttcacagaagggtctgtacgatatgcaggcaccac

SEQ ID NO: 949130 - DNA, 586 bp, Homo sapiens
gatctcagctcactgcaacctccacctcctgagttcaagcaattcttgtgcctcagcctcccaagtagctgggattacaggtgccygccactacgcccggctaatttttgtatttttagtagagacagggtttcaccatgttagtcaggctggtctcaaactcctgacctcaggtgatccgcccaccttggcctctcaaagagctgggattacaggcatgagccactgcacttggcctggatcattataattcttagtgactctcaaccttggctgtgtatgagagtgagctggggagtttcttaaaggcagactcttggacctcacaccacaccacatgaatccatctcagggggtgagacatctctttaagaagctcctaagatgagtctgatgtggaccccaggatgaaccatggttctatagattatgaaacaggaatgcggtggggtcttgctcacatagggagtaccagggaagacttccccaaggacaggaccaaaggatgcacagaaacctgccaagtgaagggtgtcagaatgttcccagcagaaggaacagtgtgagcaagctccctgtggtcaga

SEQ ID NO: 949131 - DNA, 520 bp, Homo sapiens
taggatagggcaccagttagagtggtgaggccctcattccaggccctagctcccagatgacatttytagacacaccctgtgacagaagggaaaccattgctttgaagagaaggacccagtcctagcagtattaatcgcctactaactgaagagcccttaggccctgattaaccagcagagataccttgagtgagcccttgaaacttgctggcttcaggtaccagcttggccacaggggcacagagcaccaagcaagttctaggacttgactcttgtacagcatctctggaccttccctgagctagaggggagcctattgccctgaagagtgagtcccaggccagacagcattcaccacaatctgacttaagagcccttgggccttaaggaaacatcagcagtagtctagcagtactccctgcaacctgtggtggtggtggccatgaagtgaggctcctctgttgttttagtctgttcttgcattgctgtaaagaaatgcctgagattgggtaatttataa

SEQ ID NO: 949132 - DNA, 624 bp, Homo sapiens
aggcactcctcacttcccagacagggtggccgggcagaggcgctcctcacttcccaggcagggtggcggctgggcagaggcgctcctcacatcccagayggggcggccgtgcagaggcgctcctcacatcccagacgatgggcggccgggcagaggtgctcctcacatcccagacgatgggcggccaggcagaggggctcatcacatcccagacgatgggcggccaggcagagacgctcctcacttcctagacggggtggcagccgggcagaggctgtaatcttagcactttgggaggccaaggcaggcggctgggaggtggaggttgtagctagccgagatcacgccactgcactccagcttgggcaacattgagcattgagtgagcgagactccgtctgcaatcccagcacctccggaggccgaggcgggcagatcactggaggtcaggagctggagaccagcccggccaatacggcgaaaccccgtctccaccaaaaatagaaaaaccagtcaggcgtggcggcgcttgcctgcaatcccaggcactcggcaggcgggggcaggagaatcacgggagcccgaagcagggaggttgcagccagccgagatcagggcagtaca

SEQ ID NO: 949133 - DNA, 471 bp, Homo sapiens
accctgaatacaagagaccctaatagttaggagtatcatcgcccctattcagcatgaasttacagaagatggaccttcatccttctgcaacccctaggattaagggtccccttgtaaaagggaaaggtggggaggtatgtgggaagcattcaaactagagcaactctagtttgaataagagctaagaaaaatatagctggatcaccaaccagtaattaagggctgcacagcctgcaactgccttgttccattagaaggccaccttctatgctagtaatgataccttctcttttacaaaaaaaaaagaggaggggcatgttgggaaaaagctgagtgttggaagggaaactgaggcagggcattcatgtctgacataatgtcctctggactgtgtctagacttgctggctccttgctactagccctcctaggctcctacttccattatctcgagcagcagaacatgttccat

SEQ ID NO: 949134 - DNA, 594 bp, Homo sapiens
tctggctagaacttccagtactatgttgaatagaaatggtgacagtgggcatccttgtcttgtctcagttctcaagaggactgcttccagcttttccccattccatatgatgctgrttgtgggtttgtcagaaacggctcttaatattttgaggtatgtttcttcaatgcctagtttgttgagggtttttaacatgaagggatgttgaattttatcaaaagtgttatcttcatccattgtgatgatcatgtggtgtttgtttttagttgtatttaaaatgtgataaatcacgttgatttgcttgcatacgttgaacctaacttgcaactcagaaataaagcctacttgatcctggtggattagcttttggatgtgctactggatttggtttgctagtattttcctgaggatttttgcatctatgttcaccaggagtattgccctaacattttctttcttcattgtttctctgccaggttttggtatcagaatgatgttggcctaatagaatgagttagggaggagtccttcttccttgactttttgtaatagtttcagtagaattgataccagctcttttttgtacaactggta

SEQ ID NO: 949135 - DNA, 734 bp, Homo sapiens
attgtgtgtttccaggaatttatctctttcctttagattttctaatgtgtgtgcatagatttgcccatagtagtctctgaggatcttttgtatttctataggtttagttgtaatgtcatctttgtcatttctaattttgtttgggtgttctcacccatgcccactcccccttttttttttttgctcttaatctagccagtgatctgtcaatcttgttttttttttttttatttcatggaaccaactcttggtttcatcgatcttttgtatggacttttgcatctcaattttgctcagttcttctctaattttagttatttcttttcttctaatagctttgggattggatgttcttttgttgttcttattctggttcttttaggtgcaaggtaaggttgctaatttgagatctctctaccttcttggtgaaggtgtttggtgctataaactgtcctcttaacactgctttcatcgcatcccagagattttggtaagttgcatctctattttcattagcttcaaataattttttgatttatgccttaattttgatgttcacccaggagttattcaggagcaagttgtttaatttccatgtaattgtgtagttttcagatatcttcttgattttgatttctgtatttattgtaccrtggcctgagagtatgcttggtatgactttgattttttttaaaatgtattgagactttctttatgaccaaacatttgatcag

SEQ ID NO: 949136 - DNA, 734 bp, Homo sapiens
attgtgtgtttccaggaatttatctctttcctttagattttctaatgtgtgtgcatagatttgcccatagtagtctctgaggatcttttgtatttctataggtttagttgtaatgtcatctttgtcatttctaattttgtttgggtgttctcacccatgcccactcccccttttttttttttgctcttaatctagccagtgatctgtcaatcttgttttttttttttttatttcatggaaccaactcttggtttcatcgatcttttgtatggacttttgcatctcaattttgctcagttcttctctaattttagttatttcttttcttctaatagctttgggattggatgttcttttgttgttcttattctggttcttttaggtgcaaggtaaggttgctaatttgagatctctctaccttcttggtgaaggtgtttggtgctataaactgtcctcttaacactgctttcatcgcatcccagagattttggtaagttgcatctctattttcattagcttcaaataattttttgatttatgccttaattttgatgttcacccaggagttattcaggagcaagttgtttaatttccatgtaattgtgtagttttcagatatcttcttgattttgatttctgtatttattgtaccatggcctgagagtatgcttggtatgactttgatttttttwaaaatgtattgagactttctttatgaccaaacatttgatcag

SEQ ID NO: 949137 - DNA, 584 bp, Homo sapiens
ggaactctcctgtttgaggtgtctrtcgacccctgcaattactgaagcctcagtaatggcagacgcccctccctccaccaagctcaagcataccaggtcgacttcagactgctgtactggcagcgagaattttaagccagtggatcttagcttgctgggctccacaggggtgggatctactgagctagaccacttggcttcctggcttcagccctcttcccaggggagttaatggttctgtctcactggctttccaggtgccactggggtatgaagaaaaactccggcagctagcttggtgtctgcccaaatggccgcctagttttgtgcttgaaacccagtgcccttgtggcataggcacctgagggaatctcttggtcttcagtttgtgaagtcggttggaaaagtgtagtgtctgtgccagagagcaccattcctcatggcacagtccttcacggcttcccttggctaggggagggagtcctctgtcttctgtgttgatctcgctgggagccgcagactggccatcttgtcagccactcatgtcttcttttgagaagtgcctgtttatgttctttacccac

SEQ ID NO: 949138 - DNA, 671 bp, Homo sapiens
gcatggatagcccaggcctactcacttacgtcagagctttatctgtctgcattctgygttttcatccttttctttaaaaccagatatctttatatcaaacaatcctctccactttccagtctagtctctaacccacgatttcaattactatctgtggaatgatcgtgtatttgtagccccagcccaggctttccaagcttcagaccatcttcaacttaatatatcctcttggatgccccaaagaaacctatctaaactgaactaagactgagctcatcatgtttcctgccaaacctcatatttttccagggtttcctatttcattgaatggcaccaccatcccacattgtccaagccctaaacttcagctcaaccttaatacctccttctctctcactctttatccaacacttcacctagtctaattggttttacctcttaaattgctatggactcatcgacttctgcatccacctattccaatcctcaccaccagcactcaagttcaaactactcccatcactcaattcaaccactgccttttagccaggcttgcaacctccactctggaccaccctccagtccattcaccacactgaagtcagagtaatcttttcaaatctaattaagtcatcaccttccacccctcatccccgcttaaaaaactcaaa

SEQ ID NO: 949139 - DNA, 580 bp, Homo sapiens
gagctacccacagcacaaaaatcaagtgcaacacataggttccagttaggggtactagctgctttctgaccttttactctcatttctctccctttttaaaaaaatccctctagcatcccctacttctcctttttgttcttcagccttcctaatcactttataagtcattcactatattatatctcttctagtttaaatccttaaagtagtttacattttcctaacgtaataagactgacagattctcaggcttcatggagatgcattttgggaaacaacaagcttaaatattccgcagaagttcctctttatctctaaatatttcagaaatacatgaaactatagtatttaccttcatttttctctagaaggccatgcatatgatcaaagttttttaacatctggaaactagtacagtgctaacacttctagtaagaaccaatgcaaagcaatccatgatccagaaactagtaatatgaaacatttaactcagtacttaaatattcaactaaaagtaaaatgttctcatgctgagataygtttatcttcaatataattatttgcttatttaactggaaac

SEQ ID NO: 949140 - DNA, 701 bp, Homo sapiens
tccatcttgagtttatttttgtatatggtacaaggaaggggtccagttgcaatcttctgcatatggctagccagttatcccagtagcwtttactgaatagggagtcccttccccattgcttgtttttgtcagctttgtagaagatcagatggttgtaggtgtttgaccttatttctgggttctctattctgttccattggtctatatgtctgtttttgtaccggtaccatgctgttttggttactgtagccctgtagtataaagtagggtagtgtgatgcctccagctttgttcttttacttaggattgccttggctattaaggctttttggttcgatatgaatttttaaagtttttttttctagttctgtaaagaatgtcactggtagtttgatatgagtagcatagaatctacaaaatgctttgggcaatgtgaccattctgatgatattgattcttgctatccatgaatatgtgatgtccttccatttgtttgtgtcatctctgatttctttgagcagtgttttgtaattctcattgtagagatctttcacctccctcgttagctgtattcctaggtattttattctttttgtggcaactgtgaatgggattgcattgctgatttggctcttggtttggctgttgttggtgcctaggaatgctagtggtttttgtatgttgattttgtatactaaaac

SEQ ID NO: 949141 - DNA, 752 bp, Homo sapiens
aggaggaagggggcttccggatcataggtggattcaaagattttctgattgacagttagttgaaagggttaagttattatctaaagaccttggaatcaatagaagggagtgcctgggttaagataaggggttgtaagcctgggcacggtggctctcagctctttgggaggccgaggtgggcagatcaactgaggtcaggagttcgagacctgcctgaccaacgtggagaaaccccatctctactaaaaatataaaattagccaagcatggtggtgcaggcctgtaatcccggttacttgggaggctgaggcagaagaatcgcttgaacctgggagcaggaggttgcagtgagccgagattgtgccattgccctccattctgggcaacaagagtgaaacaccgtctcaaaaaaaagataagcggttgtagagaccaaggttcttattatgcagatgaagcctccaggtagcaggcttcggagggatagtaaatgtctctaattggactttaaaaggtgccagactcagttaattttctcatggaccaggaaaaagacccagaaagggaaaggaattctccatagaatgcagcttttccctataagacagcttggcagggccatttctaaatatattaaataaatatattttgaggtaaaatgtttcgatttacttcasggcctgctctctttcatgttggtatcttaatgctataaagagtgtatttcgtcggtcttaaggtctctgtgttaa

SEQ ID NO: 949142 - DNA, 732 bp, Homo sapiens
gcctatgaggaaatacatcaagtaaagattatagaaactagtggtaggtgattgatgaagaawttgcttagtcaagtgagtaaactctttagttcattcttcgatttgtttaattttaggaggtttggtttatgggaccttgggtaaggagcacacaccaaacgcttggtatcatcctcccaatagtcatagtaatagtctccctggtgtgctgtattctctcaaaggttttaaatgtttgcatgcagccatctctagaatgtcatatggactctcttcaactggaataacaagtgctgaaagaaatgtgcaactatgaggacactgtaacctatgaatgacatgctgagaccagaaacccaaaatgatggtaactgagagtggggctaaggccataagttttagtcacactctcgtctaagtgaaaacctgaccaaaaaaggggattttttttttaaacaaaattatgagaggccattgttttggactgagctcatgcactaggccccaacaaaccaaaccaaaccaaaatggagttgctcatgctaagactttaaggaaacacatggattccagaacagaccagggtttgtttttcttctgtaaatctctataacaaacttctctggcatcataggtatccactccctgaagttcccatgaaatcttttaaccaaattcatttcctctcacctagagaccatcgagcttcagatgatcactcaacaaagg

SEQ ID NO: 949143 - DNA, 629 bp, Homo sapiens
gctgccttggggtcagagccctatagcctgcccatctgtatgctcccctagaggtttgagcagcagggcactgaagaagcaagtcacacccccatcacacactctgctaggggaaaaagggaacttttcctatttcacaaggtaaccctagccatacaaatccagttatatatagctaaattcaacagattgagcatttgaaagagaaatcatctacattcatggttgtatatttttaacttacctctttgagtagatgatagaacaagagaaagtaattcattaagaatgaagtagatttagaaaacaaattaacaaatttgaactaattgactttttagtatatgtatctgtgtttctataaaatgatataatgtcccactaaacaagtcaagattatatatttttccaagtgaacggacaactattaccaaaagtgactataaatctgcttatgaaatgtcttgaaaatgtaaaataattgaaatttcacagagtagtatctctgagtacaatagaattaaactagaaaataccaacaaaataaaactctcatatgatcccaaatttgctaattaggttacacattcctaaataackcacatgtcaaagaagaaatcttggggaaa

SEQ ID NO: 949144 - DNA, 597 bp, Homo sapiens
attctgaggaaagacagcagcgcaggagaggaacggttctccccataaaggcaggcagcagtgtctcctgcaccctccacagtagctctgacagtatgaataggagctgtcccacaaagatcctcgctttgcgcctcttccacaagcccagtctaacactttcccatccaactggagatggggtgggagctggacattttccggtcctggtgaaaatctctcccatgcttcctccatttactggtagaaaagggccagggagttggcccagcagatgaggaaaggagtctgggggggcctgggagggagggcaggttcccagaaaggccaggcacagcctcttttatttatttattttcttgaggcaaggtctctctctgtcacccaggctggagtgcagagctggaattctagctcactgcagcctcgatctcccaaggctcaagcaatcctcccacctcagcctcccgagtagctgggattacaggtatgtgccaccacrcccagctaatttttgtattttttgtagagttggggtttcaccatgttgcctaggctggtcctgaaccccagagctcaagccatccgcccgcctca

SEQ ID NO: 949145 - DNA, 720 bp, Homo sapiens
ttttagttgggttatttgttttctgattgatgaattttgagaattctttatatattccagatacaagtctcctgttgaacaccaggtttgcaaacattttcttcccatctgtagcttgtcttaactttcctactgtgtctttgtggagtaaaagttacccagtttgatgaaatccaacatatcaaacttttttcttttatgaatcatgcttttagtagcgttctaagaatactctgcctcagcccagattacaaacattttctcctatgatttctttttaaagttttatagttttatgtcttacactgatgcattttgaaataagatttatgtgcagtgtgaggtttagattgaggttcattttatttttgcatattaatgcccaattatcccaacaccattgttgaaagactgtccttcattaaattgcttttgcccctttgtaaaaaatttgctatatttttggagtccatttttggactctgctcttttccatagacctctatgtcttttccttcacaaatactatggtatcctgattactgtggctttatagtaggtcttaacgtcaagtagtatgcttcctccctttttwtttttttgagacagggtctctctttgtcgcctaagctggagtgcggtggcacaatcttggctcaatgcaacctccacctcctgggttcaaactattctcaagcctcaacctcctgagtagttggg

SEQ ID NO: 949146 - DNA, 564 bp, Homo sapiens
cactacaacatgaatgaactttgaaaacatcatgttcagggaaagaagctagttacaaaggaccacggagtgcatgatttcagtttttaagaaacgtccataataggcatatctgcagagatggaaagtggatccgtggttgccaggggctgggaaggggaagaatgaagaatgactgctaagggatgctgcgttccttctgtggtgataacaacgttccagaattagacagtagtgatcgttgcacaaccttgtgaataccctaaaaaccactaagctgtatactatgagagggtgaatatcatggtatgtaaattatatctcaattaaaaaggtaaaaagtatctgggggtggtgtattccaggtagagggaatggcatgtgttcagaggaagaaaaaaaggagaatgaggaagaggagaaggaggaggaggaagaaaggagaaggaagaggaggagaagggaaagargaagaagaagaagaagaggaggacaaggaaaagaaggaggaggagaagaagagaagatcaatcaaaatgaaaagtgccccccaccagttaatct

SEQ ID NO: 949147 - DNA, 618 bp, Homo sapiens
tttactttattttttcctaggaaaagcgtatgggctttgtgatagacagaataatcagcaccccagaagatatacataatccctgaaacctgtgactgttacgttacatgacaaaaaataaataaataaataaggtggggggggtgggtgggagctttgtaggtgtgattgagttaaggctcttgaattaggggattatcctggattatctgggtaagccctaaacgtaatcacacttccttataagagagaagcggaagagatctggcatataggggaggataaggtaatgtgaccacagatgcagggactggagtgaaacagccacaagccaaagaatgccagcagccaccaaaagcaggatgaggcaaggaatagattctcccttggagcctctgcaggcagtgcagccctgcaggtgtctgatttcagcttagtggaactagttttagacttctggtttacagaactgcgagcataacattttcttgttttaagaacaaatttgtggccaggcgccatggctcacgcctataatcccagcactytgggaggccgaggcaggcggatcacctgaagtcagaaattcgaaaccagtaactccgtctctactaaaaa

SEQ ID NO: 949148 - DNA, 820 bp, Homo sapiens
tggatgtcctagccagagcaatcatgcaagagaaaagtaaaagtcatccaaataggaagagaggaagtcaaaccatatctatctacagatgatataattgtatatctagaaaaccccatactctctctccagaggcttctagaattgataaacaacttcagcaaagttttaggatacaaaatcaatgtacaagtatcagtagcatttctatacatcaataacgttgaagccgagagccaaatcaagaatgcaatcccattcacaaaagccacaaaaataataaaatatctaggaatacagctatacagggaagtgaaatatctgtgcaatgagaattaccacacactgctaaaggaagttgaagagaacacaaacaaatggaaaaacattccatgttcatggataggaaaagttaatattgtttaaatggccatatgtccaactcagtttacagattcaatgctatttctacccaactacctatatcatttttcacagaattagaaaaaactattctaaaattcatatgcaaccaaaaaagagaatgcatagccaaaaccatcctaagctaaaagaacaaaagccagaggcatcatcctaccaacttcaaactatattacatggctacagtaaccaaaacagcatgatactggtacaaagacagacatatagaggagtggaacaggttagagaacccagaaataaagctgcacactgacaaccatctgatctttgacaaagtcracaataacaagcaatggggaaaggattacctatttaataaatggtgtttgaagagctggttagccatatacaaaag

SEQ ID NO: 949149 - DNA, 624 bp, Homo sapiens
tgagtcaaattttttatctcattattcccagtagctacattctataatgttgctgcaaaaacagaattagcaaataatgaaacactactgctaagggaaatacagggtraagttcctgtgaggctccggtcataacattttcacccaccaattaatatataaccttgtttcagatgtgtttctgtgtaataatactttaggtcatttacactgttgattcattaacattgaactcatggccaaaaccaccataactcatgcctaaacaaagcttatatctaacactcgcatattttctctgtaagacataccacagcctttttgtgcttagggaccctagacagcagcacttcagcactacacttggtggccattctaaacagtgaaatcactcatgaaaagcacaaaaacataaaacatctttcactaaataaaactcaaaagaatgcctgtttacaacatgagggctgcaaaaagaaggtagggcatcattttgttcaacctcagctaggaacatgtgagtgaggtgactcaaattttttgttgcattgcacactacattcccatgaatgattatgaaacctctgtaagtactgatttgggtgttacaaatacatcttagta

SEQ ID NO: 949150 - DNA, 565 bp, Homo sapiens
cctgaagctcaggttctcaaagaccatctaagactgaggctggaaaagaagtgtgttagtccgttttcacactgctataaagaactgtctgagactgggtaatttataaaggaaagaggtttaattgactcacagttcaacatggctgggaaagcctcagaaaacttacaatcatggcagaaagtgaaggggaagcaaggcactttctttacaaggtgacaggaagaagtaccaagtgaagggggaagagccccttataaaaaccatcagatcttatgagaactcactcactatcacaagaacagcatatgggaaaccactcccatgattcagttacctccacctggtctctcccttgacacatggagattatggggattacaactcaagatgagatttgggtagggacacaaaacctaatcatatcaaggagaaccaaaaaactatctacctgtatgagcactgagtaataagtaaaagcactacaactgggatgaaagtaagrgagctcttctatggtgcaggagatcagggcctgtgaacactaacagtggagcccaggtac

SEQ ID NO: 949151 - DNA, 569 bp, Homo sapiens
gtcccacaattaccattgttcctggcctggacttcaatccggcctcccacattattcctgataccacacctgacccctatgactgtmtctctctgataccacacctgacccctatgactgtatctctctgatccacctgacattcaccccatttccccatatttccttctttcctgttcctcaccctgatcatgcttgatttattgatggcagttccaccagggctaatcgccacacaccagcaaaggcaggctacgctatagtccaagccactagcccacctcttagaacctctcattttctttccatcgtggaaatctatccttaaggaaataacttctcagtgttccatctgctattctactactcctcagggattattcaggccccctcccttccctacatgtcaagcttgaggatttgcccccacccaggactggcaaattagctttactcaacatgccccaagtcagataactaaaatacctcttactctaggtagacactttcactggataggtacagtcctttcctacagggtctgagaaggccaccgcagtcatttcttc

SEQ ID NO: 949152 - DNA, 628 bp, Homo sapiens
gctggctcatctcagtaactcagcacaggggcagtgtccccagtgtcccaggtcagaccagggcacctagatttgcctgcagagaatgtttcttcctaaaggatattttgttaccaagtacatttttgagcatttattggcaaaactcgaagtggttgtgagaactagatggaataatatatttcaatgctgtattgggaataagtaggagaatatccttgtttgtagagagtgcttaataaagtcttagagagtggggctatcaggtcttcaacacactgtgaaattgttccagttgggagcgatactttgtgacatacatactacatttttgtaagcatgaaattgatctttttttaagtaaaaaagaacacttagtcatgagcaagtaaaatgttctcaaaagcattttgtaatggccctaaaccaatgttattaccagtctaagctgaagaggtttactgcagattgacaaagaggatgattttgtgattccttaaagcatatgacatccacagttcctgcattgtccagagctataagtctctttaatgcttgagttttaatgggattcattttatkctctgtttggggacccccatattctacccccttttctgtcattgtg

SEQ ID NO: 949153 - DNA, 542 bp, Homo sapiens
aaaaaaaaaaaacaaagctggaggtatmacactacctgacttcaaactatactacaaggctacagtaaccaaaacagcatggtactggtaccaaaacagagattcaaaccagtggaacagaacagaggcctcagaattaacaccacacatctacagccatctgatctttgacaaacctgacaaaaacaagaaatggggaagtattccctatttaataaatcgtgctggaaaaactggctagccatatgtagaaagctgaaactggatcccttacttacaccttatacaaaatttaattcaaaatggattaaagacttaaatgttagacctaaaaccataaaaaccctagaagaacacctagacaataccattcaggacgtaggcatgggcaaggacttcatgactaaaacaccaaagcaatggcaacaaaagccaacatagacaaatgggatctaattaaactaaagagcttctgcatgacaaaagaaactaccatcagagtgaacaggtaatctacagaataggagaaaatttttgcaatc

SEQ ID NO: 949154 - DNA, 638 bp, Homo sapiens
gaaaaagcatgggacgagttggggagtgctagtgtgggagctgtctccagggcctttttgagagagcaaaaagaacaatgggcaaaaaacttagggtctatgggatcagttaagttacctyttgtgagcttgtaaagtggttttgttaggatagcaaagcctggtatccagagtcggaaatatccaacaatgcctaagaaggaaaggagttgttgttttgtggtggggattcgggtctgggagattaactgagcacagtctgcaggaagggcatgtgtatgctgatggaggattataccgagataggtaacactaggggaagaaatttgtgtcttggagggggatactcggtacccctttaaatagagatgttgaagaagcagggtagtgtcctgctgggaagattggtaagagggactgcaaagaagaagatcatcaaaatattgaataagatgggaggcagacaggtgaaaagaaagcagatcatgagaaagggcctggccgaagtagtgtgggctgttcctgaagccttggggcagaacagtccaggtgagttgttgggattggtgggtgtcacggtcagtccaagtaaaggcaaaaagaggctgagaggagggatacaaggggatagtaaagaa

SEQ ID NO: 949155 - DNA, 656 bp, Homo sapiens
gtggtggggacttggagaatctttatgtctagctaagggattgtaaatacaccaatcagcactcgtatctagctcaaggtttgtaaacawaccaatcagcaccctgtgtctagctcagggtttgtgaatgtaccaatcagcactctgtatccagttaatctggtggggacttggagaacctttttatgtctagctaagggattgtgaatgcaccaatcggcagtctgtatctagctcaaggtttgtaaatgcaccaatcagcactctgtgtctagctcagggtttgtaaatacaccaatcggcaggctgtatctagctaatctagtggggacagagaacttttgcgtctagctcagggattgtaaaggcaccaatcagcagcgtgtcaaaatggaccaatcagctctctgtaaaacagaccaattggctctctgtaaaatggaccaatcagcagaatgtgggtggggccagataagagaataaaagcaggctgcccgaatcagcagcggcaatttgcttggatctgcttctgggtcgtggagggtttatatttttttttttttttttttagttttagctgtttgcagtaagtcttgctgctgcttgctgtttgggtccacattgcttttatgagctataacactccttgagaaggt

SEQ ID NO: 949156 - DNA, 557 bp, Homo sapiens
gttttggggccagtttatggccagatttttggggagggggggcttgttcccaacatgtcccccttctttggtttgcaaatcaataaaagcaaaggcagctttgtcacggtgagctacttctcacaggagtcaggatccacatctgcagactatgcaaagacaaacaacacagattaaaagcacaatcatcattgaaatcacagagcttccaagtgtttttatccattttaatgggttactagctgctaatttgtctgcagctcctttaagcactccagttcctggcattaaggccaggtgtgcctgggatgctttaaatatttgttcttttaattttgcaatatccaaaaacaagtttgtagagtgtccttttagatgcttttttattctttcccaaactttgatcttattaagagctattaatagtttccacaaatccttatgtttagctcctacaatgggccatatcatttgaggttgaggtgccactatacygccatgattccagataatatgaactcttgctggacttcttatcatttctaccatctgaccat

SEQ ID NO: 949157 - DNA, 544 bp, Homo sapiens
caggtatgtctttattagcagcatgaaaatggatgaatacagcaaattggtaccagtagagtgaggcattgctgaaaagataccccaaaatgtggaagccaatttggaactgagttacaggcagaggttggaacagtttggagggctgataggaaaaatgtgggaaagtttggaacttcgtagagacttgttgaatggctttgacaaaaatgctgatagtgatacgaataataaggtccaggctgaggtggtctcagatggagatgaggaacttcttgggaactggagccaaggtgactcttgttatattttagcaaagaggctggcatcattttgcccctgccctagagatttgtgaaactttgaacttgagagagatgatttagggtatctggtggaagacatttctaagcagcaaagccttcragaagtgacttagatgctgttaaagcactcagttttgtaaatagagaagagcatacaatttcagaaaatttccaactggacaatgccatagaaaagaaagtcccaatttctgaggaga

SEQ ID NO: 949158 - DNA, 544 bp, Homo sapiens
caggtatgtctttattagcagcatgaaaatggatgaatacagcaaattggtaccagtagagtgaggcattgctgaaaagataccccaaaatgtggaagccaatttggaactgagttacaggcagaggttggaacagtttggagggctgataggaaaaatgtgggaaagtttggaacttcgtagagacttgttgaatggctttgacaaaaatgctgatagtgatacgaataataaggtccaggctgaggtggtctcagatggagatgaggaacttcttgggaactggagccaaggtgactcttgttatattttagcaaagaggctggcatcattttgcccctgccctagagatttgtgaaactttgaacttgagagagatgatttagggtatctggtggaagacatttctaagcagcaaagccttcgagaagtgacttagatgctgttaaagcactcagttttgtaaatagagaagagcatacaatttcagaaaatttccaactggacaatgcsatagaaaagaaagtcccaatttctgaggaga

SEQ ID NO: 949159 - DNA, 612 bp, Homo sapiens
ggaaattcaccagctaataaaactcaagaaaaaatagaaaatcttaatagaactatagcaagtaagaagayttcattagaaatcaaaacactttcaaaaaatatcaggagcagttgttttaactggcgatttttatcaaatgttcaaagatcaattaacaccattccttctcaaaattttccagacaacaaaggaggtgaaaacccttcctaattctttctgtgaggccagtattattctgtatcaaagaaagataaatacaacacaagggaaaaaacggagcaatatattctatgaatatagatgccaaaattctcaagaaaatactagtaaaccaaatgtagaaaccttttaaaataattacatattatgatcatatgtgatttattccaggaatgcaaaagttattttctgtataaaagtcaatgtagtacactgtattaacagatttaaagaaaataactattatctcaatagacgcaaaaaaggaatttaacaggatctgtattatttcatgttaaaaactccacaagtcaagaataaaaaataaattgttcacctggataaagacactgaataacccacagataaaataccatactttattgtgca

SEQ ID NO: 949160 - DNA, 787 bp, Homo sapiens
tccttctcttgcacagacaatgcctaaagctgagtgaaatccggaagcagcaacataacaggttaaccagggatatgaagttaatactaaagaaccagataaaagagcaraaagtgacgtgcagggcgccatcggggaccactgtttttcaacaagcactttggttctgtaaactctgtgtgttacgtgcatgcacgactttgattaaacatacaaggactgatgaaatatttgcaacaaatgtgacaggaggcttgaatattattaatatactataaagactagatgggtgaaaatggttcattttagttgcccttgcgtggtggcattgtgggtaattattttttcctgctagtctataattttctgtactttccaaattaaaacataatagaagcatgcataatttttaaaacaaagaaatgatcatacaatctaataaaaaataagaaaagaattaggtaggctgggtgcggtggctcacgcctgtaatcccagcactttgggaggccgaggcgggcagatcatgaggtcaggagatcgagaccattctggctaacatggtgaaaccccgtctccactaaaaatacaaaaaattagctgggcgtagtggcgggtgcctgtagtcccagctacttgggaggctgaggcaggagaatggtgtgaacccgggaggcggagcttgcagtgagccgagatcctgccactgcactccagcctgggcgacagagcgagactccatctcaaaaaaaaaaaaaaaaaaaaaaaaaggattaggtagctatat

SEQ ID NO: 949161 - DNA, 482 bp, Homo sapiens
aggagatagaaaggccagagaatgcaagacctgccaccccgtgcctgctttcacctcctcatctgtacttgctggtgtttcttttttttttttttttttgagatggagtctcgcattgtcgcccaggctgaagtgcactggtgtgatctcggctcactgcaagctccgcctcctgggttcacgccattctcctgcctcagcctcccgagtagctgggactacaggcatgagccaccacgcctggctaatttttgtacttttagtagaggcagggtttcaccatgttggccaggctggtctcgaactcctgacctcaagtgatccgcccgcctcggcctcccaaagtgctgggattacaggcatgagccaccgtgcccggccacttgctggtgattctgaaggatctgtcctttgcggtgtccctccttgctctccagaatcttcrcttcaactcccatctaagatgaaaggagccaactaag

SEQ ID NO: 949162 - DNA, 663 bp, Homo sapiens
atggaactgggcatcattatgttaaggtcatccaaactggaaattaagaagtcaaattatccttgtttgctgatgatatgatcttatatttggaaaaatctaaagacttcccaggaaaactgttagaactsatcaactgattacagatttatttcacaaacgtaatgatctccagttccatccatgttgttacaaatgactggatcttacatgataaacatcacatgttctcacttatttgtgggatttaaaaatcaaaacaattgaactcatggacaccaagtagaaggatggttaccagtggctgggaaaggtaatggagggttggggggaggtgggcatgattaatgagtacaaaatcagttacaaagaatgaataagacctacttttaatagcacaagagggtgactatactcaataatcacttaactgtacattttaaaataacttgaatagtgtaactagattgtttctaactcaaaggataaatcctggaagggatggaaaccccactttccatgatgtgtttatgtcacattgtatgcttgtatcaaaacaactcatgtaccccataaatatatacacctactatgtactcaaaaacattaaaataaaaactaataaaaaaagcttcaaaaaacaggctgactttcttggtaggg

SEQ ID NO: 949163 - DNA, 740 bp, Homo sapiens
ctccgtttggggtccctgacttcccgcaacagtcgggctttggtatcaggatgatgttggcctcataaaatgagttagggagaattccctctttttctattgtttggaatwgtttcagaaggaatgatatcagctcctcttttaaccactgggtgaattcatctgtgaatctgtctggtcctggacttttttttagttggtaggctattaattactgcctcaatttcagaacttgttattgttctattcagggattcaacttcttcctggtttagtcttgggagggtgtatgtgtccaggaatttacccatttcttctagattttctagtttatttgcatagaggtgtttatagtattctctgatggcagtttgtatttctgtgggatcagtggtgatatcccctttatcattttttattgtgtctatttgagtctcctctcttttcttctgtattaatatgggtagtggtcaatcgattttgttgatattttcaaaaaaccagctcctggattcattaatcttttgaggggtttttcatatctctatctccttctgttctgctctgatctcagttatttcttgtcttttgctagattgtgaatttatttgctcttgcttcccaagttattttagttgtgatgttagggtgttgattttagatctttcctgctttctcttgtgagcatttagtgctttaaatttccctctagacactgctttaaatgtgtcccagatatt

SEQ ID NO: 949164 - DNA, 740 bp, Homo sapiens
ctccgtttggggtccctgacttcccgcaacagtcgggctttggtatcaggatgatgttggcctcataaaatgagttagggagaattccctctttttctattgtttggaatagtttcagaaggaatgrtatcagctcctcttttaaccactgggtgaattcatctgtgaatctgtctggtcctggacttttttttagttggtaggctattaattactgcctcaatttcagaacttgttattgttctattcagggattcaacttcttcctggtttagtcttgggagggtgtatgtgtccaggaatttacccatttcttctagattttctagtttatttgcatagaggtgtttatagtattctctgatggcagtttgtatttctgtgggatcagtggtgatatcccctttatcattttttattgtgtctatttgagtctcctctcttttcttctgtattaatatgggtagtggtcaatcgattttgttgatattttcaaaaaaccagctcctggattcattaatcttttgaggggtttttcatatctctatctccttctgttctgctctgatctcagttatttcttgtcttttgctagattgtgaatttatttgctcttgcttcccaagttattttagttgtgatgttagggtgttgattttagatctttcctgctttctcttgtgagcatttagtgctttaaatttccctctagacactgctttaaatgtgtcccagatatt

SEQ ID NO: 949165 - DNA, 597 bp, Homo sapiens
ccatcagaacataggatctgaaaaatacctcaaatatcaatcttaggtttgataatagtaatattatctacaggagcaattggggaggttagtgatcttgtggcctctggctgcatgactcctgggtcatactttctaatcatgttgtagcaggacaagctgcagacaaaacccctctgacaccaagttaaagaaggaagggctttattcggccaggagctttggcaagactcaaatctccaacaaccgagctccccgagtgagcaattcctgttcctcttaagggcttacaactctaagggggtccacatgagagggtcatgatcgattaagcaagcagggggtacgtgactgggggctgcatgcaccactaattagaatggaacagaacaggacagggattttcacagtgcttttccatacaatgtctggaatctatagataacataaccgactaggtcaggggtcartctttaactactaggcccagggtgtggtgctgggctgtctgcttgtggatttcatttctgccttttagtttttacttcttctttctttggaggcagaaattgggcgtaagacaatatgaggggtggt

SEQ ID NO: 949166 - DNA, 689 bp, Homo sapiens
agtgggtcccaagttcttgtcctgtgtccacaaagaatgaagtatgcagacaactggagggtgagcaaggcagaaaggagcctcactgagtggcagaactgttctcagtgggtatctcctttcctcaggcaggttgtcccgatgagtgtccagctctcagtggagaagagacccacagtgggtagctgccttccacaggcaggttgccccgatgtctctgcagccttcagcagagagacccagagtgggtagctcctatctgcaggcaggtcatcccattgtctgcctgagtctggctgagtctggttttttttatggacttcagaagggaggaagtgtgtgctgattggtccaccggcagccataggcaggcccaggaaaagcaccataaattctcactccagtctgcaggactgatagctcagcccctaggtttcaggctgtccctgtcttgaagggggcttcactggggacccatcccatttcacccaggagcctgattgccccctgctgccatcaacctgctggccatggcacccatggcacccaggctgttcatgctgaggggtgcctgcaggtacatgccraactgccctcagcctcaccctggcctccctcccatgctcatcggcacccaaagtctggagggggccgaggcggcaggggactggtgtgtcagtgctgccctg

SEQ ID NO: 949167 - DNA, 763 bp, Homo sapiens
ttctgattcagtaggtcttgggtggggcccaagaatttccatttctaatcagtttccaggcaaagggatgctgctgatccagggactacacttaagaaccactgctctggccaggcgcggtggctcacgcctgtaatcccagcactttgggaggccaaggcgggcggatcacgaggtcaggagattgagaacatcctggctagcgcagtgaaaccctgtctctacttaaaaaaaaaaaattagccaggtgtggtggcacgtgcctgtagtcccagctactcaagaggctgaggcaggagaattgcttgaacccgggaggcggaggttgcagtgagccgagattgtgccactgcactctagcctgggctacagaacgagactccatctcaaaaaaaaaaaaaaaagatccactgctctacaagtctttcatggtagtgtttgacctgcctcaactgcacataagtacccatctacacacagacacacacacagacacacacacacggcagtcaagagcccctgcctcaatcactggtccctcaaacagccagatcaaccagatctgcccaaccaactacagactgaacgctcaggggtagctgcccctgagaaagctggtcccactgaagtcctatatgagcctgtcactgcaagaggctctaaagtcacacccaaaacccttgaaatccaaagtcacagcrtttctcttttctgagagcagtcatgagcaatcccaccctgctgcacccttcacacatgggta

SEQ ID NO: 949168 - DNA, 612 bp, Homo sapiens
tctaactaagcctatttaataaagggttgaatatctcatataatttattaaatactgtgctggaagtgagaaatagaatgactrtatggtgtttgaagtatggtttctactgaatgggttttgcttttacaccatcttaaagtcgaaaaattgtaagttgaatcatcgtaagtcagggaccatctgtacttcatctaataaaagcagaatacacatttttctcaagctcatatgggatacttaccaagatagattccattctgggtactgaaacagattgaacaaatttttaaaaataaaattcataaaaagtatgctcttggaccataatgaaattagctagaaatcaataatggaaagatagctggaaaagaaccaaatatttggagattaagcaacatacttgcaaataacacgtgagtcaaaagagaaatctcaagagaaattagaaatatttttaattaaatgaaaataaagatacaacttatcaaaatttggggaatacatcaaaaggaatggttagagagaaatttatagcattgaatgcatatatgcatatattagaatagaaggaggacctgaaatcaatagaggaaataggaaaataaagca

SEQ ID NO: 949169 - DNA, 772 bp, Homo sapiens
tatgtatacattatgcaatgattaaatcaaactaattaacattctacacctcacatacttaccatttttgtaaagagaacttttaaaatcaagtcccttagcaatattctattatactatatattattattaattatagtcaccatgttgtacactagatctccagagcttagtctttctaactgaaactttgtgcccttgatcaacatcttcccattccccaccccagccgctggtaactgctattctactctgggtttctatcagtttaattattttacattctacatacaagtgagatcatgcagtatttgtttttctgtgtttggattattttagtaagtcctccaggttcatctgtgttgccacaaatgacaggatttccttattttataaggctgaataacattccattatgtacagatactactttttctttatttgttcattcgttaatggacacttagtttggtttcgtatcttggctattgtgaatactactcaaagtgatctatagcttcaatgtaactgctatcaaaattccaatgacattttttacagaaatagaaaaaacaatcctaaaattcttatggaaccacaaaacatcccaaatagccaaaacaattttgagcaaaaagaacaaatctggatgtatcacacaacctgactacaaactatactacaaagctatagtaacaaaaacagcatgatactggcacmaaaacagacacatagatcaatggaacaaaatagagggcccagaaatgaatct

SEQ ID NO: 949170 - DNA, 433 bp, Homo sapiens
ttttgattggtaacttcgttttttcatatattatccattattaaagtcttgtcttaccaattattttgagttatggattctttaagtactttaggattaagttcagatgaaaatttcaaatattccattctctgatgagcctgcagtcacaagtattccttgtctctgttatgctcaaagcctttagagagccataggtgatgttttattattctgataaggctgttttctcatatcaaaggaagtcgaatattatgtttctctatagaaatacctgtgataacttctaggtccatagggtmacttctagggttaatgacttctaccaaggacttggagcggtgtgactcagggcacacactgctgctcaccttcccagtaaccaggaaattaaacaagatatgtgcaaaatgccaccgggctacatgaattc

SEQ ID NO: 949171 - DNA, 495 bp, Homo sapiens
atcataagatagttcaatttttagtttttttaaggaaactccatactgtwctctattatgactgtactaatttacatccccagcaacagtgtacacggttgccttttctccacatcatgaccagcatttggtattacctatcttgtggctaaaagctattttaacaggtgtgagatgatatctcattgtagtttagacttgcatgtgtctgatgatcaaggatgttgagaaccttttaatatacctgtttgccatttgtatgtctttttttttcagaaatgcccattcagatcttttgtccatttttaatcagattattagatttttttcctatagagtttttgagctccttttatatcattattagatgacttgcaaatattttctcccattttgtgggttgtctctccactttgctcactgcttgttttgctgtgcagagactttctaacttgatgtgatcccatttgtccatttttgctttggttgcctgtg

SEQ ID NO: 949172 - DNA, 598 bp, Homo sapiens
ggataagtacatgtgtacagtcaatgtactttcacacatctctaagcttctgcttatagttttgcctattcacaaaattcgtaccttttatttatattatattctaaattcaatatatcatatagaatctggaaagatattggaactggcctaaagggaaacatcaggatttcaatcattatgtacaggttacatagatttagtatatttaaaaaagaatgatacaaagatttctgtttccagtgaagatgaagggtaaatttggagggagcagatttaccttacacataaacaacaaaaaaatgaacaatatttatgaaacgattttcaagacttcaaacatcaagtaataaaagatagtgattccttaagagatgtgaaacatgtgatgagacctatgaataccctagagtttctaggtcatagcaaaaggagataaaacacagacaaagcctggcagtcactctaaagttgagaagataaaactggggakctgacgaggccacaggagttaaagttcatagggcggagtagacagagtattacaaaagagagtgctgcctagcgagtgagccagttccagagatcttcagagtct

SEQ ID NO: 949173 - DNA, 629 bp, Homo sapiens
ctttgtaataattttggctgaacatgaattttccagggtaaaatcygggggtggggagcaaacaggaagtgcagatttgagcacagaagccatggcatgtgggtaggggtgaagcctgaaagccctacttgctttctcagcaggaaggcttgtagcctggggcaagaactcagccctgcacactgactgcctggatataaacctggtgatttgttggggcatggtaagagtgagactggccttgctggctgcatgagagctggctgaggcccatcatggctgggtttcccccacttccctggtggcttgtatgatgcagcagaggcagccataatccccctgggaacataacctcattggcctgagaaccaccaaccccacagtggctgcagcaagtcctgcccaaggagagtctgaactcagacatgcttaaccccgcccccaactgatggtctttctctacctgccctgggagccaaagacaaaagatataatctcttggaagctctatggctctactcattcaatgagaaacccgaatacttatccagacaggcttgtatccctgctatactaccacagttgatgctcttttaaaagcaccacctccctgctggtggtcaagcaac

SEQ ID NO: 949174 - DNA, 578 bp, Homo sapiens
tataatttattctctttccatcttgctaattagtcattggtcttgtagcatttatgttgtacaaggccagtgttgtagatagttactccaagatgtcagtagggagtcatttgtgcccctcacgcatatattttgggatgtattttgtcattgccaagcatttttaaattatttataggagaatgtgactacattttcttccaacctgagatggaatgaagtagtctttatttatggaaatactatgtagaagagatggatagcaaatcttttctgtttccaaagtgaatgagttcaaattgtagtcatatggatttagtgagctgtaaataagatgctaactctaagaagcattacaaatgactttgagaagatatctatagttttcttacttagggaacagtatgatataggcaagactaagaaaataaaatagcatatttaatttcttttaccaaatatsctaaatatgaaatctgttagcccctctactcatttcctccttacagtcttcgattttagtacagaataggagcaaggcaagggattcatgaaattttagattcttatcagatcta

SEQ ID NO: 949175 - DNA, 659 bp, Homo sapiens
cttgcagctgtgatcccacccctttaacactgagccttctccccacaaacatcacagtccagacggggcttctggagaggatgcggacaagggaacccccacccccaagcccctcactcccccaccaccgtaagtttatcagcgccttccttccgagagagccacacctaacatatcatctctcctcatcagttcccttggaggaagacaaggagctgtcccatttcctaagtggggaagctggaggcccggagatactgctgggtttgttcccaaatgctaaatgtcagaggacttggtgcggggcgcccctgagcactgttccaaatggcagcactgagtgaggacacacaggcctccagccctaggtatctaccgtgctgcctggcccacgtccccaaacatctctggccccgatgtgtaccccacctgtagtctgcaaacacatccctgggctgcagggatgcaagataaaatgtagttgttgatgcagatgcattttgagcttctgggggaaagcctccttttctagaggcatcccggagtgcccatctttgcagaaacgagtgctcccatctgtccgcaggggagggttgcaggtgggtggaaygcactccgacttgtctctgtggtgaaatggaagtgaaaggactggacgc

SEQ ID NO: 949176 - DNA, 633 bp, Homo sapiens
ttggaagtttctcaaaaaattaaacacagaattatcatatgacccagtgattctactcctgggtatatactcacaagaattgaaagcagggactcagatatttgtatgccmatattcactgcagtattatttacatttgtactaaaatagccaaaaggtggaaataacccaagagtccatcaacagaagaatgaattcagtatatgcatacaatgacatattatttagccataaaaaggaatgaggttctgatacatactataacatgggtaagacttaaaaacataatgctaagtgaaataagccagacacaaagggacaaataaatgtattattttctttacatgaaatgtctagaacaggcaacatcacagagacagaaagtaaagcagaagttgccagggactaggggaagggggaaatggagagtcattgcctgctgcgtacagaatttctgtttggggtaatgaaaaagttttggaaattgatagtggtgatgactgcacaatgctgtgactataattaatgtgactaaattacacactcaatataattaaaattgcaaattatgttattatattttaccatgataaaaaaatacattaaaaaaaagctctacagctatttctgcat

SEQ ID NO: 949177 - DNA, 579 bp, Homo sapiens
ttactgtttccagttttgccttctctggaatgtcatagagttggaatcatatagtaattgtagctctttcagattgttttcacttaattagtaatatccatttaaatttcctccatgttttttcatggcttgatagctcatttctttttagccctgaataataattcttcatctgattgtagcatagtttatttatccattcatctactgaagtatatcttggttgcttccaagttttggtaatgatgaatagagctgctataaacattcatgtagaggcacaacttttcaattcatttgggtaaataccaatgagcatgattgctggattgaatgctaatggtatgtttagttttgtaaaaaactgccaaactgtcttccaaagtgactgtaccatttccttttcccaccagcaagtgaaagactatcttttctccactgtactgcctttactcctctgtcaaagtatagttgactatatytttatgagtttatttctgtacttactattctgtttcattgacatatttgtctattccttcaccaacaccaaactatcttaattactgtaactttata

SEQ ID NO: 949178 - DNA, 616 bp, Homo sapiens
ccatctctactaaaaatacaaaaattagccagtgtggtggtgcatgccagtagtcccagcttccctggaggttgatgcaggagaatcgcttgaacccaggaaactgaggttgcagtgagccaagattgtgccactgcactccagcctgggtgacagagcaagactctgtctcaaaacaagacaaaacaacaaaacaaaaaacagaaagaattgatcatcatttattgtcctgttgaggtcagagaagagttggccaagtttatgtaggaactagagtatgctttttagataaaaaaaaaataaatccctaaagatttaaaagtctctaaagactttgagcacttttacttattctaatatggaaaatctgttttattgataaaagaattttgtactctttaaatttaattgaaaggattattttttaataaactcagaaatttagaaattaggtatataagttaacttgaaaattcagtgtttkaattgtaatttcttcactctgctttatccagttgaggggaaaggggtaagacagtcttcagaatgagaagatgagcacaatttttattaatttattttaaggcgagaaggcatgtgtaatataaaaacaaaa

SEQ ID NO: 949179 - DNA, 545 bp, Homo sapiens
tttttaataaatggtgctgggaaaattggagtgtcacgggcaaaagaatgaaactgaattcgtgtctctcaccatatacaaataccaattcaagacggattaaataattaaatggaagactcaaaattataacaataccagaagaaaacctaagaaaaattcttccagaaattggcctaggcaaataattcatgactaagacctcaaagtcacagggaacaaaaacaaaatagacaaaggggacttaattaaactaaaaagcttctgcacagcaaaagaaactatcggctgcgtaaacagacaacttgcagaatgggagaaaatatttgcaaactgtacatctgatagaaactaatatccagaatttacaaggaaatcaaacattcaacaacaacaaaaaatacacacacacacacacacacacacacacacacacacacataatcccattaaaaagtaggcaaaggatatgaacagacattttttaaaaacagcatacaaatggccaasaagcatatgagaaaatgctcatcattactaatcat

SEQ ID NO: 949180 - DNA, 596 bp, Homo sapiens
ctgctccacaaaagtgtggtcagactgcctccytaagcatgtccctgatctattccttcttgctgggtaggacttcccaactagggcctccagccgctctcactgatgttttctggctgtcagaggtttgaaaacttcctgggacaaagctcctagacagaggggtgggctgccatctttgctgttttggcaacttagccattccagcctccaggttttggagagcccaagctgactaagggcagaattagtaccccagcacagcacaactgctctatgaaagcatggctagactgcttctttaagcaggtccctgatcctgttcctcctgactgggtgaggcttcccaacctgggtctccagccacctcctacaggtgcatttgggctggcaacgggtctatacccctctgggatggagtccccagaggaaagagcaggctgccatctttgcttttttgcagccttcactgctgatactgccacatactgaaaaatccataggcaactaggggctggagtggaaactcagcaaaacccacagcagccctatagaaaagtggccagactgaaaaaacaaacaaacaaacaaacaaa

SEQ ID NO: 949181 - DNA, 626 bp, Homo sapiens
acctagtttgaatagtagcaaatttgtttcaatagcatatggacacattgctcttctacatctgtattttccctccctttattttttattatcacgaatcacatctttataggctrtattcccatttacttagatttagatttacagttactgttttatgcattttccttttatttatttatttagttatgtatttatttgagacagagtctcactctgttgcccaggctggagtgcggtggcgtgatcttggctcactgcaacctctgcctcccaggttcaagcaattctcctgcctcagcctcccgagtagctgagattacaggtgcccgccaccacgcctggctaatttttgtatttttagtagagacaaggtttcaccatgttggccaggctggtcttgaactcctgacctcaggtgatccacccaccttgacctcccaaagtgctgggattacaggcatgagccactgcacccagccgcattttccttttaaatcatgtatgaaagaagtgagttatgagccaaagtacagtaatactgtcttttaaatgtacctgtatggttactttcaccagatttacttatttcttcttatggctttaaattactatgtagtgttctt

SEQ ID NO: 949182 - DNA, 593 bp, Homo sapiens
gatttgccttttcctcagtctcttttctatccattccaattgagctttctttttcactcctccacagaaacagctcttttcaaggtgatgaatgatggtctatattggcaayttcaaaatttaattctctgttcttatcgaattcaaatattacgcagcatgtgacccagttattttctctctcttggcaatattctggctatcttctcaggttctgttgattattcttaatcttagattcactctaaatgctgggaagcacaaggagctcagcccctagcccttttctctagctgcattatctcccaagataatttcatctagtttcatggcttcgaatagcatctatatatgggtgtcttccatcatcatcatcatagctaataaatgtggaatacttactatgtaccaggtactataccctaagtgctttacactcattgaatcatttcaatgtaaacttactagaatgtaagtttcatgagaacaggaaccttatctgttatagtgcttgagacatggaagttgattaaaaaataatcactgaaagaatgaataaaacttcgcagactttagaaataagagtgcctgca

SEQ ID NO: 949183 - DNA, 581 bp, Homo sapiens
gccctgctcttgcctctgaggggcctctccagctccagctctcacctcactgtggcttcccaggacctagttcctgcctgcctcccrgcagcctcgacaggcccagctcctccctcagagtggcctgttcaggcccaacttatgcctctggccaccttcccagaggtgtgagctcctgcctcacgctggcctctgtaggccgaggtcctcccttatgctggcctgtcgaggcccagctcatgcctctcctggcctctccagggccagcccctgcctgttggtggcgtctagaggcccagcctctacctcgcagtgggccctcctggcccacctccttcctcaccgtggcctactcagggcaagcctcctgcctttcggcagcctctgcagacccagctcctgcctcccagtggcctccatacaccaagctcatgcctcacagcagcctttccaggcctagcgtttgctcctttgcatcctctccaggtcctgaacttcctctagtaggcatctccaggcccagcttttccttccagcagcccctgcaggcacaagtcatcctcaagtcgcccaccccgggc

SEQ ID NO: 949184 - DNA, 600 bp, Homo sapiens
cgcagcactgtgttcacattaytcttattttacttagcagtggccccaaagtgcaagagtagtgatactggcatattgttataattgttctattttattattattgttgttaatctcttactgcgcctaatttgtacgctaaattttataggtatgtatgtagaggaaaaaaacatagcatatatggactttggtactatctgaggtttcagacatcgatgtgggtcttggaacatatcccctccagggtgaggggagactactgttctcctctttccccatctgcaggctgaatgaagggcattctgtgctcttaggggatgaaggtgctacagaatggaagaagcttgggtccctgaattgccatgtggcagggagccacctaccacccccctacattggatggttacatgtctgataaactttttgtttttttgagacgaagtctcactttgtcgcccagcctggagtgcagtggtgcaaactcagctcactgcaacctccgcctcctgggttcaagtgattctcctgcttcagcctcctgagtagctgggcttacaggcactcaccaccacatctggctaatttttgtatttttag

SEQ ID NO: 949185 - DNA, 587 bp, Homo sapiens
tttaggagaaaagaagagtgttgacttgccttacgtggaaaattgactttaagtcatcaagtcatctacagggatctgggacctcccccagttgtattctttctggttttaaaatagtaaataactattttaagaaagcgttggctgggcgcggtggctcatgcctgtaatcccagcactttgggaggccgaggcgggtggatcacgaagtcaggagatcgagaccatcctggctaacacggtgaaaccccatctctactaaaaatccaaaaaaaaaaaaaaattagccaggcaaggtggcaggcacctgtagtcccagctcttagggaggctgaggcaggagaatggcttgaacccgggaggcggagcttacagtgagccgagatcgcaccactgcactccagcctgggtgacagagcgagactccgtctcaaaaaaaaaaaaagtgttataacaaatcctaaaagtacaaaaatgtaaaattttaartgacctgaaatttacacattttaatagtggaagctcctaaattctttcttttaaaagccccaaagtgtattggccgagtattaaaagtcaaggtttac

SEQ ID NO: 949186 - DNA, 440 bp, Homo sapiens
ccacaagcatgagtgcagagccagcccagcagaatcttcgggataaatggttgtttgaagtcattaygttcagggcagtccagatgctggaaacactgagctgaccatcttccaaatcagaggtcaccctggcaagctcacttctcttgcattttttcatgatgagccctttttattacagcgtttgccattgtttgggtgatgatgaagagaagcctgaagtgagctgagtggaggcttggaatagctacttcaaagagaagcgggcttaacctgtatcaacatctgcagacgtgctctcctgaagctggtctggtggcactgtatgaccccctctcaggatgctgaaggcagcaaggggccagtgaaggtccctcagaacctgcaaaggaccacgtagaccccaagacggacatagctactcaggagtgttaggagct

SEQ ID NO: 949187 - DNA, 556 bp, Homo sapiens
ttgccctacgtgtcctgcttacgtccggctacctgacccacaagaaccttccgctgccccagcctcccctctcccgctcccctggggccctgtttcccttccctggaaactttcctcctcctgctgctgcccagtgttgtgcccttgggataatagagggcaggtcctgccaggcctattgggagccaccccttggctgggtagtgctgtccttgcgccatcaggcattttaaaaactaccctagcccaggaagggtggctcacacctgtagtcccagcactttgaggggccaaggtgggtggatcacctgaggtcaggagttcgagaccaacctggccaactcttgtctctactaaaaatacaaaaattagctgggcgtggtggcacgcacctgtgatcccagctacttgggaggctgaggcaagagaatcacttgaacccaggaggyggaggttgcagtgagctgaggtcacgcctctgcactccagcctgggtgacagaaagagagtctgtctcaaaaacaaaaaacaaacaaacaaaaactaccctgaggct

SEQ ID NO: 949188 - DNA, 556 bp, Homo sapiens
ttgccctacgtgtcctgcttacgtccggctacctgacccacaagaaccttccgctgccccagcctcccctctcccgctcccctggggccctgtttcccttccctggaaactttcctcctcctgctgctgcccagtgttgtgcccttgggataatagagggcaggtcctgccaggcctattgggagccaccccttggctgggtagtgctgtccttgcgccatcaggcattttaaaaactaccctagcccaggaagggtggctcacacctgtagtcccagcactttgaggggccaaggtgggtggatcacctgaggtcaggagttcgagaccaacctggccaactcttgtctctactaaaaatacaaaaattagctgggcgtggtggcacgcacctgtgatcccagctacttgggaggctgaggcaagagaatcacttgaacccaggaggcggaggttgcagtgagctgaggtcacgcctctgcactccagcctgggtgacagaaagagagtctgtctcaaaaacaaaaaacaaacaaamaaaaactaccctgaggct

SEQ ID NO: 949189 - DNA, 536 bp, Homo sapiens
ggaatggaatgaaatggaatcaacccgagtgcaattgaatgcaatggaatgcaatggaatggaatagaatgtaatcaacccgaatgsaatgaaatggaaaggaatcaacccgagtggaatggcatggaatggaagggaatggaatggaattgaatggaatggtacggaatagcatggaatggaacggaatggaatggaatggattatacccaattggaatggaatggaaatgtgtggaatggaatggaatggaatggagtgtaaaggaattgaaaagaatcaacccgaaatgaatggaatggaatggaatggaattgaatggaatggaacggaatggaatggaatggaatggaatggaatggaatggaatcaactcgagtgaaatggaatggaatggaatggattggaatggaatgcaattgaatggaatggaatcattccgagtggaatggaaggcaatgtaatcgagtcgaatagaaaagaatggaatcaacccgagtggaatggaagggattgcgatggaatggaaaggaatg

SEQ ID NO: 949190 - DNA, 536 bp, Homo sapiens
ggaatggaatgaaatggaatcaacccgagtgcaattgaatgcaatggaatgcaatggaatggaatagaatgtaatcaacccgaatgcaatgaaatggaaaggaatcaacccgagtggaatggcatggaatggaakggaatggaatggaattgaatggaatggtacggaatagcatggaatggaacggaatggaatggaatggattatacccaattggaatggaatggaaatgtgtggaatggaatggaatggaatggagtgtaaaggaattgaaaagaatcaacccgaaatgaatggaatggaatggaatggaattgaatggaatggaacggaatggaatggaatggaatggaatggaatggaatggaatcaactcgagtgaaatggaatggaatggaatggattggaatggaatgcaattgaatggaatggaatcattccgagtggaatggaaggcaatgtaatcgagtcgaatagaaaagaatggaatcaacccgagtggaatggaagggattgcgatggaatggaaaggaatg

SEQ ID NO: 949191 - DNA, 633 bp, Homo sapiens
agaatggaatcaaatggaatggaattgaaggtaatggacgggaaaaaatggagtcgaaagcgttggaatggaatggaatggaatggattgtaatggactcgaatggaatggagtcaaatggaatggaatcgaatggaatggaattgaatggaatccaaagcaatagaatggaatggagtgtaatagaaagctatcaaatagaatggaatggaagggaatggactcgaatggaatggactggagtggaatgaactcgaatggaatggtgtcaaatggaatttaattgactgcagttgaattgaatggaatggaactgaatggaatctaaagatagagaatggaaaggagtgtaatggaaaaacatcgaatggaattgcttggaatggactcgaaaggaatggactggaatggaatggacttgaagggaatggactggagtggattggaatcgaatgcaatggaagcaattggaatggaatggaatggaatggaatggaatggaaaggaatagaatgaaatggaatcggttggaacggaatggaatggaatggagcagaatggaatagaatcgattgcaaggtcatygaatggactggaatggaatgaactcgaattgaatggactggaaaaaaa

SEQ ID NO: 949192 - DNA, 584 bp, Homo sapiens
ccccatggccacacacagccacactgggcctcagtgacctggctgacccccaagagatccccatgactgccccctcttggattcagcaaacacctctcttcatgcagtttgaatcctgacactttggagsgggtaatttctgagcctctgtggcctcatctgtgaaatgggccactgaagcaggtgaagtgctactccgtccctggcctacagtgggaacccacgcatctgggcccctggagagcagccgtcacagggtcagccagcgcctagctgtcccagctcagtgcactctgcggccagcaccccacgctgcccaaagggcctgcacacacacatagaacaggacatcccaggcagctacagcccatccaccaggactgtttcttcagtgaaaaccaaaggttcttgtgaactcacacacatctgctaaactgcttcctattttgaaaattgtgatgtttcatgtggaagataattgattcacaatgacgtaaacacacactgtggggaaacccctgaatctcttttgtttcctgctgcctgtgggagatgagtcaccaagaggcaaaggctctcaagtg

SEQ ID NO: 949193 - DNA, 583 bp, Homo sapiens
ctacagtatttagtacagtaacctgctatataggtttatagcctaggagcaataggctatcctatatagcctagtatggaggaggctataccatctagatttgtgtaagtatgctctatgatgcttgtacaaagactaaattacctaatgatgcacttctcagactgtatccccaccgttcggtgagtgacacatgacagtatgttccaattatgcattctggaacttaggaaataaccgcatagactgagcctggggacccaatgggcccactgtgagatggacctgagctaaaactcccttgaccacctgacctccgtaagcccctggagggccacagggatgcttctggtcttctggaatgaatgtcagttcagagccagtgtcccagagtgcctgagaggtctgattattttctttttcctagtacacaatgaccctggtaaaaggtcaaaggtctctctagggaaggctgagagaaagattaacagtagaggtttttgayagcatacaggatcctttctggaggggactgtgcttcccctgcatggaccatgatgttctattttcatgattcaagtaa

SEQ ID NO: 949194 - DNA, 458 bp, Homo sapiens
acctccgtggctgtaataaggacgaaattagatacagtgtgtaggttgcctagctggtgtctgacacaaaaaggtcctcagtaaacagtatgaatggattcaaagccatttaacctctaaacttccctccactctatgcagaaaggccttctctccagcccatgaaaccctaattgccttcttttctccccacacttgctattgtgggctccctactggaaggctctcctttcactcagcctaaccaaatcccccacaaaagcctgactcaggtccccactcagcagcctcaggcctggcatcacatggcctctcgatggtggamccagcattgcgggttgctctctcggcaggcatgtctggccatccacacctgggggcagagaacactccatcttcccctgtgccctccacaacacccaagacaaagctgggcccatgcagcatgctcgataggg

SEQ ID NO: 949195 - DNA, 458 bp, Homo sapiens
acctccgtggctgtaataaggacgaaattagatacagtgtgtaggttgcctagctggtgtctgacacaaaaaggtcctcagtaaacagtatgaatggattcaaagccatttaacctctaaacttccctccactctatgcagaaaggccttctctccagcccatgaaaccctaattgccttcttttctccccacacttgctattgtgggctccctactggaaggctctcctttcactcagcctaaccaaatcccccacaaaagcctgactcaggtccccactcagcagcctcaggcctggcatcacatggcctctcgatggtggacccagcattgcgggttgctctctcggcaggcatgtctggccatccacacctgggggcagagaacactccatcttccsctgtgccctccacaacacccaagacaaagctgggcccatgcagcatgctcgataggg

SEQ ID NO: 949196 - DNA, 606 bp, Homo sapiens
tgatggggaacatggtaagtccagtaaattccatgagcatgagcccactgctgcacttctttagctataaagtgagtgccttggtcagtrgcaatgttgtgtggaataccatgatggtagataaggccttctgtgagtccacagatggtagtcttggcagaagcattgcgtgcaggataggcaaacccatatctggagtaagtgtctatttcagtgaggacaaaaacctctgccctttctatgatgaaagagttccagtataatcaacctgccaccagggagctggccgatcaccccaaggaatggtgccatatcgaaggctcagtgttggtctctgctgctgtcaagttgggcactcagcagtggctgtagccaggtcagccttggcgagtggaagtccatattactgagcccatgagtaacctctatccctgccaccatagccactttgttcatgggcccattggtgatgacagcggtggctggggaaagaggctgagtggtgtccacagaatgggtcatcctatccacttgattattaaaatcctcctctgctgaggtcacctgttggtgagcactcacatgggatacaaacgtcttcacagt

SEQ ID NO: 949197 - DNA, 689 bp, Homo sapiens
aaaattttatcttctattatctttgattattgyttgtgttccacttattctctcttccatttgagagctctggtccctcattagttggttgtctcttctctggttgtctgtgaccattttctttttctaattatcatttctggataccttccttctgtatggagggatagctgctaagctgctcatcctctgcattgctgattttctgtaactgtgctgttggtgctaatgtggactttaattttgtatttatgttttcatgtatattgaaatatgaagaaattccataacttctcttatattgtattatttatattgttattttagtatttatatattattattattataattattttgagacagagtctcacttcgtcatccaggctggagtgcagtcactgcaacctctgcctcctgggttcaagcaagtctcatgctcagcttcccaagtagctggaattacaagtgcgtgccaccatgcccagctaatttttgaatttttagtagagacggggtcttaccatgttggccaggatgatctcgaactcctgatcttaggtgatccacccaccttggcctcccaaagtgctgggattaaatgcatgagccaccacacccggccacatattgtttctatactatcattttagctctttatgttatttcgttgcctttatgtagaggtc

SEQ ID NO: 949198 - DNA, 651 bp, Homo sapiens
tcttagatttaagtttttaactcatcttgagttaatttttgtgtaaagtgcgatatgagaacccagtttctttcttctacatgtggcttgccaattatcccaacactgtttattgaatatggtgtcctttccccacttagtgtttttgtttgctttgtcaaagaccagttggctgtatttgggcttatttctgggttctctgtgctgttcagtggtgtatgtgctatttttacaccagtgtcatgctgttttggtgactatggccttttagtatagtttgaagtcagataatgtgatgcctccggatttgttctttttgcttagtcttgctttggctgtgagtctcttttttggttccatatgaattttaggattgtttttcctaattttgtgaaaaatgatggtagtattttgataggaattgcatgaatttgtagattgcttttggcagtatggtcattttcacaatatggataccacccatctgtgagcatgtgacgtgtttccatttctttgtgtcatctgtgatttctttcrgtaatgttttgtagttttcctcgtagaggtctttcacctccttggttaggtatattcctaagtattttttttttttttttggcagctattggaaaagggattgagttcttgatt

SEQ ID NO: 949199 - DNA, 597 bp, Homo sapiens
tagaatacaattgaccagtcaaycttccttgaaataatttcttttcctgtactgcacggtactataatttccaggaaataagccgaacagtgttttttattaaagcaaaaacagccaacaggaagtaagttgtgcttactttaagatagttaagtgtttagtctcattaaattacatatgtataaacaaactaattagcattcttcatctgctcaactgatgaaattacactatgaagcagatgcacgcagtgttgataccttggaaacctgtttgtcttgcttttgcctgccaggaatacagaatacagaatattcctggcaggcaaaagattgttcctcaagtaaactagtgatgatttttatgggtaacgttagcagtaacttcagaaatggtttggtcagtgggtgaattcagtacatagttggttgtagagatggtagtaacatggtaagggaaaaacaaataaattaaaataataaatttggcgacaggccttggcaagaagtggaataatatgttctcagaaacttgaagaggtacttctcattccaaaagttgataattaaacagcctccaaataaacttaatgctcac

SEQ ID NO: 949200 - DNA, 602 bp, Homo sapiens
cttagttacttccaagatacaatgggggtactggtgttgggtaaatgctcctgttccaaatgggagaaattgaccaaaacaaagggggctacaggccccatgcaagtgcagaatccagtggggtagtcaaatcctaaagggctgaaatgatctcctttgacaccatgtctcgcatctgctgatgcaaggggtgcccatggcctttggcagctccgtcacagggtagcattcagtgcccatggcttttccaggcacacagtgcaagctgttggtggatctactattctgggatctgggggacagtagccctcttctctcagcttcactaggcagtgccccagtggggactgtgctgtggctccaaccccacgtttgccttccacactgccatagcagtggctctccatgaggcctctccccctgcagcagacttctgcctggacatccaggcatttccatacatcctctgaaatctagtcagtggtttccaaaccttaactgttgaattctgtgcaactgcaggcccaacaccatgtggaagctgcttggggtttacaccyactgaagcaatagcccaagctttactgtggcccctttcagct

SEQ ID NO: 949201 - DNA, 463 bp, Homo sapiens
aaaatagctgcaaaaaagcaaatctaagaattattggccttaaagaagagacagagaaagagatggtgtaaagagtttattcaaagggttaataacagagaacttcccaaacctagagaaagatattaatgtccaagtacaagaaggttatagaacaccaagaagatttaacccaaataagactacctctcaaggcatttaatagttaaactcgtgaagatcaagaataaagaaggaatcctaaaaatagcaagagaaaagggacaaataacatacattggagtttcaatcatctagcagcagactattgagaggaaaccttacaggccaggagagactrgcatttaaagtgctgaaggaaaaaaaaacttttaccccagaatagtatatctggtaaaaatattctttaaatatgaagaaataaagactttcccagacaaacaaaagctgatggattttatca

SEQ ID NO: 949202 - DNA, 591 bp, Homo sapiens
gagaaacactactctcttcaaagctgtgagggagggacatttaggtctgcrgagtttactgctgtctttttgtttgtctgtgccttgcccccagaggtggagccttcaggggcaaggaggcctccttgagctgtagtgggctccacccagtttgagcttccttaccattttgtttacctaatcaaacaactaacttggcaatgctgggcgcccctcccccagcctcgctgccaccttgcagtttcatcttgggctgctgtgctagtaatgagtgagagtccatgggcgtaggacctccaagccatgtacgggatataatctcctggtgtgccattttttaagcccattggaaaagcgcagtattagtgtgggagtgatccggttttccaggtgccatctgtcaccactttctttgactaggaaagggaattccctgaccccttttgcttcctggatgaggcgatgcctcaccctgcttcaggtcaaacctggtgtactgtacccactgtcctgcagctactgtctggcactccccagtgagatgaacctggtacctcagttggaaatgcagaaatcacccatcttcagcgt

SEQ ID NO: 949203 - DNA, 612 bp, Homo sapiens
ctgaaagacttgaagacagaccacattaaaggactttttgttgatactccccagtacaagtctgggagcatggcagctccactgggtgactagacccaaaaaagcaaaaacaataactgcggtttggctctcartaaggcccatccatagggaaatggggagaacaccacaacaaaggagcacattgtgggacaaaagaatctgaacagcagctcttgagccccagatcttccctctgacatagtctacccaaatgagaaggaaccagaaaaacaattctggtgatatgacaaaaccaggttctttaacacccccaaaagatcacaccagctcaccaacagtggatccaaacccagatgaatctctgaattgccagaaaaaaaattcagaagtttattattaagctaatcaaggaggcaacagagaaatgggaagttaaacttaaagaaatccaagacatgataaaggatatgaaaggaaaattatttaatgaaatggatagcataaattaaaaaatcacaacttctggaaatcaaggacacacttagggaaatgcacactggaaagtctcaacaatagaatcaaagaagcagaagaaagcacttcagagct

SEQ ID NO: 949204 - DNA, 596 bp, Homo sapiens
ttcttttttctagttgttatagtttattgttgaaacttagcactgcattttgtatctccctaaatgtgtctttcgttcccagaagttgtgatttttttctttatgatatctctttctctagakaatttttcatccttaacttgtatttttaaaaaatttctttgagttggttttcacctttctctggtatctccttgagtagcttgataatcaagattctgaattccttatctggcaattcagagatttcttcttgatttggatccattgccagggagttggtcttttggggttgttatagaatcctgtttgtcatattaccagaattattttctgggggttccttttcatttggatgactatttctgtggagagttctgaaactcaaggcctgctgttcagattttcttgtcccatggggtgaccccttgatgtagtgccctcccccttaccctagggatggggcttcctgagagttggacagcagtgattgttattgttcttctggatttagccatccatcggggctaccaggctctgggctggtgctgggggttgtctgcaaagggttctgtgatgtgatccatcttcaggtc

SEQ ID NO: 949205 - DNA, 684 bp, Homo sapiens
acacgcctgtaatcccagctacttgggaggctgaggcaggagaattacgtgaacctgggaggtggaggttgcagtgagccgagattactccctccagtctaggtgacagagcaagactccgtcacaaaaaaraataaaaaataaaataaaataaattttaaaaaataacctaattagattaagaagcatccgcacagtcaaagaaatcatcatcagagtaaacagacaacccacaaaacgggagaaaatatttgcaaaccatgtatctgacaaaggactaatatccagaatctacaaggaactcaaacaaatcaacaagaaaaaaaatcccattaaaaagtgggcaaatgacagacatttctctaaagaagataaacaaacggccaaacatgaaaaaatattcattagggaaatgcaaattaaagccacaatgagataccaccttaccccagctacaatggttattactaaaaagtcaaaaagcaatagataatgcatggatgtgatgaaaagggaacacttatacactgctggtgggaatgtaaattagtacaacctctgtggaaaacactatggagatttctcaaagaactacaagtagatctaccgtttgatccagcaatcccactactatctacccaaaggaaaagaagtcactgtatcgaaaagacaactgcacattta

SEQ ID NO: 949206 - DNA, 517 bp, Homo sapiens
aagaagcatccgcacagtcaaagaaatcatcatcagagtaaacagacaacccacaaaacgggagaaaatatttgcaaaccatgtatctgacaaaggactaatatccagaatctacaaggaactcaaacaaatcaacaagaaaaaaaatcccattaaaaagtgggcaaatgacagacatttctctaaagaagataaacaaacggccaaacatgaaaaaatattcattagggaaatgcaaattaaagccacaatgagataccaccttaccccagctacaatggttattactaaaaagtcaaaaagcaatagataatgcatggatgtgatgaaaagggaacacttatacactgctggtgggaatgtaaattagtacaacctctgtggaaaacactatggagatttctcaaagaactacaagtagatctaccgkttgatccagcaatcccactactatctacccaaaggaaaagaagtcactgtatcgaaaagacaactgcacatttattgcagcacaatt

SEQ ID NO: 949207 - DNA, 661 bp, Homo sapiens
tcctcatagcagccctcctcctgagactgtggggacgagggctagatctcagatccagggtctgtcctctgagaagtcatctttacaggcggatttcttagtgtttttcattggcagaggcaggcttttccttgtgtgacctcaatgaaagtatatttgatcatccttagaggagatgactagaaggtactccatattgtctctccccagaacactgctgagaggcagcatttttaccagagagatgatttggccttcagcaagtaatctgaaatagaaatgatggatagaagacgctagccaaccaggagctcagagaagatggtcatctagacagagatacctggggcatggcagtcatggagaagagtcactgtcactctttctgctcagtcctagagatagttttcaatgccactgcattttgccctaagtggtaatatagatactgaatgaatggatgttactctgctggagatttcaataaagaggtagtaagtaggttccttgttgggttttactcaattttccaaatttgtatagcatttacmttcatttacatttttataagttgtcgttaagcagcaatagtttgtattttttttacattaagaagaaccatacaaattgacatcgtagaaaaatgatgaaaaaatgtagt

SEQ ID NO: 949208 - DNA, 613 bp, Homo sapiens
tttttgcaagagttttatggtttcaatctttgcatttaggtttatgatttgttttgagttaattaatttttgtatatggagcaaattaagaatttaagttctttttttaatataaaaaaacactattgttgaaaagtgtattctttcttcacaaaattgcatttgtatctctatggaaaatcaagtggccgtgcacatacatgtgggtctatttctgtactctttttttccttcaccaatagcaaactggcttgattactgtggttttatagtgctatgatgacctcgtattcacctcattagtgaggaaggcatccactgccctaaacagaatgagatggttgaacacatcgcaacactgggcagatagatgggcagcattttattacccacatctactcatggtcctgcgggaggacactgcacaccacacagggccacaccggggtgcacttgggaacagatgaacaagcaggggcagcaagagagaggcaggctttgaatatcaacagcacagggtgcccctggttactatgtgaggacgatactgccttgttttaatgrtttgcggctggcagggaactgaagtctgtcagattgaggaccaggtggt

SEQ ID NO: 949209 - DNA, 628 bp, Homo sapiens
ttctaccagaagtacaaagaggagctggtaccattcctactaaaactattccaaacaattgaaaaggggggactcctccctaactcattttatgaagccagcatcatcctgataccaaaaccaggaagagacacaacaaaaaaagagaacttcaggccaatatctctgaagaacatcaatgcgaaaatcctcaataaaacactgcaaaccgaatccaggagcacatcaaaaaacttatccaccacgatcaaatcagcttcatccctgggatgcaaggctggttcaacatatgcaaatcaatacatgtaatccatcatgcaaacagaagcaaagacaaaaaccacatgattatctcaatacatgcagaaaaggcctttgataaaatccaacatcccttcatgttaaaaactcttaataaactaggtactgatggaacatatctcaaaataataagggctatttatgacaaacccacagcgtcagtatcattcagtatcatattgaatgggcaaaagctggaagcattgcytttgaaaactggtataagacaaggatgcctctctcaccactcctattcaacatagtattggaaattctggccagggcaatcaggcaagagaaagaaata

SEQ ID NO: 949210 - DNA, 579 bp, Homo sapiens
aatattttctagaagtgggaataatggatattattgtgctgtatttmagatcttagggaaaaataattagttattcacctgtacatgtgatgaaagttatagagttgtgctttatgtagttggataagaaatgttttctttttcaaaaatatgtgtgttgaattttgataattgccatttacaaatctattctgaatctattgtgatgcttatatatttttatattttagtctcttactagagtgaattacaatgattgatttatgaatgttaaaccaccttgtattcccaggacaaattcaacctggttatgatgtgttacctttttatgtggctaacttcaataagctaaatttgagatattatttttgaatccatgtttagagatatttgtaatttatttgtaattttgttgcaataaccattctaagcatcttattaatactccatcatacaaggagtagagatgtgtaccctcttgttttattttccagaagagcttgtctagacttgtatttttttaagtgtttgctagaatttaccactacaatcttatgggcttagagtttctttgtgaaa

SEQ ID NO: 949211 - DNA, 787 bp, Homo sapiens; identical to SEQ ID NO: 949160

SEQ ID NO: 949212 - DNA, 580 bp, Homo sapiens
atgtgtgtgctggacactattggcctccacatwcgctttttttttttctttttaaagttggggtctcgctctgttgcccaggctggagtgcagtggtgcaatcatagctcactgacgcctccaactcctgggctcaagtgatcctcctgcctcagcctccccagtggctaggaccacaggtatgtgccagcacaccagtctaatttttattttatttattcatttatttagagatgaagtctccctcttcttgctcaggctggagtgcaatggtacaatctcggctcactgcaacctctgcctcccaagttccagcaattctcttgcctcagcctctgagtagctgggattacagtcatgtgccaccacacctggctaatttttgtatttttagtagagatgggatttcaccttgttggtcaggctggtctcaaactcctgacctcaagtgattagcctgcctcagcctcccaaagtgctgggattacaggcataagccactgtgcccagcagcctggtccttgttgaaggccctgagccgaccccatgggagcatcgggcgttctgtcttttgcaccat

SEQ ID NO: 949213 - DNA, 555 bp, Homo sapiens
tgctcacttctgaatggttctcaggcaacaggcacagtgcctgctcccagaaacggctctctctgcaaagacgaacagaacacaatggcctccttgtgtgacatgctaaattcgagccccatacggagccgggagcagaagtcgcagaagcacatcgggtgggacagaggggctcctctaggaattatctggtcggggcatgagcaggtggctggacttctggcccctttatggccagaagaccaattcttggctggtctctaagcaaacaaagggagcagcaccttgtcagcggatgtgatttttgtgacatctgttccgcagcccccatcaattcacacccagcgtctgcgtgactcatgtccttgaattagccattgttgggcccgagggaggcgaacgggaaaaccgaacggaagaaaggtttggggaagggaacgttctgttctstcctccaacgataagcgcctgtttggcagcgtcatggcagggacaatgcagagatggccttgaaaattctcaggctgtcggtcacgctgaggggcaaagaaaagt

SEQ ID NO: 949214 - DNA, 862 bp, Homo sapiens
acacaagggccatatcagagagggcctagtaaacctttgtcagaagtttgacttttactctgtgtgaggttgagatggcatcagggtcatatgcgtaggagtggtacagtctgttttaagggataactgtgggtgctgagaataggctgaagatggattgagggcagatgggagtgcatggtgtcttggaccacggggtaactgaagaggtgataagcaccatttggcttttagatatattttctaagagcagataaaatttgcaggccggagccagatgtggtggctcatgtctataatcccagcactttatgagactgagacagtaggatcatttgagaacagtagtttgaaaccagcctaggcaacatagtgatagaccgtctttgcaaaaaataaaaaaattaaccaggcttggtgttgaacagccataatcccagctactcaggaggctgaggctggagaattgcctgagctcaggagtttgaggctgtagttagctatgattggaccactgcaccccagccttggtgacagagcaagaccctgtctgtaaaaataaaataatgaaaaaaaaatttttttttaatttgcagactggatgtggagagtaagagtaagaggggagtcaaggattactaaggtttttggcctgatcaactgaaagaatggagttgctctaactgagatagggaggacctgggaggagcagggttgagaggaattaggagtttggctttgagyatgttacgtttgagaggtatagttccaggaagaagtcgtggctggataaaatccccaagggagtgggagagagacaaggactgaggcctgggacattgaaatgttagggatcagggag

SEQ ID NO: 949215 - DNA, 569 bp, Homo sapiens
attgagagacgatgaacagcctggctaagcaacttcatttaattcttttcctttcrtctctctgtagcacaataaaggaaattaaaatcagtgattgattgtgtttgagtgcattatcatcaagactgaatacataaacaatgcaccaaatgagaagctatttaatcacattttttgttactatatatctaactcagtatatcatgagccaaggaactgacatttattttattcagaagaagaaaataaattcatttattttatttgagtgtttctcctgtgttaatagaacattctattttccttgaaaattttacattaaaaaacatacaaaaatctttattaaatggaaatcattatcatttaacttttttgaaaacactactgttttagatgtttcccttaactgttggttattagtttattttagttcctagaaatcttcagtgtgaatgctgacatttcaaatataccaggaaattatttttcttcattggaaagggcttaggaagcctattcctttttctgaatcagattatcttattgcattaattttatttgggaataag

SEQ ID NO: 949216 - DNA, 789 bp, Homo sapiens
agaaaaatcaatatacaaactacaggcatccaggatccaggagaagaagtgagaatgaaaggagcaacaaacttatttttttaaaaagagggagagaggattaagatggcatataggagacaggactagcttgcagctcccacttggacgggcagagcggcatgtggtaacttacactgtgaacttttgctccaagaattaccacaggaacaaccaggaaagccaagagaatccacggaccctttgaaggaactgaatcaccgctgcaggctccctgagatgccaaaaacctgagagtctgattgctttctgcttgctttctcagcagggaggctagtggtctggggcaagtcctcacccctggtcactggctgcctggaaatagactcagtgtggtgttgggggatcggtcatggtgagaatgagactggcctttaagactgcgggctgtgtgggtgtggagtgagtcctgtgactgccagctttctctcacttccctggtgacctgtatgactcagcagaggcagccacaatccttctggaaatataactccattggactgggaaccacacccctatccccacagcagccacagcaagccctgcccaaggagaggctgagctcagacacacctatatctgcccccacccactgacctttctctaccagccctggtagtggaagacaaaagttataatcacttgggagttccatggccctgcccactaccckagaaacctgaatacttaaccaggtgtccctagggcaagtttacatcttccttatag

SEQ ID NO: 949217 - DNA, 614 bp, Homo sapiens
tgggctggcattgagtgtctgtggcttttccaggcacacagtgtaggctgttggtggatctaccattctggggtctggaggayggtggccctcttctcacagctccacaaggcagtgccccaggagggactctgtgtgggggctctgactccacgtttcccttacaaactgccctagccgaggttctccatgagggcccagcccctgcagcaaacttctgccttgccagccaggcattttcatacatgctctaaaatttaggtggaggttcccaaaccccaattcttgacttctgtgcactggcaggctcagtaccacatggaagctgccaaggcttggagcttgcaccctctgaagccatggcccaagctctatgttggcccctttcagccatggctggagcagctcagatgcagggcaccaagtccctaggctgcacacagcatgggaaccctgggcacagcccacaaaaccattttttcctcctaggcctctgggcttgtgatggtagaggctgccatgaagacctctgacatgctctggagacattttccccattttcttggggattaacatttggctcctcattgcttatgcaaatttctgcagccagc

SEQ ID NO: 949218 - DNA, 608 bp, Homo sapiens
ctggaatttcagatgcaaagccagggtttgagcccaagccacctgccggaacctgtggcttagccatgctgctctgctgccggtgcgcctgtgactttcgatcctacagcccttyagaagacggtgaccatgggagggggctgcagagagtctcagaagcttggacacccgaggtgctgcttcctggagtgtttcgggagctcgcctctgacctcattgtctggaccccactcaacagacacattcattctcaggaaagcccttgtctggttaatcacgctgagtggaaatcagaggtttttttttttttttttttttcatcaaaagtctgaaagctccattttcaaaggatgcctctcgctgaacaaatgaatagccatctccttataaagcattctgctttgaaattctgggatgaaagggccaaagcacaaatgattgcagggctggtaataagggtaacaataatcatgatgatcatactgtaccgggattttatttttgaagtcaggggagggctcattcgtgctctccggcttcaggctgaaagcctgaaccaggcccttcttaaaagccgggatgcaatcaggctgaaaaaagtttctcgt

SEQ ID NO: 949219 - DNA, 713 bp, Homo sapiens
ggcacgtgagctgagtcagctttgrctgttgtgagttgtgagtgtggccctgggcctcccagtgcaggttttcatgtggacagatgtctgtgcctaagagaggggcagcagggtccctggaactctgtctttagggttccaaggaattgccaaactgttttgcccagaggcattctggttttcattcccaccaacagcatactaggtctctcatctcctcgtgtcctcgccagcacttcatgttctctgtctttctgcttgtagctctctctgtgggtgtgatgtgggcggtacgttttttttttgttttttttttttgagacgcagtctcactccatctccagcctggagtgcagtggcatgatctcggctcactgcaacctccgcctcctgggttcaagcgattctcctgcctcagcctcccgagtagctgggactacaggtgtacgccaccacacctggctaatttttgtatttttagtagagacagggtttcaccatgttgtgcaggatggtctcgatcccttgacctcgtgatcctcccacctcggcctcccaaagtgctgggattacaggcgtgagccaccatgtctggccgggcggtatgttcttaaggggcctgtggatgcttgagtttcaggggagctggtgccacttctgcctgccccacagcctcgcctcctgatggttggtgctgtggtcggcagccatgc

SEQ ID NO: 949220 - DNA, 603 bp, Homo sapiens
ctggaatttcagatgcaaagccagggtttgagcccaagccacctgccggaacctgtggcttagccatgctgctttgctgccggtgcgcctgtgactttcgatcctacagcccttyagaagacggtgaccatgggagggggctgcagagagtctcaaaagcttggacacccgaggtgctgcttcctggagtgtttcgggagctcgcctctgacctcattgtctggaccccactcaacagacacattcattctcaggaaagcccttgtctggttaatcacgctgagtggaaatcagaggtttttttttttttttttttttcatcaagagtctgaaagctccattttcaaaggatgcctctcgctgaacaaatgaatagccatctccttataaagcattctgctttgaaattctgggatgaaagggccagagcacaaatgattgcagtgctggtaataatggtaacaataatcatgatgatcatactgtaccgggattttatttttgaagtcaggggagggctcattcgtgctctccggcttcaggctgaaagcctgaaccaggcccttcttagaagccgggatgcgatcaggctgagaaaagttt

SEQ ID NO: 949221 - DNA, 571 bp, Homo sapiens
caagagaattattgaacccgggacgtgggagttgcagtgagcagagattgcatctcaaaagacaaacaaacaaacaaacaaaagtaaagttcttcaaataaacaaaatggaaaacagaacatacaatatttagaaaacaattatattgtgtgggtaatcattaatgacttcttaaaaactaccaacaatttgtactttggaggatatttgcaaccaaatacaatgaactgtcaaaatatattttacaaaatttcattagtgcattacctgtgaaatcttaactgtgtaaaatttaatttaatgttgttcttgtcccatgaatttcctgtctccatgttcacagaatctctagagaaatctggcaacattactcctaaggttatattcctctgcaaactagtgcacattttattaaatacacacactttatatgatttatgaaacataaatagtattgttctatatagmgtgtcatttttaaaaattatgaatatgtcctagaaaataggtttttaagaagaattgataattgccttatataatataaacgttaggtatggtctattcaata

SEQ ID NO: 949222 - DNA, 795 bp, Homo sapiens
taagtgcaaagttttgcagtgggagaagggagggtgcttatttgcaaggtgccaagtgaggagaatcgggcagttcmtgcttacgtcctgacgtccctgatggcttgcaagcaaggatttttaaaggcaggggtggatttcaggaaaatggaagctacaggcaaaatcagaaccaatacacggaggttatgcatcagtttgacctaaaagggcaggatatcttgaagtggaggcttataggtcacaagtggattcaatgattttctgatttgcaattggttaagaacgggaagctttgtctaaaattttgtggtcaacagaaagaaatgttcagtctggcttgtgggcttcccaggccccttaggaagaaatttcgaacaaaaatgggaggtcaggattcagtcttcaattcccctgtatctgaggtctgcgtggcagaggatccgtttggtagaggtctagatttctgaaaaacaactgaggggcatatgttaagatgttatctttagtttctacaggtaactgaacatctcatgactctagcttccttggctattgttttaggctactattaccttcttgcttgtcacgttgctcatttactcctcagggccagctaggtgcctggagtctcccctgaaagaactcaagattttcctttattttcatgctcagcgcgggggtgcggcagaggtccctgctctgtctcactgggactatcaagtgtctggtacagaaaatagagcaactcaatgcagttgccggtttcagagcattcttgaattgatcgtgaaa

SEQ ID NO: 949223 - DNA, 680 bp, Homo sapiens
ggatgctggattttgtcaaatgctttttctgcatctattgagatgatcataagatttgtttttaattgtttacatggtgtattcatttattgacttatktatgttaaaccatccttgcatccctggtatgaaacccacttgatcttcgtatattatattttcgatatgctgttggattcagttagctagtattttgttgaggatttttgcatctaagttcatctaggatattggtctgtaattttctttttttgttatgtcctttcctgattttagtattagggtaatcctggcttcacagaatgatttagggaagatttcctctttatctttttgaatggtttccgttagattggtacttttttttttttttttgaggcaagctctggctctatcacccaggctggagtgcagtggcataatctcagctcactgcaacctctgcttcacaggtccaagctatcctcccaccttagcctcccgagtagctgggactacaggcgcatgccaccacgcatggctaatttttgtattttttgtagatgatgggtttcgtcatgttgcccaggctggtctcgaactcatgagctcagtgatctgcccatcttggcctcccaaagtgctgagattacaggtgtgagccacagtgcccagcccaattcttctttggatgtctgata

SEQ ID NO: 949224 - DNA, 625 bp, Homo sapiens
caggcttcatctgagagaggcgagcacggggaaaaccacaaaagaacccaggacctccgggctgtagtgccaggtcttcccctaaatggctttccctgtcaggggcatccatcgcaccaggcttactaagctgatggcaacagaagccccttctctatcttgcaggagcagaggaaggactcaggagaacactcaccctggcaagggcacggaagccactgaggtttcttcaggaaagaaggggaggagctgcgcacaccccgttatcctcccggagagcgagtgaggggctaatgactgagaaatgagaggaatcaagctgctgtcttctctgtacagggctgtgttcactacagcattctcctctggggcactcagaaactggctctcctaggagagagaaggatggggggagagacacggaaaaggagacacctcaggcccttcatactcatggcaacgatgcctcaccccttctggtatttagactttctcacaaggaaggctttgctgctagccctggctttgtgggcaggttgtacggcagatgatgtcsgctctgcttaatgtgggtcactgaggcctacaggacttgcctatgtcctcaaagtcccccaggaaggga

SEQ ID NO: 949225 - DNA, 446 bp, Homo sapiens
atttgaaggctttgtaaaaagaaagtgataggagtaaattttagctactgctgctgaaggctgctattgtattcaaatgaagtaatacctacctggcaggtgaaatgttactttgataaagggaattgttaggggaggcatttccccttgtcttccagagtgaagcagaaaattatttcctcttttaaagtcatggaaaattctggctctcctcctatcaagctttctctttaatcacaagtatcatctccaaaatcagaaatctacctcacagggattcacctcctcctgaaatagtaaaaattctggtggagaggaaggggagcagcagccyaaactagaaatactaggctggatgaactatagccacaggtaggcttggtgaagtcagaatgccagccgaccctgacactgaaggagcggatgttcccagtgacccaaacacc

SEQ ID NO: 949226 - DNA, 674 bp, Homo sapiens
ccagttcgagcttccctgtcgctttgtttacctactgaggcctgagcaatggcggcacccctcccccagcctctgccgccttgcagtttgatctcagtctgctgtgctagcaatgagggagagctccgcgggcgcaggaccctctgagccaggtgtgggatataatctcctggtgtgccgtttgttaagcccattggaagagcacagtattagggtgggagtgacccgattttccaggtgctgtctgtcaccgcctttctttgactaggaaaggaaactccctgaccccttgcacttcccagcgtgagcgatgcctcgacctgctttggctcatgccaagcactgcacccagtgtcctgcacccgctgtccggcattccctcgtgagatgaacccggtacctcagttggaaatgcagaaaccacgccatcttctgcatcactcacgctgggagctgtagactggagctgttcctatttggccatcttggctccacccccggctcttgatccactttcaagaggaagagtgcaggtcccctccrctttaacctgggtgggcatttttgatggccctgacaaatagagcacagtgctgtggaagtgatgttatgtggcacttaaggctaggccataaaatacaatacatctgaatcctggctgtctcctaggatgc

SEQ ID NO: 949227 - DNA, 674 bp, Homo sapiens
ccagttcgagcttccctgtcgctttgtttacctactgaggcctgagcaatggcggcacccctcccccagcctctgccgccttgcagtttgatctcagtctgctgtgctagcaatgagggagagctccgcgggcgcaggaccctctgagccaggtgtgggatataatctcctggtgtgccgtttgttaagcccattggaagagcacagtattagggtgggagtgacccgattttccaggtgctgtctgtcaccgcctttctttgactaggaaaggaaactccctgaccccttgcacttcccagcgtgagcgatgcctcgacctgctttggctcatgccaagcactgcacccagtgtcctgcacccgctgtccggcattccctcgtgagatgaacccggtacctcagttggaaatgcagaaaccacgccatcttctgcatcactcacgctgggagctgtagactggagctgttcctatttggccatcttggctccacccccggctcttgatccactttcaagaggaagagtgcaggtcccctccactttaacctgggtgggcatttttgatggccctgacaaatagagcacagtgctgtggaagtgatgttatgtrgcacttaaggctaggccataaaatacaatacatctgaatcctggctgtctcctaggatgc

SEQ ID NO: 949228 - DNA, 563 bp, Homo sapiens
ctgtgcatggctcagagggtcctatgcccatggagcctggctcattgctagcacagcagtctgagatcaaactgcaaggtggcagcgaggctcggggagggcacccaycattgctgaggcttgagtaggtaaacaaagctgccaggaagctggaactgggtaaagcccactgaagctcaagggcctgcctgcctctgtagactccaccctgggggcagggagtagccaaacaaaaggcacagagtcctctgcagacttaaatgtccctgtctgacagctttgaagagagtagtggttctcccagcacgcagccggaaatatgagaacagacagactgcctccttagagtgtccctgaccccgcgagtagcctaactgggaggcagtgcccgagtaggggcagactgacacctcacacggccgggtactcctctgagacgaaacttccagaggaacgatcgagcagcaacatttgctgctcaccaatatccgctgttgtcagcctctgctgctgataccaaggcaaacagggtctagagtgaactccagcaaactccaaaagac

SEQ ID NO: 949229 - DNA, 602 bp, Homo sapiens
aaaggaggagagataagtgtcactattactgttcagttcaaagaatttattttatattttattttatgtttttgagatagatccttgctctgtcaaccaggctggagtgcagtggcacagtctcagctcactgcaacctccacctcctgggtttaagcgattttactgcctcagcctcccaagtagctgggattacgagcatgtgctaccacacctagctaatttttgtatttttagtagagacagggtttcaccatattggccaggctggtcttgaactcctgggctcaaggggtccacccaccttggcctcccaaagtgttgggattacaggcgtgagccactgcacccagtctcaaagaattttttaatgtttatcttgatttcgttgttgacccaacaatcattcaggagcaggttatttaatattcatgtatttgcacacttttgagtgtccttttaaagttaattttcaattttattccattgtggyctgacagagtacttgatataattccaattttcttaaacttattgagacttgttttgtgagctatcatatggtctatcttctaaaatgtttcgtgtgctgatgaatagaa

SEQ ID NO: 949230 - DNA, 555 bp, Homo sapiens
caccagtttggtacttattttcatatagtagaaattttaattttaatgaattccatcttattaattttttttcaaaagatctttgccaaatccaaggtcatgaagattttgttgttataccwtaagagttctatagttttgtttatagttttagtgtagtttatagttttacatttaggtctgatatttattttgagttaatttgtgtgaaatgtgtaagatgagtctaaatccttttttttttttttgcatgtggatgtctagttgctccagcactatttgatgaaaagactatattttctacattatgttgcctttgttcctttgtcaaagatcagttgactgtatttagataactttatttgtgggttttcaattctgtatcattgatacatttgttttttctttcactaatatcacattttcttgcttgctatagctatagaggaatccttgaagtaaggtgacgtcagttcttcaacctggttcttatttgtcaatattgttttagctaggctggatcttttgcctcttcatatatactttagaaacagt

SEQ ID NO: 949231 - DNA, 853 bp, Homo sapiens
catgtcccatatccaggaagaatgagatacgtgaacaactggagggggagtaaagtggagaggagcttcattgaatgacagaacagctctcaggagacccatagtgggttgctcctttctgcaggcaggtcatctcaacgagtggccagacgagtgtctggagaggagaattgcagtgggtagctcctttccacaggcaggttgtccacatatcccactctaagcctagaggagacctgcagtggatagctcctttatgcaactggtagtccttatgtctgttagaggctgactgagtctggggtctttatgggcttataagagagaaactgcatgctgattggttcattggtggccataggtggtctgggaagaagctatgtaagttctcactctgggccagatttcacctggaaatgacagccccgatcccaggctttaggtcacccctggcttgaaagtggggcttcacagtggacctgactctttctgcccaggatcctgtttttctcctgcggccatcaataagtcatccacaacatccaggctattcatgtcgaggggtccctgcaagcccatgccaaggcactctcaactcctcctcagtctgccttctatgcttgtggttggcacctgaggtccagagggggccaaagcagcagggactagtgtgtcagcaccaccccaagtatgtacacacctggctgggtcttaatagtgcctggacttggacacaactttgctctgaaatcagagtgggtgctgggagtaagaagaagcagaagcaagcactttcaagcccrtggtggcagggggccttcctgggcccctgagagcacaaggatgactgtgt

SEQ ID NO: 949232 - DNA, 582 bp, Homo sapiens
aattttgaacatatcttcatcggggttattgtcctcaggttttcttattttgttatgtctctgccagattttggtatcggaataatgctggcctcatagaatgagttagggaggagtccttcttcctcaatgaaaaaaaaatagttttagtagcactggtgccagttcgttttgaaagtctggtagagtttggctgcaattctgtctggctagggctttttctggttggtaggttttgtattcctgattcaattttggattttattattggtctgtacaggatttcaatttatttttttcaatttcaatctggggaggctgtatgtttccaggaatttatcgatttcttctaggtgttctagtttctgtgcacataggtgtttgtaatagtctctgagtttctttttgtatttctttggggtaatgttatctatatcatttctgctcatgtttrtttggaacttctctcttttgttcttcattatctagctagccatctatcaatcttatttattattttaaaaaataaacttttggtttcattgatcttttatgtggtttttaacatatcaatttcattcg

SEQ ID NO: 949233 - DNA, 594 bp, Homo sapiens
tatcacttttcaagaggagctagttcatgatattcaaacmcacctgagaaagtgttcaggaaagaactagagaagggcttatttcataataaggaataaggaatttgacttattaagtcaaattatgcccctggctgaggaaaacagacatttggaataatgggtaattaatagggaccaattagacagaggaaggttttatacatcggttttatatatctttgtaagagaaatgttcaatttctagttataaagataaaataagcattattaagcttttgaaaatgaaagaatagtattgattgtattaattagcatttattaagcacttaactggcacaatgcacaactccaaatactttatgtgggttaactcaaacatcacagaaaacctaaacaggtaggtcctttactcacttagcaagtgggggaaacgaattttcaaatcagttagtggttaaattgtgaataattaagagtgtccaccaaatgagagttgaacaactgacctatacatagaatgactctttgagggacgactgctgcattgttaataatttgaatatttaactcatgagctcatctaaaacatag

SEQ ID NO: 949234 - DNA, 591 bp, Homo sapiens
aaaaggaaaaaaaaatacagatgctagcgagactgtggagtaaggggtaatgcttatccactcttggcagaaatttaaattagttcagtcactgtggaaaacaatttggagatttctcaaagaacttaaaacagaggtttcatttgacccagcaatcccattactaggtatattgtcaaagaaaaatagatcattataccaaaaagatacctgcactaatatgttcattgctgcactattcacaatagcaaatacatggaatctacttgggtacatatccatcatggaatactacacaaccatacaaaaaatagtaacatcgcatcccttgaagcaacatggatggagctgggggccataatcctaaatgaattaacacaggaacagaagaccaaatactgcattttctcacctataagtgggagctaaatattgagcacccaaggacataaacataagaataatagatgcgacagactactaggggtgggcagggaggttggtgtgggttcaaaaactacttattgggtastaggctcactacttgggtgcaacatacccatgtaacaacctgtgcatgtaccttcctgt

SEQ ID NO: 949235 - DNA, 599 bp, Homo sapiens
tgtgtgtgtgcgcataatcacccatgcatatacacatatttatatatatttctatagataaacatctacatttacattaagctgaaggtaagttcatactgatgtctatacctctaatccaataccatgtgaattattcaagcttactccctttacttaaatctaacttcccacttcaacagttgagtttttggactcccaatatttgccatacatttacttaattgttcaattccagtttacatgtgtagtggttttagaattgttgatctgtgtgctccatgagacaccactttgtcaactaacatacatgcttatgtagattatgtgtggtttctttggactttattcttacagactccactcatttctagttatttagatcaacacagtttttctacacccctaagactgaggttgttttgtacatttgtaatacatttagataattttttcacattctgcattctatcccagaatcctccagttaagtgattaaaaaaatttgcacagattgtttcaygctttgagtcacataattctccagattttaacaaattatctttaaaaatttctgattactcttaaaaaacttacga

SEQ ID NO: 949236 - DNA, 610 bp, Homo sapiens
accaatatcagaaatgaaatagaaaatatcaccatagagcctgcacccatcaaaaggataataaaggctactgtgaacaactctacacatataaatttgacaactggaatgaaataaaccaattcttcaaatgtggacacactaccacaattcatccaagatgaaatagaccatttgaagagccttataactttgaaggaaactcaatttgtaattttaaaacttccaaaaaaagacgtttagaggctcagatgatttcactgaagaactatacctaatgtttaaagaaatactaacacaattctacctattttttaaatagaaaataggagggaacacatcccaattcactttttgaagctagtattatctaatatcaaaaccagagaaaaataatacaaaaaaagaagaaactacaggccagtatcccctatgagtatagagacaaacatctctaataaaatattagcaaacagaattcagcaatatataaaaagaattatatactrttctattaccaaatgtgatttattccagggatgcaaggctagtatgatattcaaaaatccattaatataatctaacatattaacaggctaaagaagataaa

SEQ ID NO: 949237 - DNA, 578 bp, Homo sapiens
aacaccgtaacaaaaatgaaaaatgcctttgatggactcaccagcaggctggatgaagctgaggaaaaaatcagtrggctggaaaaataggttaatagaaattttcctaactgaaatgcaaagagaaaaaaataatttataaaagtacagcacatccaagagttgtgggacaatttcaaaaggtgtaacatatgcataattggaataccagatcaagaagaaagagaaaatggagaagataagagttgaagtacttaatgccagatgacaaaacacaggtctaggaatctcagagcacactaagcaggatcaatactaaggctctacacctacatatgtcattcttaagttgcagaaagccaaagacaaaatcttgaaaataggcagaggaaaaagtgccttacctgtagaagaacgaagatgagaattacagggaacttcttgtcagaaatcattcaacaaagaggagaatggagtgaaatatttagtgtcgaatgaaaaataacacttacctggatttctctatctagtgaaatcatccttcaaaagtaaaggagaaagaaagactttttcagacc

SEQ ID NO: 949238 - DNA, 673 bp, Homo sapiens
ttacgtccccgtaagtgaacttctccccccttactctgcattgtgggaaaccgcccagagagagattccatggggagactgcactatggaaaagacgatttctgtaagatctggtaaatctgtagtaatgcatttattctggtattggaagagtggcgatttgtttactcagttctttatcttttccagagtataggagttatcacagcaatcagaggggagaaattaaaagattagtgcagcactgaaaacctccagtgcggatgggctattaggaatctaaagagttcaacaagcctaaatctaagtcagcttcgtaactgctgtctctgcttcattgtagggctggattttttttttcttttcctgagcacagtttttcatcattttctcaggtgggctatggactagccagtcacttgagtagagagcccttatttcaggcagcttcaaatgcctcatcatttctcaatgagttccagctccaggagatttcagtgctggaagaattgcaataagctatgaaactttatcccttctcaagactcttccgagtcactggggwactctggcttccacgggtaatggtaatcgctccactcacttagagaaggaaggtaccacctcgggggtcacatgacaataccaaagaggttaaatcaacttccagctg

SEQ ID NO: 949239 - DNA, 560 bp, Homo sapiens
tgaaacaatttcaagctcatagaaatattgcaagaatagtacaaataaccactgtgtaccctttagtcagattgactaatgtttaacattttgctatatttgctttctctctctctttttatacaygcacgcacacagacacacacaaaatgttctttctttttaaaaaacaggatcttactttgttgcccaggttgtaatagagtggcatgatcatagctcactgcagcctcaatttcctgggctcaggcgattgtctcaccttagcctccagagtagctggaactacggtcactcactaccatgccaggctaattttttctagagatcgggttccaccatgttgaccaggctggtctcaaactcctgagctcaagctatccacttgtcttggcctcccgaaatgctgggattacacgtgtgagccactgcgcctgggcacaaatttcctaatcatttgagaataggatgcatagatcatgtttctttcttcctcagcacttcattatttcctaagaagaaggacgttttctcatgtaaccacgtatcaaccacatatg

SEQ ID NO: 949240 - DNA, 609 bp, Homo sapiens
gttgctgcaaaggacattatttcattctttttggtggctgtgtagtattccatagtgtatatgtaatatattttctttacccagtccaccaattatggccacctaggttgattccatgtctttgctgttgtgaatagtgctgcaatgaacatgccagtgcatgtgtctttttggcagaacactttgggttttttgggaggtatatgcccagtaacgggattgctggattggatgatagttatgttttaagtcctttgacaaatctccaaactactttccactgtggctgaagtcatttacattcccaccaacaatgtataagtgtccccttttctctgcagcctctccagcatatattattatttgactttttaataacaggcattctgattggtgttagatggtatctcattgtggctttgatttgcatttctctgatgactagtgatgtgtagcatttttttttcatatgtttgttggttgcttgtgtgtcttctcttgagaagtgtctgttcatgtcctttgcccatttattaatggrgtgatttgctttttgcttgttgatttaagttccatatagattctggatattagacttttgacagatgc

SEQ ID NO: 949241 - DNA, 529 bp, Homo sapiens
gcgcagattggtctcgaactcctaggctcaaacaatcctcctaccttggcctcccaaagtgctgggactacaggcatgagccaccatgctcagccttggtagcatctttgatgcacaagtattttattttgatgaagtccaatttatctgtttgattttcaccccctttggttgcttatgcttttggtattgtatcaaaaaccattgccaggctgggcacaatggtgcatgcttataatcccagtgctttgggaggccaaagtggtaggatcacttgagctcagaagtttgagaccagcctgggcaacatagtaagaccatgtccctacaaaaaaataattagccaggtatggtggcatacacctgtagtccccgctgcttgggaggctgaggcaggaggatcacttgagtctgggaggctgaggctgaagtgagctgtgatcaagccmctgtactccagcctgggcaacaggctcaaaaaaccaaccaaccaatcaaccattgtgtaaagtagacacagtggcatgca

SEQ ID NO: 949242 - DNA, 631 bp, Homo sapiens
aatatgagaaaacattctgtgtaagtaagcaataaccaaaagagaggtgagatggttgtatgattattatacaaagtagacaatacatctaaaattgttacagaagacaaataagaacwttatatattggtaaaaggatcaattcaccaagaagacataatacttacaaacatatatgcaccaaatctcagagccctaaactacatgaagggaccttggcagcattgaagacagaaatttgcagttctagttgcagacttcaatacctcactttgaatactggaataagcaactatataaaaaataattatgaaataaagaacttttcaaacactacaaacctaatagacctaatagacatataagaaaaacttcacctcaaacagcagagtatgcatttttctcaagtgcacagaaaacatgccccaggatatgttaggccacaagacaaatctcaatacttgtattttaaaacattcaattaaaaaattaaatagttcaaggtatcttagcaacaatgaaataaaatagaaataaataagagaaaaacctggactattcagaaatgtaggaatttaacaacatattcttaaacaatcatggctaaaagaagaaatcaaaagagatatta

SEQ ID NO: 949243 - DNA, 631 bp, Homo sapiens
aatatgagaaaacattctgtgtaagtaagcaataaccaaaagagaggtgagatggttgtatgattattatacaaagtagacaatacatctaaaattgttacagaagacaaataagaacattatatattggtaaaaggatcaattcaccaagaagacataatacttacaaacatatatgcaccaaatctcagagccctaaactacatgaagggaccttggcagcattgaagacagaaatttgcagttctagttgcagacttcaatacctcactttgaatactggaataagcaactatataaaaaataattatgaaataaagaacttttcaaacactacaaacctaatagacctaatagacatataagaaaaacttcacctcaaacagcagagtatgcatttttctcaagtgcacagaaaacatgccccaggatatgttaggccacaagacaaatctcaatacttgtattttaaaacattcaattaaaaaattaaatagttcaagstatcttagcaacaatgaaataaaatagaaataaataagagaaaaacctggactattcagaaatgtaggaatttaacaacatattcttaaacaatcatggctaaaagaagaaatcaaaagagatatta

SEQ ID NO: 949244 - DNA, 606 bp, Homo sapiens
cgctcgccgtccaccactgctgtttgccactatcgcagacccactgctgacttccatccctccggatccagcaaggtatctgctgtgctcctgatccagcgaggcgcctattgccactccctattgggctaaaggcttgccattgttcctgcacggctaagtgcctgggttcatcctaatggagctgaacactagtcactgggttccacagttctcttccgtgaccaatggcttccaacagagctataacactcaccacatggcccaatactccattccttggaatccatgaggccaagaaccccaggtcagagaacacgaggcttgccaccatcttggaagcctccgtaccatcttggaagcggcccgccaccatcttgggagctctgagagcaaggacccactccccgacccctgtaacactataataaagagaatgtttttctctggagcaaagaacaaacaggctcatacaacagacctggtgttcttcaactcacaggtcttctcgtgtaacatactctatggygtgcactagtgtaacctgcattgccctgtggaaactgggcttaacaaaactagcccaaatgatgacactctggctac

SEQ ID NO: 949245 - DNA, 657 bp, Homo sapiens
aatcgctgaaagattaatattagatttctcagcagaaaccttacaggccaaaaaagaaygggataatgtattcatgttctgaaagaaaaagaaaagaacctgctagccaagaattctatacccatcaaggctatccattagaaataaaagataaataaagcctttctcaggcatgcaaacttgaggaaattcaaaatccctagactaaccctacaaaaatttttaagtgagttttacatctagaagaaaaaggataatatatactgtcatgaaaacatacaaaaatataatactcactaataaagctgttacacaaatgagaaagagaaaggaatcgaatctgataactatagaaatccatcaacccacaaaaataaattaaaagagagaaacaaaggctgtatgaaacaaccagaaaacaattaacagaatgaaacatgtaactcttcaactatcaataaaaattttgaattcaaatggtttaaattcctccaattaaaaaatatagactggctgaattaataaaaatgaaataaaatacaacaagatgcaactgtatgctgcctataagaaattctcttcccaaaaagacactcatagactaaaagtaaagagaggaaaaaagacataccatgcaaatggaaatcaaaagcaagc

SEQ ID NO: 949246 - DNA, 602 bp, Homo sapiens
tacaaatataagggaatcgctgaaagattaatattagatttctcagcagaaaccttacaggccaaaaaagaacgggataatgtattcatgttctgaaagaaaaagaaaagaacctgctagccaagaattctatacccatcaaggctatccattagaaataaaagataaataaagcctttctcaggcatgcaaacttgaggaaattcaaaatccctagactaaccctacaaaaatttttaagtgagttttacatctagaagaaaaaggataatatatactgtcatgaaaacatacaaaaatataatactcactaataaagctgttacacaaatgagaaagagaaaggaatcgaatctgataactatagaaatccatcaacccacaaaaataaattaaaagagagaaacaaaggctgtatgaaacaaccagaaaacaattaacagaatgaaacatgtaactcttcaactatcaataaaaattttgaattcaaatggttwaaattcctccaattaaaaaatatagactggctgaattaataaaaatgaaataaaatacaacaagatgcaactgtatgctgcctataagaaattctcttcccaaaa

SEQ ID NO: 949247 - DNA, 553 bp, Homo sapiens
ataaaaataagaggaagaaaggaacaaaggatgtacaaaacaatcagaaaacaatatagaaaatgataagaataaatcctcacctatcaataacaaccttgaatgtaaatggattaaattccccacttaaaagatatagactggctgaatagattttttacatgatccaactatatgctgcctacaaaaaaactcactttacctgcatagacacatatagattgaaagtgaaggaatggaaaaagatattccatgcaaacaaaagtcaaaagcaaccagtagtaattatatcagaaaaaaacaaactttaaataaaaaaactgtagaaagagactaggtcactatataataataacataaccaatttggtaagagaatacaaaacattttctaggatagaccacatgttagttcacaaaacaagtctcaacaaatttaaaagaagtgaaacgatactctttttttgttttaagagatggggtcttgctatgtttcccaasctggagtgcagttgccattcaaaggcacgatcatagtacactttaagctatgc

SEQ ID NO: 949248 - DNA, 573 bp, Homo sapiens
attgatcaagtggaagaaaggatatcagagactgaagatgaacttaatgaaataaagtgtgaagacaagattacagaaaaaagaatgaaaaggaatgaaccaagcctccaagaaatakagggctatgtggaaagaccaaacctatgcttgattgttgtatctgaaagtgacagggagaatggagccaagttggaaaacactctttaggatattatccaggagaacttccccaacctagcaaggcaggccaacattcaaattcaggaaatgcagagaacaccacaaaggtactcctcgagaagagcaaccccaagacacataattgtcagattcaccaaggttgaaatggaggaaaaaatgttaagggcagccagaaagaaaggccaggttacccacaaagggaagcccatcagactaacagcggatctctctgcataaaccctacaacccagaagacagtgggggtcaatattcaacattcataaagagaagaattttcaacacagaattacatatccagcaaaactaagcttcataagcaaaggataaataaaatcatttacagacaagcaa

SEQ ID NO: 949249 - DNA, 623 bp, Homo sapiens
tgccacttccttactgatatggtttggccgtgtccccayccaaatctcaacttgaattgtacctctcagaattcccatgggttgtgggagggacccagggggaggtaattgaattatggggggctgatcttgcctgtgctattcttgtggtaatgaataagtctcataaaatctgatggttttatcaggggtttccatttttgcttcttgctcattttctcttgccaccaccatgtaagaagtgcctttcacctcccaccatgattctgaggcctccccagccatgtggaactgcaagtccaattgaacctctttttcttcccagtctcaggtatgtcttcatcagcagcgtgaaaatggactaatacacttaccctccccccaaatctctcataccaaccccaattctatcataggttttgtctaactccctcttactaagacaccctggtgtgtattctctctcactgcagtaattaataaacctggcttattcaaccacaagtgtgttcttggtggtctctgctggaagatgttggttcttgtccagggtcccacagttgaaggatgaagactggattcaaactcaggaagcaggcttttctgattccagaatccacatg

SEQ ID NO: 949250 - DNA, 353 bp, Homo sapiens
ctacaatgtgccagacaccatactcctcaagactctgtaggcacagaaggaacagacaaaaatccctaccttcatagatattattctaggggtaacacaggtaaataaaacatttatataaatagttttcacayagtaacaaattctatagagaaaaataaaacagaagaaggaatagcaaatgagggagatgccctttaaaacatggtgctgagggaaggcctccctgagaagatatcatttaccccaaaaataaaaaagcaagtaatagaaataacagctaaaaggtgttctagacacttaaacctgccacaacattgagaactcagggttctgatgcaaaacctcgctgc

SEQ ID NO: 949251 - DNA, 353 bp, Homo sapiens
ctacaatgtgccagacaccatactcctcaagactctgtaggcacagaaggaacagacaaaaatccctaccttcatagatattattctaggggtaacacaggtaaataaaacatttatataaatagttttcacacagtaacaaattctatagagaaaaataaaacagaagaaggaatagcaaatgagggagatgccctttaaaacatggtgctgagggaaggcctccctgagaagatatcatttaccccaaawataaaaaagcaagtaatagaaataacagctaaaaggtgttctagacacttaaacctgccacaacattgagaactcagggttctgatgcaaaacctcgctgc

SEQ ID NO: 949252 - DNA, 596 bp, Homo sapiens
atacaattctgtttctttaggccgggcgcagtggttcacacctgtaatcccagcattttgggaggccgaggcaggcggatcacaaggtcaggagattgagaccatygtggctaacacggtgaaaacccgtctctactaaaaatccaaaacattagctgggtgtgatgacacgcgtctataatcacagctacttgggaggctgaggcaggagaatcccttgagcccgggaggcggagcttgcagtgagctgagattgcgcgactgcactccagcctgggtgacagagagagactccgtctcaaaataataataataataatgaataaataaataaaataaaaaataaaaagatggaagaaactcagactttcaaaaattagggatcccatttttacctaagatattggctttactcttaggttcccttgattgacttagccaataattttttttctacctaagtacacaagaaaaatgaaatgaaggggtagagctcaagaatccctgtgcatttctaaaagccaaattttacaaccactgcaatattaccatttactaatattttctttctgtctcagccaaaggtaagaggtctc

SEQ ID NO: 949253 - DNA, 671 bp, Homo sapiens
  misc_feature 24, 412, 470, 583, 671: n = A,T,C or G
cttccttcttctccacgtttcccntcatgggtgggtggattgcctacaatgagcctgggcgaccgtgactggccttgtcttacaggacaggtggtgtcgcatttcctcagcacttcctgtctcattcttgtgggacatcctctcctccgctccagggtgcactgactcccttgatcttctggccgaaacgaatatcagggaaccaaagggactgggctggggctgggtgcagccgaagttgcgtcagggctaccggggcggtggagggttgggggtggggcgaattttgcagaaacctctttgctccctggtaggcactggaaaacgtggcttgggtcaggaacaggactcctaccccccaggtcccaggtgttctttgtttttccttggcattgagggaaagttccctcgntccccccttccaccggcacatgcctggacaccaccgtttgtttcacggtggccctgtntgcctccggtgacacacgttcacaccatccgctgtgggatatgccagtgccgcgtgtggtcacatggtctccccctcggattcgcccctgttcctgtttgctcgagtcctgtnaagagcsgtcagctttccggagccccagggcttttagaagcggggcaggccactgctctttccaaggacgaggggcgcagtgggctgn

SEQ ID NO: 949254 - DNA, 479 bp, Homo sapiens
aagacccatggttctccgggcttcttgcctcaaaggccagctctcgcttactccttggkgccctggggaggggtgggcagagacgagcctcatcatgccctaaagggaatgaggcccaaagaagtagcctggctgcccagggccacacaggcctaggaaggtgagtcttggacagccatccacggcctcacccatgggatgcatgtgatggtttggcctttcccaggcagcccaagtccatgggaatgatgtgcgcagaggcgagatggaacccttgctcctgcctgaaacgtctgcatgattgaggaggaagcacccagcgatggctctgttgcctttccaaaccgcttcatgcattgtagtggaaggagcgtgggctttggagatagacagcttggcattccaatcccagggtctacactgaccatgtgtgtaacctgggtgaagtcacttcatgtctttgagcatcagtgttctca

SEQ ID NO: 949255 - DNA, 479 bp, Homo sapiens
aagacccatggttctccgggcttcttgcctcaaaggccagctctcgcttactccttggtgccctggggaggggtgggcagagacgagcctcatcatgccctaaagggaatgagkcccaaagaagtagcctggctgcccagggccacacaggcctaggaaggtgagtcttggacagccatccacggcctcacccatgggatgcatgtgatggtttggcctttcccaggcagcccaagtccatgggaatgatgtgcgcagaggcgagatggaacccttgctcctgcctgaaacgtctgcatgattgaggaggaagcacccagcgatggctctgttgcctttccaaaccgcttcatgcattgtagtggaaggagcgtgggctttggagatagacagcttggcattccaatcccagggtctacactgaccatgtgtgtaacctgggtgaagtcacttcatgtctttgagcatcagtgttctca

SEQ ID NO: 949256 - DNA, 546 bp, Homo sapiens
gatttcagaccctgatttcatgttctatctagttcctcaaaattcagaccaagaatgcctacagcaaatatatgttctttgttaatgaattccctattattgttgctttarttattagttcttcaaataacaacttataaatcttttttttttttttttttttttttttttgagatggagtttcactcttgttgcccaggctggagtgcaatggcgtaatcttggctcactgcaacctccacctcccaggttcaggtgatcctcttgcctcagcctcccgagtggctgggattacaggtgcccgccatcatgccggctaattttttgtatttttagtagaaacggggtttcaccatgttggccaggctggttttgaactcctggcctcaagcaatccacctgtctcggcctcccaaagtgctaggattacaggcatgagccaccatgcctggctaacgtataaatcttatatctggagacagatataagatttacagatcatctgggaatttgttgtgaagagtgacatagtttaggagttattga

SEQ ID NO: 949257 - DNA, 546 bp, Homo sapiens
gatttcagaccctgatttcatgttctatctagttcctcaaaattcagaccaagaatgcctacagcaaatatatgttctttgttaatgaattccctattattgttgctttagttattagttcttcaamtaacaacttataaatcttttttttttttttttttttttttttttgagatggagtttcactcttgttgcccaggctggagtgcaatggcgtaatcttggctcactgcaacctccacctcccaggttcaggtgatcctcttgcctcagcctcccgagtggctgggattacaggtgcccgccatcatgccggctaattttttgtatttttagtagaaacggggtttcaccatgttggccaggctggttttgaactcctggcctcaagcaatccacctgtctcggcctcccaaagtgctaggattacaggcatgagccaccatgcctggctaacgtataaatcttatatctggagacagatataagatttacagatcatctgggaatttgttgtgaagagtgacatagtttaggagttattga

SEQ ID NO: 949258 - DNA, 714 bp, Homo sapiens
ggttgcagtgagctgagatyatgccactgcacttcagtctgggtgacagagtaagaccttatttcaaatataaaataaaataatggtgaagaatccctgtccaggcagatcccactcccagtgcactcacaggggtttgtgggctcagggatggctgggcgatctcaagcccctccttggcccctgtcactcgtctggcatcattccttactggttccctcttgcggttgctcagcttcacctgctgcaggtcacctcctggctgactacagtcccagctcttctcccatttcctctcttcatcaactgctcaccctctctctcggagactccatggcttcccatgtgccaggatcagtgagttgttctgggcagccaggagtcaggctggagttggagcctgtctcaacctcagtgctctttgctgttcctggccaggccagttcactagtgttctcaagtccccctcctccggatgttcttccgcactctcccagcaggcagcgttagtcttggctggggtcacagtgttgtctttagtctctgtgttttcgtccgtgttgtctctcaggcagtctcccagctcacgagcctgttccatggatgttcctgaggacctgccatgtgctgctgtttgtgctgtggatgcagcaaagaatgacaggaaaggctgagccctcactcagcatctgggagatggaagtcttgagagat

SEQ ID NO: 949259 - DNA, 595 bp, Homo sapiens
gttctaagattctatcccatgtcacaatgggattatcaaaaaatttgtgaagacattctgaagtccccatagattgtcttctgaaccctggctacaaacaccccctgggtgttttaataaaattaaataaaattagtaacaattaatgctagaacaatgttaccagcttaaaatgaaggcatcctccttgtacataatttttcagtctgttaaatagaaaacaaacacaagaaagaagaaaaaacatctggaggtgataagactgcagttttgtttttaataatttacaactgatgcagaagctgctttcttcttgtgtcaaaagttgtgttcctcgagatcatgtcctttgcagggacatggatgaagctggaagccgttatcctcagcaaactaacacaggaacagaaaacctaacaccacatgttctcacttaaaaatgggagctgaacaataagaacacatggacatataaggrggaacaacacacactggggcctgttggtggaggggtagcaggtgagagagcatcaggaagaatagctaatggacactgggcttaactcctaggtggtgggatgatctgcacagcaaa

SEQ ID NO: 949260 - DNA, 593 bp, Homo sapiens
atgaagaccaaagcctagagaatgagcttgtttccctaagattatacaactgtaaaatagtcatttgaggttcaaactcatgaccttatgactctraagcctggagttaaccttgatgctgttactctgcatgccacattttaagtcacctggatcttttatgaaaacaagtgagctgtatatcatggatgtcccccagttagatatccctttaagagaacctactgcaaagagactgagtcccttcagccaaacctgttgcatcctcagatcttccccaggtggaggcgtaaacactcaggccacacttccccggggctgctctcagacgaatactgaatactgagcacggtcgggttcctagtacaggtccattcctgccctacagtggaagcctattccaacaggtgactttggctcaaaaatgctgtcgtagtgcattcaggctgctctaacaaaaaatggcatagactgggtagcttataaacaacagatttttgtttctcactggtctggcagctaggaagtctgaaatcaaggtgctggcagattctgtttctggtgagggcccattttctggttcacaggcagtg

SEQ ID NO: 949261 - DNA, 614 bp, Homo sapiens
tgaggacagaatcatcctgatacaaaaacctggaagagacgcaacaaaagaagaaaacttcaagccaatatccctgatgaacatcaattcaaaaatcctcaacaaaataccggcaaacaatccagaagcacatccaaaagcttatacaccatgatcaagtagacttcatccctgggatgcaagtttggttcaatatacacaaatcaataaatgcgattcatcacataaacagaactaaagaaaaaaaccagatgattatctcaatagatacagaaaatgccttagataaaattaaacatcgcttcatgttaaaaactctcagtaaactaggttttgaaagaacataccacaaaataataagagccatatatgacaaacccatagccaatatgatactgaatgggcaaaagctggaagcattccccttgaaaaccagcacaagatgaagatgtcctcccttaccactcctattcaacatagtaatggaagttctggccagggcaatcaggcaagagaaagaaagaaagagtattcaaataggaagggagaaagtcaaactgtctttgtttgcaratgacatgattctttatctagaaaacctcattgactcagct

SEQ ID NO: 949262 - DNA, 642 bp, Homo sapiens
aagtattttatgtatcttaacagatttaaaatttgtgatataacatttaaatttttttcttttttttttttttcttttttgagatggagtcttgcactgtcaccaggctggagtgcagtggcaaatctcagctcactgcaacctctgtctcccgggttcaagcgattctccgacctcagcctcccgagtagctaggactataggcgtgcaccaccacgcccagctaatttttgtatttttagtagagatggcgtttcgccatgttggccagggtggtcttgatctcttgaccttgtgatccacccacctcggcctcccaaagtgctggaattacaggtgtgagccgctgcgaccggccacagatttaaaattttacctgcgtagggtacttacgagtggagcttgcaggactggaagttgctctgggtgagtcagtgagtggtgagtgaatgtgaaggcctaggaccttactgtacattgttatagactttataaacagcatatacttaggctacaytaagtttattaaaattttttccttcagtaataaattaaggttagcttactataactttttaatttcatcagcttttaaattttcttaacttttgactcttttgtagtaatagctcaaaacacaaa

SEQ ID NO: 949263 - DNA, 642 bp, Homo sapiens
aagtattttatgtatcttaacagatttaaaatttgtgatataacatttaaatttttttcttttttttttttttcttttttgagatggagtcttgcactgtcaccaggctggagtgcagtggcaaatctcagctcactgcaacctctgtctcccgggttcaagcgattctccgacctcagcctcccgagtagctaggactataggcgtgcaccaccacgcccagctaatttttgtatttttagtagagatggcgtttcgccatgttggccagggtggtcttgatctcttgaccttgtgatccacccacctcggcctcccaaagtgctggaattacaggtgtgagccgctgcgaccggccacagatttaaaattttacctgcgtagggtacttacgagtggagcttgcaggactggaagttgctctgggtgagtcagtgagtggtgagtgaatgtgaaggcctaggaccttactgtacattgttatagactttataaacagcatatacttaggctacattaartttattaaaattttttccttcagtaataaattaaggttagcttactataactttttaatttcatcagcttttaaattttcttaacttttgactcttttgtagtaatagctcaaaacacaaa

SEQ ID NO: 949264 - DNA, 642 bp, Homo sapiens
aagtattttatgtatcttaacagatttaaaatttgtgatataacatttaaatttttttcttttttttttttttcttttttgagatggagtcttgcactgtcaccaggctggagtgcagtggcaaatctcagctcactgcaacctctgtctcccgggttcaagcgattctccgacctcagcctcccgagtagctaggactataggcgtgcaccaccacgcccagctaatttttgtatttttagtagagatggcgtttcgccatgttggccagggtggtcttgatctcttgaccttgtgatccacccacctcggcctcccaaagtgctggaattacaggtgtgagccgctgcgaccggccacagatttaaaattttacctgcgtagggtacttacgagtggagcttgcaggactggaagttgctctgggtgagtcagtgagtggtgagtgaatgtgaaggcctaggaccttactgtacattgttatagactttataaacagcatatacttaggctacattaagtttattaaaattttttccttcagtaataaattaaggttagcttactataactttttaatttcatcagcttttaaattttcttaacttttgactcytttgtagtaatagctcaaaacacaaa

SEQ ID NO: 949265 - DNA, 714 bp, Homo sapiens
tactctactcaaaaacagaagaatacacattgttctcaagtgcacagggaacattctccaggatagatcatatgttagacaacaaaacaagtcccaataatataaaaaatactgcactcatataaagtatgttctctggtcacctgtgaaaaacccacagaaaacaacatgtttttgcaaaaagactgaaaatcttcccctaagatgaggaacgtgacaaggatgtctgcctttgtgacccctattctgttatactggaggttctaactggagaaattaggcatgggagaaaaaggtatctacatatataaattatataattataattatacatgtatgcagatgacatgacattttatagaaataatactaaaaaattcacacaaaaactattagagccaataaaagagttcagcaagattgcaggacaggaggtcaatacacacacaaaaaatggttgtttttccatccagtaggaatgaaaagtttgaaaataataataaaagacaattccatatataatagactcacaaagaataaaatacttaagaataaatgtagcatgggaagtgtaaggtttacacactgaaaaccacaaaacttaattgaaagatattaaataaaacctaaataaatgaaatgacgttccatstttgtggattttgagacagtatttttagatgccaatactccccaaatttatctacagatttg

SEQ ID NO: 949266 - DNA, 445 bp, Homo sapiens
aggtgtttgggtcactgggaacatccgctccttcagtgtcagggtcggctggcattctgacttcaccaagcctacctgtggctatagttcatccagcctagtatttctagtttrggctgctgctccccttcctctccaccagaatttttactatttcaggaggaggtgaatccctgtgaggtagatttctgattttggagatgatacttgtgattaaagagaaagcttgataggaggagagccagaattttccatgactttaaaagaggaaataattttctgcttcactctggaagacaagggaaatgcctcccctaacaattccctttatcaaagtaacatttcacctgccaggtaggtattacttcatttgaatacaatagcagccttcagcagcagtagctaaaatttactcctatcactttctttttacaaagccttcaaa

SEQ ID NO: 949267 - DNA, 581 bp, Homo sapiens
tcttttggagtttgctggagttccactctagaccctgtttgccttggtatcagcagcagaggctgcacaacagcggatattggtgagcagcaaatgttgctgcctgatcgttcctctggaagtttcgtctcagaggagtacccggccgtgtgaggtgtcagtctgcccctactgggggatgcctcccagttaggctactcgggggtcagggacccacttaaggaggcagtctgtctgttctcatatttccggctgcgtgctgggagaaccactactctcttcaaagctgtcagacagggacatttaagtctgcagaggactctgctgccttttgtttggctactccctgcccccaggggtggagtctacagaggcaggcaggcctccttgagcttcagtgggctttacccagttccagcttcctggcagctttgtttacctactcaagcctcagcaatgrtgggtgcccctccccgagcctcgctgccaccttgcagtttgatctcagactgctgtgctagcaatgagccaggctccatgggcataggaccctctgagccatgcacaggatataatctcct

SEQ ID NO: 949268 - DNA, 752 bp, Homo sapiens
gtctttgttctcattggtgttaaagaacatctgtatttctgccttcatttcgttatttacccagtattcatccaggagcaggttgttcagtttccatgtagttgtgtggttttgagtgagtttcttaatcccgagttctaatttgattgtactgtggtctgagagacagtttgttttgatttctgttcttttacatttgctgaggactgctttacttccaattatgtggtcacttttacaataagtatgatgcggtgctgagaaaatgtatattcttttgacttagggtggagagttctgtagatgactattaggtctgcttggtccagagctgtgttcaagtcatggatatccttgttaaccttctgtctcattgatctgtctaatattgacagtggggtgttaaagtctcccattattattgtgtgggagtctaagtctctttgtaggtctctaaggacttgctttatgaatctgggtgctcctgtattgggtgcaaatatacttaggatagttagctcttcttgttgaattgatgcctttacaattatgtaatgggcttctttgtctcttcatctttgttggtttaaagtctgttttatcaaagactaggatttcaacccctgcttttttttgctttcyatttgcttggtagatcttcctccatccctttattttgtgcctatgtgcgtctttgcatgtgagatgtgtctcctgaatacagcacaccgatgcgtcttgactcttcatcc

SEQ ID NO: 949269 - DNA, 584 bp, Homo sapiens
acctgttccaattagtgagattaaaatagtatcctgctgactatctgaagccaagttcaggctttctggatgatcacaacatcttgacaaagacagagaaaagggacttttggccccaacacagaattgaacacactggagtaaatatatttaggtgctgaagcacagctttcactaaaggcattctttatttttggacaagtgcttatactgaaatttctgtggaaggctgcagctcaagacaccatttaatttccttccattacaacaagcctacatacacatcttaattaggttcaactttactttagaaaaaacatgtaactcaaatttcttctccacccactaactgtccttgcctgaaattcccaaagaattcatattttctggatgttccactcttcggcctatcgtcatccattacctcagtttctcccaggtcatggtcgtcagaagactaaagaggaaataatacagagagaagcaagctcagctcatttccaagctccttcaagtatttccacctagatgagactgcctttgacttatcagattgggyttctgttcatcccagtaacaatcat

SEQ ID NO: 949270 - DNA, 555 bp, Homo sapiens
tttgtgaggaaggtgtcttgcttccccttcacctgccaccatgactgtacgttttctgtgaccttccccagccatgctgaactgtgagtcaattaaacctatttcctttataaattacccagtatcaggcagttctttataacagtatgaaaatgaactaacacatggagcatatcataatgttttatttttaccgtggagtaggaattatgagacaggtgagtcaggtcttatgaatgtattgcaggaaggtggagaaagagaagagaaatgagaaaacttttaaaacagagtagggtgtaactttgtttttgagacgaatctctctctgtcccttggctggagtgcagtggtgctatctcagctcactagaacctctgcctcctgggttcaagcagttctcctgcctcagcctccttagtagctgggactacrggtgtacaccaccatgcctggctaatttttgtatttttagtagagacggggtttcaccatatcggtcaggctggtctcaaactcctaaactcaggtgatccacccgcttcggcctcccaa

SEQ ID NO: 949271 - DNA, 717 bp, Homo sapiens
gcctcctccctggattacccatagcagagaggaggcaggcactaggttgggaagaaagcctatcggggtgatgatgagcagagggactcawgcaggcagatccatgttctggagaaggcgaggggcctaaatgcctcccagaaggagaaatgcatccagaggcagctcagagtccacttgctgggagaagtatgttcccagcccccagttctgctccctgcgcccacccctcagagccccaggagcccagtctaggcaagatcagccctgactgccagtcctggaggcggaccatgagagggcacttcctccccagccaagcctcaggaatgtggcggagcctttgctggaaagtccccccacccacccccacccccacttagcttcctctcctcaggagcaggaaaaggatgcccagggagggggcttcaagggggagactctctcagcgccgtccccaaagagtgctccttgtggggaaaggaaggccagtgaaagtgctggggcccagtgatagccactcaaccagctcctccttatcccagttcctggatggtttccccatagtgtcctgggggccagtgagggcctttccacccagcccagcccagccaagtgatgtcgccctgcttgccctccatgaggaagggtttcctctggcagagggagtgtggaacagagcctgagggcaggcaccgcccagcatctttaggtccg

SEQ ID NO: 949272 - DNA, 624 bp, Homo sapiens
gtgcagcacaccaatatggcacatgtatacatatgtgactaacctgcacgctgtgcacatgtaccttagaacttaaagtataattttaaaaaaaagtacctaatgtaaatgacgagctaacaggtacagtaacaccaacttggcacatgtatacatatgtgacaaacctgtacgttgtgcatatgtaccatagaacttaaagtataataaaaaataaaaagtaaataaacaaaagaaaataaacagaaacaaatgaattaaatgaatgatatcctctttggtaaagcacctgttaaatcttgcttgttgctctttttgttgggttatctctttttcttatttgtaagaaaataagagaattttatataaatgggtaggagtcctttgttaagcaggtgccattgcaaatattttctcctagacctggcttgccttttgacattccatgtggtttgtttgtttgataaacataagttctcaattttattaaactccaattcatargtatattcctttttggtaagtactttgttgtctttttaagaaatctttgcatactccaaggtatcagaaattttctgttttctcctaaagctttattgtcttaccattcacatttagatc

SEQ ID NO: 949273 - DNA, 609 bp, Homo sapiens
tgattagccaacacttggctacttgtcacaagaatatattcatttgggccaggtgcagtggctcatgcctgtaatcccagtgcttttggaggccgaggtggtggatcacctgaggtcaggagttcgagaccagcctggccaacatggtgaaaccttgtctctactaaaaatacaaatattagctgggcatagtgatgcgtgcctgtaatctcagctacccaggaggctgaggaaggagaatcacttgaatccaggaggcagaggttgcagtgagccaaaatcttaccactgcactccatcctgggtgacagagtgagactccttctcaaaaaaaaaaaaaaaaaaaagaatatactcccaagttaggttgcagttcactctacagagagagctttaggtcaaatttaatttaattaaacaattctccccttttggtcagcctcaaaattttgagattgaccaaaaccttgggcatcaacattacttctgtcaccatcataatggacttgtctgctctcagtatggaattcacaatggacaatgtcaacgtagttgagtgattctttacmttttcttcatgtttttgttgttcccactgtaatgagccca

SEQ ID NO: 949274 - DNA, 731 bp, Homo sapiens
gagccacgatcacaccactgcactccagcctggaccacagagcgagactctgtctcagaaaacaaaaacaaaaacaaaacttggattcagaaaaaggaacgacaatgtggggtgggtcttaatggagtttgcaaaaccaccagtgatgaacatggtctaatgctttgctacccaaagcgtggtccatgcaccagcaccagcagcatcacctgggagcatgtcagcaatgcagaatcccaaggcccagcccagacctatgactcaggctctgcattttaggaagatcccccagtggatttatgtgcacactggagtttgagaaacactggtacggtttgcttctaaagccccgtgtgactttttgtgacctacacaaatggccattttaaaggaaatttcaacttcaactcaaactatcacctgttctgcacaaaaaatgcttcagatccaggatatcacattcttcaatcaggctctggtcagattctatcaaagacaacccataggtatacaaatgaattgcgtttggttaatacagttaaattttttcccccaaatttgttatcaccatttaaaaactggaggtttcaggccgggcatggtggctcacacctgtaatcccagcactttgggaggccaaggaaggtggatcacttgaggtcagaagttgaagacgagcctggccaagatgrtaaaaccctgtctctactaaaaatacaaaaattagctgg

SEQ ID NO: 949275 - DNA, 405 bp, Homo sapiens
gatattaaatctgattattccttggaaaatgctatgtttaggggagggggagatcagtgagtatgttctgtttttctggtatcttcataggaatcatttttttctctattaaaatacaatttaggttgggtgtgttggctcacaactgtaatcacagcacttagggaggctgaggcaggaggatcccttgagctcaggggttcaagaccaggctgggcaacatagggagaccttgtctctactaaaatccaaaacattagccaggtggggtggcaaatgcctgtagtcctagctacttgcagggcgctgaagtgcaagaatttattgagcctgggaaatagagactgcagtgarctctgatggcatcactgtatgacagtgcagactgggccacagacggatacc

SEQ ID NO: 949276 - DNA, 695 bp, Homo sapiens
caacctctgcctcccgggttcaagtgattctcatacctcagcttctggagtagctgggattacaggtgcgcaccaccatgcctggctaatttttgtatttttagtagagacagtgttttgccatgttggccaggctgccttggcctcccaaagtgctgggattacaggtgtgagccaccgtgcccggctcagttgttacggtgaatgggattccccatcttatgcataaattactgcagagaccagttacttcctaaggtagattaggtttgaaaatagaaatatagatccaacaactactcaatgtttgctatttgcttgttgagaatccttacagcctggcaattccagggttatagaaatctggcccacattcagatataattgaattgtctttacagtgttgacctgtaggtgtcactgttggtcaaagcaatcatctgtttagcagggaagtgagttgtgttgactttgtatccaggaggtcaccatggaaaagtttttgcagtcaacagacaatgccccacatttatgagctgctttactttccagcaccattggtaacttgcctttcctactgcctataattgcaggtttgtatcttttaagttaaaaatgtggctggacgtaatggcttatccctgtaatccmaacatttggggaggctgaggagggagggttgcttgagcccagaa

SEQ ID NO: 949277 - DNA, 586 bp, Homo sapiens
gtctaggagtgaggtgaaagatttgcctgtcccttgacctggtcagataccaagctgctgctctgactgtaagcacccaccaagctgatggttccccacctgccaactcaagcaccatgggccttttgccaggctgtgctctttgtcccacatggaaactaaaggtaagatgccgagcacatcatttactctgcaaccagcagcaggaacttccatgcacattttttccgatcagatgacacaaacttttctcctcttctaaagttatcattttcccagaagaaacttaactagggacaacctaagtttaaagcattagtacttcttattagcaaatcaccacctacattttacatagaataccttatggcagaaatgtcattcttcacaatcttccaagttttgcatggatagaatttagatgtgtagcctggagaaacagttgggcatttgagaaaagaattcattctcaaggcccctattgtgtgccaggagtagggaaaaatttgttggatccaaagaacatggtttcttgggaytgggagtgagaatgaagacattctctatgtgttcatttattcattcc

SEQ ID NO: 949278 - DNA, 560 bp, Homo sapiens
aaaaaaaaaaaaatgaaaggtttctgctcaccacaaactagaagggaatgatggtggtcttgtttgggactctttacctgcagcaagaacctgggaaatgtgggggtgattttggtgtgtcatgtacagttgggctggggaaagcgaaaaaagtgaagaagaggaggtgaggagggggaggtcagcacaggaagaagggtcctggccacctttgacccatacttggggtaaaggacctgcatctggccaggctctgtggcttatgtctgtaatcccagcactttgggaggctgaggtgggaggatcacttgaagccaggagttcaagaccagcctgggcaacatagccagatcctccatctctacaaaaacaaacacaaaacaaaaacagaaaagggatctgcatctttacatggtgcaaataaagaaaactagaagatagggagttaacttgagacatactattatgtgctccttttctccccttgaaatgttgatgcaggaagtcagggtggtraaaaataggcacaatgtcacactcagcttcacaagatttgaaag

SEQ ID NO: 949279 - DNA, 560 bp, Homo sapiens
aaaaaaaaaaaaatgaaaggtttctgctcaccacaaactagaagggaatgatggtggtcttgtttgggactctttacctgcagcaagaacctgggaaatgtgggggtgattttggtgtgtcatgtacagttgggctggggaaagcgaaaaaagtgaagaagaggaggtgaggagggggaggtcagcacaggaagaagggtcctggccacctttgacccatacttggggtaaaggacctgcatctggccaggctctgtggcttatgtctgtaatcccagcactttgggaggctgaggtgggaggatcacttgaagccaggagttcaagaccagcctgggcaacatagccagatcctccatctctacaaaaacaaacacaaaacaaaaacagaaaagggatctgcatctttacatggtgcaaataaagaaaactagaagatagggagttaacttgagacatactattatgtgctccttttctccccttgaaatgttgatgcaggaagtcagggtggtgaaaaataggcacaatgtcacaytcagcttcacaagatttgaaag

SEQ ID NO: 949280 - DNA, 601 bp, Homo sapiens
ctttccgccttcattgggggaagggtaacggatagtgtggagtggatggaagggaaatgtaggacatgaatgggtaatataaactggaatgtaaagggaacattacttcttgatggcattgatcctaacgagatttgtattatatataccaaagatctgggggagaatgcaacctggggagtcttcaagatgctctactgcagtgtttctgaaagtgtggtccctaagtccagcagcataggcttcatatggaaactcatcagaaatgcaaatccttgggtcctaccccagaccgacttaatcagaaactttgggagttacaaaccctccagttggcttggatgcgtactcaagtttgggaaccactaaatgtgttgaaattcagggagaaaagattagaacttctgtttttaatttttagaaaaaacgttaagatttactgacatttaaatttactaacatttaacattamctcttgtgttcttatctgctctgtaagttgtgggtcatgtgtcatgtgcaatttccacaacccaaaggacttgcaattattatccctacttgttcattcactttcagcttgcagtattttttacttaaa

SEQ ID NO: 949281 - DNA, 913 bp, Homo sapiens
ccatttttgggtagtgcctgcatattgtgcagaaccatctgtgaaccaggtcctagtcctctcttctctgtcaactaatcttgggaactccccatgaggccaccagtgcaggctgggggagaraaggcagggtggcaggagtggagaccatgggcatttgagccacttcctcatgtaacttcaggacctgctcaaacccgatcacatatataccacttccatttaatgctgctggaatgctggaatgctgctgtgcatgagccactttatggctagatgtgtcagaaagcaatcagttcatgataggcagttcaggtcgcacggtgacttgatgacccatagtgaaacatttagtttccaccaaagcttagtaacaggccaagagttgtctctcaaaggagagtagttatctacagaagacagcagagccttgctccaaaatcctagaggactccactgtgattcacctataggtgcctgccagaggctccaaatagcatccctatctgccactgacacctcaagcacaattggatctgctgggtcatatggccaaagcggcaaagcagcttgcacagcagcctggacctgttgcagggcttttcctgttctggatcccactcaaaactagcagcattttgggtcactcagtaaatgggctgtagtaacacacccaaataaggaatgtgttgcctccaaaatccagataggcccagtaggtgttgtgcctctttcttcgttgtaggagggacctaatgcagcaaattatccttcgccttagaaggaatatcttgacaggccccacaccactgaacccctagaaattttactgcggtagaaggtccatgaattttagtcggatttatttctcatcctctggcacacaaatgtctcaccaataagtccagtgtgt

SEQ ID NO: 949282 - DNA, 394 bp, Homo sapiens
gcccagaaggtttgctgtgagaacacctgtagtggaacatggccagggacgccctaccccatagggttcacttgctcccgtaatattttagccctaggggaattgtgggacctgaactcagcagggtggtttgacccatccagagcacccgttggtctactggcttctctcaggaccccagcctagccacgccttcttacagggtagcctcagaagccctgggggcatgcatgacagcttctgtgctggtagactatgcttgactggcagaaagctccagcagggtagcccccactgmcacgcaccagcctacccactccctccccacactgaagctttccctgggcccatggcaaagccccacattgctttactggtgcatgaatgcacaggt

SEQ ID NO: 949283 - DNA, 394 bp, Homo sapiens
gcccagaaggtttgctgtgagaacacctgtagtggaacatggccagggacgccctaccccatagggttcacttgctcccgtaatattttagccctaggggaattgtgggacctgaactcagcagggtggtttgacccatccagagcacccgttggtctactggcttctctcaggaccccagcctagccacgccttcttacagggtagcctcagaagccctgggggcatgcatgacagcttctgtgctggtagactatgcttgactggcagaaagctccagcagggtagcccccactgcyacgcaccagcctacccactccctccccacactgaagctttccctgggcccatggcaaagccccacattgctttactggtgcatgaatgcacaggt

SEQ ID NO: 949284 - DNA, 791 bp, Homo sapiens
ttttgtcattccaagaatattatataatggaatcatagagtgtttaaccctttgagatagctttttatttcactcagcataatttgggtagattcattgaggatggtataagtattgatatgttgtttctttactgttgagtggtattccattgcatgaatgtaccattgtcttttcattgatcaattgaaagaacactgagctgtttcctaatgttggctattataaatacacctcctataaaaatttgtgtacacactttttgtgtgaaataactcttcatttccctggaacaagtgcccaacagtgcattgctgggttgtatggtaattatgtgcttagtttattattaagaagctgaaaatatttcccattatagtcatatcagtttatcacattatggtcccagcagcaagagtgtaagtcatcaggttgtgtcacattcatgtcagcatttgacattaccaatactttttattttagccattctggtagatatgtagcaacatctcattgaggtttcgattagcattctcctaatggtaaaccatgctgaactccttcccatatacttatttgcaatctatatatcctctttggtgaaatatctgttcatgtattttgcccatgttatctttggattatttctttttttttttttaactattrtattttgagaattgtattggttttctagggctgccttaacaaactaccacagactgggtggcttaaacagcagaaatttattttctcacaagtatggaagctagaagtacaaaattaaaatg

SEQ ID NO: 949285 - DNA, 565 bp, Homo sapiens
gatatgctcaaatttgagaaacactgccctaccaaacctggagcccaagagttgcctaagtcaactctatggtgcccacatcttgaacatatgtctaaactggacgagcagggcaggcatcrtagctaactaatgtctgtaatcccagcagtttgggacactgaggcaggaagactgcttgaggccaggaaagttcaagaccagcctgggcaacatacagagatcctgtctctacaaaaaaaaaaaaaatttaaattagccaattgtggtggctcatgactgtagtcctggctacttggaagcctgagtgggaaggactgcttgagcccaggaggtcaaggctacagtaagctgtgattccgccactgcactctagcctgggcagaagagcaaggcctatctcaaaaaataaaaaatgaactggactagtgatagatatccaaaaccaccagcctgaaaaattctaatagtctcctacctgattttgctacctgcatttgcacttcacttctggtttgtcttcccacatggtcagcatggacagcttcctaaaataaagacctgc

SEQ ID NO: 949286 - DNA, 563 bp, Homo sapiens
actgttgtaaaggcataattgtattttgcaatgtgagaaggacatgagatttgtgggggccatgggcagaatgatrtagtttgactgtatgtccctaccaaatctcatgtcaaattgtagtccccagtgttggaggtagagcctggtgggaggtgtttggatcatgggggtggatcccttatgaatgacctgggccatccccttcatgataagtgagctctttctctgagttcccacaagatctggtagtttaaatgtgtgtggcacgtcccctccaccttgttcctgccttcaccatatgacgtgcctgctcacctttcaccttctgccatgatggcaagtttcctgacgcctcctcaaaagccaagcagatgccaggactatgcttcctataaagcctgcagaactgtgagccaattaaacctcttttcttcataaattacccaatctctggtatttctttatagcaatgcaagaacggcctaatacaagtcacttcctgtctttgtccctcaatttcctcctctgtgtgaggaaacaggaagaagaatccctgccctgcg

SEQ ID NO: 949287 - DNA, 563 bp, Homo sapiens
actgttgtaaaggcataattgtattttgcaatgtgagaaggacatgagatttgtgggggccatgggcagaatgatatagtttgactgtatgtccctaccaaatctcatgtcaaattgtagtccccagtgttggaggtagagcctggtgggaggtgtttggatcatgggggtggatcccttatgaatgacctgggccatccccttcatgataagtgagctctttctctgagttcccacaagatctggtagtttaaatgtgtgtggcacgtcccctccaccttgttcctgccttcaccatatgacgtgcctgctcacctttcaccttctgccatgatggcaagtttcctgacgcctcctcaaaagccaagcagatgccaggactatgcttcctataaagcctgcagaactgtgagccaattaaacctcttttcttcataaattaccmaatctctggtatttctttatagcaatgcaagaacggcctaatacaagtcacttcctgtctttgtccctcaatttcctcctctgtgtgaggaaacaggaagaagaatccctgccctgcg

SEQ ID NO: 949288 - DNA, 614 bp, Homo sapiens
gaaaatgattaacccacagacattaaagacacacaaactcagaaagatgmcctgcagagcacttgtggtcatttcggcacatttgattgaaaaatggttagaggccgggcgtggtggttcatgcctgtaatcccagcacttcgggaggccgaggcaggcggatcacgaggtcaggagtttgaaaaatggttagacagagaatcttaatagatttaatttaaactgagatgactcaagtattgcaaacaaaaattttctgcatgaagcagcaccattcaatttagattgaaccgccctgtgattacttaattaggacagtgtttgctgaaacactgccatagatacacgtgtcaaaggaatttgccacagattgtcaaacctccacgacataatagtacaaatccaggggactgaccactcagtaagtggcccctagctcctttaatgaaaactgcctttattgccaaatatcataagctccaggacaaaaaaaaaaaaaaaatagtagaggtcgcctggctagtcaccccagagggtcacaggaccccatattaatttttggagaggatgttaaattaagaacaaagaatcatggaaacagagcagaaaaacaa

SEQ ID NO: 949289 - DNA, 566 bp, Homo sapiens
aatgagccacagatgcatgagcagtaaatgtttattgttgtaaaccataagattttgtggttgcttgttacacagcatcgttgttgcaacaactaaactgatacatccctgatttcttagtccatttgggctactacaacaaaatactttagactgcataatctataaatggcataaatttattgttcatggttctggacactggaaagtctaagaccaaggcatcagaagattcagtgtctggtgagggattgcactctgcttcagagactgtgccttcaatctcacatgttagaagagaggggagtaagcactgtgtccttacatgagagacagaggtaaggggccctctccagcctcttttattagagcactaatcccattcgtgagagtggagccctcatgacttaatcatttcccaaatacccccaactcttaataccatcatgctggatawtgggttcaaatatataaattttgaggggacactgatatgatttgggtctgtgtctccacccacatctcacctcgaattataatccccatgtttcaggggagggacctgg

SEQ ID NO: 949290 - DNA, 586 bp, Homo sapiens
atatttcttggaggctttgttggttactttttactttttttctctaatcttgtattctcactttatttcattaatttgatcttcgatcactgataccctttcttccacttgattgaattggctattgaagcttgtgcaagagtcacgaagttctcttgccatggttttcagctccatctggtcatataaggtcttctctagactgtttattctagttagccattcgtctaacgttttttcaaggtttttggtttccttgtgatgggttaggacatgctcctttagctctgagaagtttgttattactgaccttctgaagcctacttctgtcaactcgtcaaagtcattctccatccagctttgttcctttgctggcaaggagctgcaattctttggaggagaataggcactctggtttttagaatattcaggttttctgctctggtttctccccatctttgttgtttaatcwacctttggtctttgatgttggtgacctacagatgtggttttgttgtagatgatctttttgttgatgttgatgctattcctttctgtttattagttttccttctaacagtcaagt

SEQ ID NO: 949291 - DNA, 221 bp, Homo sapiens
ctggaaatcaattatttcacacccttatgattcttagagacatcatttagaaaatktattcattaagtttgtttttaacaacaagtaacaaaaaaatccagcctcatagtcttaacatgtttttgctcatataacaaaatcagaagataagtggaccaataatgttaaactgatacctccagattctcctgtcctctgcctactgctgactgagtcaaaaa

SEQ ID NO: 949292 - DNA, 505 bp, Homo sapiens; identical to SEQ ID NO: 945185

SEQ ID NO: 949293 - DNA, 586 bp, Homo sapiens
caggaggagagatatttctcagatccatctccccaagagctcagaggctagggttttttaaggataatttcgtgggcaggaaagtagggmatgggtgcttctggttggttgaggatggaatcataggagtgtcagagctgtctttgtgtgctgactcagttcctgggtaggggtcactggtcagggtgacattgctttttctaccagaaggcaaggtctgaaaaatatctcaaacaccagtctttggttttacaatagcaatgttatctataggggcaattagggaacttacaaatcttgtgaccaccagccatgtgacacctgagcagtcaacaagtaggaagcaatgactagttatcatttaactatgcagatgtcttagccaaattcaggcccatcccataattctaatcttgtgaccttccattggttttacaaaagtgggtccacaaacaagaagtggctagttttgggaagagctattatcatccttaaggttaaactataaactacatttctcccatagttaagttagcccatgcctaggagtgggcaaaaggagttagcttgtgaggttagaagcata

SEQ ID NO: 949294 - DNA, 586 bp, Homo sapiens
caggaggagagatatttctcagatccatctccccaagagctcagaggctagggttttttaaggataatttcgtgggcaggaaagtagggcatgggtgcttctggttggttgaggawggaatcataggagtgtcagagctgtctttgtgtgctgactcagttcctgggtaggggtcactggtcagggtgacattgctttttctaccagaaggcaaggtctgaaaaatatctcaaacaccagtctttggttttacaatagcaatgttatctataggggcaattagggaacttacaaatcttgtgaccaccagccatgtgacacctgagcagtcaacaagtaggaagcaatgactagttatcatttaactatgcagatgtcttagccaaattcaggcccatcccataattctaatcttgtgaccttccattggttttacaaaagtgggtccacaaacaagaagtggctagttttgggaagagctattatcatccttaaggttaaactataaactacatttctcccatagttaagttagcccatgcctaggagtgggcaaaaggagttagcttgtgaggttagaagcata

SEQ ID NO: 949295 - DNA, 609 bp, Homo sapiens
gagaaggaagaggagggcctggtccttgaaggtctgcaattcttgtggaactccaagtgcgcaggtttgtccaaacagccacatggaactatctcctgtacataggtgattattytaattcttccctttttttttctgtgtttcctgccaccacatgcattgactcaccccctgaatctcttgaatgcaccacttcctttattgtctattaccacttttctataggaccttcatatccctagacttggaagttgcctttctcctggcacacagtgctctgcaatttcaacccatcctccaccgtagtgccagagaaatcgccataaagtacttcttgcaagtgccgtgctgccttgcttcaagtcattcctggcccctgctggagccaggtggagagttctagctccagagcctggtgtgtgaaactgaagaggaccctggccttgtggttggatactccagcatatctggacactggcgtaccatcctagccaaatcctgagtgtgtttattaacacagacttggttttgttttttctttgtttggtttgtcctctgtttggtttttcctcttgctgcttgctggtaatgacagtctgtcctgggggc

SEQ ID NO: 949296 - DNA, 562 bp, Homo sapiens
tgggcaaggttaataggtataaaaaatagaaagggtgaataagacctactatttgatagcacaataggtgactacagtcaataataacttaattgcacatttaaaaatagmtaaaagaatgtaattggattgtttgtaacacaaaagattaatgcttgaagggatggatatcccattctccatgatgtgattattacgcattgcacgcctgtatcaagacatctcatggaccccataaatatatatacctactatgtacccataaaattaaaaataaaaaagatgaaaaattatataccatgtaaacactaataaaagaaaaggtggagtggctactataatatcagacaaaatgaactttatttatttttctttttcaaaaacttttaagttcatggttacatgtgcaggtttgttacatgggtaaactcgtgtcatgggggtttgttgtatagattatttaatcactcaggtattaagtctagtacccattagttattttttcctgatttttttcccctcctcccaccatccaccttcagataggccccagtgtgtgttg

SEQ ID NO: 949297 - DNA, 562 bp, Homo sapiens
tgggcaaggttaataggtataaaaaatagaaagggtgaataagacctactatttgatagcacaataggtgactacagtcaataataacttaattgcacatttaaaaatagataaaagaatgtaattggattgtttgtaacacaaaagattaatgcttgaagggatggatatcccattctccatgatgtgattattacgcattgcacgcctgtatcaagacatctcatggaccccataaatatatatacctactatgtacccataaaattaaaaataaaaaagatgaaaaattatataccatgtaaacactaataaaagaaaaggtggagtggctactataatatcagacaaaatgaactttatttatttttctttttcaaaaacttttaagttcatggttacatgtgcaggtttgttacatgggtaaactcrtgtcatgggggtttgttgtatagattatttaatcactcaggtattaagtctagtacccattagttattttttcctgatttttttcccctcctcccaccatccaccttcagataggccccagtgtgtgttg

SEQ ID NO: 949298 - DNA, 557 bp, Homo sapiens
gccatttgaaacctgttgccatttgttctttacctgctaaacsacctaagcagaatttcgagctagaaataaggatgcatataaggcttacaactggaacatttttatggaaaagacagggagaaataggagaaaggagattgggaggattggttctcaagagaaaaaaattaaattgatgattttgtagagaagaaagaataagaacttggagacatttcagtgagtatcagggaaagtggttactgtggattgaaaaaatattcctggactttataacacgcacacgcacgcatatgtatagatataggtacagatatctatatgtagatacagacatacatatccagatatagatagagacatatatgtgtatatatatctagacccagtatatctatatctatacattagacatacatgtgtgtatctgtctagatacacatgtatgtctatatctatatatatacatatacatctagatacatatatgtatatgtatatatccagatatgtatacatatatatctagatatatacataaacgatacatatat

SEQ ID NO: 949299 - DNA, 450 bp, Homo sapiens
cttgggcaagtgtttccctccaggaaaggaaaaagctgtggtattttttcccccaagcaggatgagggatgtgggaggcagggaatgaggaggtggatatggggaggtgggggatatggggacgcaggttgaggggagtttttgatcaggggagggagactttttctttcaaacatccccgctgcctttcatatcttccaggtttgatcactatgatcatctcacccacagacagaggatgcagggcttcatttttgttcccaaaaacaggggcaccgtagatacgtaaagtatgtgtcctaatgtctcctgaacttaccctcattcttgccctcaaacctttacctccccagtgctttcagaacctagagagacttcatctcactactgagcccctgtccttagcctcatgtktcttattctttcctttctagcacccaggaaggcagg

SEQ ID NO: 949300 - DNA, 745 bp, Homo sapiens
ttcaagggagaacaacaactgtgttcaaatcaccagataaagtggctgcattcgaagccaaactggaataatgagggcgatgagtcaacactgggatttagcagagatttttttttctttttttttttctgtgatggactctcaccctgttgcccaggctggagtgcagtggcatgatctcagcccactgcaacctccacctcccgggttcaagtgattctcttgcctcagcctcagcctcccgagtagctgggattacaggcatctgccaccatgcccagctaatttctgtatttttagtagcgatggggtttcaccatgttggccaggctggtctcaaactcctaacctcaagtgatcctcccaccttggcctcccaaagtgctgggattacaggagtgagccactgtgcccggcatttttttttttttttttttgagatggagtcttgctctgttgcccaggctagagtgtagtggtgtgattttggctcactgcaacctccacctcccaggttcaaacgattctcctgcctcagcctccccagtagctgggattataggtgcgtgccaccacgcccagctaatttttgtatttttagtagagatggggtttcaccatgwtggccaggctagtctcaaactcctgacctcaggtgatccacctgcctcagcctccgaaagtgctgagattataggtgtgagccaccatgcttggcgagcagagattttacaagagactgagc

SEQ ID NO: 949301 - DNA, 709 bp, Homo sapiens
tgacttggtttcacatgaatcaggctatggggctgcagtgtacagtgagtttgaaatgtctgctcagtcctgagagattcagatgccaaagggaatgccagcatcaacatcagtgaaacacactgaagaactgggatgtaaatcatgctcactgaattggtttgaattatttgggctgctttttatataagtgatgttttcgattattaaaaaatccttatttaatcaacaagttgtataactgagcatcaaggtagctcaaatgtaatcctgatctaataaagctctttaaacttatgttaaattgtttgaaatagcaactcctttcctgctattatgacactttttttattaattgggaagagagtattgtaaagaatatataatatctcaacatgtagaatgattctgtaacaaagaacttagttgctaagctgtggtctcaaagttatcactagctttttttttttctttttaaagagatggagtctcactgtgtctcctaggctggagtgcagtgtagtggctgttcacaggtacaattatagtgcactacagcctcacattcctagcctcaagtgatcctcccacctcagcctcccaagtagctgagactacaggcacaagccaccatgcctcactctgggtttttttggtgtgttgatatgtakcattttatatttattgaaattgagatacagtacaagta

SEQ ID NO: 949302 - DNA, 513 bp, Homo sapiens
aggtgcttgaggccacacagcggccatgatgcacracgggtgatgtttctctgccattgcccgtgttcctggccggtccccagcacttggttgaaatcactgactctcacaacatcctcaacgtcctgttcccatttactagatgatgaaactgaggcacggagaggtgaagtaaggagccagggtcatcggcctcaagggccccagccaggagtaagactcaggcagtttggctccagaatctacagcgtgaccctgacattgtaccacttgcatgagaggcagtgtttcgatggggatggagggaaattccagggccccattgggtgaggcgggactgggagttttcctgggcgacgtcttctgcatctcgcttgcttcctggccttgcggcagggggcgcgcgtggcaccagtgtgagcctccacccccctctgcctgctccagggtccctggtgagctctgccgccacctccactccaccctgtttctgagccctcttgggcctcgaca

SEQ ID NO: 949303 - DNA, 485 bp, Homo sapiens
aagtggagacttggagaacttttctgtctagcaagaggattgtaaaatgcaccaatcagcactctgtagctaggactgtaaaacrcaccaatcagcgctctgtagctagcaaggggattgtaaaatgcaccaatcagcactctgtaaaaatgcatcaatcagcactctgtagctagcaagaggattgtaaaatgcaccaatcaccactctgtaaaacacaccaatcagcaggatcctaaaagtagccagtcgcagggaggattgaaaaaagggcattttgataggacagaaactgaacatggaaggggacaaataagggaagataagctggccaccccagccagcagcagcaacccactctggtccccttccacgctgtggaagctttgtccttttgctcttcacaaataaaccttgctaccgctcactctttgggtccatgccatctttaagagctgtaacactcacctttaagagctgtaata

SEQ ID NO: 949304 - DNA, 485 bp, Homo sapiens
aagtggagacttggagaacttttctgtctagcaagaggattgtaaaatgcaccaatcagcactctgtagctaggactgtaaaacacaccaatcagcgctctgtagctagcaaggggattgtaaaatgcaycaatcagcactctgtaaaaatgcatcaatcagcactctgtagctagcaagaggattgtaaaatgcaccaatcaccactctgtaaaacacaccaatcagcaggatcctaaaagtagccagtcgcagggaggattgaaaaaagggcattttgataggacagaaactgaacatggaaggggacaaataagggaagataagctggccaccccagccagcagcagcaacccactctggtccccttccacgctgtggaagctttgtccttttgctcttcacaaataaaccttgctaccgctcactctttgggtccatgccatctttaagagctgtaacactcacctttaagagctgtaata

SEQ ID NO: 949305 - DNA, 485 bp, Homo sapiens
aagtggagacttggagaacttttctgtctagcaagaggattgtaaaatgcaccaatcagcactctgtagctaggactgtaaaacacaccaatcagcgctctgtagctagcaaggggattgtaaaatgcaccaatcagcactctgtaaaaatgcatcaatcagcactctgtagctagcaagaggattgtaaaatgcaccaatcaccactctgtaaaacacaccaatcagcaggatcctaaaagtagccagtcgcagggaggattgaaaaaagggcattttgataggacagaaactgaacatggaaggggacaaataagggaagataagctggccaccccagccagcagcagcaacccactckggtccccttccacgctgtggaagctttgtccttttgctcttcacaaataaaccttgctaccgctcactctttgggtccatgccatctttaagagctgtaacactcacctttaagagctgtaata

SEQ ID NO: 949306 - DNA, 486 bp, Homo sapiens
gtgaaacatatatcctccagcttttttttttttyttaacttttattttaggttcaggggtacatgtgcaggtttgttatataggtaaattggatatcatggggatttggtgtacagattattttgccacccaggtaataagcatagtacccaataggtagtttttcaatcttcccgctcctccttcctttcatcctcaagtaggccctggtgtctattgttcctttctttgtgtccatatgaactcagtgtttggctcccacttatatgtaaaaacatgtggtatttggttttctattcctgtgttagttcgcctagaataatggcctccagctccatccacattgttgcaaaggatatgaggatatgatctcctttgtttttatggctgtgtagtattccatggtgtatatatactacattttctttatccagtctacaattggctttaggttgattccatgtgtttgctattgagaatagtgct

SEQ ID NO: 949307 - DNA, 636 bp, Homo sapiens
aaaaaaaagctgtcagacaaaaatactatacscaccatagttatccttcagaaataaagaagaaataaagtccttcccagacaagcaaatactaagaaaattcatcaccactagaccagccctagaagaaatgctaaaagagtaacatttagaaatgaagagacgatatctaccaccatgaaacacacaaaactaaaaactcactggtaggtgtaatgcacaaatgacaaagggaaaggaatcaaactatcactacagaaaaccaccaaacctcaaagataagcaataagagaggaataaagaaatgactatacacaaaacaaccagaaaacaacaaaattacaggagtaagtcctcacctatcaataataaccttgaatgtaaatgacttaaattccccaatcaaaagatatagactggctgaatgaataaaaaataacaagacccaactatatgttgcctacaagaaactcactttacctgtgaagacacagaaatagaaagtaaagaaatacaaacagatattccatgcaaatgaagagcaaaggtgagcagaagtagtgttactcatggtaaacaaaatatatcttatgtcaaataacataaaaataggctaggcatggtaacttatgcctg

SEQ ID NO: 949308 - DNA, 643 bp, Homo sapiens
aatgaatatattgcataatgtgctttttgtgcttgtattgaacccaaacagtgaacgtagtacccaaaaggtagttttacaactcttgcccccctccctccttctcttcttttgaagtctcctgtgtctattttttctctctttatgtctgtgtataccccttgtttagctcccacagataagtgagaacatgtagtatttgattttctgttcctgcattaattcatttaggataatggcctccagctacattcatgttactgcaaaggacataatttcattactttttacggcttcgtagttttccatggtgcataggtaccacatcttctttatccagtccaccattgatgggtatctaggttgattctataactttgccattgtgaatggtgctgcaataaatacatgagtgcatgtgtctttttggtagaatgattcattttccttcgggtacatacccagtaatgggattgctggatcaaatggcagttctatttttaggtctttgagaatactccaatctattccacagagactgaactcatttacwttcccaccaacaatgtgtaaacattctcttttctccttatcctgaccaacatctgtcattttttgagtttttaataatagccattccaat

SEQ ID NO: 949309 - DNA, 576 bp, Homo sapiens
aaatttgtattttttcctctcttggtggggtagaggtccacaaacaatatcaagtgttatagaaaataaacaagcaaagggctttctgtgcataacaagtgtgggatgataaaattggcaaggctgctctataggtgttgtccatttaccctggggcctatggatgtcatttacataactgagttttttcatagcttcaaaaatttctaagttgtaaaaccatacagtgaatttagaatggtaggcaagaccaccatcatttagcatggtagacaaggcaatatatcacaattgtattattgccatgttaaaagatttttgcagtaagaagctctgctctgtaattttggggagtgtaacttcctgtggggagatgttgggtgctgctgggatttggaactctctaaatggaacctgagaagagctggagaaggctgtgggggctctccttatkctcccacagtggacttgctgtttgtcttcctctttccacctccaagttgactcttcccatcttttctgtgttctgtggtccttttttccttgtcagaactgctaagtgggtagaccgagcct

SEQ ID NO: 949310 - DNA, 727 bp, Homo sapiens
tggtggcaaaagcaccaagttttatagtccagtttgaggacgtggtgtctgatttacgtagggctcacagattggtaagatcaggtatttcctttacatagygtgtggggaaggctggtcaccccaccctaatcttcttatgcaaatgggctttctagttgatcagcaccatcttgtctgcttgttataatacacgtggctgacagagaagggaagatggagccaccattttgaaaatgtctagtccttagtttctgccggcattcatccatgcaagctcccagcttgcaggctgctctttgttagaaaatgatttggggctgcttttcattaacaaaaaaaaaaaaaagccttatcaaggactcccatgcccttgctatctgcctaagtaattccttcttaactcctatatcagtgggaggtgattaaatcatgtgggcagtttgccccatgctgttctcatgatagtgagtgagttctcatgagatctgatgggtttaaagtgttgcacttctcttctccccctttgctctctttttctctctcctgctgccacataagacatgccttgcttcccctttttcttctgacatgattgtaagtttcctgaggtctgccaagcctgctgaactgtgagtcaagaaaagaggtttaaacctcttttctttataaattacccagtcttaggtagttctttacagcagtgtgaaaatggactaatgcagaa

SEQ ID NO: 949311 - DNA, 584 bp, Homo sapiens
caaaaaaatcctctgttcttatcatcttatgactttcttcttttctktgttgagatcactgctcaaattctccagactctgcctttcctgaccaccctgtataaaatagatcctatcactcttgattttcacacatcacattcattttattttcagtctttatgtcaacatgagtcatgtgcttattggttaattatctatggttatctatggacatagctctatgaggacagagattaggcttgttccctgctgtgactctagcccctagaactgggcctggaatatagtgagttctcagtaaatactttttgaaagaattgatgaataaaagtgctttctttctttcctttttttttttttttttttttttttttgagactgagtcttgctctgtcgcccaggctggagtccaatggcgcaatctcagctcactgcaacctctgtctcctgggttcaagcgattctcctgcctcagcctcctgagtagctaggattacaggtgctcaccaccacgcccggctaagtatttttttgtatttttagtagagatggggtttcaccatgttggtcaggctggtctc

SEQ ID NO: 949312 - DNA, 312 bp, Homo sapiens
aaaggttgaagctgcagtgagccatgattgcaccactgcattccagcctgggcaacagagtgagatcttgtctcaaaacacacacacacacacacacacacacagagtaagaaagtcactgaaaatagtagtttggcatgatttctaattccaaccctgtaaccatgcagaatcacaaatgtcctgaggacataaacaggtaaggaggtttttcttagatcctgggcccctgatgccccaraattccaaagtaaacctagtgggtaatgcttaggctggataacttgagcatcttgctctaagatactcagc

SEQ ID NO: 949313 - DNA, 422 bp, Homo sapiens
atcggcagcaatcagccacactcacctgtgctgtgtcttttaacctctgttaccatttgcctctggattcctcagatccagttttctttcctagggctttgaccyaaagcttggaattgagtctgggataaaaatgtatctcagggggttgcattcactccttatcataagccaaatgctaaagtgaaactgtggacctgagtcctcctccaaaaaaagagaggaaagcatgtcttgtgacgcacccagataactggtagctatagttatgcttgctaggatttgggtgcaaggtgcttggctctggttcgtccccttggtcttactttcccaaaaagaaatctctgagtttatttatttattcctatcacctggcaagatttgcaggaatactgatccagatttttacattacccacccct

SEQ ID NO: 949314 - DNA, 608 bp, Homo sapiens
ctggcaggtgcctctctgggatgagtcttccagaggaagacaggcagcmatctttgctgttctgcaggctctgctggtgatacccaggcaaagagggtctggagtggacctccagtaaactccagcagacctgcagcagagaggcctgaattttagaaggaaaagtaacaaatagaaaagaatagcatcaacatcaacaaaaaggacgtccacacaaaaaccccatccgaaggtaaccaaggtcaaagaccaaaggtaggcaaatccacaaagatgaggaaaaaccattgcaaaaagactgaaaattccaaaaaccagaacacctcttctcctccaaaggatcacaacttctcaccagcaagggaacaaaactggatggagaatgagtgtgacaaattgacagaagtaggcttcagaaggtggctaataacaaactactccaagctaaaggagcatgttctaacccaatgcaaggaagctaagaaccttgaaaaaaggttagaggaattgctgactagaataaccagtttggagaagaatataagtcacctggtggagctgaaaaacacagcatgagaactttgtgaagcatacacatgtatcagtag

SEQ ID NO: 949315 - DNA, 608 bp, Homo sapiens
ctggcaggtgcctctctgggatgagtcttccagaggaagacaggcagcaatctttgctgttctgcaggctctgctggtgatacccaggcaaagagggtctggagtggacctccagtaaactccagcagacctgcagcagagaggcctgaattttagaaggaaaagtaacaaatagaaaagaatagcatcaacatcaacaaaaaggacgtccacacaaaaaccccatccgaaggtaaccaaggtcaaagaccaaaggtaggcaaatccacaaagatgaggaaaaaccattgcaaaaagactgaaaattccaaaaaccagaacacctcttctcctccaaaggatcacaacttctcaccagcaagggaacaaaactggatggagaatgagtgtgacaaattgacagaagtaggcttcagaaggtggctaataacaaactactccaagctaaaggagcatgttctaacccaatgcaaggaagctaagaaccttgaaaaaaggttagaggaattgctgactagaataaccagtttggagaagaatataagtsacctggtggagctgaaaaacacagcatgagaactttgtgaagcatacacatgtatcagtag

SEQ ID NO: 949316 - DNA, 449 bp, Homo sapiens
tcacaatgcaggagacgaatgtgtggggtatgaggctggaggcagacaaattagttaggagactattgcaatattcccagggagagataacgagggattaaactaagaagagccattgggaatagmaaggagatgatgaggttatctaataaaaacccacagaaagtaacaaacataatggggaaagattagatgcattctgtttaaagttggaacaaggcatgggtgcctgctatgaggtatacttttcgatatagcacaggaattctgtccaattcagaaaattttgaagaataaataaggtgtatacagattggaagcaataataaatatgtgattgtttgcagatatgatgagatacaggaacacacacgcaaacacacacacacgtaaaaatctatagacaaactattaaaattcaaaccaaatctatcaatatgctggataca

SEQ ID NO: 949317 - DNA, 593 bp, Homo sapiens
attttgttagcaccatgcctactctcgcaagccggcaccaagatagcactgctgttcccgtctcttgggagggctgcttcccttccctgtgccgccgcttcctctatgctgtggacggcttacatgcatgatcctctatgatgataaagccataggttttatagtacttccttcatatttcagccacataggtagatgtgggcctgaattgaggcaatctcacagacacacactatgatccaccccaaatccctttatcttgaacctttatttgtataaccaagagtctgtgtctctttttgtgagtgaagtttattattttcctctgtggatacactgcgaatatattcagaagtgtgccaacctgctgagtcaatcctagggtaatgcagttttgtctgaagccagaacttcatacttatatatggtgtgttgcctttagagatgcactgatatgacagaacaggaaagcaagagcagctctgtctcgcacacccagcttagagcaccagygtgaacactgtactccctccatttaagaggtgcccccaaaatattattttgttacttagagtttttattctgttcttatt

SEQ ID NO: 949318 - DNA, 590 bp, Homo sapiens
ccaggataactgctccaaaatataaagcctccctaatgtttaagaatgaatagttctataayactctcattcactgaagagagcatttctccatcttaaagtcctatgtaattcatataaagcccagaccactttgtgaccctgtctcagcagagtgtcacattaaaaaaaacgttagtccagcagccaaaatagttgaaagcaatgtaaagttttagtctggcctctcaagaaaaagaaaaaagaaaagaaaagaaaagaaagagaaagaaggaaagaaagaaagaaagaaaaagaaagagagaaagaaagaaagaaagaaaagaaagaaagaaagaaagaaagaaagaaagaaagaaagaaagaaagaaagaaagaaagaaagaaagaaagaaaaaaatatcttatttgggaaataagagattaaatcacacacagtaaaatctttttaaaagtttttttctctccctttctcactttctctgtctctctcacacacacacatacacacaaatgcacacacacatgcacatatgtgcacacacacacatacacatataactgcctggaaagacaagacttttctttgt

SEQ ID NO: 949319 - DNA, 526 bp, Homo sapiens
aagaagcagcaggtgcgaaggcttggcaggcaggagaacaccaggcctgctcaggagctgtggtaagtctggacacgggatgatgggtgtaacagagggcccaggggcaggggaagcaggacctccgacaccgtgtgaggagcctgaccttcatcctgcaggaggtgaaggggatgcttggcctagttctaggtcgctgctgatacataaaagctgctgctgccatgctgagtgggtgagcaggagggcggggctcgggttcaacactcaagtcccagagttcccaagaggccagcccagggcctggccaagtcacttcaaatagctgtttagcccagatggcctgttaatcttgaaggaaacccaaagaagcacagagacacagttgaaatgggagtaagagcacccaatgcccatccacggccaaaggaaagcttatrcatatgcaacatgggcccactccgaaggcttttccattagccgcgtggagacactgtggccaggttgggggaatctatatttcacc

SEQ ID NO: 949320 - DNA, 634 bp, Homo sapiens
ccgaggcctccaacctacctgtgcttgttgggagccagggaagagtccacataggagacgtggttggggctaaagagaaaagacagcagacaatgactctccaggggcccagaagagagtagggtctaccccatacataagaggaggtaggggcccagagccagaccctcaggatgtcttaagccaggagtggtctgtgcctaagatctgcatgacagagttgttggtgtgtgtgtgttagtgtgtgtgtgaaaagaagagttgtgggtgtgcctgtgtaagacaaagagagacgcagagtgacagacagactgtgtctctgtccagggacctctgagggtaccttcccaacaattgaggccaggatgtaccgggtggaggagaggtgagagtccatgtttggggacaggatctttgctccccttggaccacagcaggagacctggcaggatgggggatgatagaggcatgggagggggtgcatgacatttccttcaggtccctggggggtggcacagaggtatttcctcaagaaaagagctcacctggagacaccaccaggctgatatttctaagaacagtgatgatgttttcggaagcrttgtagattccacaccagtagaatcccgagtca

SEQ ID NO: 949321 - DNA, 702 bp, Homo sapiens
cttcaagctccacctactgacctgaaggccggtccacacagcccattgcaaccactgccaacacaaaaacacagcactcaggaccaagaagaagaactcgccactactgctattgccatcacccrtgccactttggctgtccaggagttgagagcccactcacctgccaagtacaccactactgcaactgaccttagaaaaagccaccccagatgcccaagaatcagcctgcctgggcccatcaatacaagtgccagtgtacgctgccctaggtcacaagaatagacatgcttagcccaccactgctactactgaaacctaaaggcccatctggcatttcagtccccagcacaacttcaccatagtctccaccaataactacatccaaacacaccaaggaaaccacagatactaccaacactatttatagccaaataactcatacagagtcttcaccactgcacacatccagaagcaaagcttaagggtactaccaaaacaagattatagtcacatcttcaagaaaaaagcctccccctcccctcatgagagtaaattcaaacacagaagaaatgactattacaccagatgtgcagaaattaatgtaaagaaatgtggcaggccaattctccctgacaatcacatagacagacctgcatagcactccagttacacagacagatttccacagcactgccttaa

SEQ ID NO: 949322 - DNA, 572 bp, Homo sapiens
agaacatctcactactgggagaacagtaccaagactttcatgagggacctacctccatgagccaaacacctcctaactagccccaacaccatcacattggggatcaaatttaaacgtaagtttagggagkataaaccaacagtatcaaagtaataacaaagacctcatcattaatgtataaaaacagaactgatttttatatgttgatttggtatcctgccactttcctaaattcattcactagttttcattttttaagtgcctttaaggttttctacatataaggtcatgtcatgtacaaaacgagacaattgtgcttcttcctttctgatgtgggtgccttttgtttactttttttcctaattgctctggctaagtcttctagtactatgttgaatacaagtggtgagaataggaaaattcaaaaatatgtaaaaaataaataacacattcttgaaaccaataagtcataaaaaaatagagaaattaaaaaatatatcaggacaaatgaaaatgacaacgcatcacacaccaaacttatgagatgcagcaaaagcagtaataatttggaa

SEQ ID NO: 949323 - DNA, 660 bp, Homo sapiens
ggtagagcaaacacacaaatgaggaagagaaaggacttcagtgttaccactacagaaaaccactaaaccaaaataaagaaaacaaaacataaatwaaggagcaaaatatatttaataaaataaataaaatgacaagtataagccctcacatatctataatacccttgcatataaataaactgtctgcttaaatgttatagaatgattgaatgaataacacaacttgatccaactatatgctgcataaaaaaatctcatttcacttctaaatacacatatagactgaaagcacagagatgaaaaattatattccatgtaaatggaaaccaaaaataaacagcagtattttgtattatgtccttttgtgcctagtttattaagagtatttatcatgaagggatgctgaattttagcaaatgctttttctttatctattgagaaaatcatgttttttctctttatttggttgatcacatttattgatttgtgtgtattgaaccattcttaacatatgaagtttaaaactcacctgatatgattttgatttttaaaaatgtgtttatactttgtttttgtcctagtatatggtttatcttggagaatattccatgtgcggatgagaagaatgtacattctattgcaattggaatgttatgtaaa

SEQ ID NO: 949324 - DNA, 576 bp, Homo sapiens
gttaccctgccaggttactatgcttttcccacgkttttttgcaatctgcagatcaggagattccctcatgtgcctataccaccagggtcctgggtttcaagcacaaaactgggcggccgtttgggcagacaccgagctagccatgggagattttgttcataccacagtggagcctggaaccccagggagatagaaccgttcactcccctggaaagggggctgaagccagggagtcaagtggtctcgctcagcggctcccactcccgcagagcccagcaagctaagaaccactgtcatgaaattctttttgccatcacagcaatctgaagttgacctgggatgatcaagcttggtgggggcagaggcatccgccattaatgaggccttagtaggcagttttcccctaacagtgctaaggaggctgggagatctgggttgggcgcagcaaagcggctgtggccagactgcttctctagattcctcctcattgggcagggtatctctgaaggaaaggtaacaggcccagtcaggggcttacaaacaaaacccccatttccctgggacagagctcctggg

SEQ ID NO: 949325 - DNA, 612 bp, Homo sapiens
ttctttttcttttgtgtgtgtgtgtgtgtgtgtgtgtgtgtgtgtgtgtgtgtgtgtgtgtgtgacgggagtctcactctgtcatccaagttgaagtgcagtggggcgatctcggctcattgcagcctccacctcccaggctcaagctaccaacccacctcagcctccctagtagctgagaccacgcctggctaatttttgtattttttgtagagttggggttttgcaatgttgcccaggctggtctcgaactcctgagctcatgcagtccacctggcttcgcctcccaaagtgctgggattacaggtgtgagccattgcacctggtcagacatgaaggttttttttttttttttttttttgagacggagtctcgctctgtcagtaggctggagtgcagtggcccgatctctgctcactgcaacctctgcctcccgggttcaagtgattctccagcctcagcctcctgagtagctgagattacaggcgcgtgccaccatgcccagctaatttttgtatttttagtagagacggggtttcaccatgttgaccaggatggtctygatctcttgaccgcctgccttggcctcccaaagtgctgggattacaggca

SEQ ID NO: 949326 - DNA, 508 bp, Homo sapiens
cctccatctcctgagttcaattctcctgcctcaccctcctgagtagctgggattacaagcgtgtgccaccatgcctggctaattttttttttttttttttttgagacagagtctcactctgtcacctaggctgaagggccatggggcaatcttggctactgcaacctctgcctcctgggttcaagtgattctcctgcctcagcctcctgagtagctgggactataggcatgcagcaccacgcctgggtagtttatgtattttcaggagagatggggtttcaccatgttggccaggctggtctcaaactcctcacctcaggtgatccactggccttggcctcccaaagtgctgggattccaggtgtgagccactgcgcccagcccagacctccaatttctatcctcccagggactccaggcccagcctggatctsagagaagaatcctgattgtggcagaggctgttacttctcccttagaatccatcctccctgtttcgttcttggta

SEQ ID NO: 949327 - DNA, 768 bp, Homo sapiens
aatggcagggatgggggctgccctggccactgctgtgtccctaacgcctgcacagggctgggcccatggctaatacctagtaagttgttttgttttattttattttttgagactgagtcttgctctattgcccaggccagaatgcggtggtgtgatctcagctcaccgcaacttctgcctcctgggttcaaacaattctcctgcctcagcctcccgagtagctgggattacaggtgcatgccaccacgcccggctaattttttactttttttatttttagtagagacggggtttcaccatgttggccaagctggtctcgaactcctgacctcaggtgatctgcctgcctccacctcccaaagtgctgggattacaggcatgagcgaccacgcctggccttaagccattttaaaagcatacaattaagtggcacttaatgcattcacagtgttgtacaaccatcacctttatctagttccagagtgtcttcctttccccaaaaggaaaccctgcatccattagcagccactcgccattccccgttctctccagtcctattgtcagtctcctttctgtctctaaggatttgcctagagacctgcgaggtgatttgcacctgtaatcccagcactttgggaggcagaagtggatagatcccttgaggccaggagtttgagaccagcctgggcaacatagcaagaccctgtctcaataaatwaattaattaattaattaattaattaagtgggcatggtggtacacacctgt

SEQ ID NO: 949328 - DNA, 608 bp, Homo sapiens
tggagtgcagcttcccccaaccccttcacrgtaatagaggcaggaggcagagaaattctaggtggacagggcgggtgagtccctggtgaaaccccaccttcaccataaaacaacaacaaaaaacagcctgaaacccatggccaaaagtccaaagtaagtacttatattcctgtttgcctgccctctcccaattggttctttctgaatcatgcctttttaccaattgaatgttgctttttccaaaactacctatggtatgccccacccctatcctgtgcctataaagatcccagactcagtcagtagaggggagacagcctgactttggggaagagacaacctgattttggggaaagacgacctgtccttctcgtcccctctccagctccactctcttctgagaaatgttttcatcactcaacaaaattctccactttcaccatcattcaattttctgtgtaaccccattcttctcagacaccggacaagagcttgggacccaccaagcgccagtacccagaaaaggctgtcacaccagccctttgccctcaccagcggagggaaaccaccccagcaacaaggcaacacaccacctgggtgccaccatg

SEQ ID NO: 949329 - DNA, 608 bp, Homo sapiens
tggagtgcagcttcccccaaccccttcacggtaatagaggcaggaggcagagaaattctaggtggacagggcgggtgrgtccctggtgaaaccccaccttcaccataaaacaacaacaaaaaacagcctgaaacccatggccaaaagtccaaagtaagtacttatattcctgtttgcctgccctctcccaattggttctttctgaatcatgcctttttaccaattgaatgttgctttttccaaaactacctatggtatgccccacccctatcctgtgcctataaagatcccagactcagtcagtagaggggagacagcctgactttggggaagagacaacctgattttggggaaagacgacctgtccttctcgtcccctctccagctccactctcttctgagaaatgttttcatcactcaacaaaattctccactttcaccatcattcaattttctgtgtaaccccattcttctcagacaccggacaagagcttgggacccaccaagcgccagtacccagaaaaggctgtcacaccagccctttgccctcaccagcggagggaaaccaccccagcaacaaggcaacacaccacctgggtgccaccatg

SEQ ID NO: 949330 - DNA, 564 bp, Homo sapiens
tcccataacttaaagtaaaagaaaaaaaaaaaagaaaatttacaatagcattgtaatggctaaatctttatcaccmatcatgttaattaaccctcataaaataattttatgtttccagtactattgtttcacaagcaagagaaatacaacacagtgtggtttaagatttttgcctaagatcacagaagcgcatagtagttagggtttgaacctaggcagcctgacaactaatgaccacactctgaagaccctcatatactttgaagatagttgtttaatccacttcttttctcatatagaaaaaaggaattgaggatggaaatctaatatttgatgaagactcagtgtgcaagtaatcatggagacactatattgttttattctagtgtccttgtaattttctttatagagcaccaaaacaataaactgcttctcaaatggtcgtattcaagtgctttataatattaactcatttggtgtgcataacaactctatgaggtaggttttattattatgcccattttccaattcaagcatcttgtgtgcaaagaattaagtaattta

SEQ ID NO: 949331 - DNA, 601 bp, Homo sapiens
ttctcttgcctgactgctctggttaggacatccagtaaataggagtggtgagagagggcatacttatcttgttctgsttctcaaaaggaatgcttctggcttttgtccgttccgtgtgatgttgactatgggtttgtcatgcatggctcttatgattttgaggtatatttcttcaatgcctattccgttgaagtttttagcatgaaaagatgttgaattttattgaaagccttttatgtgtctattgagatgatcctgtggtgtttgtttttagttctgtgtgatgagttacacttattgattttctatgttgaaccaaccttgcatcccaggaataaagtcaacttgatcatggtagattagctttttgatgcgctgttgaattaagtttgctggtattttgttgaggatttttgcatctatgttcatcagggatattggcctgaagttttccttttctgttgtgtctttgcaaggttttggtatgagaataatgctggcctcacagaatgagttagagaagagttcctcctcctcaattttttggaatagtttcagtagggttggtaccagctcttccttgtatgtctggtagaattca

SEQ ID NO: 949332 - DNA, 610 bp, Homo sapiens
tgcgaaatgagtgacaaggagccttgggcctatttgtccttcaacagcgcaaacactgcagacttcatttgaagagaaacaaagaaaaactttgagcgccccctggtggacaattctctacagcttgtcacggtgctcgcagaagtcttggctggggagcccgaggggactttaaaaggagcttggatatgggtcccagaacagacccagcctccctttccccctcctcacctcggcccccagggactcattcattgttaatgggctcggctctgaagccaagacaggaagccaggctggtgttcttggctgggagcaggctggagcggctctagtctcctccagtaagtggctgcctgcaaacctgccagccgccccaggacgtcctccctcccgtgctatgcgaggcaggactgaggcccaggggtaggagatgtgtccacgatcctcccgagagaggtgatcctggctgccaggctgggggcccttcgacaaggcctgatggcagatccttcccctcccctccccacccccgcctctctccctttgtcccccttctttctgcctrtctctgtgtagctccctttcctctctgcctctgtcctcccca

SEQ ID NO: 949333 - DNA, 618 bp, Homo sapiens
tgccagagaagaggcttgaagtatctcaaatgaaagtgaatggtgtgatttattaactcatactttgtctcctgagcaccaactgtagttctgccctattgtataaatcctaatgcatcctggctttaaacagtttttgagcatgtttacatccctcccatgctttgaagtatttatttgtgatacttactgtgtgccaggcactttttaaggtacttattggatattttataatgaaaataaagtaatataaatttgggtttatggtacaatcacaactctgtaaaatgtataagcactaggctgaagaatttaataacatttgcacaattgaaagtaattatgtcggtatccagatagcagttggttcttttcacttttcaaaattctcttatatgttggtattatactgattttgtaacaaagaaagcaaaaaataggtaaatactcaaatttgcatccagaggtaatttgtttaaactgyacgttatatgggtctccgattctttgatgtagcctttttttcttctaatttttaattaggaacttagtttccctaaatgttgaaacttagtgtcatttgggataacagttgggattggtgtgtgccaataaatc

SEQ ID NO: 949334 - DNA, 643 bp, Homo sapiens
tggttctcaactttgaatatgaattttttgcacatgaatcagcccagagattttgttaaaatgcagattcacagagagtaggtcggggatgggatctgagattctgcatttccaacttgcccacccatgttgtttgctgatgcttctggtctgtgagttatccattgagtagcaagtcatcccccaatctggctgtgtatcagaatcacttgacaagcttattgaaactgtggatcctggggccagaggttgatccaggttttgtggggcctgaactcgttccatatagagagtcctttttaaagtatacatataaagttatgaataagaaattgccacctgtggtcccaactacttggaaagctgaggtgggaggatcacttgagcctgggaggtggaggttgcagtgagctgagatggcaccactgccctccaggctgggcaagagagcaagaccctgtcttaaaaaaaggggaattgctggagcttctcccaagtccctggaacaagctgtgcaagtgaagsgtcttgaagtataaactccactagctgcaaggtaaatccatttttgcctggggccatacgacagcagaatcttgggaggcaggaactatatgtgtgttttgttttgtttcattttcag

SEQ ID NO: 949335 - DNA, 586 bp, Homo sapiens
ctgaaaatgaagaagaggaaggtgtcatggcccagggagccagagcaggaaaatcarcaagaaacccatgcaagggttcaggcacttcaggtcccggtcctctggccactcggttatggtgcctctctgttaaccctactctgagtggattctacctcaggattctattaaaagctgtctgggtggatcacgaggtcaggaattcgagaccagcctggtcaacatggtgaaaccccttctttactaaagatcaaaaaaaaaaaattagctggctgtggtggtgcatgcctgtaatcccagctacttgggagggtgggtcaggagaattgcttgaacccaggaggcagaggttgcagtgagccaagatcgctccattgcactccagcatggatgacagggcgagactttttctcaaaaaaaaaaaaaaaaaaaaaaaagctgtctgggaaaacctgggggagaaaaaggggctgtaggagaaagtaagggcattaaaacatcattagaaaggaaactcagtcagacagagtttactccaagcctcattctttcccaaattacttctatgcaggatgacccattttag

SEQ ID NO: 949336 - DNA, 660 bp, Homo sapiens
tctgactcatggctcagtgtatcacaggggcttccagcacctggcaagaccccatggtcaccatctgtattagtcagtgttcttcagagaaacagaatcaatgggatatagagagatacatattagaagagatytattataagaattggctcatgcagttatggaggctaagaaacctcacaatctgctgtctgcaagctggaaaaccaggaaagttggtagtgtcattcagtcttagctgaatcccaaaaacctgagaaccaggaatgccgatttctgagggcaggaggagatgggtatcccagctcaagcagggaaagcaaattcacccttcctcctgactagtcaggtcctgtttagtcacgtcctcactagattggatgatgcccacctatattggtgaaaggaatcttctttactctgtctgctgattaaaatgttgatttcttccaatcaccctcacagatatatttagaaataatattttaccagctatctaggcatcccttagcccagtcaagttgaaacactgcacctaactatcacgcaatcatagtaagtatcatttagatgattgaatccctagaacagccctagaaggtagttcttaccacacagaagagggactgaggtttagcgatcttatagaactctcccttt

SEQ ID NO: 949337 - DNA, 472 bp, Homo sapiens
ttttttgaaaaaacaaaaatgagtttttgtttttcttcctttccctttagcttatttctctattctgatttggaggattttctttatttttattattwtttttttcaaagagatggtgtcttgctagttgcccaggctggactcatgctcctgggctcaagcgatcctcttgcctcagcctctggagtagctgggactacaggcacatgccaccatgcccagtgatttttctattaaatctctcacatgtctgttgtttgattataagacagttgatctatacacttcagtgattctgcaagtcaatgtttttctctttagagaacaatatgtgtatatattttccttgttattagtgcagactgccaccaatatatttgaggcataaaaggaagcgaggacaaataatgttaccagaacatctttgttgatttagttacctaaaccttttaaagaaaatgggcagtatttc

SEQ ID NO: 949338 - DNA, 566 bp, Homo sapiens
aagacttccagtactttgttgaatagaagtagtgagagtaggcatccttgttttgttcttaatgttatagaaaaagctttcagtctttcactaacgagaataaagttggttttcagttttttaatacataatttttattatgtagaggcagtcttagtttgttaaattttgttaaatgcttttctctgcattaataaagatgattatgtgaacttattccttcagtctgttaatgtggtatattacattgattgattttcatatgttaaatcatctttgcatcccaggtagaaatcccactcggtcatggtgtatgatcattttaacatgcaattaaatttgatttgctaatattgtcctgaggatttctgcatcaatgttcatagaggatattgacctgcaatttgcttttttttttttttttttcaaatattttctctgcccttttctctcacttctcctttgggagtccttcagcatrtatgttggtgtattttatggtgtcccacaggtcccttaggctgggttgcactttaacctttttccattctgttcctcagacttga

SEQ ID NO: 949339 - DNA, 738 bp, Homo sapiens
ctcagtgatctaacataagaaggcacaaagttgccctagttaagaaaactgggagtcatctgtgatggctttgtggtgtcattttggccaggctaaacaatatccccataattccctttctagtatgtttctgattagggtgggctacaaggaagaccttctcctgaaagttggtagatggaagggagatgtggccgtctgtagcacccacatacactcactcaaatatgcaatccaacatgaatctaggtgctgctgtgaagggattttgcagatgtaattaaagtccctaatcaggtgactttataggagattatgctaaataagctgataatcagtggaaggcagagaggagagagagataaaaagagaaaagggaaagaagacaggaaggaagggggaggggggaagaaaaagaaagagaaagaatgttgcaggagaaagggaggaaaaagaattgcttcctacctgtgggcaacaagattcagcctatgggattccaaattgcctagccagttctcaattgcataagccaattccttgcaatgcatccctttaattcatacatatctagatacccacatattcactttgtagctacttgttctgtttctctggttgaaccctgacaaaccctgacatcaatgtttcctcttccctcctcacctcagctcaaatcaagttgattccatctcttcaatagttctctgattyaatccctcctctccagaaacaggg

SEQ ID NO: 949340 - DNA, 614 bp, Homo sapiens
tagagaacagaaatgaagccagggtgactggagctgggtggcaatgctcctcaaggtggtcaaggacctagaagccacagaagggcatkcaagcatgagcgacatgatctgacatttttcaagatcattctgggagctgaatgtggtatgaatggatgcaggaaaagcagttaggagtccagaagaggctgtagtgaagatggagagaagaggatgattatggcatatgtttcagaggtggagacaaaagaacacgctgatgagggggatgatgatgagacaaagaacagagcctgagtatccacttcatcaactaggtggatggtggcaccatttgctgaaatttataaaatggagggagaggcaggaattacaggaaagggaacaaaggcattgaaaattcagagctctgcccatgaggaagaagccaaggggagtcgtccagtagttgtttcagtcaagggtctggaactcagggctggggacacacatttggtcaccatctacctatgaatggtatttagagacactggaataaaaaagactggaaccgagaaacaagccctggttgttcagacaaaggaagagccagcaaaggaaacttcagacacagc

SEQ ID NO: 949341 - DNA, 638 bp, Homo sapiens
tgcttttagtgtcaattataagaaatcttttcttagccctagatcccaaagattttcttctgtgtttttctaaaagttttatagtttcacattttacatttgagcttgtgatccaactggagtcaatttttatataaggtgtgaggtttaggtcaagattaatttttttttgtctgtggatgtcgagtttttccaacatcatttattgaaagactatcttcccccctgaattgcttttgcacctttgtcaaaaatcaatttgtgtcaaatgctttttcagcctcaattgatagtcttaagattttgtttctttatcttggtgaagtggtagattacactgattgattttcagatgttcaaccagccctgcatatgtggaataaatcccacttgatcatggtgtataattttttggtacatttttaaaaatttggtttcctggtattttgtttgaggacttttgtatctaagttcatgagagatattagtctgtagttttcgtctttttttatgtctctagttttgatatcagggtaacattggctctataaaatgatctggaaagtattctgttttctgttttctaaaagaaatagtgtraaattaatgttaattcataaaatgttggcagaattctc

SEQ ID NO: 949342 - DNA, 592 bp, Homo sapiens
cggattcactcacacacccctctttgttccatacttgactctcccttggcaggtgtgagactgaggcctctagggtgagctgagcatagcttgatargctgagtgggcaaaacaagccttgcagatccaaggcaaaatgcagccaaaggcgcccctggcttcagaggcacctttctggccagaaaaactataccccaaggatcatgtaacactgtgactttattcctctcttttaatattatgttggctactctgtatttttttccttcccatataaattttgaatccgtttgtcaatgtacattaaataatttgctgggttttaattgagatttcattgaaactatagctcattttggaaataactgacatttttaacctttaaaactcaactataggaaaataaataataagaaaaagatcaaaccaattacactcaacaataagaaaatgaacaagttgaataaaaaatgggcaaaagacataaatgaaaaccttaccaaaaatggtatgtggcaaataagcacatgaaaacatgctctacatcatatatcattaaggatttgtaaattaaaacaacagttattagaat

SEQ ID NO: 949343 - DNA, 648 bp, Homo sapiens
gggtaaatttaggaaggtcttcccaatagggtaaatttttcaggagagtgtgctggaagagacaatattcccagcaatgatgtgatactgatgaggctgaggctgctgggggggctgggtggaggtgttgccactgcaagtcactgttaagtgactcttagctttttgtgtgccatatatttatctgagattctgataaaaggtatggaccccagacacaattttgactatgatttcagaggttttacagaccacttgaagtttatcacagacccctgcttatcttcatctggttaaggaccctccttattgcattggaaaatatccaatctaggaaaacgtttcaaatgatttctgctgtcaaatatagaccctcaactgactcctccagtaaaatttcacctgggaagctgggtattctaaggcagcctctttctgtaacccacttgcctaccctggaaattcatgactcttcctgtccctgaatgtaaggactagcgtcaccctagcttaggaccagcattctcagcccttcccagtagagcaacctttttcactgcacccatgcattccctacagtcactctgacttcaytggatttcagacccagggagatgacagctgaggctcagagctggagggtgggtg

SEQ ID NO: 949344 - DNA, 763 bp, Homo sapiens
ccaagaggaatatgacatggactctgcccacaaagagcctccattcgaagggaggagacaaaccagygccatgtgagacagacggtgtaagcactgagatgagaatggagagaccaggatgggaaagacatggccgggcagttattgtctaacttaagttagaggaaggacaagaagaatccccgcaggtccagagggagtggagatggcagtggtttaaggcaggggaccagcagggatgaggaaaggagcccacaggtctggagagatcagacacaagccactgttctaatcccagagagtagcattgatggtggtggagcagacagcaaagacaaagttgggaaaaagagacgacttggtgactgattagatgggaagagaaggaatgggtgagaaggagaattcaaagaggacgttgaggttgggtcttatatgaatatgattcctcatccaagacagaaagtcaaagagaaaggtcagtatgagaaatgtggcatttgaggtgtcatcagggtatggacaggtacgtcaaccaggagcccagaagacagatctctgttggaactgcacctggtgtgggtgtaaatcactgggatcagtggatgagaggtgttcaggtagaagtggaccacgaatggagctctatgcagctcccacacccacagtgtgtgagagagaggggaagggtgggctgagatggtgagaaaactaaaaaagtctcatcagaaacacatgatgcaccaagggtctagctgaaggt

SEQ ID NO: 949345 - DNA, 736 bp, Homo sapiens
tcaggcttaccccagctcttagtctagtttccaagtacatttcatggcaggaatctccctctccataaattagcgcacaacatctttggacgggcctgaatactacagaggtttccctgctggtagaatgmaaagtttgcaaatctgctgattcatcaagccgacacaaagggttactgctactatacatcaaatcgtaacattttcttggaggcttatttttaacaaaaacatatccatttggctacaaggatgaccttttctgcctccttacccctccatgctggaagtcttcatttcctgatgcctgctgctaatataggacacatgttgaaatgtttatgctaattaggctttgattggaatctcagaaacaagttaaaatgacaagttttattgcattgatgaattaattaatgaaatgaaatcattgttatgctgtttgaaaccagtcctctgatttttgcaggaggcaggtggattttctactctaaaaatctagtcgttttatcagaaaggagtgcaggatttacgtgttgttctcaggtgggagtactgtgggaataaagaaggatcatccttttgatgaacaagtgagtagcgatggtggatgatgagaacaggcattcattcatgtgaatgtgcaaacaaatggaaaggagatattaatagaacaggtgatggagaagaatcagtggtaggtgtctgtggcactgataaattgcagtctccccac

SEQ ID NO: 949346 - DNA, 702 bp, Homo sapiens
ttgctttctatttcactgagaacaatgaagcaatcagaagacgatttcataaatctcactatcacttctacctgtttactagcatatacacctcacactttgacttcctgccagttaccactagtgaacttgccatgctcctaaagctgacatctccttctccacttaggtactagattccacctcctcttgtctattccaggacatccctccaataatgcttccttctgtctcttacatcattagttttatgctccctactggatcattcacatcaacctgcttctttacacatgcttcatctcccattttaaaaacacgttctttgatccatttccccaccagctatcatcccatttctttgaaacaaaacttctcaaaacagttgtatatactcgctgttttcactttttcgcttcctgttttctcttaaacttattccagccaagctattatcccaccactccactgaaagtagcttgactactcttgtcatgatcccatttctttgtttctttttggagaaaaattcctcaaaagaattgtcaatattcaatctccatttcttttctccctttccctttcaaacatatttcaacccccaccactccactgraagtgctctttttgagtcaccagtgactctttgttgtaaaatccgacggtcaattctcagacctcatactaactgacatgtgagca

SEQ ID NO: 949347 - DNA, 589 bp, Homo sapiens
acctttcccaccacagctctggagggctactacaggcgtgagacgccacctctttctctctgaaactcgaagtctctaatgagtcattatggkgtgtgcacatgaaaggccttgtgagtgccagtgagggtattgccaagaaccccatgggtgtcaaaggactgtggaccctcttggggactagaaaaggccctcttcatggaaaggcagaactagagtgagtcttggaaggcttggtggtgggattgcagtactcagaggagaagttcaggtcctaacatcagagagaacggagcctgtttctgaaggtcagggggtggccaggggctatactctggggggctggtagcagaatcaactataatgatagctccatccttccaccaactcttttctctcttatctcctgtattagtccatttattttttcattgctataaaggaatacctgagactgggtaatttatacagaagagaggtttatttggctcacagttctgctggttgtacaagcatggccccagcatctgctcagctctggtgaggtctcaggaagcttttatccatggtgcaaggtgaagggggaaca

SEQ ID NO: 949348 - DNA, 736 bp, Homo sapiens
agtagggttgtatattgcaggaatttatccatctcctctaggttttctggtttgtgcacataaaggtgttcatagcagccttgaatgatcttttgtatttctgtggtataggctgtaatatcttccatttcttttctaattgaacttatttggatcttctctcttcttggttaatgtcattaacggtctatcaattttgtttatcttttcaaagaaccagctttttgtttcatttatcttttgtattttttttgtttcaatttcatgtagttgtgctctgatttttgttatttcttttcttccactgtgtttgggtttagtttgttcttgtttctatagttccttaaggtgaccttagattgcctatttgtgctctttcagactttttgatgtaggtgtttaatgctatgaactttcctcttagcaccacttttgctgtaatcccagacgatttcataggttgtgttactattatcattcagtgcaaaaaaggtttaatttctatcttcatttgattgttgactcaatgatcattcaggagcagattatttaatttccatgtatttgcatggttttgagggttcctttcggagtttctaattttatttcactgtggtctgagaragcacttgatataattttgattttcttaaatttattgagacttgttttgtggccaatcatatggtctactttgaagaatgttccatgtgctgatgaatataatgtgtatatt

SEQ ID NO: 949349 - DNA, 232 bp, Homo sapiens
gatcagcattgtcaagtgcaacaatctgtaatgatggaaaagttgcayaacagcaaaaagctggcatgcatctgtgtcattaaaaactcagtatgatttaacaaattttagctaagatttaaaaataccgtgttatgtgatgtggatatgccagacattacttagttactgccctactttttcttattatagttatttttcatttttttattgtaaatattttcataatgtc

SEQ ID NO: 949350 - DNA, 585 bp, Homo sapiens
tggctaggactttcagtattacattaaataggagtggtgagagtggtgatccttgtcttgttccagttctcagagggattgcttccaccttttgcccatttagtatgatgttggctgtgggtttgccatagaggctcttattctgaggtatgttcctttgatgcctatttgttaaggggttttgacatggggagattttcaattttatcgaaagctttttctgaatctggtgagatgctcatgtggtttttggttttagttctgtttatgtgatgaatcaaatttattgatttccatatgttgaaccaagtttgcatcccagggataaagcctacctgattgtggtggatttgaattttgatgtgctgctggattcagtttgctagtatttggttgaggatttttgcacctatgtttacctgggatattggcctgaagttggtttttttttttcactgtgtctctgacaggttttggtatcagaatgatcctgccctcacagaatgagttagagagragtcctccttcttgcttctctggagtagtttcagtaggatttgtaccagctctgctttatacatctgg

SEQ ID NO: 949351 - DNA, 412 bp, Homo sapiens
cagtctaggtacaaaaatcattacatatctattgaacataatattctgaatccattaaaaatccaatttttaaaactttaacaaaatggagatattaatgatatcttatgagctaaaatgtgagaagtaaaaatgtaacaattcttagtactccatagagctcccaaaatatttgcttggtagctcagatttgacctcatttctgtgggtttgactgcaaacaggacagggtttatgtttgtaattgaatgctgttttctgggcaactttcacagatgcaactgaagctagtttttaagggggactraactgtaaagcacaacactcaatcaggaaaacattctgaaaatcattgtcgtgagttttttctaatggaaaagctagccagtcaaaaaaaaaaaaaaaaatacag

SEQ ID NO: 949352 - DNA, 598 bp, Homo sapiens
atgggagaaattggcccaaagaaaggggctgaaggccccatgcaagtctgaaagccagcagtgcagtcaaatcttaaagctccagattgatmttctttgacttcatgtctcacatctaggtcatgctatgcaagagctgggtccccatggttttgggcagctcagcccctctggctatgcaaggtagcctccctcctggctgctttcctgtgctggcattgagtgtctgtggcttttctgggtgcacggtgcaagctgtgggtggatctaccattctggggtctggaggacagtggcattcttctcacagctccactagacagcaccccagtggggactctgtgtgggggcacccaccccacatttcccttctgcactgccctaacagaggttctgcatgagtgccccaccgctgcagcaaacttttgcctgggcattcagatgtttccacacatcctttgaaatctaggcggaggtttccaaacctcaattcttgacttctgtgtacccataggctcaatgccacatgaaagcagccaaggcttggggcttccactctctgaagccatgacctaagctttaccttggcccctgttag

SEQ ID NO: 949353 - DNA, 620 bp, Homo sapiens
acttagaatacaagatggggtcctcagtgacgagaaccagatcacatatagagtctttattttagttagctagggctgatacaacaaaataccatataccgggtggcttataagcagcagaaatgtattgctcacagttttgggagataaatgtccaagatcaggatgccagcatgactgggttctggtgaggtccctcttccagattgcagagtgctgattccttattctatcctcacatggcagagaacagggaggggaagcaagcttgcttgtgactcttataagggcactgattccattcataagggctccaccctcattaccgtatctaattctaattatctcccaaagacttcacctcctaataccattacatggggggtagagtttcaacatatgaattgtagaggcacacaaacattcagtatacagcattctgccacagccccccaaaatgtatgtccttctcacatgtaacatacattcattccttcccaacagccccaagagtcttaartcattccagcatcacctctaaagtctaaagcttaagatttcatctaaatatcatctaaatccgatatgggtgagactcgaggtatgattcatcctgcgat

SEQ ID NO: 949354 - DNA, 592 bp, Homo sapiens
gagcctcatttatctaatctktaaaggatgcaaagaatgtttagcctggagggttattataaggattaaaaagatgattccaataccatgcgtggttcataagagatgttctacaatatagaatgtagagctttcatgtgtgcagttactgataatttgcttttttgtgtatattgtttgggatatagagaatccattaccagatctctgagggtttctcctaggagtcaagggcatgctgaagggccccctcaaagtggtagatgtgaagcagaagcaaaaccattctcccaaggtccaataaatctctggccgcttgtttcccggtgacaagtgtctttgttatgaataatcacactccactctactcttatcttttttctccttgtcaatttcatttcaagctaccttcctgcctcagcccaatgcattcctctaggttcttaaaggaaaacgaggaaagatattattttcatcagcatttttcggtagcctgaaggactctgtcatgctttcttttggtttgcagtcattgaataggacttaaaggtttcagaggcctcaggaaattgagttcatatgaacaagtctg

SEQ ID NO: 949355 - DNA, 495 bp, Homo sapiens
agggatcaggaggaggcccaagaaaaagagaggaagcacaagagaaggacagaggctctagtggcagcattgcaagcttgcaaagtccaggatccccatggtgcatccactagctgttactgatgtggcaagtcagggcattttaagaaggaatgcccaaacagcaagaagaagccagctcaaccctgtccagtctgtgatggagaccactggagattgaactgctcccagagatggaggtcactaggttcagaaccagtctcactgatggtccagcaggactgatgagtcccagggctcaaccccctgctccagcagctcaaactgccattacagcacaggagctccaggtgtttctggaaattgaaggaaggtagatctccttctggatactggaggcaggctctctcttctctctaatccaggyctcccctcttcccatagcacaactgtaaggggtgtctcaggaaaaactctaatccgatatttttcttc

SEQ ID NO: 949356 - DNA, 762 bp, Homo sapiens
gacattacaggatatccctggctaccaactccaagttctacttattcactaagggatattcatgtttaacaaacaaatcttaaatgcccaatttatgtcagatgttacacgggtggttttcaaccaggggtaattttccccttccccaggaacatttggcaatgtctgatgacatttttctgtgtcatacctgaggctgggggaagtgctactggcatctaatgggtaaaatccagagacgctgttaaacaccctacaatacacaggacggcacccccagaataaggaattgccccatccaaagtgtccatggagctggagctgtgaaaccttggtacaggtcatctcatttaatcttccctccagccccataaagtgtgtggatgatattaatatccccatttcacagatggagaaatgaggctaaaggaagctaaatacattacttgaagtcaggtctgcctgactgtaaaaggctgtgctctttgcaggacaccacactgtttcctgaagccagtgctttttctaccagtaaaaaaatccaagcccagaacagttaggcccttttccaacatcatacagtcagtgatggataagacaggccaggtggccaggcatcctgttgcaaaggttccttccaccactgcctgctcggcacatcacctgagacagacagttttccctccagcccaggcaggcygcatgtctcatttcgtcttctttcttctatccttcctcctctctcccgactctgcaagccct

SEQ ID NO: 949357 - DNA, 638 bp, Homo sapiens
ttccttggcttgtgcctgcatcactccagtctccacatccatctccacagggtcttctctctgtatctctgtgtcttctcctcttcttacaaagacatttgcctttggatttagggtccacctggttaatgaggtaagaataatctcacctcaagatccttaattgaattatatctgcaaagaccatttttccaaataaggtcatatgtacaggtaccacggctgagcacttggacgtatttgtagggggccatagttcaacccactacacttattatctgggtgttctttttccaagccaggctttgctgggatgcctcatggaccttgaaattatgtaaactgtattacttgaaagagatgcttcctgtgacatgttggggaaattgcctgctgctagttgttctcactctaggaacagagtctccatttctacaggcttgaccctccaaccttggcactcttgctcaacccctctgggcttctttttgtggcaaaggagaagagttatcctctgctctgtttagtgggaatactgcagtccaagctgaaagcccaycctgcccttttccccactgggcagaaacaaggatgccatgacatttcccccagaggtggccccttagggtgtccttttt

SEQ ID NO: 949358 - DNA, 549 bp, Homo sapiens
attgcagatgttgttatttcacagttaggtaaattagacataaaaaggtcaaacgacttgaacgtgctaccataaaaggtcagtgataaagccagaagtcatttctcagtgtccatcataagccacccccacccccgcagcaattactttgagaacaagagctctctaagttttcccagtcaaccacaggtactattttaacatggtccaacatctcaaaaagatgactttcttcaccttttgatgtttgccttaaaaaaaaaatcaccagaaacagtgaaagaatcagaatgcttttaaaagaaaagtgttgctatcattcccatttttcttgttgtatataaatgattaggaattaaaacatttctggcccggcatggtggcttacgcctgtaatcccagcactttgggaggccgaggtgggcagatcacaaggtcaagagatctcgagaccatcctggccaatatggtgaaaccccatctctactaaaaatacaaaaaattagctggtcatggtggtgcgtgcytgtagtctcagctactcaggag

SEQ ID NO: 949359 - DNA, 611 bp, Homo sapiens
tacattaatctgaaccaataacctgtgtggcccacaaagtataattctgctaaatgttttttaaaacacctttttttctaattaaaatctttacaagtgaatacaaaatacaaaagataaatgaaacaaaagttggttcttcgaaaagataaataaaatcaatagaccattaccaagattcaccaaggaaagaagagagaaaatcaaataacctcattaagaaacaaaatgggagatattacaactgacaccactgaaatgcaaaagatcgttcagggctactatgaacactttatacacataaactagaaaacctagaagaaatggataaattcctggaaaaatacaaccctcccagcttaaatcaggaagaattagataccctgaacagaccaataacaagcagcaagatcgagatggtaattagaagattgccaacagaaaaaagtccaggaccagatggattcacagcagaattctaccagacattcagagaagaattggtaccaatccttttgacattattccacaaaatagagaaagagrgaacccttccaaattcattatatgaagccagcatcaccctaataccaaaaccaggaaaggacata

SEQ ID NO: 949360 - DNA, 622 bp, Homo sapiens
ttattctgtctgcttcttcatttatttctttattttttagagatagggtctcattctgtcacccaggccatcaactcactgcagcctttaactcctggggtcaagtratactcccacctcagtctcctgagtagctggactacaggcctgcactaccgtgcccagctaatttatttttgtagagacagggtctcactatgttaaccaggctgatcttgaactcctggcctcaagagatcctcctgcctcagcctcccaacgttttgggattacaggtgtgagccaccatgcctgagctctgtaatattctttgtgagaagacttttaactacaaatttcatttttaaaacatatatattcaagttatttttcttgagtgagctttggtcatttatatttttcaagaaatttttccatgtcctttgagttgcgaatttattgacaaaaagttgcttataatattgtctactatctttctcacctcagtctcccaagtagctgggactacaggcatatgactaattaaaaaaatgcctgactaattaaaaaaaatttctttttttggagacgaggtcttgctatgttgctgtgttgcccaggctggtctcaaactcctgggctc

SEQ ID NO: 949361 - DNA, 600 bp, Homo sapiens
gatgctggggtgcttgtagattcgggctgccacagacattaacgtcaggatgtggttctgtcaggaaggaggagacaagaggcggagtgaagggttaagtctcagggcccttggcctggcctgtccgctgccatcacctcttgttatggggctgagcatcagattcctaccaaagcctcacaatacccccgaggtctccgtgttactcccttcattttgcatgtgagaaaacaggctcaagaacctgcacgaggtcacaaagctgatgcatgaacagtggtctttgaacccagacctgccttgctccgaacttgtgtgtctaacatccaggacagcttcaggggacgacctaaatccaaattcattaaaatccaaaaccttaaacttatagcgtggcacaggccacatttctagtgcttcaatagtcatatatggctcgtggctactgcactggaatgtgcagatacaaagttctactggacggcatggcttattctgccttaatcctgacaccgtctccttgccaaccacccccacccgtccccggcctcagcccagaagcaaagttytgagcgctcaaggttagtagaattccctctt

SEQ ID NO: 949362 - DNA, 447 bp, Homo sapiens
aggctatatcatttgtgtttgtataaatacattttttgatgtttacacaaccacaaaatcagctaaagatgcttatttcagaacgtattcctgtcactacatgacatatgactgtatctcacattataatttataaagtactctcattgtccattatctatatcacagaattatgaaatgttaaatttgaagggatattagagatatcgctaatctagtggttgccagttggggtgattttatcccccagtggcatttgacaaagtctggatacatttttaaattgtcctaacttaggagtgggtgctgctagcatctagtgggtggaggctaaatatcctatgcaattcacagcatagtccctacaacaaagaagacttctgtgctcactsggatggagaaggcttgggaagaagccatatagcaatcttcccagagaacagcagc

SEQ ID NO: 949363 - DNA, 393 bp, Homo sapiens
actgtccttcagagaaaaagattaaattcgacctcaatcctattttattttatttagttatttagagatggagttttgctcttgtcgcccaggctggcgtgcagtggtgcaatctcagctcactgcaatctccacctcctgggttcaagcgattctcctgccctagcctcctgagtagctgcctgccaccacacccggctaattttgttgttgttgttgttttatttttaatagagatggggttttgccatgttggccaggctggtctcgaacccttgacctcaggtgatccgcccacctcagycccctaaagtgctgggattacaggcgtgcgccactgcacccagccctattttataaccgtaaaattttacccacactttttgtaagttc

SEQ ID NO: 949364 - DNA, 571 bp, Homo sapiens
caacttgagcaaagtttcaggatacaaaatcaatgtacaaaaatcactagcattcttatacaccaacaataatcaagccaagarcaaaatcagggacacgaacccattcacaattgccacaaaaagaataaaaatacctaggaatagagctaaccagggaggtgaaagatctctacaaggagaattagaaaccactgctaaaagaaatcagagaagatacaaacaaatggaaaaacattccatgcttacgaatgggaagaatcagtatcattcaaatggccatattgcccaaagcaattcacagattcagtgctattcctatgaaactaccagtgacattcttcacagaactggaaaaactatcttaaaattcatatgaaaccagaaaaagtctgaatagccaagacaatcctaaggaaaaaaaaaacaaacccaaagctggaagcatcacattacctgacttcaaactatactacaaggctgtagtaaccaaaacagcatgatactggtacaaaaacagacacatagaccaatggactagaatagagaacccagaaataagcccacacac

SEQ ID NO: 949365 - DNA, 607 bp, Homo sapiens
cccccaccccctgacatgccccagtgtgtgatgctcccctccctgtgtccatgtgttctcattgtttaactcccacttatgagtgagaacatgcgatgtttggtttctgttcttgtgttagtwtgctgagaatgatggtttcagcttcatccatgtcccttcaaaggacatgaactcatccttttttatggctgcatagtattctatggtgtatatgtgccacatttgatggttctaaaaatgggaattgccctgcacaactctctctttgcctgttgccatccatgtacaatgtggtgttgagcctatgagtgcacagaagtcaagaattgaggtttggaaacaacctagatttcagaagatgtatggaaaagcatggatgtgcaggcagaagattgatgaaggggtgaggtcgtcatggagagcctctgctaagacagtacagaagggaaatgtgggatgggagcccccacacagagtccctactggggcactgcctagtggagctgtgagaagagggccaccatcctccagatcccagaatggtagatccactgacggcttgcactatgtgcctggaaaagccacagacactcaatgccagccc

SEQ ID NO: 949366 - DNA, 445 bp, Homo sapiens
tgcaaggtagattaatgcaaacaaaatggcagttaacatcccatagtgccaaatccacccttagacargacagactttactgagagggacctctaacccactaaatcttaggaagattctaacctttgtaagttgggcctcgaaaccatatttggtcaagcatccttgtcttttattaagagggacttttaacccactctgtcttaggagagactctaactcccctaagttgggcctctaactcaatcccatcctttacctgggtatcctaccacttacccaaagttggccaattggtgctgcagtctatttcctttgggtcagggtctcttcagtatcacccctttgtggttccccaggatggtgttaccagaaaggggtcctgattcagacctcaagagagggttcttgaatctcacacaagaaagaattcagggcaagtcca

SEQ ID NO: 949367 - DNA, 600 bp, Homo sapiens
ttaaaatgaggctatactggattaaataggcactaaactcaatgactattacccctacaagaaggtcaggtcatgtaaagacacaggagtacagaggaacacagggagaatgycatgtgatgacagaaacagagattgaagtgatataactgcaagccaaggaacactaaagattgacagtcaccaccagaaactagaagaggcaaagaagaattcttcctcagagcctccagaaggaaccaatctggctgaaaccttgattttagacttctagcctccacaactgtgagagaataaatttctgttgttttaagaccatccggtttatggtaatttgttaaggtcaccctaggaaactaacacaccctataacactggttctgagatagctgaagcagaaaaagagaaatgggaatccaatcagtagctgatttggctgtggagtaaacaaagtcccagcagtactgggaacaggttcagcaataattacaacctttatcagacagccaagatcccatttgaatcagaatatggtaactgtcacacaccccaagacaccccctacttttgaatcataaaggcgtatgtaattggagaggc

SEQ ID NO: 949368 - DNA, 604 bp, Homo sapiens
gacagcatagagtaggatcttcttttttcatccagtctaacaatctccaccttttgattattgagtccattcacatatgttattattgacatggttaaatttacatttgctgttttactatgtgttttctatatgtctcatgagttttttgttcctcgttctttatttattatattcttttgtatcaaacaggtacttttagtgtaatatttaattcctcttgattttttaaactgtatatttgtacttttggtagtgtcaggctaagggattacaatatacatcttaattaattacagactacatcaaagtaattacagtctacatcaaaataacttaattctggtaaattatggaaaccctgttccagtacaccttcatcccctcagcttcctttgtacaattatcatatgtattaaagctatattatgttgtaaatccaataatacaatgttataataactgctttatgtaatcttakaaaagaagttaagagaagtgaatatatatttatatagacttctttttattatttttaactctggtaaaataaagtaacatacaattccccatattaaccatctctgaatgtacagctcagcct

SEQ ID NO: 949369 - DNA, 558 bp, Homo sapiens
accaaaggtacaaagaggagctggtaccattccttctgaaactattccaaacagaaaaagaggaacycctccctaacttatttatgagtccagcattatcctgataccaaaacctggcagagatacaacgcgaaaaaagaaaatttccggccaatatccctgatgaacatcagtgtgaaaatcctcagtagaatactggcaaactaaatccagcagcacatcaaaaagcttatccaccatgaccaagtcggcttcttccctgggatgcaagtctggttcaacatatgcaaatcaataaacataatccatcacataaacagaaccaaagacaaaaaccacatgattgtctcaatagatgcagaaaaggcctttgataaaattcaacatcccttcatgctaaaaactctcaataaaccaggtattgatggaacacatctcaaaaagaataacagctatttatgaccaacccacagccaatatcatactgaatggacaaaagctggaagcattccttttgtaaactggcacaagacaaggatgccctctctcaccactcct

SEQ ID NO: 949370 - DNA, 559 bp, Homo sapiens
cagaggtacaaagaggagctggtaccattccttctgaaacaattccaaacaagacaaaaagagggactcctctctaactcattttctgggkcctgcatcatcctgataccaaagcctggcagggaaataacaaaataagaaaatgtaaggccaatatttctgatgaacattgatgcaaaaatcctcaatgaaatagtggcaaacaaaatccagcagcacatcaaaaagcttatccaccatgatcaagtcagcttcatccctgggatgcgagactggttcaacatatgcaaatcagtaaacaatccatgacataaacagaatcaattacaaaaaccacatgattaactcaatagatgcagaaaaagcctttgataaaattcaacaccccttcatgctaaaaactctcaataaaataggtactgatggaatgtatctcaaaataataagagatatttatgacaaatccacagccaatatcacactaaatgggcaaaagctggaagcattccctttgaagactgatacaggacaagtatgccctctctcaccactcctattc

SEQ ID NO: 949371 - DNA, 570 bp, Homo sapiens
agcatactatgcagccataaaaaaggatgagttcatgtcctttgcagggacatggatgaagctagaaaccatcattctcagcaaactaacacaagaacagaaaatcaaacaccgcatgttctcmctcataagtgggagttgaacaatgagaacacatggacacagggaggggaacataacacactggggcctgtcagggggtgggggcagggcgagggatagcattaggagaaatacctaatgtaggtgatgggttgatgggtgcaggaaactaccatggcatgtgtatacctatgtaagaaaactgcacgttctgtacgtgtaccccagaacttaaagtataatttaaaaaaaagaaaatattttaagctcatgggctctatggtgtctgctggaattgctcacttttgtggttgcagcattgtgacagttaatactgagtgtcaacttgattggattgaaggataccaagtattgatcctgggtgtctgtgagggtgttatcaaaagagattaacatttgagtcagggactggagaaggcagatccacccttaatctgggtgggcaca

SEQ ID NO: 949372 - DNA, 591 bp, Homo sapiens
ctgaggaatatcatgggatgagttaagtttaatatcatcctcttctagcattgagactagagaggttgagaatcctgggcacttagcatggactaaayacagccatgaactttgagtcatcttaagcaggtaggttatgggggtttgcagggatgtgcaaagtctaacaaatagcaattggtttatgggtcagaaagtggctaatggctgaagagctcaaagagttgatgagttaaagccaagcccagctttccagcagcccaagaatatacccagaatagggcaggagccctatcaaccaggtgtgggaatctctgtgggactcaagggagcatgttcccagaagcaggggtttccccaaagagcatgtaagttgtccttgctcatgactgttatccacttggtgcttgcttttgtatggatacatgttagggaaatagtgtgttgcaaagagggctggatgccaattgacgttctctagctacctttgataggagccctggagtgagccaacaattgaggacaactgcatggtcccctgctaagacatatatctgatagatagaggatatcagtcatggcctgctgctc

SEQ ID NO: 949373 - DNA, 587 bp, Homo sapiens
gtaggaaaacctggggctgaaagtgtgcagggacatgtcatctttagccttgggcaaaggcaaccyttcccactgatgatttccagatcacccaggggtattggttctgcctcaattttccaactggcacagagatcaagggcgacggtgaagcagattggaagggcaaagacgccacggtgggaacaggttcctatccctcccggctgctctccagctgggtggccctcagtgcatctccagagggcagtcaaaagccccaggccaagaccaccctgcactctggatccctctactcgctcaccaaacacagaccagccaaataaccaacggggatggcagaggccagggcactgtgcacccctcgctgcctcctgacactcgaagcagccccccattgggggacccactagcccatgatcctacgcgagcgaggtcaggccacacctgcccgtgtgtggagcctctggtcagtccacatggctgcaggggcctgtggggaggctggaacagggttacctcaaggcctttcttctaagcacccagcaaagggcaggagagtgtgctctagtcagcatctttcaaag

SEQ ID NO: 949374 - DNA, 627 bp, Homo sapiens
ttcagaagttgaggtgggaagaactggttgagcccagaaggttgaggctacagtgagctgtaattgcactactgcactctagcctgggtggcccccatctcacacacacaaaaaaagagygagacccggtctcaaaaaaaaaaaaaaaaaaaagggagttcctcatttgccatgagtggacacctgcttctttactgcttcaaagtgaacacagctattccttgtaaagggtaggttttactgtaaggaaatctagaacacctgtgtgtgaatgccccctgatttttcaaagaaatgagtggttgcatcaaaatcaagcttatatttgtggaaaatcacatgttgccaaattctctcatcaagaaccctttattaactgactaattgtgggccatggtggcaggcacttaacaaagaccatggcagcagacctccctcaactggaaccctcagttaagcgggattttgtttttattttggaactccaccttcagaagggcaaaaatcacaagatgtggtagcaagggtttattctagaaattagcttccaagcagtcgtcagcccagtctgtatgtcttccgcatctataattatagtagcagaagagaatggtgagcctggggcac

SEQ ID NO: 949375 - DNA, 627 bp, Homo sapiens
ttcagaagttgaggtgggaagaactggttgagcccagaaggttgaggctacagtgagctgtaattgcactactgcactctagcctgggtggcccccatctcacacacacaaaaaaagagtgagacccsgtctcaaaaaaaaaaaaaaaaaaaagggagttcctcatttgccatgagtggacacctgcttctttactgcttcaaagtgaacacagctattccttgtaaagggtaggttttactgtaaggaaatctagaacacctgtgtgtgaatgccccctgatttttcaaagaaatgagtggttgcatcaaaatcaagcttatatttgtggaaaatcacatgttgccaaattctctcatcaagaaccctttattaactgactaattgtgggccatggtggcaggcacttaacaaagaccatggcagcagacctccctcaactggaaccctcagttaagcgggattttgtttttattttggaactccaccttcagaagggcaaaaatcacaagatgtggtagcaagggtttattctagaaattagcttccaagcagtcgtcagcccagtctgtatgtcttccgcatctataattatagtagcagaagagaatggtgagcctggggcac

SEQ ID NO: 949376 - DNA, 604 bp, Homo sapiens
tcaagctgatgaatacaggttgacttcttcctttttaatcacatcaagaaatacatattttctctcatatggtcttccccactgataacccaactttcaactttgacccacatttacctttatctggtagtcaatttctttaaaaagcaaagttgctgttgtttttttaataaattcacaaatgttactaaatataggaaagagtcaaagatatcaaagccccattgagatcttgatgttgggcagttatctaggtttactcactagctaagtgacttatgacttattctttcaccttacccaagaaatttgaatgctgttatctgttacagacctttgaggttaccaggacatagcttaaactgtgagcttttgaataataaggaccaaggcttctatgcaaactttggagattttttatagttgctttctagaataaaaaagccagtaatacctaagagcaaaagtagcatcwccagttattttctatgtcctttccagtcagacttgaccttttcttcaatgcttccccaaattccaaattattttctgcctgagggaaggaaaagcattgcctcctgccagagacagccaagatgctgca

SEQ ID NO: 949377 - DNA, 589 bp, Homo sapiens
gtgatccttccacctcagcctcctgaatagctggaactacagaaatgtaccacctaatccagctaattatttatttatttatttttgagacagagtctcgctctgtcactcaggctggagtgcagyggcgcgatcttggctcactgcaagctctccctcccaggttcacgccattctcctgcttcagcctcccgagtagctgggactcaggcgcccgccaccatgcctggctaattttttgtatttttagtagatacgaggtttcaccgtgttagccaggatggtctcgatttcctgacctcatgatccgcccgccttggcctcccaaagtgctgggattacaggcgtgagccaccatgcccggccaattttttattttttgtagagattggatctccctatgtagcccaggctggtcttaaacttgcaggctcaagcgatcctcctaccttggcctcccaaagtgctgagttgttttgttttgtttttgagacatagtcttgctctgtcgcccaggctgaagggcagtggcgcaatcttggctcactgcaacctccgcctcctgggttcaagcgattctcctgcttag

SEQ ID NO: 949378 - DNA, 607 bp, Homo sapiens
ttgaaaggatcaataaaattgataagctccttaccaggttaattaggggaaaaagagagacgacacaaattactaatatcagaaatgaaagagtatacatcactacagatcccatgarcattaaaaaaataattaagcaataatatggacaagtctatgcccacaaatatgatagcctagatgaaatgtaccaattccttgaaaggcacaatttgccaaaactcacactagaggaaataaacaatctgaacagatttttttgctattgaagaaatttaatcaataattaatattttagaacaggagacacaaggcctagatgagttcactggtgaattctaccacacatttaatatacaaattatactcatcctctacaatgtcttccagaagatagaagtgggagaaatagctcctaattcttcctatgaaggcagcataaccctaataccaaaacaagacattaaaaagaaaataaaattaggaataaatatcttttatgaacacagaagcatacattctcaacaaaatattagcaaatttaattgaacaatgtataaaaataattatataccacaaacaaggaagaattatgtcacatatataa

SEQ ID NO: 949379 - DNA, 595 bp, Homo sapiens
tccaaggagaggcgtgatagtctacagtgggaggtaatatcatagaaacaacactgggtatcaccagccaaaaagtcttctgtctttttcagaataaatctgaagtgttatcttattctactaaaggtctcattacccaaatgatgagttttatgattagtcctctgtgctcacaaccagtgttatcctcacacgtagacaagtggatgacagtagatgaatgtttggaacttcgcctgttgtatgttaatatttcaggatttgaggtctctttattacaaaagtacaaattgattgaaacataatttgttctactgttttctgaatgtattctttgcttttttccccttttcattaagtactcattaagtaatacaatgaaaatacagatttatacagttgaaactcaataatgccgaaacatagaaatatgcaaactacgtagaaccatcacagttttggggttgctgatgggaccatcatgatacttccttggccacttgccataatatgcacagctctgtccctagggctcaagtgggkccagtaacatcagagatgggtcattttcagtccagaggatatactgtcactc

SEQ ID NO: 949380 - DNA, 586 bp, Homo sapiens
acttttgagaggaaaacaacaggagcagagcgaagctgtacatatgttaaattcacatcagtaataaagattaagtagaagttaatagcatcccagtcatgcttgtggaggtaatctcctttctgaaaattcaaaattagatttggaggatcgaagcaaacagggggtgagactttggcgtaatattttaatcaaattgtcatgaatgagtggatacaattaagaattctgtcagtcaaagtgctgaggcccttttgttagtcagcggtgggaggggtgcgctgggccgtggtggggagagattaaacttgacctttcctagggtcttcatttttgaccctgaggctgggctttgcctgtcagatggctgtttttttttaaaaaaagtatgtgtgtgtgcatgaatgtgtatacctgtgcatgtgtgcgtgcactcaggcatgtgtatacatgtgtatacatgtrgttgcaagagtgtatgtgtgcgcttgcatgtgtgtgcatatgtgcatgtatgtatgtttgcatggtgtatgcagatgtgtgtgtgaacgtatgaggccatgcatgtgtccgtgtgtgtgta

SEQ ID NO: 949381 - DNA, 586 bp, Homo sapiens
acttttgagaggaaaacaacaggagcagagcgaagctgtacatatgttaaattcacatcagtaataaagattaagtagaagttaatagcatcccagtcatgcttgtggaggtaatctcctttctgaaaattcaaaattagatttggaggatcgaagcaaacagggggtgagactttggcgtaatattttaatcaaattgtcatgaatgagtggatacaattaagaattctgtcagtcaaagtgctgaggcccttttgttagtcagcggtgggaggggtgcgctgggccgtggtggggagagattaaacttgacctttcctagggtcttcatttttgaccctgaggctgggctttgcctgtcagatggctgtttttttttaaaaaaagtatgtgtgtgtgcatgaatgtgtatacctgtgcatgtgtgcgtgcactcaggcatgtgtatacatgtgtatacatgtggttgcaagagtgtatgtgtgcgcttgcatgtgtgtgcatatgtgcatgtatgtatgtttgcatggtgtatgcagatgtgygtgtgaacgtatgaggccatgcatgtgtccgtgtgtgtgta

SEQ ID NO: 949382 - DNA, 586 bp, Homo sapiens
acttttgagaggaaaacaacaggagcagagcgaagctgtacatatgttaaattcacatcagtaataaagattaagtagaagttaatagcatcccagtcatgcttgtggaggtaatctcctttctgaaaattcaaaattagatttggaggatcgaagcaaacagggggtgagactttggcgtaatattttaatcaaattgtcatgaatgagtggatacaattaagaattctgtcagtcaaagtgctgaggcccttttgttagtcagcggtgggaggggtgcgctgggccgtggtggggagagattaaacttgacctttcctagggtcttcatttttgaccctgaggctgggctttgcctgtcagatggctgtttttttttaaaaaaagtatgtgtgtgtgcatgaatgtgtatacctgtgcatgtgtgcgtgcactcaggcatgtgtatacatgtgtatacatgtggttgcaagagtgtatgtgtgcgcttgcatgtgtgtgcatatgtgcatgtatgtatgtttgcatggtgtatgcagatgtgtrtgtgaacgtatgaggccatgcatgtgtccgtgtgtgtgta

SEQ ID NO: 949383 - DNA, 826 bp, Homo sapiens
gaaaaatggtagtattccagtaaacaatggagagaggaacacatttcaaggaatatgggaatgtgtgtggaggcacaaaattgaaaataaatagacttygcagatcagtaagagactgacctgggtagaaagtgttagtagaagaatagcagaaaataaaatcataaacaaggacaagaggacagaaaggtaatgtattttacattcctttaaaatctcctttgggaatgatttcaaacccaccccacccccaagagtcaaatccttcctaatgatttaaatccccattgctgccattttgtctttttcctgtggttacaatttttgaaattctatttgtttcttactctgatcttcttgcatccttgcattagggtattcttggtcctgactgggcccagcctctggttccgtaggaaaaagctggtgtttaagatagataccaactctccttttggatatggatgatgaaaattgtcccaccattgcacacatgggcaaaaaaaaatttttttttttttgagatgaagtttcgctcttgtcccccaggctggagtgcagtggcacaatctcggctcaccggccttctgggttcaagtgattctcctgcctcagcctcccgagtagctgggattacaggtgcgtaccaccacacccagctaattttttgtattttttaagtagagacggggtttcaccatgttggccaggctggtcttgaattcctgacctcaggtgatctgcccgcctcggcctctcaaagtgctgggattacaggcgtgagccaccgtgcccggcctacatgggcaaaagttttgtaggttgg

SEQ ID NO: 949384 - DNA, 826 bp, Homo sapiens
gaaaaatggtagtattccagtaaacaatggagagaggaacacatttcaaggaatatgggaatgtgtgtggaggcacaaaattgaaaataaatagacttcgcagatcagtaagagactgacctgggtagaargtgttagtagaagaatagcagaaaataaaatcataaacaaggacaagaggacagaaaggtaatgtattttacattcctttaaaatctcctttgggaatgatttcaaacccaccccacccccaagagtcaaatccttcctaatgatttaaatccccattgctgccattttgtctttttcctgtggttacaatttttgaaattctatttgtttcttactctgatcttcttgcatccttgcattagggtattcttggtcctgactgggcccagcctctggttccgtaggaaaaagctggtgtttaagatagataccaactctccttttggatatggatgatgaaaattgtcccaccattgcacacatgggcaaaaaaaaatttttttttttttgagatgaagtttcgctcttgtcccccaggctggagtgcagtggcacaatctcggctcaccggccttctgggttcaagtgattctcctgcctcagcctcccgagtagctgggattacaggtgcgtaccaccacacccagctaattttttgtattttttaagtagagacggggtttcaccatgttggccaggctggtcttgaattcctgacctcaggtgatctgcccgcctcggcctctcaaagtgctgggattacaggcgtgagccaccgtgcccggcctacatgggcaaaagttttgtaggttgg

SEQ ID NO: 949385 - DNA, 602 bp, Homo sapiens
gcaaattatgcaacctctctggatataaatatatgtcagattcttagcactacatctgacacagtagcctctagacaaatgacacctackgttatttaaccgggctgcttgtatgtctaagtaggacaatacagaagattcactcatttcgagatgacattagtgcagacctctctccaaatagttctttgttgctaaatagaagaatgttgccgggtgtggtggctcacgcctgtaatcccagcactttgggaggccgaggggggcggatcacgaggtcaggagatcgagaccatcctggttaacatggtgaaaccccgtctctactaaaaatacaaaaaattagctgggcgtggtggcgggcgcctgtagtcccagctactcgggaggctgaggcaggagaatggcctgaacccgggaggcagagcttgcagtgagcagagatcacgccactgcactccagcctgggtgacagagcgagacttcgtctcaaaaaaaagaagaatgttgacgctgccttttgtggagacggtatctgtgtaaggaagctgcgtgtccacttagcccccatcttttaccactatggggaagtgtgggttctc

SEQ ID NO: 949386 - DNA, 715 bp, Homo sapiens
atagatgtttctaacaatcacagaccctctgcctcaagacatttagtggtttcagtacaaccacttcaagccacactgtttatggaaatgacctgagacctcagagattattttaattcrgtgtaaacattgccagacataatttgatggatctgtatgtgaattttgtttcttcacggtatttaacttctgtcaccagcgttagcctattctaggctagtaaaaaaatgtgtaattgttagataaccaatcatatcacctctgtggtttcctggaacccagcaccaggctgagcctgggttaggtgggaataggtgaagcctatggcagagggagagaccaatacctgctcagaagcctgatgaatggcacatgaccctcaaaatccatttaggcagtaccatctttaaggtaaaaattcggcccacctctggaattatgagatttcttgccacaactactttctctttatgtaagttgagtaagctggtcatgagaatagactagggggtctaccctactgtgtggtagagatttccagctctaccacacactagctgcttgatcctgagcctcagttttcttgtctgtaaaatgcagataataatattaccatccacatgagattgtggttagggttaaataagtgtgaaggcattgagaccagtgcatcaatattgtgaagactcagtaaatgttagccagtgccatggtc

SEQ ID NO: 949387 - DNA, 589 bp, Homo sapiens
aggaaacagggagagggagaaaccaacataaacccagcctgtagcacattcagcattaatcatgaagttagctcactctctgacctgtttcctcatagttgtttgttatctgttgtcctagaatcatgtagaccatgttataagattacactttcccttaactgctctgtagagaacaacttgaacattatgaaacattaagaagttttttctttgagatactccttcaggttctgcatactatgaaactactacatcagcaggtccaaaggactccactgactcaactgatctgagggaccccatgagaagcctactcatcaaagaatgcagtttctaaatcctgatgagttcaccccccttgccctgaccaatcaacaatcctaattctccagtcccttgccctccatgatcctcttaaaaaccctagcccagaattcctcaggaagatggatttgagggtctccttccaactcctcactcagcgccctgtggtcattaaactttctctgctgcatccmtgctgtctcagtgtaatgattctgttattgtgccgtgggcatacaaacctgtttgtcctgtatcaggc

SEQ ID NO: 949388 - DNA, 472 bp, Homo sapiens
cctcttgacgttcagatgcttctcttctctccttctctgccatgctgctctgccacttctgctgcccttctgccagtggaacctggggtttttatgggtataggatgggggacagggcaggccagggtggttttggaaaaggcaacatttgggtgggaaaacaggaatgcatgttctcacttagggtggtggttgcaggcttgagggtgaagccctctctagggaccccacccttttctaccaagtatttccctgcctcctgttcatatcacaataaagatatagaacatttgcatcaccctaaaatgttcccttatgcctgtttgtattctatcccwctctctttaccccttaaaaccagcagtctgctttctgtcatcatggattagttttgtctcatctaaaattcatacaaatggaataacgtattatgtactctgtgtctatcttctttcatgttgcataatgtttt

SEQ ID NO: 949389 - DNA, 472 bp, Homo sapiens
cctcttgacgttcagatgcttctcttctctccttctctgccatgctgctctgccacttctgctgcccttctgccagtggaacctggggtttttatgggtataggatgggggacagggcaggccagggtggttttggaaaaggcaacatttgggtgggaaaacaggaatgcatgttctcacttagggtggtggttgcaggcttgagggtgaagccctctctagggaccccacccttttctaccaagtatttccctgcctcctgttcatatcacaataaagatatagaacatttgcatcaccctaaaatgttcccttatgcctgtttgtattctatccctctctctttacccyttaaaaccagcagtctgctttctgtcatcatggattagttttgtctcatctaaaattcatacaaatggaataacgtattatgtactctgtgtctatcttctttcatgttgcataatgtttt

SEQ ID NO: 949390 - DNA, 578 bp, Homo sapiens
ttcacaaagaaactctaagcccataagattgtagtggtaaattctagcaaacacttaaaaaaatacaagtctagacaagctcttctggaaaataaaacaagagggtacacatctctactccttgtatgatggagtattaataagatgcttagaatggttattgcaacaaaattacaaataaattacaaatatctctaaacatggattcaaaaataatatctcaaatttagcttattgaagttagccacataaaaaggtaacacatcataaccaggttgaatttgtcctgggaatacaaggtggtttaacattcataaatcaatcattgtaattcactctagtaagagactaaaatataaaaatatataagcatcacaatagattcagaatagatttgtaaatggcaattatcaaaattcaacacacatatttttgaaaaagaaaacatttcttatccaactacataaagcacaactctataactttcatcacatgtacaggtgaataactaattatttttccctaagatctkaaatacagcacaataatatccattattcccacttctagaaaatatt

SEQ ID NO: 949391 - DNA, 564 bp, Homo sapiens
accttagcttaatgtaatgtttttactttatgagcttagtattaatttttttaatgttttcactcttttgtagtgacacttagcttaaaatgcaaactcattatacaacagtacaaaaatacaggtattttctttctttatatccttattctgtgtgctttctccattcaaaaatttttttactttattactttttaaactgtttgttaaaaatgaagacacagacacatacattagcctaggcatacagagtcaggtccataaatatcactgtcttcttcctctgccttgtcccactggaaggtcttcaggagtaataacatgcatggagccgtcatctgctgtgataacaatggctggtcagacatggtggctcatgcctgtaatcatagcattttgggaggccgatgcaggcagatcacttgagcccaggagttggaaaccagcctgggcaacagggcaaaaccctgtctcyacaaaaatacaaaaaaattagctgggtgttcatgcatctgtagtcctagctactcaggaggctgaggtgggaggatcacttgagcccag

SEQ ID NO: 949392 - DNA, 619 bp, Homo sapiens
tcatctgaggtcaggagttcgaaaccaacctgtccaacatggtaaaacccccatctccactaaaaatacaaaaattagtcagacatggtgttgggtgcctgtaatcccagctactcgggaggctgaggcaggagaactgcttcaaaccgggaggcggaggttgcagtgaactgaagttgtgccactgcactccgttctgggcaaaaagagcaaaactccatttcaaaaataaaaagaaacttgatcccacaaatgtaccctgtgaattaagaagcaagtataattactggcaattatagaaattatgaaataacagaaaggatggttcctattacgctactatccaagtcaaattctttcatagttcctgtatttcaaaataacccggccaggcctgcatttgtgtaaaacaaacaccttatttaataacagatagataattcattgcaaggagccaaacgtgtctatacatcaattatttcagtaactaatrttcctttcaattcaatcaatctgaaggtgtgattagatgtgtggctttgctgacacagacagtaccctaggccggctcatcccagcaccagctcacaccgtgcacgcggggccacggcttccccag

SEQ ID NO: 949393 - DNA, 619 bp, Homo sapiens
tcatctgaggtcaggagttcgaaaccaacctgtccaacatggtaaaacccccatctccactaaaaatacaaaaattagtcagacatggtgttgggtgcctgtaatcccagctactcgggaggctgaggcaggagaactgcttcaaaccgggaggcggaggttgcagtgaactgaagttgtgccactgcactccgttctgggcaaaaagagcaaaactccatttcaaaaataaaaagaaacttgatcccacaaatgtaccctgtgaattaagaagcaagtataattactggcaattatagaaattatgaaataacagaaaggatggttcctattacgctactatccaagtcaaattctttcatagttcctgtatttcaaaataacccggccaggcctgcatttgtgtaaaacaaacaccttatttaataacagatagataattcattgcaaggagccaaacgtgtctatacatcaattatttcagtaactaatattcctttcaattcaatcaatctgaaggtgtgattagatgtgtggctttgctgacacagacagtaccctaggccggctcatcccagcaccagctcacaccstgcacgcggggccacggcttccccag

SEQ ID NO: 949394 - DNA, 770 bp, Homo sapiens
acttctgtcacaaccttccattgtctttctaatgactttcctgctagcattacagatatatcacaaactttatcagtccttcgggcccaggtcggttccttagtcgcagttgtcctccaaaatcaccaaggccttgacctactcactgctgaaaaaggagaactctgcatatttttaaatgaagaatgttgtttttatctaaatcaatccagcctgctatatgacaacataaaaaagcttaaagttagggccccaaaactcgccagccaggcaaataattatgctggacctacctgggcactttttaactgggcgtcttggctccttcctactcttagtcccctggtacctgtttttctccttctcttatttgggccttttgtctttcatttagtccctcaattcacacaaaaccgcatccaggccatcaccaatcattccatactgcagttgctgcttctaacaaccccatggtactatccggtgccccaaaatctccccacagcctaaacttctattcctcgtcctattatactccttctcacctttaggactaaaccagtgatgaactcctggcaacatccagacaagaccaagcttctgtgcaacaccccctccaaacggctgtccaaacatacttccaggcctgcttcacccgttcctctaaaccataatctctgaggacctgctgtctataaaaacaacttccttcaggccttgtcctccaaaatgtkccccacccccaaaatcaaagacctctgaattaaaaa

SEQ ID NO: 949395 - DNA, 804 bp, Homo sapiens
  misc_feature 529, 531, 532, 533, 534, 535, 536, 537, 538, 539, 540, 541,542, 543, 544, 545, 546, 547, 548, 549, 550, 551, 552, 553,554, 555, 556, 557, 558, 559, 560, 561, 562, 563, 564, 565,566, 567, 568, 569, 570, 571, 572, 573, 574, 575, 576: n = A,T,C or G
  misc_feature 577, 578, 579, 580, 581, 582, 583, 584, 585, 586, 587, 588,589, 590, 591, 592, 593, 594, 595, 596, 597, 598, 599, 600,601, 602, 603, 604, 605, 606, 607, 608, 609, 610, 611, 612,613, 614, 615, 616, 617, 618, 619, 620, 621, 622, 623: n = A,T,C or G
  misc_feature 624, 625, 626, 627, 628, 629, 630: n = A,T,C or G
gccagagcccacgatccagctgcttggcctcagccaagtgacctgccccaagagcccagggtcagcaggcagggcccttaccaggggcagtaggcagggsccttaccaggggcagcaggcaggggcctcaccaggggcagcaggcaggggaccttaccaggtggaaggcttcgtgggagtgctggaaggtcaggagcatgtacttgagcacagacaaggcagctccccggacgatggggtacagcagcttagagaaaacctacaagagagtccctggtcaggagtccccaggcttgagctgctgaggccaagtagaatcacaagcctgagaggggactcagagacaccctagagttcaaacccatgcagagggatcaacactgaggtgctcacagacccagatggacagacagatggtgagatggacagcaacatagatatctgaggaatggatggacacaccaaaagtcagacacacatacttggatgagtagtcagggaaactaatggggagaaaatctgaggccanannnnnnnnnnnnnnnnnnnnnnnnnnnnnnnnnnnnnnnnnnnnnnnnnnnnnnnnnnnnnnnnnnnnnnnnnnnnnnnnnnnnnnnnnnnnnnnnnnnngtacaaaaggctgtaactctgggctaggacaggggcaccaaccttctcaattttggtgagcgaaacctcgatcaagatgctgaacttcttaacagcagccaggcccttcagcagtgcaatgatccacttgtcaatattcttccccaggggccaggacacccagtcaatcatcct

SEQ ID NO: 949396 - DNA, 804 bp, Homo sapiens
  misc_feature 529, 531, 532, 533, 534, 535, 536, 537, 538, 539, 540, 541,542, 543, 544, 545, 546, 547, 548, 549, 550, 551, 552, 553,554, 555, 556, 557, 558, 559, 560, 561, 562, 563, 564, 565,566, 567, 568, 569, 570, 571, 572, 573, 574, 575, 576: n = A,T,C or G
  misc_feature 577, 578, 579, 580, 581, 582, 583, 584, 585, 586, 587, 588,589, 590, 591, 592, 593, 594, 595, 596, 597, 598, 599, 600,601, 602, 603, 604, 605, 606, 607, 608, 609, 610, 611, 612,613, 614, 615, 616, 617, 618, 619, 620, 621, 622, 623: n = A,T,C or G
  misc_feature 624, 625, 626, 627, 628, 629, 630: n = A,T,C or G
gccagagcccacgatccagctgcttggcctcagccaagtgacctgccccaagagcccagggtcagcaggcagggcccttaccaggggcagtaggcagggccctyaccaggggcagcaggcaggggcctcaccaggggcagcaggcaggggaccttaccaggtggaaggcttcgtgggagtgctggaaggtcaggagcatgtacttgagcacagacaaggcagctccccggacgatggggtacagcagcttagagaaaacctacaagagagtccctggtcaggagtccccaggcttgagctgctgaggccaagtagaatcacaagcctgagaggggactcagagacaccctagagttcaaacccatgcagagggatcaacactgaggtgctcacagacccagatggacagacagatggtgagatggacagcaacatagatatctgaggaatggatggacacaccaaaagtcagacacacatacttggatgagtagtcagggaaactaatggggagaaaatctgaggccanannnnnnnnnnnnnnnnnnnnnnnnnnnnnnnnnnnnnnnnnnnnnnnnnnnnnnnnnnnnnnnnnnnnnnnnnnnnnnnnnnnnnnnnnnnnnnnnnnnngtacaaaaggctgtaactctgggctaggacaggggcaccaaccttctcaattttggtgagcgaaacctcgatcaagatgctgaacttcttaacagcagccaggcccttcagcagtgcaatgatccacttgtcaatattcttccccaggggccaggacacccagtcaatcatcct

SEQ ID NO: 949397 - DNA, 593 bp, Homo sapiens
aaggagcaacgccgggaacacaacactcgtcagctctcagttcctgccctaggtgtggtcccctgcatgcagagggacagaatgggtgcttgagggaaccctaagcacccaccttggtgtgactccttcatgaggcccaccaccaaacagggaccctgcatgcttgaaggccagcagcaggcaccactctgacctcatgccctcagcacctccaaaagccctccaccctcttaagaagggcctagcctcatgaccctggtctgcctttgggccagatctccctgtgcaggggtggccaaggtccccacttgcccacacctcagaatttgcagcctaggatgcagccactcttttgtaaactgcaccctaaatcacacagcatttgtgtaaccacccattcaccccaaacttccagcttccttttacaaattactcttaaaacagtctgactttgggaggccgaggtgcgcggatcacgaggtcaagagatcaagaccatcctagcaaacatggtgaaaccccgtctctactaaaaatacaaaaattaggcatgktggcacatgcctgtagtcccagcaacttgggaggctgag

SEQ ID NO: 949398 - DNA, 482 bp, Homo sapiens
atgtccttgagtgctgtctcccaaggttgctaaaagcaggcctctggcattcctgataagaaycagaccacatgcagttggctgaagacaagatggactccagcactgacctttcaccaagttttccttataataatcacatcgtaatactaaaaatcacacccagggctggagatttaacgcactaatgagacatatgatgcatgagaaacacatagtcaaactgcgcaggtgctaaaagttccccatccctacatgcctacatgtcactcctttttctcgcctcagcttccttaaaatgacaagagccaagtccttccaggagctagcaccaggatccctttcccatacaatgctcccgcgcagttgctccagacgcaagcctatgaaaccttgcctgagtaaaagttctgtttggcctggtgttaatttctttcttttctttttttgtgaggggggtgggggacggagtcttactctgt

SEQ ID NO: 949399 - DNA, 632 bp, Homo sapiens
cactggcatgatctcaattcactgcaacctccacctcccgggttcaggcgattctcctgcctcagcctccagagtagctgggactacartcacgtgccaccatgcccagctaatgtttgcatttttagtagagacggggtttcaccatgttggccaggatggtctcgatctcttgacctcatgatctgcccgcctcggcctcccaaagtgctgatattacaggcgtgagccaccgcacccagccagggttcatttctatttacatgagagccaaaaactagaggtccaagctgggataacaaagccactcccgctgcttagagtaccccactgataataggagttaagaagaaatcacttaggcagatagtaaggatatgggagtcctcggtaaggcttttctttttaatgaaaagcagcccaaaatcattttctaccaaacagcaacctataaagtcaagctgcagatacagacaaacaagctgggagcttgcatggctgaatgtcagcaggaactagggactagggagggactagacatgttcaagatgggggctccatcatcccttctttgccagccacgtgtacagtaaggagcagacaagatggcaccagccaaggagagttcattt

SEQ ID NO: 949400 - DNA, 466 bp, Homo sapiens
tggagctctcagctttggagtcagttaagaccagttccttgctgggaagccctaactctggagggacagagacaggtraggttagtttacttccttgagctttcgtcttcagtgctgcttacagccttaggatatctggtattcaggaaaggaggatgaggtagcattcaaaattgtgttctacctgggcaagaaccagggattgacagcccgttctctttccccagtgctggccagagttacacaagttggactgtgaacattggcaactattgacagaagtcaaggtcatggcaagaccatttggcccatgtttgttggggaaggataagcctgcgtttcaaaaagactggtcaactggatttgcattcccagaaaccaggaaatttctgaaactgagttttaaacctggcaactcttttaccatccctttgtatttttgcagttcctccctataccagcttcc

SEQ ID NO: 949401 - DNA, 675 bp, Homo sapiens
acacaattacatgtaaactgaataacctgctcctaaatgaattttgggaaagtaataaaattaaggcagaaagcaaggagttctttgagactaatgagaccaaagacaacataacagaatctctgggacacagctaaggcagtgttaatggggaaatttatagtagtaaatgtccacatcaaaaagttagaaagatttcaagttcacaacctaacattacaactaaaagaactgcagaaccaagaacaaaaaaatttcgaatctagcagaagacaagaaataaccaatattatagctgagctacaggagtttgagacacacaaaaaacatacaaaagatcaacgaatccaggagctggttctttgaaaaaattaataaaatagactgctaacttgactaatacagaagaaaagagagaagattaaaataaatccaatcagaatcaataagggggatatcaccactgacacaacagaaatataacaaccatcagagaatataatgaacacctctatgtgcgtaaactagaaaatccagaagaaatggataaattcctggacacatattgttccaagactgaaccaakaagcagttgaattcctgaacagaccactagtgagctctgaaattgaggcagtaataaacagccaatcaaacaaaaaaaaagcacagaac

SEQ ID NO: 949402 - DNA, 598 bp, Homo sapiens
gcctcaaagtctcaactaattctagcataactcaaaagtctgaagttcagagtctcattcaaatcaaatatggatgagattcggttaagatgtgaacctgtgagatmaaacaagttatatacttccaaaacacaatggtaggacaggcattgaatagacattcctatgccaaaaaggagcaataggaaagaagaagggaataacagatctcaagtccaaaacccaacaaagcaaacaatattaaatcttgaggcttcagaataaactttcgactccatatcctgccttttagacacactgaggcagggctcgggaccctaaagcccttggggtccccacacccacagcttttctgaacacagcccacacagtaactcacacaagttgaaattgggttcctgcacctctctcaggctggtgttgcacactggtggttcgacaattatgaggtcttgggtatgacactgacaaggttctcagaggcatccttagaaatctaggtagaggtaccaatgcttccatagttcttgatgtcttcatggctgcagagttagtagcacatggataccaccatgatttatggcctgtacctttcaga

SEQ ID NO: 949403 - DNA, 596 bp, Homo sapiens
ctctttcgggtcccctttccttgctggggcttttctgttgcttaataaatccaactctgccttacactctctaatgtccactttccttattcttcttggtsgttggacaggaaccaaatgcttgctggcagtgggagtaaaatagctgtaacactccctcccaattgccaaacagcaacagtgaaaaagctatacagattccgtggcttaagcaacagatgtttatttctcacagttcttagttctcacagttcttgaggctagcaagtccaagtttaaggtgccagtaggttagcttctctgtgaaaccactggcttccaagttatctctctggcttgcagataatcaccttctcactgtatcttctcatggtagaatgagatcaagttgaggtctctttctctttttaaaaaagacactagtttcatcatggagtctctatccacatgatccatctaaccctaattaccttccgaagacctcacctcttaacaccatcgaattaggagctagagcttcaacacatacatttgggaaaaaacacaaacattaatttcataacaataggtgttgtgagggaataagcagcttgcta

SEQ ID NO: 949404 - DNA, 584 bp, Homo sapiens
ctaaagtttatatggaaaggcaaaagactcagaataataaacacaatatggaagaaaaataacagaggactgacactacccaacttaagacartataaagctatagtaatcaagacagtgtggtactggtgaaagaattaacacatagatcaatggaaaagaatagaaagcccagaatagatacacacaaatacagtgaactgatttttgaccaagataaaaggcaattcaatgcagaaatgagagtgttttcaacaaatggtgctggaataactgcatacccacatgcgacaaaaagtgaatatagtggcagatattatacttttcgcaaaaagtgatgcaaaatggatcaagagttaaatgtaaaatgtaaaacgataaaacttctagaagataacatagcagaaaatctaggtgaccttgggtttgatgatgagtttttagatacagtaccaaaaggataattcaggaaaacaaaaattgataagttgggcttctttaaaatttaaaacttctgttttatgaaagacacagttaaaagaatagaaagacaagccacaggctacaagaaaaaaaatctttgc

SEQ ID NO: 949405 - DNA, 593 bp, Homo sapiens
ctgataaattgtagccattatatacaaagaaatcttcaaactcaacaacaagaaaacaagcaatccagtttacacatgtgtaagtgatctgaacagataccttatcaaagaagatatacagatggcaaaagatgcatatgaagagatgctggacattacatctcattaggaaatcacaaattaaaacaagatgttgttttacagtacaaacctattagaattactaaatccaaaacactggcaatactgaatgctggcgaagaggtggaacaacagaaactgtcattcattgatgttaagaatgcaaaatggcacagccacttgggaaatcaacttggtagtgtcttagcaaggctaaacacagtcttactgtacaatctagtgatcatacttctaggtgtttactcaaatgaaatgaaaacttaggtgcacacagaaatctgcgcttgaatgtttacagcagctttattcataattgtgaaaaaycagaggcaaccaagatatccctcaatagatgaatggataaactgtgatattacagtttacaatggaatattattcagtgacaaatgaactatcaagccacaaaaaaa

SEQ ID NO: 949406 - DNA, 713 bp, Homo sapiens
aatgaagcagaggtagataatgtaatccatccatggctcatgtaagtgcaaatattgtgatttgtgtttacagtgattgctgctgagtgggaggctcttctttggcttctgtggaaattttctagactgattgaattttgtcatatagttggtcacattgcatgaacaatgagttggcgcaaccttagagcagaaatacaagtaatttcctttaatgagaaagtacagtaatggttcagtctctttctagctcttcagggcatattactaggactgcaccaggaaacaaactgcacaatagttgaggtgttgtacttaggggaaagaaagaggtaacttgaagacctaaggcaatttgcagataaaagagcaggaagaggtctgtcttctagaccagaatagtaagtggcgggatgagtactcaaagttgatttcaaaatgtcagattcaaaacaccctcaagagttcactgcagttattcccaagatactgtattagttccagaggtcatccagccttgctttaaataagccacatgatgatgcttgtgtcatcagagtgcaaaggaaaggccacaggctttgagactaacaggactgggtttcamctgcagctccatcatctacaagctgagaatcttggggcaagttgctagttcatttgttcactcattcactcactcaacaaaaatgttttgagcacctgctgtgtgc

SEQ ID NO: 949407 - DNA, 659 bp, Homo sapiens
gtctgttggagtttgctggaggtccactccaggccctgtttgcctaggtatcaccggcagaggctgcagaacagcaaatattgctgcctgatccttcctctggaagcttcatcccggaggggcactcgcctgtttgaggtgtctgtcagcccctactgggaggtgtttcccagtcaggctacacaggggtcagggactcactttaggaggcagtctgtccgttctcggagcttgaatgccatgctgagagaaccactgctctcttcagagctgtcagacagggatgtttaagtctgcagaagctgtctgctgccttttaatctgctatgacctgcccccagaggtggaatctatagaggcaggcggccttgctgagctgcagtgggctctgcccagttcgtgcttcctggcctctttgtttacactgtgagctactcaagccccatcaatggcaggcaccccttcccccttcaagctgtagcatcacaggtcgatctcagactgctgtgctagcagtgagcgaagctccctgggtgtgggacccaccgagccaggcacgggagggtatctcctggtytgctggttgcaaagactgtgggaaatgctcagtatttggtcaggagtgtaccatttctccaggtacagtctgtcgcagcttc

SEQ ID NO: 949408 - DNA, 590 bp, Homo sapiens
tttcacatcactcctccccctatcccagcagcacagattgcacctccagaaaagactccttccttctgcttgaagagaggagaagaaagagtaaagaggatgttgttttgaaacttggatatcacctcgatcacagaaggatatagggcaatgagtagagtcctggagtccccgttccagaactcagctcctggagaacatttttagacataccctaggtcagaagggaacttaccgctttgaagggaagaatgcaattcaggcaggattcccacttgctgactaaagagacttgggtcttgaataaacatcagtggtacccagacagtactcgctgtgggctttcggggagactaaagactatgctgacttcaggtgtgacccagagcattcccagatttgacagtcatagagacaaactcaccttgaggaaaggagagggaagggtaaaggggactttgtcttacagcttgggcatcagcttggccactgtgcattagagcacaaygtgggctcttgggttccctgcatccaggccttcatgcctagaaaatatttctggaccttcccagggccagaggggattgctc

SEQ ID NO: 949409 - DNA, 612 bp, Homo sapiens
cctctgagcccaagccaagccatcgcatcccctgtgacttgcacgtataagcccagatggcctgaagtaactgaagaatcacaaaagaagtgaatatgccctgccccaccttaactgatgacattccaccacaaaagaagtgtaaatggccggtccttgccttaagtgatgacattaccttgtgaaagtccttttcctggctcatcctggctcaaaaacacccccactgagcaccttgcgacccccactcctgcccgccagagaacaaaccccctttgactgtaattttcctttacctgcccaaatcctataaaacggccccactcttatctccctttgctgactctcttttcggactcagcccgcctgcacccaggtgaaataaacagccatgttgctcacacaaagcctgtttggtggtctcttcatacggacgcgcatgaaagggaccactggcctttcgtgagtagaggtatgacatgaaccttcggaagcctttggagtcagtcctctgactgctgcattgcgaatacacaggagtgggggccacagtgraagtagagagccctagcatgagcccattgcaataacagagacaaaacgatggcagtg

SEQ ID NO: 949410 - DNA, 460 bp, Homo sapiens
ttcacagtggctgagtcaaccagcattttaaaaagaaagaaataaataaaataactacacttaatttttgtttattaagtgaggtagggatctggtttcatttttgcattccatatgagtacttaattacccccacactaattattgaaaagattggcatttcctccattgcgctttaatgtcacctttattttaaattacatgtcaacatatatatatgagtctgtttctcggttctttattctactctgatgactaatctattcttaaacctagtacgacactttcttatttactgcatattccaaaacacgtattactgtgttataaactaccccaaaactcagtggcttcaaacagccacattgtatctcattactcctggatcagaaattcgggtgggtcccagctagctgaattttttctaccatgtgaargcttataacaaaagtcactatgt

SEQ ID NO: 949411 - DNA, 580 bp, Homo sapiens
cgtattagtttcttttccctcaaaatttgggaatttgggggcagataattcaaaatcatatgctgcaagaaggattgagaagatgcattatcctatcagcaagctttagaattctcttgcaggcccayggtgaccagcaaactccctgagttttacacttgagcgtggaattttcagattgcaaacatcttgattataaacttgtttcttaatggaacacattaaatcaagaattatttattattgagataaatactttactatttgcatccttctggcaaaaactgtaaataaaaagattttaaatttctagatactagcaaagaaatggagtttcatttagaccagtttcttaatcatggatcatggcttggtcatgctcatttacttcatgattccttaaacgccctaaattctctcagaaggatttttctattcctttaaatagtgtatctctatgcctgcacagctaaataggatactttgcaagtacttagtaaagtgttattacttccaaacttggttaggagaaaatactggggtcaccagaaagtatcattttttgaaaagtaaattttgc

SEQ ID NO: 949412 - DNA, 641 bp, Homo sapiens
cagttttgcctcttcatgtggtttcctcaaacccaccccctgggaagtgcaatatgattctctcacasagcacatgggatgctaactggaatcacctctgccttgcacagttctccctcagttgctccaacagtgcctggtagtgtaaacaagactggcttaccagtgcagcattcaataccagtgcttacccagcagccattcaaccagtcctgctgatgccccaccatgtgccagccaccaaagcatctagtgccaagattacaactgtttccttctgctcctggttcttagagtttttttttaaaaaaaatatataaatgatctgcatttagtgatatatttatttttaatttttttatttccataggtttttgggggaacaagtggtattcggttacatgagcaagttcttcagtggtgatttgtgagattttggtgcacccaacacctgaacagtatacactgaacccaatttgagtcttttatccctcacccccaccaatgctttcccccgagtctccaaagtccattgtattattcttatgcctttgcatcctcatagcttagctcccacatatgactgagaacatacaatgtttggttttctattcctgagttacttcacttagaataatagt

SEQ ID NO: 949413 - DNA, 764 bp, Homo sapiens
tcagcaacgtgcaagccgcacacaacatctgatatcaccatggaactccaggagacctggggagccattcagggagctgggtgctctgggggacgtttgcgcaaaacataagcacatgtggccacgctcacaagcatgcacacagatccgaaccccgggaacgaacgtgcctcccggcaggctacaaaagcctacatctagaggcaggatccagggaggcttcccgcagccaggccgaacccctgcgtccccagcccgcagagacctgctaccctaagtcagtgcagggtgtgggggccccccaatcctgcgcaagcacacggggttcgtgctaggactcgacgcccgcagctttctgtcccctttcacctcccggagtcccggcaacgcagagcgtggcgcgcgccgccggaggacgtcggcccggcttgccaggcgccggccaatcccgcgcgtccatgcaaatgaggctccttatcgggccgcagctccgcctcccgcagccagggccgtagtaacccattcatggggcccgcgcgcggctgcagccgggctccgtggcgctcgcagccaccgcctcctctcggctccaggtcttccccttctttttacaactgatcctgttggggattttttttttttctaaattggaacggtggggaggagcagggaggggggacctggaggaaggggagagattaggcagccatcaatttcctccagtttctcccagaacaggkgatgcttctaaattgtgatcactt

SEQ ID NO: 949414 - DNA, 785 bp, Homo sapiens
taccttcgttctaattgcctcattctttgattctagagaactggactattccttttcatttcccctgacgggggattttgtccaggcatctggtgcttcacaaaattaactgtcctctctgaccctgaaataaagtatctctattctcgtatacagctatcccacgtgtgtggtagtgttgttgtacaatttactggaaatactttggtcagaatagtcaaaacagttataccaacagatttttctaggcatgtgagattaatttttaggcttcttttctgagaccaggctggttttaataatactttcttgcagcatctggagccaagagaaactcaatattttactcagcttagcaattgccaatcatttttatgtatcaaaaacataattgtatgttttatagaattggggaagcttccagttatgaacaaatttgtgaactaatatgagccatgtcctccaaccttggaacccaattgaagagatgtcacagaagcaagagggaagctaatgcaacatctgtcttgacacaaaacagcaggaacctctgtgagacacataaactagtggttgtgtccctgcaagaaagaagaacagcatcctgtaaaaagagaggaccaggacgaggtgccacaaatatggggctcagcttggggaagacattctagtggcacattagtctccttcacattgttctgttcctaacatgttataaaggataggcaggatagcagcagtgcccacagtgccatgcacagrgctgggtgatgtctctccagcac

SEQ ID NO: 949415 - DNA, 703 bp, Homo sapiens
aaaatgactgactttgaacgttacgatttttctcctccttacgtgtacggtcctgtgatagacagaccaggggactcctcggctcatagtccgtgaggccagaagctgacgtcccaaatttctatttagaatgagtttaagcacgccagccaaacgctctgtcgtgaaactgtctgtcgggaaaacaagcgggggaaggggaaagggggggtccgggcgcggtaggctctcgcctgtcatccccgcacttttgggaggccgagggccggtggatccctctgtccaagccttggcaacacggtgaaacctcttctctcaaaaaaaaaaaaaaaaaaaaaaaaaaaaaaaaaaattttcccaaactctctgggttcataacctgggctcaaagttaataaatagataaataggccggggggggggggtcacgcctgtcatcccagcacttttggaggccgacgtggacggatcacggggtcaggagatcaagaccatcctgggtaccacagtgaaaccccatctctactcaaaatacaaaaagttatccgggcacgggggcgggcgcctgtagtcccagctacttgggaggctgaggcaggagaatggcgtgaaccccggaggcggagcttgcagtgagccgagatcacrccgctgtactctaccctgtgcaccacagcgagagtctgtctctaaaataatatat

SEQ ID NO: 949416 - DNA, 703 bp, Homo sapiens
aaaatgactgactttgaacgttacgatttttctcctccttacgtgtacggtcctgtgatagacagaccaggggactcctcggctcatagtccgtgaggccagaagctgacgtcccaaatttctatttagaatgagtttaagcacgccagccaaacgctctgtcgtgaaactgtctgtcgggaaaacaagcgggggaaggggaaagggggggtccgggcgcggtaggctctcgcctgtcatccccgcacttttgggaggccgagggccggtggatccctctgtccaagccttggcaacacggtgaaacctcttctctcaaaaaaaaaaaaaaaaaaaaaaaaaaaaaaaaaaattttcccaaactctctgggttcataacctgggctcaaagttaataaatagataaataggccggggggggggggtcacgcctgtcatcccagcacttttggaggccgacgtggacggatcacggggtcaggagatcaagaccatcctgggtaccacagtgaaaccccatctctactcaaaatacaaaaagttatccgggcacgggggcgggcgcctgtagtcccagctacttgggaggctgaggcaggagaatggcgtgaaccccggaggcggagcttgcagtgagccgagatcacaccgctgtactctaccctgtgcaccasagcgagagtctgtctctaaaataatatat

SEQ ID NO: 949417 - DNA, 667 bp, Homo sapiens
  misc_feature 577: n = A,T,C or G
tcttgctgcccaggctacagtgcaatggcctaggggactcaaggagtcaacctatggcagagaggacacgtcattctgagcgtaagggccgcagcgaaaggtggcagggcccgcgcttttaaaggctgaaatcccggcggctcaggcctgtcgtttccagcactttgggaggcccaggaaggcggatcatttgaggtcaggagttcgagaccagcgtggccaacgtggagaaaccccgtctctactgaaaataggaatatgagccggccgtcatggtgtgcgcctgtaatcccagctaccgaagaagaatcactggaacccgggaagcagaggtttcagtgagccgagagagcgccaccgcaccgcagcctgggtgacagagcgagagagactcagtccaaaaaaaaaaagaaagaaaagaagaagaagaagaaaaaagaacgggcccaaatactgcattgtcgctcaacgttctcccaaaaggccagaaaccccctgactcaggtcaaggaggtggtgtttcgttttctctctccctctctctctccctcctctctctctctctctctctcccccncccccctccccatctctctctctctctctctcctcttttctcccccckaacttttatttgtcgttcaagcatacatgagcaagattgtga

SEQ ID NO: 949418 - DNA, 646 bp, Homo sapiens
tgatggttcagtgtgcacaaattttgtttcgtgtgcaaacttattaaaatgattgtataaaattacctttaggctttgtatataaggtatatgtgaaccataaatgaattttatttggatcccatcccaaaatatctcatatgtatgcaaatattccaaaatccaaaagaactcaaacacttctagtcctaaacatttcacataagtgatactcaacctgtcatataaacaactttatgccaataaattcaataacttagatgaaatagaaaattttcttgaaagacaaaaactaccaaaagtagctaaggaaaaaatagataatgtgaatatctgatcagattatatctatgaagttgaattcatagttttaaaaaaccttcccccaaagaaaacttaggtcctagaaggcttaggtcccagatggcgttactgtcgaattccaccaaacattgaaggaacatataataaaaattcttgcaaaaaaatgaaggaagaaggaatactttcagactcattttgaggccaccattactytgataccaaaatcaaagattataagaaaagaacactacataccaatatctctcatgaaaatagacacaaaaatcctcaactaaatattagtaagttgaatccagcattg

SEQ ID NO: 949419 - DNA, 558 bp, Homo sapiens
gaaaaaatgatcaatccttctttcatggtttgaaacttctgcagtttctacccacttttgcacaatcttcaggtccttcgaaaagttgttcttggtgtyaccttttgagtgtgtaattgaagttggcaatagggtaaatctgccatcatcaagctactctgccattataagaaactagaattttgtttttatcccagttgtaatgtctttgtgttttctctttttgttggtgtgtgcaatgtctgtctttgcagtgaaccactaatcacatgataggtgtgccataaaacaaagctttcaaggtagtctgcatttgtcacaagctccctcccactgactttgactgccactgcatattttatgacctcaccttgatttcaggagtaatacaaatatatggcttatgttgtgtgaattttgattattgtatgtgagcattacactgcaaaaaatcattagtcagaatgcgaacacatacaacacacatgagatgagaatataataatcttttataatcactaaaataaacacattatatggtagctccaaatgttatgg

SEQ ID NO: 949420 - DNA, 558 bp, Homo sapiens
gaaaaaatgatcaatccttctttcatggtttgaaacttctgcagtttctacccacttttgcacaatcttcaggtccttcgaaaagttgttcttggtgtcaccttttgagtktgtaattgaagttggcaatagggtaaatctgccatcatcaagctactctgccattataagaaactagaattttgtttttatcccagttgtaatgtctttgtgttttctctttttgttggtgtgtgcaatgtctgtctttgcagtgaaccactaatcacatgataggtgtgccataaaacaaagctttcaaggtagtctgcatttgtcacaagctccctcccactgactttgactgccactgcatattttatgacctcaccttgatttcaggagtaatacaaatatatggcttatgttgtgtgaattttgattattgtatgtgagcattacactgcaaaaaatcattagtcagaatgcgaacacatacaacacacatgagatgagaatataataatcttttataatcactaaaataaacacattatatggtagctccaaatgttatgg

SEQ ID NO: 949421 - DNA, 547 bp, Homo sapiens
atctttgctgtgtgggtgacttagcggttccagcctttgggctttggaaagtccacgccaaccacgggcataagtggcaccccagcacagacctacaaagacatgggcagactactttttaaagtagtttccagatcccgttactcatcaccacgcacagcctcctaactggggtctccagcactgaggccttcatttgcccctataaaatctgtccacgtagttgccaagttgctactggctcaatatctctgtcaggtcctctctgtcactgcttctgctgtggaaccgtccttggtaccctctggctaacaaaggagcacagacccttagtaccttatccacatctccaacaagctgaagttgactcaagaaaaggaggccactggatcgtccataattcccacactctgccactgttcatcaccagacagggaacacctggcttgggcccacagcacasaccctctatcttgggctgattgcactgagtaattgctggcctccatctctctgggatggcacccccacgagacaagaaaagtgg

SEQ ID NO: 949422 - DNA, 547 bp, Homo sapiens
atctttgctgtgtgggtgacttagcggttccagcctttgggctttggaaagtccacgccaaccacgggcataagtggcaccccagcacagacctacaaagacatgggcagactactttttaaagtagtttccagatcccgttactcatcaccacgcacagcctcctaactggggtctccagcactgaggccttcatttgcccctataaaatctgtccacgtagttgccaagttgctactggctcaatatctctgtcaggtcctctctgtcactgcttctgctgtggaaccgtccttggtaccctctggctaacaaaggagcacagacccttagtaccttatccacatctccaacaagctgaagttgactcaagaaaaggaggccactggatcgtccataattcccacactctgccactgttcatcaccagacagggaacacctggcttgggcccacagcacacaccctckatcttgggctgattgcactgagtaattgctggcctccatctctctgggatggcacccccacgagacaagaaaagtgg

SEQ ID NO: 949423 - DNA, 765 bp, Homo sapiens
acagctgagatcagctcaccaggagaacaaaccatcatagctacaaatgggaaggagcatttgaaaagcaacttggatgaattgctggagatggacagtagacttkagtaagagtgagaaactctttcaacttgcggtcttaggagagctgcacatttttgtgtgctttacttctaggaacgtcaccacgttctcacagtgaagaattaagaaaaaaaaccctcatgtttctggcaggggaaagggaaaagtaagcgtttaaaaaataaactcagaattctcaattacaaagaacttactcagcaaataactttactagagccctatcaaatgctggagaagggcaattacccagctccttctcctctagccttagtgtctcacctaaggagttgggaagctgaggaaaacttgtgaaggtcacagacctgggacagaagcccactgataactgaagtttggtcacagaattctaggatactttacattcccccaaaccttaccactaaatcactggcctcttgttactataaccagagtgtaataataatataatatattacatttgaaagagctgcaaggctcagcctctctttgaaaagtagtttttagggaaacccaaagacagcagaagagaaaaagacaaggacattagaggaaatggaagctgctgacacccatagctatggcaaacattaaacataatccaactccttgccaggttaacataaaaccacacacacactaaaggtcaatttacctcag

SEQ ID NO: 949424 - DNA, 621 bp, Homo sapiens
gctgaagaactggtttggggttgggagaaactcctgtacattttggtgcctagaggtgaaatattctgtgttgagtattgagtgagtgtgtaaaaataggaaaaaacagtttggttcttcctatcttttccataaaccacccccacacacagcttctgtgaagcttatgcactgttcaatctctctgttgctcctttttgtaggagacacttaaaggtctccaagcgactctgctccgtttccctctctctccctctaagaccactcttgtactaacacttgatgatttcagtattcatgcagatgacacctcgagggtctttatctctcagtttcttgatcttctcatctccaattattttgtccaccctacctctgctctccccgaccttattctatggcattgccacttattgccctccttcacaatctgtgtttcacatatcctattttccaaacatcatcttttatctccccagcttactccccctgtactggaataccaatgattcttagcccacactaggatgtttatcactgccatcattgcrctgtccacttgtaccctaagctttcttattaggctctgtggtccattgttatcatcagtcctttgaagac

SEQ ID NO: 949425 - DNA, 562 bp, Homo sapiens
ttgcagtggctgaagaaggatctagagaaggcagagcagtcgcaggcctgaccactccctcacacctatgagtgagctggcagatacatgtgaacatgtgtgagctatgaaacacctgctggctgggcatggaggctcacatgtgtaatctcagcacttcatgaggccgtggtaggaggatcacttgaggtcaggagtttgagaatagcctggcaacatggcaagacctcgtctctacaaaacagaaaattagccaggtgtgggggtgcacgcttatagagccagctacctgggaggttgaggcagcaggattgcttgagccaaggagattgaggctgtagtgaactgtgatggcacctctgtactccagcctgggtgatggagtgagaccctctctcaaaaacaaaccaacccccaccccaccacaaaacacctgctgcttccctatgctcacaaaatttccacaagaatctctcttgtggtccaccttaaccagaaacrtacaggaaaggaaattctaggaactgtagttcagcctaaccaagctgatatattacaaagc

SEQ ID NO: 949426 - DNA, 612 bp, Homo sapiens
gtgtttaatatagccttatggtggaggcctctcagacacctgccgccattaggttacacgtggccctggggctggaaggctggattcaggccttgtggtcgggggcagctctcctgcgggcagttttttgttttgttttgtttttgaggtggagtctcactgtgtcacccaggctggagtgcagtggcgcgatctcggctcactgcgacttccacctcccggattcaagcgattctcctacctcagcctcccaagtagctgggactacaggcgcgagccaccatgcccggctgatttctgtatttttagtacagatggggtttcaccttgttggccaggctggtctcgaactcctgacctctgatgatccgcccacctccgcctcccaaggtgttaagatgacaggcgtgagccaccgcgccggccccggttgcagttttgtggagggaggaggtgcaactaggtggaaggacagagagaaagttgcaatgccgtgtgctagtctagggraaggggagggagacgactagaaccccgcccccaacactcaggaccggggacccgagcccgccagagaccctccacaagtgagggtcccccggggtggcccct

SEQ ID NO: 949427 - DNA, 811 bp, Homo sapiens
ttctgaaatgggaggattttccagcagcttgtccttgtatatcttagtgtagggtgacatactgctggcttggttttgtagatctgcagttcatgttttgtttttcagagaaacactcatctttatggctcaccatttaatttccctgctgtcaagaggcagaattaagttattcctctttttaaaagaatgatataagtagggaataatgaatgcaaaatgctgtagttaaacatcagcagataggctgatggataggctgtcacttagatgatgctataaatggaaagaaagtgatatttaatcatttgcaaaaaataaaaacagtgatgatggatttggtgtactttgagtgactcactacggcaaattgttatgttccagttaataaagaaaataaaaagggcaaagcagagaaagtctttgctttccagagcaggccaggtctcctgtgctgtttaaacacataaatagttgctgattcactgttatgggccaaattgtgtcttcctaaaattcctaagctgaagtcctaacaccaagtacctcggcatgggactatatttgcaaacagggcctataatcaggtaattgaggtaaaactagtataggattagtctacttataagaagaggagagtagggtgcagactcacacagacagagggacagtcaggcaatgacatagggagaagacagcatctgcaagctgcagaacaatcaatcccgctgacacctcaattttggaactgtagcctcaaaaactggaaaaaacaactttccgttgtatmagccagttggtctgtggaact

SEQ ID NO: 949428 - DNA, 680 bp, Homo sapiens
gattgtccctcacataggattccagaacactgctgctgggttttcagagtttgtccctaccatagcattccagaacactgcgacgagggtctaaatatttgtcattcacatagrattccagaacactgctactgggttctgagtgtttgtccctcacaaaggattcctgaacaatgctgctgtggtctgaatgtttgtctctcatataggattccagaacactactgctgtggtctcaacgtttgaccctcagatatgattccagaatactcctgctgtgatcagggtgtttgtgtctcacatgggattccagaacaatccttctgtggtctgaatgtttctccctcacataggattccaaaacattcctgctgcagtctgagtgtttgtccctcaaacaggattgtagaacactgctactggggtctgaatgtttgtccctcacataggattccaaaaccctgacaggagggtctgaattattctccctctgataggattccagggcactcctgttgtggtctgaatgtttgtccctcacttaggattccagaacactgctgttaggttctgagtgtttgtccctcatgtgcgattccagaacaatgttacgtgggtctaaatatttgtccctcacataggattccagaacactgctaggagggtctgaatgtttctct

SEQ ID NO: 949429 - DNA, 680 bp, Homo sapiens
gattgtccctcacataggattccagaacactgctgctgggttttcagagtttgtccctaccatagcattccagaacactgcgacgagggtctaaatatttgtcattcacatagaattccagaacactgctrctgggttctgagtgtttgtccctcacaaaggattcctgaacaatgctgctgtggtctgaatgtttgtctctcatataggattccagaacactactgctgtggtctcaacgtttgaccctcagatatgattccagaatactcctgctgtgatcagggtgtttgtgtctcacatgggattccagaacaatccttctgtggtctgaatgtttctccctcacataggattccaaaacattcctgctgcagtctgagtgtttgtccctcaaacaggattgtagaacactgctactggggtctgaatgtttgtccctcacataggattccaaaaccctgacaggagggtctgaattattctccctctgataggattccagggcactcctgttgtggtctgaatgtttgtccctcacttaggattccagaacactgctgttaggttctgagtgtttgtccctcatgtgcgattccagaacaatgttacgtgggtctaaatatttgtccctcacataggattccagaacactgctaggagggtctgaatgtttctct

SEQ ID NO: 949430 - DNA, 759 bp, Homo sapiens
tttatcacctagaaaatgtgattcccccatttctgcctgagccctgctcacaagaaaaactgtagcatatttctgggcccagcaaacaggtaatgtgtttctcctgcctgtgtcttgctcacagggaaaattgtgacatatcgctggacccagaacccaggtgaggtgactctgctgcacgtgtcatgctttcaggagggaacaagaacatatccctggcagaatacctagggatgtgactttcttgccttgtccctgtcctcaggggagaatgtgacatatccctgacaatgatccaggtgatgagaccctcctgcttgctgactactcaaatgtgagattgtcacatatattttggcctagcatgtaggtgtgatgatgacattcataccttaaaccaaccaataggagagatactttgtctcatatccaggctttacaaaatgtgcaaaattatgggtcttctcttactatgaaggtcagagaaaataagcactcttgcatatcctgtaaagcactcagatggtacagtgtcatcacagggcccagaacacaggtgagattgtgttctctgtgtgcacacccaccaatcatcagaattgtcattcctacacaggaacagaggtgattagggaggtctaaayctcatacctgaatgccgtccacagcgggaattgtaactatcacatgtgaacatccagtcacagtggggatagtgacttatttctgaacccagtttacagccaagtaaagatcctc

SEQ ID NO: 949431 - DNA, 759 bp, Homo sapiens
tttatcacctagaaaatgtgattcccccatttctgcctgagccctgctcacaagaaaaactgtagcatatttctgggcccagcaaacaggtaatgtgtttctcctgcctgtgtcttgctcacagggaaaattgtgacatatcgctggacccagaacccaggtgaggtgactctgctgcacgtgtcatgctttcaggagggaacaagaacatatccctggcagaatacctagggatgtgactttcttgccttgtccctgtcctcaggggagaatgtgacatatccctgacaatgatccaggtgatgagaccctcctgcttgctgactactcaaatgtgagattgtcacatatattttggcctagcatgtaggtgtgatgatgacattcataccttaaaccaaccaataggagagatactttgtctcatatccaggctttacaaaatgtgcaaaattatgggtcttctcttactatgaaggtcagagaaaataagcactcttgcatatcctgtaaagcactcagatggtacagtgtcatcacagggcccagaacacaggtgagattgtgttctctgtgtgcacacccaccaatcatcagaattgtcattcctacacaggaacagaggtgattagggaggtctaaacctcatacctgartgccgtccacagcgggaattgtaactatcacatgtgaacatccagtcacagtggggatagtgacttatttctgaacccagtttacagccaagtaaagatcctc

SEQ ID NO: 949432 - DNA, 240 bp, Homo sapiens
ctggcctctggtgctgtggaaaccggagcagctgggggcggccagagagaggctgakcaggagggtgtggaggtccccggggccctggggaggagggacacaggccatgggcattggtgcgtgggagggagcagcagaggccagcctgctgagaagggctgtgagggaagggaggtcctgtggctggaggggaaacacagtcttcttgttcaggattgaagagacccggttctgttgttg

SEQ ID NO: 949433 - DNA, 244 bp, Homo sapiens
ccctggcctctggtgctgtggaaaccggagcagctgggggcggccagagagaggctgatcaggagggtgtggaggtccccggggccctggggaggagggacacaggccatgggcattggtgcgtgggagggagcagcagaggccagcctgctgagaagggctgtgagggaagggaggtcctgtggctggaggggaarcacagtcttcttgttcaggattgaagagacccggttctgttgttggg

SEQ ID NO: 949434 - DNA, 244 bp, Homo sapiens
ccctggcctctggtgctgtggaaaccggagcagctgggggcggccagagagaggctgatcaggagggtgtggaggtccccggggccctggggaggagggacacaggccatgggcattggtgcgtgggagggagcagcagaggccagcctgctgagaagggctgtgagggaagggaggtcctgtggctggaggggaaacasagtcttcttgttcaggattgaagagacccggttctgttgttggg

SEQ ID NO: 949435 - DNA, 735 bp, Homo sapiens
tatgctgtcttggaaaaattgcaagaaaagttgcaaaaatagcatagatttcctctgtgcccttcacccagcttcctccgtatgcaacgtagaacaaggactgaaaccaggaactttgtaggttgatactaagcgttggtacttagtgtcttagttttagtctattttgtgttgctataatggaatacctgagactgggtaatttataaagaaaagaagcttatttagctcatggttctgcaggctgggaagttcaagagcatggccctggcttctggtgaggcctttttgtgctgtgtcataacgtggtggagagggtcaaagggaaagcccatgtgtgcaaagaagggaaacccagggagtgtcctgcttttataacaacccaggctcgggaactaatcaagcctctccagagcaagaattcccttgctaccttgagaacagtatcaagccactcacgagggatcggcctccatgattcagatacctcaccccaggccccaccttccaacactgccacactggggaccaaatgtcaagatgagttttggtgggaacaaaccagtcacattctaaccgtagcactccagactgcactgaattttgtcagtcttccgactcatgtcggttgtstggttcaggctccccctcaggatcccacgtggcatttagttgttgtgtctctcccgtttcctcccatctgaggtttcatgacctggatgtttttgaagagga

SEQ ID NO: 949436 - DNA, 680 bp, Homo sapiens
accagggcataacaagttttctgacagggcatctgtgcagatgcagtctgaccaagggatgggtcgctccctgcttcatccttgctgatgtacaagttaagcattccactaaaaggcttatcaagagtgggagacttggccggatgcggtggctcacgcctgtaatcctggcactttgggaggccgaggagggcggatcacctgaggtcgggagttcgagaccagcctgaccaacatggagaaaccccatctctactaaaaatacaaaattagccgggcgtggtggcgcatgcctgtaatcccaggtactcaggaggctaaggtaggagaatcgcttgaaccctggaggcggaggttgcagtgagcagagatcgtgccagcctgggcaacaagagtaaaactctgtctcaaaaaaaaagtgggggggcggtgaggagacttggctaggtgcgatggctcacaatcttagagcactttgggaggccaaggcaggtagatcacttgagcccaggagtttgagacccacctgggcaacacagtgaaacagtgaaaccccgtcmctagaaaaaaaaaaaaaaaaaaaaaaacagtgggactcttaggaaactgccacaaggagtctctttaagatttcacctaagcacggttccaagcagggagctataaatgcacatgtgagt

SEQ ID NO: 949437 - DNA, 618 bp, Homo sapiens
tccctgcttcatccttgctgatgtacaagttaagcattccactaaaaggcttatcaagagtgggagacttggccggatgcggtggctcacgcctgtaatcctggcactttgggaggccgaggagggcggatcacctgaggtcgggagttcgagaccagcctgaccaacatggagaaaccccatctctactaaaaatacaaaattagccgggcgtggtggcgcatgcctgtaatcccaggtactcaggaggctaaggtaggagaatcgcttgaaccctggaggcggaggttgcagtgagcagagatcgtgccagcctgggcaacaagagtaaaactctgtctcaaaaaaaaagtgggggggcggtgaggagacttggctaggtgcgatggctcacaatcttagagcactttgggaggccaaggcaggtagatcacttgagcccaggagtttgagacccacctgggcaacacagtgaaacagtgaaaccccgtcactagaaaaaaaaaaaaaaaaaaaaaamcagtgggactcttaggaaactgccacaaggagtctctttaagatttcacctaagcacggttccaagcagggagctataaatgcacatgtgagtaactc

SEQ ID NO: 949438 - DNA, 643 bp, Homo sapiens
ataatactttgccttattaataaaataatgctcagggagaggtgttacttctctgaaaaggaactaaactttagttgtttttacaaggatagaagggaaagctaactgttacatgtataactctgagaatttatatagggcatagatatttctagttacaaagaaggttttagactaaggaactctcctaagaaatagaacagagaggatggaaaaagcagggcccatatcttcctcatgattttgtccctgatatggtttggctgtccccacccaaatcttatcttgaattgcagctcccataatcccatgtgttgtgggagggacctggagggagataactgaatcataggggcggtttcccccatactgttcgtgtggtagggaataagtcttacgagatctgatgattttataaagggtttcacctttctcttggcccccattctctcttgtctgccaccatgtaagacatgcatttcaccttccaccatgattgtgaggcctccccagccatgtggwactgtgagtccattaaacctctttttctttataaattacctagtcttgggtatgtctttatcagcagcatgaaaatggactaatacagttcttatggcccagaccagagtcttgcagagct

SEQ ID NO: 949439 - DNA, 455 bp, Homo sapiens
gcatcttgctgtgatgagtgtgaccctaatggataaggacgtttttgcaccctctagccctccaaatcctaaccaggactccaacttgtgttcaaatgcagaaccagcgcttggttccaagaaaaagaaatyagacttttcagatttgttgaaggttggtcagtttaagggatctttccagagtggtttaaccatgttttcccccttactggctaacttcagagcttaataccctataatgggagggtagcttgaagtgacacctctagatgttgagcaggaatgtggcatatagactctatggtgagaccacaagccgagatcattgaaaggccatgcctctagctttggtcaggggaggtgagagtctggaagtggcgtgtcacattggcacaactgaggaatggtaacaagagagggaggagactccacagagtcagatggctgactgggag

SEQ ID NO: 949440 - DNA, 468 bp, Homo sapiens
ccaagatggccaaataggaacagctccagtctacagctcccagcttgagcgacgcagaaaacgggtgayttctgcatttccaactgaggtactgggttcatctcactggggattgtcagacagtgggtgcaggacagtgggtgcagcgcaccgagcatgagccaaagcagggcgaggcatcgcctcacccaggaagcacaaggggtcagggaattccctttcctagccaaggaaaggggtgacagacagcacctggaaaattgggtcactcccaccctaatactgcgcttttccgatggtcttagcaaacagcacaccaggagactatatcccgcgcctggctcagcgggtcctatgcccatggagcctcgctcattgctagcacagcagtctgagatcaaactgcaaggtggcagcgaggctgggggaggggtgcccgccattgcggaggcttgagcaggtaaaaaa

SEQ ID NO: 949441 - DNA, 617 bp, Homo sapiens
taactctttgaactttaaaaaataagttaattaatgcatgtcagtgtcacctatatagaaaaactgatgattgagtratagggtaacttttttttctttttgagatggagtcttgctctgtcgcccaggctggagtgcagtggcgccatctgggctcactgcaagctccgcctcctgggttcacaccattctcctgcctcagcctcctgagtagctgggactacaggcgcctgccaccacgcccagctaattttttgtatttttagtagagaaggggtttcactgtgttagccaggatggtctcgatctcctgaccttgtgatccgcccacttcggcctcccaaagtgttgggattacaggcgtgagccaccgtgcctggctgtgatagggtaattttgtactagaatgttacccactcattacattgcacaaaataggtccttaaagtaataattttatcaccaactataagaaaatagcttttctaagtagtgccagaaagagctttagataagcattgtctgactgctttcagacttgcgaagcaaagtaaaggttcctgagagcccactagaacgatgtggtagactcaactcgaatttctttaactgtatta

SEQ ID NO: 949442 - DNA, 609 bp, Homo sapiens
catttacaaatttctaaaatttgtaagatgagagcagtgtgttatgtgccactaygtgggagaggagtaaacttagtttactccatgattaaaacaaaattccatatatacaccatggaatactatgcagccataaaaaatgaaagagttcatgtcctttgtagggacatggatgaaactggaaaccatcattctcagcaaactatcgcaaggacaaaaaaccaaaaaccacatgttctcactcataggtgggaactgaacaatgagaacacatggacacaggaaagagaacattacactctgggaactgttgtggggtggggggaggggggatggatagcattaggagatatacctaatgctaaatgacgagttaatgggtgcagcacaccaacatggcacatgtatacatatgtaacaaacctgcacattgtgcacatgtaacttaaaacttaaagtataataatgataaaataaaaaaataaataaatgaaatttccgtcctaaaaaaggatgaggttacaactgtcagaagataattttttcttaatgtgagtctaatatgaactctgaaaagtatctgtaggctgactggcatccttgaaaagc

SEQ ID NO: 949443 - DNA, 645 bp, Homo sapiens
aatgaacttaaacaaatttacaagaataaaataaacaatcccatcaaaatgtgggcaaaggatatgaacagacatttctcaaaagawgatgtatatgcgaccaacaaacaaataaaaaatgctcattaacactggtcatcagagaaatgcaaatcaaaaccacaatgagatatcatctcacgccagttagaatggcaatcattaaaagtcaggaaacaacagatgctggagaggatgtggagaaataaatggttttacactgtaggtggtagtgtaaactagttcaaccattgtggaagacagtgtggcgattcctcaaggatctagaaccagaaataccatttgacccagcaatcccactactgggtatatacccaaaggattataaatcattctactataaagaaacatgtacacgtatatttattgtagcactattcacaatagcaaagacttggaaccaaccacattaatgatagactggataaagaaaatgtggcacatatacaccatggaatactatgcagccataaaaaaagaatgagttcatgttttttgcagggacatggatgaagctggaaaccatcattctcagcaaactaacacaggaacagaaaacaaaacaccacatgttctctctcataa

SEQ ID NO: 949444 - DNA, 607 bp, Homo sapiens
gtggatagcactgtgtttaasaattatcaaatgtgcctgtttcaggctgtaaactccttagatctgatgtgtgacctaggcatctacattttttatatcaagcccaataggtggctttgatgctaatgaaaggaccatgattaggagcagagacttgagatttatacattcctgaactcaatctagtctttgacatttactagcatgttgcctagatttagttatttaaacattttaagctgattttagtggggataaatgaaagatctacttagcatatagtaaataatcagcaaatcactcaattataatctagtgggaatattttcacataaacaattatgtgatgacctccccagagttgactataatgccaagataaaagaaaaaataatcttccaacttgcaattatctacattataaataaatgcaaatgtaacaactttttcatccccttgtcattataaatccatactgaatggaggagtttgtatcaaaaatgtgcttctaaaattattttttaaactccttcataattttatatacttatgttgttttcattattttcttataaacacagagagagagagagagaaaagagaggaa

SEQ ID NO: 949445 - DNA, 697 bp, Homo sapiens
cttggagaagggggagcattccacaggcaggggtgcccagggcaggcagtgccacctcagccacctcctcctataatcaccacctcacaaggtcgtctctgcctgcagtggtatagagtgtgtggtacacaacaatgctgcatttcaaagaagtgcactcactttataggcatcataggtttgaatatttattattaaaattgttctggcaggaggaaacaaagtatattaaagaagggatttttctaatacacacaaaagtgctatggggctatagcaggcttgttggaccttgatgatcaatctcaggcagcccacttcatagccaccatacctgtcctcacctactaagctcacatactctattcagtaattcttcagtctcaccaagaccccagattaactgacctttcagtcaccatcctcacgactttacttcccttcttacccagctttgattccttagtctaccattataatccctccttggcaattattctcaactccttcactctttctccctttgatgtacttgctcaaaaagccccaaccctggttaaagccaactctgcctactccatgcgtgcaatggagctgctcagattccatgrcctgtcattcacctcactccctggcagagctctcagcttcttcacctctccattttacctgcttcacaaaggcccaaccccgcttc

SEQ ID NO: 949446 - DNA, 559 bp, Homo sapiens
tgtattttcatccctttaacaagccctttcaaaaatcagaagttttaaatttcaataaagttaaatttaaccatttttctctttggattatacttttggcatcatatcactaaattkttgcccaatacaaggtcacaattatttttttctagatgttttacagttttagattttgcatttgatcaataatacattttagttcatttttgtatttgttgcaaagtagaaaaatttatttggtgggaaggagttggatacccagctcctccagtcccttttttttttttttttttttttttaaagacagggtctggctttgttacccagcctggagtgcaggggcacaatcttggctcactgcaacctccgcctcttgggctcaggtgatcctcccacctcagcctctgaatagctgggacaacagctatgtaccaccacacctggctcattttttattatttttttgtagagatggggtttcactatgttggccaggccggtctcaaactcctggacttaagtgatctgcccaccttgccctccaaaagggctgggatta

SEQ ID NO: 949447 - DNA, 579 bp, Homo sapiens
taatgctttatcttttccccactacactttaatcaatgagtcctatcctgaccatattatttcaaattgaatctacactcccctttatccactcctatcycctttattctcctttttatagcacttattaattttagcattatttataagtgaattatttttcatgtttattgttcatagtctatattccacaccaccactaaatggaaggtactccagtactgtatttctgtctattatgtctactgatacattgtaaggtcctagaatggtacctggcacatagaaggcacttaataaatacctgttcataaactgaatacaggcatattttgaagatattgagggttcagttccagactactgcaataaagtagatattgcaataaagtgattcacacaaattttttttatttcccagtgcctataaaggttatgtttacactatattgtagtctattaagtgcaattgcattataactttaaaaataatatataccttaattaaaaatacattaaaaatgataacaatcatctgaaccttcagcaagtcatgttctttttgctggtcgagggttt

SEQ ID NO: 949448 - DNA, 579 bp, Homo sapiens
taatgctttatcttttccccactacactttaatcaatgagtcctatcctgaccatattatttcaaattgaatctacactcccctttatccactcctatcccctttattctcctttttatarcacttattaattttagcattatttataagtgaattatttttcatgtttattgttcatagtctatattccacaccaccactaaatggaaggtactccagtactgtatttctgtctattatgtctactgatacattgtaaggtcctagaatggtacctggcacatagaaggcacttaataaatacctgttcataaactgaatacaggcatattttgaagatattgagggttcagttccagactactgcaataaagtagatattgcaataaagtgattcacacaaattttttttatttcccagtgcctataaaggttatgtttacactatattgtagtctattaagtgcaattgcattataactttaaaaataatatataccttaattaaaaatacattaaaaatgataacaatcatctgaaccttcagcaagtcatgttctttttgctggtcgagggttt

SEQ ID NO: 949449 - DNA, 579 bp, Homo sapiens
taatgctttatcttttccccactacactttaatcaatgagtcctatcctgaccatattatttcaaattgaatctacactcccctttatccactcctatcccctttattctcctttttatagcacttattaattttagcattatttataagtgaattatttttcatgtttattgttcatagtctatattccacaccaccactaaatggaaggtactccagtactgtatttctgtctattatgtctactgatacattgtaaggtcctagaatggtacctggcacatagaaggcacttaataaatacctgttcataaactgaatacaggcatattttgaagatattgagggttcagttccagactactgcaataaagtagatattgcaataaagtgattcacacaaattttttttatttcccagtgcctataaaggttatgtttacactatattgtagtctattaagtgcaattgcattataactttaaaaataatatataccttaattwaaaatacattaaaaatgataacaatcatctgaaccttcagcaagtcatgttctttttgctggtcgagggttt

SEQ ID NO: 949450 - DNA, 605 bp, Homo sapiens
aattacaggcatgcaccaccatgcccagctattttttgtacttttagtacagactgkttttgccatgtgggccaggctggtctcgaactcctgacctcaggtgagcgggccgcctcagcctccgaaagtgctgggattccaggtgtgagccaccattcccggccctgatttctgtttgcaatgttgtgcaaccactcctccacagcagtgaaacaggtgacattacaaccccactttcaggaagtggaaactgaggctcagagagactgagtgctgtatcccaggtggctgggctagtgaggagcagagctggggtgtttgggtttgtgctcaggggagtgtcctctagggcccttctgggctgctgagggagcagagctggctgcacaggcgagcccagcgtgcctagacgggcctgcacctgctgcaatgccctgcgatcaccatcttgaaattcttactagggtttgaacaagggatcttgcattttcattttgcactagcccagcaaatgatgtaagaacaggggaaggaactgagagacagccacctggggaccagggccctcatcctggttctctgtgtggccttaatcagctgtctac

SEQ ID NO: 949451 - DNA, 587 bp, Homo sapiens
ggtgcacaggcagagaactggctgtggctgggaacatgaatggtttgtctgcattcatggaagagacaggagagtcagtggtcataaatgctgggatgggggcttctgggagtgtggggcgtgtatgaggacaaagtacccagacaaggagaaaagtcccagttctgagggatgaagcgggacccaggctgagccacagcagtagcaagggacaaaggaggtccaacaagggctaatgatgaaagaggagacagaaaagctggagagtttttattttacacttttttgcattttttggtgctgatcatgaattttttgtgtttttcaatgctgatcatgaatttttttttaataacaaaaaagaactataaaataagctctgattttaaaagttgtggcagacggtctctagaatggcacccagtagtcctgtctcctgacactcgtgcccttgtgcaatcccgtgctccttgagtgtgggtraggcctgtgacttccaaggaaatgtgatgagacatcccttccaagaccgggttctgaaaaggctgtgctgtctgccttgctggcggtcttggagcccttgccct

SEQ ID NO: 949452 - DNA, 597 bp, Homo sapiens
agctagggaagacaaagctcatgggggttttcttttaaatgtcctattgaaggataacacacaaagacaaagcacacaatcacactgccaccgttcaatggatcgtggcaaagtgaagacgtgcagagcaaacttccaggtcagacacaggacactgcgggatttgcatgcctttcccaggaaactatctccccacaaagcaaccgccgcagagattgtctttgcctgcctctaacgtcgcagaaacagaatcatacaggtgtgttatttcgtgtctggcttctttctctcagcgttttctctgtgagattcagccatgttgctgcactgtagctatagcttttttatcctcatcccatagagtattccactggctgagtagctcacggtttacttacctattctacctggaagagaatgtgggtcattcccatttttgacaattatgcacagtgctgctgctctgaacgttcttttgttgaacacatgtacgcgctgctgctggcgcgtgctcaggagtggaaggcctggctcrtggtctgtgtatgtgcagcttgcaggacagtttttctaaagttgctgtgcaagttcacatcc

SEQ ID NO: 949453 - DNA, 576 bp, Homo sapiens
ttgtcataggtgtgtggtcttatttctgtgttatctattgtgttccgttagtttatgtgcctgttttttctaccaatgccatgttgttttggttactgtggccctgtagtatagtttgaagttgggtatcttgatgcctccagctttgttctctttattttgcattgccctggctatttgggctctttttgagtctatatacgttttccactagtttttttttttttttttgtcatgtgaagaatgtcattggtagtttggtagaaatagcattcaatctatgaattgctttgggcagtatggccattttaatgttattgattctttctatccataagcatgagatgtttttccatttgtttgtgtcttctctggtttctttgagtagtgttttgccattctcattattgagatctttcatctccctggttagctgtattcctagatattttattttttgtgtgacarttgtgaatgggattgccttcctgatcttgctctcagcttggctgttgttggtgtaaagggatgctagtgatttttgtacattgattttgtatcccaaaacattgctga

SEQ ID NO: 949454 - DNA, 554 bp, Homo sapiens
tagaacaccaggtagaattctaggctttttcactctagcccttgactcctggatggtgtttctggacccacgtgggtcctgtgggacctcgccaccctaaagggaaggacacagacctgtctggctttgccactggctgattgtagagctctgaggtcttgagtgaacataggcttagccagagagtggttacatcacgccttgatgagactcagtgcttttctggcttcaggtctgatgcagtgcagtcatagtggtggtggtcacaggggtgtttctgtcactccacccccagctttaggtggctcagaacagagacagagagtctatatgcttgggagaatgtaagagaagagaacaacagtctctgcctggtaatccagtgaattctcctggaacttgttcaagaccatcaaggtggtacctctatgagcctgaaagaaccacagcattactggacttggggtgccccctaaagcagatacaccttagatcacaacactcaagtccttttaratatctgaaaagacttcccaagaatgatagctacaaat

SEQ ID NO: 949455 - DNA, 601 bp, Homo sapiens
gtttgtgaacaaagtttttcaaacatttgctcccctgacatttgacctttaggtcttaattaaaaaaaaaaaagttgaaaacctaagccatatgaattttgcatgcagtatgattaataggtaggtgtttmcctaaaaaatcatttaaaaaagtgtgtgggaagaaaacaagtcccaaaagatgctttgtgaaaaataaaaaaaaaaaaaaaaaaaaaaaaaaggttgggggagaactagttaattaatctagaaattgtagaatttcaaaagattcataatgcatattagcatttaaaaagctctggggaaggttaaagaaaaaaaaagctgttcaactttttttgtatgcagatttccaaaattctttatcatataagttctcacgttttaaagttatacttattaacattattagctagtgttgtttattgagtgcttattctttgcctaggatattgcagtacaaacattatcttgattaataatcttattatttagaaattatcatactcttctcatttgagaaattctcagcttacataaggaactgcctgaagtcacataagtggtaagtgatattgaatctaggactgttgaa

SEQ ID NO: 949456 - DNA, 578 bp, Homo sapiens
ccactcctgggtatctactcacaggaaaataagtcattatatgaaaaagatacttgcacacatgtgtttatagcagcacaatttacaattgcaaatatatggaaccagcccaaatgcccatcaatcaatgagtggataaataaaattccacaccatggaatactactcagccaacaaaggaacaaaataatggtatttgcagcaacatggatggaattgaaggccattattctaagttaagtaactcggtaatggaaaaccaaacattgtatgttctcacaagtaggagctaagctatgagatgcaaaggcataagaatgatacaatggactttggggacttggggaaaaaggagtttattaagtattaactcacacaatcacaaggtcccacaatatgccgtctgcaagccgaggagcaaagaaagccaattcaagtcccaaaactgaagaacttggagtctgatgttcgaggacaggaagcattcagcacasgagaaagatgtatgctatgaggatagggcagtctaaccttttcacatttctctacctgctttatatcttggccatgttggcagc

SEQ ID NO: 949457 - DNA, 578 bp, Homo sapiens
ccactcctgggtatctactcacaggaaaataagtcattatatgaaaaagatacttgcacacatgtgtttatagcagcacaatttacaattgcaaatatatggaaccagcccaaatgcccatcaatcaatgagtggataaataaaattccacaccatggaatactactcagccaacaaaggaacaaaataatggtatttgcagcaacatggatggaattgaaggccattattctaagttaagtaactcggtaatggaaaaccaaacattgtatgttctcacaagtaggagctaagctatgagatgcaaaggcataagaatgatacaatggactttggggacttggggaaaaaggagtttattaagtattaactcacacaatcacaaggtcccacaatatgccgtctgcaagccgaggagcaaagaaagccaattcaagtcccaaaactgaagaacttggagtctgatgttcgaggacaggaagcattcagcacacgagaaagatgtakgctatgaggatagggcagtctaaccttttcacatttctctacctgctttatatcttggccatgttggcagc

SEQ ID NO: 949458 - DNA, 578 bp, Homo sapiens
ccactcctgggtatctactcacaggaaaataagtcattatatgaaaaagatacttgcacacatgtgtttatagcagcacaatttacaattgcaaatatatggaaccagcccaaatgcccatcaatcaatgagtggataaataaaattccacaccatggaatactactcagccaacaaaggaacaaaataatggtatttgcagcaacatggatggaattgaaggccattattctaagttaagtaactcggtaatggaaaaccaaacattgtatgttctcacaagtaggagctaagctatgagatgcaaaggcataagaatgatacaatggactttggggacttggggaaaaaggagtttattaagtattaactcacacaatcacaaggtcccacaatatgccgtctgcaagccgaggagcaaagaaagccaattcaagtcccaaaactgaagaacttggagtctgatgttcgaggacaggaagcattcagcacacgagaaagatgtatgctakgaggatagggcagtctaaccttttcacatttctctacctgctttatatcttggccatgttggcagc

SEQ ID NO: 949459 - DNA, 436 bp, Homo sapiens
tccactgagctagaccactttgctccctggcttcagcccccttttaaggggagtgatcagttatgtctcactggtgttccaggtgccmctggagtatacaaaaaaaaaaaaaaaaactcctgcagctagctcagtgtctgcccaaacggtcgcccagttttgtgcttaaaacccaggcccttggttttgtaggcacccaagggaatctcctggtctgtgagttgcaaagaccgtgggaaaattgtagtatcctggctgaaatgcactcttccacatagcacagtccttcatggcttcccttagctaggggagggaattcccttgtccttcctgggtgaaccgacgccccaccctgctttggctcaacctccataggctgcatccactgtctaaccagtcccaatgagaagagctgcgtacctcagctggaaatgca

SEQ ID NO: 949460 - DNA, 581 bp, Homo sapiens
ccatccctcttcactgggcggggcctccctgcatgaactccaacaactccagccaggggctcgagctggactctgatctcgctggaccagaacccttagaggtagggtggctgcagtctctscagaccagcagacttagtctttcctcctgctagtcctgagaaatctgtgtagcccagacgagcgggtttccacctagcaaatcacaacccctccaccaaggaacaaagtgcttcattaaatgggtcctactacccatgccacccaactgggtgagaccctctaacaggggctgtcagacatcctgtataggaatgttcttactggcatcaggtcagtgcccctcaaggtcagagatcccaggggcaggagtaggcacccatctttgctgttttctagcccccttgagtgacatctccaggtgcaggagtgaagcaaccagatgaatagggcctgaagtgaatccccagcaaactgcagcagccttgcagaagagggaactgaccattgagagaaaaacaaacaaacagaaagcaacagcaacatcatctacagaaaagtcctcacaaaaacctcatcca

SEQ ID NO: 949461 - DNA, 603 bp, Homo sapiens
gccaaaaaaagagttggcatatcacatggtgagagcaggagcaaggggagagggaggtgtcacacacttctaaacaaccatatctcatgagaacttacrtgagaacagcaccaagccatgaatgatcgatccccattacccaaacactttccaccaggccccacctccaacactagggattacatctcaacaggaaatttggaggggtaatccatactatatcattcttcccctggcccctcaagtctcatgtacttctcacattgaaaaatacaatcatcccttctcaatcattcttcaaaagtctcaacttttgcatttcagcgttactcaaaattccaaaatcctaagtctaaagtttcatctggaaatgagttatttttgcctaaaaatttgcaaaactgaaacaagttatttacttccaagatacaatgggagtacaggcatttggtaaacaattctattccaaaaggcagaaattggccaaaagaaaggggcctcaaggcatgcaagtctaaaacctagcagggcagtcattaaaccttaaagctctgaaataatgtcctttgactccatgtcccacatccagggcacactgctgca

SEQ ID NO: 949462 - DNA, 609 bp, Homo sapiens
catctgatcctgagattttttggttggtaggctatttattactgcctcaattttagaactcattattggtcagttcagggattcaatgtcttcctggttcagtcttgggagggtgtgtgtgtccagraatttatataatttcttctagcttttctagtttatatgcatagagatgttaataatattctttgatggttgtttatatttctacagggtcagtgttaatatccccattaccatttctgattgtgttaatttgactctcttctcttttcttctttattagtctagctagaggtaaatctatattattaacttttttttcaaaaaaccagctcctggattctttgatcttttcaatgtttttttatgtgtctctgtctccttcagttcagctctgattctggttctttcttccgatatctttggggtttggctgctcttggttctttagttttgatgttaggttgttgccttgagatctttctagctttttgatgagggcatttagtgctatacatttccctcttaacagtacctgagatgtgtcccagagattctgatacattgtatgtttgctctcattaatttcaaagaacctcttgattt

SEQ ID NO: 949463 - DNA, 634 bp, Homo sapiens
taggatctaactaaactaaagaagttcttgygataattttttacttaaattctattatgtttgatataatatagttatccctgctgtcttttggttaccatctaccagggatatcttaaccacttctttcaccaggtgtgtccttaaatctaaagtgagttttttgtaggcagcaagtatttgtatgtttattttattatactttaagttctggggtacatttgcagaacgtgcaggtttgttacataggtatacatgtgccatggtggtttgctgcacccatcaacctgtcacctacattaggtatttctcctaatgctatccctcccctagccccccacccaccaacaggccctggtgtgtgatgttcccctccctgtgtccatgtgttctcatcagctcccacttatgagtaagaatgcagtgtttggttttctgttcttgtgttagtttgctgagaatgatggtttccagcttcatccatgtctctgcaaatgacataaactcatccattttttatgtctgcatagtatttcatggtgtatatgtgccacattttctttatccagtctttcattggtgaacatttgtgttggttccaagtctttgctattgtgaatagtgccacaataat

SEQ ID NO: 949464 - DNA, 595 bp, Homo sapiens
aacaaaaacacgatctgatgtggggaaatgcatcaaagaagggccagacccctggagaggccagagtgcaggggaaggatgtggaggacctgtgtctgagcacgctgcctgcttcccctccagcttggctagcccagccagccaacaagcctgcctgcccccaagaaacctactcctggctaagaccacacttagggaattctgcccatgcaacaacaatacagcaaaaacttaccacccctaccttatgcgagagagcacttcttccaatgtgctctccccattatcccattcttccctcccacgccccatggggtaaagcaggcagacactgtcctccccccattatcccattcttccctcccacgccccatggggtaaagcaggcagacactctcctcccaccattatcccattcttccctcccacgccccatggggtaaagcaggcagacactctcctccccccattatcccattattccctcccackccccatggggtaaagcaggcagacactgtcctccctttccagacgtggaagcagaggtggagccgtcatacaactggtctagagcagagccaagttcagaggc

SEQ ID NO: 949465 - DNA, 606 bp, Homo sapiens
tgcatgatttgaatctgaaaaaggatgtccttaatctaatagcctttaatttcaatgtggaagaccaaacagttagaacatgtacaatgacccaaaaccctgagctctcaccattaagtggagcasccacccctgcttcaggttctgtgtgcctggcaatgagggctatccacagtagcctatagaacaccataaggtggcagcttccttgacttgtcagtgagttagggctatgcatttaaaaaatattcagtgaactgaagacctcatagagccagcagtttttcttcaaacagtgaagggaggtgtattcattcattttcacactgctgataaagacatactcaagattgagaaatttacaaaagaaagaggtttaatggactcacagttccacatggctgagggggcctcacaatcatcacagaaggtaaaagccatgtctcacttggtggcacacaagaaaagagagaatgagagtaaagcaaaggggtttctctttatgaaaccatcagatctcatgagactcattcactaccacgaaaacagtatggggaaacccactcccatgattcaattatctcctagtgggtccctcccacaaca

SEQ ID NO: 949466 - DNA, 578 bp, Homo sapiens
aatttaataaacaaagtgaaagaatcaactccttaaaaagcacaatctgccaaaactcacagaagaaataggcaatctgaatgtctgtatcttttaaagaaattggatcaataattaataaccttccaaaacagaagtcaataggcccatattgttgtgttggttaattctgctaaatatttaaggaagaaactacaccaattcctacaagcagaatatttcctgacccattctatgcagccagcattatcccaataccaaaaccaaagacattacaagaaaactacagaccaacagcttttatgaacataaatgcaaaaatcctcagtaatatattagcaaattgaatccaacaatatatggaaagaattatacagtattatcaagtggaatttatcctaggtatgcacattagtttgttctcttgctgctataaagaactgccacaggctgggcatggtggcacacacctgtaatctcagcactttgggacgccaaggygggtggatcacctgaggtcaggagtttgagaccagcctgactaacattgtgaaaacccagctctactaaatacaaaa

SEQ ID NO: 949467 - DNA, 630 bp, Homo sapiens
tttgaggtttctgacatggtgaatgaggtttttgtggggtctttgtcattgttgttgttttgtgtctgtttgtttgttttaacagtcagcccactctaccatagggctgctgtggtttgctgggggtccgctccataccccagttgcctcattctcccgtacctggaggtatcaccagcaaaggccatgaaacagcaaagatgacagccagatcctttctctggaagctctatcccagggggtactgacctgttgccagcctgcacgcacctataggagatgtctggaaacccccattgggaggtctcacccagtcagaaggaatgggatcagggacctgcccaaagaagcagtctggctgttttttggtagagcagttgtgctgcattaaggggcacacttcctcatccaaactgcctgcaatctccaaagctgacaggctggagtggctgagtccaccaaaccgcagagatgacatccacccctcctcacaggagctccatcccagggagagatcagagctctgtccatagaaccctagctggagtsgttgaagctcctgcagggagatcctgctcagtgaggagaaatggatccaggtgctgcttaaagcagtctggccacaatctg

SEQ ID NO: 949468 - DNA, 506 bp, Homo sapiens
acatagtcagactactattactttttgaagaaggccctcaatcccattccttttcactggaaaggacctcccaactgaggtttacagccacctcctataggtgcattcgagccaacaataggttcatgcctccctgggatagagatcccaaagggagagacagactaccatatttgctgttttgaagccttcactgttgatatctccaggtattggaaaatctgaggtgactaaagactgcagtgggcccccagaatacttcagaagccctacgaaaaagtggtcagactgctacatgggtgattgttcccacatctccttattgggcaggtcctccaggccaccagcctccccctgccagagctatgagccagtagcagctctgcaagttactgggcagaacycaggaacaactgaaagcctctctgccactttctctgtagtggaactgcccttgccacccttgaactaatgaagaaggaaataccctaaatgtcttacccaca

SEQ ID NO: 949469 - DNA, 474 bp, Homo sapiens
catgaggccacctgggcaggctgggggaaagaaggcagagtggcaggagtggagaccatgggcatttgagccacttcctcatgtgccttcaggacstgcttgagcctggtcttgtatatacaactgccatttgatgatggaatgctgctgtgcatgacccactttatggctagatgggtgagaaagcactcagttcatgataggcagttcaggtcacatggtgacttgaggacccatagtcaaatgatcagtttccaccaaaacccagtaacaggccaagagctgtctctcaaaaggagaatagttatctgcagaagatggtaggaccttgctccaaaatcctagaggcctccactgtgatttacctatagggggcctgccaaaggctccaaacagcatccttatctgccactgacacttaaagcaccattggatctgctgggccatatggccaaaatggcagagcagcttgca

SEQ ID NO: 949470 - DNA, 557 bp, Homo sapiens
attttctgtaacacatgtgggaaaaaagagaaaaaaaaaatcaaagaaaaatgaattttgaagtaaaaaaataaaaaacataaaaatccaagaggtcagctgaacacatggaaggttctggagggtggcagccgagggagggcttggaaactccatagcctgtccccccacaccttgttccgtgcttgccctcatctgtattcttggcaattatcctttacaatgggtctgcaaccccgggggcagtactggtccgtggcctgttaggaaccaggctgcacagcaggacgcaagcagcaggcgaacaagcatccccaccaagctctgccccgacagatcagcggcagcatacgattctcacagaagcatgaaccccactgtgaacggcacacgcgagggatggaggctgcacgctcctcctgagactctaatgcctgatgatctgagtgggaacagtttcatcccgaaaccatccccctatgaaaaaaactgtcttccatgaaaccagtccccrgtgccgaaaaggctgcagaccgctgctttataataaactggta

SEQ ID NO: 949471 - DNA, 831 bp, Homo sapiens
actgaatccaccaccaggaccttttgcttgtaactatctggtcttcctctctccattcttgttctcctccagtttattccctgcatagcagccagttggatcacatcaactttgctaattaaagtccttcagtgtcaaggcacctgcatgatcaggttcctgtctgcctcttgcttctcacattgaaactattctcaggcacactggtttcctccataggacgaagcttttgtctttctttcttttttttttttgagatggagtctctgtcacccaggctggagtgcagtggtggagtcttggctcactgcaacctccgcctcccaggttcaagcaattcttgcgccttagcctcccgagtagctgggattacaggcatgtgccaccacgcctggctaattttttgtatttttagtaggcacagggtttcactatgttggccaggctggtctcgaactcctgatctcaagtgatccacccgcttcggccttccaaagtgctgggattacaggcgtgagccaccgtgcccggctgaatcaagcttttttctgactcgacctttacacgtcctgttcttcagcctttacgtgaacaacttctacccattcttcaggtgtcagcttaagtatcagtttctcagtgagttattcatttcctcactccccaaactaatctatgatgtctccgtgattctttctcacagtactaggttcttttccttcattgtgcttgccacactttgtaatgatatatttatttattgcttgcttaatgtctgtctctccyctagattgcaaggcctttgaaggagcttacaggatttgtttactc

SEQ ID NO: 949472 - DNA, 618 bp, Homo sapiens
aggctggcattgagtttctgtggcttttccatgtgtacagtgcaagttgtcaggggatctaccattatggggtctggaggtctggcccacttctcatagctccactaggcagtgccccagtggggactctgtgtggaggcttgaccctacatttcccttccacactatcctagcaaaggttctccatgagggttccactgctgcagcagacgtttgcctggacatccaggcatttccctacatcctctgaaatctaggtggaggttcccaaaccttaattctttccttctgcgtacccacaggaccaaaccaactgaaagctgctaaggcttggggcttgcaccctctgaagcaacagtctgagctgtaccttggccccttatagccactgctgaactgggtggtactcagggtaccaagtcctgaggctgcacacagcagaagggcccaggccctggccaaggaaatcatttttccctcctatgcctttagacrtatgatgggatgggctgccatgaaggtctctgacatgccctggagattatatactcattgtcctagtaattaacatttttttttttttgagatggagtttcgctcttgttgcccaagctggag

SEQ ID NO: 949473 - DNA, 595 bp, Homo sapiens
tataagagaataatatttctataacatagcacttttgctataaataattttggtactttatctcaccacttctgttcaaaattaaagtggaggtcctagtcagtaaaataaggcaagaaaaccygaatacaaggcataaaggaactctcttgcggcaagaagaaactctctttattcacagatgatataatcatgtatgcagaaagctgtaagggagaaaaaaactgatgaataagttagacaaagttgcagaaaacaaaggtattttatagaatatttttttacagactagtaacacaattagagaatgacataaatgacaatttacaatcacattcaacagtgccaaagtacttacggatatttagtaaaatatataagactggtacaataaaatctacaaaatattgctgaaagaaattaagaccttcacaaatggagacatacaccatgcctatggattagaagactaaatattattgagatgtcaattcctttcaaattgatgtgtacatttgttacaatgtcaatcaaattcccagcaggctttttctgtagaaatcaacaaactatatctaaaatgttttggggaata

SEQ ID NO: 949474 - DNA, 592 bp, Homo sapiens
gaaggctgagacaggagaattgcttgaacctgggggtggaggttgtagtgagccaagatcgtgccactgcactccagcctgggcaacagagcaagactctgtctcaaaaaacaaaaaygaaaacaaaaaaaccctaattttttggttttcatgacaatattgaactaaattgctcaacaaaaacatggatgacatagcagagcttggagtttacagttaaaatatttgaagttcctttacttggtaggatggaggatagaaatattgataatttattattcttgtatgtaagttccaaacagtagttggtttgtttatatcctgcagtaactacagcacctaaaatgatttctgccatgtattttgtttgttttgtttagtaatgactgtagcttcatacgtttttgttctgtttttcccttttttgtggataaacttttaaatttatactagttttaggttcgcaggactattacaaagatattacaaacagtttctatatatcccacactcagttcctctattattaacatcttaccttaacgtaatatatttgttacacataatgcgtaaatatggatacatcattatt

SEQ ID NO: 949475 - DNA, 555 bp, Homo sapiens
gaactaccctgataccaaaaccagacaaggacacaacaacaacaaaaatctacaggttaatattcctgatgaacatagatgcaaacatcttcaacgaaatactagcaaaccaaatacaacagcacatcaaaaagattatacaccatgatcaagtaggatttatctcaggaatgcaaggatggttcaatgtgtgcaaatcaataaatgtgatacatcatatgaacagaatgcaagcaaaaaaaaaaaacacatgatctcgatagatgcagaaaaagcatttgataaaatacaacatcccttcaggataaaaattgtctgtaaattaggtatagaaggaaaatacctcaacacaataaaggccaatatgacaaacccacagctaatatcatagtgaatggaaaatgttgaaaacttttcctcaaagaactygaacaagagaaagatgcccattttcgccacccttattcaacatggcactggaagtcctagccagagaaattaggcaacagaaagaaatgaacagcatccaaattggaaagcaagagattaagttat

SEQ ID NO: 949476 - DNA, 763 bp, Homo sapiens
agctccagggtccttccttcacatagtttctttctatccaaaaatctgagagtgggtaaagaaatatgtgccatgagggttttttttaaataagatattaagtatatatattttggtttagaaagctatcttggcagggcatggtagctcacacctgtaatcccaacattttgggagaccaaggcaggaggattgctggagtctgggagtttgagaccagcctgagcaatatggcaaaatcccgcctctaccaaaaaaataaataaataaatacaaaaatacaaaaatacaaaaactagctgggcgtgatggtgaatgcctgtagtcccagctacttgggaggctgaaattgtagaattgcttgagcatggagttgcagtgagcagagattgtgccactgcactccagcccaggcaatggagtcacatcttgtcaaaaaaaaaaaaaaaaaagaaaagaaagaaaagaaagaaaaaaagaaagttatccctctttactccaactttctgttccacttttccccattccaatgatgttggtgtggccatggttgtttcttgaatcttccaaggggaggttgggtggaggtgcacatttttttggttcagtgggacatgttgatgtggtttgaagcaatattcatgtgtagttggcacattgctagccattttagtgtagtgttgagttttakttcctgcccactgtgccgactctcctggtgttgtgccatgaggtacaggtcagaggttctattgtgatagga

SEQ ID NO: 949477 - DNA, 558 bp, Homo sapiens
tgtaaggaaagcagaatgtacttttggtaaaagattttaagaargcatgggaatatgaatttctcacctaagtttagagggttaaaggattgtgttaagtgaggaaggaaaaaatctaaaggtttaaacaagttgtgaaaggtttataaaaaattaatgtgtgcaaacatattggctaaagttaaagaggtattattctgtttttccataaattgaacattggaataaaagtgcaacagagttttcctaaatcattgttctgctctttaacaaaaaaaatattgtaaagggttataaaaggtttataagaatcttaccttatggtcaaactaactaaaactgaatagatttgtaaaatgctattaaactaaatttaggctggacgtggtggctcacacctgtaattccagcactttgggaagccgaggcaggcggatcacctgaggttaggagtttgagactagcctgaccaatatggtgaaatagtgtctctactaaaaattagccgggtgtgttggcgggtgcctgtagtgccagctactcaggaggctgagacaa

SEQ ID NO: 949478 - DNA, 612 bp, Homo sapiens
ttgctttatgctgttgcatagatcctgtaagttttcttcactctttttcattcttttttttttttcctctgactgggttatttcaaaagacgtgtcttcaagttcagagattgtttcttgttcttaacctatctgttgttgaagctgccaattgtatttttatttcattcattgaattcttctgctccaagatttatatttggttctttttatgatgtcaatctctttgttgaatttcttgcttaggtcatgaattgtttttctgattttattgaattgcctactgtattcttttgtatctcagtgtatttccttaagatcattatgatgagttccttttcaagcaatttgtaaattttcgttttttggagggtgggtcaattattggataattattgtgttccttttgtggtatcatatgtccttgctttttcatgttttctatgtccctgcattaatgtctgcacatctggtggagctgttacatcttctagactttacagagaaaactctcatgaggaaataatttcacctgccaatgggtctagggtgacarttgggaaggatgtagtggatctgtttctaagcgaatgcagtggcttagcttctgta

SEQ ID NO: 949479 - DNA, 761 bp, Homo sapiens
taatttttgtatttttagtacagacagggtttcgtcatgttggccaggctgatcttgaactcctgacctcaggtgatccaccctccttggcctcccaaagtgctgggaatacaggggtgagccactgtgtccagcctagagcccacagtcttaacacaacagttccctctaacaaagctccctgttgctgcatgcaccaagtggcaaatttttaatattaatttatagtaatataaaaacatcgaaggctagtgcctctttacttgaaggcaagcttcacatcatgtgaagctacttagcatggcttcagggagaggggagctggtatcaaggctgggatagtctggtctgtggtcccagggggcggacgggcagtcacaggtgaaacatgtcaacccccaggcagtgcatgtgtagacagtaccagcccctctcttttattttctcagcctccttggctgctcaggcctctgtctcgagagtgactttgcttctctcttccctgatgttcatgggttaatttcattgttatccttgtcgaaggaagctgtagtttgccctcctttccaagatctttcatgccctgacagcaaccctaagcaacagaaactgtttccactccctttattattattattgttatttgaaacagagtctcactctactgcccaggctggagtgcaatggcacaatctcatctcactgcaacccctgcctcccggggtcaagtgattctcatgyttcagcctcccaagtagctg

SEQ ID NO: 949480 - DNA, 594 bp, Homo sapiens
ctttctttgtttacctactgtttctcgcagatgaaatcatgtataagcaaatgcaaaatgttatgctcagattgttccctaatatatcagttacactggaacaaattcacatyttccaaacaagcatcactgcagaaccaactgtgcagtgttgcgagaggggctgtgtggagaagctttctaaaggaggtttctggaggacattgtagggtaggactgaactgtaggatctcaagagcacccaatcgtggcacctgcctttgtttacctactgttagtaaaccaagtgtctgtgaatccatgtttccctgtcttacccaccactgttgctacatggaaggaactggaaaggcagctcattcttcagggctgtcgtgagccaccctgggctctgattaccgctctgttggatccatcagccaccaaagaaggctgaggctgcccaggggggcagtaggaaggggagccagctctcccttgacccagaactgagagagttgtacagaaacagatgcccagacattgttatttcagacctgtcacattaaaaaaatgtagtcattgacatgatgttgtcaattcaatcaccagctt

SEQ ID NO: 949481 - DNA, 669 bp, Homo sapiens
tgtcagggagatagggcttctgatttcagaggagaccagaggtgtgctcatgcagatgarggtcctcatgggatggacatggaaggggcagctacaacctggggacaaatggtggtgggctgagcccctgggacttctggagtgaggaggcaagaacgtgaggaggagccaggcagggagccagaggcagagggtaaagagtaaagtagagcccaggaaaggggcagatccagcaagtagatgaaaatttcccctcacctgccccgttggcctctgtccctgcccacacgccctagtgccctcgccctgagtctctgcttgtctcggcctacctggccatcccagacaggtgtggggtaactgtgagggtaactgaagggccactttcagaaggcacagtctagaagtgaacagcattgagtcactgtcgtctcccagtcctgggaagagcctctgccacaacccgctgagctgtcttcatcaccaacgggtctccttcccccacccctggaggtccagaggacagctcagagctgtgattggtgcctcttcccagtgtctctctacactgctcctgcctgtgcctcagcatcctcctctgagaggtgggcctgtcgctgcacgtgaatggcgagcaggtcactgtggggaagggcctcctccttcctc

SEQ ID NO: 949482 - DNA, 617 bp, Homo sapiens
atgtgacaagagagataaccctccaacagtgagtctttcagagccccgtttaaaaatcctatacatgtaatatataagmcagtattgtccacatttcaaaatacactaaagtaaatgaagaatgagatttacacctaaatataagtagaaattctaatattttcttcttcaacttgagtgttttgcatgccgtgctctaggtctgacatattcattcactgtgtactttacacagtttattatagagcgaccatatttcaggcactattctttggagggccaattgtgaaacagcttcgctaattatcagtcccaaaaaaggactcccattccatgaggaaaacagcaaaagatcaatcatcactatgccagccaccagaaacaggagtccatatgtacttatgcccactgcatcctgagctactgtgtaggtccaccatgcactgggtacctatttgccaaaatccagtgaaagaaaacatattcacaagttatgtgaaatgggtttacttcttatagataattagcaagggacagaagtcttggatccattgtgtgtggttcctccaaggctgaagaaagctgaacaggaaagatgtagtcttgatatgaatgct

SEQ ID NO: 949483 - DNA, 623 bp, Homo sapiens
tttatcagctgaaaaaaagaattattaacattaaagtaaaaatggactcttttaaaaaaagataacagattccccttccttttctctctctccaatctttctgaattactttgtttttatcttttcctgtttgggtctttgatatttacatagccttttaaaattgattgatccttccttacctttagaagtagagagagagagagagagagagagtgtgtgtgtgtgtgtgtgtgtgtgtgtgtgtgtgtgtgtgcagcccctttaattttcttgcctattctatgttctgttcctgaatttgaaatggcaagccagacaggggcaatttgtgaatcagcccagaggaagaatatttcctgctgatatgatcacatctagttgttgttactctccattcctaaaaccagaaaagaacagataacaagacaagaaaatggaggcactcatacaccattttgtaaaagtcagtagacttgagaagatctactcacctccckgtgaagagcaattataagaggaagagtagaaaaaaaaagactatcatctatgtctgaaaatattacattttaaatatcattaagttaaaaacatatttctttatttagaaaaagttggactta

SEQ ID NO: 949484 - DNA, 623 bp, Homo sapiens
tttatcagctgaaaaaaagaattattaacattaaagtaaaaatggactcttttaaaaaaagataacagattccccttccttttctctctctccaatctttctgaattactttgtttttatcttttcctgtttgggtctttgatatttacatagccttttaaaattgattgatccttccttacctttagaagtagagagagagagagagagagagagtgtgtgtgtgtgtgtgtgtgtgtgtgtgtgtgtgtgtgtgcagcccctttaattttcttgcctattctatgttctgttcctgaatttgaaatggcaagccagacaggggcaatttgtgaatcagcccagaggaagaatatttcctgctgatatgatcacatctagttgttgttactctccattcctaaaaccagaaaagaacagataacaagacaagaaaatggaggcactcatacaccattttgtaaaagtcagtagacttgagaagatctactcacctcccggtgaagagcaattataagaggaagagtagaaaaaaaaagactatcatctatrtctgaaaatattacattttaaatatcattaagttaaaaacatatttctttatttagaaaaagttggactta

SEQ ID NO: 949485 - DNA, 427 bp, Homo sapiens
ttctacagggatcaagcaaaacacaagacataacctcagtatatycccataaattctcatggaggctgaaatggatacaaggaatacctaaagaaacctatttatagaaattgctaagtgttatattcccctacatgcatagaatagggcttggtttcagtgcaggaagaatttatcttaaatacttaatgcagagaaaagataacatatgttccactgcaggtacacttccttctaatgggaagatcaaaactagtgttaacaactacaggagacaaggtactcagcagtgaaatgacgtactcagccactgtttggcaattgggtagtttttctctaaaaacctaatcagcacagtacagaataagttgtagaagaaaactgaacttgcactgcttctccattcattaagacagctcacactgag

SEQ ID NO: 949486 - DNA, 214 bp, Homo sapiens
agtttttttttattgttaagcttagccatgctataggaatrcagtaatgtaaaatgcattaactcaaactactaaatatacaagcatatttcatcattctattaggaagaaattttctccataactctctctcataatagcctaacaggaactgcactagagtgtagctgtactcccacggtttagtaagtgaacaggtattcagcccatcctt

SEQ ID NO: 949487 - DNA, 633 bp, Homo sapiens
ctggtgacgtcacatccggccagtttccagccctgtccacagacaacccccaactagtgttcccatcacaaacatttttttttttttacttttggggggtgtgttatatatatatatatatatatatatatatatatatataaattcagttgtttgggtttctggtgtattttagatattaaccccttatcagatatacatggcttacaattttttttccattctataggttgccttttttttttcttttaaatgaaatagagtctctctccatcacccaggctggagggcagtggcgccatcttggctcactgcaacctctacctcctggactcaagcgattctcatgcctcagcctctcgagtagctgggattacaggtgcctgccaccatgcctggctaatttttgtatttttcgtggagacaggattttaccatgttggccaggatggtctcaaactcctgacctcaagtgatccacccacctcagcctcccaaagtgctakgattacaggtgtgagtcatcatgcccggcccacattttctttattagcaaaatccactggaagcgtattcctcgaatgctctgtattctgaattcagagaaccaccctaaattctctttcttgagaa

SEQ ID NO: 949488 - DNA, 595 bp, Homo sapiens
ggagttataccagcagctctcctagttctcaggccttcaggctcaggctgaattatactcttggatttcctgcctctccagcttccagatggcatatcattatacttcttaggccccataattacatcaactaattcacataataagtctcctcatacatacatatatatgaggatgtgtgtgtgtgtgtctgtgtgtatatatcctattcgttctgtttctctagagaatactgaccttcaatattcatatattaaagtcctaacacccagtagttcagaattgaccttatttggaaacagagttgttgtagatgtaattaagttaagaagaggtcacacaggagtagaatgggccctaatccaatatgagaggtaacctcataaaaatgggaaatttggacagagacatgcacacagggagaaagccatgtgaccatgaaggaatagataggggtgatgctcttgcaagccaagagacaccaaagattgccagtcaatacccagaagstgggagaacagcatggaatagattatttcctgacatcccttgggagaaaacaaccctattgacaccttggtcttggacttctagc

SEQ ID NO: 949489 - DNA, 668 bp, Homo sapiens
tgggtacagacagtattattttttaaaattagctatgggaattaaaatatttttgattactaactgcagaaaaacaaagttgtatgagaataaaaatgtaatcatggcatacyatgtggctcaatattgcataataattacatagtcataacagtgtaaatgctgactatcaatttaagccaattttgatataactctgttggaagaatagaggaggagctgtgggataatagctgtatgagaaagttaaacttccaactatcataatagtgtcacaggatcgtttgggtgtcacttcacaagccagaaagctctgtggctggcagtgcctctgcttgagttttgctcgcacccgctggacttgttccattcacttgacctggcgggctgcactcggcttgcgatactggcccagatcccatgcctgccaagagcaagccaggcacacagtgacgaggggtgtgtgagcgagtgagcgtggggtccggctgctgcacacagccaagcatgctggctgctgcggcagggcagccagctctgtgtgaggctgtgactggagcagacgtactgcaagtggcttccactgcaggcaccagtgtctggatgaggggaatgtggtggtgcccagaagcttggagatgctaggaaccacagagcccaaaagaggg

SEQ ID NO: 949490 - DNA, 579 bp, Homo sapiens
tttgggaatgtggttttagagaagcccacagaataaaggagagaagcagaggaacaacccyattcctatctccctagaagaatcaaacccaacgataccttagtttagtaaatgcctatttcatcgccccactgtacaaagaactaaggaacttttacagaaatgagagaaaaccaacttcgggggagattagtctggagagatgcagtacctccaggaaaggaaaacatacccactcaaagaaaacccaggtacatgaagatatgatccaatgcaagaagaagaagctagagagggatggagaataggggcatttggactccctaaaagaaagtgaagccctggccaggcgtggtggctcacaccgtaatcccaacactttggaaggccaaggcaggcagaacacttgaggccaggagttggagaccagcctgggcaacatagtgaaaccccgtctctactaaaaatacaaaaattagtcaggcatggcggcacatgcctgtagtcccagctaccagggaggctgaggcaggagaatcgcttgaaccacggaggcggaggttgtggtgagctgagatt

SEQ ID NO: 949491 - DNA, 611 bp, Homo sapiens
aggccaccatgacttgaggctgtacaaagcagagaggccctggccctggcccaggaaaccacttttccctcataggcctccaggcctgtgatggtaggkgctgctgggaagatctctgacatactctggagacattatccccattgtcttggtgattaacatgcatctcctcattacttatgcaaatttctgcagccagcttgaatttctccccaaagacaggtttttattttctattgcatcatcaggctgcaaattttccaaacttttatgctctgcttcctcttgaatgctttgctgtttaggaatttcttctgccaggtaccctaaatcatctctctcaagttcaaagttctacagatctctaggatggggcaaactgccactagtccctttgcaaaagcataacagaatcacctttgctccagtttccaagaagtccctctccatctgagaccatctcagcctggaattcattgtctatatcactatcagcattttggtcaaaaccattcaacaatctctaggaagttccaaactttcccacaccttgctgtcttctcagccttccaagcctctgggaagttccaaatattcccacatttttatgt

SEQ ID NO: 949492 - DNA, 632 bp, Homo sapiens
tcaaattaattatagttttggtatattatctcagcaacttctgcctaacccaaagtaacaaatattttctcatatgcttacttttataagttgcctggtttgagttttacatttagttttataatccgttttgagtcaacttttatatatgttatgagacataaatagaagttattttttgggcatatggatatggtcttttttcagtatcactcagtgcaaacaatattctttctcaactgaatttacacttcacctttgttgaatagcctttgttcatacatgtgtgaatctatttttgagttctctatccttttccattattctatttccctctcttaatgcaaataccacactgtcttaattactgtagctttataagattcttgaagttgggtaattttgattctacaacttccttctttttcaaggttgtttggtctattctcaaccctctgcattttcacatgaattttaatgccagtttctgaacttctgcaaaacaaaaacaaaaacccctctggcatttttattgaattgattctgtaaaccaatttgggagatttaaygtcttaacagtattgagcctctgaactcatagacatattatgtttccctatttacttagggct

SEQ ID NO: 949493 - DNA, 586 bp, Homo sapiens
tttgaaaggaaatcacagtaayagtctttttttctttcacaaaagggaattcattccatcagtcttgattcattaaaacagattgaaattgtatctactttgtctctgttgaccttcatctttgaatgaggctttgtatgctcttataataaatttctcctgagatttttggtgtcagttgcaatttccaggaattaataataataaaaaagaatgctttgtgagtatcagaaacagaaaattgagaaagccctatttattcttctttcaggatattattgaacaatgaaatgagcactgaataagaaccagaatttaggctggcatcccaggactacaactttctgtgtttgaccccaggcaagtcacttaagctttctcagccttagcttcctcacctggagaacaaagctaatgatgcttgccaattcaaaaagtaaataacatacacatagtcaaaaacacataaagtattcaacttaattagtaaacaaataaataaaattaaaatatctatcgagttagcaataacctctccaaatatccagtgttggtgaaggctaaatgagacaggcactttcacact

SEQ ID NO: 949494 - DNA, 627 bp, Homo sapiens
ctgtggagaaatccatgtggcaaggaattgagacctctgtctggtcaccagcataaacctgcctaccatgtgtgtcagccatcttaaaatcagattttctagccycagtcaagtcttcagatgactgcagccctggctgacatctaactgcaaccttgtatgagactctgaggcagaacaacccaactaagccactcccaaattcttaactcacaaaaaagtatgtgagataataaatgattgttgttgtttcaagctgcgaagttttacataattatgcagtgattgataactaatattgaggaagtgataaacacataataaataaaataatttcagatgtcaatagtgttatgaagaagataaaggagaacaatatgatagaggaatgggggaaaagctgctttgctaagactgggaacctctctgaggaagtaacacttgagttgagacaagactgagcataaagaagcaatcatggctgggtgcggtggctcattcctgtaatcctagcactttgggagaccgaggtgggagaattgcttgaggccaggagttcaagacctcaagaacaacttggccaacatagcgagaccctgtctcttaaaaaaaatcaatcatgaaaag

SEQ ID NO: 949495 - DNA, 604 bp, Homo sapiens
tgggctggcactgagtgtgacttttccagcacacagtgcaagcagtcggtggatctacsattctggggtctggaggatggtggccctcgtctcacagctccactaggcagtgcttcagtgtgggagcttcaaccctacatttcctctgcactgccctagcaaaggttctccatgagggctccttccctgcagcaaacttctgtctggacatcctggaatttccatacatcctctgacatctaggtgcagattcccaaacctcaattcttgacttctgtgtgcccacaggctcaataccacatggaagctgccaaggtttggggcttgcactctctgaaaccatggccggaactgtatcttggccccttttagccatggctggagcacctaggacacagggcacgaagtccctaggctgcacacagcaggggaccatgggaccatcccatgaaaccatttttatctcctaggcctcctggcctgtgatgggaggggctgctgtgaaagtccctgatatgccgtggaaacattttccccattgtcttggtgattaacatttggctcctcattacttatgcaaatttctgcagcatacttgaatttc

SEQ ID NO: 949496 - DNA, 547 bp, Homo sapiens
ctgcttacaagaactcacctcacctgtaagaccacacatagactgaaagtgaagggatgaatataagctacacttataycaaataaaattaactttaaatccaaaactgtagaaacaaaatattcatcattatataatgataaaggaattggttcagcaagaggatataacaatcataaatatttatgcacccaacatcagtgcacccaaatatataaagcaaatattagtagatctaaagagactacaatacaataataagaggagatgtcaggctgctgccatgttgtaggatgctgaaggctagtacgcattgatgtggtggttactctgagtctctagctggacttgaatgtctgtgttgccattcctcactgtgggttcatgatctacggggtggcaggcccaggccctatcatctgggagctggaacacaattctgactaggagccagaggaatggaagctaaaggaggtggagaggtaccggctcctccctgggccctcagcttgaagcagggcctcatgccctggcaccccaggccaca

SEQ ID NO: 949497 - DNA, 606 bp, Homo sapiens
  misc_feature 590: n = A,T,C or G
gtacaagaggtaaatttaccgtttgagaaaatcaacacatctttaggtacctgstatgtgcaagctgttgacctgaaaatttttttatctctatctctgttaataagtccaccagaagcagtttgcattaggctggcaaggccccaatacaccttcactgtcttgtctcagggttatatcagctctttagttctgagtcataatttagttcacagagatcttgaacactttatctttccacaagatatttccctggtccattacactgattaacatcatgctgattagacgtagtgagtgagaagtagcaactactctgaacttactggtaaaacatttgcatcagagaaaaagaaataaatctgactgaaattatagaccttttcaactcagtaagatttctaggagtccagtgttgttgagatatcctttataagtttttggattgcatctgctccctcctacaaccaagaaaaacacacaatgctttgtggcctaattagatttttgagacaacatatccttatttggtgtgttattccagcccattaatggagtggcgtgaaaagttactaattttgagtgggtcncagtacaagaggagga

SEQ ID NO: 949498 - DNA, 580 bp, Homo sapiens
cttcctcccttttttcaggcctttctattctctgagacttaagattattgagattaggccaattaataaccctccagtggcctctaaactttcaagtgaaaggaagaattgcatgtctctcactttaaataaaaaactagaaatagtcaagcttagtgaggaaggcatgttgaaaagctgagataggcccaaagctaagcctcttgcactagttagacaagttgtgaatgcaagaaaaagttcttgcaggaaattaaatatagtactccatcaagcacacaaatgataagaaagtaaaacaacctttttgctgatatggagaaagtttgagtggtctggatagaagatcaacccagccacaacattcccttaggccaaaatgtaatctagggcaaggccctaacacatttcaactccatgaaggcggaaagaggtgaggaagctgcagaataaaagtttgaagctagtagaggttggttcataaaagaagctctctccataacatayaagtgcaaggcgaagtagcaagtgattgtgtagaagccgcaacaagttatccagatctaggtaagataattga

SEQ ID NO: 949499 - DNA, 649 bp, Homo sapiens
ggtacaagaaggaaaaaacattaatccaaaaacagcaagaaattaggggctaaaatgtgataaaaatggaaagcactaaaatagataatacaaataaatctaaaaaaattactattaataaaaattaaataaattctcaagttaaaaaacacaaaccattattttgtttagaaatacagaattttcctatattctatttgctgtggactcaactgaaagacaagcaaccatgcaattgaaagtgaaagcctagagaaagagatgccagcaaacattaacatctgaaatgctggtgttgttctagtaatacagactttacctggacaaaatcaagaaaaaataggaaatctgaatttttctataactatcaaaggaattggatcatttttcaaacatttttacagagaaaacataaagcctaagaagctttatatgtaggcctaccaaccattcaaggaacgaaaaattccaataatacacaaaaactttaaaaataggaaaagagtgaagatggtctgattatttatttatttatttattgagayagagtctcactctgtcgcccaggctggagtgcagtggcgtgatcttggctcactgcaagctccacttcccgggttcacaccattctccttcctcagccttccga

SEQ ID NO: 949500 - DNA, 579 bp, Homo sapiens
gtaatcccggcactttgggaagctgaggagggcggatcacctgaggtcaggagtttgagaccagcctggccaacatggggaaaccccatctctactaaaaatacaaaaattagcctggcatggtggcaggcacctgtaatcccagctactccagaggctgaggcagaagaatcgcttgaacccaggaggtggaggttgcagtgagctgagatcacatcactacgcttcagcctgggtgacagagcaagactccatctcaaaacaaacaaacaaaaacaatgactgtgaggcaggactgttccaaggtgctttagctgtatgaacactttaaatcctccctgcaacccagtgagatagggagagtactatcattgctcccattttatagatagggaagataagtagttaagaccacacagatggcaagaataagggccaggatttgaacacgggtgatctggcatcagagtgtgggctctgaagtaccttgccatgtgagattctgagtttgaactgtttgtaggacgcctgagttgtrctatcaagtagacaacagaacagacagtctgtcaacactga

SEQ ID NO: 949501 - DNA, 591 bp, Homo sapiens
tctcttcatttcttctctttttcttctttcttttttggggatttatcctgcttggtgttctcttaacttcctggatctgtggtggggtgtctgaaaccaatttcaggaaatccctagtcattataactttatttattgcttctattcttttctcttttaattttcttgatgtttccattatgcatatgctacattttctgtagttgttccatattcttgcatattattccattttttccgtcttttttctctttgcttttcagttttgtaagtttctagtgacatgtccttaagctcaaagatactttgctcaagatgtgtccagtatactaatgagctaatcaaatgcattcttcatttttgttagtgtttttgatctctagcactttttaattctttctcagaatttccatctctttgcctacattaaccaaccattgttgcatgttgcctaatttttccactagcaccctcagaatattaacrgtggttgttttaaattcctgatccgataattccaacattcctgccatatctgagtctgtttgtgatgcctgctctgtctcttcaagctgtgtttttgccttttag

SEQ ID NO: 949502 - DNA, 604 bp, Homo sapiens
ggagggaccctgtgggaggtaattgaatcatggtggggagggggctcccatgctgttcttgtgacaatgaataagtgtcatgaaatctgatggttttataraggggagttgccctacacaagttctctcttgcctgcagccatgtaagacatgcctttctcctcctttgccttctaccgtgattgtgagtcctcgtcagccatgtggaactgtgagtccattaaacctctttttctttataaattacccagtctcaggtatgtctttattagcagtgtgagaactgactaatgcacagagtcttgatctgttgcctgggctgaagtgcagtggtgcaatcacagctcactgcagcctcaaactcctgggctcaagcatatcctcctgcctcagcctcccgagtagttgggactacaggcacatgccaccatgcccagctaatttttttagaaatggggattttgctttgttgcccaggctggccttgaactcctggcttcaagcaatccttccacttttgtctcccaaactgttgggattacaggagtgagccaccacacctggtccatgtactcttctgatacttgcttctgatacttactgc

SEQ ID NO: 949503 - DNA, 568 bp, Homo sapiens
ggagtttgaggccagcctggacaatatagtggggctgtatctctacaaaacataatataaaaaaaaaaaaaaaaacttagctgggcatggtggcatgtacctgtagtcttagctacttggaaggctgagataggaggatcacttgagcccaggaatgcgaggctacagtgagttataattgcgtcactgcactccagcctgggcaacagagatagactctgtctaaacaaaaacaaacaaacaaacaaacaactaaaaggcaatatgaaaaacaaaatatgatacatctgtatggggcatttaccatgaatggagtttgtgggactggaagttgctctgggtgaatcagtgagtgagtggtgagtgaatgtgaaagcctagggcattactaaacactactgtgggctttataaacactgtacacttaggcgacactaaatttacaaaattcttttttaataatacatgaacctttgcttactgtarcttttaaactttatcaacttttacttttttaaaaacattttgactctggtaataacacttagtttaaaacacaaacacatta

SEQ ID NO: 949504 - DNA, 601 bp, Homo sapiens; identical to SEQ ID NO: 947912

SEQ ID NO: 949505 - DNA, 641 bp, Homo sapiens
tattttcctagatggtgctgatgcttgtagatgttccttggtgtctggcrttgaacagttaggtatttattgtagtcctcactgtctgtgcttatttgtacccattcatcttggaaatgctttccagatatttgaaaggacttgtgtgttgtgatctaagctgtatctgctttagggggcaccccaagcccagtaacactggtttttgcaaacttgtagaggtactgccttgatggacttggacaagatctgggagaattccctgggttacaaggcagaggctcatgttcttttcctttactttctcctaaacatacagtctttctctcggttctgagccacctaaagctgggggttgagtgacacaagtacccctgtggccaccactgctgactgtattggatcagacttgaagctagtgtagcatttggtctcacccaagtcctgctgtactcaacctctggctgcagcctacgttcactcaaggtcctggggctctacaattaacaggtggtaaagccagccaggcctgtgtccttcccttcagggtggtgaggtcccccaggccctgggtgggtacagaagtactgtctgggagtcaaggactagagtcaaaaattttagacgtctaccaggtattc

SEQ ID NO: 949506 - DNA, 570 bp, Homo sapiens
agacatacttagcagctggcagaatccaccatttgctccctgacttgtagggtagagctactataatgggaaaggtcaaatggaggccaatagagctgcctatgcctagaaaaatagtaaatcaaaaacaatatcaattttttggagagattgtgaaggttagtgacaccatcaaggacttgaaaggcataggagtggtaattagcaacacatcctcctacaactctcccatttgtctgatgcagaagacacatggattttggagaataatagtggattatcgtaagcttaactgcatggtgactccaattgtacctgctgtaccagatgtggttttattgtttgagcaaattaatacatctcctggtacctggtatgcaataattcactgggaaaatacctttttcttcattcctgtccatacggctcaccagaagcaatttgccttcagctggcaaggccagtaatatgcctttrttatcctaccacaggggtatatcaactctttgtgtgtcataatcttatttagagagcccttgattgcttttggcttctgcaagatagcaccct

SEQ ID NO: 949507 - DNA, 570 bp, Homo sapiens
agacatacttagcagctggcagaatccaccatttgctccctgacttgtagggtagagctactataatgggaaaggtcaaatggaggccaatagagctgcctatgcctagaaaaatagtaaatcaaaaacaatatcaattttttggagagattgtgaaggttagtgacaccatcaaggacttgaaaggcataggagtggtaattagcaacacatcctcctacaactctcccatttgtctgatgcagaagacacatggattttggagaataatagtggattatcgtaagcttaactgcatggtgactccaattgtacctgctgtaccagatgtggttttattgtttgagcaaattaatacatctcctggtacctggtatgcaataattcactgggaaaatacctttttcttcattcctgtccatacggctcaccagaagcaatttgccttcagctggcaaggccagtaatatgcctttgttrtcctaccacaggggtatatcaactctttgtgtgtcataatcttatttagagagcccttgattgcttttggcttctgcaagatagcaccct

SEQ ID NO: 949508 - DNA, 605 bp, Homo sapiens
actacaggcatgtgccaccacacccggatactttaaaaaaaaaatttagagaaacagggtcttactatgttgctcagtctggtctcatattcctgggctgaagaaatcctaccacctcaggttcccaatgtgctgggattacaggcatgagctgcctagcccagctaaattatatatacatttttaaagtccaagaatgaattttcatttgcttttaaataattatctcaagtggaactgatttttatatacatgctaaaaaagagatgaaatgtaaagagcataatttataacacaattctaatttgtcattttatatttagattttgtcttactaagtctgaaggaaattcaatacacatagtataactgtaaattttatactttcctttgtccttcgcatggtgaaaagatgaatcaaatgacctaatcctggaatggcttgttttccttgcttacactttgcagaaaattgattacttgttaaatataaccaaagtgacaattttttgaggctgggaaagattaagggaacaataaagatgycataataatatagttaccaaatttgccaaaaactttacctttttctgtgtttcacgcag

SEQ ID NO: 949509 - DNA, 562 bp, Homo sapiens
atctcggcttactgcagcctctgcctcctgggttcaagcaattctcctgccttagcctcctgggtagctgggaccacaggckcacgccaccatgtgtggataatttttgtatttttagtagagatggggtttcgccatgtttgccaggctggtctcgaactcctgtcctcaggtaatctgcccacctcggcctcccaaagtgctgcgattataggcatgagcctccgtgcttggccatgatattttcaaatataaaaattttaatgttttacaattagaatatttattttacttcatttttactagtaccgttgtaagctttttaaattcttgctaaatgacaatactgttttatcaggattttactttttatgtatgtatttttttctgagacaggttattgctctgttgcccaggctggactgcagtagcgtgattggctcctgcagccttgacctcctgggctcaagtgattctcctgcctcagcctcctgagtagctgggactacaggtgcatgccaccatacctaactaactgttacattttttgtagagatggggt

SEQ ID NO: 949510 - DNA, 648 bp, Homo sapiens
ctttccttcatcttaattttagataagctgatgacaatgtgcctaggtgaagatctttttgtgattaatttcctgggtgttctttgtgcttcttgtatttggatgtctagttctctagaaaggccagggaagttttcctcaattatgcacccaaatatgttttccaggcctttagaattcttttttctcaggaataccaattattcttaggtttgcatttaacataatcccagacttctggaggctttgttcaaatattcttttttctgtctttggtggattgggttaattcaaagaccttgacttcaagctctgatttttttttttaattttttttttttttttttgagacagagtcttgctctgtcacccaggctggagtgcagtggtgcaatctcggctcactgcaacctccgcctcctggactcaagcaattctcctgcctcagcctcccaagtagctgggactacaggtgtgtgccgccacacccagctaacttattttttattttttatatttatttatttatttatttatttagagacggagttttactcttgttgyccatgctggagtgcaatggtgcaatctcagctcactgcaacctttgcctcctgggttcaagcgattctactgcctcagcctccc

SEQ ID NO: 949511 - DNA, 453 bp, Homo sapiens
aaaccagttgagaccatctgcccttcaagtggacctgtcccagtgcccgaggtggccttttgatgtsagagggccaaaacttccaacctcagatcatgctaaggctgccgtttctggtacctgtgtcctgtgaaatgccatgcaccccgacgacacctgcacagaatgggcctgctggaccaccctgcctccgtagttcataaagactcccaagctgtatcacttgggaggcaggtttaagagctgttctccctcctcttcactcagtggccttgcaaataaatcttttctcttagctgggtgcagtggctaacgcctgtaatcccagtgctttgggaggctgaggcgggaagatagtttgagctcaggagttcaaggccagcctgggcaatagcaagaccttgtctctacaaaaaaaaaaaaaaaaaaaaaaaaaagctggtcttggtggca

SEQ ID NO: 949512 - DNA, 522 bp, Homo sapiens
ccaactctctaaatgacagttccttcatcaaaaaaatgagacaatgggaccagatccatttgaccagcacttctcaaactgtctgtggtgaaagaccaggagttttcagggggttttaaaaaatttccagtccgtcacaaaccatgtatttgtatgttacaataaaaatgaattagtagaagaatggaattttcaaaacatataaaatataagccaaaatgtcttattataagatgcaacaggcatgaaatagatctgtcaaactgccatgaacgtttctaaatgcttactcttcatttctgaccttatcgtggacaaggggatctcgagcagcatgtggagcagcccctgtggggaccccacttttatcactggccatgtgacatcccgagggcatgtsacactcctaagatgcccctctccttttgttgggaccctaggcagcaagcagggtccttctaccctccccatccccagaccctgtgggagcccattcagctctcactcactgagggaatgagg

SEQ ID NO: 949513 - DNA, 522 bp, Homo sapiens
ccaactctctaaatgacagttccttcatcaaaaaaatgagacaatgggaccagatccatttgaccagcacttctcaaactgtctgtggtgaaagaccaggagttttcagggggttttaaaaaatttccagtccgtcacaaaccatgtatttgtatgttacaataaaaatgaattagtagaagaatggaattttcaaaacatataaaatataagccaaaatgtcttattataagatgcaacaggcatgaaatagatctgtcaaactgccatgaacgtttctaaatgcttactcttcatttctgaccttatcgtggacaaggggatctcgagcagcatgtggagcagcccctgtggggaccccacttttatcactggccatgtgacatcccgagggcatgtcacactcctaagatgcccctctccttttgttgggaccctaggcagcaagcagggtccttctaccctccccawccccagaccctgtgggagcccattcagctctcactcactgagggaatgagg

SEQ ID NO: 949514 - DNA, 658 bp, Homo sapiens
attcctctttaaatgactgctaatagggaacaaaggagaataaaaacctagactgtagttgaaaaggtatctaggttgttatattaattatatatagccaggcgcggtggctcacgcctgtaatcccagcactttgaaggctgaggcaggtggatcactggaggtcaggagttcgcaaccagcctggtcaacatggtgaaaccccatctctgctaaaaatacaaaaaattagctgggcatggtggcgggtgcctgcagtcccagcgaggcaggagaatcgcttgaacctgggaggtggaggatgcagtgagccgagatcatgccactgaactccagcctgggccagagagcgagactctgtccaaaaaccaaaataaaatgaatcaaaattatatatataattattataacaattattatatatatttcatatgtatatttaaattggtttttttttctcactagaacttaatttgtctcctgtgcttagaaacttaagcaccctcagaggccagaagggtaaatacggataaaggaaaaragggagtggtgtggtctatggtcaaactggagaagatgcccagcctcatcgcattcacatttaataacataaaaatgtgtatgctgactaaatccacccatctcagggatgaattca

SEQ ID NO: 949515 - DNA, 640 bp, Homo sapiens
tcctcttcaccaatttggatgcccttgatttatttctcttgtctgattgctctggctaggatttccagtactatgttgaataaaagtggtgaaagtgggcatccctgtcttgttccagttttctaggggaatgctttcaactttttccggttcagtacaatattggctgtgggcttgtaatagatagcttttatgaccttaaggaatgtcccttgcatgccgattttgctgagggttttaatcataaagtgatgctggattttatcaaatgttttttctgcatctatttagatgatcatatgatttttgtttttaattctttttatgtggtgtagcacatttattggcttccatatgttaaaccatcctctcatctctagtatagaacccacttgatcatggtagattatctttttgatatgctgttggatccagttatctagtattttgttgaggatttttgcacctatgttcatcacagatattggcctgtagttttctttttttgttatgtcctttcctggtcttggtattagggtgatagtggcttcataaaawgatttagagaagatttcctctttctctatctcttggaatagtttcagtagaattggtaccaattattctttgaatatctgat

SEQ ID NO: 949516 - DNA, 617 bp, Homo sapiens
tttcacaggctggcactgagtgtctgtggcttttccaggtgcacagtgcaagctgtcagtgtatctaccattcttgggtctggaggacggtggccctcttctcatagctccactaggcagtgccccagtggrgactctctttgggggcttttaccccacatttcccttctccattgccctagtagagattctccatgaggactccacccctgtagcagacttctgcctagacatccaggcatttccatacatcctctgaaatctatgaaatctaggtggaggttcccaaacctcaattcttgacttctgttcacctgcaggctcaacaccacgtggaacctgctaagtcttggggcttgcactctctgaagccatggcccaaagtgtaccttggccccttttacccatggctggaggggctgggatgcagggcaccgagtcccaaacctgcacacagcaggggggccctgagccaagcccaggaagccattttttttcctcctaggcctacaggctcatgatgggaggggctgccctgaagacctctgacatgatgaagagacattctccccgttgtcttgatgattaacatttggctccccattacttttgcaaat

SEQ ID NO: 949517 - DNA, 594 bp, Homo sapiens
agagaagggtgttccctctgggtagaccagttagaaatatgttccccttcctcttggctagtgccgcaaggtacggggcatggtaagcagagcctgggcgcatttcagcccccacttcccctctgttggctagggatctttgtgtcaggcacactttgcatgactgcactgcacattgaccttgcagttaggcacttggccagtgggcattccaatctggagactcactctattccatacctgggaattttcctgtattatttcttcagtaaatctcttcttactgtttcctgtcatctgtttttagaatcctatttctcagatgttggatctactgactgagtttcttgtctttcctctcttgttgttcatctcctggttcttttattctagtttctgggaaatttctcaagttcaattctcataccaaaattttttcaaccaaaattttaatttcacctatactrttttttattttgatgagtgatcattctatgatgactcttttttatttttactatatccttccactcatgtttcattagtacaatatctcattatcgttctctgattcttaacgagatttccttttcc

SEQ ID NO: 949518 - DNA, 566 bp, Homo sapiens
ctcggcctcccaaaatgctgggattacaggcatgagccactgcacccgccttactttttgttttttttttttaagagagacagggtcttgctttgtcacccagactggagtgcagtggcgtgatcacagctcactgtaaacctcaaaatcctgggcgaagtgatcctcctgcctcagcctcctgagtagctaagactgcaagcatgtaccaccacacctggctaattctgaaaattttttttagagatgcggtctcactatgttgcccaggctggtcttgaactcctggtctcaagtgctcctctcatctcagcctcccaaagcgctgggattacaggtgtgaaccactgtgcctagccagtttaccatttcgtagcaatagagtattgtttcttttttttttttcttaaatttattttttatttttatttttttgagatggagtctcgctctgttgcccaggctggagtgcagaggtgtgatcttggctcactgcaacctccgcttctcgggttcaagcrattctcctgcctcagtcccctgagtagctgggattacaggcatgc

SEQ ID NO: 949519 - DNA, 566 bp, Homo sapiens
attgttgagaattacttctcaggaaaaatgattccttttaaaacatcactggtcattaacaacgcacctggtcacccaataactctgatggagatgtacaaagagataaatgctgttatcaggcccgctawcacaacttccattctaaagcccaaggagtaattttgaatttctagtcttattatttaagaaatatgttttgtaagtctacagttgccatagatagtgattcctctgatggatctggggaagtcaaacaaaaaccttctgtaaagcattcacctttctacatgccagtaataacatttttgattcatgagaggaagtcaaaataacattaacaggagcttggaagaagttgatttctaccttatggatgactttgaagggttcaagactccagtggaggaagtaactgcgcatgtgatagaaagagatctagaattagaagttgtgcctggagattagactgcatggctaaaatctcatgataaaactttaatagaagaggagttgcttcttgtagatgagcaatatagtaatttcttgagatagaatatcttcct

SEQ ID NO: 949520 - DNA, 613 bp, Homo sapiens
tggtggcacaaaaatggtgtttatcctttattacattatatactgttttctgagtatagactctaggggaaatattaagccktgtacagtactttttgtcacaataatatgacattacatattatcttcagagaatttatttgattagtttttatttgttttggtttatgggtatatgccataattctttgatgtgtttattattatagaagataactagctctaaatttatataagtatatataaattatatataatatatattcatatagaaacatatgtaatttttatatataaaaatgtaaatttttattatgtagtttattataactgtgatttgtctaaatggagcttacgtaagttaaacattgactataagaacttactagaaatacaaactatcatcaaagaatacgacaaacacctccatgcaaataagctaaaaaaatctagaataaatggataaattcctggacacatacaccctcccaagactaaaccaggaagaagtcaaatccatgaatagaccaataataagttctgaaattgaagcagcaattaatagcctaccaaccaaaaacaaagcccaggaccagacgaattcacagcagaa

SEQ ID NO: 949521 - DNA, 554 bp, Homo sapiens
gtggtgagagaggacatcctggtcttgtactggttttcaaagggaatgcttccagcttttgcccattcaatatgatattgtctgtgggtttgtcataaatagctcttattattttgagatatattccatcaacacctagtttattgagagtttttaacatgaagaatgttgaattttatcaaaggtcttttctgcatctgttgagataatcatgtggtttttgtctttggttctgtttatgtgatggattacgtttattgatttacgtatgttcaaccagccttgcatcccagcgataaagccaacttgatcgtggtggataagttttttttttatgtgctgctggatttggtttgccagtattttatggagggtttttgtatcaatgtttatttggcttattggcctgtagttctctttttttggtgtgtctcttcccagttttggtatcaggatgacactggcctcataaaatgagttagggaggagtccctccttttcaactgtttggaatagtttcaraaggaatgggactagttcctctttgtatttct

SEQ ID NO: 949522 - DNA, 606 bp, Homo sapiens
ggtggctacacatgaaggaaggcactttgagaaagtgggatctagactcctaaaaagaagaggccatattttttcctttgtggaccctacacagggtagaagaatctacttttattattagatattttttctacctaatttaagttatactcagaagcacaaaagcttgtttctagtttttatatgacacttctaaacttaatgtttattctggcttttatataaatgtcctaagcttagcatttgttgagaattactaagagaagtagaattaccttctggggaaattgaaaaatgacctttctgggcaaaaaagcagaagataaaaggattaataaacaaaagtccccagttccccaattcctctgactaatgttacaatcggaaagaatttaattcataaggtcaggctcttcagagaagtaaagaccagtgggtgagaacaaggacacctgggagtctatgaaagtggattccagtctcactgtggcatgatttatcctgatcaaagagcagaagccatgaaaagctttgaaaaatgattcacagtgccgagaagaayatacctgtgaatattccagttaaggcagtgcattttaaccagct

SEQ ID NO: 949523 - DNA, 642 bp, Homo sapiens
gtaaatagggttacatcatagttattaaataagcctggaaaggggggagacacggccaaaggtcttgtctgtggctctctctgaatggtgggattacaaagagcttttaattttttcttgaatttttttctgtagtttccaaactttgtacagtgagcattgttatttatttatttatttatttatttatttatttatttatttgagatagagttttgctctgtcacccaggatggagtgcagtgctgtaatctcggctcactgcaacctccgcctcccgggttcaagcgattctcatgcctcagcctcccaagtagttgggattacaggtgcacaccaccacacccagctaatttttgtatttttaatagagacggggtttcaccatgttggccagactgggctcgaactcctgacctgaggtgatccacctgcctcggcctcccgaagtgctgggtttacaggcgtgagccaccgcacccagcctgtaattttattttaaacaatttttataacagttgccatcacctagaactgccccgtgcggccgtattgtccttaggaggcagaagytttccttgagggcatcaggtaaggagaccaagggagagtggaggtggatgagaagctgtaggaggcacc

SEQ ID NO: 949524 - DNA, 509 bp, Homo sapiens
gccgactttgggcagtgtccttctgcagccgacactcttgtggaaacacttggctctttagtgtgtcttcccctcaaccatagcctgcacagatggcctctttagggaggccaggcagcttggctggctgtgcctccagaagacagattgtccagtcaaagggtgatggagaaagtgtggggcgcccatgactgctgagacagcggtggctgttacagagtccttccccaccctaaagactgaagggtggtcctgaacactggatgagatggtaacaacttacccaaggacatgcattgcttgggtctggtttattttctaaaaagaaaacataatatgtgtctgggacaggtgtccttgaatgttgtcccaccctccaagtccagcaagatttttccaaagrtcccgtgcacttgcagagagaaaacaggggcctcaggaacacccatcctgaaagcaggggcctcaggaacccccatccatgtctgatgaatctccaccagacttgc

SEQ ID NO: 949525 - DNA, 640 bp, Homo sapiens
ggaggcctcaccatcatggcagaaggtgaaaggcctgtcgggggatgggggactaggggagggatagcattaggagaaatatttaatgtagatgacaggttgatgggtgaagcaaaccaccatagcatgtgtatacctatgtaacaaatctgtacattctgcacgtgtacccctgaacttaaagtatattaaaaaaaaatacagaaaagctaaaaaaaaaaaaaattgaacacctttaacggcacccgagtcacatcttaatgctctgctgcttagaaatttcttccatcagataccctaaaacacctctctcaagttcaaagttccacaaatctccagggcagggacaaaatgccgccagtttctttgctaaaacataacaagagtcacccttactccagttcccagcaagttcctcatctccatctgagaccacctcagtctggaccttattgtccatatcgctatcaggcttttggccaaagccattcagcaagtctctaggaagtcycaaactttcccacattttcctgtcttcttctgagcccttcaaactgttccaatctctgcctattacccagttccaaagtcactttcacattttcatgtatcttttcagtagtgccccactctactgata

SEQ ID NO: 949526 - DNA, 625 bp, Homo sapiens
aaatcaaaaaagaagcatcagacttcatctgcactatagaccaagtgggcmtaatagatccttacagaacatcttcattcagtggctgctgactacacattttttcctcagcacatggattactttgtaggataaaccttatattagaacacaaaataagtctcaaaacattttttaaaaattgaaataatatcaagcatcttttttaaggatgtgtgtgtgtgtgtgtgtgtgtgtgtgtgtgtgcgcgcgtgtgcgtgtgtgtgtgtgtgtatgagtgcgttttgtagagacaaggtttctccatgttgcccaggccggtctcaaactcctgggttcaagtgatccatcctcctcaccctcccaaagtgcttggattacaggtgtgagccactatgcccagcctaatattgagtatcttcactgaccacaatggaatataactagaaatcattaagaagagaaattttggaaactgtacaaactcatggaaattaatcaatatgctcctaaatgaccagtgtgtccataaagaaattaaaaagaaaatttaaaaatttcttgaaacaaatgatagtggaaacacaacataacaaaacctatgggacaaagcaaaagcagttct

SEQ ID NO: 949527 - DNA, 625 bp, Homo sapiens
aaatcaaaaaagaagcatcagacttcatctgcactatagaccaagtgggcataatagatccttacagaacatcttcattcagtggctgctgactacacattttttcctcagcacatggattactttstaggataaaccttatattagaacacaaaataagtctcaaaacattttttaaaaattgaaataatatcaagcatcttttttaaggatgtgtgtgtgtgtgtgtgtgtgtgtgtgtgtgtgcgcgcgtgtgcgtgtgtgtgtgtgtgtatgagtgcgttttgtagagacaaggtttctccatgttgcccaggccggtctcaaactcctgggttcaagtgatccatcctcctcaccctcccaaagtgcttggattacaggtgtgagccactatgcccagcctaatattgagtatcttcactgaccacaatggaatataactagaaatcattaagaagagaaattttggaaactgtacaaactcatggaaattaatcaatatgctcctaaatgaccagtgtgtccataaagaaattaaaaagaaaatttaaaaatttcttgaaacaaatgatagtggaaacacaacataacaaaacctatgggacaaagcaaaagcagttct

SEQ ID NO: 949528 - DNA, 576 bp, Homo sapiens
atgctcaataaaagtgacaacacttatgccttcgttctaccttactgctcactgaatgcttataattactgtgtaatggaataataccaatagaatgctaattgcccagagacatttagtgactcttaacactccagagataggaccatttttatattaaaaaatcaaatagcactctggctaacatatcaagctgacatccaggagaattagatctggttccatgagtgcatgccctttgcaccagttacaattgtaacccttattggacatctacacaataggcatttattgagtatatactgtgtgttcatccatccagccattcatccatcaatctagccattcatccattcatcatttattcaaaaaaacactttcagagtgcctgcatatgtcaggcagtggtctatgaagtggatatacactgaagaacaacacacgctttccctacttttatggagttacattctagtgttgggaaccactaagactaaacataaggaaataacatgatttctggktttctggcttctgtggcaaacactggaaataaaatcttacacgtgtaggggg

SEQ ID NO: 949529 - DNA, 757 bp, Homo sapiens
gtagaaaagcactttgctaaaacctctcaagacataaaacctgcagttttatggtaacatgtaaacagtaatgtatggtgtggtccaaatgaattgttaacatggggargaggatatgcttgtgttcacattccctcaggtcctctttggattccagcacgacacatcaaacgataccattgcatggctaggacccaacccggtaccagtaataaagaaaatgaccctacaggaccaacaacaccaggcaatgcggcttcctcaggtgacacaggccccagacatgatgctgaaaaagacaagtcagaagactgagcaaatcctactccagacacagacaccattcactccagataatttgctccttgctatgctttattcatccttttaaattctctcattctacctgcaaccagtacctgctacactctattgggaccatcttctaaatctgcctttcttctgtcctgttacttagacaaacacccccttcccagcttctaacaaatgcgactgcttagctaagagggattaacatacccctagtggggttccttagtaacagcactcatcaaactgaaatgccaagtaacactgcaggtcactgcttgattggaaaagaatgttgctaattatactcatgtttgtcttatgttatttactaattctaggatcaaagccagaatacaagcagtgaccaccatgcctgagagacctgttgctgcacacatctgtactcttcaatcaacaaaacctg

SEQ ID NO: 949530 - DNA, 757 bp, Homo sapiens
gtagaaaagcactttgctaaaacctctcaagacataaaacctgcagttttatggtaacatgtaaacagtaatgtatggtgtggtccaaatgaattgttaacatggggaagaggatatgcttgtgttcacattccctcaggtcctctttggattccagcacgacacatcaaacgataccattgcatggctaggacccaacccggtaccagtaataaagaaaatgaccctacaggaccaacaacaccaggcaatgcggcttcctcaggtgacacaggccccagacatgatgctgaaaaagacaagtcagaagactgagcaaatcctactccagacacagacaccattcactccagataatttgctccttgctatgctttattcatccttttaaattctctcattctacctgcaaccagtacctgctacactctattgggaccatcttctaaatctgcctttcttctgtcctgttacttagacaaacacccccttcccagcttctaacaaatgcgactgcttagctaagagggattaacatacccctagtggggttccttagtaacagcactcatcaaactgaaatgccaagtaacactgcaggtcactgcttgattggaaaagaatgttgctaattatactcaygtttgtcttatgttatttactaattctaggatcaaagccagaatacaagcagtgaccaccatgcctgagagacctgttgctgcacacatctgtactcttcaatcaacaaaacctg

SEQ ID NO: 949531 - DNA, 630 bp, Homo sapiens
aatttctccccagaaaaaggatttttctttttggccccatggacaggctgcaaattttccaaacttacactctgcttcaattttaaacataagttccaatttcagactatctctttgtgaacacatrcgactatatactttcagaaacagccaggttacatattaaatgttttgcttcttagaaatttttttttgccagatacctgaaattatttctctcaagttcaaagttacacagatgtctagggcagggaaaaaatgccaccagttcccttgctaaagcatagcaagagtgatttttactccagttctcagtaagtttctcatttccctctgtgaccacctcaacttggacttcattgtccatatcactatcagcattttggtcacaaccattcaacaagtatctaggaagttccaaactttcttacatctccctgtcttcctctgagccctccaaactattccaacctctgccatttacccagatccaaaggtgattccacattttcaggtatctttatagcaatatctcactttcaatacaattgtctgtatagctcattcttgaattgctgtaaaaaactacctaaacctgtgagactgggtaatttataaagaaaaaaggtt

SEQ ID NO: 949532 - DNA, 577 bp, Homo sapiens
tttcaaaaatttttaggcattcaaacaatcggttaaatataactgatgataagaaaaatcaatcaatatacactgatctagaaatgctatactatagrtaataaaattattaaacaagtccaataatacggtttcagttatattttgtatgtagaagttgctgaaggaaagattgactgcataaattagagacatggaagctataaaaaatctcaaatcaaacttttagaaatgtctgggtaaacaaaatatgctggagaggattaacactagattatacatggcaaaagagaagatgagtaaaatgaaaaatatgtcagtagttattaccccatgtgaaatacagaaagaaaaatgacaaaaaatttacctgagcatcagtgagctatgtggcaacttcaagaaacctactgtatacagaattggagtcaatgaggagggagagaaagtgaggagaccaacaatatatttggaaaaatcacagccaatttttactaaaaactatacaactacagaagcagaaaattcaataaactccaaattcaaaaagcataaaataaaataattaaattctgaa

SEQ ID NO: 949533 - DNA, 490 bp, Homo sapiens
aatatttaaaataaaaaatgtggctgggcgcagtggctcacgcctgtaatctcagcgcttttggaggacaaagtgggtggatcacttgaggtcaggagttcgagaccagtctgaccaacatggtaaaaccctgcctctactaaaaatacaaaaaattagctgataatggtggcagacgcctagaatctcagctacttgggaggctgaggcaagagaatcctcttaacccaggaggcagaggttgcagtgagctgagactataccactgcactccagcctgggcgacagagcgagactccatctcaaaaacaaaacaaaacaaataacaacaaaaaacaaaaataaaaatacactcgawgagcttaacagattagatattgaagaagaaattataagaatactggaagaaaaacaatagatactaatcaagtgttttcaaaggaacaaaaaagcaggaaaaaaaatggacagagcttcagtgatttctaac

SEQ ID NO: 949534 - DNA, 584 bp, Homo sapiens
agtgagaggcagctttttctgtcttcctttaggggtctgagtcattagaagtctcctctagatcttttcatgtggtactgaagacagcagagagatgggaggaggttgaatctcatttttgtttgtttgtttttgagatggagtctcgctctgtcacccaggctggaatgcagtggtacgatctcggctcactgcaagctccgcgtcccaggttcacaccattctcctgcctcagcctcccgagtagctgggactacaggcacctgccaccacgcctagctaattttttgtatttttagtagagacggggtttcaccgtattagccaggacagtgtcgatctcctgacctcgtgatctgcttgccttggccacccaaagtgctgggattacaggcttgagccaccgcgcccagcccttgtttgttgttttgagagagagggtctctctgttctgcggtactgaaagaaaaataaaaaaatagamacagggtgttgctctgtcacacaagcgggagtgcggtgtgacatgattacagttcatctagccttgacacattgtgggcttaaatgatcctcgacctcag

SEQ ID NO: 949535 - DNA, 584 bp, Homo sapiens
agtgagaggcagctttttctgtcttcctttaggggtctgagtcattagaagtctcctctagatcttttcatgtggtactgaagacagcagagagatgggaggaggttgaatctcatttttgtttgtttgtttttgagatggagtctcgctctgtcacccaggctggaatgcagtggtacgatctcggctcactgcaagctccgcgtcccaggttcacaccattctcctgcctcagcctcccgagtagctgggactacaggcacctgccaccacgcctagctaattttttgtatttttagtagagacggggtttcaccgtattagccaggacagtgtcgatctcctgacctcgtgatctgcttgccttggccacccaaagtgctgggattacaggcttgagccaccgcgcccagcccttgtttgttgttttgagagagagggtctctctgttctgcggtactgaaagaaaaataaaaaaatagacacagggtgttgctctgtcacacaagcgggagtgcggtgtgacatgattacagttcatctagccttgacacattstgggcttaaatgatcctcgacctcag

SEQ ID NO: 949536 - DNA, 652 bp, Homo sapiens
ccctagcagatcttcagagggaaggcattgagagcagatggaggaaagatacagaagcggggctgaagaggaaggaagctgagaaccatgtatggggctaccgtgcataccatgacttgttcctggtcccagtgactctgagggaatgggttaattgaataggcaaggaacagcccgctcttgccacaggcctctggaatcccagcagaaggaaagcccatgaccaccacagacacttgagctggcaatgagagctgcttagagaaatggtaggggcagaactccagccagtgcagagcccagaggatttggtgcgggaacatctgtagtggagcatgagcaggaatgcctgttcccctaggctcaacttgctcccaaaggagaatttatgaagaactgtcagacatgaactctgcagggtggacctgcccgagagggagctggtctgatctgagcatccttcagtctgctggcctctcctgaggccccagcctggatgcacctgctttcagcgcagcccagaggggaggtacctcctggggcctgcatgacagtgcctgtgctggcagacagtgtctgaccagcagagagctccagcacagcggcccacatggacatgtgccaggctgyccatgccctccccccacaaact

SEQ ID NO: 949537 - DNA, 617 bp, Homo sapiens
agggggagaagggggtagtgccacacacttttaaaccatcagatctcatgagaactcactcatgagaacagcaagggggatatctcgtcctcatgatccaatcaccttccactaggtctctccctcaacattggggattacaattcaacatgagatttgtgtggagacacagagccaaaccatgtcattccaccccagcccctcccaaatctcatgtccttctcaaatttcaaaacacaatcatgccttcccaacagtcccccagactgttaactcatttcagtattaattcaaatgtccaagtccaaagtctcatgtgagacaaggcaagttgctttggcctacgagcctgtaaaataaaaaacaagttaagctactctcaagatacaatgaggatacaggcattgtgtaaatagacccattccaagagagagaaatcagccaaaacaaaggggctacaggccccatgtaaatccaaaaccagcagggcagtcactaaatcttaaagcttcaaaatgwtcttctttgactccatgtctcacatccaggccacactgatgtaacggatggtctcccaagaccttgagcagctttgcccctgtggcactgcagggtac

SEQ ID NO: 949538 - DNA, 617 bp, Homo sapiens
agggggagaagggggtagtgccacacacttttaaaccatcagatctcatgagaactcactcatgagaacagcaagggggatatctcgtcctcatgatccaatcaccttccactaggtctctccctcaacattggggattacaattcaacatgagatttgtgtggagacacagagccaaaccatgtcattccaccccagcccctcccaaatctcatgtccttctcaaatttcaaaacacaatcatgccttcccaacagtcccccagactgttaactcatttcagtattaattcaaatgtccaagtccaaagtctcatgtgagacaaggcaagttgctttggcctacgagcctgtaaaataaaaaacaagttaagctactctcaagatacaatgaggatacaggcattgtgtaaatagacccattccaagagagagaaatcagccaaaacaaaggggctacaggccccatgtaaatccaaaaccagcagggcagtcactaaatcttaaagcttcaaaatgatcttctttgactccrtgtctcacatccaggccacactgatgtaacggatggtctcccaagaccttgagcagctttgcccctgtggcactgcagggtac

SEQ ID NO: 949539 - DNA, 593 bp, Homo sapiens
gtttagtcttgggagggtgtatgtgtccaggaatttatctatttcttctagataaaggtactgtctcctttgttgtttgccttccaaagagagctcccaagtctttcagaaatacttccctgggtcattaagctgaaaaaagatttagtttctcaaaaaaccaaagtttgccaggcatagtggctcatgcctgtaatcccagttacttgggaagccaaggcaggagaatcgcctgaacccaggagtaggaggttgtggtgaggcaagatcgtgccttgcactccagcctgggtaacaagagaaaaactccgtttttaaaaaaaaaaaaaaaaaaaaaaaaaaccccccttccccccccccccccctcaaaagtcagagaaaaatgcttttacaaattttctgagtgtgctaagaaaaagagacaaagggaaagaaaatctcttcctttatttttaaaggtttattttaaataaacctctcatttatttgcttgtttgtttgaaacagggtctagctttgtcatccagtctggagtgtggkggcgagatcagagctcactgcagcctccaactttttggcttaagcgatcctcc

SEQ ID NO: 949540 - DNA, 457 bp, Homo sapiens
aaaatattttttaaataatagtaaatatataccagaccacccacagcgtgatcaaacacctttctttggcagcatttgtgtagtttctaatacagctttaaaatatgytcataaagaattattaaatatcctttgtatttatattttatttagagcctggagaaggctctaaataaaaggtgagaggtgaatattttgagttaacttgatataagcaaggtttcacagattaactttgaaatataggatgacatggggctgggtgccatggcttatgcctgtaatcccagcatttgggaggttgaggcaggatgactatgacagcttgagcccaggagattgagggaaaaaaaaatggataacatggaatagttgagaaacgtgacatcatgaaaataaaggtgatttttctaaattttattgcaaacaaatttaaaggtatgaaagtgttgaaaaa

SEQ ID NO: 949541 - DNA, 590 bp, Homo sapiens
aataatgtcactgggctcacttgggctaaagtgggtctcccctttccttccctgccctccctctacccygaaactttccttaactactgaagatcaggccttcttggccccaacacagaaatccctgtggggtggggggcaaggagaactgttgtccactcctgtctgcaacaaaagaagagttcatttttggccaaatgaatgacaatgaatattagggtcttggactgccagaactccctgccagtggcactccctgggagagaaggcctgttcccacacccctctctccagctttctccacctggaccggatcagttgttctcccttactcccctctaggatccagaattcctggtttgactatcaaaagtaacactacttataattatttataggatacatcattgactctcacattcactttattataaaatttctttttctataacaactctaggtacttttattgttattaggccattgttccttactctttgttttcttgtattatcacatcagtcagcgaccaaatcctgttcattctaactgagatgttccccgatctgtcccctccgtattcttcatgt

SEQ ID NO: 949542 - DNA, 629 bp, Homo sapiens
gtttgttacataggtaaatgtgtgtcatgggggtttgttgtaccaattatttcttcaccaggtmtgtaagcctagtatccatttgttatttttcctgatcatctccttcctctcatccttcagcctccaacaggaaccagtgtgtgttgttcccctctatgtgtctatttgctctcatcatttagctcccacttataagtgagaacatgcggtatctggttttctgttcctgtgttagtttgctaaggataatggtctccagctccaaccatgtccctgtaaatgacatgatctcattcttttctttcttatggctgtatagtagaatgcctattttaaaacagggagatttccttttttcccctgtaccccagaattctcaccttaaccttaaaaacaaacatttcacaatgtctaaataaatatagtgaatgtcatctgttaatacttgaagctatttacggcaataagcatcacagcaacagccccaacatcatgaacgtgcagaccaaatgcattgctagaaatgtgttttcatttaatttactgagcccatatagactgtaactctaatgtaatgcaaatggtacaggttgagcatccttaatccaaaatccaaaatgcttcaa

SEQ ID NO: 949543 - DNA, 460 bp, Homo sapiens
tgagctagtcaatctcttcagtctggaaacgcaaarattaaggggaagagggcaaactctcaaagccttaaaggatacagtcaaggaagaacatgaacgcatgaaatttggacagttaaaatattgagagaggcaaattcaggatctataaaactaagttcagtttaccccttcctcgttcattcattcagtccacaaatagttgctgagcatctattacatgcctgaccctgtgctaggcaccatggatatagggggatcaggaaaaccaaagtcactgccctctggcacataaactctagtgggaaagacagttattaagctgatgtttttacagataaatatttactcagtttcatcaaatgtaacattccattaatttcaccattataatcgtaagtcaccattaattgcaagacacttgccagtttcagaaagattaaaatgtaaaataaaaaac

SEQ ID NO: 949544 - DNA, 705 bp, Homo sapiens
catggactcacaggcagcacatgatcagatggtactttcttccctaaggagctttgagatcactgggtaaacacccatctgcctgtgacagtttgcatatgtgcctgctcagtggatggggaaggaataggattggacccatgagcctcagaagtagaagaacaaagcaaaatgtttcggaatcaatagaacctagatcgctggctccatcatgcctggcctggcccttcatggatcctgaaatttagaaccttttcctacatatcccccatgattcctccttatgagctcaaatctcaatcacattggtcaactctttgtttgcctgattctctttccttccaggtcttagctagtgtgtttgtttctctttctattttcacatttccaggctacaatcatcttccaagtcttaggtcatctgctacttccaaatggaaacaatgcctcctctctctaaccacgtagtgccttaaacttctttaaagatgcttatcatgtgctactttgtgttccaattgtaacctgagggaattctggtgtcactagagggagtgctaaacaaacaaacaaacaaataggaagtctgactccagrgatagatgtttgtatttcttggtgcttccaatgcttccaccccacaccatgacccattctgcaccacttccctgaaaacatacactttttccctctcagtattttgga

SEQ ID NO: 949545 - DNA, 655 bp, Homo sapiens
aaatttcaagtgtacaatacaatattattaactatagtcaccatgctgtaatgctttaaaatactgtattttatttctctagctactatatgatttttttaaatttctttttttagaaagttcatttttagtatataaaaacactactgatatgttgttttgtatcctgcaactttactgagcttctttattagttctaacagtttttttgtggcgtctttagggctttttatatataaaatcatatcatctgcaaacagctacagttgcactacctactttctaattgggatgcgttttatttctttctcttgactaattgctctggctaggacttctagtactatgttaaacaagtgatgacattgagcatcttcattttgttgttgatcttagacatagcttttagtttttcaacattaaatttgatgttagcgcttggcttagacaagtttttttttaagttaaagtagttctaagattatagctgctcaaaacctaggaaaccagctatttaacataacggtattcaaaaccartagttacttgaaaaaggaaacactttgctattctgacagattaaattgtgctttattattttacgttgaataacttgtattttgatgctaagaatcacatattttctttgactttt

SEQ ID NO: 949546 - DNA, 553 bp, Homo sapiens
atgtctttaggaatattttaaggaagatatattttcaggaaactagaagtttgaatttttttcttccacaaatgaatatttgtgatctagaaaattattgagtcacaatcgttttccccaaatcattataaatattgcatcattactttctgacgtttaacaaaaaagcttttgcttgatttctttccctttgtaggctgtagattttttctgaaaaatgcttgcaagacattttttaaattcttgaaattaaaacaaattctgcaggatatttttactgtatagtctctttcaattgattctgcctgaattcactaagctctttcacatgcagactaaatgaaagcccatgaacgttttctattatgtttttcattatttcttttttttttggtatgtgtgtgtgagtatgtatgattgtttacacctattattcaaagcttcattctcacttctctgaatyttatatttatcatttcttcatatttcattgttttttttttttttttttttgagatggagtcttgctctgtcaccctttaaagcagtggca

SEQ ID NO: 949547 - DNA, 434 bp, Homo sapiens
ctgggaagcaagacaccaagtccctagactgcgcccagcacaggaaaactgggcctggcccacgaaaccatgttttcctcctaaacttctgggcctgtgaygggaagggcttcctcaaaggtctcttctgttaacataacctggagacattttccccattgtcttggtgattaacacttgactccttgttacttatgcaaatttctgtatccagcttgaatttctcctcagaaaatgggattttcttttctatagcattgtcaggctgcaaattttccaaacttttatgctctgtttcccttttaaaacagaatgcctttaacagcacccaagtcacctcttgaatgctttgctgctgagaaatttcttctgccagataccctaaatcatgtctctcaacttcaaagttccacaaatctctagggcaggggcaa

SEQ ID NO: 949548 - DNA, 709 bp, Homo sapiens
gacatttagcatttctcaatgcctaagattaaactgatgctttgaatactgatcatgcttttgagctgctcctcttgggtacttgtggcatcgtgttggcagaccctgagtgacatcttcagcggggggaaaacgaaatgtatttcactgggagtaagtagagcggacatttgagagtttgctgggtcccagacagtgttatgtgaatgaaagtgttggaaatgtaatctggatcctcagggaatttctgaagtgtcgggagaggagatttgatgagcagaagcaattggagaacagcattctagggtatagaagcaaactatcaactgtatggtgaagagctcactgagaactgggctaatggagcggcttcgtgcattcactcagtagcgattgagagacttctgggccagggctgggcgcacacggggatgaaatatggtcccttccctttccacacctgtgtggtaacaaggggctagattagcaaacaattaaaatccaacacgtcctactgtacaagtgtgagagaacgctggaggagaaggcggcgcgagctgagcccttaccacctgagtgaaggagaaggtgggtgtgagctgagcccttaacacctgagcaaaggagagaacgctggaggagaaggcggcgcgagctgarcccttaccacctgagcaaggagaggttctctgtgcttaggttaatttca

SEQ ID NO: 949549 - DNA, 595 bp, Homo sapiens
tgatggggttttctaaatatacaatcatgtcacctgcaaacagaaacaatttgacttcctcttttcctaattgaacaccctttatttctttctcttgcctgattgccctggccagaacttccaatactatgttgaataggagtggtctgaagaaaacctaggcaatgccattcaggacataggcatgagcaaagacttcatgactaaaacaccaaaagcaatggcaacaaaagctgaaattgacaaatgggacctaattaaactaaagagcctatgcacagcaaaagaaactcatcagaatgaacaggaaacttaaagaatgggagaaaaattttgtaatctatccatctgacaaagggctaatatccagaatctacaaaacctaaaaaaatttacaagaaaaataaaccatcaaaaagtgggcaaaggatatcaacagacacttttcaaaagaagacatttatgcagccaacaaacatatgaaaaaatgatcatcatcactggtcattagagaaatgcaaattmaaatcacagtgagataccatctcacaccagttagaatggcgatcattaagaagtcaggaaagaacagatg

SEQ ID NO: 949550 - DNA, 586 bp, Homo sapiens
aaatagtctaataatttgatattattattccccttctccctatcagattttactataccattactttttaaatctatttttctttctctttatatatttaattttttagtacacgctaaaactattttctaaatcaaagtcttggttaaaatccaagctctagctcattctagatgaaagacactagacaaattccttcacttatctgataatttccttatgagtagaagggaaacaatgataactctatcccatgttgtttttgtcttaagttagtgtttcttgaacttattgattttaatatcctttacacatttgaaaattattgagactaagaaatattgtttatatgaaatatatatatatatatatatatatatatatatatatatatatatatatatatttaccacattggtaatttgaactgagaaaatttaaaaaatatgtgtgtcttaatttatctaaaacaataataagcctgctatgtattaatataagatatattttatttaaaaaactgtrttttccaaagaaatagagagaagattggcattaagttacatttttggaagtatctttaaca

SEQ ID NO: 949551 - DNA, 586 bp, Homo sapiens
aaatagtctaataatttgatattattattccccttctccctatcagattttactataccattactttttaaatctatttttctttctctttatatatttaattttttagtacacgctaaaactattttctaaatcaaagtcttggttaaaatccaagctctagctcattctagatgaaagacactagacaaattccttcacttatctgataatttccttatgagtagaagggaaacaatgataactctatcccatgttgtttttgtcttaagttagtgtttcttgaacttattgattttaatatcctttacacatttgaaaattattgagactaagaaatattgtttatatgaaatatatatatatatatatatatatatatatatatatatatatatatatatatttaccacattggtaatttgaactgagaaaatttaaaaaatatgtgtgtcttaatttatctaaaacaataataagcctgctatgtattaatataagatatattttatttaaaaaactgtgttttccaaagaaatagwgagaagattggcattaagttacatttttggaagtatctttaaca

SEQ ID NO: 949552 - DNA, 579 bp, Homo sapiens
cattctgtgtcttttaattggggcatttagcccatttacatttaagrttaatcttgttatgtgtgaatttgaacctctcatcattatgctcactggttaattttgcagacttgttaatgttgttgctttatagtgtcattggtctgtggatttcaatgtgtttttgtagaggctggtaatggtttttcctatccatgtttagtgcttccttctggaaggccgggtggtggcaaaatccctcaggatttgcttgtctgaaaaagtttttatttctccttcgcttatgaatcttaatttggccaaatgtaaaattctgggttggaatttcttttctttacacattttgaatattagcccccaatctcttctgggttgcagagtttctgctaagagttcagctgttaatctgatgggcttccctttgtaggtgacctggcctttcactctttctgcccttaacatttttttcccttatttttaccttagagaatcggatgattatttgtcttggggtaggtcttttcatgaagtatcttattagggttctttggatttcctgaatttggatattggcctgtc

SEQ ID NO: 949553 - DNA, 618 bp, Homo sapiens
atgagggctaagtaaaagggttttcccttataaaaccatcagatctcatgagaggtattctctaccaygagaactgtgtgaaggaaaccacccccatgattcaattatcgctcaacaggtccctacctgtgggaattatgggagctacaattcaagatgagatttgggtgggaacacagccaaccataccattccacccctgccccctcccaaatctcatgtcctcacatttcaaaaccagttatgccttgccaacagtctccaaagtcttaactaatatcagcattgactcaaaagtccacagtccaaagtcttatctgagacaaggcatgcccctactgcctattagtctgtaaaatcaaaagcaagttagttacttcctagatgcaatgcgggcacaggcaaagggtaaatacagccatccaaaatgggagaaattggacaaaacaaaggagctacaggctccatgcaagtttaaaatctagtggagcagccaagtcttaaagctctgaaataatctcctttgactccaagtctcacattcaggtcacactgatgcaagaggtgggttcccatggtcatgggaagctccactccgtagctttgcagggtatagcc

SEQ ID NO: 949554 - DNA, 561 bp, Homo sapiens
atacaaagcatgaagtcatgtttccctcaaaaaaatgatttgttctgtagtcaaattaatttggaaaacattgcaaactcttcagcagtggttctcaaagtatagcttgygtcagaatcccctggggcccttgctaaaatctggatggctacactccccgcctagagtgggttaaactcagtgcccactggcaggaaactgaaacttggctgaagtcaccgaggaggccttccccgttaaacctctggctggcgacagcttggtttcctcgccgctgcttctgagtaattctggcacgcagttcctcctagccacctgctgtacctggaagggggccagccctcctcagcaggctttgctcctgccctgcacagcacaactgtggcgtaaaaaatggaaaagctggtagcagaaggaaagagcagggagacagaggttaggtgaacctcaatggcctcattaaagcaaattgagaaagagagtttccttcccagtgaggcgggacagtgcagaaatgcggcccgtcctgggagaagtaggggcgaggggtggggggctcac

SEQ ID NO: 949555 - DNA, 433 bp, Homo sapiens
acctttctactttctgtctccataaacttgactattctaggtgcctcatataagtacaatcatacaatagttgtcctttggtgtgtgggttatttcacttaggtgcacttagagttagcacttataaggatttccttcctttttaaggttgaatactattccattgtatgtctattctacatcatattttgttttgccattcatctgcggattgggttgtttacactgttcggctattgtgaataatgctgctatgaagatgggtgtacaggccgggtgcgggcacggtggctcatgcctgcaatcccagcactwtgggaggccgaggagggcggatcacttgaagtcaggagtttgaaaccagcctggccaaaatgacaaaaaccctctgtctactaaaaatacaaaacttagctgggcatggtggtacatg

SEQ ID NO: 949556 - DNA, 821 bp, Homo sapiens
tgttggagtttgccagaggtccagtccagaccctgttttcctgggcatcagcagtggaggctgcagaacagcgaatattgttgaagagcaaatgttgctgcctgtttgwtcctctggaagttttgtctcagaggtttacccggccgtgtgaggtgtcagtctgcccctactggggggtgcctcccagttaggctactcaggggtcaggacccacttgaggaggcaggctgtctgctctcacatctcaagctgtgtgctgggagaaccactactgtcttccaagctgtcagacagggacatttaagtctgcagaggtttctgctgccttttatttggctatgccctgcccccagaggtggagtctacagaggcaagcaggcctccttgagctgtggtgggctccacccagttcgagcttcctggccgcttgtttacttgctcaagcctcagcaatggtgggagccactcccccagcctcgctgccaccttgcagtttgatctcagactgctgtgctagcaatgagcaaggctccttgggcataggaccatccgagccaggcacgggatataatctcctggtgtgccatttgctaagaccgttggaaaagtgcagtattagggtgggagtgaccagattttccaggtgccgtttgtcacccctttccttggctaggaaagggaattccctaaccccttgcacttcctgggtgaggtgatgcctcgcctggctttggctcatgcacggtgcgctgcacccactgtcctgcacccactctccaacaatccccagtgagatgaacccagtacctcagttggaaatg

SEQ ID NO: 949557 - DNA, 629 bp, Homo sapiens
atgataagagaatgtggagactgtggatctgatgatcaggcttagagacagtgaagtgatttaagataataacatctttcctaacacaatgaaaatggaaagatttacccaaacccagacgaagtatttagaatgttggaaggaaacaaaaggtcatttgttttcttacacttgtactctatccacttcaagatcggaaacaaaaatgataaagagatattgctatgttgggtcatggagtctaaccccaaattacacactatctttgtcctgaacatgattcccttgttacggaactaaattcctaccggaagccaaatcacccttcagtagtaaattaagcactgaggaatacacatattttgttttacatcctggaagaatcccatgcccattgtgtgtatcgggggtgtgtttacatagtgggcttcaagcaaactctacaagattctgctcagctctgctccagatccttaccagacacccgagacccaacctgaagagctgcccgcatggtaggcctcaggccatacccacggcctctctagttttactcctgcagtgctgagygaaccttactaatctaactggcactgagctttgtgccagacctgggggtagtaacaagg

SEQ ID NO: 949558 - DNA, 623 bp, Homo sapiens
ttggcttgttgtttgcacaactcatcatattctgccttccaaaggaggtattgactgggctctaaagttgttttagctagcactgaccagtcccatggggtcacatggaagtagtctgctgtggtctcaattaatcctttcataaatgggctagtggcttctttttctctaatgcttttccttatctctttataagtattgccttgttgatcttgcatcaccgggcaggccaagagctccccttctcatgctgcttgcctaagacagggttccataactgtagtgtatcccttgtcttttttccgatgtgttcggggagggggctcagggaaaatctttttcgtcttttgtatctttacccggtaacagcagggctgagggaggaggaggaggtggtaaggtaggtgatggttcttcctcccttccctttataggctcttctgtgtagagtagggccaaagcagtcctaaggcccataacgttaaagatgtttactgggacccgttgccgttgtgcaggatgttgtttaagatttctccccacttgctcccagagctctaggtctagcgtaccttcttctgggaaccmtgggttacaggaaacaacagtttgcataagatccc

SEQ ID NO: 949559 - DNA, 760 bp, Homo sapiens
ttcctatcacaatagaacctctgacctgtacctcatggcacaacaccaggagagtcggcacagtgggcaggaamtaaaactcaacactacactaaaatggctagcaatgtgccaactacacatgaatattgcttcaaaccacatcaacatgtcccactgaaccaaaaaaatgtgcacctccacccaacctccccttggaagattcaagaaacaaccatggccacaccaacatcattggaatggggaaaagtggaacagaaagttggagtaaagagggataactttctttttttctttcttttctttcttttcttttttttttttttttttgacaagatgtgactccattgcctgggctggagtgcagtggcacaatctctgctcactgcaactccatgctcaagcaattctacaatttcagcctcccaagtagctgggactacaggcattcaccatcacgcccagctagtttttgtatttttgtatttttgtatttatttatttatttttttggtagaggcgggattttgccatattgctcaggctggtctcaaactcccagactccagcaatcctcctgccttggtctcccaaaatgttgggattacaggtgtgagctaccatgccctgccaagatagctttctaaaccaaaatatatatacttaatatcttatttaaaaaaaaccctcatggcacatatttctttacccactctcagatttttggatagaaagaaactatgtgaaggaaggaccctgg

SEQ ID NO: 949560 - DNA, 467 bp, Homo sapiens
cccttgtccccagcccccagtccccaggcctgcaacagcgttgtcagggcatttctggcctaagayattttatttttttttattttttatttttttttttttttgagacggagtctcgctctgtcgcccaggctggagtgcagtggcgcgatctcgactcactgcaagctccgcctcccgggttcacgccattctcctgcctcagcctcctgtgtagctgggactacaggcacgcgccaccatgcccggctaatttttgtatttttagtagagacggggtttcaccgtgttagccaggatggtctcgatctcctgacctcgtgatccgcccgtctcggcctcccaaagtgctgggattacaggcgtgagccaccgcgcccggcctaagacattttaaaacctgaaaggacctgccaacaggatgggtcatcccaccacaccacccaagcccatgcctcccagagtca

SEQ ID NO: 949561 - DNA, 588 bp, Homo sapiens
ctccaaaccccattttcaacactgggcacctcttccaaacagcaaataaacaaagaaatgtttgaattagtctgcactgtagaacaaatggacccaataagtattyacagaacatttcatccagtggctgcacaatacacattcttctcctcagcacatggatcattgtcaaggatagaccatatgttaggtcacaaaacaagtcttaaaacattcaaaaaaattgaaataatatcatccatcttctctgaccacaatggaattaaactagaaatcaataataggaggaactttgtaaactatacaaacacatggaaattaaaaaaatatgttccttaatgaccaatgagtcaaggaagaaattaagaaggaaattggaaaaaatcttgaaacaaatgaaaatggaaacacaatataccaatatccatgggatacaatgaaaggagtactaagaggaaaatttatagctataaatgcctacctcaaaaaagatgaaaaacttcaaataaataacctaatgatgcatcttaaagaactagaaaagcaagagcaaaccaaacccaaatttaatagaagaaaagaaataat

SEQ ID NO: 949562 - DNA, 713 bp, Homo sapiens
catttgttgacttgcatatgttaaaccatccctgcattcctgggattaaacccacttgatcatggtgtattatctttttgatgtgccatttgatttggttagctagtattttgttgaggatttttacatctatgttcatcagggatattggtctgtagttttctttctttttgttacatcctttcctggctttggtatcagggtgatactgacttcatagaatgaagaagaacaggttgcttccttgatgtggtgctgtcccccttgccctaggagtaggagtccctgagagccagactactgtgagtactgctgctcctctgggtctagctgcccagtggggttaccacattccaggctgattctggggaatgtctgcaagggatccagtgatgttatctgtcctcaagtctcccagcaatgtgtaccagcaccagctctcataggggtaacaggggaatgacatacgttgtgagattccttggttgtaaatagccgtagtgcgttggctttcttaaatgctggttgtagtattaataaactggtcatgtggacagactcaggacatcctggttagccagggtactgcagacagtgctgataactgggtcatgcataagttttytccttcttgggtgcaatgttattttacctgtagttgctgtagtaaactgtgtctgttggcctccagccaggaggtggtgcttgcaaaa

SEQ ID NO: 949563 - DNA, 713 bp, Homo sapiens
catttgttgacttgcatatgttaaaccatccctgcattcctgggattaaacccacttgatcatggtgtattatctttttgatgtgccatttgatttggttagctagtattttgttgaggatttttacatctatgttcatcagggatattggtctgtagttttctttctttttgttacatcctttcctggctttggtatcagggtgatactgacttcatagaatgaagaagaacaggttgcttccttgatgtggtgctgtcccccttgccctaggagtaggagtccctgagagccagactactgtgagtactgctgctcctctgggtctagctgcccagtggggttaccacattccaggctgattctggggaatgtctgcaagggatccagtgatgttatctgtcctcaagtctcccagcaatgtgtaccagcaccagctctcataggggtaacaggggaatgacatacgttgtgagattccttggttgtaaatagccgtagtgcgttggctttcttaaatgctggttgtagtattaataaactggtcatgtggacagactcaggacatcctggttagccagggtactgcagacagtgctgataactgggtcatgcataagttttctycttcttgggtgcaatgttattttacctgtagttgctgtagtaaactgtgtctgttggcctccagccaggaggtggtgcttgcaaaa

SEQ ID NO: 949564 - DNA, 598 bp, Homo sapiens
ctagagcggaactgaacctgagtcaggcacagaacaacttcaggctctgtacaagtttaggaagaacacattgtcgattaaaccggctcctgcctgggccatggatatgagcagagcaagatgagcacaggtggaaaagctgttacttcaaatatattttttttcattttcattgtttctgtcttctggtactccaataatttggtagttacacattttgaaattgttctacagttcttgtatatttttcctttatatttcagtttgggaagtttctattcatctatcttcaagctcagtggtacttctccggtgaacccatcaaaagcactcttcatttgttactatgttttttatttctagttttacttttgattctttcttagtattttcctttctcagcctttgtaactcatctgttcttgcaagttgtctgatttttccattagagtccttagcatttaatcatacttatttatttwttttttttgagacgcagtctcgctctgtcgcccaggctggagtgcagtagcgcgatctcggctcactgcaagctccgcctcctgggttcacgccagtctccagcctcagcctccag

SEQ ID NO: 949565 - DNA, 779 bp, Homo sapiens; identical to SEQ ID NO: 948400

SEQ ID NO: 949566 - DNA, 513 bp, Homo sapiens
ttttttttcttgagacctaagtgttttttgcatatttcaggtatcagtcatttatcaatgtgttttgcaaatatgttcctttagtggcttttcttctcwttctcttaacagtatttttgatagagaataagcatttacatttaattaagtccagtttacctaccttttatttcctggatcaggctttttgtcttatatgtaaaaagtcatcaccaaatccaagatcatttaggtttcctcctacatgttttgctaagagggtttttagttttttgttttgtggtcatgtcaactttttttttaacttttattttaggtttgggggtacatgtgcaggattgttatataagtaacttgtgtgtcatgggttttgggtgtacagattatacattttacatttagttgtatcgtttatttttagttaatttttgtgaaagtagtaagattattattatttttgaacatgtatgtacagttttccagcaccatttcttgaaaagaatatccttttcc

SEQ ID NO: 949567 - DNA, 608 bp, Homo sapiens
tatcaaggtcctttgcccaaattttaattgagttgtccttttgttatttagttgtacgtattctttacatattaaaatataaatcctttgtcaaatctgtgaccaaaaatattttgtgctattttgtaggctttttttaactttgtagtgtcctttgaagcacagaaatttttaattttgataaaatgcaatttatctaatttttccttttgtttcttgtgtttttcttgtcatacctaagaatctattgccaaatccaaggtcacaaagaatcacccctatgcttctactaaaagtttagttttagaacttacatttaggttttaagtctatttgttgaaaggattattttttccacattaatagtgttagcaccatttgggaaatagttttggcttgctaatggcccttagtggaaactgaatacttaaccatgaacctataagttttcatggaatctaagctatccatcataaactgtaaataatataygcaggccctgaaggcataattaagttacataaaacatggtccaaatgtccatagtccctattcttgctacattaccttctctattccatcctatacctatgtttgattggagtttt

SEQ ID NO: 949568 - DNA, 608 bp, Homo sapiens
tatcaaggtcctttgcccaaattttaattgagttgtccttttgttatttagttgtacgtattctttacatattaaaatataaatcctttgtcaaatctgtgaccaaaaatattttgtgctattttgtaggctttttttaactttgtagtgtcctttgaagcacagaaatttttaattttgataaaatgcaatttatctaatttttccttttgtttcttgtgtttttcttgtcatacctaagaatctattgccaaatccaaggtcacaaagaatcacccctatgcttctactaaaagtttagttttagaacttacatttaggttttaagtctatttgttgaaaggattattttttccacattaatagtgttagcaccatttgggaaatagttttggcttgctaatggcccttagtggaaactgaatacttaaccatgaacctataagttttcatggaatctaagctatccatcataaactgtaaataatatatgcaggccctgaaggcataattaagttacataaaacatgrtccaaatgtccatagtccctattcttgctacattaccttctctattccatcctatacctatgtttgattggagtttt

SEQ ID NO: 949569 - DNA, 629 bp, Homo sapiens
tggaatcaaatggaatggaattgaaggtaatggacgggaaaaaatggagtcgaaagcgttggaatggaatggaatggaatggattgtaatggactcgaatggaatggagtcaaatggaatggaatcgaatggaatggaattgaatggaatccaaagcaatagaatggaatggagtgtaatagaaagctatcaaatagaatggaatggaagggaatggactcgaatggaatggactggagtggaatgaactcgaatggaatggtgtcaaatggaatttaattgactgcagttgaattgaatggaatggaactgaatggaatctaaagatagagaatggaaaggagtgtaatggaaaaacatcgaatggaattgcttggaatggactcgaaaggaatggactggaatggaatggacttgaagggaatggactggagtggattggaatcgaatgcaatggaagcaattggaatggaatggaatggaatggaatggaatggaatggaatggaaaggaatagaatgaaatggaatcggttggaacggaatggaatggaatggagcagaatggaatagaatcgattgcaaggtcatygaatggactggaatggaatgaactcgaattgaatggac

SEQ ID NO: 949570 - DNA, 622 bp, Homo sapiens
tcacccagtggatcctgtgccagggctgcaggtggagctgcctgccagtggtgmgctgtgtgcctgcactcctcagcccttgggtggtcaatgggactgggcaccgtggagcagagggcagcgctcgtccgggagctccggccacaaaggagcccacggaggtggggaggctcagacatggcgggctgcaggtcccgagccctacccagcaggaaggcagctaaggcccggcgagaaattgagcatggcagttgctggcccaggtgctaagctcctcgctgcccgggctggtgggccggccggcttctccaagtgtggggtatgccaagcccatgcccacccggaactcgcactggcccgcaagcaccccggcagccgcggttcccacccgcgcccctccctccacacctccccacaagctgagggagccgctgcagccttggccagctcccttttggtataggaatgtttacccaactctatactcgcattatatcttggaagtaaattacttgcctttgattttacaagctcataggtggaaaggactcgccttgtctcagatgagactttgggcttttgagttaatgtggaaagagttaagactttggctgatatggtt

SEQ ID NO: 949571 - DNA, 614 bp, Homo sapiens
tctacatatattagtaataattattttaacaaagaataacttttcaatatttagataatagtatgatttgagcaaactgaaaaacaattscaataagaaaagcatttaattcttaagttgttagagaaaggatttggggcctgttacttctaatacaaccaattaattgggagaggtgtggatagctctcttctcctacctctttctttctttctacatatcatcataattttacaggtatttatatatgaaatgagtctgaatcaatttcaattattattttttcaatgcttaacttttgtcatttttgaatctttggccattagaagtcccttcatgtttgacagtgaccctttgacatgacatatgtctttgtgcatcccctttctttccagcaaaaagaaatgacagacttatggagtacctatgtttccccacatctgggattagacattacctctggggctctgggcccacaacctgggaactagatgaactaagtgttctcaaactctcattactttcagacatttcctgttgtgaaagttagaaagtatgtatcttaagaaaaacagtaatgaatttattctagtatgtcctattaaaatttgctg

SEQ ID NO: 949572 - DNA, 731 bp, Homo sapiens
tagttctttaaggcatctccacactgttttccatagtggttgtacyagtttacattcccatcagcaatgtagaattgttccttgttcactgcatccacaccaacatctactgttttttgattttttgattatggtcattcttgcaggagtaaggtggtatcgcattgtgcttttgatttcaatttccctgttcattagtatgttgaccattttttcatgtttgttggccatttgtatatcttcttttgagaattgtctatccatgtccttatcccactttttgatgggattgtttgtttttttcgtgttgatttgtttgagttcgttgtagattctggatattagtcctttgtcagatgtatagattgtgaagatttttctcccactctgtgagttgtctgtttactctgctgttttttttttcctgtgcaaaagctctttagtttaattaagtcccagaaatgtatctatctttgtttttattgcatttgtttttgggttcttggtcacgaaatccttgcctaagccaatgtctagaagagtttttacaatgttatcttccagaatttttatagtttcagctcttagatttaagtccttaatccatcttgagttgatttttgtataaggtgagagatgaggatccagtttcattctcctacatgtggctagccaattattgcagcaccatttgttgaaaagggtgtcctttccaaataaaatacttagga

SEQ ID NO: 949573 - DNA, 553 bp, Homo sapiens
aaaaccggtgtccgagaggttttgtctgcaacgtgtcctgctacagtagtcctagctactcagggggctgagtgggaggattgcttgaacccaggagttcaagactgcagtgagctatgatcaggctactgcactgcagcctgaacaacaggctccatctcttaaaaaaaaattttttttttggctgggcttggtggctcacgcctgtaatctcagcactttgggaggccaaggcgggcggatcacctgaggtcgggagttcaggaccagcctgaccaacatggagaaaccccgtctctactaaaaattcaaaattagctaggcgtggtggctcatgcctgtaatcccagctactcgggaggctgaaacaggagaatcacttgaacccgggaggtggaggctgtggtgagctgagatcgcascattgcactccagcctgggcaacagaataagctccgtctcaaaaaaaaaaaaatgttaattttaaaaagggggataaataatctaaatagacatttctccaaagatgagatataaaaggccaacaatcctg

SEQ ID NO: 949574 - DNA, 603 bp, Homo sapiens
aatctgtcgggaataatactagggagctacctttccctggagatgggtcttgtcagtggagtgagataggctggggggaggaagaggaatgggaggctcagtttataaatattaagatcagcaagggtgtgctgctggcaggagcagagggagcctggagatttgggtggctgccgttggtaagtggttgcaatccagagagtgggattgagttcctcccttgtcatgttagcatcccgtttcctgggcgcgggtctaatgccctgcaggtggtcatttcactcatggtggctttgtctctcttctgccatctccagactcagcttcgcactccagggctgcgtaccaccagccactgtcatgttaaccccttcccaggccaatgtgtccttggtctggagcccaatctgctggacagcctgggaccgtccattttcggggtggtgggcaacctggtggccatcgtggtgctgtgcaagtcgcgcaaggagcagaaggagaccaccttctacacagttatgcggctggytgccaccgacctgttgttcactttgctggtgagccaggtgaccatcgccatgtacatgaagggcgggtaacctg

SEQ ID NO: 949575 - DNA, 582 bp, Homo sapiens
gctgattgggaaactcttaaggttagtatctttatgtttttattcctcactattcagagtcctcagagattttcccatgtcccgactcatggatataggcctggcgaccagaattctggggctggcagcaaaaagaaagctgacactcttaacgttcagtatgccaacattcactcaatctcccccaaggtgtcactgccatcaagcatgtttgatgtcctctagttcagacacctcttactttaccctgtctagagaacacatttctgatcttccactaagttataggaggggcaatttttaaaaataaactttcaatactgttgttagcctcactctcccccacccctcccccactttctagaattatctggtactgtcaatttctgaattgtttagggttctgctgcataaactgggttgtttcttggctttctctattgctggctcaggattcagctttctcaggactsctaagtcagttacactcatccatctgctacccagattccaaaattttgttgctgttgtctcctctcccactctctttgtccttgtgggtttatgtctttaaaaaaaaaa

SEQ ID NO: 949576 - DNA, 762 bp, Homo sapiens
aatgaggaccccatcactggtggtgggtggagcatggacagcctccggcatgaggtagcagtccagttgttaaaactctcagctttgatgagctgggatggcacgacaatggaagacaatayatttgatggagcaactgaccacaagtacgtactggggtgggactataggactataactataaggataatggcttgaaaggctattgttaagcaccactgatattctagaaaacgttcctgaaaagctacaattgaaaggcaagtatgaaagccagaggaccttcctggtacctaacaaagaggctttcatgtcctgcagtgggaggacagagaaagctgaggcccaggctcaggacttcatagtaagagcagacaaactccagagaagttcagtcctcaaccaaaacagctctgttatgttaaagacagggtcctggagtgggaaaaatcaggcccacatttttggaatgagaatatctaggcagatgcttctggaattttgaattcccagattcctcggaattctccacacctgcaaaaaaaaaaaaaaaaaaaaaaaagtcctaaccctccctatgaaggtctaagatttaatgcagaagctgcttccccattagacaacatacaaccctttcaggatttgcccctgcctcctctcctgcccattaggcctgtaatagggctaagtcacaacataaccagtctgtgggcctgttacaggaggaaaggagctatatcccaaacaggctgtaagctctag

SEQ ID NO: 949577 - DNA, 841 bp, Homo sapiens
gcagttcctcaaaatcctaaacagaattggtttcttaggactgccgtaacaaagcaccacaaacttagtggcttagacaaagaaacatgctgtctcccagttctgcaggtgggaagtccaaaatcaaggtcttgscaggcacaatggatcatgcctgtaatcccaccactttgggaggccaaggcaggcagatcacttgaggtcaggagttggagaccagcctggccaacatggtgaaaccctgtctctactaaaaatacaaaaaactacccaggtgtggtggcaggtgcctgtaatcccagctactcagaaggctgaggcaggagaattgcttgaacctggagggtggaggttgcagtgagatgagatcacaccattgcactccagcatgggcaacagagccagactccgtcttgagaaacaaaacaaaacaaaaccgatatcaaggtcttggctgagttggctccttccacaagggaaggatctgttccaggctctcccagcttttggcgtacctggcttgttggtgccaccttctccctgggtgtccacaacatcctccctccatacatgtctacgtgtgtccacatctccctgttttagaaggacacaagtcatactgctttagggtgtgacattttaagttgattacatctgtaaagaccctccttatttccaaataacattacatgctgaggtactggtggttaggacttcaagtatctttttgggagtacataattcaaccctttacagcatttgatccagcaacacagtgaaaccccatctctacaaaaaatacaaaaattagccaggtgtagtggcacatgcctgtagtccc

SEQ ID NO: 949578 - DNA, 652 bp, Homo sapiens
agcaacaacttgttgctacaaaaaattcttaaaaattagctcctgctgctgggcgcggtggctcaygcctgtaatcccagcactttgggggccaaggtaggcaaatcatgaggtcaggagtttgagaccagccgggccaatatgatgaaaccccgtctctactagaaatacaaaaaattagctgggcatggtggcaggtgcctgtaattccagctactcaggaggctgaggcaggaaaatcacttgaacccaggaggcagaggttgtagtgagccaatattgcgccactgcactccaacccaggcaacagagactgtctcaaaaaaaaaattaaaaaattaaaaaaaaattagcccctgctactctggacactgaagaaggagttggaggctgtaatgagctatgatcgcaccatggtacatactccagcctgggtgacagagcgagagtctgtctgaaaacacacacacattccaaggtggcgataaaaccatctccttctatttgtccaccctaggagcaacctggtccccacagcacacaaaccctaggttctcctggctgaaagcatcggaggtgccactgcggatggtgaggaacagaaagttactaggggcgaggggacaagtgagaaggcagtgaacccagaact

SEQ ID NO: 949579 - DNA, 658 bp, Homo sapiens
ctcccaggtcaagagtcatccaagtcaagagctaaagaatgtgctggaggccagacgcggaggctcacgcctgtaatcccagtgctctgggaagccaggcaggcggatcacaatgtcaggagttcgagaccagcctggctaacatggtgaaaccccatctctactaaaaatacaaaaattagccgggcgtggtggcgtgtgcctgtaatcgcagctactcgggaggctgaggcaaaacaatctcttgaacccaggaggaggaggttgcagtgagctgacatcatgccacggcactctagcctgggcaacaactgagactccgtctcaagaaaaaaaaaagaaaagtaaagaatgtgctggaatctgctaggtggaagagaagggctatgctgggccctgtgctgggaaggacccaaagcactggtgagagaaggtagcatcgagagcgagtgacaggcaaacagaaggccccagggccagggtggggcttcctcgcaggaccatgcaggcagtatccgcgtttgcgcttccttctcctccaaccaagggaagctgggtctggggctaagagaagtgggagmagttctcttaggagggctctgcagcactgagaggggcctgaatcaacatcaaatgatttggcagggaaacggaagga

SEQ ID NO: 949580 - DNA, 555 bp, Homo sapiens
agcatcatgacagtttacaaatgccacagcaatgccaggaagttgccctgtatggcctaaaacggggcagaaccatcagttccaggaattgccttcccctttactggaaaacatatagataatccaccccttgcttagcatataatcaagaaataacaataaaaatagccaaacaacagccattagggctgctctgtctatggagtaaccacccttttatttttttactttcttgataaacttgctttcactctactctgtggactctgtggactcacccctaatttttctttcatgagatctgagaaccctctttccactaacataaagattgacaaccagctattcttaacttctccttacaattagagtactcagtaatcatataaattgtatgaacgcttccatagttaagtcataaccttattaatgcttattggcttcactggggagattaccctttgtaaagatgctcaaaagccagaaatatcagctattygcctcagctaaaatctggtaataatgagacagccaggtgggaagggctccctggca

SEQ ID NO: 949581 - DNA, 761 bp, Homo sapiens
tcacaatcatgacatgtctcatgaaagatgaaaggcatgtctcatgcggtggcagacaagagaagagaacttgtacagagaaaatcccctttataaaaccatcagttctcatgagacttattcactatcacaagaataggatgggaaagatctgcccccaggattcaattacctcccaccaggtccctcccacaacacatgggaattgtgggagctacagttcaagatgagacttgtgtggggacacacccaaactgtctcagtacctaaattaaaattacagaataaagaaggagcaatatattttgaaagggaaataaatctctggatccccaaatcactaagctaagggaaaatccaagctggtaactatgtcaggcaaacttgcctcccattttattcctaaataagatagctacaaagataaaatgctacattaactccctcacaatttgccagcaagataattccttgtggacaaaggacagaaaaaaactcaaagtcatccctctgaggctcgcctgttacaaatgcatgtctgattgcttcctctgccttattgtttatgtaaaaatgcagattcactgagccagactaaattgtgtattcggtggaaggctgatcaaggactcaaatgaatgcaaccttttgtctcttatctacttctgaactggacggcccccccgccttccagttgtctcacctttccagaccraaccaatgtacatcttgtacgtactgatagatgtctcatgcctccc

SEQ ID NO: 949582 - DNA, 604 bp, Homo sapiens
ctgtgaagacgtttgtatcccatgtgagtgctcaccaacaggtgacctcagcagaggaggattttaataatcaagtggataggatgacccattctgtggacaccactcagcctctttccccagccaccgctgtcatcaccaatgggcccatgaacaaagtggctatggtggcagggatagaggttactcatgggctcagtaatatggacttccactcgccaaggctgacctggctacagccactgctgagtgcccaacttgacagcagcagagaccaacactgagccttcgatatggcaccattccttggggtgatcggccagctccctggtggcaggttgattatactggaactctttcatcatagaaagggcagaggtttttgtcctcactgaaatagacacttactccagatatgggtttgcctatcctgcacgcaatgcttctgccaagactaccatctgtggactcacagaaggccttatctaccatcatggtattccacacaacattgcyactgaccaaggcactcactttatagctaaagaagtgcagcagtgggctcatgctcatggaatttactggacttaccatgttccccatc

SEQ ID NO: 949583 - DNA, 736 bp, Homo sapiens
tttttacaggatacatctttctgtgctcatgacttcaagggaaaataggctttcttcattctagaaagctccttcaaatcctcctttgaggaaattcatattcctgtctgtctagggaaagttgataactttgctctttgttctttcctgtatttccactgtgtgtgtgtgtgtgtgtgtgtgtgtgtgtgtctttggctgagttactctgaagtgaaggctgagacatggtttattgaagatggttctccttggagaagggcagcaagggaaacaggaggggctgagcaagcctgtggtctcaggtggggtctaacctcagccagacaccatggggagctctgaagcatgcattgctccacagagttgatctcactcttagtaagggaattatccttttgccctctgtcagtcaggtataatcctccatggagaggagggatggaaaggggttgctgtgacctctaggtcaggaggatttagcttggtctaggagagtggttctcaagaagtgacccatagactagcagaatcaatagcacctaggaatttgttataaatgctagttctcagaaatctccccagacgtactgaatgagaaactctgagaatggggtccagatctrtgagggttaacaagccctccaggtgattctgattcattataaaatttgagaaccactagttgaggtcaattccttggagaagggggtgtctctgagcatgtagcagtcat

SEQ ID NO: 949584 - DNA, 489 bp, Homo sapiens
tggataccatttcaggtgagatgggtttcttgaagacagcatacagttgaatcttgcttctatatccaacttgtcactctatgtcttctaattgggatactgtagccagctacattcaaggttaacattgatatgtgaggatttgatctgttattgtttttttagctagttcttatacagacttgattgtatagttgctttatagtgtcagtgggctatgtgcttaagtgtgtttttgttgtggccactaatgatctctcatttctatgtttagcactctcttgatgacctcttatgaggcaggtctagtggtaataaattcaattagcatttacttgtctgaaaatgattttatttctgtttttcttatgaagcttattttggctgaatataaaattcttcattcacatttttttctttaaggatgccgaatataggctccraatctcttctggcttgtaaagtttctacttaaaggtctgctgttag

SEQ ID NO: 949585 - DNA, 741 bp, Homo sapiens
gggcaatgcattaacaaaacatgacaggccgggcgcggtgacttatgcctgtaatcccagaactctgggaggccgaggtgggttgatcacctgagggtgggagttcaagaccagcctggccaacatggcaaaaccccgtctctactaaaaaaaatatataaaaattagctgggcatggtgatgcgcctgtaatcccagctattcgggaagctgagacaggagaatcactcgaacccaggaggcagaggttacagtgagcggagattgcgccactacactccagcctgggcgacagagtgatactgtctcaaaaaaaaaaaaaaaaaaaaaaacaaagaaacaaaacaaacaaaaaccacacaacattcagtactgaaatataaaaaataaccaacagtaagtgtcggttggaggtcagggaagaccaggatgggtttaagagcctgggaggcttccaggaagaggtggcatatgagctgcccctggaagggaggttagccttaggaggaggagaggaggagggcaggtggctgcctagggcacagggcaggcccatgtgcaaggctggaatgggccttggttccggagccagggaggagctgggcctggccggggcaggaggttggagctgtgataaggtccgataggtagggtggggaccrattgtggaggcgcttaaattccaggcttggcttttggactttaccctgcagacaatggggagccaccaacgtttctgag

SEQ ID NO: 949586 - DNA, 659 bp, Homo sapiens
aaaataccagagactgggtggattatgtacatggtgtttgtccaaaaggcagatagtgaagggttggaaggtgtgtgagttaataaccaacaaaaaccaaacgttttgttgtattaatttttttttaagtccccacattactttataaaataagacaaaaacagaacaaaagaaagcatactctgcagccaaagaatgaggctgaggcttcaccaccagaatttgcatgcacctttttataactctaaaagcagagacccacaggcgggaactttatagccaattagggtaaaccaaagacacaatttataaatttttattaatcttttcacatataacaacatattgtaactttataaaatgtttaatgtttcccaaagtgaaaactaattcaatccttagtaatcctaacatgtttttcttttttttttccattacgttagtggggtacaggtggtttttggttacatgagtaagttccttagtggtgatttttgagattttggtgcacccattacccgaacagtwtacactgcaccatatttgtagtcttttatccctctcccacctcctactcttcccgcccaagttcccaaagtccattgtatcattctcatgcctttgcatcctcatagcttagctcccacaaatcagtgaga

SEQ ID NO: 949587 - DNA, 591 bp, Homo sapiens
catttgacctgtcgatgttccagatgaaaggtgaaagctgttggatggagctacaattctggggtctggaggacagtggcccttttctcagctccactaggcagtgccccagtgaggactctgtgtggtggctctaatcccacatttcccttccacactgctctaggagaggttctccaagagggctgtgtccctgctgcaaactcatgcctggaaatccaggcattttcatacatcctctaaaatctaggcagcagttttcaagcatcagtttttaaattccatgcaccctcaagcccaacaccacgtgtaagccaccaaggcttggggcttgcaccatctgaagcaacaggccaagctgcaccttggccccttttagccaagactgaagctggagtggctgagacacagggcgccaagtcccaaggctgcacaaagcagtggggttttgggcccagcccaagaaccatttttcccttctatgcctctgggcctgtgatgggagtggctgccatgaaggtctctgacatactctggagacattttccccattgtcttggtgatyaacattttactccttattacttatgc

SEQ ID NO: 949588 - DNA, 644 bp, Homo sapiens
cttatcctgttttctttttcttgttttttgtttgtttgtttccttgtagaattttttaaattttattttaattgtaaattggyaaattataattgaatatatttatgggatacaaagtgatgttatgatttataaatacaacgtggaataataaatcaagctaattaatgtatttatcacctcaaatacttattcctttttgtggtgagaacatttaaaatttactctcttagttattttgaaatgtatgaaacactgttactatattcacactgctgtgcaatctatctcaaagaaaataaaaccatattgcttttgtctaattgaggcattgtactctttttttttgagatggattcttgctctgtcacccaggctggagagcagtggtgtgatctaggctcactgcaacctctgccacccaggttcaaatgattctcatgcctcccaagtagctgggactacaggcacccaccaccacacctggctaatttttgtatttttagtagtgacggggtttcaccatgttggccaggctggtctcaactcctgacctcaggtaatctgcccgcctcgacttcccaaagtgctgggattagaggcatgagccaccctgcccagcctgaggcattgtactttttagc

SEQ ID NO: 949589 - DNA, 603 bp, Homo sapiens
accttcataactaattgctttcaaaagaaaaataataaataaatatcactcactgtagccgttcccttaatttattcagaatttatccaaatcttgaaagataaggaggaagactcaactttaaaaagtgcagacccagtacaatccaactttgacctctattgaaactgctattgtggagatcagtgaccattaatttactaaatctattaatctattctcagttctcttcttaaatagcctaccaataatatttgacacagttaatcactctccactcttataaacacatttttcacttggattccaaaacagcatatcagttttgttttccatttacctttatctctcactaatatctcttcccatcttgtttcttggttcttattttgctccctaatatcttagcattgaagtgctcatagctcagttttagcgtttcttctctgttgacacatactattttgttcacattatttaaagcttatgatgcccaaagttttatatccatcctagaccactagtctcaaatcctggcttgtatattcaacttccaattcaatrtctccactgagtattaaaatatgtctcaaatttcatctc

SEQ ID NO: 949590 - DNA, 644 bp, Homo sapiens
aatttgcataagtaaaggggaaytgaatgttaatagccaagacaatggggaaaatgcctccaaggcgtttcagagacctttactgcagcccctcccatcacaggccaggaggcccaggaggaagaaatgctttcatgggctaggcccagggccccactgctctgtgcagccttgggacatggtgccctgtgtcccaactgttccagctccagccatggttaaaagggccccagacacatctcaggccactgctacagaggctgcaagccagaaaacaccaagatctccatgcggtgttaagccttcaggtgtgcagagggcaagagttgaggcttaagagccgccatctaggtttcagaggctgtatggaaatgcctagaagtccaggcagaaatctgctgaagaggcagtgtgcctagatgtccaggcttaagtctgctaaaggggcagtgtgctcatagacaacctctagtagggcagtgtggaaaggaaatgtgcatttggagcccccagacagagtccccactggggcactgcttagtggggctggaagaagagagccaccatcctgcaatcccagaatggtaggtccaccaacagcttgcactactcacatggaaaagccacagacactcaatgctagc

SEQ ID NO: 949591 - DNA, 644 bp, Homo sapiens
aatttgcataagtaaaggggaactgaatgttaatagccaagacaatggggaaaatgcctccaaggcgtttcagagacctttactgcagcccctcccatcacaggccaggaggcccaggaggaagaaatgctttcatgggctaggcccagggccccactgctctgtgcagccttgggacatggtgccctgtgtcccaactgttccagctccagccatggttaaaagggccccagacacatctcaggccactgctacagaggctgcaagccagaaaacaccaagatctccatgcggtgttaagccttcaggtgtgcagagggcaagagttgaggcttaagagccgccatctaggtttcagaggctgtatggaaatgcctagaagtccaggcagaaatctgctgaagaggcagtgtgcctagatgtccaggcttaagtctgctaaaggggcagtgtgctcatagacaacctctagtagggcagtgtggaaaggaaatgtgcatttggagcccccagacagagtcccyactggggcactgcttagtggggctggaagaagagagccaccatcctgcaatcccagaatggtaggtccaccaacagcttgcactactcacatggaaaagccacagacactcaatgctagc

SEQ ID NO: 949592 - DNA, 644 bp, Homo sapiens
aatttgcataagtaaaggggaactgaatgttaatagccaagacaatggggaaaatgcctccaaggcgtttcagagacctttactgcagcccctcccatcacaggccaggaggcccaggaggaagaaatgctttcatgggctaggcccagggccccactgctctgtgcagccttgggacatggtgccctgtgtcccaactgttccagctccagccatggttaaaagggccccagacacatctcaggccactgctacagaggctgcaagccagaaaacaccaagatctccatgcggtgttaagccttcaggtgtgcagagggcaagagttgaggcttaagagccgccatctaggtttcagaggctgtatggaaatgcctagaagtccaggcagaaatctgctgaagaggcagtgtgcctagatgtccaggcttaagtctgctaaaggggcagtgtgctcatagacaacctctagtagggcagtgtggaaaggaaatgtgcatttggagcccccagacagagtccccactggggcactgcttagtggggytggaagaagagagccaccatcctgcaatcccagaatggtaggtccaccaacagcttgcactactcacatggaaaagccacagacactcaatgctagc

SEQ ID NO: 949593 - DNA, 457 bp, Homo sapiens
aattatttgtatgttgaataaaataatgcacttaaaacaccatgtagaaattgtgaacattatgttgtaattattgtaaaaatattgtgagctattattcccagagtgaatagaataatataattcagggatggatgaagtgtgtctactccacactgcctacctagcctctctttataaacagacctctggtgtcctgagagctcaggtgactgctgtcagacatgggtacaaatctcttaacccagcttgtgaggccctttacagatgggctgcctgacctcgatagggataggcccatcttcttgtccctcctccttccctycttcccctctgcctatgttcaggcatccctgcgatgcccttctgtggctgggccctgcctccagggtttgaatgctctgctccctctgccaaggccatgccctgcccagctcatgctccctacaccttcctt

SEQ ID NO: 949594 - DNA, 622 bp, Homo sapiens
acagtggtatcttttggaaatcacaaggcaggtgaggaactactcctcctcctttcctgtgataagrgaggaaagtcaatagggggcttatctactttacctattgaagtaatctcccaagtagatcctatagtatgggacactaagattacaggcaaaatgttaaatgtttccccagtttacatccaacttaagcctatacccctggaagagacaataccccttaaagccagaggcacaaagaggggtccaaccattaatagctaagtttttgcaatttgggttgctaaggccctgtgagtctccttgtaatacgccagtcttaccagttaaaaagccaaagccaaatagagactataaatttgttcaagatcttcaaattgtcaatgaggctgtcattcccatacataatatagtgcccaatccctacttgccattagccgaggtccttggggatgccaattggtttacgatcttagatcttaagaatgcttttttttttttttttttttgcattccagtacacgctgattcacaattcattaagtggactgattctgatagtcatttagtttttcaattaacttgaacagttcttccttaggggtttagggacagtcct

SEQ ID NO: 949595 - DNA, 500 bp, Homo sapiens
ctatgcagtctgaaaagtcaattgaggtttctaaactcctactaaaggaaataattcctagacttgggctgcctaagagcttacagagtgataatggtccatctttcacagcaacaattacccaaaacatattttcagccttagaaattcaatactgccttcacttggagtggaggccacagtcttcagggaaagtagaaagagctaatcaaactctaaaaagaactcttgaggactaaatagcagctctgcacagagcagcatgcaggcttgcattgtgaattttagctccagatccactgcaagaacaaaccagcaatcctgagaggacccacagtccctctgaaggaagcagtgctcctgcaggacctgrgagaccccccaaatactgtgagtgccccaactacagaagtgggaaagggagactctcctctcccaaacacacgcccccactggagaagctgaagttctgtttgtgggagaactttccgactttacct

SEQ ID NO: 949596 - DNA, 812 bp, Homo sapiens
tgggctgagacaatggggttttctcaatatagaaaccatgtcatctgccaacagggaagtttgacttcctctcttcctatytggatgtcgtttattttttttctcttgcctgattgctctggccagaacttccaagactatgttgaataggagtggtgagagagggcaaccttgtcttgtgctggttttcaaggggaatgcttccagcttttccccattcagtatgatgttggctgtgggtctgtcatacattgttcttattattttgaggtatgttccttcaatacctattgagagtttttaatatggaaggctgttgaattttattgaaaggctgttctgcatctattgagacgatcatgtggtttttgtctttagtccgtttatgtgataaatccatttattggtttgcgtatgttgaaccaaccttgcatcccaggaatgaagcccacttggtcatggtggatcagctttcggatatgctgcttgattcagtttgcaagtattttgttgaggatttttgcatcaatgttcatcaaggatattggcctgaacttttcttttttttgttgtgtctctgccagaatgagttggggaggagtctcttcttctcaattttttggaatagtttcagtaggaatggtaccagctcttcattctacatctggtagaattcggctgtgaatccatctggtcctgagcattttttggttggtaggctatttattactgattcaattttggagttcattattggtctgttcagggattccacttcttcctggttcagtcttgggataatgcatgtgtcc

SEQ ID NO: 949597 - DNA, 633 bp, Homo sapiens
tctccataaattttataaaagtgtcctttacctctcacacacattccctccatatctggttgcaaactggacatgactggaagaagaagtaaaattatagctattggattgggacatacttgcttgtttgtttgtttagtaatagtgaaggaaacaaacaacccaggcatatgagaaaaaaaatattttacatctatggagtaagtgaggtattaatgatctttcatcaaaacctcttgtagccaccctcgttactaaaaacatgatgtttctctcctaaaccattgtaagtgtctagaatttaatggattcatggggtctgtctaattacaaccctcaaccccactgactctattttatgatagccatttcccttaatccttccaagaaatctgccaaaaacaccagaggatgaccccaactcctgaacctctcaggcaaaacctatcagtatctccagatgtcttccctattctcattcccagagccactactcaaccacacatgggttggacaaawgccacccagttggtggcatgaataaataggacagtttgggctgagtgccctcaggaaatccctccaaaaatcaggacttgactcaattattcaaattgaattaagaatctgaca

SEQ ID NO: 949598 - DNA, 633 bp, Homo sapiens
tctccataaattttataaaagtgtcctttacctctcacacacattccctccatatctggttgcaaactggacatgactggaagaagaagtaaaattatagctattggattgggacatacttgcttgtttgtttgtttagtaatagtgaaggaaacaaacaacccaggcatatgagaaaaaaaatattttacatctatggagtaagtgaggtattaatgatctttcatcaaaacctcttgtagccaccctcgttactaaaaacatgatgtttctctcctaaaccattgtaagtgtctagaatttaatggattcatggggtctgtctaattacaaccctcaaccccactgactctattttatgatagccatttcccttaatccttccaagaaatctgccaaaaacaccagaggatgaccccaactcctgaacctctcaggcaaaacctatcagtatctccagatgtcttccctattctcattcccagagccactactcaaccacacatgggttggacaaatgccacccarttggtggcatgaataaataggacagtttgggctgagtgccctcaggaaatccctccaaaaatcaggacttgactcaattattcaaattgaattaagaatctgaca

SEQ ID NO: 949599 - DNA, 591 bp, Homo sapiens
gatccatagattgcacagtgatctgagttacctgctcagccctgccggggggcagggcagttcagggagcaagatgggcagggccagattgagcaggcccrcatagaggtcccctaatgccagacacaagccccagcaccaaggcagaatctagcaggtggccatcaagcacctggtagtgtgcctagccacagagttgaggaatctcttggcctcaagttctctgcatggggaatggaggcaacctagactcctaactcaggggagggagtgctccagatgcctggagatctgtctgtgtgtggagtgtagagggccctgatgcaccacaatctccacacatggagggtgaggttattcagtctgcaaatccatgcaaatgtgtgctttgaattatttttatacaggtaaatacacctgaacttggggcagggaaggcggcactttaccacagtatgcaaaggaaggatgggccagctcaggctgctgattcaagcaagtggtcacactaaatgcctagagatctgcctggacatggagcagagaggatgctgcttcattataatgtctgtgcgggaaggatgggttagc

SEQ ID NO: 949600 - DNA, 638 bp, Homo sapiens
aatttgcataaataacgaggagctgaatgttaatccccaaggcaataggaaaaatgtctccygggcatgtcagaggtcttcccagcagcccctcccatcacaggcccagatacctagaaagaaagaatggaatcatgggctgggcccagggttcccacactgtgtgcagtctaaggacttgatgccttgcatccaagccacttcagccatgactaaaaggggccaaggtacagctcaggccatgacttcagagggggaaagccccaacccttggcagcttccatgtggtgttgagcctgtgggtacacagtagtcaagaattgaggtttgggaacctccgtctaggtttcagaggatgaatggaaatgtccagatatccaggcagaagtttgctgcaggggcagggctctcatggagaatttctgccagggcagtgcggaagggaaatatgtggtctgagccctcacatggagtccctactggggcatacctagtggagctgtgagaagagggccactgttctccagaccccagaatggtagatccaccaacaacttgcactgtgtgcctggaaaaaccacagacactcaacatcagcccatgaaagcagccaggagggagcctgtactctgcaaagc

SEQ ID NO: 949601 - DNA, 443 bp, Homo sapiens
tgtagatgtctttgttaattttctgtcttgtttatctgtctaatattgacagtggggtgttaaagtctctcactattattgtgtgggagtctaagtcacactgttggtctctaagaacttgctttatgaatctgggtgctcctgtatttggtgcatatatatttaggatagttagctcttcttgttgcattgatccctttaccattatgtaatgcccttcttggtcttttttgatctttgttggcttaaagtctgttttatcagagactaggtttgcaaccactgctttttttttttttttttttgctttccatttgcttggwaaatattcctccattcctttattttgagcctgtgtgtgtctttgcatatgagatgggtctcctgactacagcacaccaatgggtcttgactatccaatttgccagttggtgccttttaat

SEQ ID NO: 949602 - DNA, 443 bp, Homo sapiens
tgtagatgtctttgttaattttctgtcttgtttatctgtctaatattgacagtggggtgttaaagtctctcactattattgtgtgggagtctaagtcacactgttggtctctaagaacttgctttatgaatctgggtgctcctgtatttggtgcatatatatttaggatagttagctcttcttgttgcattgatccctttaccattatgtaatgcccttcttggtcttttttgatctttgttggcttaaagtctgttttatcagagactaggtttgcaaccactgctttttttttttttttttttgctttccatttgcttggtaaatattcctccattcctttattttgagcctgtgtgtgtctttgcatatgaratgggtctcctgactacagcacaccaatgggtcttgactatccaatttgccagttggtgccttttaat

SEQ ID NO: 949603 - DNA, 646 bp, Homo sapiens
  misc_feature 633, 634, 635, 636, 637, 638, 639, 640, 641, 642, 643, 644,645, 646: n = A,T,C or G
gggaccaaatctcgcttaaggaattcttcagaagttggcacagccaagtgcaacaccttcccatatttacatcttccacgtaatgttccatatttacgtcaacatttctcaggcacaaccacattgacatgcactcacaagcacaatgttaaaaaaggaaaagcaggccaggtgcggtggctcacgcctgtaatcccagcactttgggaggccaaggcaggtggatcacgaggtcaggagatcgagaccatcctggctaacacggtgaaaccccgtctctactaaatatacaaaaaattagccaggcgtagtggggggcgcctatattcccagctactcgggaggctgaggcaggagaatagcatgaacccagggggcggagcttgcagtgagccgagatcgcaccactgcactccagcctgggcaacagagcgagactccatctcagaaaaaaaaaaaaaaaagtaaaagcagccacaaaagatagcatgtcacttaaggtgtgggtgaggaagggacggtcccactaaatttkcctttctctcaataggagaaaggcagagggttggggggaaggaagtgaaagggagaaaatggattacaaatatatttttttcctgatcataaatatgnnnnnnnnnnnnnn

SEQ ID NO: 949604 - DNA, 578 bp, Homo sapiens
tgtgttttctaagtcttgtttaaaagtctgtctgtgctcctagcatataaaagttttctctgttttttgcttctattgacatattttttcacatttaagtctttaacctgtttagaatctcccttcgtatttgatgttagttaaggatctagtttgcatttctcaacaaaatgatgatattaggtaataatctggttactattgctccacacagccaatttcatcaacaccatgtactgaaaaaacatttaatttgtcaatggatttttcatgccttctttaatatatgttaaattctgatacataagtggttgtttctaaattattctattccactggtctgttagttcttgacctcaaacctgctaaaatcacatgttaattctgttaatatcaggcagggcaaatttcaatatactcttctttttttttaaggtttaatgtttttaaagttgacttttattcacatttaagcatcagtttttagaacatgtggaaaaagtattgaaaatataagaatatctaataaaaataaaamaacaaacaaaaaacagtaagtttatcatcttccttgaaag

SEQ ID NO: 949605 - DNA, 641 bp, Homo sapiens
aatttgcataaataacgaggagctgaatgttaatccccaaggcaataggaaaaatgtctccygggcatgtcagaggtcttcccagcagcccctcccatcacaggcccagatacctagaaagaaagaatggaatcatgggctgggcccagggttcccacactgtgtgcagtctaaggacttgatgccttgcatccaagccacttcagccatgactaaaaggggccaaggtacagctcaggccatgacttcagagggggaaagccccaacccttggcagcttccatgtggtgttgagcctgtgggtacacagtagtcaagaattgaggtttgggaacctccatctaggtttcagaggatgaatggaaatgtccagatatccaggcagaagtttgctgcaggggcagggctctcatggagaatttctgccagggcagtgcggaagggaaatatgtggtctgagccctcacatggagtccctactggggcatacctagtggagctgtgagaagagggccactgttctccagaccccagaatggtagatccaccaacaacttgcactgtgtgcctggaaaaaccacagacactcaacatcagcccatgaaagcagccaggagggagcctgtactctgcaaagccac

SEQ ID NO: 949606 - DNA, 593 bp, Homo sapiens
tgatttaaactttttagttcaccctccaatgaaaaggacaactccagtatgaggactcctcttcctttcttctaaatgttcccataaaagccttccaacttgtagcagactttggaacgtccccaactttgttggtatgtcttcccaggtagacccccaaatctggtttccaataaacctttatcaaattatttctacatcaacagcattaattttggttgaaaaaccaaattacaataatactggatagtttatttgcctacgtagttacttttaccagtgttctttatttcgtcatatggcttcaaatgagtagtgactagtgtctattcatttaagcctgaagaacttcctttagcattgcttgtaagcatgcctaatagtaaagaacttctttatctgggaatgtcttcatttttacttcgtccttgaaagttaatatttccaggtataaaatttgtggttgaaaggtttttttttttctttcaacaatttaaatatgtcatcccacygccttccagccttcatggttcctgctgagaaattgattatttattctgttttcaatccctcatatattataagtcaattct

SEQ ID NO: 949607 - DNA, 561 bp, Homo sapiens
ttgaataggagtggtgagagagggcatacttgtcctgtatcagtcttcaaagggaatgcttccagcttttgcccatttagtgtgatattggctgtggatttgtcataaatatctcttattattttgagatacattccatcagtacctattttattgagagtttttagcatgaaggggtgttgaattttatcaaaggctttttctgcatctattgagttaatcatgtggtttttgtaattgattctgtttatgtcatggattgtttactgatttgcatatgttgaaccagtctcgcatcccagggatgaagctgacttgatcatggtggataagctttttgatgtgctgctggattttgtttgccactatttcattgaggatttttgcatcaatgttcatcagaaatattggccttacattttcttattttgttatttccctgccaggctttggtatcaggatgatgcaggmcccagaaaatgagttagagaggagtccctctttttgtcttgtttggaattgtttcagaaggaatggtaccagctcctctttgtacctctg

SEQ ID NO: 949608 - DNA, 534 bp, Homo sapiens
tctggtcctgagctttttgttggttggtaggctattaattactgcctcaatttcagaactcattattggtctagtcagggattcagcttcttcctggtttagtcttgggagggtttatgtgtccaggaatttatgcatttcttctagattttctagtttatttgtgtagaggtgtttatagtattctctgatggtagtttgtatttctgtgggatcaatggtgataccccctttatccttttttattgtgtctatttgattcttctctcttttcttcttaattattctggctagtggtctatctattttgatattcttttcaaaaaaccagctcctggattcactgagttttttttgaagggtttttcatgtctctatctcattcagttctgctctgatcttagttatttcttgtcttttgctagcttttgaatttgtttgctcttgyttctgtagttcttttaattgtgatgttagggtgtagattttagatctttcctgctttctcctgtgggcatttagtgctataaattt

SEQ ID NO: 949609 - DNA, 596 bp, Homo sapiens
agtgaccaatggttgaaagtaaaaactaagaatggaasttaataattccttgaaataaatgtaatacaacatgccaaaaactatgggtcagagcaaaagcagtattgaagagccaattttatagcaatagatgcctacctcaaaaaactagaaagacttcatataaaaaagtcaatgctgcatctcaaggaactaggaaaacaaaaacaaaccaaactcaagattagtaaaatgaaataaataataaagatcagggcagaaacaaaactgagaacaaaaaagtacaaaaatcaaggaaaaaagatttttttggaaagataaaccaaaccaataaactactacctagactaataagaataaaagtgagaaaatgtaaatagaaacacaacaggaaatgccacaataaatatgaaagaaatacaaagaatcattagaaaccacaatgaacaactatatgccaataagttggaaaacctagagaaaatggatgaattcttggatatatataatttaccaagattgaaccaataaaaaacaagaaaacacagacagacctataacaagactgagtcggtaataaaaactctccgaaaaaa

SEQ ID NO: 949610 - DNA, 558 bp, Homo sapiens
ttaataatcaaccttctgaattttttttctggcaattcggagatttcatcttggtttgatccattgctagtgagctagtgtgatcttttggggatgttraagaaccttgtttttttttcatattaccagaattgtttttctggttccttctcatttgggtagactatgtcagagggaagatctggaactcaagggctgctgttcagattcttgtgtcccatgggggtgctcccttgacctggtgctctcccctttgccctagggatggggcttcctgagagccaaactgcagtgattgttagttctcttctggatctagccacccagtggagctactgggctttgggctggttctggggagtacctataaagagtcttttgatgtgattcatcttcaggtctctcagctttggataccaacacctactctggtggaggtagcaggagaatgaagtggactctgtgagagtccttggttgtatttttatatgtgttggtttttgtattttcatgtgtgttgcttttgtgttggctggcctccaggaaggaggtagcact

SEQ ID NO: 949611 - DNA, 717 bp, Homo sapiens
gataaaaagaaaagggcatcttctaagcttttctcttggctaggctaagaagtggttattacaggtcaaaraagaaaaacagataaaagaacagaaagttctttgacaattactgcttcatatttagtatgaattcctgggattcaaaatgaaagcacatagtaggtgctttataattgccaaataaactccatggctaagaatatgaaaaccagagtgagacccaaacagttttcaaatgtgatattcaaagtgcctcaggatgggaaaacagaagaggaaacctcaaccagtgttacattgattatcatacacattttgaagaataaaatcatggaaaatttaaacttaacttttgacataaaggtaaaattaaactcttacataaaagatacaacttacatggatcagaccagagaaatagtgccacaacattgctactttatgcctttcggaaaaggcataagggaataccagtatacatggtgaaatgaaatgcagacatcccaaaacacttcttttctgccaattgagaatgaccgatccgatgagctagacagtgattcttattaaatcaaacagcaggaatttcattttgctttgcccaggaagctggaagcagaaaacctgcccctccagctttcattctttatctaccctcctctagagtcttctccaaaaagcaactcatgaagaagcagaagtgatcactgggac

SEQ ID NO: 949612 - DNA, 691 bp, Homo sapiens
atataaaacaggaactatattatttacttttccatttctgtcctcccttgctttagaagagttttgaggtggagaacagtcatgtaatatatttatggcttgaattcattccattgstaggcaagattcaacactgttggatccctcaggataagtatccatgatacagacattgtttaagaatttgtaaaggtttttgagaaaaaatattttacatttagttttggaataatacaggtctgagaggctcacagagtccacttcccatttattttgccattattcctgtaacacaagtactagctaactagtgaaattttaacagaacaataaagggtaatttttttctctttgcactgtgtatgaaaaaaagagtacttgctaactaaaagaataatgtgaaaaaataaatagtttctaagtccttcaatctttgtatttgcttttgttttgcattttttattgatacatcatagttgtacatattttgggggtacatgtgatattttgatacatgtacacaatgtgtaataattgaatcacagtagtatcagtttagagatatgatacacaaccaaccaaatattcttatctcttcattaaagcaggcaggtcccagatgtttaattacaagtttgagttataacatagcattggtgttctgtttcacttctgtaacaatgtcccaaat

SEQ ID NO: 949613 - DNA, 621 bp, Homo sapiens
gatctgagtgcaatgaatttggcactgytcaggtggaaagtttgctcagccctaatgtttcattcagaattgtgtaagctcatcctattgagatgtctgtggtgttggctcttgtttcagttattaatcatcagtcttcttcaattagggcaaaaacaagatgaatttttttcttgcaaattgatgaggatgttctgccaccagggggttcatcttcaacatcatctagatccttcttaaaatgaattatttatttgtaaactgccaagttctttgagatcattgtgctcataaattttttgtaaggaactactcttctatctaagctttatcataaatttagtgtgtgtccttgcttcaattgcagcagaattcatattgctctgataggggctcttctcaaactgatgttttattcttagtgcctcacactagatcctgttcaggcacataataacaatttagtatgagtttattttggtcaaaaacttttgaaatccatatataatgttttgataatatgtattttccatgacctttttgaagacccttcatatatatgtgtgtaaaatctccatactttgaacatatattatgattttctcctagtgtgttcaactg

SEQ ID NO: 949614 - DNA, 573 bp, Homo sapiens
ctgcaagctccgcctcccgggttcgcgccattctcctgcctcagcctaccgagtagctgggactacaggcgcagccaccacgcccagctaatttttcagtagagacggggtttcaccgtgttagccaggataaggcctcacctcatgtatttgggacttgaaaggaagcctgtgcaagcacatggttaatacaatttattacccacattccataccaccagccactctttctacctgctctgtattcctagaaatgcatatcctgagaagggcacacagtgaattcatttctatatttattgatgacttttgattacgtatgcagagcagtctgttgtcttaataaaattggaaaaccagatattttttaatttgggtggtgagtcatctaccatattaagcagttaatatacataaccataacaagtaggattggtattatgcataccaaagtagagactaagctgcttatgccacggaagcagagagaagagaggratgaatgaagcccaaagaattgaagggagaaagataatagagctacaacgattgagaaagatgggtatttgtggc

SEQ ID NO: 949615 - DNA, 758 bp, Homo sapiens
gatgtaaaaatatatccaacttcgacagaaattttgtcctcttgccagagtttttggagtgtctagtaaataactggggtagagaatgttatgtgtagcaatgtctaagagggaaaggaaaaaaatatcgttgttagtagggggaactgagaatgacacaacagcttttcaagtcttctagaggttcacaagtgtaggtcattgtgttttcttctggtgtgtgcagggactcataagaaacaggtttaactctggacagtcgtacccctctagtgattccctgaagtttaaatgtagtagggagattgaacaatacttgataggggatatcaagcaggggatatggagcagcataggaggggatcacccaggatgtccagcacagtttcttggtgcctggacataacatgagccagacacattctacatgtgtccctcaagtcaggatcttggtagaaggccataaaagcctgaacataagggacctctccccatttttgttctcctttacggaagtccaattgtaaagtagtgttatagtgcaaagaaccattttcaggccaaacttcctggtctttcagtttgtaatggacccagggaatattcgcctagagagtaagtttatttttcctttgaccatcgcatttgaatttattccagttgcctaaaaggcactctagttatkagtccttcaaaatggtagctgttgttcatttttgacaaggaattttactaaacacagggattgttccgagttt

SEQ ID NO: 949616 - DNA, 772 bp, Homo sapiens
agctgtcatttaggggcatttaggaaggcagatggccacgtcttggtccaaaattgatgccataggttgagagttttctataaaggaatcttggacttacatgacaaaaaaaataaaaaaggataaacagtagttatcactgcattgtatttcagaaacagagtatttcaggagttgagaagaaaaggaaggcaaaatgatctatttggtaccaagctcacctgtgtgccctccaatctctctggctctctcttctctgtctctttgtccttgtctctgtctgtctgtttctctctctgtatatatattcgtactcacaccgacatacacatgcatatatatgcaagatttattatttagttatcacagaaaccctatgagttaagcatttaagtaacttaattctatctagaaatggaggcttaaattgttattataactcatgcaagtttctatagatattaagtggcacagtaagaattaaagctatctatctacttatgtctatttatctatccatcatctattgattatatatcagtcattgtctctctctctatatatatacrtatatattttatatatatatatatgtatatatcaatttttatcattggtcttatttttacaatctagcccactgcctggcacagatcaacagatcaagcactccatgagttgtattcaccaagtcctgctctgacccccaccaccatgcccatgctcttcccccatgttcttttcaccacatccctgtgtctcaacatttctg

SEQ ID NO: 949617 - DNA, 554 bp, Homo sapiens
caaaactctttctttgcattcaggcagagagaagtctggagctccagcctcagttttttactcagggacatatgtgaagtgtcatctcatttcctccccccatgataaaaaaaatggggcagttatgcaacaaatcaactttgtgctatttccaggtacatgagactgtccatgagatgtgttttgaatgccaaacaccgaatatatagttattttttaaagctttgttgagatataactgacaaacaataaactgcacaaaataaagtatacaaattgatgttttgacatacgtatacatctgtgaaatcatcattatccttaagatagcaaacatatttttcaccgttccaaaatattttttgcactgtatttatttgaaatttccagctttattgtgatatacttatgaaaattataagggttcartgtatacaatgtaatgattggatacacatgtatactgtgaaatgattcaccacaatcaaatgagttaacatatttattacccaaggtcattgcttccctttttgttttattctgtttttggtgag

SEQ ID NO: 949618 - DNA, 634 bp, Homo sapiens
ggctgagaagaatgtatattctgttgatttggggtggagagttctatagatgtctattaagtctgcttggtccagagctgagttcaagtcctgaatattcttgttaattttctgtctcgcactaatactggcagtgcggtgttaaagtctgtcactcttattgtgtgggagtttaagtctctttggacgtctctaagaacttgctctatgaatctgggtgctcctgtattggatgcatatatatttagaatagttagctcttcttgttgcattgattcctttaccattatgcaatgcccacctttgtcttttttgacctttatcggtttaaagtctgttttatcagagactagcattgcaacctctgcttttttttggctttccatttgcatggtaaatcttcctccatccctttattttgagcctacatgtgtcattgcacatgagatgggtctcctgaatacagcacaccaatgggtcttgaccctttatccaatttgccactctgtgccttttaattggggcatttatccagtttatgtttaaggttaatattgttatgtrtgactttgatcctgtcattatgatgctagatggttattttgcccattagttggtgcatttttttcatagt

SEQ ID NO: 949619 - DNA, 614 bp, Homo sapiens
gggctgccaatgcagacaaaggatgcatttttatttttatttttcattttttttgagacagggtctcactctgtcacacaggctggagtgcagtgatstgatcacagttcagtgcaacctcaacttcccagtctcaagtgatcctcccacctcagcctcctgagtgtaggactacaggcatatgccaccacacctggctaatttcctttattttttgtagagttgaggtctcgccatgttgcccaggactcgaactcctgggctcaagcaatcctcccgccttggcctcccaaagtgttgggattacaggcatgaaccgctgtgcccagccaatgatgcatttttaaactgaagttttcatcactgcattataatgtggccaatccactcacctgaattttccaccaaatgcaaataaagacaatgagaaggtaatagttctgcataacatgatgcaactaacatgactcaactgtcctaaatacaacccaaaacgcattaattccttccctagaattcagctttctaagatttccaatttcaggattttgatctttcaggattacgatttttggaattttagatgttagatattttagactctagggatttta

SEQ ID NO: 949620 - DNA, 673 bp, Homo sapiens
gattttgtcaaatgctttttctgcatctattgagatgatcataagatttgtttttaattgtttacatggtgtattcatttattgacttatktatgttaaaccatccttgcatccctggtatgaaacccacttgatcttcgtatattatattttcgatatgctgttggattcagttagctagtattttgttgaggatttttgcatctaagttcatctaggatattggtctgtaattttctttttttgttatgtcctttcctgattttagtattagggtaatcctggcttcacagaatgatttagggaagatttcctctttatctttttgaatggtttctgttagattggtactttttttttttttttttgaggcaagctctggctctatcacccaggctggagtgcagtggcataatctcagctcactgcaacctctgcttcacaggtccaagctatcctcccaccttagcctcccgagtagctgggactacaggcgcatgccaccacgcatggctaatttttgtattttttgtagatgatgggtttcgtcatgttgcccaggctggtctcgaactcatgagctcagtgatctgcccatcttggcctcccaaagtgctgagattacaggtgtgagccacagtgcccagcccaattcttctttggatgtctgata

SEQ ID NO: 949621 - DNA, 719 bp, Homo sapiens
agaacggtggaatggccttttgaagtcacaattgtaataccaactaggtgacaatactttgcagggctggggcaaagttctccagaaggctgtgtatgctctgaawcagcatccaatatatggtactgtttttcccatagcaaagaatcatgggtccagggatcaagaggtgaaagtggaagtggcaccactcaccatcacccctagtgatccactagcaaaacttttgcttcatgttcccacgacatcacgttctgctggcctagagatcttagttccagagggaggaacactgccaccaggagacatgacaatgattccactaaactggaagattgccacctggacactttggggtcctcctacctttaagtcagcaggctaagaagggagttacagtgttggctggggtgactgacccagactatcaagatgaaatcagtctactactccacaacggaggtaaggaagagtatgcatggaatacaggagatccattggggtgtcttagtattaccattgcctgtgattaaggtcaatggaaaactacaacagcccaatccaggcaggactacaaatgacccagaccgctcaggaatgaaggtttgggtcactccactaggaaagaaacacgacctgctgaggtgcttgctgaaggcaaagggaacacagaatgggtagtagaagaaggtaggcatcaataccagctacaaccacat

SEQ ID NO: 949622 - DNA, 593 bp, Homo sapiens; identical to SEQ ID NO: 949606

SEQ ID NO: 949623 - DNA, 625 bp, Homo sapiens; identical to SEQ ID NO: 947348

SEQ ID NO: 949624 - DNA, 490 bp, Homo sapiens
tttgggtggctgcagcccygtccaggagggtggggctcctgcctgctccttagagagcaggaggcctgggtctgcagtcacagtttgggtggttgcagcagcactggggagctccatgaagtgtgcagccccagccacaccaccctgctgcatctgctgccatcactatcatgaactgtgcatttgagggatctaggttgtgtgcttcttatgaaaatctaatgcctgatgacctgtcattgtctcccatcatccccagatgggaccatctagttgcaggaaaacaagctcagggctcccaatgattctacattatggtgagttgtataattatttcattatgtattacaatgtaataataatagatataaagtgcacaataaatgtaatgcacttgaatcatcctgaaaccatcctcccctcccccaaccctgatctgtggacaaattgtcttccatgaaactggtgtttggtaccaaaaaggttgcag

SEQ ID NO: 949625 - DNA, 567 bp, Homo sapiens
cattccctgctgagcccagcacttcaattctgcctctattgaaagaaacttcccaccagtggaacaatctaatccttaagacctgccatctggaytctttattcacacagggtgttcccttgatgtggcacactctccctttccttaggagtagaagttcctgagagacagactactatgagtgctgctgctcctcagggtctagccactcagtggctccagactagtgctgggggatgtctgctaaggatccagtgatatgacctgtcctccagttttccagcagctgttatcagcaccaggtctgatgggggtgccagaggcgtgacatagacctgtgagattccttgattatagataactttagtgtgttgtctttcttgaatgctagttcaggtagtaataaactggtcatgtggatagactcaggacctcctggttagacagggtagtgcaggaagtggtaatagctgaggtcacacagtagttttgtccttcttgagtgcagtgttattccacctacagatgctgcaatggactgtgttggtaggcttccagctactgggt

SEQ ID NO: 949626 - DNA, 665 bp, Homo sapiens
tcttttacacggcgaaaatggaaacaatcagaggagaccttccacatgtggttcccatcacttcttccaaacctgcttgcatcttcgcctgtgtcccctcatccattctgtcctctgaggaactgtccatgggtctgtccaaggcacagccctcctgttctacactaggtcccaggatctcacatctactcaaggagatcactctagcaattttactctagccattttggagaggctctctcttcctgtttgtttttttttttaatttttttaatttttatttatttatttatttattttagatggaatcttgctctgtcacccaggctggagtgcagtggcatgatcgtggctcactgcaacctccacctcccgggttcaagaggttttcctgccttagcctcccgagtagctgagattacaggtgtgcaccaccactcctggctaatttttgtatttttagtagagacggggtttcaccatgttggccaggctggtctcaaactcctgacctcaaatgatccacgtgcctcggcctcccaaaatgctgggattacaggcatacrtgatgacgcccagccaaggctctctcttcttcctcctgatcaatttatgtccatcagtatataaatatgctttatttctatattaaaatactttccctt

SEQ ID NO: 949627 - DNA, 580 bp, Homo sapiens
gtaccacattttccttatccagtctatcattgatgggamtttaggttgattccatgtctttgttattgtgaatagtgctgcaatgaacatatgtgtgcatgtatctatatagaataatttacattcctttgggtatatattcagtaatgggattgctaagtcaaatgatatttctgtttttaggtctttgaggaattgccacactgtcttccacaatggctgaactaatttacattcccatcaactgtgtataagtgttcctttttctccacaaccttcattttctatattttcattggaatataaatttcatagagcaggaaccttgtctatcttgtgtccaatgtatacccaagagctacagcagtgcctggcacatagaaagtactcagtatttattgaatggatatatacttagataataaactattgtcctatgtagtaagttcatgtaatgtttctttgaaactattacctattgatatggttttgccctgtgtccccacccaaatctcatgacgaattgtaatccccatgtgtcaagagagggacctggtatgaggtaattgtatcggggggc

SEQ ID NO: 949628 - DNA, 645 bp, Homo sapiens
gtctgcacacatttggcagggtttgacgtgtgccgtgtgtctgagtgtgggtccgcctgtgtgtgtggtacccacacgtgtrttggggccattgtggtgtggtatctgcacacctgtgtggcaggggctcgtatgtttagctgcatgcacacacacctctgtggtgtctgcataagtgtatggctaaagtttgtgtgtgtgtgcccctgcacatacatgtgcacctgtgtgtgatacctgccatctgtgctggcattttctgtgttgcataccctggtgtttgtggctgcacaggtgtgtggtagggcttgtatgtgttgtgtgtctgtgtatacatgtacgtgtgcaggagctagaaagtgttcaccttcgtgttaactgagataatagatatgtatgaaaggaggttaattggggtcacccaacattcattgctcccttccttcttccctccctgccttcctcctttccacagtgtggccacattagccaccaacagggcccaggaggagacctgagccatgtcccctactggtggccccacatgtggtgactccagactataggctctaggcagaagcaggaactgtgttgtggtatagctcttccaccaccccttctcaaccatggggtctcagaggggac

SEQ ID NO: 949629 - DNA, 575 bp, Homo sapiens
ctttaaaagtcaaaatgaggtaaatcaacacaaaacaaatgcaagcttctttctagacctaacccrgtatccttcactatcggtgtttctctgctctgtttaacagaacatatctcaaaagaacgtcctgcacatgctattcccatttccttgcattttgaccaccacgaatctattaaaatggctaaggcacctcgtgacctccacataaacatatctaaggggcccttttcagtctctgtcttctcgacctctcagcagaatgggatgcatttgattgttctcattatctttgacactttcttctcttggcttctccgacacctcagtcttagcttttagattgttaaagcaaactaaatatggcctgagaaggactccatacttctatatttgagtccttgtagacaaatcgtaacatagcttaataggcagacaagattgaaaacctaatttaagactatacacctgtaatgatagctgtgtcttggccaatcccagcagccatacttcaaccactcacagactgctgagtgttcaaactgtgttcaaataaggcaaaggccaacctgtaa

SEQ ID NO: 949630 - DNA, 587 bp, Homo sapiens
aaaacctggcagacacacaacaaaaaaaaaaagaacttgaagccaatatccttgattaacattcatgcaaaaatcctcaacaaaatacttaaaaactgaatccagtaacaygtagtaaagctaatccaccatgatcaagcaggctttttccttggcatgcaaggttagttcaacatatgcaaatcaataaacatggttcattacataaacagacctaaaggcaaaaaatcatatgatacaatagacacagaaaaggcttttgatgaagttcaacatcccttcatgttaaaaattctcaataaactatgtattgaaagaacacacctcaaaataataagagccatctatggcaaatccactgccaacatcatactaaatgggcaaaagctggaagcattccctttgaaaacaggcacaagacaagaatgcccactgtcatcactcctattcagcagagtattgaaagtcctggccagagcaatcaggcaagagaaagaaatagtgtatccaaataagaagagaggaagttaaactttccctatttgctaatgacatgatgctatatctagaaaaccttatagtcttag

SEQ ID NO: 949631 - DNA, 601 bp, Homo sapiens
aaaacctggcagacacacaacaaaaaaaaaaagaacttgaagccaatatccttgattaacattcatgcaaaaatcctcaacaaaatacttaaaaactgaatccagtaacatgtagtaaagctaatccaccatgatcaagcaggctttttccttggcatgcaaggttagttcaacatatgcaaatcaataaacatggttcattacataaacagacctaaaggcaaaaaatcatatgatacaatagacacagaaaaggcttttgatgaagttcaacatcccttcatgttaaaaattctcaataaactatgtattgaaagaacacacctcaaaataataagagccatctatggcaaatccactgccaacatcatactaaatgggcaaaagctggaagcattccctttgaaaacaggcacaagacaagaatgcccactgtcatcactcctattcagcagagtattgaaagtcctggcyagagcaatcaggcaagagaaagaaatagtgtatccaaataagaagagaggaagttaaactttccctatttgctaatgacatgatgctatatctagaaaaccttatagtcttagccgaaaagcttctt

SEQ ID NO: 949632 - DNA, 568 bp, Homo sapiens
tacacatatacacatctatgtttctgcacataaatacacacaaaacaaagtacttaaccttggtgctgtgggctttctgctgtcaattccatccctgaaggtgaccagggctctttcacaratttttacctgtattgttatgctataagcttattgatccctcatcagccacaaatacactagcctccctggctgtgtaatataggtgagagtttcataagtgtgttcacatatcactggtggcaggtgaagccatcttcagtggtttgtgagcaaacattcttttcattatcacaattttccattgtttttcctgtataattgaaaagatataagtagctcatccaacctagataccattaacatgattgcttaggacaaggcagcaataggtaacgctacgaggcttacgttgatttgaagatactagtaggcagttaacaggtggtagatggtaccctttggagtcatgaacatggagtgcctatgctgtgccaatcgatggtatgtgcgtattagtctgttctcaccctgctaataaagatatacctgagaccgggtaatttac

SEQ ID NO: 949633 - DNA, 553 bp, Homo sapiens
tgcttggtctctgccctgtggctgagaatctgactggtggaaagctcagagtcactgtctgggacttgcaggcaagtttaattctggaggcaattatagcaaacacgcttgatatcagatctgaagccacagtmacaaatggacttttcagtttataatgatgatgctttgacctccaaaagtctgactcataaattcatctctcaatggtttcaaattcaattgggagataggatatttttccccaaatacagcaatagatacagtattgtaaatttttattattatttaaacttttattttaggttcaggagtacatgtgcaagattgtcatgtaggtaaacttgtgtcacaggggtctgttatacagattatttcatcacccaggtactaaatctagtacccaatagttactgatcctctccctcctcccacctccaccctctagcaggccctgtgtctgttgttcccctctttgtgtccatgtgttctcgtcacttaactcccacttataagtgagaacatgcaatatttggttttctgttcctgtgtt

SEQ ID NO: 949634 - DNA, 553 bp, Homo sapiens
tgcttggtctctgccctgtggctgagaatctgactggtggaaagctcagagtcactgtctgggacttgcaggcaagtttaattctggaggcaattatagcaaacacgcttgatatcagatctgaagccacagtaacaaatggacttttcagtttataatgatgatgctttgacctccaaaagtctgactcataaattcatctctcaatggtttcaaattcaattgggagataggatatttttccccaaatacagcaatagatacagtattgtaaatttttattattatttaaacttttattttaggttcaggagtacatgtgcaagattgtcatgtaggtaaacttgtgtcacaggggtctgttatacagattatttcatcacccaggtactaaatctagtacccaatagttactgatcctctccctcctcccacctccaccctctagcaggccctgtgtctgttgttcccctctttgtgtccatgtgttctcgtcacttaactcccacttataagtgagaacatgcartatttggttttctgttcctgtgtt

SEQ ID NO: 949635 - DNA, 567 bp, Homo sapiens
ggatcacttgagatcaggagtttgagaccagcctggccaacatggtgaaaacccatctctactagaaatataaaaaatagctgggtgtggtggctactcgggaggttgaggcaggagaatcacttgaacctggggggtggaggttgcagtgagccgagatcgcaccattgctctccagcctgggcaacagagcacgacgccatctcagaaaaaaaaaaaaaaagatcattgcctaggcacatagtcatcaggttatctaaggtcaagatgaaggaaagaatcttaagagctgtaaggcaaaagcatcaggtaacctataaaggaaattagattaacagcagatttctcagcagaaaccctacaagcctgaagagactggggtcctatctttagcctccttaaataaaacaattatcagccaagaattttgtatctaaactaaaactaaacttcataaatgaaggaaagataaactttttttcagacaaaaaaatgctgagagaatttgccactaccaagccarcactacaataactgctaaaaggagctctaaatcttgacacaaat

SEQ ID NO: 949636 - DNA, 608 bp, Homo sapiens
gaactgagggctgaaatcaactgatactgccatttaccagccaagttttcacttggaaactacaagcattcaatattctccagagtactaaaacagtcacttcagacagttcctgctagtacaatctttgattaggtagagatgtatttttggagttccctattctgctattttccctgatgtgtcatcagtgggtttttttttttaatgagttcttcaattagggtttatttgaagttttcttataattaaagttatgcattactgaaaatgataccacagaggtgatatgtccttctcagtacaacataccaggggttacttgatcacctcccagcatattttactggtgatattaaccttgatcatctgcctaagatagtatctgcctataaacttactatttcctcctttataattactaaatatttggggaagaattctttgaaattatgcaatatcctgtttgtgtttaaactttcaaccaatcattttagcatccatcactggatcttacccataggaaattaccactgttctgatggtgatttttctatttctctaayttcatttacacttattaattaaaactcttctgtaagggagag

SEQ ID NO: 949637 - DNA, 680 bp, Homo sapiens
ttgtttctaataacactttttgccttaaattctattttggcttttgtcaatgtagtgactgtctttggcttactgtctgcgctgtaaatcttttgtttactttcaacctatctatgtcttttaatataaaatgtgtcacttgtagacagcatatatttgagtcattttatatctattctgtcagtctctgtctttccattagaatgtgtttaaactattttcatgtcatataactaataagctataatttacacctgccattttttatattcgtttcctatatgtcttatgtccttttggtttctctgtttcagagttcttgattactttcctattaaacatatactttttggggatatatcattttgattaccttcttgtttatttcactatattttaaaaaatattttctttttggcttccctgaagtctcagttagcttttaaacaattcaatttagttcagtttaacacaaatttaatttcaatagtatacataattttcttgcattgtagctttgcccctcatttttgtgctattattgtcaaacaaattgcatcttttgattaacacatttttatatttgttgctgcatgtagctgygttttaaattacgtagtaaaagaaaagggctgtaagcaaaatacatttacaccaccctatccttataatgtttaatt

SEQ ID NO: 949638 - DNA, 434 bp, Homo sapiens
gaaataacccccacagtgaaaggcagcaggtacaatttagatcagaagtattaatgcagtagaggaaatytgacaattttttaaagagctgaagaaatttggatgttttagagttataagaactaagaacaaaatatggggcataaattcaggaataaatcataacacattccaaagcttttgctgtttcaacactttgaaagaaacagttaaagaaggtttaattctaacattaccgttgaagcagatggtggatctgatgactgcccttgacggttccttgtgtgctggtttaacccactgggatttgaagatggtgttgtaggaagctgggtactggctgcaggttgctgagatgactttactttgtggctcttatttgagccatccagtctgctacttctctctatggcaatcaggtcacgaattttttg

SEQ ID NO: 949639 - DNA, 482 bp, Homo sapiens
tgtaaattcagctctgctacttcctgtgcatcactgagcaagtaatttaatctctatgactcagtttcttcatgtagaaataagaatgataatttttagaaataaatgaaaaaatacatgtaaaagctgggcatgatgtactggataataggaactgaggtaaacaggcctttcatgtaaggttttatgctaatctagctaggaattaatctaactagagttgttttcttgtttgctttagccgtaggtatcagaggcttcaaattcctccagtgttcttgtcgtctcccccattgtctttaggcttccctaagaactcctcattagagtctgcatttatcctgcttggtgttcgtttagttgtaatccattgwtattatactggagccctattggtgtgatggtaaggtatcaaggagaaggttctataatcttttgattaaatctcagtattttagtgggcctatatctctgggcctgtg

SEQ ID NO: 949640 - DNA, 604 bp, Homo sapiens
gagttattgggcttagacgatgagactttctaaatatacagtcatgtcatctgaaaacagagacaatttgacttcctctcttcctattcaaatacctttatttccttctcattcctgattgctctggccagaacttgaaatactatgttgaataggagtggcaagagagggtatcattgtctagtgccagttttcaaagggaatgcttccagtttttgcccattcagtatgatattggctatgggtttgtcataaataccttttgccattttgacatatgcttcatcaatacccatgactaaaacaacaaaggcaattgcaacaaaagccaaaatagacaaatgggatctaattaaactaaagagcttctgctatataaaagcaagtatcatcagagtgaacaggcaacctacatactgggagaaaatttttgcaatctatccatctgacaaaggtttaatattcagaatctamaaggaacttaaacaaatttacaagaaaaaaaaacaaccccatcaaaaagggggcaaaggatatgaacagacacttctccaaagaagatatttatgtggccaacaaacatatgaaaaaaaagctcatcatc

SEQ ID NO: 949641 - DNA, 472 bp, Homo sapiens
atataaattgtgaagatttcatggacatttatcagttcccraacaataattttatgttttcttatgcctgtcttactttaatctcttaatcctgttatcttcctaagctgaggatgtacatcacctcaggaacactgtgataattgtgttaattgtagaaattgattgtaaaacatgtgtgtttgaacaatatgaaatcagtgcaccttgaaaaagaacagaataacagcaatttttaaggaacaagggaagacaaccataaaatctgactgcctgcagggtcgggcaaaaagagccatatttttcttcttgcagagatcctataaactgacatgcaagcaggagagatatcactaaatgctttttcctagcaaggaatattaatatgaataccctaggaaaggaatgcatttcctgggggaggtctataaacggccactctgggagtgtctgtcctatgcagttgagataa

SEQ ID NO: 949642 - DNA, 619 bp, Homo sapiens
tatggagaaaagggaactcttatacaccgtcagcggaaatgtaaattagtacagccactatrgtaaacagtatggagatttacaaaacaccaaaaataaaactaccatataatccagcaatccctctactatgtatttattcaaaggcaaataaattagtatatgtcaaagggatacctacactcccatttttattgcagcactattcataatattcaagatatggaattaagctaagtgtccatcaatagatgaatggataaaaaaaatgtggtatatatacctatttgaatactgtttggtcataacaaagaattaaatcatgtcatttgctgcaatatggatggaactggaggtcattatgctaagtgaaataaaccaggcaccatcagacaaatacctcatgttctcactcatatgtggaagctaaaaacttggtctcatggatgtagagagtagaatgatatacttcagtgtaaaggtggtgaggggataaagagaggttgattgatgtatacaaatacacagttcatgagaggaatttttttgtagatatggattctggctatgtcgtccaggcttgtctcaaattcctggcctcaagctatcctcccactgt

SEQ ID NO: 949643 - DNA, 619 bp, Homo sapiens
tatggagaaaagggaactcttatacaccgtcagcggaaatgtaaattagtacagccactatggtaaacagtatggagatttacaamacaccaaaaataaaactaccatataatccagcaatccctctactatgtatttattcaaaggcaaataaattagtatatgtcaaagggatacctacactcccatttttattgcagcactattcataatattcaagatatggaattaagctaagtgtccatcaatagatgaatggataaaaaaaatgtggtatatatacctatttgaatactgtttggtcataacaaagaattaaatcatgtcatttgctgcaatatggatggaactggaggtcattatgctaagtgaaataaaccaggcaccatcagacaaatacctcatgttctcactcatatgtggaagctaaaaacttggtctcatggatgtagagagtagaatgatatacttcagtgtaaaggtggtgaggggataaagagaggttgattgatgtatacaaatacacagttcatgagaggaatttttttgtagatatggattctggctatgtcgtccaggcttgtctcaaattcctggcctcaagctatcctcccactgt

SEQ ID NO: 949644 - DNA, 526 bp, Homo sapiens
aaaattagccaggatagggtttttaagggttttggagtgggttgaagagcggagatcactggttggttaaaaagtgtggggtgaagtcatgggacagggagatgaagaagccgggttctcatgctgatctcgatcctctgtgggggtcttcaaactagttgctggaattcatggcctgaaaaaaatgtcttaagagatccttaaacaaaagccttatgaggctgggcacagtggctcacacctgtgatcccaacactttggtgggaggattgcttgagcacatgagttaaagaccagcctaggcaatatagtgagcctcccacctctacaaaaactcaaaaattagccaggcatagtggtgcatgtctgtggtcccagctactcgggaggctcaggtgggaggatcactcaagccttggaggtggargttgcagtgagccaagattatgcctctacactccagcctgggcaacagagcaagaccttgtctcaaaaaaaatagaagccttatgattctaatgttaga

SEQ ID NO: 949645 - DNA, 610 bp, Homo sapiens
agccgcgcaagctccatcagacagaggctggactgacctgtgatcctgagtgacaggtgaaraggcccagttcccgcctctctagttcttctcctgcaggatttggttgtgtttggtttacccatttctgcctatatccctgcaataacctcttcccctctttttactttaagtggattcctgtttcctgtgactgacaggactttgaggggactgacatttctggatgtgacttgcttagaggcatgtttcacaacattgaatcttatgtccagaattttgccttatatagtggtgagcagaatatgaaactaaacacgaatggcttctagtgaacatctcatggtgatgagcaacacacagtgggtgcactgggactgtagattttgatgttgatatttaaaggtttctgtaattagaaacaatttttttatcattttgatgtgtggatgaaacaggaaataatagcaatatcatgccctttatttgctttgttatggatggacattttaaacattgcaacatggctttctagagagtcagggcaacaaccacagtaggctcctgagttgagtcagaaaatcatgaccacttattcatcctattatat

SEQ ID NO: 949646 - DNA, 542 bp, Homo sapiens
actgtactccagcctgggcgacacagcaagactccgtctcaaaaaaaaaaaaaaagaaagaaagaaaaagaaaamgaaaaaaaaaaaagaaaagcaactttatcaagtagagtgctatgtatagttatttttacctttcattttacaatcactactcatttctaagttttcttagattagcaccttcttcccatcgcatttataaatttgtaatacacttagagcctttttcatattccgtattcatcttgagatctccagctacacaaatgatatgttaaatgtgaatacagtaaggtttacgtttgggggctatcaagttttagatttaataaatgcttaatatcttttctttaccattacagtataatacagaatagtttcaccagcctatgaaaaatctatgcttcacctattcaatgttccttcaaccccaaaccactagccactgacaatcactgttaattatactatttctatgttctgccttttctataatgtcctgtcattacaaccatagtatgcagtttttagactggctg

SEQ ID NO: 949647 - DNA, 543 bp, Homo sapiens
tacctagaatagcactaccagtaatcttattattgaatatatacccagaagaacataaatcattctaccaaaaagacgaattcagttgtatgttcattgtagcactgcccaccacagcaaagacacagaatcaacctaggagctcattaatggtacattggataaagaaaatgtggtacatacacaccatgagatattgtgcagttataataatgaatgaaatcatatcctttgcagcaatatggatgcagctagagtccattatcctaaaccaataaatacaggaacagaaaatcaaatgccacatgttctaacttatgtatgaaaccaaaacattgggtaaacatggacaaatatagcaacaatacacactgagtactactagacggtggagggaaggagaagagcaagggctgaaaaactaaccattgtgtactatgctcattacttgggtgaaaggctcaattgtaccccacacatcagcattacacgawgtacccacataaaagaagctgcacatgtaaccgctgactataaaataaa

SEQ ID NO: 949648 - DNA, 540 bp, Homo sapiens
aggctgaggcaggagagtcacttgaacccgggaggcggaggttgtagtaagccgagaccatgccactgcactccagcctgggcaccaagagtgaaactccrtctcaaaaacaaaaacaaaaacaaacaaacaaaaggtttacaaagtaatgttatggagaatggtggagtagggagtgctaagtatccctcccttcactgaagctcgattaagctgcccaaaactgtcagaataaactctttcaaaactctagaatctaaaaagaaacttataacaatcagggaagtacttaatgaagagagaagctgctaaattttgatgacagcattttggatttttttgcttatttgcttataattctccattattcagctaagcagtggtcacaggactgacaccagctaacgttcttggtgtcgcttgatgccatcccagggggccgtatggaccttgttctcaaagaattgtggctggagttttgatctgtctggtgccaaccgagggatgaattctatgtcttgtctttgtttcagccctttg

SEQ ID NO: 949649 - DNA, 611 bp, Homo sapiens; identical to SEQ ID NO: 946095

SEQ ID NO: 949650 - DNA, 435 bp, Homo sapiens
cattttcctttagaatgattcagtttttaatttaatgatgtctgaattccgtaaccacattttaaaatgagactaataataaaccttacatcatagagtcagttgtgaggattaatacgttactaaattttttaagtatttaggacagtgccttgcctatagaaagtgctatctatttttttggttgctattattatgagtgttatttttattgcatacataagagatcatatccctaaccttttgttaggcataatttgtcttagaaatttcaggaagaggcaaacaaattgcatacctaggctttaaaaaatactacttggtgarcataaataagaaaaaatatgaggaaaatcttcatgttatcctaattccattgcttaaagtctagattctgttttaaactttttccttaacttagtttagagttcggtt

SEQ ID NO: 949651 - DNA, 616 bp, Homo sapiens
tggaccagctgcctgacagactggttttaaaatgtctatgataacaatttgacagtatctatcaagatcctcaamttttccatacctttttggcttatcatctcttttcccatttcagaaaatctattcaaggtaattcattacaaattatccctcaaggccagtagcatttatgatacaaaagcttcaaatgatcctaatgtccctttatagaggtatgattaagtaaactacaatacaatcactcaaacgtatttagtagccataaaaattatgctaaccagcttgagtgaatgggtaccccattctccatgatgtgattattaggcattgcatgcctgtatcaaaacatctaatgcactcaataaatatgtacaactactatgtactcacaaaaattaaaaattttaaaaattatgctaaccaaaagtgaaaatgcttttacaataaaataatatgtagcatatatcgtatgattgcaaccataacaaaaactaggccctaaaataaaaaatgaaagaaattaaaccaaaatattaaccgttaacagtattaatttgaacagtgggttaggagtacatattattattttttcttcaatttttaactttccttt

SEQ ID NO: 949652 - DNA, 474 bp, Homo sapiens
gccggagctggagtggctgggatgcaggaagccttgtcccaatgttgtacaaggcagcagggscctgaatctggttgagaaatccattcaattcacctacaattccaggcctgtgatgggaagtgctgccatgaagttctctgaaatgctttcaaggccttttttcccattgtcttggctagtaacactttgcctccttttacttatgcaaatgtgtgtagcttgcttgaattcttcccattcaaatatgtttttctttttttaccacatggcaagtcttcatttttttttaagcttttacactctgcttcccttttaaatgtaagtttcagtttcaagtaatttctttgcttactcatataagcacaggttgttagaaacagccaggccatatcttgaacactttgctgattaaaaattgtttctaccagataccttaaatcatcactgtcaggttcaaagttctatggatcc

SEQ ID NO: 949653 - DNA, 474 bp, Homo sapiens
gccggagctggagtggctgggatgcaggaagccttgtcccaatgttgtacaaggcagcaggggcctkaatctggttgagaaatccattcaattcacctacaattccaggcctgtgatgggaagtgctgccatgaagttctctgaaatgctttcaaggccttttttcccattgtcttggctagtaacactttgcctccttttacttatgcaaatgtgtgtagcttgcttgaattcttcccattcaaatatgtttttctttttttaccacatggcaagtcttcatttttttttaagcttttacactctgcttcccttttaaatgtaagtttcagtttcaagtaatttctttgcttactcatataagcacaggttgttagaaacagccaggccatatcttgaacactttgctgattaaaaattgtttctaccagataccttaaatcatcactgtcaggttcaaagttctatggatcc

SEQ ID NO: 949654 - DNA, 564 bp, Homo sapiens
gatctactaagaggaagacacacattcgaatatagtagatttgtccatttcttcactctgctattaaaatcttcatagtatctataaattcaatttctttgtcttaaaaatggaagccaataaaaaccaaaattttgtcaatgcagaggtgacctcactcaataccataagcagagtgcaataatcaatacagaaattcattccgagatctcaaggtcagtgtttatttctataaaatattcaacatttgagttacttatttgaggtcactgcatagaaggtgctacataaataggaactgtcattctggcagccttaacgattgctacttaaatgtttgaacactgaatgatatttagagagtaaagtgatttaataaactagcaattgctcatgcaagggcaatcacccccatttcagtttaattattaagatgaaatttttaaaatattcccaactttagcaagcaatcttgcaatgaaaaagaaattataaaatgttacatgatattatgatataaaatgctcatttcatcaactatwatgagcacctaggaagattcag

SEQ ID NO: 949655 - DNA, 728 bp, Homo sapiens
atgatcttaaaataagtccctgaaggtcaagcatrtagggtgaaattttatttttcagtaaataatagcatttgacaaaataacagaaatgtcccttatagtatctcttcctttacatctttgaatgaaattaccaagtgcacatcactggatgttcatttataaacattttacatcttctccatgcctttctggcagagtattaaggtaacattctgatatcactgttcccaatgaagttagagattctaaagaacaatttcaaaatgcagccctaacttgggatgtcactgatcacttggaaagtcgtttgttacatctagtccagaaaaatataagcttcttgtcatagaaaggctgaagtattgactataaatctataaagaaaaagaaaaaaaaaacttgcaatgtgaaagttttccaggtcaaagctggatctctctcatccatcactgagttctccaaggtgacatgcaattcaggagaaaagcatcagcatccagaaagatactggccaaggatgtctttgtgctctttaatgatgggtctttggctgaatcaccagactggtagctttggaatagctgctcatggaggtgggaggcaggatgtggaggtccttggataaatctcatctagattcacatagaatcctgcactcgtcaaggctgatgggatcctgaagttcatctacctcaaataccttcttgtctcattttacggatgag

SEQ ID NO: 949656 - DNA, 791 bp, Homo sapiens
tgagggaaaaacacacagatcacagaaggaatattctggaatccattgtgagggagaataatacagaccctcgtagcagtgttctggaatcctatgtgagggagaaatgctcaacccagaagcagtgttctgcaatcctatgtgagggacaatcattcagactacagccggggtgttctggagtcctacgtgtgggacaaacatgcagacccgcgtagcatttttctggaatcctctttgaggaaaatacattcagaacacaacaggagtgttgtggagtcctatgtgcgggacaaacattcagtccctcgtagcagtgttctggaatgccatgtgagggagaaacactcataacccagtagtagtattgtggaatcctatatgagggacaatcattcataccacagttgaggcattctggaatcctatgtgtggggcaaacattcagacccggacccttgtagcactgttctgcaatcctatgtgaggaacaaacttttagacccagggagcagtgttctggaaccgcaagtgagagacaaacacttggaaccctacagcagtgtcctggaatcctaattgagggacaaacatacagaccacgaaggaatcttctggaatcctatgtgagggagaataattcagaccctcgtagcagtgttctgcaatcytatgtgagggaaaaactttcagaccacagtagcagtgttctggaataccatgtgagggagaaacactcacaacccagcagcagtgttgtggaatcctatgtgagggacaatcattcagac

SEQ ID NO: 949657 - DNA, 791 bp, Homo sapiens
tgagggaaaaacacacagatcacagaaggaatattctggaatccattgtgagggagaataatacagaccctcgtagcagtgttctggaatcctatgtgagggagaaatgctcaacccagaagcagtgttctgcaatcctatgtgagggacaatcattcagactacagccggggtgttctggagtcctacgtgtgggacaaacatgcagacccgcgtagcatttttctggaatcctctttgaggaaaatacattcagaacacaacaggagtgttgtggagtcctatgtgcgggacaaacattcagtccctcgtagcagtgttctggaatgccatgtgagggagaaacactcataacccagtagtagtattgtggaatcctatatgagggacaatcattcataccacagttgaggcattctggaatcctatgtgtggggcaaacattcagacccggacccttgtagcactgttctgcaatcctatgtgaggaacaaacttttagacccagggagcagtgttctggaaccgcaagtgagagacaaacacttggaaccctacagcagtgtcctggaatcctaattgagggacaaacatacagaccacgaaggaatcttctggaatcctatgtgagggagaataattcagaccctcgtagcagtgttctgcaatcctatgtgagggaaaaactttcagaccacagtagcagtgttctggaataccatgtgagggagaaacactcacaacccagcagcagtgttstggaatcctatgtgagggacaatcattcagac

SEQ ID NO: 949658 - DNA, 486 bp, Homo sapiens
aatgtgggcgtggttggagagtagctgggacagacgggagagtccctgagggatggtgaagacatgagagagactggggagtaacgcagtgaaattggtgagtttggtggtgatttctgggtgcctgcaacggactcccgctgaagtgtgggcgtgcttggagagtagctgggacagcacaggcgagtccctgagggttggagataaagacgtgctggagactggggagtaactcattgaaagtggtgggcttggtggtgatcccagggttcctggaactgacccgcgctgaaatgtgggcgtggttggagagtatctgggacacactgtagggtccgcaagggctgtgggtgaaaacatgagagagactggcgaggatctcactgtggtgtgtgagtttgtaggtgtttctgsggtgtggggtacacactcccgctgtaatctgggcgtatttggagagtagctgggacagcacacgagagtcat

SEQ ID NO: 949659 - DNA, 547 bp, Homo sapiens
aaatgtgggcgtggttggagagtagctgggacagacgggagagtccctgagggatggtgaagacatgagagagactggggagtaacgcagtgaaattggtgagtttggtggtgatttctgggtgcctgcaacggactcccgctgaagtgtgggcgtgcttggagagtagctgggacagcacaggcgagtccctgagggttggagataaagacgtgctggagactggggagtaactcattgaaagtggtgggcttggtggtgatcccagggttcctggaactgacccgcgctgaaatgtgggcgtggttggagagtatctgggacacactgtagggtccgcaagggctgtgggtgaaaacatgagagagactggcgaggatctcactgtggtgtgtgagtttgtaggtgtttctggggtgtggggtacasactcccgctgtaatctgggcgtatttggagagtagctgggacagcacacgagagtcatgggtggctgggggtgagctgctggatgatggcagtaagaacatatggtacattattgatg

SEQ ID NO: 949660 - DNA, 571 bp, Homo sapiens
gactggggagtaacgcagtgaaattggtgagtttggtggtgatttctgggtgcctgcaacggactcccgctgaagtgtgggcgtgcttggagagtagctgggacagcacaggcgagtccctgagggttggagataaagacgtgctggagactggggagtaactcattgaaagtggtgggcttggtggtgatcccagggttcctggaactgacccgcgctgaaatgtgggcgtggttggagagtatctgggacacactgtagggtccgcaagggctgtgggtgaaaacatgagagagactggcgaggatctcactgtggtgtgtgagtttgtaggtgtttctggggtgtggggtacacactcccgctgtaatctgggcgtatttggagagtagctgggacagcacacgagagtcatgggtggctggggrtgagctgctggatgatggcagtaagaacatatggtacattattgatgaatgaggtgactgtgaaaaatctccagaggaggacacgggagaacacactgacatgagtgactgtcctgcttgggtaggaaagggaaacgtaaagt

SEQ ID NO: 949661 - DNA, 652 bp, Homo sapiens
aaaaacaggagtacctaataaaaatatgcttagtgacttgggataaaccaatagatgttcacaagtgatggagagccgtgaaagagagatagcggtaaatagttacaataacacaattttcctgcacckgtcgaggatttccccaaaaaaacgcagaatgtgggatgcacctaaggcatatgaaagagagagggcagaaggagtaagagagaaataggaggaaggaaggaaggaaggaagcaaggaagaaaggaaggaaggaaagaaggaaggaaggacggaaggaaggaaggaaggaaggaaggaaggaaggaaggaaggaaggaaggaaagaaggactaaaggaaggagagaacaccggtgttactaaaaccccccaaaaaatggtttccccctgtgggtaagcctacaatgtggatgaatcttgaaaatattgtgctacgtgttatgtcagtcatagcagctcacctattgtgcaattccgtttataggaaatgtccacaatatggaaatctatgcatatgggattgatcgcactatgtagttgctacctatggctgagggtcagggagagggtttgagacacaaggaggagtgactaatgtctacagcgtttttctctggtcgggggtgataagacgttttacaatgg

SEQ ID NO: 949662 - DNA, 625 bp, Homo sapiens
gcatgggtttgagatctttcttctttttaatttaagcatctgcagctgtaagcttccctttagcatgggtttgagatcttttttctttttaatttaagcatctgcagctgtaagcttccttttagcacgggtatgaggtctttcttctttttaatttaagcatctgcagctgtaagcttccctttagcactgcctttgttgcctcctcctgagtttgggtatgtcatggttttcttttcgtttgcttaaacattttttgtcctattgtaatataattgcattgtttttaataaaggtaattaatgaaacacataatgaattttgcttctgtttttataatattttaagtattcttaactcagaaatgtaaattttagaaaaaaattccaggccaggcacagtggctcacacctttaatcccagcacttggggaggccgaggcgggtggatcatctgaggtcaggagttggagaccagcctggccaacatggtgaaaccctgtctttactaaaaatagaaaatatatatataaaagttagctgggtgtcgtggcgggtgcctgtaatcccagctactctggagrctgaggcaggataatcacttgaatctgggaggcggaggttgc

SEQ ID NO: 949663 - DNA, 577 bp, Homo sapiens
cctttagcactgcctttgttgcctcctcctgagtttgggtatgtcatggttttcttttcgtttgcttaaacattttttgtcctattgtaatataattgcattgtttttaataaaggtaattaatgaaacacataatgaattttgcttctgtttttataatattttaagtattcttaactcagaaatgtaaattttagaaaaaaattccaggccaggcacagtggctcacacctttaatcccagcacttggggaggccgaggcgggtggatcatctgaggtcaggagttggagaccagcctggccaacatggtgaaaccctgtctttactaaaaatagaaaatatatatataaaagttagctgggtgtcgtggcgggtgcctgtaatcccagctactctggaggctgaggcaggataatcacttgaatctgggaggcggaggttgcagtgagctgagattgcaccactgcactccagcgtgggtgacagaacgagagtcyatctcaaaaaaaaaaagaaaaaagaaaaaatttcagacatatttatatgtatttccatttagaaactatgatctccta

SEQ ID NO: 949664 - DNA, 442 bp, Homo sapiens
aatcctactcaaactattccaaaaatagaagttcgctatacttccagtctcattctatgaggttagtattagcctgatattaaaaccaaagacaygtcaacaaaagaaaactacagaccaatatctctgatgaatattgatataaaaattctcaacaaaatactagctaatgaaattcaataatacgtcaaagagattattcatcttggccaaatggggttcaaataaataaccctgcggtttatcctagggacacaaagatggttcaacatatacaaatcaatcaatatgatacatcataccatcagagtaaaggacaaaaaccatatgaccatttcaattggtgctaaaaaacatttgataaaattcaatatccctttgtgtaaaaagccttcaaaaaactgggtatcaaaggaacatacctcaccataataaaaagacc

SEQ ID NO: 949665 - DNA, 561 bp, Homo sapiens
cattgaccctatttttattcctcaaaaatacatctgtgggagagtgacastagcaaagtggaagaagagaaggtatccaactcacatccctcacacaaataatgatctggcacccatggacaagtgcctctgtggtgttttcggatccaggtaggagaagcaccagtgaggccccagaccacggagagccactttgagaaggcagacccccaccctagtggcaggtttgcgaacatgatcccaattgcagactgaaagcagccccatatccctatggacccaactctagccatctttggtcacagtcctgaaacccatccatcaaggagcaatacctgtccatgctcctggtaacaggtctgccaacctagacccaactgaacacactgaggctgtccctctccagtccctctctaccattgtcatggaggcagtcctgcccacccagagaccttcccagagacccagtgggagcccactcagaaactatgcttcagccacactcatctataaccatagtaacaggcccactgtctgcaaacttgactgtggaaccggaag

SEQ ID NO: 949666 - DNA, 493 bp, Homo sapiens
aaaaaaaaaaaaaaaaaaaaaaaaaaaatccagaagttttaaaggcaacttagagaaagaaagatttaagaaaggaagttagcagttgttcatggagggggaagagaattagcaaatggtaaaagtcacatagctattaatttgaaagtattcattccccaagccaggattgaacccgtgcgccattgtaaaatggcaaaggctaaaaaaagtactgtgacatggttacaggtcacactcaagtatgtaaaacaagacggaggcctgcagcaaaggttgttactgacaactttaccaggctgtcttgaagtgagggcttacatggagttccagacctgcattccattccaaggtatccctctttctgccttttttatgtgtttcctctccctttccagggcctcctcctggttcctattataaaagactgwagtggctacccttaggaggttttctaacgtgccatctggtcctatagcctgattctgaagct

SEQ ID NO: 949667 - DNA, 565 bp, Homo sapiens
gcaaaacctatatagagtcatactataatcacatattgtcaaaattgcaaagagaattttgaaagcaacaaaagaaaagtgactgaggtggagccaagatggccgaatacgaacagctccagtctgcagctcccagcatgagcaatgcagaagacgaatgatttctgcatttccaactgaggtactgggtgcatctcactggggactgtcggacagtgggtgcaggacagtgggtgcgggacactgggtgcagtgcaccgagcctgagccgaagcagggcgaggcattgcctcacccaggaagtgcaaggggtaggggaattccctttcctaggggtgacggacggcacctggaaaatcgggtcacccccaccctaatactgcgcttttccgacagtcttagcaaacggcacaccaggagattatatcctgcacatggcttggagggtcctacgccaatggagcctcactcattgctagcacagcaatctgagattgaactgcaaggcggcacasaggctgggggaggggcgcccgccattgctgaggcttgaggaggtaaacaa

SEQ ID NO: 949668 - DNA, 585 bp, Homo sapiens
tgggattgctgggtcacagggtaattctcaagttctttgagaaatcaccaaactgctttccataatggctgaactaatttacatayccagcagtagtgtataagcattccctttcctctgtaactttgccagcatctattttttggctttttattaatagctattctgactggtatgatatggtatctcattgtagttttgatttgcatttctctagtattagtgatgttgagcattttttcatgtttgttagctgtgtgtatgtcttttgagaagtgtctgttcctgtcctttgccccctcctttttttttagtgaggttgttttttgcttgtaaatttgtttcagttccttatagattctggatactagaaccttgtcagatgcataatctgtaaatattttttcccattctgtaggctgtctgttcaatctgttgatagtttcttttgctgtgcagaagctctttaattaggttccacttgtctgtttttgtttttgttgcaattgcttttggcatcttcatcatgaaatcttcataaggtcctatgtcagaatggtatttcctagcttatcttccagggat

SEQ ID NO: 949669 - DNA, 585 bp, Homo sapiens
tgggattgctgggtcacagggtaattctcaagttctttgagaaatcaccaaactgctttccataatggctgaactaatttacatacccascagtagtgtataagcattccctttcctctgtaactttgccagcatctattttttggctttttattaatagctattctgactggtatgatatggtatctcattgtagttttgatttgcatttctctagtattagtgatgttgagcattttttcatgtttgttagctgtgtgtatgtcttttgagaagtgtctgttcctgtcctttgccccctcctttttttttagtgaggttgttttttgcttgtaaatttgtttcagttccttatagattctggatactagaaccttgtcagatgcataatctgtaaatattttttcccattctgtaggctgtctgttcaatctgttgatagtttcttttgctgtgcagaagctctttaattaggttccacttgtctgtttttgtttttgttgcaattgcttttggcatcttcatcatgaaatcttcataaggtcctatgtcagaatggtatttcctagcttatcttccagggat

SEQ ID NO: 949670 - DNA, 521 bp, Homo sapiens
cctaatgtagatgacaagttgatgggtgcagcaaaccaccacggcacatgtatacctatgtaacaaatctgcacattctgcacatgtatcccagaaccrggcgcagtggctcacgcctgtaatccgagcactttgggaggccgaggcggggggatcacaaggtcaggagatcgagaccatcctggtgaacacggtgaaaccctgtctctactaaaaatacaaaaatattagctgggcgtggcggcgggcacctgtagtcccagctactcaggaggctgaggcaggagaatggcgtgaacccggtaggcagagcttgcagtgagccaagatggcaccactgcactccagcctgggagactccatctcaaaaaaacaaacaaaaacaaaaaacaaaacaaaacaaaacaaacaaaaaaaaaacttatggcagattgtattttctaaaaaggacctcaataatattcccattcccacatgctcttatgcaatgtgaccttgttagtattccattaagagatgga

SEQ ID NO: 949671 - DNA, 470 bp, Homo sapiens
tgctttgtaacacttcagcacagggaggcttctgggactaaaactatttttcaacaaggatgatgttttccatttccagcgtgaacacagtgttattcaattccccacagccctcagtccagggatcccacctaaacagtttactctaagacgaaattgcagcctttaaactgatttctcagaggatgccattcatttcagcatcttcactctccatgcaggcagcttccaagactcctaagaatggctttttctaaattggaggtcccctcggattgcttcagtagaacagctacggcctcagtgcctgtgatttgaaaaatgcccctagctgtccgtcccggctgctgaagggaacgagcttcggtggtgactgcatccctcacatccgaggagggtgagrtgctcgccggccagcattcccttcttaggatgggtcaccgccatcggtgaagctggaaggaaacact

SEQ ID NO: 949672 - DNA, 629 bp, Homo sapiens
tgggaaacaggagatgctacattttatgttgactctgcactactcaacatccaggagmtcctctctcactgctggcctgcagacaatcttgcattctagggagttgcatctcatcttcttagcaagcacgtctggacctgattctccttatctgccactgggtaccagtactggtgctgtccaggagctgcatggctacttgactgactctactcagcaagtaattcacttcccttagtattggatgtggcaaccatccaaatgtccaaagaccccctttcagtcccaaacggatgcctatactggcacagaaccacagaggttgcaatgagctttcagcctgcacttctcttcactctcttacaaagttctgtgagcattgcaaccactcacatcatctctccgagactcagaggcaccatatagaagactgaaatatgacttcccattgtgcagggaggaaagaggcatgaaaaacaagccagcacaacttctcatgctccaggagcagcctcctccactgcaattctgctaacgaagggcattaagaaaggcatagtcatggacaagggaaaagagaaggggtatttttccttttggcttgaaagatattgttatgtgatttttgt

SEQ ID NO: 949673 - DNA, 573 bp, Homo sapiens
agtgaacagtgtgaaacccacagaagatgcacagggaagaaaaccaggcacatcggagaggaacttgtacatcatttaaggatttttccagagctgaaaaggagatattatttaaacattttccaacaatagccctagattcagaggcaactgttgagaagaggcccctgggctgcaaggactctgtttccaaacaagcccacagtctgaggttccaggaagacatgagtttggaggatgcagaccaacctactgcctacctctaagccctggcatgctttcccggctcacactgttttcccttaaccctacccaccccttggatcagcaatcctcaagttccaggtttgtgtggaccatctgttccctgcctagacttggaaagagacagcctttccgagtggcccctgggggatgggatgaggaaacgtgggcagagccacttgaggagaggttccggactactactggccccttgccacgggcatgccacagttgctggacagtgrcctctctcagcacctgcctttcccctgcccacctgcccacaggaatgccaatgactcgaacagc

SEQ ID NO: 949674 - DNA, 640 bp, Homo sapiens
tctttgttaagtctcccacaattaccattgttcctggcccagacttcaatcyagcctcccatattattcctgataccacacctgaccctcatgactatatctctctgatccacctgatgttcaccccatttccctacattccttcttccctgtttttcaccctgatcacacttggtttattgatggcagttccaccaggcctaatcgccacacaccagcaaaggcaggctatgctatagtacaagccactagcccgccttttagaacctctcatttcctttccattgtggaaatctatcctcaaggaaataacttcttagtgttccatctgatattctactactcctcaaggattattcaggccccctcccttccctacacatcaagctcagggatttgcccccacccaggactggcaaattagctttactcaacatggcccgagtcaaaaaactaaaatacctcttagtctaagtagacactttcactagataagtagaagcctttcctgcagggtctgagaaggccaccgcagtcatttcttcccttctgtcagacacaattactcagtttagccttcctacctctatgcagtccgatagcagaccagcctttattagtcaaattaggcaagcagctt

SEQ ID NO: 949675 - DNA, 669 bp, Homo sapiens
ccccctcccttccctacacatcaagctcagggatttgcccccacccaggactggcaaattagctttactcaacatggcccgagtcaaaaaactaaaatacctcttagtctaagtagacactttcactagataagtagaagcctttcctgcagggtctgagaaggccaccgcagtcatttcttcccttctgtcagacacaattactcagtttagccttcctacctctatgcagtccgatagcagaccagcctttattagtcaaattaggcaagcagcttttcaggctcttagtattcagtgaaacctttatatcccttacagtcctcagtctttaggaaaggtaaaacagactaataatcttttaaaaacacacctcaccaggctcagccaccaacttaaaaaggactggacaatacttttacctctttcttttctcagaatacaggcctgtccttagaatgctacaaggtacagctcatttaagctcctgtatggacgttcctttttattaagccccagtctcattccagacaccagaccaacttagactgtgccccaaaaacttgtcatcccyactatcttctgtctagtcatactcctattcaccattctcaactactcatacatgctctgctcttgtttacactgccagtttactctgtttctcca

SEQ ID NO: 949676 - DNA, 572 bp, Homo sapiens
gttgttgttcccttgcatttcttgcctttatcctcattcggtcagtggtatgctgccaattcatacgtcccagtattatcccrtaatatttggaaaagttggtatcaactaagagtgcacgagtacaagtcttaactttggagtttgaaaagctgaaaccccaggaataaaatttcttaatttagaagaatatacagctaggcaatttttcttattcctggaaatagacaaagatttcttggattgagggatggaagatgatatcaatagttgaggaggaacaggagagttgaacgatgtgtctttgagaacgggatcattactttatctccatgccagactgaaaaaccctggactggggatgaaatcagataaaaaaaaattctggtaattttgggaaatgtgaaaacagagaaattttgccctgtgctccctggatagaacccaagaaagcagcaaaatctcaggttgcttgccctgtggggattgtatttaatcattcacacactgatttgtctgttcaacaggtattttctttttcattgattgatggattgattgagaaagggtgt

SEQ ID NO: 949677 - DNA, 592 bp, Homo sapiens
ccagctgaggactgtgggtcatctcagggcgatttcacagtccccacatgccccaccccctcagctctgcaaataccaagcagtgcarcctgtctaggggatgatgggctcgagagtgcccaggtagtgcccagagtgcccttggcaggcccctcacctagctgcttccacagctctgtagcaagagttctaaccttttttgaccgtgaagcctgttgtggactgttttcccagaaaggcatgtacatgctctccacacaaaacctttcatcgtggccaagcacagtggctcatgtaatcccagaactttgggaggcagagccagtgggatcacctgaggtcaggagttcaagaccagcctgcccaacatggcgaaaccctgtctctactaaaaatacaaaaaattagccaggcgtggtggcagccacctgtaatcccagctactccggaggctgaggcaggagaatcacttgaacctgggaggcgcaggttgtagtgtggtgagatcacgccactgcactccagcctgggcgacaggagcgaaactctgtctcaaaaaacaaaacaaaacaaaaccttgcatcctttcagg

SEQ ID NO: 949678 - DNA, 592 bp, Homo sapiens
ccagctgaggactgtgggtcatctcagggcgatttcacagtccccacatgccccaccccctcagctctgcaaataccaagcagtgcagcctgtckaggggatgatgggctcgagagtgcccaggtagtgcccagagtgcccttggcaggcccctcacctagctgcttccacagctctgtagcaagagttctaaccttttttgaccgtgaagcctgttgtggactgttttcccagaaaggcatgtacatgctctccacacaaaacctttcatcgtggccaagcacagtggctcatgtaatcccagaactttgggaggcagagccagtgggatcacctgaggtcaggagttcaagaccagcctgcccaacatggcgaaaccctgtctctactaaaaatacaaaaaattagccaggcgtggtggcagccacctgtaatcccagctactccggaggctgaggcaggagaatcacttgaacctgggaggcgcaggttgtagtgtggtgagatcacgccactgcactccagcctgggcgacaggagcgaaactctgtctcaaaaaacaaaacaaaacaaaaccttgcatcctttcagg

SEQ ID NO: 949679 - DNA, 556 bp, Homo sapiens
taatcccagcccttttggagggcaaggtgggcagatcacttaagtccaggagtttgagaccggcctggccaacatagtgaaaccccatctctacaaaaaaataataaaaaatgagccaggtgtggtggtacatagctgttgtcccagctattcagaggctgaggtgggaggatcacctgagcccaagaggcggaggttgcagtgagccaagattgtgcccctgcactccaggctgggtaacaaagccagaccctgtctttaaaaaaaaaaaaaaaaaaaaaaaagggactggaggagctgggtatccaactccttcccaccaaataaatttttctactttgcaacaaatacaaaaatgaactaaaatgtattattgatcaaatgcaaaatctaaaactgtaaaacatctagaaaaaaataattgtgaccttgtattgggcaamaatttagtgatatgatgccaaaagtataatccaaagagaaaaatggttaaatttaactttattgaaatttaaaacttctgatttttgaaagggcttgttaaagggatgaaaat

SEQ ID NO: 949680 - DNA, 579 bp, Homo sapiens
taaaaacacttgcttaaaggggaacatttttagaatatgccttactgttaataaagctgagctaatctttgtaaagtaaccagtgtagtgcttgtcacctggtaagcattcagtaaacagtggtgctttttatcagagtaagggcgcaaattctcagatgatagctctcttgaataaggaatttgattttttatgattaaacttcattttgaaactttgttctaccaggcggcaaaaattaaattttagcaagttattcttcacctcaattcatgaagttgtttctcttggggacttaattaaggccaagaccgaggccttaattaaggtgcttgggaggcgagatatatctaacaaaggtgatgctacatgtttactgtggtttctatcatgaagtcttcgtttactcagctcattgatggtggatccacaaacataattgattcagttggacacattgcttcatcttgccacaagacccttccacacctgccagactaaagtgccacatttatgctcgttttggctgcaraggaaaacttttttaggctgccgattcatgatggcagaaaccaggga

SEQ ID NO: 949681 - DNA, 554 bp, Homo sapiens
attttctgtaacacatgtgggaaaaaagagaaaaaaaaaatcaaagaaaaatgaattttgaagtaaaaaaataaaaaacataaaaatccaagaggtcagctgaacacatggaaggttctggagggtggcagccgagggagggcttggaaactcccatagcctgtccccccacaccttgttccgtgcttgccctcatctgtattcttggcaattatcctttacaatgggtctgcaaccccggggcagtactggtccgtggcctgttaggaaccaggctgcacagcaggacgcaagcagcaggcgaacaagcatccccaccaagctctgccccgacagatcagcggcagcatacgattctcacagaagcatgaaccccactgtgaacggcacacgcgagggatggaggctgcacgctcctcctgagactctaatgcctgatgatctgagtgggaacagtttcatcccgaaaccatccccctatgaaaaaaactgtcttccatgaaaccagtccccrgtgccgaaaaggctgcagaccgctgctttataataaactg

SEQ ID NO: 949682 - DNA, 592 bp, Homo sapiens
cacaggaaggggaatatcatactctggggactgttgtggggtggggggacggggagggatagcattgggagatatacctaatgctagatgacgagttagtgggtgcagcgcaccagcatggcacatgtatatatatgtaactaacccgcacaatgtgcacatgtaccctagaacttaaagtacaataaaaaaaaaaaaaaaaagacacagattctgctcttagacagatcacaatctagttgtgtgactctgggaagtttccttaatctctctgaggcttcagtccttccacgacatagtaggaatattattatcaatctcactggattgttatgagaattaaatgggaatatgtatgtaaagatagtgctgtatctgatatcaagttaatgcttaataaatgttttctccctgcacttgtctattctcagtgcaacagaggaactttaagtagcaactatcatcatctgtcatgtgctatttatatgccaactgagtgcaaarggtctcattcaatattttattcagtttatttaaaaatgactatgtagtaggtgttaatatagtagttattaattgattaacataagta

SEQ ID NO: 949683 - DNA, 630 bp, Homo sapiens
  misc_feature 154: n = A,T,C or G
tctggaaccctatgtgagggacaaacattcagacactcatagcagtgttctggaatcctatgagagggacaaacatttagacccacgtaccagtgtgctggaatagtacgtgagggacaaacactcagaacacaacagcagtgttctggaatcntaagtgagggacattcagatgatggcaggagtgttctggaatcctatgtgagggagaataattcagaacctcgtagcagtgctctggaatcctatgtgagggacaaactttcagaccccagcagcagtgttctgaaatcctatgtgagagagaacctctcagaaaccagcagcagttttccagaatcttatatgaaggccaatcattcagacgatagctggggtgttctggaaacctaactgtgggacaaacattcagaccctcgtagcggtgttcgggaatcctatctgagggacaaacatttagagacacgtagcagtggtctggaatcgtaaatgagggacaaacactcagaacccaacagcagtattctggaaacctaagtgagrgacacgcattcagacaacagcaagagtgttctggattcctatgtgagggagaaacactcagaacccagcgtcattgttctggatcct

SEQ ID NO: 949684 - DNA, 630 bp, Homo sapiens
  misc_feature 154: n = A,T,C or G
tctggaaccctatgtgagggacaaacattcagacactcatagcagtgttctggaatcctatgagagggacaaacatttagacccacgtaccagtgtgctggaatagtacgtgagggacaaacactcagaacacaacagcagtgttctggaatcntaagtgagggacattcagatgatggcaggagtgttctggaatcctatgtgagggagaataattcagaacctcgtagcagtgctctggaatcctatgtgagggacaaactttcagaccccagcagcagtgttctgaaatcctatgtgagagagaacctctcagaaaccagcagcagttttccagaatcttatatgaaggccaatcattcagacgatagctggggtgttctggaaacctaactgtgggacaaacattcagaccctcgtagcggtgttcgggaatcctatctgagggacaaacatttagagacacgtagcagtggtctggaatcgtaaatgagggacaaacactcagaacccaacagcagtattctggaaacctaagtgagagacacrcattcagacaacagcaagagtgttctggattcctatgtgagggagaaacactcagaacccagcgtcattgttctggatcct

SEQ ID NO: 949685 - DNA, 788 bp, Homo sapiens
gtctgaatgattgtccctcacataggattccagaacactgctgctgggttgtgagtgtttctccctcacatggtattccagaacactgctactgtggtctgaaagtttttccctcacatargattgcagaacactgctacgagggtctgaattattctccctcacataggattccagaagattccttcgtggtctgtatgtttgtccctcaattaggattccaggacactgctgtagggttccaagtgtttgtctctcacttgcggttccagaacactgctccctgggtctaaaagtttgttcctcacataggattgcagaacagtgctacaagggtccgggtctgaatgtttgccccacacataggattccagaatgcctcaactgtggtatgaatgattgtccctcatataggattccacaatactactactgggttatgagtgtttctccctcacatggcattccagaacactgctacgagggactgaatgtttgtcccgcacataggactccacaacactcctgttgtgttctgaatgtattttcctcaaagaggattccagaaaaatgctacgcgggtctgcatgtttgtcccacacgtaggactccagaacaccccggctgtagtctgaatgattgtccctcacataggattgcagaacactgcttctgggttgagcatttctccctcacataggattccagaacactgctacgagggtctgtattattctccctcacaatggattccagaatattccttctgtgatctgtgtgtttttccc

SEQ ID NO: 949686 - DNA, 544 bp, Homo sapiens
aagaatagatctgggttaggtggatcaggagtgcctacatcgggggagcacagaaacggtttacaatattaaatagatggtccaggtgaagcaggacagttccctgaccccttcgtgggtgggaactggagtgcactggcactggcaggggcgaactccactcactctctgctccaccccacgtgggagtgggagcacaggtgagcaggtgcaggagccagggtgtgtgcttttaggtgccggcaagagcgaactccgtactggcccatggcagcatctaagggagggtgccggaagtccctgaagccacagaggaagtgttacagtgccctttacctttgctgtctgtagacagcttaacagctcagcagagggtcagtgtgacagccttttgtgcccacacttgaggcacackagtttttgtctggagtccaggaggaataaggtctcacaaacgaattgaaggtggtaaatgtgggggatttcattgccaatgaaagtggctctcagtgagaaagggagctggaaaggggacggaacaaga

SEQ ID NO: 949687 - DNA, 577 bp, Homo sapiens
caagagaaggttcttgaacctcgagcaagggaaaattcagggcaagtccataaagtgaaagcaagtttattaagaaagtaaagaaacaggccgggcacggtggctcacgcctgtaatcccagcactttgggaggccgaggcgggcagatcacgaggtcaggagatcgagaccatcctggctaacacggtgaaaccccgtctctactaaaaatgcaaaaaattagccgggcgtggtggtgggcacctgtagtcccagctacttgggaggctgaggcagaatggtgtgaacctgggaggcggagcttgcagtgagccgagatcgcgccattgcactccagcctgggcaatagagcaagactctgcctcaaaaaaaaaaaaaagaaagaaaagaaacaggcgcagcggctcatgcctataattcaagcatattgggagactgaggtgggtggatcacctgagctcaggagttcgagaccagcctgaccaacatggtgaaaccccatctctactaaaaatacaaaaattaactgggtgggmcagacgcgttggctcacgcctgtaatcccagcactgtggg

SEQ ID NO: 949688 - DNA, 606 bp, Homo sapiens
ttgcaaactttgcaaatcaacaaaggtctaatatccagaatctataatgaacttaaacaattaaatgagcaaaaaccaaataaccctgttaaaaggtgaacaaaagacacgaacagacacacttcaaaagaagacatacaaacatccaacaaacatatgaaaaaaatacttcactaatcatcagaaaaatgcaaatcaaaactacagtgagataacatggtcacaactgctattattaaaaagtcagaaaataaggtgctggtgagtctatggagaaaagcgaatgtgtatacactcttgttggggatgtaaattagttcaactactgtggaaagctgtttggagttttctcaaagaacttaaaacagaactactattcaacctagtaatctcattactctgtatacactcaagggaaaataaattgtactgaaaggatacatgcattcatgttcagcacatctctatttacagtggcaaagccatcaacctatgggcccatcaacagtggatagaataaagaaaatatgttattgatacttatacactgtggaatattayatagccatgaaaaagaacaaaatcatattctttgcagcaacatag

SEQ ID NO: 949689 - DNA, 639 bp, Homo sapiens
agagccagcagacatataaaataggtagcatatccttgccctctcatgagatagtcaagcatttctccctcccaccattgaatgccaggcctaacctcatgccccttgctccctacatggtatccaaccttgcccttgatcttcataggccctggcctggttctcatcacttagtcctgatattctgtcttggcgctcaggatgaatgtttagactctgtttgtttttctcctccttgacttcagtcagatctcgctctcttttgggctatactattctagaccacctgaaaaatctccataagtcaacactgccctgggggctcctgcatcctataacctcatggatcagagtattactttcctattgctgctgtaataaattatcacaaaggcagtggcttaaggaacaaccttattatcttacggtttggagatcaaaagtccaaaatggttctcagtgggctaaaatcacgatgtcagcagaactttttttttttttttttttccctgagatggagtcttactctgttgcccaggctggtgtgcagtggcacratctcagctcactgcaacctctgcctcctgggttcaagcgattcttctgcttcagcctcctgaatagctgggattacaggtg

SEQ ID NO: 949690 - DNA, 821 bp, Homo sapiens
tctacaagttgtacaaggaaaaagctggtaccattcctactgaaatgatttaaaaaaaatyttttttaaaggagggacttcttcctaacttactctatggagccagcatcatcctgataccaaaccctggtaaagagaaaatgaaaggagaaaacttccggccaatatccttgatgaacattgatgcaaaaatgctcaacaaaatactggcaaaccaactccagcagcacatcaaaaagcttatacactgcattcaagtaggcttcatccccagatgcaaggatggttcaatgtatgcaaatcaataaatgtgattcatcacataagcagaactaaagacaaaaaccatatgattatcctaatagaggcataaaaggcctttgataaaattcaacatcacttcatgttaaaaactcttaataagctaggtactgaaggaacatatctcaaaatagtaagacccatacattacaaacccatagccaacatcataatgaatagtcaaaagctggaagcattccccctgaaaactggcacaatacaaggaagccctctttcaccactcctattcaacatagtattggaagctctggtcaaagaaatcaggcaagacaaagaaataaaggcattcaaataggaaaagaggaagccaaactatcctgtttgcaggtgatatgatcctatatccagaaaaccccattgtctcagccccaaagcattttaagctgacagacaacttcagcagtctcagcatacaaaatcgacctgccaaaatcactagcatttctatacactaaaaagagtcaagccaagagccaaat

SEQ ID NO: 949691 - DNA, 579 bp, Homo sapiens
tttttaacaaagctctattgagttataattcacaaaccataaaaaaatttcacccatttaaaatgtgtaattcaatgactaggcatattcacagagtggtgcaaccatcaccaaatcaatttagaacattttcattacactaaaaagaaacactataccccttagctatcacctccacttctccacgtatccaagccctaggcaaccaccaatctactctatagatcatactggtctctatagatttgtctattctggatatttcacataaatgcaatcatataaaaagtggccctttgtgactggcttctttcacttagtatagtgtttccatggttcgtccactcaatatttcatttttaatttttttattgccaaatgattttcaagtgtatgtgtgtaccatattttatttatccatttatcagttgatggatattatggctcttatgaataatgctgccattgacattcgcrtaaaagtttttgtgtagacatattttctcttgggtatatacctaggagtggaattgctgcatcatatggtaactctgcatttggccttttgaggaactgcca

SEQ ID NO: 949692 - DNA, 473 bp, Homo sapiens
acttctgtcatttcagccatctcagcctcagcccagttccaaacccttgctggagaggtgtcgcagtcatttggaggaaagtgggcactctggctttttgagtcttcygtatttttgtgctgattccttctcatctttgtgggcttatctaccttcagtcttcgaggttgctgccatttggatggggtttttgtgttttttttcttttgcaaaaatgaactcaagatggagtaaagaattaaatataaaacctaaaactataaaaacctcagaagaaagcctaggcaataccattcaggacatagacatgagcaaggatttcatgacaaagatgctaaaagcaattgcaacgaaacaaaaactgacaaatgagatttaattaaactaaagagcttctgcacagcaaaagaaactgtgaacaaataacctacaaaaagggagaaaacttggaatctatgcacctgacaaaggtc

SEQ ID NO: 949693 - DNA, 608 bp, Homo sapiens
tgctatcacaaaatgccatagactgggtggcttaaacaagagatgtttatttctcacagttctgaaggctgggaagtccaaggtgaaggtgccttggaattagtgtctggtgagggccctcttccttgtttgcagatggcaccttctcactgtatctttacatggtagagagagaaggggttctggcctcttcctcttcttaggagagaatcattcctatcatggaggctccaccctcatgacctcatctaaaccgaattaccttccaaatgccccacctataaatgtcctcatattggtgattacagcttcatcctaagaatctggggaggacacaaacatttagtttctaacactcagtttctaagtagaggttcggacctgtaggaatggaggctcctggaaaccagaggggtcagaagaaagccagacccatcagatttcttttatcagatgtcaacaaatcttcctcagtacccacctgtgcctgtggaaagctcttcccgtcagagcaatgctcaagacttcagtctgtccagatgattccatgacccacccttctattatccccagttgtagagcayagcacagcctaagcttggagatgg

SEQ ID NO: 949694 - DNA, 642 bp, Homo sapiens
ccacctatgaccttcccgtcagtcaccgttccgtgctttcctgtgtgccattcttactaatcttagggactttagtaacaacctcccaactcactcccctgtctccagtcagttcttaatcagagttatcctctatatacactgctgtatgctcagattttctgaagcactgactatttactaaatgtggttattatagaatttggaggaaaaggaaagcaaagtggcaactcaggttctaaaataagaataaaaaaatattgggttctagtgcttgctctcccattaacttcctgaccttgagtaagtctctaatctagtttttttaaaccatagctcatatgtgtagccgttctgattatactaacattttctgttagtgcagtcaagtttcagaaatagagtttgttatgaagacatcccaaatctagctaaaaagcctctagataatgctttccaaatgccttatatttctcaaattatgaacctttgtattaagatttatcttgaaaatctgtcactgttttaaatcattttcttgatgtgaatttctaattcagagaggcagtgggacttgtctaagatctcgcagkggctgaagatctgagccataaagggaccatgtggtagatgcatttcatc

SEQ ID NO: 949695 - DNA, 550 bp, Homo sapiens
gtcttagtggtggagccagacaccagagagcaatcaacttgcratattgacacagtgacaagagctgcctcaagagctgcatttaactccaggcaaccttgtagtgctctgttgtctgagtggactgcctacccagctaagatcccatctacctaatttccacatacaaccttacaatcaagcccccgctatttgaaataaccagagaggctctctcttgcttgcagagacatgattttattaaccccaggtcaccatctgagctcagcagccacaaggcagaaacaaacccagagtgtgtgcaaaggttgttaacaacatcagaagcaacccagaatagaagcagcagaatctctgctgaacagtctggggaaaccaaagccattttcttatagagagtctaaacatccacagggcaacttaattaaatcatccttttaccctgttagtaaaagaaaaggctgttaagaactcggtaccactgattcattcattcaacaaatatttatttatttatttatttattcatccatccattcatttttaagga

SEQ ID NO: 949696 - DNA, 566 bp, Homo sapiens
tgaaagggaagaggtggaaaaagatatttcatacaactggaaaccaaaaaagagcaggaatagctatacttatcagatcaaatagactgaaaatcaaagaccatagamacagataaagaaggtcactatataatgataaaaaggtctatttagcaacaggatgtaacaattataaacatctaagcacccaacaccaaagctcccaagtgtaaaacacaaacattaatagatttaaagggggagagagactgcaatacagtaatggtaggggacttcaataccccactctcagtaatggacagatcatccagacagaagatcaacaaagaaatattcgagttaagctacacactagaccaaatagtcctaaatgacgtttacagaacatttacccaactgctgcagaatacacattcttttcaacagcacatggagtattttctagaatagaccatattttagcccacaaaacaagtctcaacaaattcaagaaaacagaaatcttatcgagttcttttctgaccacaaaagaataacactagaaatcaataacaagaggaaccttg

SEQ ID NO: 949697 - DNA, 545 bp, Homo sapiens
aacaacagaaatctatttcacatagttctggagcctgggaaggctaagatgaaggtgctgacagatgtggtgttgtgagggtctgccttctggttcacagatcaccatcttctccttgtatcctctcatagtgggaagcagagagaaagaaaaagcaagctgtcttgtatctcattataagagaactaatcccagtcatgagagctctaccctcataacctaatcacctcccagaggccccacctcctaataccatcatattaggggctaggatttcaacatatgaatttgggattgacacattcagtccatagcagaatcacattttctagatgagatgtgtaaggctaaggtaactggcctaaggtcacagttctgataaatgggaaagctgaaaggtattaaggacctcggttacaccatagatgtttccttcaacctaaagggaactgcccttcattcttttgaggtatgaaataccattctaacaattcaatcatttattcaactgtgaatayattcttttgcttgcaaatgcaattttt

SEQ ID NO: 949698 - DNA, 564 bp, Homo sapiens
acttactatccccccaatagtgtataagcattcccttttctctgyagccttatcagcattttttgttttttgactttttagtaatagccattctgagtggggtgagatgatatctcattttggtactgatttatattttctgatggttagtgatgtggagcatttttcatatgttttttggtcactagtatgtcttctttggagaagtatctattcatgcctgctgctcattttcttttctttttttgaggcggtgtctcgctctgtcaccaggctggagtgcagtggtgcaatctcatctcactgcaacccccatctcctggattcaagcaattcttctgtctcagctcctgagtggctggtactacaggcgtgcgccaccacacccagctaatttttgtatttttagtagagacgtggtttcatcgtgttgaccaggatggtctcaatctcttgacctcgtgatccacctgtcttgacctcccaaagttctgggattacaggcgtgagccagcgcacctggcctgctgctcattttttaattgggttgtttgttttttgctt

SEQ ID NO: 949699 - DNA, 623 bp, Homo sapiens
gtcaagtgatcctcctcccttggcctcccaaagtgctggaattataggtgtgagccactgcactcagtcaaaagatagtatttagacaatacaaacgcaagctacatactggaaggaaatatttgcagaaacacgtatcagataaaagacttgtattcaaaatgtacaaagaacacttaaaacttaacaaaagaaaaataaacaacccaattacaaaatggacaaaagatctgaacaaacacctcaccaaaagaggtatccatataaaaataaacatataaaaagatgctcagcatcatatatcattagggaattgcaaaataaagcaaaatgagatgccactacacatctattagaatgactaaaatcaaaagcattgacaacaccagataggaactctcattcactgctgatggcaatgcaaatggagttccaaagtatagccactttgggaaacaatctagcagtttctcacaaagctaaacataggcttagtgcatgatccagcaatcatgctcctagttattyacccaaatgagtttaaaacgatgtccacccaaaaacctgcacaagaatatttgcagcagctttatttataatcactgaaacttggaagcaaccaa

SEQ ID NO: 949700 - DNA, 673 bp, Homo sapiens
ctgagaatctctgttctcagggagggagagtgggactttgtgttggaactcggtgctgccaacatgcacagacctcagcaaatgcccatggagggaccacttagagcagccctagccagagggaaatcacccattccagatgttacaacctgagttttggcaaaccttgccaccatgggctaaagtgttctgaggctctaaacaacttgaaaggcagtctaggccacaagaactgcaactcctaggcaagttttattgccgtgtggggtcagagccagtgggcttgaggtgcacatgacctagtgatatacctagctaaagaagtgggttgtgccatccctcccccaaccccaggcagcacagctcactgctccaaagaagaccccctcatttcacttcgagagaggaagagaaaagagtaaagaggactttgcaacttggataccagctcagccacagcaggatagggcaatgggtagagtagtgaggcccccatcttaggccctagctcctggaagacatttctagacacacatgggccagaagaaaacccactggcttgaagggagggatgyagtcctggcacaattcatcacctgctgactaaagagcccttgggcactgaataatcaggagcagtagccagttaggaaacaccctgggccttggatga

SEQ ID NO: 949701 - DNA, 802 bp, Homo sapiens
agtgatatacctagctaaagaagtgggttgtgccatccctcccccaaccccaggcagcacagctcactgctccaaagaagaccccctcatttcacttcgagagaggaagagaaaagagtaaagaggactttgcaacttggataccagctcagccacagcaggatagggcaatgggtagagtagtgaggcccccatcttaggccctagctcctggaagacatttctagacacacatgggccagaagaaaacccactggcttgaagggagggatgcagtcctggcacaattcatcacctgctgactaaagagcccttgggcactgaataatcaggagcagtagccagttaggaaacaccctgggccttggatgagactctgagatgtcctggcttcaggtgtgatctggcacattcacaactgtagtggctaccaagagagactccttctgcttaagaaaagcagagggaagagtaaagaggactctgtcttgcagtttagatacctcagccttgcagctcggccacagtgtggcagagtatgaagtgggatctcgggatccccaattccaggccttggctgttaggaggaatttctggacctatcttgggccagaggggagcccacttttgtgaaagtgggtcctaggtttagcaacatgcaccacaacctgactgaagagcccttgggccttaagtgaacattggctgtggcctggcaatactccccaaggacctrtggtggtggtggacataagagtctcctctgcttatcaaaaggggagggaagagtgggaaggacttt

SEQ ID NO: 949702 - DNA, 616 bp, Homo sapiens
aataattttatcaactaatgtcaayagaaaatttaaaaacctcagaaaatttattcacggatagttaagagttgatttcatgtcttttccctttataaaaaatcatcatttgagatttgttcataacttccatttatgaaagttaaaaaatgtatttatgtaaatttgatttacattctgatatcactaagaccttgagacaatatgatgctattaagactataactagactcttcttagaagcatctagtaattaaaccttgctaaagtttgaagttgggcatgtttgaactccatccaaaacatttgcagagaacatacagtataatcgctcatgctattgtcttgagtaccactgccagaaatagagtccaaagtgtattccacaatttcctctgcctgcaattatctttcttcttttatctggtgatggaagttttcttcttccttcaaatttagttcaagtatcaccaactccagaaatcctcccaacagggcctcaatccacttactctgaagtccagcacgcctactgcctttttgacctcttgaagtattttatcttatgcttggtatctgtattcctggcatcctggtgcctactaaaaggaaatct

SEQ ID NO: 949703 - DNA, 631 bp, Homo sapiens
tctcagctttgcatatgtaaggctgaaaccaaagtttcacaaaacaatacctacttttgaaaccacctttgcaaaattataactgaggaaatgacaacagtgaaagaaawcagacctaaccgactccatctcgcttctaacctttaagctgtccttgttcattcctgggcatgggctgaacaaactttgggatggaattcagttcatggtttgactctgacacagaattgataatagcagtttccggaaaagaccccctgcttgcctggggaccagtctgcctttgcaggactaacaaattagctacaagatgagaagttacagtttaggggtcatgcagcctctggctccaagagtctaaacccccccagattgctcctaggaataagatcactgttgtaaaacctaagatcagcgcttgagatattttgcagagcctgcattctgatgcaccagctaacaccacccagaccagtcatctggctcagccagttctgctatcccacccaggaacagaagacagcaagaaaaactcacttcaaacccctgattccatctccagtctggccaatcagcactccccatttcccaagcctctaccggccaaattatctttaaaagctctgatccc

SEQ ID NO: 949704 - DNA, 612 bp, Homo sapiens
ctggccccacccacatcctactgattggtgcattttacagagcgctgattggtccrttttgacagcgtgctgattagtgcgtttacaatccctgagctagacacaaaagttctccaagtccccactagattagttagacacagagcactgataggtgcatttataaaccttgagctagacacagggtgctgattggtgtatttacaaaccttgagctagacacagagtgctgactggtgtatttacaatcccttagctagacgtaaagattctccaagtccccactagattagctagacacagagcactaattggtgcatttacaaaccttgagctggacacagggtgctgattggtgtatttacaaaccttgagctagacatagagtgttgattggtgtatctacaatcccttagctagacataaaggttctgcaagtccccaccagatgagccagatacagagtgctgattggtgcattcacaaacctgagctagacacagagtgctgatgggtgcatttacaaaccttgagctagacacagagtgctgattggtgtatctacaatcccttagctagacataaaggttctccaagtccccactagactca

SEQ ID NO: 949705 - DNA, 735 bp, Homo sapiens
agaacatctgagcccccactgtttcatctttagaggatcccagctgctggggtgtgaggccagtgctggagccagcagtctctgacccagaagggacctgaggtgctaaagaaaagtaagttaccctctttgctaagtctccagacctgctttgagcataactgtgcttattggttaccacatttgtatttggtgcagggagttgtacttagtggctggagttcatatttgggactagagatcccgtaggaatctacagaggagttaagagttttaagtcctaaggaggcaatgtaagcagactgaggaatagaaaggagaaagcaaaaggggaagagaattgatggtaaacagggtacctttggggtctttccaaaatggagaagattcaaaaggtaaggcttccaatggtggctgcatttgccagtacacatcttccatcctctcttcttctggcattggctccatttcctacaccctgtctatgtgatgtaagtgggagtggccccatcctacccagatccagcaatgagcacatgagtcaggcttggccagtcactgaagtgcccctggtcagcatgattggttcatgcttgaacacctcactttaattagcccaattggcatgaattccagaacttttcagggataataaaaaaccatagctcttttttttttccacagggatcattatctataaarataatttaagcttggggatgcaagaatctccat

SEQ ID NO: 949706 - DNA, 750 bp, Homo sapiens
tgagggacacagagacagacacaggagagaaagattcagcgtaaagactagaatggcctttattcagagtaaagaacctgaaggcaggtctgagcatcaaaacccattgatagcatgctgttgggccatttccacctctcagtttccccctgtgcaactgctgggactagatcaaggatgatgaataagtttcattttgtgtgccaactccaatctgtcagtagtcacttaagcactgtattgaaaggatctgaggctacacctgggcttatagagaaagactatagtgatggattagcaatgtctgccattgatgtgggcgaggagaattacaacacacatgccaggtgttgtctgtctctgaagtagattgcctctaaattcaaatttcagctctgacattcaatgattccatgccaccatgacaaaaatgcaagatcttttcactagaccaagtttttctctaaaattgcggctattacctgtcatcactgggtatgaagaaaaaatatatactacaaggaatatttaaagagggaacatttgtggtttttcttcttttctcccagagcttctagaaatatgaacattttagagagctggaggctgttttttgcatcccttggaragatggaagaaggcagacagctggaaaaatttaggacagttgtaaattatttaggaccctttgctttacttgtattttccaaaagaacacaggcaccaagctttcagctgcattcaccctgc

SEQ ID NO: 949707 - DNA, 564 bp, Homo sapiens
acgctcatccctactttttctcagaatactgctgtggatctaccacgaggctctgtggccctggtgctgccttttaactatgaatgtatgtagcgagttggaagcctctakcctggagcaagccacgctgccctaaatgggatgtgctttgagaaaggggttttgaagttgataatgaaagtaattcttcccctaatggagccgaaatagcacaccttgaaagcctgtcaagcacagaatagtttaaaagagaaagaaaaaaaagacacaaaaattagaagtgccaccataatccactccctaaaaagaggaatataattcaagaaacagtgagttatctaaactgaatagcaggaagagacccatcaactgtcttgcaaggagctgcagctgtgaaagctccctggtgtacacgtgcctctgttgggagagtagcaacctgaactgtagtcggtcaagtacatgtcaatgtgaacaggggtagagtgctttactggagagaccaccttgataatggaaggagatagaagcattcatgccctattgctcaaagcaggaagcaca

SEQ ID NO: 949708 - DNA, 603 bp, Homo sapiens
ttccatggacagacattttatatttgaagaaactcgaatctatattccaagaagttaagaaacaagatcaygcaatgaggaaatagcagaactagaatgcaaaccaacttttgttacccaggagtctcaactaaaggtctgcctgccctgccgagggcactcccctctctgcggtttctcttctacactcctgccacactggccccagtgctgccatgtccactcccagggctctgcacttactcttccttctcttttaagtattttttcgctagctgttcccagagctgcaccctcctcatcctttaggcctcaacccaaatgttacttactcagagagttcttccctgaccacccagcccacacttctgtgactgtacaagtttcctggggctgctgaaacaaatgactgcaaagttggtgacttaaaccaccacaagttggctgggtgtggtggctcacgcctgtaatcccagcactttgggaggcccaggcgggcggatcatgaggtcaggagattgagaccatcctggccaacgtgatgaaacctcatctcaactaaaatacaaaaaaattagccgggtatggtggtgtgtgcctata

SEQ ID NO: 949709 - DNA, 591 bp, Homo sapiens
tctgtctggtcttgggttttttgtttttttttgttttgttttgtttttctggttggtaggctactactgcctcaatttcagaacttgttattgttctattcagggatttgactgttttcctggyttagtcttgggagggtgcatgtgtccaggaatttctccatttcttctagattttctagattttatttccatagaggtgtttatagtattctctgatggtaattagtatttctgtgggatcagtggtgatagtccatttatcattttttattgtgcctatttgattcgtctcacttttcttctttattagtttggctagtggtctattttgttaatcttttaaaaaaaccagctcctggattcattgattttttgaaaggtttttcatgtctctgtctccttcagttctgctctgatcttaattatttcttctcttctgccagctcttgaatttgtttgctcttgcttctctagttcttttaattgtgatgttaggttgtcaattttagatctttcctgctttctcctgtgggcattttagtgctataaatttccctctaaatgctgcttttgctgtttcccagagat

SEQ ID NO: 949710 - DNA, 756 bp, Homo sapiens
aaggtagtcatcaataccagctttttttttcttgagacagagtttcgctcttgttgcccagactggagtgcaatggcacagtctcggctcactgcaacctccgcctcccaggttgaagtgattctcctgcctcagcctcccaagtagctgggattacacggtacccacgaacacaccgggctaatttttgtactttttagtgggatagagtttcaccatgttggccaggatggtctcgaactcctgacctcaggtgattcgcccacctcggcttcccaaagtgctaggattactggcatgagccaccttcttttgttaaaaacttggtttgtgcatgtatacacttgtactaagaaaatatcttcattttatttcctttctcttttatcatgtaagatttattgacttcacatcagcacatcacatcagcataaagtattgttaactttatgtaatagtatttgggttggggattggtgcatttccggttgtatgaaggatagttatattatcttaggtgtaattatgaccttattattgtctttatttgaagattatgtatgatctcaggagatgtgtatgggttcaagttgacaaagggtggacttgtgatggttaatactgagtgtcaacttgattggattgaagtattgatcctgggtatgtctrtgagggtgttgccaaaggagattaacatttgagtcagtgggctgggaaaggcaaacccacccttaatctgggtgggtgggcacaatc

SEQ ID NO: 949711 - DNA, 815 bp, Homo sapiens
ccactgcactccaccctgggcaacagagagagactccatctctataacagcaacaacgacaactgttgcaggaagtcagggactttgaacagagggactggctggagctctggcagaggaacataaattgtgaagatttcattttaatatggacatttatcagttcccaaaattaatacttttataatttcctatgcctgtctttactgcaatatctgaacataaactgtgaaaatttcatggacatttatcagttcccaaataatactcttataatttcttatgcctgtcttactttagtctcttaatcctgttatcttcgtaagctgagaatgtacgtcacctcaggaccactattgtacaaattgattgtaaaacatgtgtgtttgaacaatatgaaatcagtgcaccttgaaaaagaacagaataacagcaattttagggaacaagggaagacaaccataagggctgactgcctacagggtcaggcagaatagagccatatttttcttcttgcagagagcctataaatggacatgcaagtagggaagagaccgttgaattcttttcctagcaaggaatattaatagttaatatcctggggggaaggaatgcattcctggagggaggtcaataaatggccgctctgggagtgtctgtcttatgtggttgagataaggactgaaatacaccctgatctcctgcagtaccctcaggcttattaggakgggggaaaaaaccccaccctggtgaatttgaggtcagactggttctctgctcttgaaccctgttttctgttgcttaagatgtttatc

SEQ ID NO: 949712 - DNA, 673 bp, Homo sapiens
attggtaccgaaatggtagggcgctactataaggatacctgaaaatgtggaagcaattttggaactgagtaacaggcagagggtggaacagtttggagggctcagaagaagacagcaagatgtgggaaagtttggaactttctagagacctgttgaatggttgtcaccaaaatgatgatagtaatatggacaatgaagtccaggctgaggtggtcttagctggagatgaggaacttcttgggaactagagcaaaggtgactcttggtatgctttagcaaagagactggttggcattttgcccctgccctagagatctgtggagctttgaacttgagagaaaaatgatttaggatatctggcagaagaactgtctaagcagcaaagcattcaagagaaagcagagtgtaaaattttggaaaatttgcaggctgatgatgcaatagaaaagaaaaaccaattttctgggaagaaattcaagcctactacagcaatttgccataagtaacaaggagctgaatgttaatcaccaagacaatgggaaaatgtctccatggcatgtccmtggggaaaatgtccttcatggcagcccctgccatcacaggcccagaggcctaagaaggaaaaatggtttcctggtctgggttcagggcccccttcctctgtgcagcctcc

SEQ ID NO: 949713 - DNA, 687 bp, Homo sapiens
taaaagaggccaatgtacagctcaggctgttgcttcagaaggtgcaagccccaaacccttgcggcttacacatggtattgggtctgtgggtgcacagaagtcaagaattaaggtttgggaacctccacctacatttcagaggatgtatggaaacacctgggtgtccaggcagatgtttgctgcaggggcagagcccccatggagaacctctgctacagcagtgtggaagggaaatgtggggttggaggcttcacaaagagtcccctctggggcactgtctggtggatctgcgagaagaaggccaacatcctccagaccccagaagggtagatccactgacaacttgcactgtgagcctggaaaagccacaggcactcaacactagcctatgaaagcagtcaggagggggcctgtaccctgcaaagccacagggagcttgggcagagctgcccaaggctgtgggagctcaccttttgcatcagcatgacctggatgtgagacaggagccaaaggagatcattttggaattttaaggtttaatgactgcccgactggattttggacttgcatggggcctgtagcccctttgtcttggtccaatttctcccattcagaatgggtgtatttacccaatgcctgtacccacattrtatctaggaagtagctaatttggttttgattttacag

SEQ ID NO: 949714 - DNA, 578 bp, Homo sapiens
tggctagaacttccaatattatgttgaatagaagtggtgaatgtgggcatccttgtctcattccagttctcaggggaaatgctttcaacttttccccattcagtataatgttagctgtggatttgtcataggtggcttttattaccttaaggtgtgtcccttctatgccaattttgctgagggttttaataataaagggatgctggattttgtcaaatgctttttatgcatctattgagataatcatgtgattttgttttcaattttctttatgtggtgtatcacatttattgacttgtggatgttaaatcatccctgcattcttggtatgaaacccacttgatcatggtggattatctttttgatatgctgctggattcagttagctagtattttgttgaggatttttgcatctatgttcatcagggacattggtctgtggttttctttttttgttatgtcsttccctggttttggtattagggtgatactggcttcaaaaaatgatttagggaggatttcctctttctctatcctgtggaatagtgtcaatagaattgataccaatttttctttga

SEQ ID NO: 949715 - DNA, 578 bp, Homo sapiens
tggctagaacttccaatattatgttgaatagaagtggtgaatgtgggcatccttgtctcattccagttctcaggggaaatgctttcaacttttccccattcagtataatgttagctgtggatttgtcataggtggcttttattaccttaaggtgtgtcccttctatgccaattttgctgagggttttaataataaagggatgctggattttgtcaaatgctttttatgcatctattgagataatcatgtgattttgttttcaattttctttatgtggtgtatcacatttattgacttgtggatgttaaatcatccctgcattcttggtatgaaacccacttgatcatggtggattatctttttgatatgctgctggattcagttagctagtattttgttgaggatttttgcatctatgttcatcagggacattggtctgtggttttctttttttgttatgtcgttccctggttttggtrttagggtgatactggcttcaaaaaatgatttagggaggatttcctctttctctatcctgtggaatagtgtcaatagaattgataccaatttttctttga

SEQ ID NO: 949716 - DNA, 578 bp, Homo sapiens
tggctagaacttccaatattatgttgaatagaagtggtgaatgtgggcatccttgtctcattccagttctcaggggaaatgctttcaacttttccccattcagtataatgttagctgtggatttgtcataggtggcttttattaccttaaggtgtgtcccttctatgccaattttgctgagggttttaataataaagggatgctggattttgtcaaatgctttttatgcatctattgagataatcatgtgattttgttttcaattttctttatgtggtgtatcacatttattgacttgtggatgttaaatcatccctgcattcttggtatgaaacccacttgatcatggtggattatctttttgatatgctgctggattcagttagctagtattttgttgaggatttttgcatctatgttcatcagggacattggtctgtggttttctttttttgttatgtcgttccctggttttggtattarggtgatactggcttcaaaaaatgatttagggaggatttcctctttctctatcctgtggaatagtgtcaatagaattgataccaatttttctttga

SEQ ID NO: 949717 - DNA, 593 bp, Homo sapiens
tcaaatatatcaaaataaataaataaataaataaacagaggccagagaagttagggggcagaccgctgtggaagtagctactctgtgggctccccactgggcccaagaacaagacacacaggaagccagagaccaactgtggtgcttgaccctccatgtggcaaagtgagacaggaaagccacgagaagtcagtgagggatgtgaagacctgtgttgtgggggactcagaggtcccctgatgtgttggctgcatgctgtcgataaagctgaggctcagagagggaaggttaccagcctgaagtcacacagccgcccagggacaagagccaggaccagaactcagcccgcctcccagcccagggcccgctgccctgctcctattctctggttaagaaggaaaacaactaatgcctttgagagcaccagtgctcggtgcagtgcccggcccacccggcaagcaccgtataggtattcacgcacttaacctcacaacaagctrtaagtgaaggactattactatccctgtttgacaaaggtggaaactgaggcacagagcccctcggtaactgttcagggcagcacaactcatgat

SEQ ID NO: 949718 - DNA, 657 bp, Homo sapiens
cagctgtccatcttgccaccactyccagtctttccaccccatccccacctcatccatccccaccctcacccctgatctgatctaggtctgctgatctaaatcagggtgcccatacaattttccatcccgcctgggcacttccaagaaccgaaggggatgctctcaataattacaccagaacacgggagacaggatgcacggtcaccccacccatgagggctcagcctccacacccaggcatctttgcacttctcacacctctattgtgattactgcctgatgcaggcatttgctgagcagcctcgggcaagtcacttggtctctctgactctccatatcctcgtctagagtgcaggaatcttaagagttcctagagttgctgtgagagtgaaatgtctttcacattttaaagatgatgtctttaaagtgtctgaacacagtggatacatagtaaacagcaatgtttatgtttagctcacccaggaatacataagccccacataagacacaggcacacacatcccttctctctcaggaacaccagctcacacacatgcaaagtcatgtgccacaggtgtatacacaaacactgccacactgggcacactcacacactagcactcactctgcagatcaggtgggtttggctgtgagctt

SEQ ID NO: 949719 - DNA, 583 bp, Homo sapiens
aaagctaattcaccacaatcaagtaggctttatctctgggatgagagattggttcaacatatgcaaatcaataaatgtgattaatcacagaaacagaactaaaaactaaaacgacatgatcatctcaatagatacataaaaggctttcaataaaattcaacatccctttacattaaaaactctcaaactaggcattgagttaacatatcttcaaataataaggggcgtctatgaaaaacccatggtcaacatcatactgaatgagcaaaagctggacgcattccccttgagaactggaacaacacaaggattcccactctcgccattcctattcaatatagtactggaaatcataaccagagcaatcaggcaagtgaaaaacataaaaggcgtccaaataagagaggaagtaaaattatcctcatctgcagatgatataattttatggctagaaaactccataktctctacctcaaaactgggtctgataaacaacttaagcaaagtttcaggatacaagatcagtccatttctgtgtactaagaatatccaggctgattgccaactcaagaaccaatctcat

SEQ ID NO: 949720 - DNA, 619 bp, Homo sapiens
ccaagtattgatgataagtaaaactgtgattccttaaggacagttttaagttgctatctcattttgttggggcrggggggcatcgatttttattattaaagtataattgcataagatatatagatctaaaattaactattaggtaaatacactagcataaacatcactcagcagaagacatagaaaattatcagcatcacggggatatctctcatgtccctccctgatattatgcactctccccaaaatcatcaatattctgatttctatcatcttgagttatttaggctaggtttagcatttgtttaaatggctagcacaaataaagctggtatgagtatacatacgcttatttgggtatttactaagagtaaaatttccacgtcgtacttagagctagtataaaacctaaatgagtttcccaataaattttatcaatttagattcccaacagcaatgtacaagatatttagttgctccaaatccttactcacttttgcttttgtcatgtgtgtgtgtttcatactaatattctcacaggtacatggtagtatttcattgtggttttaatttgcatttccctaatgattgaaatgggcacgtttgcccatttgaatat

SEQ ID NO: 949721 - DNA, 619 bp, Homo sapiens
ccaagtattgatgataagtaaaactgtgattccttaaggacagttttaagttgctatctcattttgttggggcaggggggcatcgawttttattattaaagtataattgcataagatatatagatctaaaattaactattaggtaaatacactagcataaacatcactcagcagaagacatagaaaattatcagcatcacggggatatctctcatgtccctccctgatattatgcactctccccaaaatcatcaatattctgatttctatcatcttgagttatttaggctaggtttagcatttgtttaaatggctagcacaaataaagctggtatgagtatacatacgcttatttgggtatttactaagagtaaaatttccacgtcgtacttagagctagtataaaacctaaatgagtttcccaataaattttatcaatttagattcccaacagcaatgtacaagatatttagttgctccaaatccttactcacttttgcttttgtcatgtgtgtgtgtttcatactaatattctcacaggtacatggtagtatttcattgtggttttaatttgcatttccctaatgattgaaatgggcacgtttgcccatttgaatat

SEQ ID NO: 949722 - DNA, 498 bp, Homo sapiens
  misc_feature 170: n = A,T,C or G
ggtgcatgctgggaggtcaggacctgtgagggctgtgggggcatcaggtggagtgggctccaggtgcaccctcagtgcaccaggcaggtctcaggccaggctccctggaccccggctgggtgatgtggtcactccctgggggactgttgtcagaccctggccaccctccntgggcagcaccgtcccatcccagaactggactttctgagttctaaaacaggacagtgctgcccaggcctgacagactgggaggacctgtgaagtcctccatccctagaccagcctcccaacagcagggacagtctcctacctttaccttcaggtaaaggtactgatacatctcattctaaggcaaccaaggcagagctgaggacctgtgccaggctgggagccagttctctccctaaatgggccttagggaagcctcatscctgtcccagtgcactgcaagtttcagcccaggagacacatagggaagtgaggaaggggtctccccac

SEQ ID NO: 949723 - DNA, 579 bp, Homo sapiens
cttgtgcctacaccaccagggccctggatttcaagcacaaaactgggcagctttttgggcagacactgagctagctgcaggagtttttatgtccctcagtggtgcctggaaccccagtgagacagaatcattaacccccctggaaaggggtctgaagccagggagccaagtggtctcattcagcaggtcccactcccacagagcccagcaagctaagaaccacaggctttaaattttcactgccagcacagcagtctgaagttgatctgaaatgattgagcttggtggggggaggggcatcccccattactgagacattagtaggcagttttcccctgaccgtgctaaggaggctggaaggtttggactgcgcagaattcaccacagcgtggcaaagcatctgtggccagactgcttctctagattcctcatcactgggcagggcatctctgaaagaaagacagcagcctcagtcaggggcttacagataaaactctcaactccttgggacagagcacctggggaaaggggcggctgtgggtgcascttcagtggattaaatctttcctacctgccagc

SEQ ID NO: 949724 - DNA, 542 bp, Homo sapiens
ttcacacttctgtgagaatctaatgctgctgctcatctgacaggaggcggagctcaggctgtaatgtgagtgatggggagcggctgtaaatacagatgaagctttgctaactcactggccacttacttcctgctgtgcagcctggttcctaacaagccacagacaggcactggtccatggcccaggggttggagacacgatctctttgcccctttcaggttctagaggctatcttcattccttagcacgtggcctctcatcactttgccttttctccttctgcttcctttgtcacattgccttcttcctgactgatcctcctgcctcttcctataaggagctatgggattaaattgggaccacgtggctaaccagggatagcttccccatttttggctccttgatttaatcacaactgcaaagcctcttttaccaggtgctatggtctgaatgtttgtggatccctcaaaattcatrtgttgaaatcctaacccccaaggtggtggtattaagaggtggggtctttgggaggtgattcggtc

SEQ ID NO: 949725 - DNA, 656 bp, Homo sapiens
agcacagcatccatgctctatttctgtgttcaatgggtcacctctgcatgattaattcaacaaggattttttttttaatcaactctctgtgccagagcctgtgctgagtactggacacagagggtagacaagatccccagtgtcctggagcttgcattatagcatgtggagacaaacaggtaaacaagcataaataaggttaactgtggactgagagaagcattacagagaaaacaaaagtgaacaatgtgatggagactagctgagcttggaggaaaagaggttagctacttggagtgggtgttcagggatggcctggcctcactgagaaggtgactgtgacatcatggtgaattacataatgtgactttccaagggaagcatattccaggtaaatagacagcacaaagagcctgaagctaaaataagcttggtgtgttcaggagcggagaggtagctagggaggccagaggggagtaagcaaggcaaagagaggtaggaggtaatgttaggtagcaggtgatggcagagagrtatccagggacagaccaggcagaagcttgtaggccatagtgtgctgttagaattttattccaaatgtggtataagagttttaagcaggagagaaacaggagatggtttaggttttcacaaga

SEQ ID NO: 949726 - DNA, 656 bp, Homo sapiens
agcacagcatccatgctctatttctgtgttcaatgggtcacctctgcatgattaattcaacaaggattttttttttaatcaactctctgtgccagagcctgtgctgagtactggacacagagggtagacaagatccccagtgtcctggagcttgcattatagcatgtggagacaaacaggtaaacaagcataaataaggttaactgtggactgagagaagcattacagagaaaacaaaagtgaacaatgtgatggagactagctgagcttggaggaaaagaggttagctacttggagtgggtgttcagggatggcctggcctcactgagaaggtgactgtgacatcatggtgaattacataatgtgactttccaagggaagcatattccaggtaaatagacagcacaaagagcctgaagctaaaataagcttggtgtgttcaggagcggagaggtagctagggaggccagaggggagtaagcaaggcaaagagaggtaggaggtaatgttaggtagcaggtgatggcagagaggtatccagggacagaccaggcagaagcttgtaggccatagtgtgctgttagaattttattccaaatgtggtataagagttttmagcaggagagaaacaggagatggtttaggttttcacaaga

SEQ ID NO: 949727 - DNA, 720 bp, Homo sapiens
ttcagcactcctctgccttattactcctctcccctccctctatcagtgccccttccttttccctttagacamtcttctttccattgtcctttataccttggtgtgaattcagataaaggagttgcctcccctgggattatttgcaattcaagtttcatctctatattgtggaataaaagactcatcttctgttaaaaggtttgtgggtaaaactgagcagaagaggttttttgggcagagacattatcccaaatccctctcaaaccaggaaaccagacctaccaggggcagggaggtgtgggatggaatgagaggggcttaatactgtgactgaggagcagccagcctgtgacttccagggcaactggaagatttgcttgttcatgggacttatttttaatgcatagacatgggtgggatctagctgtggtggtggcctgcctgcttgagggtcttgtggaatgttctgggggaaatgcagctactgttcagggcagcctcatgatccctgctcccatctctataggcctctcagtctcctatgccacaaaccaagctagaaacaagctacaacaggctccttcactacctttggggcccaaagtcccctccccagctattctccttccccctctattgctcctgagggtccagacactcctcctttaggccctgtaaccccaaagggctgatcttactctctttttcaggcaacagagc

SEQ ID NO: 949728 - DNA, 720 bp, Homo sapiens
ttcagcactcctctgccttattactcctctcccctccctctatcagtgccccttccttttccctttagacactcttctttccattgtcctttatacmttggtgtgaattcagataaaggagttgcctcccctgggattatttgcaattcaagtttcatctctatattgtggaataaaagactcatcttctgttaaaaggtttgtgggtaaaactgagcagaagaggttttttgggcagagacattatcccaaatccctctcaaaccaggaaaccagacctaccaggggcagggaggtgtgggatggaatgagaggggcttaatactgtgactgaggagcagccagcctgtgacttccagggcaactggaagatttgcttgttcatgggacttatttttaatgcatagacatgggtgggatctagctgtggtggtggcctgcctgcttgagggtcttgtggaatgttctgggggaaatgcagctactgttcagggcagcctcatgatccctgctcccatctctataggcctctcagtctcctatgccacaaaccaagctagaaacaagctacaacaggctccttcactacctttggggcccaaagtcccctccccagctattctccttccccctctattgctcctgagggtccagacactcctcctttaggccctgtaaccccaaagggctgatcttactctctttttcaggcaacagagc

SEQ ID NO: 949729 - DNA, 720 bp, Homo sapiens
ttcagcactcctctgccttattactcctctcccctccctctatcagtgccccttccttttccctttagacactcttctttccattgtcctttataccttggtgtgaattcagmtaaaggagttgcctcccctgggattatttgcaattcaagtttcatctctatattgtggaataaaagactcatcttctgttaaaaggtttgtgggtaaaactgagcagaagaggttttttgggcagagacattatcccaaatccctctcaaaccaggaaaccagacctaccaggggcagggaggtgtgggatggaatgagaggggcttaatactgtgactgaggagcagccagcctgtgacttccagggcaactggaagatttgcttgttcatgggacttatttttaatgcatagacatgggtgggatctagctgtggtggtggcctgcctgcttgagggtcttgtggaatgttctgggggaaatgcagctactgttcagggcagcctcatgatccctgctcccatctctataggcctctcagtctcctatgccacaaaccaagctagaaacaagctacaacaggctccttcactacctttggggcccaaagtcccctccccagctattctccttccccctctattgctcctgagggtccagacactcctcctttaggccctgtaaccccaaagggctgatcttactctctttttcaggcaacagagc

SEQ ID NO: 949730 - DNA, 720 bp, Homo sapiens
ttcagcactcctctgccttattactcctctcccctccctctatcagtgccccttccttttccctttagacactcttctttccattgtcctttataccttggtgtgaattcagataaaggagttgcctcmcctgggattatttgcaattcaagtttcatctctatattgtggaataaaagactcatcttctgttaaaaggtttgtgggtaaaactgagcagaagaggttttttgggcagagacattatcccaaatccctctcaaaccaggaaaccagacctaccaggggcagggaggtgtgggatggaatgagaggggcttaatactgtgactgaggagcagccagcctgtgacttccagggcaactggaagatttgcttgttcatgggacttatttttaatgcatagacatgggtgggatctagctgtggtggtggcctgcctgcttgagggtcttgtggaatgttctgggggaaatgcagctactgttcagggcagcctcatgatccctgctcccatctctataggcctctcagtctcctatgccacaaaccaagctagaaacaagctacaacaggctccttcactacctttggggcccaaagtcccctccccagctattctccttccccctctattgctcctgagggtccagacactcctcctttaggccctgtaaccccaaagggctgatcttactctctttttcaggcaacagagc

SEQ ID NO: 949731 - DNA, 584 bp, Homo sapiens
cagtccctggttcgtggatagcacctcatgactaacctggggcctgggggaaataactgcccaggtagccaggtagttgtttcagcaggtgttgggcaagatcctggcttcaggtatgacccagcacagtcccagtgaccacaggggtgcttgtgtcacctcatccccagttgcaggtggctcagaaagagagagaaacatttttttgtgagaaagtaagggaagagaataagagtgtctgcctggcaatctatagatttcttctggatcttattcaagacgatcaaggtggtacctctatgactgtgcaagaaccacgggataactgggcttggggtggcccccaacagaaacacaacttataacacaacaccttattccttttgaatatttggaaagctttcccaagaaggacaggtacaaacaagcccagactgtgaagaccacagtaaataccaaacccttcaatgctcaggcatagatggacatacacaataatcaagatcatccaggaagatatgaactcaccaaatgarccaaataaagtaccagggaccaatcctagagaacagacatatgtgacc

SEQ ID NO: 949732 - DNA, 796 bp, Homo sapiens
gaggttccagtaagctaagatcatgccattgcatgtcagcctgggtctcaaaaataataataaataaaaattttaaaaagaagggctttttacctttagctttatttttaacatgcatatagtaaaatggttcaacttaacatagtggaaacattgatgaatttgatttagttaaactctttaaaatggtgtgtttttatttacattttaaaaattgcacccaacactttggccattgaaagaatctataaacagtaagatttttcataatccaattgaatctttcatgggcaactggcaaattgtaactcaaaaagtaaaatgtctcctgctaattcaatatgtaatttatatagcttaattttacccaattattatatagatgatcatttttctctagaaaacaagcatttttttaaaccatgaagaaattattatagaaagtgttaaaggatttgagttcataagagttcaacttgtatgaattaaatggtgtgaaaaatatatatccttacttatcaatgtagtattaaaagaaatcagcttttaaaaacctaatatttggttttattctcagtattaaaaacctagaccctttttacttcatgtacattgtgtccatcttttgtccaatggcaaatcagattgctgctgaacactataaaaattaaggacaaaatttaaaaaccagaaatcaggctayggttccagctacacatttattggtagaatgcacaataacctgtactgtttctatcagcaaagaggtttatttcatttaagctttttttcctct

SEQ ID NO: 949733 - DNA, 602 bp, Homo sapiens
acaggagaaaatcttcataaygttgggatacgataagatttcttaaacatcacacaaaagtggtaaccataaagggaaaaaaagaataaatcagattacattaaaattcagatttttttctttgacagacaccaagaggataatcaaaaggcaaggaagagtgaaaggagataaatgcaatgcatatacccgataaaaactcatatccagaatctataaaaaattgttacaaattattaagaacaaagataattccaatagaaaatgagcattttaccacaagaagtcatgcaaatagccattaaatatatgggacagtgttcatcttaattaggcatcaaaagagtacaatttaaaaccacaatgtattacccctacacactcatcaggatggctaaaatgaaaaaaaaaaatagaaaaacggaactcttgtaatcttatgggggaatgcaaattcatagaaccatttggaaaactgcttgatgagtatctactaaagctgaagatatacacactatagattcagcaattttactcttaggtactccttccagaaaaggttgtacacatgtagataaaaaggcatgtacaaggaggtaggc

SEQ ID NO: 949734 - DNA, 602 bp, Homo sapiens
acaggagaaaatcttcataatgttgggatacgataagatttcttaaacatcacacaaaagtggtaaccataaagggaaaaaaagaataaatcagattacattaaaattcagatttttttctttgacagacaccaagaggataatcaaaaggcaaggaagagtgaaaggagataaatgcaatgcatatacccgataaaaactcatatccagaatctataaaaaattgttacaaattattaagaacaaagataattccaatagaaaatgagcattttaccacaagaagtcatgcaaatagccattaaatatatgggacagtgttcatcttaattaggcatcaaaagagtacaatttaaaaccacaatgtattacccctacacactcatcaggatggctaaaatgaaaaaaaaaaatagaaaaacggaactcttgtaatcttatgggggaatgcaaattcatagaaccatttggaaaactgcttgatgagtatctactaaagctgaagatakacacactatagattcagcaattttactcttaggtactccttccagaaaaggttgtacacatgtagataaaaaggcatgtacaaggaggtaggc

SEQ ID NO: 949735 - DNA, 586 bp, Homo sapiens
gaacataatttcttactaatagagtttctctagccagacaatgagattattgagagcaaaactacgcattatttatcttgtttcttgctcacctagtatggcgctggaaacttggtagttattcaataaatatttgttgaatacatgcaaagaaaaaaacaactcagtgtcccagactagttttctcacatttctggatcatgcttttttctgactcaaagtttttactcaattttccttctgcctggaaaaactttttgactcctttccacataaccaaattctacctattctttaaaattcttcttaaatttcacctcttccatgaaattcctcaccaatttattctcttctctgtactcctctaactcttgttgaaagaaagtttcggggccgggcgcggaagctcatgcctgtaatcccagcactttgtaagacgaaggcgggcggttcacgaggtcaggagctggagaccatccyggctaatctggtgaaaccccatctctactaaaaatacaaaaacttagccaggtgtggtagcacgtgcctgtagtcccagctactcgggaggctgaggcagaagaat

SEQ ID NO: 949736 - DNA, 645 bp, Homo sapiens
acccgttctaggaagtgaggagcmcctctgcctggccaccaccccgtctgggatgtgaggaacatctctgcctggccaccccatctaggaagtgaggagttcctctgcccggctgccctgtctgggaagtgaggagcgcctcttcccagccaccccatctgggaggtgaggagcacctctgcccggctgcccattgtctgggatgtgaggagcacctctgcctggctgccaatcatctgggatgtgagtagtgcctctgtccagatgccatgctttctaggaagtgaggagtgcctctgcccagccaccttgtctgggaagtgatgaacgcctctgccccaccagcctgtctgggaagtgagaagtgactctgcctggctgccccatctgggaggtgaggagtgtctctgtatggctgccccgtctgggaggtgaggagtgtctctgtatggctgccccgtctgggaggtgaggagcgtctctgcccggccaccccatctgggaggtgaggagcgcctctgcctggccgccccatctgggaagtgagcagcacctctgcctggccactgtgcaatcttccaagtgtgaagtgacagcctttctgcaagtgcacccaacagctctgaagagacagcgaccatcaag

SEQ ID NO: 949737 - DNA, 645 bp, Homo sapiens
acccgttctaggaagtgaggagcccctctgcctggccaccaccccgtctgggatgtgaggarcatctctgcctggccaccccatctaggaagtgaggagttcctctgcccggctgccctgtctgggaagtgaggagcgcctcttcccagccaccccatctgggaggtgaggagcacctctgcccggctgcccattgtctgggatgtgaggagcacctctgcctggctgccaatcatctgggatgtgagtagtgcctctgtccagatgccatgctttctaggaagtgaggagtgcctctgcccagccaccttgtctgggaagtgatgaacgcctctgccccaccagcctgtctgggaagtgagaagtgactctgcctggctgccccatctgggaggtgaggagtgtctctgtatggctgccccgtctgggaggtgaggagtgtctctgtatggctgccccgtctgggaggtgaggagcgtctctgcccggccaccccatctgggaggtgaggagcgcctctgcctggccgccccatctgggaagtgagcagcacctctgcctggccactgtgcaatcttccaagtgtgaagtgacagcctttctgcaagtgcacccaacagctctgaagagacagcgaccatcaag

SEQ ID NO: 949738 - DNA, 580 bp, Homo sapiens
ggctccaaatatccacttgcaggttctacaaaaagagagtttcaaaactgctcaacccaaagatactttcaactctgtgagatgtatgcacacatcacaaagwagtttctcagaatgcttctgtgtagtttttaagtgaagatatttccttttccaccataggcctcaaagctctccaaatatccacttgcagattccatgaaaagagtgattcaaaactgctcaatcaaaggaaagattcaactctgtgagatgaatgcacacatcacaaagtaatttctcagaatgcttctgtgtagtttttatgtgaagatatttccttttccacagtaggcctcaaagcgctccaaatatccagttgcagattctataaaaagagtgtttccaaactgctcaatcaaaagagagggtcccatcaatacgtaatttattgagagtttttagcatgaagttttgttgaattttgtcaaaggccttttctccatctatggatataatcatgtagtttttgtctttggttcggtttatatgctggagttatgtatgacaaatccacagcaaatatcatactgaatgggca

SEQ ID NO: 949739 - DNA, 618 bp, Homo sapiens
ccaaatatccacttgcagatttacaaaaagtggtttccacactgcccaattaaaagtaaggttcaactctgtgagatgaatgcacatatcacaaagaagtttctcacaatgcttctgtgtagttattaagggaagatattttcatttccaacctaggccacaaagggctctgaatatacacttccagattctacaaaaagagagtttcaaaactacacttgcaaaaggtaggttcaagtcagtgagttgaatgcacacatcacaaagaagtttatcagaatgttactgtgtatttttcatataaagatatttccttttccaccataggcctcaaagcactccaactatccacttcctgattcaacaaaaagagtgtttcaaaactgctctatcaaaagaaagtttaagcactgtagttgaatgcacacatcacaaagaagtttatgagaaagtttctgtctagtttttatgggaagatattccctcttccaccataggcctcaaagctctccaaatattcacttgcagattctacaaaaagagggtttcaaaactgctgyatcaaaagaaattttcaacacttttatttgaaagcacacatcacaaagaagtttctgg

SEQ ID NO: 949740 - DNA, 596 bp, Homo sapiens
catattttattttattttatttttcttttcttttttttctttccttcttttttttttttttttttttttttttttttttttttttgagacagagtttttttttgtmcccaggggggggggcgggggcaagatcttggttcactgcaacctttgtttcccgggctaaagggattctcctgcctccctcctgagtagctgggattacaggcacccgccactgcacctggctaatttttgtatttttagtagaggtgaggtttcgccatgttggccagactgctcttgaactcctgacctcaggtgatctgcctgcctcagcctctcagagcgctgggattacaggtgtgagccaccacacttggcccattttaaccgtttttaaatatagttcagtgggattaaatgtgttcacattgttgtgccaccatcaccaccatttatctccggaactcttcatctcacaaaacagaaactctgtactcactaaataataacgcctcattcccctttccccccagcccctggcaactaccattctaatgtctgtcccgatggatttgactacggtaattgcctcatgaaagtagaatcacgca

SEQ ID NO: 949741 - DNA, 826 bp, Homo sapiens
atcatcgtggaggtaaaataattaattatgtaattggttgttatgatcaatgctggacaatgaaagcaggaactgtgtcctattaaccactgcatctcagcatcttacacagcaccaggcacaaagtagaaaatttatagtatttgttgactgtaagaagaaataaaacatttttaaagtgtgtttggccaggcacggtggctcacacccataatcccaacactttgggaggccaaggcaggaggatcacttgaggtcaggagttcaagaccagcctgggcaacatagtgagaccccatccctacaaaaaataattaaaattagccaggtgtggtggtgctacttgggagactgaggcagaattatttgagcccaggagttcaaggttataagtgagctatgatcgtacaaccatacttcagcctgggtgacacagtgagacagtctctctgaaaaaaaaaaaaagtgtggtttcctctctctacaaagccagactcttttttttgttttgttttgttttgttttgtttttccttttttaacttttattttagattcaggggatacatacgcaagtttgttacctgggtatacagcatgatgctgaggtttggagtacaaatgatcctatcacacaggtactgagtatagtacccaatagttaatttttctactctagctcccctccctccctttcctctctactagtccccagtttctattgttgccatctttccatccatgagtctaytgttcagctcccacttaggagtgagaacgtgtagtatttggatttctgttcctgcactaattggcttaggataatg

SEQ ID NO: 949742 - DNA, 564 bp, Homo sapiens
ggtccttggtcaattcttccattgcaccatgcttccccccacccccgaccgtgcctttgcacatgccatccctcctgcctgaaatgctcccgaccttctttacctggttagctcttactcttccttcaaatttccttctttacctggttagctcttactcttctttcaaatgtcttatcacttctaggaagccgtccttcttagtattcatgattaagccaaatctccccatgatttgctgtttacaggcatttattttgcctttatagcacttacccgacttgtaattttacctttggtttctagtgatttgaccgttgtgtcgattgctctggaatgtaaactccctgagggcaggcgttgtgcttgttttgatcacctagtccttgcacttcacctgaaacatagtaggtgttcagcagagacttcttggatagataaaagcatggatggatggatggatgsgtggatggatggatggatagatgaatggatggatgggagcaagatttcacttcaggccaggcatggtggcccatgcctataatcccagcactttgagag

SEQ ID NO: 949743 - DNA, 577 bp, Homo sapiens
cagtcaaaagagtgctggcataacccctcttctaacccttggaggcacagctcacagctccaaaacagaccacttccttctgcttgaggagagaagagggaagagtagggaggacttcgtcttgcatcttggataccagctcagccacagcaggataaggcaccagtcagagtcattagggccccattccaggccctagctcccagacaacatttctagacacaacctgggacagaagggaactcgctctcttgaaagaaaggactcagtcctgacagcatttatcatccgctaactgaggggcccttgggcgctgaataaccaacaacaatagataaatactacctcaagggccttcataagcctctgagacttgctggtttcaggtacaagcaaagagaaaactaatacaactctacattttaacttaatctccatgctttttaactttttattatttgtatttatatyttattctactctctatgtcttaaaatgttgctttagtgattattattgagcagttcatcttttattctttctacttaagatatgagtagtttatacaccacaatta

SEQ ID NO: 949744 - DNA, 752 bp, Homo sapiens
tgcaagtcaaaatgtaatcgtgatataataaattataaacataaatttgcaaggaggactagcttcattcccttcgtgtaatgaatgagcatttgtaaaggggttgaacataggagcagactgagagaagggagggccattcaggttgagagaacagcatgagcaaaggcctggaggagggaatgtgcctgactgttcagagaacagagagaggttcttgtcatttagagcgtagcgtacaggttggggcacaagactctgcgtgagataaattaggggagggagagcagggccagagccttggggcacttgcgaggaatcacagatgcatagagtccaagggctgccggaatgttcaagagtggagattttgtgcacaggaagccataccctctcacccaggttactgtaccagctttccatcgttccctccattctgtttccactcaggccctctctaatctattccccacactgcaaccacagtggtcctttggaaactgcaaatcagatcaggtcagtcttctggtttccttttcttttagaataagtttggaatgttaatatgacctctggtgttgtgcagagcaggtcttacacacacaccccccaacacctgcctgaccttgtaccaggacactccatttctcccataatgttccagtctacctgacctgctcctccctgatcataggctgctawggggtatctcttgtgctaactgtaatgctggaaaatagtaggtggtcaat

SEQ ID NO: 949745 - DNA, 603 bp, Homo sapiens
aggtgttagctagtgatcacaggaatacaagaggcccatgatctacatgaaggtctttgcacttttattggcttgctgcaccscagtgagcctggtctcctagttccctggcatcatagggcaattacacctacatattggctggtaggctctgcaagattaggaaggaagatagctgctgggggctgaggatcatttcttaggatatggacaacataggtcccaaagatagtatccattcattattcactcattcatcaaatatttattgaggatcaattctgtgccaggcaccatgctaggttctgaggaaacagcagtgacaagctagactttacaaaaataaccacaaatagtttttaagtacataagacagacatttcaaataatcactcaaataatctttaaataagtactgtgaagggaaagttacagggtactgataatccactaaggaacgaagcctgagggtcaaggaatgcatttccggggaaaggacatgtaaactgtggctgaaaggctatgtcggaattagctggtggaaattgctaagaggagtaaagagatcagaagcaacagcatgtgcccctttgctgggtctag

SEQ ID NO: 949746 - DNA, 618 bp, Homo sapiens
agagtcacaatttggtaggaagttaccctgaggaggagaaagagaatcccagacctaagggcttattakagatgattcgatggaataataatccaccaaaaaacactgggctaatgccatgacatttgacattccttttgcaatacatgttctctagcatatgtgttctgtatgattaggcagtaccaaagctggcactgggaaatggctgtaaaattgatccaacgtaagttgaggatactcctttaaggagttacagaagtgccagaaaatccaggccagttgtatatttgttcacaatgagccaggcaccacttcatgaaaacttatttacacattcaaatgaaataagaaaaaggttagcttacgaagggaaggaggaatgaagctgcttcacagctttgaggataacattccacaacatttttttcaggcaacacataggaactgcttaattatggcagaaattgttcagaaaatggtgaattgcgtatcattgtatgtttaatttcacagaaatataacctcctaccacaaagcaagcaaatataaaattcttgaagccttcatcggaatagtaaaataggaactacctttcgtttctattttcaagatggg

SEQ ID NO: 949747 - DNA, 618 bp, Homo sapiens
agagtcacaatttggtaggaagttaccctgaggaggagaaagagaatcccagacctaagggcttattagagatgattcratggaataataatccaccaaaaaacactgggctaatgccatgacatttgacattccttttgcaatacatgttctctagcatatgtgttctgtatgattaggcagtaccaaagctggcactgggaaatggctgtaaaattgatccaacgtaagttgaggatactcctttaaggagttacagaagtgccagaaaatccaggccagttgtatatttgttcacaatgagccaggcaccacttcatgaaaacttatttacacattcaaatgaaataagaaaaaggttagcttacgaagggaaggaggaatgaagctgcttcacagctttgaggataacattccacaacatttttttcaggcaacacataggaactgcttaattatggcagaaattgttcagaaaatggtgaattgcgtatcattgtatgtttaatttcacagaaatataacctcctaccacaaagcaagcaaatataaaattcttgaagccttcatcggaatagtaaaataggaactacctttcgtttctattttcaagatggg

SEQ ID NO: 949748 - DNA, 649 bp, Homo sapiens
tttgtctagttttggtctttgaggctgcttacccttgatggggtttttgtgagggacttttgttgttgttgttgttgatgcattgttaccactttccacttgcttgtttttgtttcaatagtcaggtccctcttctgcagggctgctgcagtttgctgggggttcacttcaggtcctgttcatctgatttgcttctgtgcctggagacatcattcaagaggctggagagcagtaaaaatgggtgccagcaccttttctgtgacttctgaccttgatgggcaccagcctgatgccagtaggattgctcctgtatagggtatctgacaacccttgttggagtgtctcacccagttgggtggcacagggagcaggacctgtttaacgaagcactttgtcccttgatggagagggcatgtttcgctgggggaaaacccactcatctgggctgcccggattcctcagaactaccaggaggagaggctaagtctgctggtctgcagagactgtggccaccccttcccctaggggcactggccaagggaaatctgaattctgtccctgaacctctggctggaattaytggagatcctgtgaggaagccccactcactgagaaaggatgaatcagggttagacctgaggaggcactc

SEQ ID NO: 949749 - DNA, 616 bp, Homo sapiens
tccccctggcctgaacttccaatagtatgttgaataggagtggtgagtgagagcatccttgtcttgtcctggttttcaaggggaatgcttctagcttttgccyattgagtatgatattggttgtgggtttgccataaatggttcttattattttgagatatgttccctcaaaacctagtttattgagcgtttttcacatgaagtgatgctgaattttatcaaagacattttctgcatctattgagataatcacatgtttttgtctttagttgtgtttatatgatgaattatgtttattgatttgcatatgttgaaccagcctttgcatcccagggatgaaaccaacttgatcatggtggataagatttttgatgtgctgctggatttgatttgccagtactgtattgagaatttttgcatcaatgttcatcagtgatattggccctgaagtgttttttttgttgttgttgttgtcgttgttatatctctgccaggttttagtatcaggatgatgctggcctcagaaaatgagttagggaagagtccctcctttgcaattgtttagaatagtttcagaagaaagggtatcagctcctgtttgtaactctggtagagt

SEQ ID NO: 949750 - DNA, 616 bp, Homo sapiens
tccccctggcctgaacttccaatagtatgttgaataggagtggtgagtgagagcatccttgtcttgtcctggttttcaaggggaatgcttctagcttttgcctattgagtatgatattggttgtgggtttgccataaatggttcttattattttgagatatgttccctcaaaacctagtttattgagcgtttttcacatgaagtgatgctgaattttatcaaagacattttctgcatctattgagataatcacatgtttttgtctttagttgtgtttatatgatgaattatgtttattgatttgcatatgttgaaccagcctttgcatcccagggatgaaaccaacttgatcatggtggataagatttttgatgtgctgctggatttgatttgccagtactgtattgagaatttttgcatcaatgttcatcagtgatattggccctgaagtgttttttttgttgttgttgttgtcgttgttatatctctgccaggttttrgtatcaggatgatgctggcctcagaaaatgagttagggaagagtccctcctttgcaattgtttagaatagtttcagaagaaagggtatcagctcctgtttgtaactctggtagagt

SEQ ID NO: 949751 - DNA, 577 bp, Homo sapiens
ctggtacaatgaacttctggagcaccttgtatttctaaaatcttaccatggatgaagtcttattgggatgacttactgatgcttccctcgtcccctcyaaacatccactttcctttgtcagacttgcttactggatacctcccaatatccgttagctagcagtacgtgctgaccgacggggtaactccagatggattcccacatacaaagtgtgcttgacgagaagaggagtgggcgggtactttttgatagatctccttgctgtcctaacaaccctttcctatagggttgaaatagataccgcaaactgctcaaggtgcaatcaggagggattttttttttttttttggagtcctctcacagttacctaggggttttgggagtggctccttttgctgggaagggcccaggaagagctggctgtgctcactgccctgagtgaggactccaagctgttaccacttctcccaacctgtagcagcttcaagtgccccagtcaagtgaggccttgctccaggctaacactggtggacagggccagggaagaaaggggacggagcagtttcccagaaaacca

SEQ ID NO: 949752 - DNA, 577 bp, Homo sapiens
ctggtacaatgaacttctggagcaccttgtatttctaaaatcttaccatggatgaagtcttattgggatgacttactgatgcttccctcgtcccctctaaacatccactttcctttgtcagacttgcttactggatacctcccaatatccgttagctagcagtacgtgctgaccgacggggtaactccagatggattcccacatacaaagtgtgcttgacgagaagaggagtgggcgggtactttttgatagatctccttgctgtcctaacaaccctttcctatagggttgaaatagataccgcaaactgctcaaggtgcaatcaggagggattttttttttttttttggagtcctctcacagttacctaggggttttgggagtggctccttttgctgggaagggcccaggaagagctggctgtgctcactgccctgagtgaggactccaagctgttaccacttctcccaacctgtagcagcttcaagtgccccagwcaagtgaggccttgctccaggctaacactggtggacagggccagggaagaaaggggacggagcagtttcccagaaaacca

SEQ ID NO: 949753 - DNA, 727 bp, Homo sapiens
gagagaagagcacgttcacgtgagcccagataggagcacggggcacacgcatgaaacttcctgatgctggagttcacgcgcacgatggacgcaggcttggcagccygcaaggcagaaggggaggtggtgcgggaaccgtggctgctctaacaaacttgagctccattctgcaggctcaaggagacatggagtaagaggaaggactccttgggtgcattgttcatgggaggacaaattagaaaggggattatctcatggcaggcagccacttccaagtagggaagttggagaacttgttgtcaggtggaagaaaagagaagacccttgaaaagtcatccaggaatggttgtgcacaaacatggagtgtgttcctcatgccgtaattctgatccaggtccttgacttaactgcattgccattaagcttgtgaaaggaggggaaagccggtaccagacattggttatatgtccaatatctgtttgactctttgttagaggtattacctaagttatcttacaatactctaaaagcaattctacaaagcccattgctattttacagaaatgaaatctgaaaatgaagagggtcaagtaaactaagaagtctacgcataactaagaagtggggctgcctgaccccaatcctgcactcttggctctttatgacttcacttgtgagcatactgaactcaaagtgttctggacgtctccaggtagagggctctagg

SEQ ID NO: 949754 - DNA, 598 bp, Homo sapiens
aagaccctagatttaaaaataatcagagaaaaatgttgtaaaacagctcttctcataacgtccaaagcyagaacacacttgaaacaatctcagcaaaagaaagctgtcaaatatgcagccataaaaaaggatgagttcatgtcctttgtagggacatagatgaagctggaaaccatcattctcagcaaactatcgcaaggacagaaaaccaaacacggcatgttcttactcataggtgggtactgaacaatgagaacacttggacacagaaaggggaacatcacacaccaggagctgtcgttgggtagggggaggggggagggataccattaggagatatacctaatgtaaatgacaagttaatgggtgcagcacgacaacatggcacatgtatacatatgtaacaaatctgcacgttgtgcacatgtaccctagaacttaaagtataataataataataataacaataataataaaagaaagctgttaaaaatgaccagcatagaatctctcttccccactgtcagacaacatttcagtggtccctgtaactattgctctggtcctgaataaaatctttctcgccatgcttgaaaaa

SEQ ID NO: 949755 - DNA, 583 bp, Homo sapiens
aaattagatatacattcatggaaaagatagaccctctttatggatgagaatattaaatgttgtaaagatggcaatttacctaaaaataatttaaaaatttaaagaatagtaaattttcaagcaaayattttgagttaacaattatttagaaatatttcagtaaaaataaacattttagactaggtagaatttttttaaataaaagatgttgactttctctgtcaggtaatgaatatactataaaaccataattataatagtttagtcctggaaataagaacaaggcaacagatcaacagagcagaataaaagaactccaatctgctataccagaatctattcatatttctatcttatttctctataatcaactactattaatcttatttagaatggaaatgaaaaaccatgccaaacatttagaaaatagtattattcaataagtactagaactgttcagctctatagaagaaaaattcttacctctatagcaagaaaaaatcatttgttaaatagtaatttgtggaaaaataaaccacaaaaattgttgaagactgtatttaaaggggagtaatttctaaat

SEQ ID NO: 949756 - DNA, 583 bp, Homo sapiens
aaattagatatacattcatggaaaagatagaccctctttatggatgagaatattaaatgttgtaaagatggcaatttacctaaaaataatttaaaaatttaaagaatagtaaattttcaagcaaatattttgagttaacaattatttagaaatatttcagtaaaaataaacattttagactaggtagaatttttttaaataaaagatgttgactttctctgtcaggtaatgaatatactataaaaccataattataatagtttagtcctggaaataagaacaaggcaacagatcaacagagcagaataaaagaactccaatctgctataccagaatctattcatatttctatcttatttctctataatcaactactattaatcttatttagaatggaaatgaaaaaccatgccaaacatttagaaaatagtattattcaataagtactagaactgttcagctctatagaagaaaaattcttacctctatagcaagaaaaaatcatttgttaaatagtaatttgtggaaaaataaaccacaaaaattgttgaagactstatttaaaggggagtaatttctaaat

SEQ ID NO: 949757 - DNA, 576 bp, Homo sapiens
tggagaagcaaattgtggtatatccttataatgaaatgttatttgcccataaaagtaagtaaaatactgatttgtgttataatatggacgaatcttgaacatgtactaagtgaaagaaactaggttcaaaaggccacttactgtatgatttcatttatataaaatgtccataattggcagatcaatagagacagaaagtggatgagtgctttccaaaggctgggggtggtttgagggtggggagcggctgctaataggtacggggtttcttttggggggtgataaaagggttccaagtatccaagattagataaattgtggtgatggttgtgcaaccctaaagtatactaaaaactacttaagagtagaaatgaaacttcagaaactttaaagagtgttgagaggctgggtgcagtggctaacgcctgtaatcccagaactttgggaggctgaggtgggtggattgcttyagccagaagtttgagaacatcctaggcaacatgcaaaaccctatcttcacaaaacaaaaaaatacaaaaattagccaggcgtggtggcgcctggtcccagctattt

SEQ ID NO: 949758 - DNA, 673 bp, Homo sapiens
aaaatgagggagatgaatggctgattatttggattttgacctcctagatcctatacaccttcagataccagaataaaraggctcttagtggagcacacaggcaagggacaagaatgtgtttgcccaaggactggctgtgcacggagcaagctttaaactgcatattgcagagaagggaggacgctctggggagtccatggcttgggttgctgtggaggacacccgtacagcgtataaagtcctataagatgggaagggcctggtgattcctgtggggaacagttagggcagaggtcaaaaataacatgtgtggcccagaagtagggactcaccagtcagaggtttcagaggttgtggaatgagactaagaatgaagtaagtggaggaagatagtgccccattcaaaacggggagacccaaccgtgagtctaaggcgagtgggacatagagggacttacagtgaccacgagagaaagacagaagttctgctgttatcagagcatacctgtacacacgaggaattctgtcctgatttagacacagctccctggatgggcagtggtatgattttgttgtgtccccacccaaatctcatattgaattgtagctctcataatccccacatgtgatgagagggacccagcggagataatttaatcatggattggcttcc

SEQ ID NO: 949759 - DNA, 602 bp, Homo sapiens
ccaactcctgggcgcgagcgatcctcccaccttagcctctgtactatctttacaaagttttatgtaactatcaactgttgtaaaattaaaacttaatatatgcataaaataaagaaccccctgacttcagtggagagagcagactgagatggacaagagtgaagtcagagagacgtgtgggggccccacagtggtccaggtgggcgctgtgagcgacttgttggtagcagtggagatggagaaagatgagtcgatttcagtgtcaggacatgcttatagctggcgaggaggtgagggaacacgaggaagcctgaatgatgtgtggttggagccagtggatttttttcaatagatttttctttttggggaaaagatagatgaaaggcaggtttgaggtgggtggccaaaggttctcttttggctggaatattactgacccccctgggatgttactgagatcactggtcctcatggaaatgccattacagggaccggtgagcgtgaagacccaggcgagggaggtgctggcatgtaagtgkatttaaagcatgggatgggcccaggtcatctagggaaggagggtagtgatggagaagaaagag

SEQ ID NO: 949760 - DNA, 565 bp, Homo sapiens
tgattaaaatgtctcctaaatataaatttagcagaaagtcaacgttcattcaagccctacatatcttacagtactattgtatgaagcagggttttgtcccgagactattttttcctctgcagcagtatgtgtgagagctgagagctcagactctggagccaacctagctgatctggaatcttgactccacaattggttagctcatgaccttaggcaacttacttaacctttctgtgcctcagtttcaccactcaataaaaaagtggtgagaatgacaactctctgccagggttgtcctgaggagtaaatgagtacatatttgtaaagagtttagatttgtaaagggtttagaattgtgctttgcaaaaaggaagcacaatatatgaatgctagttcttattaccccgagagagacacatttatgggaacctatmcagtttctcactgggtctggatagccactctctcccatatttattttacctcattaatctcaattactgaccatgaatgtctgctccttaagtttgtttactagtggggttttctttagcctttgaaacaa

SEQ ID NO: 949761 - DNA, 540 bp, Homo sapiens
aggatcgaggtgccggccagttccattcctggtccaggccccctccctggccgctacgtcttctcagggcggaaggggcttgcgagctcccagggccccccttacaaaggcactaatcccacccgtgagcctccatcctcacaacctcaccggctcccacaggcaccccctcctaacaccatggccttgctggtgaggattcccacacagacgtcggggggcgcactcagcccaccctgcattacacgctgggacacatccggctcatcagtctccatcccggtcttgggatcttcaaggcaggagcctccggccttgactgcagtttcctcggtgccaaagcaagaccccggtacaggaggcagccaataaatgggcacagaacaggtgaaagagggagggagggccagcggattggtgctctgtgcacctcagtgggcagggctggcttgctctggctgtgctaactgtatacacctccttgtccacccaggctgagccasagtccacatggctgtgatggagctgaagcccctgctg

SEQ ID NO: 949762 - DNA, 745 bp, Homo sapiens
agaatgtgttgggcagtttattcctcactttttggaaaaggaactagggatgtcacggttgctctgggtgtccaggatggggtgcatggagtgggagccgggcgggagcagtggcttctttygagcgttacggtgtcaccagccctgccctctcccttcccataggacccctgtctcggctccctctcctctgacaggttcctagctcggccctccaagaccatcctaggtgaccagagatggcttcttgttcctgtagaccttcaaaaccagccctggcgggcagggcaaagggcagggtacagtcacagcctgggtggagttcaagtagagagttttcctggaaccagagagactcctgggggagactcccagcagagctggtggccactgccaggctatgctctcggacatggcccctggccacctgtggcaatgtaaatttaaattctcataaaaaaggatgagttcatgtcctttgtagggacatggatgaagctggaaaccatcattctcagcaaactatcgcaaggacaaaaaaccaaacaccgcatgttctcactcataggtgggaattgaacaatgagaacacatgggcacaggaaggggaacatcacacactggggcctgttgtggggtgggtgggggcagggagagcattaggagatatacctaatgttaaatgacgagttaacgggtgcagcacaccaacatggcacatgtatgcatgtgtaactaacctgca

SEQ ID NO: 949763 - DNA, 745 bp, Homo sapiens
agaatgtgttgggcagtttattcctcactttttggaaaaggaactagggatgtcacggttgctctgggtgtccaggatggggtgcatggagtgggagccgggcgggagcagtggcttcttttgagcgttayggtgtcaccagccctgccctctcccttcccataggacccctgtctcggctccctctcctctgacaggttcctagctcggccctccaagaccatcctaggtgaccagagatggcttcttgttcctgtagaccttcaaaaccagccctggcgggcagggcaaagggcagggtacagtcacagcctgggtggagttcaagtagagagttttcctggaaccagagagactcctgggggagactcccagcagagctggtggccactgccaggctatgctctcggacatggcccctggccacctgtggcaatgtaaatttaaattctcataaaaaaggatgagttcatgtcctttgtagggacatggatgaagctggaaaccatcattctcagcaaactatcgcaaggacaaaaaaccaaacaccgcatgttctcactcataggtgggaattgaacaatgagaacacatgggcacaggaaggggaacatcacacactggggcctgttgtggggtgggtgggggcagggagagcattaggagatatacctaatgttaaatgacgagttaacgggtgcagcacaccaacatggcacatgtatgcatgtgtaactaacctgca

SEQ ID NO: 949764 - DNA, 688 bp, Homo sapiens
gctggcctgactcagcaacaacctgctcacataataaatgcccagttaatggtttaccaggaaccagctcttctgatctttgcttcaaggtctttctaaaaaccacaagagaagtgagagaagcagcttccrttaagaacaaagacagcgagtgaagacaggcaaacatcaaagtcacgggctaccgctgccctgttgctcctgctgggtcccctggggtcccagcctagtgagcaaagtgggttccatgggttggtacaggctttctctcctggcacccactgcgtggctcccactccttctaacaaggaacctcagaggcagaagagggagaggcccggaattagtgaaaaaaaaaaaaataccaagcacaggttcacaagcacccttcagagagatgtcctgcaaaggtgccatgtggatccgcgcaaatcttctcatgaacatttaagccctcagcagctgagtctgtggctaatggcaaagggaaggatcatttaattgtccccaagctgggggcagtggcctggacggcttcaccactgactgcctggcagcccactctgcccccagcagcccagggtaaatgtttccaacatcttatttctatgcatgtccccttggctggttaattgtgtagaaagattccagttttaagccttcccagttggatagtttatgttggatg

SEQ ID NO: 949765 - DNA, 606 bp, Homo sapiens
accttagaaggaatatctcaacaggcctgacatcactggatccctagaaattttaccgaggtaacaggtgtccctgaattttagttagatttatttcccatcccctggcatgcaaatgtctcaccaataagtccagtgtgtttgctacttcttgctcactggatctaatcagcataatgtcatcaatgtcatggaccagtatgatatcttgcagaagcaaaaagcgatcaagatctctctgaataagattatgtggctcacacctgtaaccccagcagtttgggaggccgaggtgggtagatcacgaggtcaagagttcaagacaagcctggccaagatggtgaaaccccatctctactaaaaatacaaaaaattagcagagcgtggtggcacacgcctgtaatcccagctacttgggaggctgaggcagaaaatttcttaaacctgggaggcagaggttgcagtgagctgagatcatgccactgtactccagcctgkgtgacagagtgagactctgtctcaaaaaaaaaaaaaaaaaaaaatctgacacaaagccagagagttgttatacccctgaggtagaatgataaagatatactgctggcc

SEQ ID NO: 949766 - DNA, 445 bp, Homo sapiens
tttcctgaatacagcacactgatgggtcttgactctttatccaatttgccagtctgtgccttttaattggagcacttagcccatttacatttaaaattagtattgttaygtgtaaatttgatcctgtcattatgatgttagctcattattttgctcgttagttgatgcagtttcttcctagcctcgatggtctttacaatttggtatgtttttgtagtgcctggtaccagttgttcctttccatgtttagtgcttccttcaggagctcttgtagggccggcctgggggtgataaaatctctcagcatttgcttgtctgtaaagtattttatttctccttcacttatgaaacttagtttggctggatatgaaattcttgattgaaaattcttttctttaagaatgctgaatattgtcccccagtctcttctggcttgtagagtttc

SEQ ID NO: 949767 - DNA, 623 bp, Homo sapiens
gctaagatccactgtcttgaaattctcactgccagcacagcagtctgagctcacccagaggggcatctgccattaccgaggcttgagtaggtggttttcccctcacagtgtaaacaaagatgccrggaagttcaaactgggaggagcccaccagagcccagcaaggccactgcggccagactgcctctctagatttcctcctctgtgggcagggcatctctgaaaaaaaggcagcagccctagtcagagacttatagataaaaccgccacctccctgggacagagcacctgggaaggggcggttgtgggtacagcatcagcagacttaaacgtcccagcctggcagttctgaatagagcagtagatctctgagcataccattcaagctctgataagggacagactgcctccttaagtgggtccctgaccccatgtatcctgactgggaggcacctcctagtaggggcgacagacatctcacacaggagagctctggctggcatctggcgggtgcccctctgggacgaagcttctggaggaaggaagaggcagcaatccttgctgttctgcagcctccgcggtgatacccaggcaaacagggtctggagtggacctccagcaaa

SEQ ID NO: 949768 - DNA, 771 bp, Homo sapiens
atgaccgggacatacagggacatatgtagctcatgatagggctggacgtgccactggccctggaatatgtggagttccttggctacaacctcctgcatctttctcacatttgagatggctttacaaatggtttggttcactgaaaatggctcctttagtgggtgatgtttggctagacactactagtgttggtcttttttttttttccaagaatgatgtatttttttattttttatttcattttatgtatattttttgagatggagtctctctttttcatccatgctggaaggcagtggcgcaatctcggctcactgcaacctccgcttcctgggtttaagcgattctcctgcctcagcctcctgagtagctgggattacaggtgcccagcaccacatccagctaacttttgtatttttagtagagatggggcttccccatgttggccaggctggtattgaactcctgatctcaggtgatctgcccgcctcggtctcccaaagtgctgggattacaggtgtgagccaccatgaccggcctaagaatggtgtattaatcagggttttccagagaaaccgataaaggtatagttatatatagaaagacattgaatatatatagaaaggaattggctcacttggtgatggaggctgacagattccaagatgtgcagtttgcaatcyggagacccaggaatgcccatggtgtagtcctaatctccaagctagcaggcttgagacccaggggagctgatgtctcagttcaagtcta

SEQ ID NO: 949769 - DNA, 730 bp, Homo sapiens
ctcttggtgtaatgattagcactctggactttgaatccaggatccactgggamctgatcatcttcattcctcaaaactgtgaaagacatcaaaactaaaaatatatgtatgagaaactggcatagccaagaggagcctaaggagatatgacaactaaatgtggtaccttggattggatcttggaacataaaaaggacattaggtaaaaactaaggaaatatgaatgctacatctattagttaataatgtgataataatgtaataattagttcatcgattgtaacaaataattatactgctataatatgttaataatagaagaaattacaagaagaagaaataaaaggcatccagattggaaaggaaaaggtaaaaccatctctattcacagataacagaatcctctatgaagaaaatctcaaagaatctacaaaaggctacttgagctactaaactaatttagcaaaatttcagttttcaagatcaacacacaccaatcagttgtgttaatatacaccaacagtgaataatcagaaaggggaaattaacaaccaagtccatttataataacatctaaaataattaactgcttaggaataaatctaaccaagaagctgaaggacatgtatactgaaaactacaaaacattgctgaaaaaaatttacaaaaaataaatggaaagacatcccacattcatggataggaatacttaatattccactgctaacac

SEQ ID NO: 949770 - DNA, 730 bp, Homo sapiens
ctcttggtgtaatgattagcactctggactttgaatccaggatccactgggaactgatcatcttcattcctcaaaactgtgaaagacrtcaaaactaaaaatatatgtatgagaaactggcatagccaagaggagcctaaggagatatgacaactaaatgtggtaccttggattggatcttggaacataaaaaggacattaggtaaaaactaaggaaatatgaatgctacatctattagttaataatgtgataataatgtaataattagttcatcgattgtaacaaataattatactgctataatatgttaataatagaagaaattacaagaagaagaaataaaaggcatccagattggaaaggaaaaggtaaaaccatctctattcacagataacagaatcctctatgaagaaaatctcaaagaatctacaaaaggctacttgagctactaaactaatttagcaaaatttcagttttcaagatcaacacacaccaatcagttgtgttaatatacaccaacagtgaataatcagaaaggggaaattaacaaccaagtccatttataataacatctaaaataattaactgcttaggaataaatctaaccaagaagctgaaggacatgtatactgaaaactacaaaacattgctgaaaaaaatttacaaaaaataaatggaaagacatcccacattcatggataggaatacttaatattccactgctaacac

SEQ ID NO: 949771 - DNA, 575 bp, Homo sapiens
ctcataatctgaaggtcctgagttcaagcctcagagagggcatcacttctgccaaagaagttggatacactaaatatcggaacgcaacgcaaatgcyatagcagataaggatttgaagactgacccaatatttgtagaaaatggaaatataatttaggttttcttgttttttcgactttccagtggtttgagtaaaatgagtggtgaaaacagaagagtagattacaccagaaactacaagctatgtcatataattggtctttctagctgacacaggaagcaggggaaatttctcttccaacttcccgctctcagggtcacctcacactaattattgggtggatgggtgaagtcatttattcttttaatcatccaacaaatatttcttgaacacatatcttgttaagagactggggtcaagagtgaatacaacgcaaacattcctaccactgtgaaactacatcctacttgggaggagtggggtgaaagtgtattcagcacaaatattcctactattgcgaaactacatcatacttgggaggagtggggagaaacagacaggaaacaatcaaaaa

SEQ ID NO: 949772 - DNA, 507 bp, Homo sapiens
gcttgagtctgggaggcggaggttgctgtgagctgagatcacgccactgcactccagcctgggtgacagaatgaaactccaactcaaaaaaaaaaaaaaaaaaaaaaaaaagaagcctgactatagtctggaaaaaaaaaagaagactagagaagcggtaaaacattccttcgggtgcatctgtgagggtgtttctagaagagattggcatgtgagtaagtggactgagtagggaagatctgccctcattgtgggagggcaccatccaatctgctggtggcccacatagaacaaaaaaggagagaaaagaatttcctctgtctccttctcctggagctgggacactccttttcctgcccttggacatcagaactctaggctctctggccttgrgacttataccagaggcctcccaggttctcaggttgtcgatggcctcaaactgagagttacgccattggcttccctggctctaggcctttggatttggacttggacttggactgc

SEQ ID NO: 949773 - DNA, 574 bp, Homo sapiens
aataatagccattctgacatgtgagatagtatctcattgtggttttgacttgcatttctctgatgattagtgatgtgggtcatttttcatgtttcttggctacttgtatgccttcttttgagaaatatctgtttatgtcctttgcccactttgtaatgaggttatttggtttttgcttaactatttaagtttcggatagattctggatattagatctttgtcagatgcatagtttgcagatatttccttccattctttagtttgtctgtctactccgttgataatctcttttgctgtgcagaaactctttagtttaataaggtttcacttgtcaatttctatttttgttgcaattgatttttaggagttagtcataaattcttacccaaggctgatgtccacaatggtgttttcattatggtagattttctagaaaatcctatattttcttttagggttcttagagtttgagttcttacatttaaatttttaatccatcttgacttaatttktttgtatagtgaaaagcagagctttagtttcattcttctagcatatagctagccagctattt

SEQ ID NO: 949774 - DNA, 734 bp, Homo sapiens
cccaagatgcaagacaaagccctctttactcttccctctcttttcctcaagcaggagtctcttcccatggccaccacacctgggaatgtgctgggtcataactgaagctagcacagctctagatctcacccaaggctcatggtgagaagtgtctgggtgccaatgatgtttattcaagtccccagggctctttagacagcaggtgataaatcgttccaggactggatccttaccttcaaggaagcaggttccctctggccaagagtatgtcttgaagtgttgctgggggatagggcctggaataggggcctcaggattctgcctggtgccttattctactgtggctgaactgatatccagtttgtaagaaaaaggtctcttttctcttccctctccttgcttcaaggggaaggaaagggtctctcctggagatgtgagctgcattgtagggggtttaggaaaggggtggtgcaagcgctcccttggccacgctggctggtaactcattaggtcatgtgcattccaaatccactggctgtgagcccagcacagcaccaagacttgcccaggattgcaggccttgtggagtagactgcctttcaagtttacttagaactctagagcactttakcctctggtggtagggcttgctggagcttaggtttcaactgctatgatgggcaattcctctttgactgggtgagtgattcctctctggcctaaatgcttcctct

SEQ ID NO: 949775 - DNA, 615 bp, Homo sapiens
gtatagcctaaagttggaatgtctcttccaaaactcatattgaaactcagtcttcaatgtggcagtatttagaagtggggcctttaaaagatgattgaatcatgatggctctcccttcatggatggatttattcatttgttgattaatggattaatgggttaagaggttaacatgctgtcatgggagcgggtctagtggctttaccagaaggggaagagaaacctgatctagcatattagaatgctaggctccctttccctgtgataacttgtgccaccttaggactcttcgaagagtctacaccagcaagaaggctctcaccagacttggcccttagaccttggacttctcagcttacagaactataagaaatacattttgtttgtttgtgaattacctggtttcaggtattctgttataagccacagacatggactttaccctacttaataagtttgacagtgtggaatggagctagattgccagccaaaatatctatacaagttcataaatttgcctgtcacagttccacagatgctcacagaagacatgagaytcctggttagaaataaaggattctgttactctcaataaaagcagtggcaagagtttcg

SEQ ID NO: 949776 - DNA, 602 bp, Homo sapiens
tgtggcagtattaaattttggatttaatcttctattctttgataactaatgaagttgaatgcatttttatgtatttcttgaccatttagattttctcttttgagaatcatctgttcaagtcttttgtttgtttttctattaagttgtctaatatttctatcttccttaataccaaaaagagaaggaattccaaataagatcacattttgtggtactgagggtcaggactttaaatataatatttgagggcacatgattcaatccataacatcatctgttgaaaacaactacaaatgttcgataaaatattttttaaatgctgtctttaaatgagctatacgtagactaacaaataagaggaatctatctaaaggaaagtttcaattcagagaggtaaataatctctcagagcagccaagaaacttttcccatagtggcatttactaattaggcaaacttgggctttggaatttaagcktctgaagaaaagaaggataaagtaaagacccaaagctcacctcaagtggtatgtctcataaaaattttacccactgtagactgtgatccaaaatactatacttcctaggacaccacttagaaag

SEQ ID NO: 949777 - DNA, 602 bp, Homo sapiens
tgtggcagtattaaattttggatttaatcttctattctttgataactaatgaagttgaatgcatttttatgtatttcttgaccatttagattttctcttttgagaatcatctgttcaagtcttttgtttgtttttctattaagttgtctaatatttctatcttccttaataccaaaaagagaaggaattccaaataagatcacattttgtggtactgagggtcaggactttaaatataatatttgagggcacatgattcaatccataacatcatctgttgaaaacaactacaaatgttcgataaaatattttttaaatgctgtctttaaatgagctatacgtagactaacaaataagaggaatctatctaaaggaaagtttcaattcagagaggtaaataatctctcagagcagccaagaaacttttcccatagtggcatttactaattaggcaaacttgggctttggaatttaagcttctgaagamaagaaggataaagtaaagacccaaagctcacctcaagtggtatgtctcataaaaattttacccactgtagactgtgatccaaaatactatacttcctaggacaccacttagaaag

SEQ ID NO: 949778 - DNA, 521 bp, Homo sapiens
tttacctactatctttaggagcattgtctggcatctttaaaaayctctgtgaacatataacgaggccctgttgaaagtgatgattttatttatgagcatataactgcatccacagctgattacaaacctgtaatcttaattagagagccaaggtacattgggttcatggatgcaattccaagtgaaataaagaatgacagagaatcaacagaggaagtaaagaagggaggactcatggaaaataattattaacgtccctgcctggaccctggcatttttatataagtgagccaagatttagcaatggcaactgaagctagatatacagtagccagagagagattggaaaaaagtgtactctggaggaggatagactctagaaacaagcctgaaaaaaaactctgtagctagtaatgcataagacaggacaagcttgagaggtctcgaaaaaataggagtgtaatcaaactttctcatgaggatggacacccatttctctctcaagccaagtctctgaggcc

SEQ ID NO: 949779 - DNA, 521 bp, Homo sapiens
tttacctactatctttaggagcattgtctggcatctttaaaaacctctgtgaacatataacgaggccctgttgaaagtgatgattttatttatgagcatataactgcatccacagctgattacaaacctgtaatcttaattagagagccaaggtacattgggttcatggatgcaattccaagtgaaataaagaatgacagagaatcaacagaggaagtaaagaagggaggactcatggaaaataattattaacgtccctgcctggaccctggcatttttatataagtgagccaagatttagcaatggcaactgaagctagatatacagtagccagagagagattggaaaaaagtgtactctggaggaggatagactctagaaacaagccygaaaaaaaactctgtagctagtaatgcataagacaggacaagcttgagaggtctcgaaaaaataggagtgtaatcaaactttctcatgaggatggacacccatttctctctcaagccaagtctctgaggcc

SEQ ID NO: 949780 - DNA, 600 bp, Homo sapiens
ttcctgtaaggtttccactgaaaagtctacttccagatgtattggagctccactgcatgttgtttcttttcttgggctgcttttaggatcctttctttatccttgacatttgggagtttattaaatgccttgaggtagtcttctttgggttaaaactgcttggtgttctataaccttcttatacttatatattggtatctttctctaagtttgaggagttctctgttatcatccctttgaataaactttgtactcttacctctttctctactttccctttaaggccaataattcttagatttgcccttttgaggctattttctagatcttgtagatgtgctttcttctttttcatccttttttcttttgtctcctctgtttattttcaaatagcctgccttcaagctcactaattctttcttctgcttgatctgttctgttgcttagagactgtaatgcattcttaagtatgtcaattgtattttycaactccagaatttctgcttgaattttttcaattacttcaatctctttgttaaagttatccagtaggattcagaactccctctctgtgttatcttgaaattctttgagtttttg

SEQ ID NO: 949781 - DNA, 600 bp, Homo sapiens
ttcctgtaaggtttccactgaaaagtctacttccagatgtattggagctccactgcatgttgtttcttttcttgggctgcttttaggatcctttctttatccttgacatttgggagtttattaaatgccttgaggtagtcttctttgggttaaaactgcttggtgttctataaccttcttatacttatatattggtatctttctctaagtttgaggagttctctgttatcatccctttgaataaactttgtactcttacctctttctctactttccctttaaggccaataattcttagatttgcccttttgaggctattttctagatcttgtagatgtgctttcttctttttcatccttttttcttttgtctcctctgtttattttcaaatagcctgccttcaagctcactaattctttcttctgcttgatctgttctgttgcttagagactgtaatgcattcttaagtatgtcaattgtattttccaactccagaatttctgcttgaattktttcaattacttcaatctctttgttaaagttatccagtaggattcagaactccctctctgtgttatcttgaaattctttgagtttttg

SEQ ID NO: 949782 - DNA, 663 bp, Homo sapiens
gctttttctcagcctccttgcttcctccttctgttttgggatggacttctgcatggcccagcccatgggcctctttcctatttacattcaacgcactggtgrtggggcccaaactaatggttttgataccatctgctagctgatgaccctcaaattcatatctccaactcaaacctcttctgaatttcagaattgtatatccaattctgatatatattcagatgtatatatccaacaatgtatgcctagctgttatctcacttggatattttttaggtatctcaaaattaacatacccccaaatcaactccaaacttcttcccctaaacctcttcccccaggtgcctgcattttcattcaccctattactcaggccaaaattcacacagacagtctgtctggcattgccctcatccagttcatcagccaatcttgtcttctccacaatgagaacatatcctgaatctgatttcttctccccactttcacctccacttctaccaccctgggctgagccagcaccaccttgcacctgcattactgcaacagcctcttcacggctctccctgcttggaatcatgctgtatcacccccagcaccaccctcacaacaccatcccaccacacagctccaggtgatcttctcaaaggataaatcagatca

SEQ ID NO: 949783 - DNA, 682 bp, Homo sapiens
ctaaagtgtgtatttgaatttgtgtcaaatttaaaatgttgatgaagaaatagaaaagtggcctgcatatgtgataaaattactgaaagtttgctaaastttggtgaagattaccatgggcgaaatggtgaaggggaagatgacagggtagttttaggcacaggagttcctccacaaccgaataggggctccactgacggagggggtgggaggggagcagaggggagagcaaaggaagctgtgtttttgttttgttttgtgtttttctttttgagacggagtcttgctctgttgcccaggctggagtgcagtggcgcgatctcgactcactgcaaactctgccccccgggttcacgccattctcctgcctcagcctcccgagtagctgggactacaggcatccgccgccacgcccggctaatttttttgtatttttaatagagacggggtttcaccatgttggccaggatggtctcgatctcctgacctcgtgattcacccacctcagcctcccaaagtgctgggattacaggcgtgagccaccgcgcccggcggctgtgagggctgatagggcactggttctcaaactgaccaggcagccaagtcacctagaagtctttctgaagcatggccgggccttacccctggagtctctgatgcaggtctgaggcccaggaacttg

SEQ ID NO: 949784 - DNA, 627 bp, Homo sapiens
ttcctcatagcggtggcggtgtaagcttggaaaagggtgtttgcaaatatctggcacacagtaggkgccggcattcccctgtccagcactagtgtattagggggctggagaagggctccttgatctgtcccctcatttcgttgtagtcaatgagggcaatttccagactcctgctagggcacggcaactgtctgaggaagcggcaatctccccatccctggaagggccgggaatgagggtgctgggggatttgcaaagtagcctgggtgaggctccctccatgaggcagaccggcgcgcagcctgtgaggcgggtggagtggagcacgcccagccaggaatggtgtgttgcaaagagaggctggaggggggaaggggtgcctctccctggaccatctgactgtggatgagagcccctcagtgctgctactttatctgaaggaatctggtccgtcaaagctcctgggctgcccgaggactgggaacaggtgtgtgcagtggggaaggggagggcaggtggacatgccaaaggtcagagtcagttcaggaagcaaaactatcccctcagatcccaaaggtaagttctgcctgagtcagagcagagcaggcctgaggctgcaggttccaa

SEQ ID NO: 949785 - DNA, 579 bp, Homo sapiens
gggtgtggcctgagtctagcagcaaccatggggagctccgctggtgccacaccaggcagggcagggccaggcaacccatgagaggaggccaggccttctcgccgtgttgcagatgagacgtgtccctttcctgggaactgtggctggggactgaggaagaactggtgctcagcagcctgtgttctgtgggcagggggtggaggggcagttgcagtgactgagaagccgacccaggcctgtctccgccccagggccctgctactcggaggctcccagccttccggaaacgccagcccttgcataaggcctctcatttcctggccagaccacagcctgctggaaagtgggtaccataacagcccccaggggccagtgggtagaagggaaaagggagcaggtaccagagagaggctcagaatagctgtggccagtgattacagggctgggccgcctccatccagccccaccctgcctgccaccctgccccgaggagmctgggccctgcagacgggcaggctgccatggagggacagatgggcacaggaggtcagaaggggggtatcttgaggatccttgggt

SEQ ID NO: 949786 - DNA, 625 bp, Homo sapiens
aatcctagaggcctcccatgggattcacctatgggggcctgccaaaggctccaaacagcatccctatctgccactgatgcctcaagtaccattggacttgctgggtcatatggcccaagtggcagagcatcttgcaaagcagcctggacctgctgcagcgccttctactattctggaccctacttaaaactggtggccttcgggtcactcaataaatgggctgaagtaacacacccaaatgaggaatgtgttgcctccagaatccacatgggctcaataggcattgtgcctctttcttggttgtaggaggggccaaatgcagcaacttatcctttgccttagaaggaatatcttgacaggctccacaccactggacccctagaaattttactgaggttgaagttccctgaattttagttggatttatttcccatcctctggcatgtaaatgtctcactagtaactccagcgtgtttgctattttttctcactggatccaatcagtataatgtcatcagtgaaatggaccagtgtgatatcttgtgaaagygaaaagaaatcaaggtctctctgaataagattatgacacaaagcttgagaattgatatacccctaaggtaggaca

SEQ ID NO: 949787 - DNA, 620 bp, Homo sapiens
catggagcctccagtctacatgtgggagacaactaacagcgcatgaacacataactccagcagtgatcaggatggatataaaattgtgaagtgggccgggcgcagtggctcacgcctgtaatctcagcactttgggaggccgaggtgggtggatcacgaatcaggcgtttgagaccagcctggccaatatggtgaaaccccgtctctactaaaaatacaaaagttagccgggcgtggtggcgtgtgcctgtaatcccagctactcaggagggtgaggcaggagaattacttgaacccgggaggtggaggttgcaatgagccaaagattgtgccattgcactccagcctgggtgacaagagtgagactctgactcaattaaaaaaaaaaaagaaaaagaaaaaaaagaaaaacgcaaaggtcggcctctgaagcctgcaggttcgcaatccgtctcctgcctgccacttactgtgagaccagagccaattccttctgtccttgtgcctcagttttctcaactgtaraatggggatcttcacagtagtgcctgtaggaataattgagctaatagttgtttacaaatagaaaaggtctataacagggctgggcacacagaaac

SEQ ID NO: 949788 - DNA, 602 bp, Homo sapiens
ctatactgttaagtgaaagtaagaatgaccagtgtatacagtttaatcccaattttgtaaagtatggaagaatatatttgtggccagagagagtataatgagtgaatatttctagactttcactctggacccagcctattctattctattctattctattctattcattttattttattttaagacaagagtttcactctgtcgctcaggttggagtgcagtaacgcgatcttggcttactgcaacctctgcctcacgggtccaagtgattctcctgcttcagcttcctcaagtagctgggactacaggagtgtgccaccatgcccggctaatttttgtatttttagtagagatggagtttcactctgttggccagactggttttgaatttctgacctcaggtgatccacctgtctcagcctcccaaagtgctgggattacacatttgagccaccatgcgcagccaaggacccagcctcttctaagcgcctttcacrtataactcattaaatgctcacaacagcttctggaggaggagcggttacatcttcattatgtaaaggtataaaaggctgggaagtgaggacaaagaagtcccctca

SEQ ID NO: 949789 - DNA, 393 bp, Homo sapiens
taaattcatggtgagaattcttgatgacatgtaagaagccatgatgttgagaatgtagagaagactctggtatgyaggaaagaaatatttttcagagacctttgactattataagaactaaaaagtagttaaactcattaggaagaaaaagcacaagtagaaaagtaaagctttgcaagtactgaacacatggcattccaggaggcagagtggacacagttcttcatctgagacatgtttagcttaaaaagaaaaaaaagccattttttaggggcagggcaaagatggccaactagaagcagcggtgatcagagactcccaccgaaaagaaccataatggcctgtgaatcctgcactggcacctgaggtatccaggttctctcatcagaactg

SEQ ID NO: 949790 - DNA, 552 bp, Homo sapiens
caatgttggcaaagagactgtctttcccacactcttcattgcctctttccttgatattatgttaaaatcaggtaatatgatccctcacctggtttttttgttctgctcaacgtgctttcttgggtggagagttgtttaatttggcgttctgttggggtacaatctccagtgggttctattcagccatcttggtctgtctccctgctctgtacttttctatgagcaactgcaatatttcaatttctttccttttttcttttttcagtccaggagtgaaagtttattaaaaagctttaaagcagtaaggaaaataaggaaaagaaaggaaggaaagtacactttgaagagggccaagtgggtgacttgagagaccaagtgcaccccaatttccttgactgtttaaatggatttgaatccatttaatgtattcattaaatccattttaatgtattcaaatcaaaatgttttaamtaattagaatccccaatttgcagcacatatgtgtcttggtggaccagtaacctggaagtttgtctggattatattaaacgg

SEQ ID NO: 949791 - DNA, 597 bp, Homo sapiens
caaaggctgaatagatttgctaacagtccccttataaaagcctagaatctttttttttttaaaatactttaagttctgggatacatgtgcagaatgtgcaggtttgttacataggtatacacgtgccaaggtggttttgctacaccaatcaccctgtcatctatattaggtatttctcctaatgctagccctcccctactcccccaacccccaacaggccctggtgtgtgatgttcccctccctgtgtccatgtgttctcattcttcagctcccatttatgagtgagaacatgcggtgtttggttttctattcctgttagtttactgagaatgatggtttccagctttatccatgtccatgcaaagtacatgaactcatccttttttatggctgcatagtattccatggtgtatgtgtgccacattttctttatccagtctatcattgatggacatttgggttacttccaagtctttgttattgtaaatagtgctgcaataaacatacgtgcacatatgtctttatagyagaatgatttataatcctttgggtatatacccagtaatgggattgctgggtcaaatggtatttctggt

SEQ ID NO: 949792 - DNA, 556 bp, Homo sapiens
ccagcaataaataagagaaatttgaaattaaaattatatttattatcatttacagtggttctcaccaaaataaaatatttagataaatatctaacaaaatacatataatatctatgtcaaaaaacccacaraactctgatgaaataaagaaataaaaagtgggatgtcccatgtttatggttagcaagattcaattttatcaagatgtctggtttttccaacgtgatttatagattcccagccaaaatctcagcaagttattttacggctatcaacaaactgatcctaaacattacatggagagacaaaagaccctaatagccaactcgatattgaaggagaagaacaaagtgagagaattaaatttacctaacttcaagacttactagaagtctacaataatcaagacagtgtggtattggcaaaagaataaacgaatagatcaatggaacagaatagataactcagaaatagactcacataaatatagtcaactggtctttgacaaaggaacaaaggcaatgcaatggagaaaagacagtcttttcaacaaacg

SEQ ID NO: 949793 - DNA, 587 bp, Homo sapiens
gtgggacagcgtcagatttcatcacgctacttggaattgtgctcaatttaaaacttatgaattgcctgggcatggtggcttatgcttataatccgagcactcytggaggcttaggcaggcagatcgcttgagcccaggagttcgagaccagcctgggcaacatggcaaaaccttgtctttacaagaaatacaaaaattagccaggggtggtggtggtgtgcacctgtagtccctgttacgcgggaggctggctgaggtgggaggatcacctgagtccaggaggtggaggttgcagagagctgagatcataacactgcactccagcctgggtgacagaacaagattctgtcttaaaaaaaaaacaaaaacaaaaaacaggccaggcacagtggctcacgcctgtaatcccagcactttgggaggccaagaagggtggatcgcctgagttgggagttcaagaccagcctgaccaacatggagaaaccccgtctctactaaaaatacaaaattagccgggagtggtggtgcatgcctgtaatcccagctactcagggggctgaggcaggagaattgcttgaacccgggag

SEQ ID NO: 949794 - DNA, 556 bp, Homo sapiens
ttgcacttcaattaaaaggcaggtaccggcataatggatttttaaaaaaacatgatctagctatattctgtccacaagaaacttgcatgagattgaaagacgaagattgagttgtgaggtggaaaaagccattacctgcaaatagtaacagaaagagagtagagatggctatatcagacaaaataagctttaaaacggaaattataataagaaactaagaaggacattatatattttgaatgagtcattccatcaaggtgatataacaattataaatacattacctatatttttattttatgtattttttgtttttttaaataagtagtgtacacacctaacagtagaaccataacatacatgaaataaaaggtgacagaattaaatggagaaatagttttatagtgatagtcaaagacttaaatatcccacttttgaaaatggatrgaacaagtagacagaagacaaaaaagaaaatagaaaatttgaacaatataaaccatttagatctaagatatacacagaacatttctctcaacagcagtagaatacgcat

SEQ ID NO: 949795 - DNA, 472 bp, Homo sapiens
tttgttactgagggttcaccagggctttacaggccacggtaagggctttggttttgccctaagtgacttgagccattggagggtttttttgttttgttttgttttgttttgtttctgagacagagtctcactctgttgcccaggctggagtgcagtagtgccatctcagctcactgcaacctccacctcccaggttcaagcaattcccctgcctcagcctcctgagtagctgggattacaggcacacgccaccatgcccagcgaattttttgtattttagtagagacggggtttcaccatgctggccaggatagtctccatctcctgaccttgtaatccacccgccttggcctcccaaagtgctgagattacaggtgtgasccaccacgcctggcccattggaggttttgagcagggaagagacatgatgtgacatgttctaaaaggatcactccttatggctattctgtgg

SEQ ID NO: 949796 - DNA, 630 bp, Homo sapiens
aggaaggaggaaatactcatgccaattacagtcctcctttctgcaactggtcacatggtcatagatggtattgatgactaccttctactacccattctgtattccttttaycttcagcaagcacctcagcaggttgtggtttttttcctggtggagtggcacaaaccttcattcctgaggggtctgggtcatttgtagtcctgcctggattggcaaggctgttgggctgttgtagtttcccattgaccttaatcacaggacatggtaatactaagagacgccctaatggatctcctgtattccatgcatacttttccttacctccgttgtggagtagtagactgattgcatcttgatagtctgggtcagtcaccccagccaacactgtaactgccttcttagcctattgacttaaaggtaggaggagcccaaagtgtccaggtggcaatcttaacttccagtttaattgaatccttgttgtgtctccgggtggcagcattcctccctctggaactaggacctctaggccagcagaacgtaatatcgcgggaacaggaaacaaaaattttgctagtggatcaccaggggtgatggtgagtggtgcaacttccaattccaccccttgattcc

SEQ ID NO: 949797 - DNA, 740 bp, Homo sapiens
cccatgaggccatttgtgcaggctrggggagaaggcagggtggcaggagtggggaccatgagcatttgagccacttcctcatgtaacttacttgtgccttcaggacctgctcaagcctgatcacatatacaccacttccatttgatgatggaatgctgctgtgcacaacccactttatggctagaggggtcagaaagcacccagtttgtgataggcagttcaggtcccatggtgacttgatgacccatagtcaaatgttcagtttccaccaaagcccagtaacaggccaagaactgtctctcaaaagaagagtagttatctgcagaatatggcagggccttgctctaaaatcctagaggcctccactgtgattcacctatgggggcctgacaaaggctccaaacagcatcatatctgccactgacacctcaagcaccattggatctgctgggtcatatggcccaagtggcagagcagcttgcacagcagcctggacctgttgcagagccttctccttttctggaccacattcaaaactggcagcctttcgggtcacttaataaataggccagagtaacacacccaaatgaggaatgtgttgcccacaaaaatccaaataagcccaccaggtgttgtgcctctttctttgttgtaggagggggcaaatgtaacaacttttccttctccttagaaggaatacctcaacaggccacacaccactggacccctagaaattttac

SEQ ID NO: 949798 - DNA, 536 bp, Homo sapiens
atctgagctacttgttgaggaattygtttatatctttacttcaggcatctctccatatgaggtgaatgaccaagtatactactaactactccattcagtgggaagatttctcctgactattgccttgaaggccatccttgataggcctattgtgtagcaaaataaatataatgcacagtcactgtagtgcagcatggtaatctgatgaatttgtaaacaaggctattattctcttttacagggttgttatggagaactttttacaaggctacatatataaactgagtaagaagcattgaggtagcagaggtaggggacaaaggaatctaagtcaccaactcattcaaaatattttttgccttctaaaccttatgaggctagatctataatgcattatttcctatataaataaatttctgctgctcctgcccaagctgtctaatatatcttagaataagcaggtcaagatgggcagctctggttgcaaagtcattgatgctctattagggctcaagcccaaatagggacaagtacca

SEQ ID NO: 949799 - DNA, 732 bp, Homo sapiens
atggttcttagattctttgcrttgggttagaacatgctcctttacctcagtgaagttttttattacccactttctgaagcctacttctgttaatttgttcatttcatcctctgtccagttctttgcccttgctagagaggtgtcactatcatttgagggagaagaggcactctggccttttgcattttcagcatttttaaaaaattctttctcatcttcatgagtttgtctatttttgatctttgaggctgctgacccttagatgaggtttttgtggggacctttttgttgatgctgttgttgctttctgtttttttaattattattatttttttcagtagtcaggtttctcttctgtagggctgctgcagtttgctgcgggttcacttcaggccctattcatctggggcactcccgcatctggagatgtcacccgaggaggctggaggacaacaaagatgggtgcccggctccttcctctgggatctctgaccttggggagcactgacctgatgccagcaggaacactcctgtatagggtgtctgataacttctgttgccgggtctcacccagttgggagcatgggaaccaggacccatttaaccaagcaatttggctgtcccttggtggagggggtgtgctgtgctgggggtaaagccacttgtctgggcttcccagattcctcagggctagcagggggaaaactaagcctactggtccatggagactac

SEQ ID NO: 949800 - DNA, 590 bp, Homo sapiens
ccagatttaaaggccagtaaaaaggcgagcgtggatttaaagcaaaagtcaaataaacctaatactttctcccctcaatgctcatcatygtacattgttagagttaatgttgaatctctaaaatataagatttgttggcaatggttctcattattgtgtcttcccaaatcctttggagatcttaatagctaatgagactcacaaggaaaaacttccatgttataatattttcaattccttcctctttagcctacattaatcctttctatctactcccttctacccccaattttgccttcttctcttcaaaaataactgtccttgcttaaaatcaaacattttgcaaattgctgtagactcctacacggttcctgtttccagattcttctccctatatttatcgtccatattgtcaccatggctatttttctaaaatatacttttgcttgaacaatttctttattttaaaatctgagggaattcttctttgccttgttagattttaagtgtagactccttaggaaggtattcaatgcctcaacctctctttccagcttcagctctcacttttcctggctaaggctgcctat

SEQ ID NO: 949801 - DNA, 493 bp, Homo sapiens
ggcctggttttgctgctacagtaagggcaacactgagttcaatgcctcatagatgctggctctccctctccctagtgcatagaaatgtsctctgcaccacgccactgctgcccgggggatgggggaggggtggcatcagtgattcaaaactgtgtttcttacctcttcagagcctctttctgcaatatgaagttaaaatcaggtactatcagtgctcacctaatttttggttcttatgaaggtgttttttgtgtgtagatagttcttaaatgggtatccttgtagcaggaagattggtggaggctgtctattatcaccatcttgttccaccctttcttctatgtgataagtattttcatgtgtcaactcggctgggccatattgtccaaatatttggacaaacactttttggatgtgtctgtgagcatgggttgggatgagatatacactcacaacacacaattttgaggaaagcacattgccctctgtgaca

SEQ ID NO: 949802 - DNA, 491 bp, Homo sapiens
atgttacagagggcaatctgctttcctcaaaattgactgttgtaagtgtaaatctcataccaaaccatgctcacagaaacatccaaaaagtgtttgtccaaatatttggacaatatggcccagccaagttgacacatgaaaatacttatcacataaaggaagggtggaacaagatggtggaatagaagcctccaccaatcttcctgctacaaggatacccatttaagaactatctacacacaaaaaaaaccttcataagaaccaaaaattaggtgagcactgatagtacctgattttaacttcatattgcagaaagaggcactgaagaggtaagaaaaacagttttgaatcactgatgccacccctcccccatcccccgggcagcagtggcgtggtgcasaggacatttctatgcactatggagagggagagccagcatctatgaggcattgaactcagtgttgcccttactgtagcagcaaaaccaggcc

SEQ ID NO: 949803 - DNA, 491 bp, Homo sapiens
atgttacagagggcaatctgctttcctcaaaattgactgttgtaagtgtaaatctcataccaaaccatgctcacagaaacatccaaaaagtgtttgtccaaatatttggacaatatggcccagccaagttgacacatgaaaatacttatcacataaaggaagggtggaacaagatggtggaatagaagcctccaccaatcttcctgctacaaggatacccatttaagaactatctacacacaaaaaaaaccttcataagaaccaaaaattaggtgagcactgatagtacctgattttaacttcatattgcagaaagaggcactgaagaggtaagaaaaacagttttgaatcactgatgccacccctcccccatcccccgggcagcagtggcgtggtgcacaggacatttctatgcactakggagagggagagccagcatctatgaggcattgaactcagtgttgcccttactgtagcagcaaaaccaggcc

SEQ ID NO: 949804 - DNA, 585 bp, Homo sapiens
ggagattcacttgaacctggaggggaaggttgcagtaagctgagatcgcaccactacactccagcctgggtgacagagactccatcttaaaacaaaaacaaaaagtccattttctctctataaacatagaatgtatcaatattgtttatcattatagcttccgtgccttattataatggttgcacatttttggtcctgacaatttgagtataaataaaaggatgtatcataatgtagggaaggcatttcctgatgttcaagaatatgattatatattgaatgtgccagaaagttctggtcatgagataatcttattttttcttttatcaaattagaaaactgggtcataatacagatttcaattacgactttctttaagtagtcaactttatatgaatttctctatttttgagaagttttcattgccattatgatctcatatttcacaaaagagtatgtgatatatagatttttttctctacataattttgtagcatattgaaaagatgaatttggtggcrtatttatcataaagtgaatgatagtagtctaagagaatggcaaatgtgtaacctatgtatatgg

SEQ ID NO: 949805 - DNA, 577 bp, Homo sapiens
ataattgggctttttttactttttggctacttgaataaaactactataaacattcacatacagatttttgtgtggacataggttatcatttctcttgggcatttatcttaggaatggaatttctttgtcatatggtaagtctatgtttaacattttgaaaaaactaccaatctgtttcccaaaatgactgtaccattccacaatcccaccagtgatgtatgagtgttctaacatttctacctcctcacaacacttgttattgtccttattttagccatcctaggagatgtgcagtagtatctcattattgttgtgacctgcttttctctaattactaatattgctctcaggtggttactggacatttgtataccttctctacagaaacatctattgaaatattgtgcctatttttaaaagttacatatatgtgtatatacttttattacattttaagttctggggtacatgtacagaatgtgcagttttgttacataggtatacacatgccatggtgktttgctgcatccatgaacctgtcacctaaatgaggcatttctcctaatgttattcctcc

SEQ ID NO: 949806 - DNA, 581 bp, Homo sapiens
aagcaccaccttctgtctggaggccaacmaacacaaaactggtgcactaaacagaaatacaaccaagactcacagagtcttcttcactcccctgctacctccaccagagcaggtgctggtatccatggctgaaagacctgaagacagatcacatcacagcgttctttgcagacactccccagtaccacctggtagctccactgggtggctagacccagagagcaaaaacagttgctgcagtttggctctcaggaagccctatttctaggggaaaggggagaccaccacatcaagggagcatcccatgggacaaaagaatctgaacagcagcccttgagttctggatctgacctagtctacccaaatgagatggacccagaaaaacattctagtaatatgaccaaacaaagttcttgattacccccaaaagatcacatcagcttatcagcaacggatccaaaccaagatgaaatctctgaattgccagaaaaagaattcagatggtcgactattaagctaatcaaggaggcaccagagaaacgtgaagtccaacttaaaaaaaattaaaaacataatacagg

SEQ ID NO: 949807 - DNA, 775 bp, Homo sapiens
  misc_feature 1, 2, 3, 4, 5, 6, 7, 8, 9, 10, 11, 12, 13, 14, 15, 16, 17,18, 19, 20, 21, 22, 23, 24, 25, 26, 27, 28, 29, 30, 31: n = A,T,C or G
nnnnnnnnnnnnnnnnnnnnnnnnnnnnnnngcttagggtatagttgttagtggaggctgtagtgaagttttgctggggatggggtcatcaagaaggccagtccttggacttcactggtggcagcagcaggctgagtgtgcctgtccttgggcttcagtgcagtatatgctggcactggtgttagtgagtccaagcatgatgaatcttgggcctccaggtgactggcctgcttgggtgctggcagtggcagtggtagaccactggtctggatggctgggtcttcaggcccctggacagcaggtatggcatgggaaatggcagtagcagtggcaggacaatcctctggtttccaagaagtctgcattggtgttgacagtggctgcaacaggctgggcacactagtccccaggcccgtaggtggcacatgcaggcagatgttagctgtggtagtagctgcaggtttagtgggcctgtcctcaggctcctgggaggagtgctgaggtaccaacagtggtggatggggcagggtcatccccaggcttccagaccatttgctcaggcactgagtgggagtgtagagccagggcaggcctgtcctcagacccctctagtggtgcatgtgggagctggctgtggtaggcaggcatrggatgatatccagaccactggtggaatgcttgggtgggggcagtagtgactgtgctgctgccctgctcctggggaggatggggttgctttcagtggcagtagctataggtgactggagagcatgca

SEQ ID NO: 949808 - DNA, 514 bp, Homo sapiens
cccagtctgccagcagcaagaacaatattcattcttgatatagcaccattccctgtggtaataagccagctacccagaggcatgttgatgctattataccacttttataatggaaagggtagcattttgttcttactgtaagagacactttgaacatagatttgtcttcactgcatgcagtgcttctgccaaaacccccattcatggactgacaaaataccttgttcaacatcatggttttccaatagcatcgcttctgatcaaagaactcacttcacaggaaacaaggtgcagcagtgtgcccatgctcatggaattcactggtcataccatgttccccattatcctgaagcagatggcttgatagaatggtggaagagccttttgaagactcagtatagtgacacccaggtgccaataccttgcaagkctgaggcaatgttctccaggaggccctttgctctaaagcagcatccagtatatggtgttgttgctcccatagccaggaatcatg

SEQ ID NO: 949809 - DNA, 775 bp, Homo sapiens
gtgccaaataggaggcaaaaatgctggaatatctcctctcttaccaacctttttccttcttttcctttctccagcaatcccaccctaagcccaaaaaattctacatttcttaatttctactattcagaaaggtgagtcaactaaactcactctctttttttattttttaagtagggatggggtttcaccatgttggccaggatggtctcaatctcctgacctcgtgatccgctggtcttggccttccaaagtgctgggattatgggcatgagccactgtgctcggcttaaactcactttcaaaataaggatgttaatacccataagactatttgcaatgtataaaagcattataaatatataaatatatcaaaggtgataattaggaaaaatcataaaaattttaatgggaaattctgcagacagaaacagccttaaaatagatgcttctatcctatgactacatcccaaatgatgatttggaatcgttgagatttagagaaggttgccccctctaaaatagagtcttcccagctttcctgaagtactatgtataacgtgtcaagcttacactattccaaggtccaccagatgttgccatgtcttattttaaagtggaaaatccaaataaattcagtcatttcttttttctttttctttctttctttctttttttttttttttgagacagagccttggtctaytgcccaggctggagtgcagtggcacatcttagttcactgcaacctccgcctcctgggttcaagtgaccctcc

SEQ ID NO: 949810 - DNA, 583 bp, Homo sapiens
acccgccaaaggagagtctgagttcagacatgcctagccttgcccccacctaatggtccttcctacgtattctggtaactgaacacaaagggcatatactcttggaagttctagggcctcacccaccatctgttcctccccctaccgccacaatcctaaacatatatgtgcctaatactggagcttccaaatttataaaacttttactgatatacctaagaaatgagataggcagcaacacaataatagtgggggacttcaataccccactgacagcactagacaggtcatcaagacagaaagtcagcaaagaaacaatggatttaaactacaccctgcaataaatggatttaacggatatatacagaacattccatccaacaatcttagaatatacattctgttcaatagcacatggaactttctccaagatagaccatatcataggccagaaaatgagcctcaataaatttaagaaacttgaagttatgtcaagcactctctcaggccacagtggaacaaaagtggaaatcaaycccaaaaggaaccttcaaaaccatgcaaatacatggaaattaaataa

SEQ ID NO: 949811 - DNA, 579 bp, Homo sapiens
cttgccttctccttaggcctcctattctctgcaacacaccaatattaaaattaagtcaatttaataaccttacaatsgcctcaaagtgctcaagcaaaggaagagctgaatgtctcacaccttaaatcaaaagctggaaatggccgagcacagtggctcacgcctgtaatcccagaactctgggaggccgacgcaagtaaatcacctgagatcaggagttcgagaccagcctgacccacatggtgaaaccccatctctaccaaaaatacaaaaattagctgggcgtggtggcgggcacctgtaatcccagctactcgggaggctgaggcaggagaatcacctgaacctgggaggtggaggttgcagtgagccaatatcgcaccattgcactccaccccgagcgacagagacagactccctctcaaaaaaaaaaagaaaaagaaaaaagaagctggaaatgattaagcttaggtaggaaggcatgacaaaaactaagataggctaaaagctagacctcttgagccaaaccgttaagccagttgtgaatacaaagggaagctcttgaacgaaattgaaagt

SEQ ID NO: 949812 - DNA, 659 bp, Homo sapiens
ctggcctggagcacaactgatggtgtgtgggaacacctcctgggcagctctggggagcggccggggccgtgtgcasaactcctgcggctgcggtcttatgaggcccccaacgttttgtgggtttcccctccaggaaccctgccaggtcttaatgaagccaaggatgatcccttcctggctctggcatgggatggggacagtcaccactgtgaaatacacccagagcattctccacagcaaatggaatttgctctccaaaggaaaggcttatctcacttgggggaggactgtttttcagcctgtaccccgctttagcctgtctcacctaaggggaggggaaaagcagatcaacaactgtgaaggggcacaggcccccaagactgagatttggtcacagactgtggaacagttccctccccaccatcttcccaacacacccacagggcctccgcagtgtgacagggattccagcagagagggccacaagacgcagactctctctgaggaggaggatttaggcaagcccaagggcaacccgggaaatgaaaacaaatgtgaagcctctggtgcccacagctacagcagactttaaaccctgccccaaacctggccagattacataaacctcacactaaaggcccatctacttcagctcttat

SEQ ID NO: 949813 - DNA, 651 bp, Homo sapiens
ctgccaggaaagcagtcctggacatttaggaagtcgatgggcaccactgtgttccaacaaaacttcatctgtggatgctgcagtgtgaacttcatagaatttttgagtcatgacatactcttgttattgttttcagtgaatatacaagaacgattcttagcctagggctgtatgaagagaggtagagggttgggtctggcctgtggcatagtctgccaaccgtttgtagactatggggtagaggttgacaagtcactgggatcctgaaaatacagccccacagttagatgtcagcagtgaatcctgtaatggagttcctagataatgaactccttctcattctgagagttttaccaattgtgcacttcagtttaatgctcttggcttcagactgacggtgcgtgaaggctctagccccaggctagggccctggccacctatgggtgggccctggaaacccagagcaggcggccggacctccctgttaaatgcagacggtcagtcctgccgggtcagttgcagggcgtgctgaggcgcacgccagacggtggagggaaaagcrttgccgagtccagcccgtgggcgcgtccttctccacctcctttcactccttttttgtgtttctctcccccattctccaatgaggtcaga

SEQ ID NO: 949814 - DNA, 577 bp, Homo sapiens
gacaatggagttagggggatgtggaaggatggggaggaaagcctgactggaatatagtcaagagaaaatgaaggaagagttggtgaagacagcaaatataacaactttttcaaggaattttgccacaatgagaatcagaaaaatgaagcagcaactggaagaggatatgtaggagaaaggtgttgtttgtttgttaagggtgggagatatcacagtacatttgtatgtttatctgaataatccagtagaaagagagaaactgatgcagaagaggggatgatggtaagagcaaggtcattgcatggcggaagaagagacacagggcccaggtgagggctggccttggagaagaacatagttacagaaggagccttgcattgttaataggagggcagacagcatatgaggatacagatgtggacatttagtggacttagtggtacatatgcggaagctstcttactatgcttttattttttcaggaaaataagaagcaaacccaagagttaaaagcaagagggcttgagaagagagaagaatcagtgaaataatctcttgactggaagagtgagttgac

SEQ ID NO: 949815 - DNA, 662 bp, Homo sapiens
atattgatctagcattcctgagactctttctatgcaactgactcccccacacccgtgttataaaagtaatacacacttktgaaacagagagacacacttgtagagcatatgggtcaagggctcaacatcaagattagattagccataatcctattgaccagtggaaaagattgtttccattttaaagcagttccttacaaccttttttctctacttttgcattttccactctaacacacatctaaaacaggtaatctcagtaaaagctggcctttttgctgagatttttatgtgggagactaaaatattagacgagatgattatgtgtacagaattttatttaaaatacatctgagagaatcattcagatacttgggtagtgttaaaggatgaagcatgtatctgggggtatttcttctttttctttctttcttttttttttttttttctttgagacggaatctcactctgtagcccaggctagaatgcagtggcaggatctcggctcactgcagcttccacctcctgggttcaagtgattctcatgcctcagcctccccagtagctgggattacaagtgtgtgccaccacacccggctaatttttgtatttttagtagagacacggttttaccatgttggccaggctggtcttgatctcca

SEQ ID NO: 949816 - DNA, 568 bp, Homo sapiens
ggcatactgcaagcagcttccacagctggcattgggaaatgcagtggcacccgaaagcttggagatgccaggaaccacaaagccccaaagagtgtgtcacagacttggcctggggagctcctasatctgggctcccagaagagctgcagctcttctctccttcactcttttctccttctcatggcccataatgtggcaagcaaggggtatgtctcagccctgtttgtgttatcgctctttcagtcctgccattcagcaggcctagagttcttgtcctgcatccaggagaaatgaggtacctgaacaagaggagggtgagcaaggcaaagaggtgctttatgtcgagcaaaagaacagctcagaggagacccaaagtggatcactcctctccacaggtaggtcatccccaagtgtccagctctcagtggagcggagacccacaatacatatttcctctctgtaagcatttcatcccttcatttgcctgagtctggctgactatgatgttttcaagggcttcagaggggaggaagtacatgctgattggtccatgggcagccatgggtgg

SEQ ID NO: 949817 - DNA, 637 bp, Homo sapiens
caaaggctcattgattggattcccaatagcagtaatgacagctaatgtttcggcctcggtggaattctctttcactaccgcagagtagacatcctgggtaaactttaggtgactttctttgctttctttcacattaattttgacagaggtaaggccggcaaatctgccatcggaagctctaacggttagctcgtagcggcttcttaactgagttgtgttttggacagtgagagcaccagtcttgtagtccatagaaaacttctccccgatgttgccttcggtgatggagtaaatcaactgtgagaatgcacttgaatcagcatctgtagcatttactgtgatgacttttactcctttgtatgttggtaacaaaagagatgcttcatataatggcttggcaaacacaggggggcagtcattaatgtcaattacatgtactgttacattcgctgcatactcagcaaataaacgtggggttcccatgtcatgcacttggacggtaaagtgaaaaatacttgtttcttcatagtccagacttagtactgtatgaatagcaccagtgctagaatcaatagcaaaatatgtgtgtacagatggttcaacaatgtgatayacaagcaaagcatttgagtcttta

SEQ ID NO: 949818 - DNA, 825 bp, Homo sapiens
taacccttatactctgctttcccaaatgccagaggaggcagagtggtttatagtcctggaccttaaggatgtctttttctgcattcctgtacatcctgactctcaattcttgtttgcctttgragatccttctaacccaatgtctcaactcacctggaatgttttaccccaagggttcagggatagccctcatctattcggccaggcatcaacccaagcccaacacttgagccagttctcatacttgaacactcatgttgtttggtacatggatgatttacatctagccgcccctgcagaagccttgtgccatcaagccacccaagtgcttttaaacttcctcaccacttgtggctacaaggtttccaaaccaaagtctcagctctacttatagcaggttaaatacttagggttaaaattatccaaaggcaccagggccctcagcgaggaatgtatccatcctatactggcttatcctgatcccaaaaccctgaagcaattaagaggtttccatggcataacaagcttctgccaaatacggattcccaggtacagcgaaagagccaggccattatacacactaattaaggaaactcagaaagccaatactcatttagtagaatggacacctgaagcagaaacagcttttcaggccctaaagaagccttaacccaagccccagtgttaagcttgccaatggggcaagacttttctttatatgtcacagaaaaaaacagaaatagctctaggactccttacacacgtccaagggaccagctcgcaacccgtggcatagctgagtaaggaaattgatgtagtggaaaa

SEQ ID NO: 949819 - DNA, 430 bp, Homo sapiens
gtgccctgactgatcccttccacccccgttcccttggcaccctgttttggccactgtgtagggccacaracataccctaaatgttagccagtgtaaacaggatagttctcaaaaacagcgcttatcaagctatctgtggtgaaggatatattttttttaaattttcaatttgtcacaaaccagtgcttttgtaaaatatgataaaaatgaataactggaaaaataaaaggaaaaaagacacacaatacaagcccaaatttttctagttacatagctagcacatcaaaatcatgacatctgaagaaaaagtagataaactggacttcatcaaattaaaaaaatgtttttccttccaaggacagtatcaagaaactgaaaagataaatcataaaatagggaaatatttctaaatcatatatctgatatggct

SEQ ID NO: 949820 - DNA, 581 bp, Homo sapiens
gcagtcagccaagattgcgacactgcaytccagcctggacaacagagtgagactctgtctcagaaaaaaaaaaaactttttgactctagtaacaacgttaaggttaaaacacacattggagagctgtccaaaaatattttgtttctttatatccttattctataagtttttttattttaaaatctatttttaatttttttcctattcaaatttttttgttaaaatgaagacacaaaccacacatgttagcttaggcctacacaaggtcaggattatcaatctccctgtctttcactttcacatcttatcccactggaagttcatcagggcaataatgcacatggagctctcatctataataacaatgccttcttctggaatacctcctgaaagacctccttgaggctgttttatagttaacttttaaaaatataaatagggccaagcatggtggctcacgcctataatcccagcactttgggaggccgaggcaggcagatcacgaggtcaggagttcgagaccagcgtggctaataagtgaaaccccgtctctactaaaaataaaacaaaattagacgggc

SEQ ID NO: 949821 - DNA, 581 bp, Homo sapiens
gcagtcagccaagattgcgacactgcattccagcctggacaacagagtgagactctgtctcagaaaaaaaaaaaactttttgactctagtaacaacgttaaggttaaaacacacattggagagctgtccaaaaatattttgtttctttatatccttattctataagtttttttattttaaaatctatttttaatttttttcctattcaaatttttttgttaaaatgaagacacaaaccacacatgttagcttaggcctacacaaggtcaggattatcaatctccctgtctttcactttcacatcttatcccactggaagttcatcagggcaataatgcacatggagctctcatctataataacaatgccttcttctggaatacctcctgaaagacctccttgaggctgttttatagttaacttttaaaaatataaatagggccaagcatggtggctcacgcctataatcccagcactttgggaggcygaggcaggcagatcacgaggtcaggagttcgagaccagcgtggctaataagtgaaaccccgtctctactaaaaataaaacaaaattagacgggc

SEQ ID NO: 949822 - DNA, 581 bp, Homo sapiens
gcagtcagccaagattgcgacactgcattccagcctggacaacagagtgagactctgtctcagaaaaaaaaaaaactttttgactctagtaacaacgttaaggttaaaacacacattggagagctgtccaaaaatattttgtttctttatatccttattctataagtttttttattttaaaatctatttttaatttttttcctattcaaatttttttgttaaaatgaagacacaaaccacacatgttagcttaggcctacacaaggtcaggattatcaatctccctgtctttcactttcacatcttatcccactggaagttcatcagggcaataatgcacatggagctctcatctataataacaatgccttcttctggaatacctcctgaaagacctccttgaggctgttttatagttaacttttaaaaatataaatagggccaagcatggtggctcacgcctataatcccagcactttgggaggccgaggcaggcagatcaygaggtcaggagttcgagaccagcgtggctaataagtgaaaccccgtctctactaaaaataaaacaaaattagacgggc

SEQ ID NO: 949823 - DNA, 581 bp, Homo sapiens
gcagtcagccaagattgcgacactgcattccagcctggacaacagagtgagactctgtctcagaaaaaaaaaaaactttttgactctagtaacaacgttaaggttaaaacacacattggagagctgtccaaaaatattttgtttctttatatccttattctataagtttttttattttaaaatctatttttaatttttttcctattcaaatttttttgttaaaatgaagacacaaaccacacatgttagcttaggcctacacaaggtcaggattatcaatctccctgtctttcactttcacatcttatcccactggaagttcatcagggcaataatgcacatggagctctcatctataataacaatgccttcttctggaatacctcctgaaagacctccttgaggctgttttatagttaacttttaaaaatataaatagggccaagcatggtggctcacgcctataatcccagcactttgggaggccgaggcaggcagatcacgaggtcaggagttcgagaccagcgtggctaataagtgaaaccccgtctctacyaaaaataaaacaaaattagacgggc

SEQ ID NO: 949824 - DNA, 601 bp, Homo sapiens
aataatgtgtataaaacatgtaaaatagtggctggcacatagtgtttaaaatacttattattatatcacttattaaaatgttctttgagataagtatgattttgcccattttcgatgggtacattgaggtacagagaagttgaataaactgtccaaagacacagagtgataaggtttggctgcgtgtgcccacccaaatctcatgttgaattgtaattcccagtgttgggggaggcacctggtgggaggtgactggatcatgggggtggatttcttccttgttgttcttgtgatagtgagtgaattctcaggagatctagttgttaaaagtgtgtagcactgcccccttcactctgtctctcccactccaccatgtgaagaagctgcttgctgccccttcacccgtccatcatgattgtaagtttcctgaggcctccccaaccatgcttcctttacagcctgtgcaactgtgagttaatcaaacctcttttcttcataaatcacccagtcttaggtagttctttctagcaatgtgagaacaaamtaatacacatggcgagagtaattctgtcatttgaaaaaatctttgtcccctaaattg

SEQ ID NO: 949825 - DNA, 603 bp, Homo sapiens
caaatttctaaaatttgtaagatgagagcagtgtgttatgtgccactaygtgggagaggagtaaacttagtttactccatgattaaaacaaaattccatatatacaccatggaatactatgcagccataaaaaatgaaagagttcatgtcctttgtagggacatggatgaaactggaaaccatcattctcagcaaactatcgcaaggacaaaaaaccaaaaaccacatgttctcactcataggtgggaactgaacaatgagaacacatggacacaggaaagagaacattacactctgggaactgttgtggggtggggggaggggggatggatagcattaggagatatacctaatgctaaatgacgagttaatgggtgcagcacaccaacatggcacatgtatacatatgtaacaaacctgcacattgtgcacatgtaacttaaaacttaaagtataataatgataaaataaaaaaataaataaatgaaatttccgtcctaaaaaaggatgaggttacaactgtcagaagataattttttcttaatgtgagtctaatatgaactctgaaaagtatctgtaggctgactggcatccttgaaaagc

SEQ ID NO: 949826 - DNA, 591 bp, Homo sapiens
cagagtacttgtcatcagcacatggaaataaactatacattaggccacaaaaaaagtctcaacacattttaaaaattctaaattatatcaagtctcttctcagcccacagtggaataaatctagaaataaataacaagaggacttcagaaactatacaagtaacctgaaatttaaacaacgtgctcctaaatgactatgagtcaatgaagaaattaagaaggaaattaaaaaatttcttgagacatgagaaccaaaaccaatgagatagaagaaaattagtgcagagagggctgtttatagcaataaacaccaacatcaaaaaagtagaaatacttcaaataaaacctaaatatgcaactcaaggaagtataaaagcaagagaaaaccaaagccaaaattagtagaaagaaaaaaataataaatatcagagaagtaaatgaaatagagactaaaaaaatacaaatgatcaacaaagcaaaaagctgacttttatgattcgataacaaaattgataaaactgctaagctagactaaccaagraaaacaagagagggcccaaataagtaaaatcagaaatggaaaaggagata

SEQ ID NO: 949827 - DNA, 577 bp, Homo sapiens
catcagcacatggaaataaactatacattaggccacaaaaaaagtctcaacacattttaaaaattctaaattatatcaagtctcttctcagcccacagtggaataaatctagaaataaataacaagaggacttcagaaactatacaagtaacctgaaatttaaacaacgtgctcctaaatgactatgagtcaatgaagaaattaagaaggaaattaaaaaatttcttgagacatgagaaccaaaaccaatgagatagaagaaaattagtgcagagagggctgtttatagcaataaacaccaacatcaaaaaagtagaaatacttcaaataaaacctaaatatgcaactcaaggaagtataaaagcaagagaaaaccaaagccaaaattagtagaaagaaaaaaataataaatatcagagaagtaaatgaaatagagactaaaaaaatacaaatgatcaacaaagcaaaaagctgacttttatgattcgataacaaaattgataaaactgctaagctagactaaccaaggaaaacaagagagggcccaaatragtaaaatcagaaatggaaaaggaga

SEQ ID NO: 949828 - DNA, 629 bp, Homo sapiens
aaaagaaatcaaatgtaatcctgaataatctaagcctttctgccagattgtctagtgttgctgttgtttctggcactgcttcgcttctgtcttcttcctcatcatctggcactggttcagaactcatcttcatcaggccctcttctgttaattcctctggtgtggtgtccgttaactcttgaatctctccaatatccatatcttgaaaccctttaccccacaacaccttttttttttaaatttttttgccatatccacaatctctttcatgactttcttgattagctctgttgtaaatcctgtgaagccatgcacaacatctggacacagtttcctccagcaggaatttcttcttgaagatttgatggctttcatgactttttctgtaacaagaatggtatcttcaatggtgtaatccttgcagattctcatgatgttttctctatcagatttctcttccattgacaattctttctgtagagtaccgcgtgtaatgagccttaaaggttcctatgatttcccgatttctaaaggctgaattagagatgatgtgtttgggagaaagtagacactttgayaccgttggtgttgaactcctggggttcttcgtggacaggggcattgtccaa

SEQ ID NO: 949829 - DNA, 598 bp, Homo sapiens
acacggaacccagaattaggctctctgctcaagcagccctgggccttgcgtgtgctctctgtggcccggtttccccacgaggggcagagatgaaagggcccagttatgcttrccccatgctccttccaactcaccaatgagagaagcagggagcaggggtgagacggctcttggcactatctccacaagcaggaagcatcaggcccgagggataagtcgacaagtcgtgcccctcagagagccaagcctatgtccgctatccaggcttatggatgaatatggcctgcaaagatcagaactccctccaggccagaaggagcacataatctcttccagtcacagcaaaggttcccatcagcattccctggccagtgcttcctttgcccaataaggggctggacaaaagggaggatggcctgtgtgatggttaatactgagtgtcaacttgattggattaaaggatacaaagtattggcctggtgcagtggctcacacctgtaatcccagcactttgggaggctgaggtgggtggatcatctgaattcaggagttcgagaccagcctggccaacatggtgaaaccccgtgtctactaaaaa

SEQ ID NO: 949830 - DNA, 599 bp, Homo sapiens
caaattgcctgagactggatagcttatgaagaaaataggtttaattgactcatgattccacaggaggcttaacaggaagcatgactgggagccctcaggaaacttacaagcattgaagaaggtgaaggggaagcaaggcatgtcttacatggcagcaggaaaaagagagagagagaagagaaatgctacacactttttaaactatcagatctcgagaacttactatcacaagaacagcaagggggatatcctcccccatgattcaatcacctcctaccaggcccctcccccaatttgacatgagatttgggtggtaccacaaaaccaaaccatatcaggtggcctgaaagatctctgaaatgcctttgaagccttttccccattctcttgaatattggcagttatctttctttcagtcatgctaatctctctagcaagtggttgcaccacagctctcctgaattcttcccatgaaaacaggctttccttctctaccacatggataggctrtgaattttccaaatttttatgctctacttcccttttacatataagttccaactttaagtcgtgccttttcttccacatctgattgtcag

SEQ ID NO: 949831 - DNA, 570 bp, Homo sapiens
cagggcagacatttcaagtcctcttcwtctagggagccataagttaatgccaatgtctccaacgggctcttgaggcacctggggagagcaagaagttagtactgggcaatggcaccagttagaggacggtggtagaaaataacgtcaagggaagagcctgttttgcccaaacacaagtttgttctcatcatctaatcatggtcctcccgcaaggtgctgcctgatgaggacttggatcattcagaggcagtcccattttaggctcagtcctttcaccatcactggtgtgattggttcaaggccataaaatctctaaagcctcttttcttcatcttccagcagaaagcttcatctctgggccacaggagcccagtggaagagatgcccaaagaactgacctgagcaaggtctagggacatcagctagggctacctgctttcagaggctccctgacatggccacatctgcaaaccacctgtcactttgtaccactctcgtgcctactccctcacctccatccccagaagcacgcatttcccatgtcaattacctttcctggagttcaaaaca

SEQ ID NO: 949832 - DNA, 570 bp, Homo sapiens
cagggcagacatttcaagtcctcttcatctaggragccataagttaatgccaatgtctccaacgggctcttgaggcacctggggagagcaagaagttagtactgggcaatggcaccagttagaggacggtggtagaaaataacgtcaagggaagagcctgttttgcccaaacacaagtttgttctcatcatctaatcatggtcctcccgcaaggtgctgcctgatgaggacttggatcattcagaggcagtcccattttaggctcagtcctttcaccatcactggtgtgattggttcaaggccataaaatctctaaagcctcttttcttcatcttccagcagaaagcttcatctctgggccacaggagcccagtggaagagatgcccaaagaactgacctgagcaaggtctagggacatcagctagggctacctgctttcagaggctccctgacatggccacatctgcaaaccacctgtcactttgtaccactctcgtgcctactccctcacctccatccccagaagcacgcatttcccatgtcaattacctttcctggagttcaaaaca

SEQ ID NO: 949833 - DNA, 588 bp, Homo sapiens
tggaagttagggctcttgaggcagaaataattaataaagcttcattggaagctaaatgtgaggatcgacctggaagacacacactgacaaagtgggtgtgtcccaaagtctgttacaagttrgaatgtttttgtgagaaatgttaaaagaagggaatggggctcctcctatcagtttgtttgtttgttttaatttgcttctgtttcttgatctggcaagcctcaaatagagttgttttttcagtgtgtcttttccattggaagtataatacagaggctacaatcattggctttagatgacaacataacaggcttacattttccttgcaagacaaccagcaaaacttcatgatcagaatcaaatcagtgtccttctcaccgtctgtaggtgaagccttcatcagtacttgaagagtttgagtcactcatgaactcatgatcagattctttactcagggacaggatgtaagccaatcgtaagaccttccgcaggtggttaatttggaagcctgcccaatgtgacctgcaggttttcactggcaatatgcaggtgcagatatgacaaagaataaccatgaccttcatatca

SEQ ID NO: 949834 - DNA, 571 bp, Homo sapiens
atctagttctgggcttttatttgttggtaatttttaaatcaccgtttcaacctccctgcttgtttttggtctgtccagggtttctattctccctacccccacacagaagagtagaatccaggaatgtatacaccgatacaaggtccctcgcccacgcacataaagctataacggcaaacagacatgtgcttaccaaacacaagagattcgtggtaatgtctccagtttcatttctaattaagcttatttggatcttctctcctcttttcttggttattctagctaatggtttatcaattttgtttatattttcaaagaaaaaaaaattttctttcgttgatcctttattttgcattaatcttttgtagttctgctctgatttttgttgttgcttttcttctgctagctttgggtttagtttgtttttgttcctctagtcccttgaggtgtgacatgagrttgtcaatttgtatcctttcagactttttcatgtagccatctagtgctatcatcttcactctcagcactgcttttgctgtatcccaaaggctttgataacttgtgtcattat

SEQ ID NO: 949835 - DNA, 613 bp, Homo sapiens
attaggaaatgctgaggaggatgagccttttagcaaaacacatcgtttctctccttttccttcccactagaattaaaaaaaaaaaaaaaaaawagaaagcaggagctaacaatccataaccttcctggcaactaaaagggttaaaattcaagacagaagctaaaatgaagaagttgaggcaagacttgtatataaagacatcattttgtgactggcagagagaaaatgactacaaagcccagacaaattcccagacatgcatagaaaaagttactgtatttgtttatttagaacactaacataaacttggaaagaggaagaagcagtaatctccttaggcattacactgctataaagagaaaaaaagtacacttcccaaattaaagaaaatgtgaagcaactccatttctacctgtagtgccaaccccatgacatctcagttcttcacaaccttggttttcaatctggaaatagtttattgagggtgaattttatgtcactgtgtttgaaggaaaacataaaaagacactgttaccctgcaatgacttcctacaaaactcaaaataccctcctgtctatgcctgtcttccacagaggcatcccagatgacttc

SEQ ID NO: 949836 - DNA, 552 bp, Homo sapiens
gtatctctgtggggtcagtggtgatagctcccttatcattgttgattgtgtctgtttgattcttctctcttttgatctttgtctagctggtagtaatctattttatttrtttttatttttctctcaaaaacacagttcctggatttgttggttttctaaagggctttttgtgtctccctttcctttagttctgctttgatcttggttatttcttgtcttgtgcaagctttgggatttgtttactcttggttctctagttcttatggttttgatgttaggttgttgatttgagatctttccagttttttgatgagggcataaatttccctcttaacattgccttagctgcatcccagagattcaggtatgttgtctctttgttctctttaatttcaaataacttcttgatttgtgccttaatttcattatttacccacaagtcattcaggggcaggttgtttaatttccttgtagttgtgtggttttgagtgagtttcttaacattgaattctaatttaattatgctctggtctgagagactgttatgatttc

SEQ ID NO: 949837 - DNA, 547 bp, Homo sapiens
gtcattcttcttatctgcacatggcacatactctaaaatcaaccacacaattggccataaaataatcctcagcaaattcacaaaaactgaaattatatcaaccacactcatagaccacagtgtaatacaagtagaaattaataccaaaaaaatcacttaaaaccacacaattacatggaaattaaacaaccttcttactgaataaattgggtaaaaaatgaaatagagaaagaaatcaaaaaatcctttgaagctaaggagaacaaggatataacatacgagaatctctgggacacagcgaaaacattgataagaagaaagtttacagtgtaaaacactcacatcaaaaagttaaacatctcaaactaagaacccattttcacaactagaggaactagagaaataagagtaaaccaaccccaaagcaagcggaaaacaaaaaataatgcaaaacagagttrgacagaataaaattgggaggtgaaaaaccatacaaaagattaacacacttattaattggttgtttgaaagagtaaatacgatgggt

SEQ ID NO: 949838 - DNA, 777 bp, Homo sapiens
caggcgcagtgcctcatgcctgtaatcccagtactttgggaggccgaggcggcaggatcacttgaggtcaggagattgagatcaacatgtactaaaaaatgcaaaaattagctgggcatggtggtgcacgcctgtaatcccagctactcgggaggctgaggtaggaaaatcgcttgaactctggaggtggaggttgcagcgagctgagattgtgccaccgtactctagtctggtcgccagagcaagaccctgtctcaaaaaaaaaaaaaaaaaaaaggacaccagtcatattgggttagaatccactctcatgacctcattttaacttagtcatctctacaaagaccctatttccaaatacaagtacattttgaggtactgggggttaggacttcaatgtatgaagttgttgggagacaaaattcagctcgtatcagtcatcacttctcctgcatctcctgcaaatgctgacaggtttcttgtctttcacgatattgacagatttgaagagtattcatcaggcatgtattgagtggtccttgatttggatttttctagtgttctccaatggttagagcgaggttgttagtttggagttaagaatatcacaggccaagtgcagtggctcatgcctgtaatcccagcactttgggaggccgaggtgggcggatctcctgaggtcaggagtttgagaccagcctggccaacatggtgaaaccctgtctctactaaagatacaaaaattaccygggcatggtggtgccggacctgtaatta

SEQ ID NO: 949839 - DNA, 552 bp, Homo sapiens
ggggaccactaccaccaagacacggagaccggtagtggccccaaatgccaggctgtgctattatttattggatacaagacaagggggcagggtaaggagtgtgagccatctccaatgataggtaatgtcatkcgagtcacatgtccactggacaggtggcccttccctgtttggcagccgaggtggagggagggagagagagagagagaggagacagcttacgccattatttctgcatatcggagacttttagtactttcactaattttgctactgctatctagaaggcagagccaggtgtataggatggaacatggaagctgactaggagtgtgaccgctgaagcacagcatcacagggagacggttaggcctctggataactgcaggcaagcctgactgatgtcagaccctccacaagaggtggtggagtagagtcttctctaaactcccctggggaaagggagactccctttcccggtctgctcagtagcaggtgctttttccttggcactgacgctaccagtagaccacagtctgcttggcaacgggg

SEQ ID NO: 949840 - DNA, 554 bp, Homo sapiens
agctaagcctcttatgccaaacaaccaagttgtaaatgcaaaggaaaagttcttgaaggaaattaaaagtgctactttgtgaatgcatgaatgataaaaaagtaaaacagccttaytgctgatatggagaaactttgagtcatctgaatagaagatcaagccagccacaaaattcccttaagccaaagcctagttcagagcaaggccctaactctcttcaattctatgaaagctaaagggaggtgaggaagcttcagaaaaaaagtttgaaggtagcagagtctggttcatgagtttgaagaaaagaagccttgtgcatccataaaagtgcaaagtaaagcagcaaatgttgatgtagaagctgcagtaagttatccagaagatctagttaagataattaatgaaagtggctacactaaacaatagattttcaaaagagatgaaacagccttatattggaagaagatgccatctcagacttacgtatctagagaggagtagtcaatgcctcacttcaaagcttcaaccaacaggcttactccttgttagaagtt

SEQ ID NO: 949841 - DNA, 554 bp, Homo sapiens
agctaagcctcttatgccaaacaaccaagttgtaaatgcaaaggaaaagttcttgaaggaaattaaaagtgctactttgtgaatgcatgaatgataaaaaagtaaaacagccttactgctgatatggagaaactttgagtcatctgaatagaagatcaagccagccacaaaattcccttaagccaaagcctagttcagagcaaggccctaactctcttcaattctatgaaagctaaagggaggtgaggaagcttcagaaaaaaagtttgaaggtagcagagtctggttcatgagtttgaagaaaagaagccttgtgcatccataaaagtgcaaagtaaagcagcaaatgttgatgtagaagctgcagtaagttatccagaagatctagttaagataattaatgaaagtggctacactaaacaatagattttcaaaagagatgaaacagccttatattggaagaagatgccatctcagacttacgtatctagagaggagtagtcaatgcctyacttcaaagcttcaaccaacaggcttactccttgttagaagtt

SEQ ID NO: 949842 - DNA, 557 bp, Homo sapiens
aagttcaccttctggaaggagaccaaccagcaaaaaactagtacaataaacaaaactacaactaagaaccttcacagagtcaatttcactccgctgccacctccaccaaagcaggtgctgctatccatggctgagagacctgaagaaggatcacatcacaggactctgtgcagaaatcccctggtaccagcccagtagctctgctgggtggctagatccagaagagaaataacaatcactacagttctgctctcaggaaatcacatccctaggaaaaaggggatggcactacatcaaagaagcaccctgtgggacaaaagaatctgaacagcagcccttgagccccagatcttctctctgacatagtctaccctaaataagaaggaaccagaaaaacaattctggtaatatgacaaaagaagtttctttagcacatccaaaagatcacactagctcatcagcartggatccaaaccaagaagaaatccctgatttacctgaaaaagaattcagaaggttgattattaagctaatcaaagaggcatcagagaaaggtg

SEQ ID NO: 949843 - DNA, 599 bp, Homo sapiens
tgggatgagaaagcagacaaaggagggaagtgcttctgaacagagtgccagtctatggtgcccagagctaaatcctcaactttcaaatctgtgaagactggagattcttaatatttgatgatctggtttatctgcacatataactagcattatgttaccctcacattaagttatattcttagtttcagttttccaagaaatgctgcttgaaactacaaacatcgtttaagtatttttgagctaaatgtattctctttttaatactcttgctttagtttctctttttgtttaattttttatggctggaagagtataattaattcaacatggttgcttagagagacattttccaggccccactaggcatactgtagtcatttattcaaaattaggcctagggaataagaatctcaagtaaataatttattatatttgatgtaaattcatctagattttctgacttttctgaaaaatatatgctaatgcmcttaaactgtatgaaatatttgtagtatacttctggaatatctttatcaccccacaactttgtttagacaaataccaattggaactcagaaattcagtgtattactctgaaa

SEQ ID NO: 949844 - DNA, 760 bp, Homo sapiens
ttccaaattgagtgcccgcaagtcttgacaccacgggctaaagtgcttcagggcctcatataaacttgaaaggcagtctacaccatgagggctacaacacctaagggagtsctagtcttgaaatggacccagagccagtggattttggggggtatgtgtactactgagacactatctgggatggctaagggagtgctgccatcactcttccccaaaccccaggatgcacaactcatgattccaaaagagacccctcctttctgcttgaggaaaagagatgaaagagtgcagagaactttgtctcatatcttggataccagctcagccacaacaggatagggcacccgtcagagtcatgagattccctctccaggcactagtccttggatgatatttctagatgcaccctaggccagaaaggaacccactgccttggaaggaagaacccagtcctggcataattcatcacctgctaattgaagcatccttgggccctgaataaccagcagtgataacccaggtgctatgttgagggccttgggtgagactctgagtcttgctggcttcaggtgagactcagcgcatttccagctatagtggctacagggtaagactcctttcacttgaaaaaaagttcaaggaaaagtaaagatgactttgccttgcactttaggtaccagctcagccacatgggggtagagtaccaaacaggcacttggggtccccagtttcgggacttggctcttagatggcatttctg

SEQ ID NO: 949845 - DNA, 646 bp, Homo sapiens
tatggtttgtcccaaccacaactcatgttgaaatttgatccccaatgtggcagtgttgtgtgatagggtrtaatgacaggcatttggatcacaggagtgcatctttcatgaatagaagaatgccctttgttgtgggtgagttctcattctctcaggaaagattatttcccacaagaatgagttgttaaaataatctggcttcctttgtctctctcttgttttctctcaccatgtgatatctttgcacatgccccctccctttccactttctgccaggagttgaagtaatctgaagccctcaccagatgcagctacccaattttgaactttccagccaccagaatcatgagccacataaacatcttttctttataaactacccagtctcaggtatttggttatagcaacactaaatgtactaagactagtatcttaacataatttatacagaaaggcattttgcatcctggacctcaaatacagcatcagaatgaaggttgaggtaactgttattcattgtaaatacagtttcagtaaatgctgtaaaattgtgatggaaattttgaagtaaatgaaatttccttaaagtatttatttttagatggactctgggagccccacagtcagatgaagcctctatgaatca

SEQ ID NO: 949846 - DNA, 740 bp, Homo sapiens
catggctgggaattgttttgaggtttctctagcatcctcttggcccattaaggggtctgttcagtyagtttggggttggggggttagggttttatttttggttttcaatcatttcactgctgattatataacaaaagctcatagtattatatttacccaaccatatggctggaatttgatccagcttgatcaagcctttcattttcttggaggaccaaaagtaacagaactagacacttaggccatattgcaaagaatattttctttcaattacataatgaatctctcagtttgagaaaataaggaaggatgtccgtgttctactgaaatcactcacatctggtcgggtgcggtggctcatgcctgtaatcccagcactttgggaggccaaggtgggtggatcacctgacgtcaggagttcaagaccagcctggccaacatggcgaaaccccgtctctactaaaaatacaaaaaattagctgggcgtggtggcgggcgcctgtaatcccagctactcgggagcctgaggcaggaaaatcgcttgaacccaggaggcggaggttgcggtgagtcgagatcacaccaccgcactccagcctgggcgacaagagcgaaactctgtctcaaaaaaaaaaaaaaaaaaagaaatcactcacatcctgttatcctttgatatctgtttctgagagtcatgcctagaaatagaggttcgagagacatgagaacccttgagaacattt

SEQ ID NO: 949847 - DNA, 610 bp, Homo sapiens
cagaagtaggtgtaaggcagagggagagactcaggcaagttttagagcaggagtgaaagtttattaaaaagtcttagagcaggagcaaaagggagtaaaggacacttggaagagagccaagtgagtggcttgagagagtcaagtgccctgccctgttcggcccttgagttggcgtttatacattggcatggttccggggtttgtgtgccttctcccttgattcttcccttgtggcaggctgtccacatgctcagcggcctgtcagcacttgggaggggccacatgcgtagtgtgtttactgacgttgtgcttgtgcttacatgaggtgtttttcccttaccagttgagccttctgccattttgccccttaatgtacatgcttgaccccacttgcccaactcctaagatcttatcataaagctgccgatcaacagcttcagatattttctatctaatgagaaactctctttccctggtgacagcggtgaccagttatcattttagaaagacagtttaacaactgtctaaccatcacctgatagttgcctgacatttctggagaagtcctctcctgccctgctcaygtctgcctgacaacctactgtaacac

SEQ ID NO: 949848 - DNA, 610 bp, Homo sapiens
cagaagtaggtgtaaggcagagggagagactcaggcaagttttagagcaggagtgaaagtttattaaaaagtcttagagcaggagcaaaagggagtaaaggacactyggaagagagccaagtgagtggcttgagagagtcaagtgccctgccctgttcggcccttgagttggcgtttatacattggcatggttccggggtttgtgtgccttctcccttgattcttcccttgtggcaggctgtccacatgctcagcggcctgtcagcacttgggaggggccacatgcgtagtgtgtttactgacgttgtgcttgtgcttacatgaggtgtttttcccttaccagttgagccttctgccattttgccccttaatgtacatgcttgaccccacttgcccaactcctaagatcttatcataaagctgccgatcaacagcttcagatattttctatctaatgagaaactctctttccctggtgacagcggtgaccagttatcattttagaaagacagtttaacaactgtctaaccatcacctgatagttgcctgacatttctggagaagtcctctcctgccctgctcacgtctgcctgacaacctactgtaacac

SEQ ID NO: 949849 - DNA, 610 bp, Homo sapiens
cagaagtaggtgtaaggcagagggagagactcaggcaagttttagagcaggagtgaaagtttattaaaaagtcttagagcaggagcaaaagggagtaaaggacacttggaagagagccaagtgagtgrcttgagagagtcaagtgccctgccctgttcggcccttgagttggcgtttatacattggcatggttccggggtttgtgtgccttctcccttgattcttcccttgtggcaggctgtccacatgctcagcggcctgtcagcacttgggaggggccacatgcgtagtgtgtttactgacgttgtgcttgtgcttacatgaggtgtttttcccttaccagttgagccttctgccattttgccccttaatgtacatgcttgaccccacttgcccaactcctaagatcttatcataaagctgccgatcaacagcttcagatattttctatctaatgagaaactctctttccctggtgacagcggtgaccagttatcattttagaaagacagtttaacaactgtctaaccatcacctgatagttgcctgacatttctggagaagtcctctcctgccctgctcacgtctgcctgacaacctactgtaacac

SEQ ID NO: 949850 - DNA, 729 bp, Homo sapiens
agctgggatgcagggacaaaatcctgatgctgcacatagcacaggactctggacccaaaycacgaaaccatttttctccctaggctttgaggcacttgttactttaggctgcaaggcctgtgatgggaggggatactgctaagatctctgacatgccctggagacatttcccccattgtgttgcgattaacaattaaatcctcgttactatggcaaatttctgcagctagcttcaatttctaccaagaaaatggattttcttttctatgcatcatcaggctgcaaattttccaaacttttagtctgcttcctttttaaacataaattccaatttcagatcatctctctcaagttaaaagtgccacagatctctagggcagggcagaatgctgccagtcttgatgtaaagcatagtaagagtgacctttgctccagtgccagataagttcctcagctccatctaagaccacctaagtctggatttcattgtccacatcagtatcagcatttggtcaaaaccactcaacaagtctctaggaagttccaaacttcccacatcctactttcttcttctgagccttccaaactgttccaacctttgcccattacccagttccaaagttgcttccatattttcaagtatctatttatagcagcacccaactctctgtggtacaactttactgtattagtctgttttcacactactataaagaaatacccgagact

SEQ ID NO: 949851 - DNA, 620 bp, Homo sapiens
tttgtgttggccttgcctgtatgactggaacaactggggttcctcttcttccaggtttaattcatgaaatcctgccgtaccttcaataccaaggtaagaaatcacttgtttaaaaagttttttatgccggcygtggtggccatgcctgtaatcccagcactctgggaggccaaggcaggtggatcacctgaggtcaggaggtcgagaccagcttggccaacatggtgaaaccgtgtctctagtaaaaatacaaaaaaattagccaggcagctaagctactcgggaggctgaggcaggagaattgcttaaaccgaggagacagaggttgcagtgagccaagatcgcaccattgcactccagcctgggcaacaagagcgaaattccatctcaaaaaaaaataataaataagttttttaaattattttttaaactgttgtgggtacatagtatatatatttttggggtacatgagatattttgatacagatatgcaatatgaaatcagcacattatggagaatggggtatccatcccctcaagcatttattctttgagttacaaacaatccaattacattctttattttaaaatatgcaagtaagttatcattgatgataatc

SEQ ID NO: 949852 - DNA, 745 bp, Homo sapiens
tgtgccaccatgcccagctaatttttaattttttttgcagagmcggtttccttctatgttgcccaggttgttctcaaactcttggccccatgcaatcctcctgcattggccttccaaggtgctgggattacaacataagccactgcacccagactaacttggatattttatgctatttattaagcttccttctggcctgtgactccagtgatactattaattcctttaccgctccatgtgctcacatactttttgccttggctatgttgttcttttgctaggaatgtccttctttcacctactaaaggtggcctcatcttctgagtatcatttactttaagaatccttctgtaacaccccactctgagcaggagcaatagtgctcacctctggttttacttaacacttgtgtttattttactagtgtgcatactcctatattccaaattgcactacagccattgtgctttctctgtctccccaagtaaattgtgggcttcctgatgtgatggtggctactgtgccttcacagactttgtttaccagtacaggtcaggctccaagcagacactcaattgagtagttttcaacttgtttttgtttttatttttaaattcacatcttcgtcttccacttattcatgtctttcctgctttgccctctatcttatgagaagagggtatttttttctcctcaaatccctctgttcccatatattattgccaaagaaattaaatcgctgctt

SEQ ID NO: 949853 - DNA, 557 bp, Homo sapiens
tctggtatgtctttatcagcagcatgaaaatggactaatagagtaaattgacaccactagagaggggcgttgctgaaaagatacctgmaaatgtggaagcgactttggaactaggtaacaggcagaggttggaaccatttggagggctcagaagaagaagggaaaatgtggaagcgtttggaaattcctagagaattgttgaatggctttgcccaaaatgctgatagcaatatggacaataaagtctaggctgagctggtctcagatgtagatgaggaacttgttgggaactggagcaaaggtgactcttgctatgttttagcaaagagactggtggcattttgctcctgtcctagagatttgtggacctttgaacttgagagagatgatttagggtatctgacagaagaagtttctaagcagcaaagcattcaagaggtgatttgggtgctgtttaaagcatttagttttaaaatggaaacagagcataaaagtttgaaaaatttgcagcctggcaatgtgatagaagagaaaatcccattttctgaggagaaatt

SEQ ID NO: 949854 - DNA, 549 bp, Homo sapiens
acgtagaaccatagaagactcacaatagcaaaagcaatcttgagcaaaaggaacaaagctggaagcccaatactacccaatttcaaaatatactacaaagmttagtagtcaaaatgccatggcactgacttaagaacaaacatcttaaccaatagaacctaatagagagtccagaaataaatctatgcattgaacatcaattgattttcaacagagctgccaagaaaacacagtggggaaaggacaatctctttaataaactgtattgagaaaactagatatccacatgctgaataatgaaattagacccttacctcacactgtacacaaaaatcaactcaaaatagattaaaaacaaagttgtagtataggaaactattaaatcattggaaaaaacataggggaaatgcttcttgatattggttcaggagataattttttagatatgattccaaaatcacaagcattaaaactgaatataagcaaatgggaatacattaagctaaaaatacttttgcacagcaaaagaaacaatcagcacagtgcaga

SEQ ID NO: 949855 - DNA, 646 bp, Homo sapiens
aaagcattctattatctttttaactcaggctctgataatcwgtgataaaaagaatcacgtttggccgggtgctgtggctcatgcccgtaatccaagcactttgggaggctgaagtgggtggatcacctgaggtcagaagtttgagaccaggctgcccatggagaaaccccctctctactaaacatacaaacattagctgggcgtggtggcaagtgcatgtaataccagctactggggaggctgaggcaggagattcacttgaactcaagaggcggaggttgcagtgagttgagatcatgccactgcactccagcctgggagacagagtgagactccatctcaaaaatatatatatagtaataataatattctactgaagcaatacaataaatatgaactgtttaaataatgattcattcaaacctgaaatacattgaaaattctacagctaacactgaatattaaaattctaaaatgcacacaaatttcaatttttgaaatatttatctctttagtatacagtaaaataacatatctaggctgagtgcagtggctcatgcctgtaatctagcactttgggaggccgaggcaggtggatcacctgaggtcgggagttcgagaccagcctgaccaacatggaaaaacc

SEQ ID NO: 949856 - DNA, 598 bp, Homo sapiens
catatgcttaatacaacgcgtccttttgacctccacattctcaccacctgtttctctgttggattaccaataaagagcatgggctcccagagctcagggccttcgcagcctccatacactagtgatggccctctggtcccagctttctctctcaaactgtctttttctcaatcctttgactctgtcggactttgtcactcccatgacctggtgtcgggtctgatcaccccaatatttaatgacaccttatttgatacatatggtgtatgcttaaactttgaacttattatcaacagtgctgtaactcatgtctgagcaagcttatttaacacacgtattttttctgtaagatgcatcacagccttccgggtatgatgcattcttatgattttatgttgccttagtatccattctgaatttaggttttactttctcacagcagaattgggacttagtcacccttgactcggtttccagttcaccattccctyccggtccttccatgtggttgatctagatatctgccttaaacatctgcatccaggtgaccacttttctatgggatagctggatacaacctacttgacaacccccactg

SEQ ID NO: 949857 - DNA, 846 bp, Homo sapiens
ctcaccactcctattcagcatagtactggatgtcctagccagagcaatcatgcaagagaaaagtaaaagtcatccaaataggaagagaggaagtcaaaccatatctatctacagatgatataattgtatatctagaaaaccccatactctctctccagaggcttctagaattgataaacaacttcagcaaagttttaggatacaaaatcaatgtacaagtatcagtagcatttctatacatcaataacgttgaagccgagagccaaatcaagaatgcaatcccattcacaaaagccacaaaaataataaaatatctaggaatacagctatacagggaagtgaaatatctgtgcaatgagaattaccacacactgctaaaggaagttgaagagaacacaaacaaatggaaaaacattccatgttcatggataggaaaagttaatattgtttaaatggccatatgtccaactcagtttacagattcaatgctatttctacccaactacctatatcatttttcacagaattagaaaaaactattctaaaattcatatgcaaccaaaaaagagaatgcatagccaaaaccatcctaagctaaaagaacaaaagccagaggcatcatcctaccaacttcaaactatattacatggctacagtaaccaaaacagcatgatactggtacaaagacagacatatagaggagtggaacaggttagagaacccagaaataaagctgcacactgacaaccatctgatctttgacaaagtcracaataacaagcaatggggaaaggattacctatttaataaatggtgtttgaagagctggttagccatatacaaaag

SEQ ID NO: 949858 - DNA, 629 bp, Homo sapiens
agtggtggatgtgagacacatgtggttcttgtcctgtggggcttggagtctaaaggagcagatagacaataaacacagaaaaaaaatcagcagggaattataacttgagataagtatcacraaagaaaagagcagagcacggggaataataagagaatgttggatggttgaggaaagtctctcaatggggctgacatctaagctggaagaaaccaggaactcaaagcacaaagaaaactattcttggctgaggcaatggtatgtaagaagtttctgaggcaggaaagaacttggcatgctttaggacctgaaacaagccattgggtaaaaggacagtgaccaaaggacagtctcttctcaaacagcagattcacttattacttcagtaatgtgttttggtgactcttcatggatcattatgatatgacctgaatacttgaactcccattgagaagatgcaggaaatggaacatgcaaggaatatgagtggagagctgattgtctttgtcttctcctggcgatacatgttaccatgacccatgtatatcatctttgctgtgatttgagtcacactttgcctttccaaaagtgaaagttcagagaatgaagcagaggctcctggggtttgg

SEQ ID NO: 949859 - DNA, 536 bp, Homo sapiens
tgatccgcccgcctcagcctcccaaagtgctggggytataggcgtgagccaccacgcctggctgcttgttttttgagacagagtctcgctctgttgcccaggctggagtgcagtggcacaatcttggttcactgccacctctgtctcctgggcttaagcgattctcagctctggagtagctaggattacaggcaccaccactatgcccagctaatttttgtgtttttagtagagacggggtttcaccatgttggtcaggctggtctcaaattcttgacctcaagtgatctgcccaccttggcctctcaaagtgctgggattacaggcgtgagatactgcacccggcgtttacttttatttatttgtttgtttgtttgtttatttttgagacagagtctctctctgccacccaggctggagtgcagtggtgcaatctcagctcactgcaacctccacctcctgtattcaagcgattctcctgtctcagcctcccaagtagctgggattacaggtgtgtgccaaccctcccggcttgg

SEQ ID NO: 949860 - DNA, 594 bp, Homo sapiens
taagcaagggtgagggaaaggctttgatgtgtgttcttctccttcgttttttttttagatagagtcttgctctgttgcccaggctggagtgcagtggtgcaatctcagctcactgcaacctccatctcccaggttccagcaattctcctgcctcagcctcacgaggaattgggattacaggtgctcaccaccatgcccagctaattttttgtgtatttttagtagagacggggtctcaccatattggacaggctggtcttgaactcctgatgagtgatccacccgccttggcatcccaaagtgctgggattacaggtgtgagccaccgtgaccaacccttctccttccttttttttttctttttttttttttgagacggagtctcgctctattgcccaggctggagtgcagtgatgcaatctcggctcactgcaacctccgcctcccgggttcacgccattctcctgcctcagcctcccaagtagctgggactacaggagcccgccaccgcrcccagctaattttttgtatttttagtagagacggggtttcaccgcgttagccaagatggtctcgatctcctgacctcgtgat

SEQ ID NO: 949861 - DNA, 608 bp, Homo sapiens
tcttgtaggtacaggagaatgttagagggatgaaatgagctaatccaygtaaattgctgaggacagggctggacacataccaggtcctccattcattcattaattcacccattcattcattcaaaggatatttatgaagcatgtgctatgtgccaggcacctttagtgctggggaagaaacaaaataagaaatcttgaccatccctcataggtttctgcatgctggtgggagagacagaacatgaacaaacaagtaaaatatatatggcctgtcagaagggagtgtgtgacacagagaaaagacatctgaaagagggaaggggacccaggggtgtgggaactgcagttttattttattattttattttttggggccaggcgtggtggctgacgcctgtaatcccagcactttgggaggccgaagcaggcagattacttgacctcaggagttcaagaccagcctggctaacatggtgaaaccccatctctactaaaaaatacaaaaattagccaggcatggtgacacatgcctgtagtcccagctactcaggagactgaggcaggagaagggcttgaacctggggggaggaggttgcagtgagccaaga

SEQ ID NO: 949862 - DNA, 608 bp, Homo sapiens
tcttgtaggtacaggagaatgttagagggatgaaatgagctaatccacgtaaattgctgaggacagggctggacacataccaggtcctccattcattcatkaattcacccattcattcattcaaaggatatttatgaagcatgtgctatgtgccaggcacctttagtgctggggaagaaacaaaataagaaatcttgaccatccctcataggtttctgcatgctggtgggagagacagaacatgaacaaacaagtaaaatatatatggcctgtcagaagggagtgtgtgacacagagaaaagacatctgaaagagggaaggggacccaggggtgtgggaactgcagttttattttattattttattttttggggccaggcgtggtggctgacgcctgtaatcccagcactttgggaggccgaagcaggcagattacttgacctcaggagttcaagaccagcctggctaacatggtgaaaccccatctctactaaaaaatacaaaaattagccaggcatggtgacacatgcctgtagtcccagctactcaggagactgaggcaggagaagggcttgaacctggggggaggaggttgcagtgagccaaga

SEQ ID NO: 949863 - DNA, 705 bp, Homo sapiens
gcatgatggcagcagcctctgccaccaccagcactttgggaggctaaggcaggaggatcatttgagcccasgagtacaagactagcctgagcaagatggtgagatcccatctctacaaacataaacaaaaatttaaaaattaaaaattagccaggcatgggtgcctgtagtcctgctacttgggaggctgagatgggaggatagcttgagcccaggagtttgaggctgcagtgagctatgatcacatcaccacactgtagcctaggtgacaaagagaaacccagtctctatttaaaaataataataacagaactaaaagaaaaaaatagataaatccaatattatagttggtgactttaacacgcttctttcaacaactgatagacttactacgtacaaagtcagcaagaatatagaagaacttaacaatatcatcaacccatctaattgacatttatagaatactccaacagcagaatgcacattctcaagtacctatagaacactcaccaaggtataccatatctgggccatagaagaaacctcaacacatttaaaataattgttttttttttttttttttttttttggttaagagacagggtgttgctctattgctcaggctggagtgcagtgacacaatcatagctcactgtaacctcaaactccagggctcaagagatcctcctgcctcagccaacatgt

SEQ ID NO: 949864 - DNA, 739 bp, Homo sapiens
cagttacagtccgcttttctgccactgtcacgtggtcatagctggtattgatgactaccttcttctgctacccattctgtattcccttcaccttcagcacgcacctcagcaggtcgtgtttttcttcctggttgagtgacccaaagcattcctgaggggtctggatcatttgtagtcctgtctggtttgggctgttgtagtttcccattgaccttaatcacagggcatagtaacactaagagacgccctaatggatctcgtgtattccatgaatactcttccttacctctattgtggaatagtagactgatttcatcttgatagtccgggtcagtcaccccagccaacactgtaactcccttcttagcctgttggcttaaaggtaggaggagcccaaagtgtccaggtggcaatcttaatttccagtttaatagaatcattgtattcctagtggcagtgttcctccctctggaactaagacctctaggccagcagaacgtaatgttgtgggaacaggaagcaaaaattttgctagtggatcactaggagtgatggtgagtggtgccacttccacttctaccccttgattcctggacttgtgaatcctggctatgggagaaacagtactatatattggatactgattaagagcatacacggccttctggagaactttgccscagccctgcaaagtattgtcacctaattggcattgtaattgtaacttcaaaaggccatt

SEQ ID NO: 949865 - DNA, 554 bp, Homo sapiens
ccgcgggaagggtgagggctaccggggcacagccaataccaccacctgcgggcgtaccttgccagcgttgggacgcgcaaatccckcatcagcaccgatttacgccagaaaaatacgcgtgcaagtgaggtggggggggggggcgggcgttgggacgtgctgctgcgggtgagacgggaggaaggtagtcacgggctcaaggctggaggctggcgggctagggctgagtggagcgcctgcttagagaccttcgggagaacttctgccggaaccccgacggctcagaggcgccctggtgcttcacactgcggcccggcatgcgcgcggccttttgctaccagatccggcgttgtacagacgacgtgcggccccagggtgaggcccaagcttgggggctacagagccgggctggaagcctggaaccggagggccggggcgaggtctcggcctgatggctgcccgcacccgccacagactgctaccacggcgcaggggagcagtaccgcggcacggtcagcaagacccgcaagggtgtccagtgccagcgctggtcc

SEQ ID NO: 949866 - DNA, 422 bp, Homo sapiens
tgtcctttgcagagacatggatgaaactgtaaaccattattctcagcaaacttacacaggaacagaaaaccaaacaccctatgttctgactcataagtsggagctgaagaatgggaacacatgaacacagggaggcaaacatcacacactgaggccttctgtggggtgggaggcaaagggagggagagcattaggacacatacctaattcatgcgtggcttaaaacctagatgacaggttgatggatgcagcaaccaccatggcacatgtatacctatgtaacaaacctgcacattctgcacatgtatcccaaaacttaaagtataatttaaaaaaagaaaaaaaaaaagcaaaaactggtaaatggatgactaaaacactactaccttaaaattaatattcactctctatgttggcaagaa

SEQ ID NO: 949867 - DNA, 541 bp, Homo sapiens
tggatcgggtggggacttggagaacttttgcgtctagctaaaggatataaaaacacaccaatcagcactctgtaaaaatgcaccaatcagtgctctgtgtctagctaaaggattgtaaatrcaccaatcagcactctgtaaaaataaaccaatcagcgctctgtgtctagctaaaggattgtaaacgcaccaatcaaccctctgtaaaatggaccaatcagcactctgtaaaatggaccaatcagctctctgtaaaatggaccaatcagcaggacgtgggtggggccaaataggggactaaaagctggccaccagagccagcagcggcaacccgcttgggtccccttccgcactatggaagctttgttctttcgctctttgtaataaatcttgctgctgctcactctttgggtccgcactacctttatgagctgcaacactcactgcgagggtctgcagcttcattcctgaagtcagtgagaccaccaacccacagggaggaacaaacagctcctgacgctccacctttatgagctgtaac

SEQ ID NO: 949868 - DNA, 867 bp, Homo sapiens
ttgctgtattcctaggtattttattctctttgtggtaattgtgaatgacagtttatttattatttggctctgtgcttgtctattgttgatgtataggaatgcctgtgatttttgcactgattttctatcctgagactttgctgaagttgcttatcagcttaagaagcttttgggctgagactatggggttttctagatataagttcatatcatctgcaaatagggatagtttgacttcctatctttctatttgggtgcctttatttttttttcttgcctgattgcacgggccaggactttcaatgctatgttaaataggaaggttaagatagcgtatccttctcctgcaccagttttcaaggggaatgtccagcttttgttcatttagtatgatgttggctgtgggtttatcatagatggctctcattatttggagatatgtttcttcaataactagttcattgagagtttttatatgaaaaggatgttaaatattattgaaagctttgatctgcatctattgagtaatcaggtgattttgtctttagttctgtttatgcactgaatcacatttatcaatttgcatatgttggaccaaccttacatctcagaaataaagtctacttgattgaggtagataagctttttgatgtgctcctgaattcagtttgccggtattttgttagggatttttgcattgaagtgtataaaggatattggcctaaaattttcttgttctgttgtatctctgccaggttttggcattaggatgacgctggactcatagaatgagytagagtacctcctcctcaatttgttgaaatagtttaagcaggaatggtaccaattcttatttgtacatctggt

SEQ ID NO: 949869 - DNA, 477 bp, Homo sapiens
ataataataataaaaagaaatgaaaatcctaacttgctaaaataataataataatttcttaatacaatcagaagcatcaacagyagaataggtcaagctgaggaaagaatttcaggacttgaagactggctcatttaatcaactcagataaaaataaagagaaaagaattaaaaaaggatggaaacctccaagaaatatggtattatgtaaagagactaaacctataatgcatttgcgtcccagaaagagagagagagagtaagcaacttgaaaaatgtatttgagtatattgtccatgaaaatttcactaaacttgctagagtggttgacatgaaagttcaggaaattcagagaaccccattaagataacataaaagatgaacatatccaagacacccagtcatcagattcttccaggtcaacatgaaaggaaaaatattaaagacagcttgagagaaggggcaggtcatgtacaa

SEQ ID NO: 949870 - DNA, 639 bp, Homo sapiens
atagaggcttcatctgactgtggggctcccagagtccatctaaaaataaatactttaaggaaatttcatttacttcaaaatttccatcacaattttacagcatttactgaaactgtatttacaatgaataacagttacctcaaccttcattctgatgctgtatttgaggtccaggatgcaaaatgcctttctgtataaattatgttaagatactagtcttagtacatttagtgttgctataaccaaatacctgagactgggtagtttataaagaaaagatgtttatgtggctcatgattctggtggctggaaagttcaaaattgggtagctgcatctggtgagggcttcagattacttcaactcctggcagaaagtggaaagggagggggcatgtgcaaagatatcacatggtgagagaaaacaagagagagacaaaggaagccagattattttaacaactcattcttgtgggaaataatctttcctgagagaatgagaactcacccacaacaaagggcattcttctattcatgaaagatgcactcctgtgatccaaatgcctgtcattayaccctatcacacaacactgccacattggggatcaaatttcaacatgagttgtggttgggacaaaccat

SEQ ID NO: 949871 - DNA, 735 bp, Homo sapiens
atatgtgtggatattggtgatggcgattgacttggtttcacatgaatcaggctatggggctgcagtgtacagtgagtttgaaatgtctgctcagtcctgagagattcagatgccaaagggaatgccagcatcaacatcagtgaaacacactgaagaactgggatgtaaatcatgctcactgaattggtttgaattatttgggctgctttttatataagtgatgttttcgattattaaaaaatccttatttaatcaacaagttgtataactgagcatcaaggtagctcaaatgtaatcctgatctaataaagctctttaaacttatgttaaattgtttgaaatagcaactcctttcctgctattatgacactttttttattaattgggaagagagtattgtaaagaatatataatatctcaacatgtagaatgattctgtaacaaagaacttagttgctaagctgtggtctcaaagttatcactagctttttttttttctttttaaagagatggagtctcactgtgtctcctaggctggagtgcagtgtagtggctgttcacaggtacaattatagtgcactacagcctcacattcctagcctcaagtgatcctcccacctcagcctcccaagtagctgagactacaggcacaagccaccatgcctcactctgggtttttttggtgtgttgatatgtakcattttatatttattgaaattgagatacagtacaagt

SEQ ID NO: 949872 - DNA, 745 bp, Homo sapiens
attggtgctgcaaaaaagccagcaggttttggggaaaattctggggctgtcaccataaacctaccctcaggtctctyggtccagcagtgtcagtgagggcaggggatgagggaagaactcagtgtcgagtgccaacagtctgggtggcacttgagtcaaccattgatggcaggagtgtcttcaccaggctgtttagtcagggagggtttaagctacataccttttcttccttccttagtgttggtactcacctacatcaggtaaacaggagacagaagaggtacaaaacaaggggagatgtgagtgggctgaatgttggcagaaatccggaatagtgtagtatccatgaaggctagggaggagagagttttaagagagccagttgtgtcaatacagaagacagatagatggatcttccttttgttcaggtttgtacatagaaagttaaaatgaatgatctgagtatgtatttaggtcaggataacttcatgacaagtttggtcatgaaacaatactgattgtgtgcttatgttttcatgacttgacaatttttcacaataggaaaaaagaattgcttggggcctcaaaaaatatttggattatgattatttgaagccccctgtctcttttttcaatctataggaaacaggaatatcactccagcactttaaatttcaagtgttttctatgaaaggtgaattcttttataggaaagtcttgtgttctttttcttgtgggctatgta

SEQ ID NO: 949873 - DNA, 671 bp, Homo sapiens
tgctgcaaaaaagccagcaggttttggggaaaattctggggctgtcaccataaacctaccctcaggtctctcggtccagcagtgtcagtgagggcaggggatgagggaagaactcagtgtygagtgccaacagtctgggtggcacttgagtcaaccattgatggcaggagtgtcttcaccaggctgtttagtcagggagggtttaagctacataccttttcttccttccttagtgttggtactcacctacatcaggtaaacaggagacagaagaggtacaaaacaaggggagatgtgagtgggctgaatgttggcagaaatccggaatagtgtagtatccatgaaggctagggaggagagagttttaagagagccagttgtgtcaatacagaagacagatagatggatcttccttttgttcaggtttgtacatagaaagttaaaatgaatgatctgagtatgtatttaggtcaggataacttcatgacaagtttggtcatgaaacaatactgattgtgtgcttatgttttcatgacttgacaatttttcacaataggaaaaaagaattgcttggggcctcaaaaaatatttggattatgattatttgaagccccctgtctcttttttcaatctataggaaacaggaatatcactccagcactttaaatttc

SEQ ID NO: 949874 - DNA, 584 bp, Homo sapiens
ttctagaaggcaattgcgtaaagaaaagagtagagagagaactatcctagattaaaaagatagataggccaggggtggtggctaacgcctgtaatcccagcacttcaggaggccgaggygggcggatcacctgaggtcaggagatcaacaacaacagcaacaacaacaacaaccagaaacagaaaaaaaaaaaaaactctcccaagaaatggaaactctaccagcctggccaatatggtgaaaccccatctctactaaaaatacaaaagtttggctgggcacggtggctcactcctgtaatcccagcactttgggaggtggaggcgggcagatcgcaaggtcaggaggtggagaccatcctggctaacatggtgaaaccctgtctctactaaaaatacaaaaaattagccatgcatggtagcacacacctgtagtcccagctactcaggagactgagacaggagaatcacttgaacccaggagtcagaggttgcagtgagccaagatcgtgccactgcactccagtctgggtgacagagtgagactccgtcacacacaaaaaaataacagatagatatatcgca

SEQ ID NO: 949875 - DNA, 577 bp, Homo sapiens
gaaataactctgaacatctttgccccaccagcaagtagaccagcaatagtatcaaaagaaaagaaatgtgaagttgattactagcttctccattttgatcagaatttgctgcaagcaaagacgatgagtctagggatgaaaaacagactaaatgtggatccctgacatttaaaggatcctaattcatagctaagagggagaaacaactatttcttcaaattatgaaatgttatatgatacattcagaggttcccatctacaattcttttcttcttatctcctcctactttctttcaccttccttgcactcaagtcatattaacattttcaattttctgaataaactcaatacctaccttcttattctagcacttatccatgtattaggattactttgtatatgttttatcttccttagagactatacatttcttgagaacaggcccctgacatatcaatctcttcacctgtcatgtggcttaacacagctatttgtgacacaatgagtgcttagtatttgttgaaataacaaactttactatactrtatatagcgggtttcaaagttaaactggaaa

SEQ ID NO: 949876 - DNA, 579 bp, Homo sapiens
ttatagaagttttctctgtggaagagatatttggggggaaatttcaaatatgagtaggagttaaccaagtaaaagataaaagtaggccagagattgttccaggcagaagcagcagctatgggagactcctgatctgtggcatcatagaagccagtgtttgaattatcttgtgagaggagaagagaaacacaatgaatgaggtgtggtagttaaactgggggtagaccaaacaaatcttaaaggccttggcaaagagcttggattacatttttaatgaggtgagaagtagtagaatgtttttaatatttgaaaaatcaccctagatgcatggggagattgatttaataaggaagtgcatggaattagggaggcaaataggaagttctagtggtcagatgtgacgtgatgatggtgtgggccagggttgcagcagtggagatgatgagatataracagatttgaggtatatggtagaaacagaattaacagagttttgtggaattgtggtaggaagatgaaaaaattcttatctaatgatttctgtttttcagagaagtatgagacaaggtcagcagctga

SEQ ID NO: 949877 - DNA, 584 bp, Homo sapiens
tcccctgcagctgatctgttctgaaggccgccagcctcagagctcacactccacatggggtcygcaaggcttgcgatttcactgtgagcaatacttgcttaactttagctgtttggattcctctcatatcttccctccctctttgtgcctttagaagtaactgaaatcacttctggttgcagcatttgtccatctcccaactcccagccatgccgggagagggacagcctttcaaggggcctttgtgtttcccagggttcccctgagaacagcgaatagtgcaggaagtaagggagctctgccatctcccagatgaccaggagaatcatctgccagtgacaggttcttcctaaggtgactgtatcagtccgttttcatgctgctgataaagacatgtccaagactgggcaatttacaaatgaaagaggtttactgggcttacagttccatgtggctggtgaagcctcataatcatggtggaaggcaaagaggagccagttacatcttacatgggtggcaccaggcaaagagagagagcttgtgcagggaaacatcaccttatagtaaccatcagatctcgtgag

SEQ ID NO: 949878 - DNA, 575 bp, Homo sapiens
tagagacttggagggctccgaagacaggcagatgtcagaaagtttggaacttcctaaagacttgttgaattgctttgaccaaaatactgatagtgatatggaaaatcaagwccaggctgaagtggtctcagatggagatgacgaactttttgggaactggaataaaggtgacccttgctattctttagcaaagagattggcagcattctgcctctgccctagagatctgtggaactttgaacttcagagagagagagagtcagaaattaaaacttatgtttacaaggaaagcagagcgtaaaggtttggaaaatttgcaggctgaccatgtggtagaaaaaaaaaaacaatttcctggggagaaattcaagccagttgcagaaatttgcataagtaatgaggacccaaatgttaatcaccaaaacaatggggaaaatgtcttcagggcttgtcagagacttcatggtagcccctcccatcacagacctggaggcctaggagggaaaaatgatttcaggggccaggtccagggaccctctgctatgtgcagcctgggacttggtgtcctgtgtccc

SEQ ID NO: 949879 - DNA, 693 bp, Homo sapiens
gaacaaggccctttcgtccttgtctgaggcctcctgctcagagtcagcttgttttccttttaactggggcacttgtccttccaatgtcctattacagtaagcacactggttatgctgcaagcctggatggccagactgggtatttttcctgggccccccccttctcttgcccctttggggagacccctctaatagctgtggctagtaggtcagtgttttgccaggcttggcgttcgctctctctgcggttctctctgtggcttaccgcatctctattcacaaacaactggttggctatctccaataactgtgaagtattcctccctgcaaacccagcctgtttctgtagttttcttctaatgtcttctgcactttgactaactaaagccatgttaatcacgcgctgattctcagggctgttgggatcaaagggggtatacatacgataggcctcacatagtctcttgtaaatagggtaccaggcagctcttgagacacttgttccaggcgctcactcccagattccatttctagacacaccctgaaccagatgggaactcactaccttgagggaagggtcccagtcatggaaagatttatcacctgctgactaaagagmcctggggccctgaataatcagcaattggagtcagccccttactgtaggctgtgggtgaaactcagagctctact

SEQ ID NO: 949880 - DNA, 565 bp, Homo sapiens
ctggtgttgaatgtctgtgggttttccagacacacggtacaagctgtcagtggctctacctctctgaggtctggaggagggtggccctcttctcacagctccacttgtcagtgccccagtagggactctgtgtgggggatctgaccccacatttcccttccagactgccctagcagaagttccccatgagggctttgccccggcagcacacctctgcctggacatccaagtatttccgtaaatcctctgaaatttagaaggaggttcccaaaactcaattcttgacttctgtgcacctgcaggcccaacaccacatgtaagccacaaaggcttggggattgcaccctctgaagcaatagcctgcttcccttttaaacgtaagttccaattccaaaccatatctttgtgaatgaataaaactgaatgcttttaagagctccaaartcacctcttgaatgctttgctgcttagaaatttcttccaccaggtaccctaatcctttctctcaaattcaaagttccgtagatctctaggacaggggcaaaatgccactagtctctttgct

SEQ ID NO: 949881 - DNA, 552 bp, Homo sapiens
cacttgtaagtgagaacatgcagtatttggttttctgttcctgtgttacttttctaaggataatggcctccatctccatccatgttcctgcaaaggatataatctcattctttttatggctgcatagtattccatgatgtatatgtaccacattttctttttttttcccttcaacttttattttaagttcaagagtacatgtatgtacaagatgtgcaagtttgttacataggtaaatgtgtgccatggtagtttactgcacagatcatcacatcgcctaggtattaaggccagcatccattagctattcttcctgatgctctccctccctcaccacaccccctccgacaagccccagtgtatgttgttgccccctcacatgtgtccatatgttctcatcattcagctcccacttataagtgagaacatgwagtgtttgggtttctgttcctgcattagtttgctgaggataatggcttccagctccattcatgtccctgcaaggaacatgatctcattcctttttatggctgcatagtattccatggtgta

SEQ ID NO: 949882 - DNA, 635 bp, Homo sapiens
ggtgctgagcccctcactgcctggggccagtggggccggccggctggctgctccgagtgyggggctgcagagcccacgcccacctggaacttgcgctggcacacaagtgccatgggggccagccccagttcccgcctgcgcctctccctccacacctccctgcaagctgagggagctggctctggccttggccagtccagaaaggggctcccacagtgcagcggcaggctgaagggctcctcaagcacagccagagtgggaaccaaggccgaggaggctccgagagcgagcgagggctgtgagggttgccagcatgctgtcacctctcaccaccacacctggttaatttttgtatttttagtagggatggggtttcaccatattagccagtctggtctcgaactcctgacctcaggtgatctgcccacctcagcctcccaaaatgctgggattacaggcgtgagccactgcacctggcccacattgtgaaattcttgtattgtgttattcagctctgtcagaccaattaggttctttttcatactggctatttcatccttcagcacctgtattactttattgtaattcttattttccttggattgggttttgccatcttcctgaatcttgatgat

SEQ ID NO: 949883 - DNA, 672 bp, Homo sapiens
aggtgctgagcccctcactgcctggggccagtggggccggccggctggctgctccgagtgcggggctgcagagcccacgcccacctggaacttgcgctggcacrcaagtgccatgggggccagccccagttcccgcctgcgcctctccctccacacctccctgcaagctgagggagctggctctggccttggccagtccagaaaggggctcccacagtgcagcggcaggctgaagggctcctcaagcacagccagagtgggaaccaaggccgaggaggctccgagagcgagcgagggctgtgagggttgccagcatgctgtcacctctcaccaccacacctggttaatttttgtatttttagtagggatggggtttcaccatattagccagtctggtctcgaactcctgacctcaggtgatctgcccacctcagcctcccaaaatgctgggattacaggcgtgagccactgcacctggcccacattgtgaaattcttgtattgtgttattcagctctgtcagaccaattaggttctttttcatactggctatttcatccttcagcacctgtattactttattgtaattcttattttccttggattgggttttgccatcttcctgaatcttgatgatctctttgttcctatccatattttgaattctatttct

SEQ ID NO: 949884 - DNA, 560 bp, Homo sapiens
ccacgtgtgttcagattgttatacacacttagttccttgagtrggtattattgcagtccccatttccttgctggccgtcagctgggaccagcctttcctcctagagactgtccctgttccttcttatgcttttttcatgggcctttccagcagcacgaacatttcaaatatctctgcctttccctcctgccccgtctctcagaaatcaactgcacatggtctcagcttttaagggctcatagtgattagattggactcatatacggtcctcattttaatattcataattctaactgcaaagtctcttttgtcaggtaatacagaatattcaggtctcaaggattaaagtgtgagcatctttgggggtttttattctgcttacaacatttacctagagtataaattcaagacataaggcagaatcttatgagaaaaagaaagtactattttgaacatacctgtggcaatcctaaatgggaattagattcagatttggcagttcttgataaaagtcaaggctgaagaaataatttggtagtcatcatgttatacattttgta

SEQ ID NO: 949885 - DNA, 609 bp, Homo sapiens
tttcatgaaatgtaaaatgattaagtcactaattcagtaaatcattgattttattaccgaatgatcgaatacataagggsgattgagattttttcccatatcattctttaaaaattgcagtgtgagtgtgagcttatctcgtttatcattgccagcttgcattcacaagagatgggctctgtggtctgtggaatgaaatggttaaagatggagaaattgtatacactggaacagaatcaacccagaacggatagctccctcctggaaaaggtaagggcctttaactagtgttttttatttggtaaagaccattataaaatgcattttatagaaattttgtaatgtgctataggaacaggagctttgagcttaactctttgaagttttgctttttactttggagattgttgtctaaaatggtagttaatacaagctgcccggattttattgttttacgtgaattgaaggcatttttattgcaaaaccgtcttgctgcatttgtggtgttctttgggggtgtattaaacacttattggaagcctttggcctgcaaggaaatgccattgaacaatcttatttagcgttgtagttttgcatgctcaataggac

SEQ ID NO: 949886 - DNA, 607 bp, Homo sapiens
tcctgacctcgtgatgcgcctgctgtggcctcccaaagtgctggggttacaggcgtgagccaccacgcctggcccttatgagcttttaaaaaggaatacagcctcacaaaacctttacagtcagaaaagtcaaatgaaaaaatatccacaacctcaaaccttcttttgggtccttttcgctgcatacttagtgcacagttgagattaaattttatactctgcctctccatttaattataaaagtctctttttttttttgaaacggagtttcattcttgttgcccaggctggaatgcaatggcactgtctcggctcaccgcaacctccgcctcccgggttcaagcgattctcctgcctcagcctccccagtagctgggattacaggcgtgcgccaccacgcccaactaattttgtatttttagtacagacagtgtttctctatgttggtcaggctggtctcgaagtcctgacctcaagtgatccacccgccttggcctcccaaagtgctggaattaccrgcatgagccaccgtgcctggccaaaagtctccatattattaaacaatcttcagaagcacagtgctgaatgactacactaataatattct

SEQ ID NO: 949887 - DNA, 627 bp, Homo sapiens
tggagtgagaaattatgtttccctcttccaaaatttactacaatgacaatgtaggaatttaaaaaaaactgcagagtaggagaagaaatgacagaacatgagaaatttttaatgcaattttaraaagcaggttgaggaacggggatggtcatagtttcagctttctttgttgtattgactttttctggagcacgtaataagaaggaagctaaactctacctctggatcccaataatgctcagggatgagaagctcaggatttctgaaggcaagggagaagaggaatgaaagagaaaaatgatcctccaatggaggatcagtagaaatctttcacaatgagttgttaggccaccaggtatcttccctgatgcaatgaaacctggaaatgactttcaccccacctaacttagatgggatatttgctacatgaagaagttcaagcctggaatgaggtaccttaatgagaaggagctttaaaatacaaagggtgtgtgtgtgtgcgtacatacacatatgagtcccatcatccacaatgttatttgtctaggttaaagacagaagtttcatctaaaaaaaaaaaaaaaaacctgagcagcccctcccgcttaaaaaaggcttattaacaat

SEQ ID NO: 949888 - DNA, 492 bp, Homo sapiens
aaggggagcacatcagcagaagaagatgtagtggctggacgttgagaggacgccagtggaaaagcacaccgacagacgtcagcaaggcagcagaccatcgactggcagaatgacacagggtttgattggggtggacagaagaaagcccgcatcactgagcaacccaactccaggggaaaacaaccttcccactccatctcccttctggctaccccatctgctgaaaactaccttcactcaataaaaccttgcactcattctccaagcccacatgggatccaattcttccagtacacaaaggcaagaacctcgggatacagaaagccctctgtccttgccataggcagggggtctaattaagctgactaacacaagcagcccrcagatggctaaactaaaagagcacatgataacacacacccactgcagcctcaggagctgtaaacattcacccctagacactgccatggggttggagccccacaacctgcc

SEQ ID NO: 949889 - DNA, 578 bp, Homo sapiens
atactagtcattaaaatggaaatagctggtggatgccaccttcatcaagtgatcaaacttagcatcatcaacgctgggacaacattcctcccatctttggtctgacccaccaccccacttaaaagttccacagtctttgggttaggctggctttctccagaaatgttcaagtatggagtgataaagtcactgggagacatgaaaaattcaccatttttctcaatgcttgcatacttcaaaaatattgttataagctcagttggatctgctctctcagttaaagccaccttggcagccgccatgcttggccctgggtccagggggctgcgggacccactcactggcttgctcatgctcggtcccagtggttcacttccagtaccagcagcgtgtgtgcccggcctgcctggagtcctgattctctatcaaccctagtcgaaggccaaattatgggccatagttaaggaatttcctgacccttatgaagatcggatttgctttaccaaagaatttgaactcmcaattaaaatctatgacccaggtcattctgacatttatcggcttgtctacatgctggt

SEQ ID NO: 949890 - DNA, 557 bp, Homo sapiens
aatgcgtattctactgctgttgagagaaatgttctgtgtatatcttagatctaaatggtttatattgttcaaattttctattttcttttttgtcttctgtctacttgttcyatccattttcaaaagtgggatatttaagtctttgactatcactataaaactatttctccatttaattctgtcaccttttatttcatgtatgttatggttctactgttaggtgtgtacactacttatttaaaaaaacaaaaaatacataaaataaaaatataggtaatgtatttataattgttatatcaccttgatggaatgactcattcaaaatatataatgtccttcttagtttcttattataatttccgttttaaagcttattttgtctgatatagccatctctactctctttctgttactatttgcaggtaatggctttttccacctcacaactcaatcttcgtctttcaatctcatgcaagtttcttgtggacagaatatagctagatcatgtttttttaaaaatccattatgccggtacctgccttttaattgaagtgcaa

SEQ ID NO: 949891 - DNA, 749 bp, Homo sapiens
agccaggcctttgttcttcccwacagggcaatgggattccccaggctttgggtgggtccagagataccatctggagatcaggacctggagtcagaaaccttagaaatctacctggtgctccattcttctgtagctgagctggcgtccaagccacaagacaaaatcctttctactcttgcctttccacaggcagaggattctctccctgtgtccaccaccccacaggcccacgtggagtactgccaggctaccactaatgtttacttaaggcccaggggctcttcagtcagtttgtagtgaatgcttctaggcctggagctcactgttaagggcagtgagctcccctctggcccagagcagatccagaaatgccttccaggagccaaagcctgggacctagtacttcaagaacctgcttggtgctccaccccagtgtggccaaactggtacctaaggtgcaagacaaagccccctttactcttccctctgcttttctcaagcagatggagtccctccttgtggccaccatagctgggaatgtgctagtgaagtcagcacatctcagagtctcaccccaggcccacggcatgtactgcttggctactgctgccgattattcagggcccaaaggctctatatttagcaggtgatgaatcctgccagaagttggtccttccctttaaggtagtggcttcctttttgggatagcgtgtgtctagaaatgcctgggagctgggccctggaatgag

SEQ ID NO: 949892 - DNA, 581 bp, Homo sapiens
tgcttccccatggactttgctgttttcctgatacggttcataagtgaagttcctgaaagctccagtttgagaccctgrgactgtgggtcttggtccaagtgcagaaaaggctgtggttccactggaggactttacttgaagtataactataactttgttttcatgttttggtagcatagaaggtaggagatggttctcgtttctgcacttcctcccttcctctttaaagcagccaacacatatattgctaacctcttgctccctgtcctctcaccttccaagtgctcagagctggttgagctacactttcctagcaggggtaggtgtacactgacgacaggaggaagaagatcactgagctcttaagcatttattcccatggaaaatgaactggcttgactcccctgtgctggtgttgaggctggtcccagcagagtgcggctgtgtagccgggatccatgaggcctctagggctcagggaaccgggacttcactgtgtgccatgccaggtgcttatgtttgggcccaaagttcaagtgcaaagcatgatttgtgcatcgagccatattagaggcatttgg

SEQ ID NO: 949893 - DNA, 725 bp, Homo sapiens
gactttatttgccttttttttttttyccccctactagggcatttctcagaagctctggttctgaagccataaaaacacctggtccctaggagaactttttttactaaaggcagatttcaagaagggtgcggaggataaggttagcagccacccacgtgcagccctgcactctggcccccaatcccagcccagaatcctctctgggagattcacaatggactcaggtggacgataaaggcctccagtcgtgactgcatttgttaggttcttccccacttccccgtgacttggttaataactccatgaagggcacccatcagcagcaagtctcagaactggggattgatcttctaaatagagacagcaaaagtgctgctcagcagaggggtggatagagaggtgggagcacctgccttcacatgactcacaaatgaaatgaacaccccattttcttggcccaaaaatatatttcaaaataagggagcaggctttcaacacagtaatcttgcttgcgagatgtctagaaaccaaggaataaattgtccaccactcagcagtgcattattgtaggtatagctatttatcaggacaaattcactcaggtcagggagtatcacactattttctgtttccaaccataggaggggtatctttttcatgtttagtgtagttgtttaaaagccctaggtttctggattgctctcctcagaactggagggcaataa

SEQ ID NO: 949894 - DNA, 706 bp, Homo sapiens
cccaacatggtgcatctgactaagggaaagaagccactcccaaaaggccacatatggtamgattccgactctaggacattctggaagaggcgaaacagcggagaagatgaaaggatcagtggctgccaggggctgggggagggacgaatcagggagcccagaggatttttagggcagtgacactgctctgttcgacatgacaatggcggaaacaagtcccatgcatttgtgcagacccacagagcacgcaccagccagagtgagccctgatggaggctgcaggctcagagcgagggcgacgcctcactgcaggctcatcggtcgtgatactcacaccactcgggcagggtattgagagaggggaggctgtgcatatgtggggtggaaggtatgtggggaatctctgactttttgcttaattttgctgtgaacctaaaactgccctaaaaataaagtgtatgaaaacaaacaaaaggtcagaaacgaagcgctagggcctccacctggaacagaaggccagggctgggtgtggctctgggcacagcaagaggactgtccaatggtcatttcacaagatcatcaccttccgctgtccagcttgtgactctgaggctcaaggaagggaaggggaggatcccttcccctctgagtccccatccaggctctttcttgggtgctccctagcctgagaaggcaggattccagc

SEQ ID NO: 949895 - DNA, 660 bp, Homo sapiens
aatcgctgaaagattaatattagatttctcagcagaaaccttacaggccaaaaaagaaygggataatgtattcatgttctgaaagaaaaagaaaagaacctgctagccaagaattctatacccatcaaggctatccattagaaataaaagataaataaagcctttctcaggcatgcaaacttgaggaaattcaaaatccctagactaaccctacaaaaatttttaagtgagttttacatctagaagaaaaaggataatatatactgtcatgaaaacatacaaaaatataatactcactaataaagctgttacacaaatgagaaagagaaaggaatcgaatctgataactatagaaatccatcaacccacaaaaataaattaaaagagagaaacaaaggctgtatgaaacaaccagaaaacaattaacagaatgaaacatgtaactcttcaactatcaataaaaattttgaattcaaatggtttaaattcctccaattaaaaaatatagactggctgaattaataaaaatgaaataaaatacaacaagatgcaactgtatgctgcctataagaaattctcttcccaaaaagacactcatagactaaaagtaaagagaggaaaaaagacataccatgcaaatggaaatcaaaagcaagcagg

SEQ ID NO: 949896 - DNA, 605 bp, Homo sapiens
tacaaatataagggaatcgctgaaagattaatattagatttctcagcagaaaccttacaggccaaaaaagaacgggataatgtattcatgttctgaaagaaaaagaaaagaacctgctagccaagaattctatacccatcaaggctatccattagaaataaaagataaataaagcctttctcaggcatgcaaacttgaggaaattcaaaatccctagactaaccctacaaaaatttttaagtgagttttacatctagaagaaaaaggataatatatactgtcatgaaaacatacaaaaatataatactcactaataaagctgttacacaaatgagaaagagaaaggaatcgaatctgataactatagaaatccatcaacccacaaaaataaattaaaagagagaaacaaaggctgtatgaaacaaccagaaaacaattaacagaatgaaacatgtaactcttcaactatcaataaaaattttgaattcaaatggttwaaattcctccaattaaaaaatatagactggctgaattaataaaaatgaaataaaatacaacaagatgcaactgtatgctgcctataagaaattctcttcccaaaaaga

SEQ ID NO: 949897 - DNA, 609 bp, Homo sapiens
gctcgccgtccaccactgctgtttgccactatcgcagacccactgctgacttccatccctccggatccagcaaggtatctgctgtgctcctgatccagcgaggcgcctattgccactccctattgggctaaaggcttgccattgttcctgcacggctaagtgcctgggttcatcctaatggagctgaacactagtcactgggttccacagttctcttccgtgaccaatggcttccaacagagctataacactcaccacatggcccaatactccattccttggaatccatgaggccaagaaccccaggtcagagaacacgaggcttgccaccatcttggaagcctccggctaccatcttggaagcggcccgccaccatcttgggagctctgagagcaaggacccactccccgacccctgtaacactataataaagagaatgtttttctctggagcaaagaacaaacaggctcatacaacagacctggtgttcttcaactcacaggtcttctcgtgtaacatactctatggygtgcactagtgtaacctgcattgccctgtggaaactgggcttaacaaaactagcccaaatgatgacactctggctaccg

SEQ ID NO: 949898 - DNA, 561 bp, Homo sapiens
ctgtaccctccagagccacagaggcagagcttcccaaggtcttgggagtccacccctcgcatcagtgtgccctggatgtgagacatgaaatcmaaggagatttgggagctttaagacataatgactgcctggctgagtttcagacttgcacggggcctctggctcctttgttttggccaatttctcccacttggaaagggaacatttaccctatgcctgtacccccattgtatcttggaagtaactaacttgcttttgattttacaggcccataggtggaaaggactctccttgtctcagatgagactttggacttagacttttgagttaatcctggcttgagttaagatcttgagggactgttgggaaggcatgattggttttcaaatgtgaaaaaaaaaatgagattttggaggggtcaagggcagaatgatatggtttggatccgtgtccactcaagtctcatctcaaattgtaatctccatgtgtcaatggaggaacctagtggtaggtgattggatgatgggagtggtttcccccttgccattcttatgatagtga

SEQ ID NO: 949899 - DNA, 565 bp, Homo sapiens
cctcgggcctgctaggggtaacacaaggcgggcagaaatcccatgaggggcagttgaggtttgaggaaggagaggtgaggcacctgtggcagaaaaaaaaactgcaccacgaagaagcrgagcctgggtccccaacggacgaaagtgtcttcccatcagcacttgcgctgggcccaggggaccctggcattcctggttcgagaccagggtgtgcttcaggccgctagggatacccaaaagcaagcagaaggcccatgaggggaaggtgatgcacgtggggcagagaaaaaaacaacaaccgtgccgcggataagcggggcctgggtcccccacagaagaaactgtcttcccatcagcgcttgcactgtgccccggggaccctggtatccctggctcgagcccagcgtgcgcctcggcctgctaggggtaccccaagacagacagaaggcccatgagggaaaggtgagacacctggggcagagaataaaataaaaaactgcgccgcccagaagtggggactgggtcccccatggacgaacgtccctacccatcagccctgcactgg

SEQ ID NO: 949900 - DNA, 629 bp, Homo sapiens
tttgtaagccaggtgttgaagccattattaaagagtaaataatatacatttaaaattaaataaatcctattaaaaacaaaggtataatgcccaaaactcatcacttcttaattatttccctgmattttactatcatctatgctcttagggttatttacatctattgcatctatgtggtagagatactagacaaacggtgcaatactgcacatctcttccccactctgaatttaatgtcacactggcagcttgatatcagccacagtgggaatatttccacaccatggatattggcaaacattacgaatcaggcctggagaacatgttaataatacagattaaacataaagatgtgctgtgtctgtagccaccatgttgtataaatagcacacacagaaaaagccaaaatattcatccagcattcaaaaacaatcattcaattcagcagaggagtcactcgtgtcactggcaaatgagtaaagttctgacatcatcttcattgtttcacttttgtcttactcattaatgtaaaagaaaatatcaaacaatattcaggtcaaaactacattcacctattaataggtcagttactaacataaaaagtttgcaaacatcaacaagagcttcta

SEQ ID NO: 949901 - DNA, 578 bp, Homo sapiens
aaccaccattctactttctgtttctatgcgtttgactactcttaacagcctcatgtaagtaaaatcacagtatgcgatttgtggctgacaccttacttaatgttctcaaagctcacccatgttgcagtatgtatatgaattttcttcctttttgaagctgaataatatttcattgcatggatagaccacattttgttttatctgttcatctgtcaatggccatttgggttttattcaccttttggctattgtgaataatgttgctatgggctgggcgcagtggctcacgcctgtaatcccaacactttgggaggctgaggcaggcagatcacttgaagtcaggagttcgaggccagactggccaacatggtgaaaccctgtctctactaaaaatacaaaaattagctgggtgtggtcgtgcatgcctgtagtgccagctacttgggaggctgaggcagggggatcacttgaacctgggaggcagaggttgcagtgagcccagatcgcgccactgcactccagcctcagtgatagagcragactccatctcaataacaataataataatgctatgaagt

SEQ ID NO: 949902 - DNA, 612 bp, Homo sapiens
cataaggagaagccaaatgttaatagccaaaacaatggggaaaatgtctccagagcctgtcagaggtctccacagcagcccctcccatcacaggcccagagacctaggagaaaaaatggtttcatgggctgggcccagggccttgctgctttgtgcaatcttgggacttggtgccctgagtcacagccatggctaaaaggggacaacgtagagctcaggccattgcttcagagggtgcgagccccaagccttggtggcttccacatggtgttgggactacgggtgcacagaagtcaagaattgaggtttgggaacctccacctagatttcaaaggttgtatcaaaatgtctggatgtctaggcaaagatgtgcttcggggcagagccctcatggagaacctctgctagggcagtgtggaagggaaatatggggtgggagccccccacacagaattcccactggggcactgcctagtggagctgtgagaagagggccactgttctccagacctcagaatggtaaatccrctgagagcatgcaccatgcacccagaaaagctgcagacactcaatgcccacccatgaaagcagccggaatgggggctgtactgt

SEQ ID NO: 949903 - DNA, 670 bp, Homo sapiens
ccctgggctcaaacaatccttctgcctcagcctcccaagtatctggaactccaagcatgccccaccacacctttttttttttttwaatttctttttacagatggggtctcactatgttgcccaggctggtcttgagttcctatcctcaagtaatcctcccaccttgtcctcccaaagtgctgggattacagtggggagctactggcacctggccataaattggatttttttttgctttttctttttttttttctttttttgagatggagtctcactctgtcacccaagctggagtacagtggcatgatcttgcctcactgcaacctctgtctcccaggctcaagcgattcttgtgcttcagcctcccaagtggctgggactataggcgtgtgccaccatgctcggctaatttttgtatttttagtagatacagggttttgccatattggccaggctggtctagaatggctgacctcaagtgatctgcctgcctctgcctcccaaagtgctgagattacaggcatgagccactacacctagacataaattagattttattgatttgttaaatcagcattgatcatgtccaccaaaaagaatatgggaggatagtagggaaaaggtaataaaatacagtgctggttttcaaactgtgctgtaagaaacccta

SEQ ID NO: 949904 - DNA, 594 bp, Homo sapiens
ctcacgctgagaacacgcaggctcaatgaattcctcacacctgcatgaatacgtcttcttcctatctctgactgttcctctcatctctttctgcccagcctctaactattgtgatctttcagggcttggtcctgggacttcttctttcaagtagtatattctccttcactgcccccaggtaactgtgcatagcttcagttttaaacatcttctctgtgtttgtgactcgctccataaacagctaaataccagttggaaaaaacacaggaatttcaaacataacacacccaaaatggaacttcaacgccagccctctgcagtctctacttctcagttcacagctccctcattgcttcagttgtctaagccataaacctggaaggcctttatttcctactttctgtaatgtggaatccagcttaatttctattatttgactgaagtaaatttaatgaacttaaatctctgaatttgaagcccaattcacattattagggtggtctcaacagctacacgtcttgaatttttaaaaaattgtctgagactctcagtatttccaggagaytggcagaaacaaatgcaaattatctctgg

SEQ ID NO: 949905 - DNA, 607 bp, Homo sapiens
taaacccttatttactgttacatgccccacctgttgcatgctccaaccccgtgaggtacatctgcagctgatgaagtagatgacgtagagattaagtcacgggattaagtaattgaccaagagcactgggtgcagaaaattgaagatatggaatttgaatcgggtgccaaatttcatgatatttccttattataattatttgtccttattaaatattaatcaaatggcttgacaatttacaaaaaagatgcctcaaatttgtatgacaatttatcacgagatgctttcatagggctagagtaatcacattacaaggaacacagatcattttaaggtagttagatttttcataggaaaacttttcattaaaatgaaaatcctgaagaaatgtagttttttttcactgtcaaagaacaaatacaattatgaatgagtgagtcattgttctcctgagtcatttcatgaacttataacagtcgtatcccagccgggcactctggctcaygcctgtatccccagcactttgggtgaccgaggcgggtggatcacttgaggtcaggagttcgagaccagcctggccaacatgggaaacctcatctctactaaa

SEQ ID NO: 949906 - DNA, 617 bp, Homo sapiens
aaaatctgatatggtctggctctgtgtccccaccaaatttcatcttgaattgtaatctgaattgtaatacccacaggttggtagagggacatcatgggaagtaattgaatcatggtrggtggtggggggtccccctggctgttctcaggatagtgagttctcatgacatctgatggttttgtaagggccttttcccccttcactctgaacttctctcattcttctccttcttactatcttgtgaagaaggatgtatttgcttctgccatgattgtaaatttcccaaagcttcccaagccatgctgaactgtgagtcaattaagcctctttcctttgtaaattacccagtgtttgctttatagcagcatgagaatggactaatacagtaaattggtactacaaagagtggtgtgctgctggaaagacatccaaaaatgtggaagtgactttggaactggataacaagcagagtttggaacagtttggagggctcggaagaagacaggacaatgtgggaaagtttggaacttcttagaaactgggaaggctcagaatacagaaagatgtgggaaagtatggaacttcttagagacttgtagctttgaccaaaacgctga

SEQ ID NO: 949907 - DNA, 539 bp, Homo sapiens
aataaaaataacatgacatataaaaaataaaaaataaaatggcagacataaattcaactatatcaataataagtttaaacatgactaaacacacaaacaatccacatcaaaggtggagattgtcagattgggactgaaaattatccaagtatatgctacctaaaggagacacattttatttatttatttatttatttatttgagatggagtcttgctctgttgcccaggctggagtgcaatggcacgatttctaaaggagacacattttagattcaaatatacaaatatgttgaaagtcaaagataaaaaagatacattatgcaaacagaaaccccaagaaagctagagaatcttatagttatatcaaagtagactttgtaacaaaagaagttactagagataaaaaggratattttataaagataaatgggtcaacacatcaataagttataacaattatgccaacataagcactagtaacagagcactaaaatacatgaagcaaaactgacagaaatgaaaaaaaaaaagacaaatc

SEQ ID NO: 949908 - DNA, 619 bp, Homo sapiens
acctcctcccaataatcatgaatgttcttagtggcatctagaatggtagatcctttccagaaggttttcaactgactttgcasagatccatcagagggatcactatctgtggcaacaatatcctcacaaaatgctttttttaattgtatttaattttttttttttttggaaaagcagtctctatcgctcaggctggagtgccgtggcacaatctcggctcactgcaacctctgcctcccaggttcaagtgattctcctgactcaaactcccaagtagctgggattacaggcatgcaccaccatccctggctaatttttataattttagtagaggtggggtttcaccatgttgaccaggctggtcccgaactcctgaccttgggtgatccacccactttggcctcccaaagtgctaggattacaggcataagccaccccacacctggccttttttccaaatttttaactttaatttttgtattttgttttttatttttattttttatttttgagagagtcttgctctgtcacacaggctggaatacaggggtgcaatcagctcactacagccttgatttcctgggctctggcaattctctggcctcagcttcccccgagt

SEQ ID NO: 949909 - DNA, 605 bp, Homo sapiens
cccgtggcagtactttcgtgggccgcctgccctccccctcagcccgcccttatccgcggctccgctttcagagcagggtttctcacccgcggggcttcgggctcctcacccggcacctctgccagaggggaccgcctcccggcgcgtcgggcattcgtctctttcaccccttccctcttcaggagaaactgaacacgttttccagcctaaactcggcagggcaaaccagaacattccccgtctaagcagttccggggagttttaacaatttcctcgtaaactcgtctacagaactcactgtatactgtttaaatgtcgcctgtgtgtggagcaacagttttattgtgccgtgcaatcctcaacaagaaattgtagtccagggagatgaaaatcccttatttggcattcaggcgttgatcaaggtcgtgcaaccctcgctaaaaggatttaggttcatctccgtcattctcagccggggtgaaggggtgtagtctgacatttggaagcttaagaaccaagtctgctgccgtccaattcttttttaaagccttccatcatgtgtgtactttgcttgaatgattaktttaaagtacatgtcctatttt

SEQ ID NO: 949910 - DNA, 591 bp, Homo sapiens
agggaatatgcataatactgttggtgtgaattggaactgaraaggtaatgtaacagaagtggaaaccatgaacatttataccaatttttcatgtaaatggcttttgccttaaggacctgctcaagaataattccatatataccacttctttttgattatggagtgctgatgcacatgtctgattcaatggactgagggttgaggaaactttcacttcatgataaccagattaggttgtatggtaagttcatgaccagtgattaaacattcattatctactaaggccctgtggcaagtccaaatctgcttctcaaaacaaaagttcttgtctgcagaagatggcagcaatttcctttaaaatcctaggggcttctgctatattagcctgtaaaaggcttagaacaccatctctatctgccactgacacatcaagaaccattggatagattggctaatatgacccaaaaggcagagtagcttgcactgcaccctgaactttatgcaaaactttgttttattgtggggccaacaagaatctttttgtgtcacttggtaaatggggcagaatagcacaccaaaatgagaaacatg

SEQ ID NO: 949911 - DNA, 644 bp, Homo sapiens
aggtgtgtagaacccaattgagcttcccctccggagcaatgctgtcatgagcactccaggcagctccctgtactagtctcaaggctcatgagagttgaggggctctccaatggataagattrcatgagtccatgatgggaatatgggctactggggatccctcacttactctttccctgtactggggaaactttccaggctcccagccaatcctgggtaagcaggctgccttacttggctcttctgccatgcctcaggtatttcccgtctctactgctttccacggtgttctcttagatgtgctattcaaagtaagataatctactatttatctaatttggttcttctttgtggaggaggtgagtgcaagttgtctctagtcagccattttgaacctttcttccaaataagttacttttaccttctaaagccatagacaagtagtaactcttttccactgaatagaggacattagtaagatgagacgtttttggcagcagacaacttgatattcaaagacatcataccttctctagtttttgcaatgtacacgtctgagcagtagcaagtggaacctcaagagggagagtgagaaaacatttacataatatttgtccacctgaagtttgaggctatatgaagaa

SEQ ID NO: 949912 - DNA, 627 bp, Homo sapiens
aaaaattagccaggtgtggtggagtgcacctgtagtctcagcaatgtgggaggctgaggtgggaggatcacttgagtctgggatgttggggttgcagtgagctgtgattgtgccaatgcacttcggcctggatgacagaggaagaccttatctcaaaaacaaaaacccaaaccacaaaaacaagactaacttgcaagccacatgaggggaattcaacttcaccttaattcaaaatcaccagagtaattaacaaatatttaaagaatttttcaatggttatagaattctgggttgataggtttttaagaattcttttatgacttcaaaagtgtcacttcgtttcttgcttgcatggtttctgatatgaagtcagctcccattcttaaccttgtttcttgtttgataatgtctttttgcctctagcttcctcaagatgtttctcttttgagaaaaatgagagattttcagtttttgtgttgatttctctttgtctctggttttcagctatttgaacacattccatatcactttaagatttcttcatcggkggtcactggacacatgtgtcacaattaacaaaggggaacacattctccaaatgtgttctgtttccccaggaagacagct

SEQ ID NO: 949913 - DNA, 568 bp, Homo sapiens
ctccctctacacccgaggaccgccggcctcccagagagtcccgccgtctccggcggccaggcctggctcaggaccaatgtggcaccgccctgctgttgytggggggcgccgccggaggcctctgtcccctgcgcaggcttccggctctaggggcggcctcctttccgcccacgctccagtccttccgggagctccggagctccggggcttccaccacatctgccggctcaggacgggtcgtgctcatcccttaactttttaactttttgttgtttctatttatattttattgtgctatgtcttgaaatgttgttgtagctattacttttgattggatattacttagtattcctactttaaataagagtagtttgcacaccacacagctatagtgttataatattctgttttgttttgtatcctattagcagtgaggatttttttttacctttaggtgatcatttattactcattaatgtccttttcttcctgattgaagtactccctttagcattcctttaggacaggtatggtattcataaaatacttcagcttttgtttgtctgaa

SEQ ID NO: 949914 - DNA, 593 bp, Homo sapiens
cttttatgtctacacctttgcagaattcaggctcctctcctcccagcctggtggtctctcattagctttataaaggtggttgggttttggagaaggactattatyatttaaactgtaaactacatgtctcccaaagctagcccatcctaagcccagtaataattaaggcaacatgaaggtaaaatataagagggaagttggctatattagatcttccccactgccataatttcctcactgttataattattgcaaatgcagtttcaatatgagttgtttttcaattcaacctctggctttctaattaaaaatgattagttaaacacacgtgcatcttcttcctattctaccaacatcctattgaaatgaccatgtgatggacaaaagagaagatatgtgtccatgctgagaacaggatgcaaaaccttcagcaccctagagggcaggaggagatgggaacacattgggatgtgtagcccgaacgatgcaaagaacagagttgagggtgagatggaaacccctcacaaaagaaagattaaaacaaatctagaatcccaggcacgcgcctcacaagcaactgcagtgctattaaa

SEQ ID NO: 949915 - DNA, 622 bp, Homo sapiens
atttctccagctccacacccccacacggaaatccaactagcaactatccacaggcaagaatacctttctgaatatcccagaactcaggggtgagactgagacacccaattgtactgcagaactaggaaaagctgtgctttgaagggtaagaggaacagttcattttgagcatgccacccctccaccaagctggcacagcacgacacacagaggatttcaccggacccactatttctacagtgggaaaagaaagttggaggtggacgttcagcttgcccaccattctaggacccttcacaggaggctcactcttgtcttataccacaggaaacattaggagtgccatcggggctagaccacctggagtcagctagaaacaaagaatgggagtagatctcacagagactagcatgtagttagtctgcattctggctaatggaggcatcatatgagagagactagccaacagcgttgtaccacaggaagtacagctsacaggtgtacccagctcgcatccctcgccagctttcctacatagacctggtgctttctacagcattgcccaggctagaaggcaagtgaacgtcagcacttctctgcagagagtacatctggtccccac

SEQ ID NO: 949916 - DNA, 622 bp, Homo sapiens
atttctccagctccacacccccacacggaaatccaactagcaactatccacaggcaagaatacctttctgaatatcccagaactcaggggtgagactgagacacccaattgtactgcagaactaggaaaagctgtgctttgaagggtaagaggaacagttcattttgagcatgccacccctccaccaagctggcacagcacgacacacagaggatttcaccggacccactatttctacagtgggaaaagaaagttggaggtggacgttcagcttgcccaccattctaggacccttcacaggaggctcactcttgtcttataccacaggaaacattaggagtgccatcggggctagaccacctggagtcagctagaaacaaagaatgggagtagatctcacagagactagcatgtagttagtctgcattctggctaatggaggcatcatatgagagagactagccaacagcgttgtaccacaggaagtacagctgacaggtgtacccagctmgcatccctcgccagctttcctacatagacctggtgctttctacagcattgcccaggctagaaggcaagtgaacgtcagcacttctctgcagagagtacatctggtccccac

SEQ ID NO: 949917 - DNA, 523 bp, Homo sapiens
taaagttctcttctccatcatcctcattgcaaaatacaatcttctggtctttcctaattgtgtctcttttttttatattttgagttctttttaattattatactttaagttwtagggaacatgtgcgcaatgtgcaggttagttacatatgtatacatgtgccaggctggtgcgctgcacccactaattggtcatctagcattaggtatatctcccaatgctatccctccccccctccacccaccccacaacagtccccagagtgtgatgttccccttcctgtgtccatatgttctcattgttcaattcccacctataagtgagaatatgcggtgtttggttttttgttcttgcgatagtttactgagaatgatgatttccaatttcatccatgtccctacaaagcacatgaactcatcattttttatggctgcatagtattccatggtgtatatgtgccacattttcttaatccagtctatcattgttggacatctgggttggttccaagtctttgctattg

SEQ ID NO: 949918 - DNA, 596 bp, Homo sapiens
tcaagcttcctggctgctttgtttatctattgaagcctcagcaatggcgggctcccctctcccagcctcgctgccaccttgcagtttgatctcagactgctgtgctagcagtgagcaaggctccgtggacataggaccgtctgagccatgtgcggtatataatctcctggtgtgctgtttgctaagacagtcagaaatgcgcagtgttagggtgggagtgacctgattttccaggtgccgtctgtcacccctttccttggctaggaaagggaattccctgaccccttgtgcttcccgggtgagggatgcctcaccctgcttgggctcatgctcagtgtgctgcacctactgtcctgcacccccttttcgacaatacccagtgagatgaacctggtacctcagttggaaatgcagaaattattcgtcttctgtgtcgctcacgctgggagctgtaaactggagctgttcctatttggccatcgtggctagagtccaaaaagaccaaattttctaacaacactgagcartattcctaaatattgaggaaggaatggagtaacaataattgtttgcatggggtggcatttgaatgagag

SEQ ID NO: 949919 - DNA, 616 bp, Homo sapiens
caaacatttttgataagggcctagagagtagatatttcaatctttctagaaatacggtctttgtcacaactaatcaactaccgctcttgtagcacaaaagctgccacagacaatacacaaaggaatgagaatggctgtgttccaattaaacttcatttatggacaccaaaatgtaaatttcatacaactttcccatatcatgaaattctgttcttttaaaacgttttctccccaaacacttaccagtgtaaaaaaattcttaactcactggctatacaaaagcaggtagtggatctgatttgaaccacttggcagagtttcacaaccttgcacttaaaaaaaaaaaaaaaaagaaaagaaaacaacaataataacaacaacaaaaaaaacactaataacaaagccaaagctttggtgaggaaagggggcactttcattttatcagccttatagctttcctgagcactgaaatgagggacatagagccttttcttagtggcttatttttacaccattttgtgtttttctgtatgtttgcctacctgcatatgtgcgtatatggtagaagtagaccaagttttcaagttacrtgtgacatattttcatagcaatttgg

SEQ ID NO: 949920 - DNA, 460 bp, Homo sapiens
tgcagccatggcatgcagattgagaggtgcaatttaagctaaacgtccccttaggggaccaatcaataatgattccataggaatcrttgagcagaacctctgcctgttctgcaatgcaatcttcctaaacaagtacgttctttttttctagccaggttcaattttgtttacaaataggtttttgagggtggtttttgaggctcctataatgccttaattataggagcagattcattatggtagatactgagatcagaaagcttgtgtaactgtgtcatagagtgattacatccaggcattattgccagccaagattgataaatatgcccagtaagtataattgttctctatgtcagcccttgttgaaggaatacttatggcagtggtgatcactgctatcatagttaccattaaattactcattgtgactggttgtcctgctttcctcaggttttcttcc

SEQ ID NO: 949921 - DNA, 460 bp, Homo sapiens
tgcagccatggcatgcagattgagaggtgcaatttaagctaaacgtccccttaggggaccaatcaataatgattccataggaatcattgagcagaacctctgcctgttctgcaatgcaatcttcctaaacaagtacgttctttttttctagccaggttcaattttgtttacaaataggtttttgagggtggtttttgaggctcctataatgccttaattataggagcagattcattatggtagatactgagatcagaaagcttgtgtaactgtgtcatagagtgattacatccaggcattattgccagccaagattgataaatatgcccagtaagtataattgttctctatgtcagcccttgttgaaggaatacttatggcagtggtgatcactgctatcatagytaccattaaattactcattgtgactggttgtcctgctttcctcaggttttcttcc

SEQ ID NO: 949922 - DNA, 651 bp, Homo sapiens
aataatgaagtctccatgagtctcaatagtgggggcaggcatgatgtttctaatttgagagtatctggcttgtgcagaaaaaaggcaaaagacctagaaagactaaactgggattcagtcccagctttgccatgcaatagctgtgtggccttgaacaaatcacttaacctctctgtacctcatttcctcacctgtaaaatgtggataattctgccttgcagcattgtggttgggatttgagaaaacataggcaaaacacataccacagctccaggtatgtggtaaatgatagctgttaatattggttgtactgggcatgttagttttctattgctgacttaagaagttaccacaaacgtagtggcttaaaacaacacaaatatatacttttatagttctgtggatcataggctgatagctgttctcaaagggctaaattaatcaagatattggtaatgttgttttcctttctggaggctctatgggagaatttctctccttcttactcaggttattggcagtattcaattccttgtggttgtaggatgggggtyccccatttctttgaagactgttacctgagggctgttcctagcttctagaggctacccaccttccttggcttgtggccccctgcctccatcttcagtg

SEQ ID NO: 949923 - DNA, 606 bp, Homo sapiens
tgtagggaagcatctcactaaggagtgttagaatgaacctactattggatttagaattattttacatgatttgggagagtttaagtaagtagggctttctttaaattgtatgctctcaggaagtgaagtaatcctgtgattggatgtcacagtaaatctagaaggagagaacattagataaaggttaaagatataattgataaggaaaaaactgtcactcttattagacaagataggaagatgctggtcacatttgtggtttgaaaaatattcgtgttttgtctgtgttcagacatgattacatagtggtctttatttctcttatttcatcatggtcacagagtggacttgtctcatcttgatgttctatgaaactgcttatgttcaacaggaaaaaccaaggcctatctgtgagtgctaggaccaacaccaagactttactaccaggccacgtgttccagaatgctgattttgggctgctatctatctgtctatctatycatccatccatccatccattaatatctatctaatcttctatctatcgtctgtccatatattgctttgacccttgaacaacacaaatttgaactgtttgggtctcct

SEQ ID NO: 949924 - DNA, 671 bp, Homo sapiens
ccacccagactgagggtaagtctgcctctcccagtccactgactcaattgtttatstcctttggcaacatcctcacagacacacccaggcacaatactttgcatccttcgatccaatcaagttgacacacaatattaaccatcacaagcctatatgtggaagagtggcaataacgaggaacagaaaaggtatatggatggccagtaagcacatcaaaagatgctcaacaccattagtcatcagaaaaatgcaaattaaaaccacaatgagggctggcgcggtggctcatgcctgtaatcccagcagtttgggaggccgaggcaggtggatcacatgaggttaggagtttgaaaccagcctgaccaacatggtgaaaccccgtctctactaaaaatagaaaaattggccaggcacagtggctcacgcctgtaattccagcactttgggaggccgaggggggcagatcacgaggtcaggagatcgagaccaccctggctaacacggtgaaaccccgtctctattaaaaatacaaaaaattagccgagtgtggcggcacgtgcctgtagtcccagctactcgggaggctaaggcgggagaatggcgtgaacccgggaggcagagctttcagtgagccgagatggcgcccttgcattccagcctgggcaacggag

SEQ ID NO: 949925 - DNA, 583 bp, Homo sapiens
tttcatctgacagttgaaaattagatgccattaaaattaaagcatattatagtatttgaatatagcgtcacgtttaatccagaatataattaatttatatatccttcaatttacaaaggatttgtaacagttgtttctatttggatgttgacagttatttgaaaactgtgatgggacactcagcctgtcaaccttgaattatgaaatttggaacataagattaagtatagcgtttattcaagtgcaacacttggggatagccacctgggaaacatagactccaaaagaatgggccagccttttaaagtggggaagttaaggttttacttatgtaggcagttaacagggttgcaacattttccttacaaggtgggtaaataccttatagtgattatcaatttgctacattccaaggaagattgctttaacattacattaggagaaacaatggtcttaaggggtcttctctctggcactatttggtcttttctaatcatttacaggacaggactgaggaagggatttaatctgtaatcagagaggcagaagttycagctacaagctacgtgactcaggccacata

SEQ ID NO: 949926 - DNA, 608 bp, Homo sapiens
acttattttgggaccttgagagagaattcacttaattcatacaggtatctcgtagaaacagataaatccttggttgggctcaggatgcttttaagaggtctaatatgagattctttayaaaaaagaatgttccagcaaagccattttttaaaaaggagcctatatagtaaataattattcttgctgccctttatgcaaaaaatcagaccaagtatagtaacaaaacttattttgcaaataaatcagttctactgtgtgtcaggcctctgagcctaagctaagccatcatatcccgtgacctgcatgtacacatccagatggccggttcctgccttactgatgacattccaccacaaaagatgggaaaatggcctgttcctgccttaactgatgacactgtcttgtgaaattccttctcctggctcatcctggctcaatagctcccctactgagcaccttgtgacccccactctgcctgccagagaacaacccccctttgactgtacttttcttttatctatccaaatcctataaaatggccccacccttatctcccttcactgactctcttttaggactcagcccgcctgcacccaggtgaaataaac

SEQ ID NO: 949927 - DNA, 633 bp, Homo sapiens
cccgggaggcagaggttgtggtgagccgagattgtgccactgcactccagcctgggcaacagagcaagactctgtctcaaaaaataaataaataaataaatatatacatacatacatacatttgtgttaagccactttttaaatttttacagcagcattaacaatgagtgcgatgatataagtgaacttcacagagattttaaaacacacacacataatggcagaaaccacatgggacagggagggctactcttcctggccattctctgatgacaggttttctcccccatcgcctagtaacttgagtgtggagggagcccacagtgctcttctgcatgtgctccttacactcttcaatactgtgaaagcaaggacagaaatacaaaaatagaaataaatggaaagcacactgtttcaaatgttcataagaggtgactgtgttttgtaaactatattatctcatttctcttgatgtttagtacagtcttgttgaatgtcccagctttaccaccactgaattttggaatgttctgggaaatcatgtgttcatcattgagctgaagcattaaaaattgagcagatctcacccatcccaaacagaatggtgstaacaatagaaaatcataggggatc

SEQ ID NO: 949928 - DNA, 594 bp, Homo sapiens
tgccaggcttatttttttatcttatttattggagacaggatctcactccgtcaccctagctrgagtgcagtggcaacatggagagaagagtgactttattttaaatgtcaatccaccatgtaacttctaactaaccccaagttcaagaatgcctcccaaatttctgactgatatattactctttatgtaggaagacctactgattgtaagtttcctccaaaacgacccttgttgttctggaaatcataggctttgacacccatagccacctacacattccttccagagcagggatactttccccaagatttaagccctgggtctggggatttgtgatgtggagatctacctgtattgtagcctcccaagaccattcttctgtaagtctccctgcttttaagttccccttaaactacccgaaacctatgacccagatttgtctgcctctttctttggtttcttatttcttctgcatttggggggtcgctttgtatatacagccctttcacagaacaggtgattcaagctcactgcagacttgaacttctaggctcaattgatcctcccacctcaacctctcaacatgctgggacc

SEQ ID NO: 949929 - DNA, 602 bp, Homo sapiens
tggcccctgtatggttgtaaaatcagttccttaaatgcaggatamacagagagctctgcatgtagcagcaccaatgagcatacaaatatactaataaagaggtcctcagaaaacaagtttgctctaaaatgtttcttccttaacgtctaatgatttttgtttcacatttgagacagtatactactttcataacactgttcatggaaaatctatcccgagagggaccctatttagaaaatataaactctatggaaataaagtaagggagttatacaaaaaaataattattcgatctgcagattccagaggccaataacttttcaatgagaattttacaatttattatcaaggtttttcatttcctgacttttagaaggtgggcagtgacataggtatggatttcccatctgtcaggtccaaagtgaaacctcatcttgtcaagaaaagtctccctgacccttccaattcataacagtctccaccttctctgaacctctgaatacattgcattatcattcttcttgtcaccataataagaatgcacagctgtatgtaatttcataagcatattaccctgattaaattttatactagtgaaaggc

SEQ ID NO: 949930 - DNA, 580 bp, Homo sapiens
ccaaactggtctcaaactcttttttttttttttgagacggagtcttgctgtctcccaggctagggtgcagtggcacaatcttggctcactgcaacctccacctcctgggttcaagcgattctcctgcgtcagcctcctgagtagctgggattataggggtgcaccaccacgcccagctaatttttgtatttttagtagagatggggtttcaccatgttggtcaggctggtcgcaaactcctggcctcatgatctgcccgcctcagcctctccaagtgctgggattacaggcatgagccgctgcgcccggctgacaatgtctctttttatggaggcaggggtggggggtgcttacagaggagaggaggccagcgtgtcaggctgtaggaagagcccaggggctgtcttgggatcccaaagccgctgcagaattgaggcttgcgctggggtccgggggcrcctggcctgtctgttcttgccagttggcctggacctggtccaccttctcaggccctcggtctctagcctgccaccgccacctcctccaccgccctgagaagaagtgccaggctttgctgggt

SEQ ID NO: 949931 - DNA, 559 bp, Homo sapiens
actgacaatatgattttatacctagataaccccaaagactccaccaaaatgctcctggaactgacaaataactttagtaaagtttcaggatacaaaatcaatgtacaaaaatcaatagcakttttatacattaataatattcaagctaagagccaaatcaagaatgcaatcctatttacacttgccacagaaaaactaggaatacttctaaccaagatggtaaaagatctctccaaggagaactacaaaatattgctgaaataaaccttagataacacaaaaagaattccatctcatggattggaagaatcaatatcattaaagtaaccatactgcctatggcaatctatagatccaatgctattcctatcaagctatcaacataattttagaaaaaattattctctaattcatgtggaaccaaaatgagcctgagtagccaaagcaatcttaagcaaaaagggcaaagctggaggcatcatattaccagactttaaactgtgctgtaaggctacagtaaccaaaatagcatggtactggtacaaaaacaggtacatag

SEQ ID NO: 949932 - DNA, 664 bp, Homo sapiens
catacttatggagtgtttgatctcatgacacaggatcttcccaatatcacatcaaacaaagggattcattttattgcaaaagagatgtggtagtgagcacgtgaccatgtgattcactgattytttcacataacacttcacccagaactgtaaacaattgccggccggatagagcaacggaatggcctgttgaagaatcagcttaagcaccaccttagatacaataataccctatgcagtataccctctgaatcaatggccagcatatgttgctgtgttcccagcaaatagaatttatggatatgggaatcaaatgtagaagtagaggtggtcctgtttaccatcattgtcagtgacccaattggggattttgtgctactcatctccatagctctgagatttgtaggtttagaggtattgttcccaaaaggtgagcatttccaccaggagacacagcaagaggcccagtgaactttaaactatggctgtcactggggcatttctgccttctactgccaaaggatcaggcaacgagagcagtcaccatcctggcaggtttatcattctaaatactgggaggaggtcaggctgctcttatacagtgatggcaaaaaggaatgtatttggcatctcttggtatgcccttgcacaactttgacagtaa

SEQ ID NO: 949933 - DNA, 622 bp, Homo sapiens
tctcattgccaccctttttcccaatccaaagcctcctttgtattctcctcttgwatccccccaccttaacccacaagtataagatacctctcctccctccttggcgaccgatcatgcaccccttactatctcattaaaacctaatcccccttaccccgctcaatgccaagatcccatcccacagcactctttaaaatgattaaagcctgttatcactcgcctgctacagcatggccttttaaagcctatgaactctccttaccattcccctattttacctgtcctaaaactggacaaggcttacgagttagttcagaatcttagccttatcaaccaaattgttttgcctatccaccccgtggtgccaaacccatatactctcctatcctcaatacctcactctactacccattattttgttctgggtctcacacatgctttctttactattcctttgcacccttcatccaagcctctctttgctttcacttagactgaccctgacacccattaggctcagcaaattacctgggctgtactgccacagggcttcacagacagcccccattacttcagtcaagcccaaatttcatcctcatctgttacctatctcggcataatt

SEQ ID NO: 949934 - DNA, 701 bp, Homo sapiens
agcattcagaccacagcatctggtcttctccttgtctgtgtataaggaagggatggcttcatcccttttatctctggcctcccagctctcagcagttgtgcctgctgaggctgagcatgtgaggaggactgtaytgcagagcctttacttgcttcagtttaccttgctgggctgccttctctctcagtgcctgcttgaaacaaaaaaagggtggctgggctttctgagctgcaaactgaaagtgaaaaaaacaaaacaaaacacttcttgttttttctgctttgctaagagactcttggccaaaaaacctcccccctttctctgggctctctgtaaatcacagccaatggttcttatttctgagccttggaaatgcgtgttggagatgaatggagctgctgtcatccctgcatgaaagatggcagcccataactctgcttcaaggtgtgtcggacattgcacgaggcaggaaagtcattgacctggacaagcatcagagcccccactgccacctttgtcctttctgggccctccttttcccactcagttggctgggaagccacaaggggccaaagggaggccaagtgaaatctgaaggtccttgggggattgcagagcgaggtgggagatttatagcaggtgtgggattatagctggtccatgtggggcctgagacacagcagagggggtggaggaacctc

SEQ ID NO: 949935 - DNA, 601 bp, Homo sapiens
aaccagcagcttcccagtagtctcccaggggctctcaggcctttggcctcagactggagctgcaactgttggtttccctggttctgaggcttttggacttggactgaaccacactagctgtctttccagggtgccatacttaccagcttctctactcctccagcttgaagatggcctatcctgggacttcgtctttcttatcatgtgagccaaattcccctaataaactccctttcatatatatcctattggttctgtccctctggggaactctgactaatacactacccaactgcttcagattatacattcttctcaaatgcccatgaaacatataccaaaatggactgtatcctgagccataaaacaagtttcaacgaatttaaaagaattaaaataatatagagcatgtcttcctaccacaatggaatcaaactaaaaatcaataatggagagataacaggaaaatctccaagcacttggaaatgaaacaacatacttttgagcaatccatagttcaaaaaggaggtytccaggaaaattgtttaaaatgcattgaactgaataaaaattaaaataccatacaccagaagttgtgaga

SEQ ID NO: 949936 - DNA, 617 bp, Homo sapiens
tccagaacaggagaaggctctgtaactggttcaggctgctgtgcaagttgctctgccacttgggccatatgacccagcagatacaatcgtgcttgaggtgtcagtggcagatagggatactgtttggagcctttggcaggcccccataggtgaatcacagtgaaggcctctaggatttaggatcaaggccctgccgtctcctgcagataaccactctccttttgagagacagctcttggcctgttactgggttttggtggaaactgaacatttgactatgggtcatgaagtcaccatgagagctgaactgcctatcgtgaactgggtgctttctgacccgtttagccataaaatgggtagtgcacagcagcattccatcatcaaatggaagtggtatatatacgtgatcaggctcaagtaggtcctgaaggcaacaagtaagttacataaggaaagtggctcaaatgcccatggtctccactccagccaccctgccttytctctcccaccctgcactgatggcctcataggttgttgcccatgatcagttgacaaaggaagagaagactagggcctggttcacacatggttttgcatgatatgtgggcaccacctga

SEQ ID NO: 949937 - DNA, 464 bp, Homo sapiens
gaagagtatccctaagacatatgatcatcagatttttcaaggttgaaatgaaaggaaaaaaaatgttaaagacagctagagaaaaagagcaagtcacctataaagggaamcctatcaggctaagagtggacctctcagcagaagagattggggacctatattcaacattcttaaagaaaaatgtctaaaaccaagaatttgatatccagccaacctaagtttcctaaacggaggagaaacacagcctgtttcagataagcaaatgttgagggggttcattactaccacacatgccttacaagaaattgggaaaggagcaccaaatatagaaagaaaagactgttaccagccaatacaaaaacacacttacatacacagaccagtgacactgtaaagcaaccacacaaacaagctgacataataaccagctaacaatacaatgacgggatcaaatccacacatat

SEQ ID NO: 949938 - DNA, 623 bp, Homo sapiens
cctctcactttgtcttaactttagataacctgatgacaaagtggctaggcaatgatctttctgtgatgaattttccaggtgttctttgtgcttcttgtatttggatgtctaggyttctagcaaggctgggtaagtttttcttaattattcccccaactatgttttccagacttttagatttctcttcttaggttcctgttcttcaggaacatgaattattctcaggtttggtcatttaacataatcccagacttcttggaggctttgttcatattttcttatgcttttatctttgtctttgttggattgggttaattcgaagaccctgtctttgagctctgaatttctttcttctacttgttcaattctcttgctgagactttccagagtattttgcatttctataagtgtgtccattctttcctgaagttttgattgttgtttatttatgttacctatttccttgaatatttctgtgttcacttcttgtatcactttttgtagttccttagattgggcttcacctttctctggtgcctccctgattagcttaataattaaccttctgaattctttttcaggtaaattggggatttctacatggtttgagtccactgatggtg

SEQ ID NO: 949939 - DNA, 503 bp, Homo sapiens
ctattcacagccctaacgccacagccggggtctctcggaagctctgtggttttggccccctatgagagctgtagtacacgttccttcgttctcttccccagcctcctcccwttaccactgtaccccttaggaacatcttaagagttccagaacttcccaggaccttcaaagcggttttatgccaccatgcctgcttatgaccctcctccaatacgcatgccctgttttgccagccaagccagcacctcacctcaggctcagctcatccatgaagtcttgactgactcaagtccccatccccaagaagaattggccctgtcctcctctgctcccattccatgcctcgtagagactctgaacctggccgcagttcaagggcaggagagcctggctgtggaggatgcagggttctggaaaggcaccaaaaagtcatagcaaatgatgtgggacaggggaggctgatcagggcttagcttgcaaataaaatttaaaattgtgaaaca

SEQ ID NO: 949940 - DNA, 437 bp, Homo sapiens
atgtcctggtcatgaaagacagagaacagctataaaaaacatggcaactgamtgcagtacctgatcctaagccagatactgattggagggtagaaagtgtcagaaaggacattgtctggtcaaatgacaaaatgggaatgtgaaccatagataagataaaagcataggatcagtattagatttgctgaagttgatagtagtgctggggtcatatcagagaattgtcctatttttagcaaatggacactgaaatacgggcatgatatatgtgactaactctaaaatggttcaggaagttattttgtatgtatgtattatacatgcagaaagaatatgaatgatcaagcagctgtgtaaaaggttagcaaaaggtgactcggtatagagtggtccatgtaccatttctcttgcaacttctgtaaatttgcagttgtctc

SEQ ID NO: 949941 - DNA, 726 bp, Homo sapiens
gtccacgatcagataaagaggcgggctctcccacccagctctgaacaacaggaagtcttccagaagattgctcctaggcccatcacttctggggcggactttccacctccacccctccacaccacagaggcctgttctgttgactttcccggcctttgtttttccttccaggacatcactgataattgcactaaaacctatcctcctccccccatctccttcctccacttcactaaggcgaggccggaggagatctccagaggtttctagccagaccagcaagctttctgcccagtcctttgtgaggggaattatcacatgagacccctggggaaggatctgtcctcccctactttttggttgtttttaattgggacccctggcagattgcccagaggatcattagctgtggtgggtggactggcctgtgatttcagggggagatgtaaaatgtagctaaaggttacttattcacttatctcggccacttaataagtatcttggttagaagatgcttaattttttttctgacttatggaagtattacagagccatggtagaaaaattagaaaacagaattgtgcataagaagaaactcagtkctccataatcatccggagtataagaacatttaacattttaacctgtgttcccaggatcactgttgataaacacctccactgaagaatcagatagacctaggttgggtgcggtggcttttggctg

SEQ ID NO: 949942 - DNA, 726 bp, Homo sapiens
gtccacgatcagataaagaggcgggctctcccacccagctctgaacaacaggaagtcttccagaagattgctcctaggcccatcacttctggggcggactttccacctccacccctccacaccacagaggcctgttctgttgactttcccggcctttgtttttccttccaggacatcactgataattgcactaaaacctatcctcctccccccatctccttcctccacttcactaaggcgaggccggaggagatctccagaggtttctagccagaccagcaagctttctgcccagtcctttgtgaggggaattatcacatgagacccctggggaaggatctgtcctcccctactttttggttgtttttaattgggacccctggcagattgcccagaggatcattagctgtggtgggtggactggcctgtgatttcagggggagatgtaaaatgtagctaaaggttacttattcacttatctcggccacttaataagtatcttggttagaagatgcttaattttttttctgacttatggaagtattacagagccatggtagaaaaattagaaaacagaattgtgcataagaagaaactcagttctccrtaatcatccggagtataagaacatttaacattttaacctgtgttcccaggatcactgttgataaacacctccactgaagaatcagatagacctaggttgggtgcggtggcttttggctg

SEQ ID NO: 949943 - DNA, 435 bp, Homo sapiens
cactgttggcgagattataaaacgaaacaactgtaatggaaaacagtatggagtttcctcaaaaaatcaaaagtagagctactatataatctagtaattccggttctggtatatagccaaagaaattaaaagcagggtctcaaagagatttgcacgcccatggtcatagcagcactaatcccaatcgtcaaaaggtagaggcaacccagatgccccgtgataaatgaatggataaaccaaacatggtgtacacatacagtggagtattatttcaccttaaaaatgaaggaaatcatgttacatgctacaacactgatcaactattaagacattctgctatgggaaataagccagycacaaaaacacaaatacaatatgactccagttatatgaggtatctaaagtagtcaaattcatagacaccagaatgtagaa

SEQ ID NO: 949944 - DNA, 548 bp, Homo sapiens
acatttcaatagtctgtccttttaatttgataatatcatgaggctcgggaacttaagaagtttgaaagaagtctaattaatgacctcacatttgcctcagataaagtttgaaatctaatcattttttttcggcaactatatttgttttctatactgaaatagtaagcctcaaagtatgagtgtaaaaatacgcaattctccaaagtgaagggcagcacaattgtggctattacagttgggactcattaactcaagaatatcagtaaataccagccctccaccaaccaacaatttaaaaatgttaaactcccacaagaagttctttccttgaaacctgaatataattgtcttaggtctttaatagccattcaaaaaaattaaatatgcataaatgcattcaacaactgctcttcaaaaaccactgctattctagagttcaatgtgaacaaagtttaaggttaaggactgatttctaaaaytatgcaactcccatgacaagctggaagatctgttctcaaatatcaaaacactcatgtacccttttaaag

SEQ ID NO: 949945 - DNA, 563 bp, Homo sapiens
tggacccccagaacagcagagctgccctatcaaaatgtggccagactgctttttaagcgggtctctgatcccgtttttcctcactgggcaggacctcccaactgaagtctgcagacacttcctataggcgcctttaggccagcaacaggctcttacttccctggggcaaagcttccagagggaggaatgggctgtcatctttgctgttttgcaggcttcactggtgatacctccaagtgctggaaaatctgaggcaactagggactacagcaaaccccaaacatactgcaacagccctacaggaaagtggccagactgttatagggctgccctttctcaaaactcctcaccagtcaggtcctccaggccggggtctccagccacccctggccagagctatacagacagtagcaactcagcaactccttggatcgagcatccaggggtaactgaaagcccctctgtcactgcctctgcaggagaacagcccttgtcatgcccttggactaacaaaggagcaaaarccttaaatgcctcacccacatctccaacaaactgcagtc

SEQ ID NO: 949946 - DNA, 732 bp, Homo sapiens
aaaaatagaatcatggcccctcagtcaatttccagacttaagccagtttacagacccaaaaccctttgaatgaagtggaagctgggtccccttgaggaaggaccaaactacactagcaacaatttatgctgttaatctttctcccatccttccccaaggggaccttcagacttttgccagagtaactgtgcattggtgaaagggaaatgatcagacattttgaggactactggacactgactctgagatgacattgatcccaggggacccaaaatgtcattgtggttctctagttaaaataggggcttatggaggtcaggtaattaatggagttttagctcaggtccaacttacagtaggtccagtgggtccctggactcattctgtggtcatttccccagtgccagaatgtctaattggcatagacatacttagcagatgacagaatgcccacattggttccctaactggtagggtgagagctattgtggtgggaaagggcaaatggaagggaggagagttaattttagctagaaaaatagtaaatcaaaaacaatatcacatccctggagggattacagagattggtgccaccatcaaggacttgaaagatgcasgagtgttgactcccaccacatccccattcactctcccatttggcctgtacagaagacagatggatcttgggaatgacagtggattaccataagcttaaccaagtggtgactccaa

SEQ ID NO: 949947 - DNA, 658 bp, Homo sapiens
cagttatggtttcattgccttttctccattactgtccataaggcccaccagaagcaattcrccttcagttggcaaggccagcaatatacatttaccatcctacctcagtggtatatcaacgttccagcttcctgtcataatcttattcagagagagcgtgatcacttttcacttctgcaagatatcacactggtccattacattgatgaaattgtgctgattggatccagtgagcaagaagtaacaaacacatgtgacttattggtgagacgtttgcatgccagaggatgggaaataaatccaactaaacttcagagatctctacctcagtaaaatttctagaggtccagtggtgtggggcctgttgagatattccttctaaggtgaagaataaattgctgcatttggcccctcctacaagcaagaaagaagcacaatgcctagtggacctatttggattttggaggcaacacattcctcatttgggtgtgttactctggctcatttatcaagtgacctgaaaggctgccagttttgagtccagaacaggagaaggcactgcaataggtccaggctactgtgcaagctgctctgtcacttggtctatattacccagcaaatccaatggtgcttgaggtgtcagtggcagataggaatg

SEQ ID NO: 949948 - DNA, 575 bp, Homo sapiens
gcaaggaggttgaaatgatattcccaacacctgtgggagagtgaaagcaataggattgggcggagcaggaagtcggctagaatgcaatcactatcatggctgcagtccactctacagggatcttggtgagtttacctaatgacctggaattggagcaagaaaaccaggccattatatttctgtaccaagcagttctcggatgtgggatgccttgagaagggatatgaacttggatgaaggaactttactgtgctgtgagtattgttgccaggagtcagctgtcaacactcccaggagacgggaaattatgctttagtcactgaggcggcatctagtgtcagaccgcagccttgttaaacagagccagactttggaggatggttggtgggtttaaaatttggggctttacatcttgtccccacaagctgctgctggcctcttccttgtccatttctgtgtggcctgtttaggccccccagcttcctgcttcttctttaccatawttggaatgcaaaaatctacacgtaatttggcccatggtcccttctgcttagacatatccttgtagctacttt

SEQ ID NO: 949949 - DNA, 786 bp, Homo sapiens
tgggaactgtagttaaggtcactactgctttagtaaagagactggtggcattgttcccttgccctagaaatctgtggaaatttgaacttcagagaaatgatttagggtatctggcmttaaaaatttctaaagcaacaaagtgttaaagatggggcctggctgtttctaatagtgtatgctaatatctctgaagaaagatatggtttgaatttggaacttatattgaaaagagaagcagagcataaaagtttgaatcactcacctgaggtcaggagtcagcctggacaacatggcgaaacctcatctctactaaaaatacaaaaactagctggatgtggtggcacgtgtctgtaatcccatctacttgggaggctgaggcaggagaatcgcttgaacctgggaggtggaggttgcagtgaactaagattgtgccaccacactctagccttggggacagagtgagagtccatctcaaaaaaaaaaaagaaaagaaagaaagaaaaaagaaaaacccattttataggaaggaattcagggctgcagaaatttgtgtaagtaaagaggagcagaatgttaatagccaagacaatgcaaaaaatgcattcaaggtgttttgaaaccttcatggtagcccctcccattacaagcctggaggcctgggagggaaaaataatccctgaaccaggacaagggccctatccctatttctctgtacagtctcaggacacagcactttgcatcccagcagctccagctctaggcatggctaaaaggggccaagataga

SEQ ID NO: 949950 - DNA, 435 bp, Homo sapiens
gctttggggcacccaaatgttgaagggctttcaactgaccatctagccagaggcttttactccttagcttacctgatattgcagggagcagaggggacactcacacatccacaggagacaaaatgkcacaaaccagtcttccatgaggaacccaagtaaaggtctttccaggttccctcagcttgtgtgggcttggctgccgtacagggggccagtgtgaggaccagcaatctgccagcctcctggtctgagtggcaggtcccacatgaagcaatggcactgtgatggttaatagtgagtgtcaacttgattggattgaaggatgcaaagtactgatcctgggtgtgtctgtgagggtttggcaaagtaggttaacatttgagtcagtgggctgtgaaaggccaacccacccttaatctgagtgggcacaatcta

SEQ ID NO: 949951 - DNA, 435 bp, Homo sapiens
gctttggggcacccaaatgttgaagggctttcaactgaccatctagccagaggcttttactccttagcttacctgatattgcagggagcagaggggacactcacacatccacaggagacaaaatggcacaaaccagtcttccatgaggaacccaagtaaaggtctttccaggttccctcagcttgtgtgggcttggctgccgtacagggggccagtgtgaggaccagcaatctgccagcctcctggtctgagtggcaggtcccacatgaagcaatggcactgtgatggttaatagtgagtgtcaacttgattggattgaaggatgcaaagtactgatcctggktgtgtctgtgagggtttggcaaagtaggttaacatttgagtcagtgggctgtgaaaggccaacccacccttaatctgagtgggcacaatcta

SEQ ID NO: 949952 - DNA, 666 bp, Homo sapiens
ggaccctgcgcagccggctggctggtgcttcccgcctgcagcatcagtggaacttttcttctcctggccaaggagttcagctcagttcaaactgggggaaggacccattagcagtgagcaagggcttcttscctcaggacctccccgttttgaccctttaactgttttctcttttctccttttctagattagagggttcctatccccctgataactgcaaattcatcagggctcatttgaggtttaatctaaacagatacatgcaaccctctaaaatactttttagtctcaaacttgactccaagcttgaggctgaggccatagaaagaaaaaccaaatctgaggggtccaaagccaggcaacaggcacaatgtaaatgggcaggaccaattcctgctgactaaaccccccacctcatggaaggaggccatgctccatggaataaatgaagcccagggaacccaagggttgctggcagtaggaaaaatggaggcaaagttaagggcaaataattcctattctctaggccttccctgcttcatgggtgcatgccggatcagtaaccatgggtggcgactgccaaggttgccgagactcagggacaaaaagatggaagaaaaagaaaggacacttgcttcctctctccatcacaccccaagttttcgc

SEQ ID NO: 949953 - DNA, 588 bp, Homo sapiens
cagactggattccgtttatggacggaagttttttttgtagaaaaaggaactcacagagcagggtatgcaatagttactctgaatgatrttgttgagagtgcacctctctccttgggcacaaatggtcagctagttgaactaatcaccctcacgagggtgctcgaattaagcaaaggaaaaacgttaacttttatattgattctaagtatgctttcctggtcctcgatgcccataccactatctggaaagaggaacttcctcatagctaatgggtctcctattaaatataatcagaaaattaatagactattatcctcagttttcctcccacaggaagtggcaataatacattgtaaagactgccaaagagggacagatgaaatagttgagggaaataggctggcagaccaagcagtttaatcagcagcaagtgggccccaggtctctgacccatttgaagtcccactgatctgggagtgccccgtgatagaaataaaacctcaatattctcttgtggaaatagaatgggccacctcttagggatacatcctgcagtcctcaggatggctataatcagaggatagtaag

SEQ ID NO: 949954 - DNA, 481 bp, Homo sapiens
caaaacattgtaacatgttggagaccaccaacgtattaactcatgttgccaggaaaattctctttgagatagtctgaaaaatttatcttttctgctagtttcattcataactytgaatgtttaacagaggtgtcactgattagtaagattgtagctctatataggtgatttcttaaaatccaggtccatgcatgtcctctcaatttgtacaagcatactactatggtaaactgagtcacactcaaccaaattcacacaggcaaaacctaggtgatcacgatccctcccactgcataatggtgagttgtgcagtcaggatcatatcacacgagcacctgtcctgaggctgggttgcttttgatttgacttttacatttaacacagggagtaaaagcacttagatattgttaatgattcaacttagaatcaaattttcctcctactccacatttaaggtattgggtctgtttaattgagcgca

SEQ ID NO: 949955 - DNA, 629 bp, Homo sapiens
gatcctgcaatctggagccctgccccagctcaggtgaggtggggagagcagtggtggcctgkgcccaggggaggtgaggctggaggtccccccaccccacccctactccatgtaatgcatggcctccaggtaattgggtacacaggtaattcaggtagtctagtatttctatcatggattcctgctgatgacaaagggactgcagtcaggattccaaccttcaggacaaagcctggaagtggagaggtgcagattcttcttgggatcattcctctttccactcacctttggcaagggtgtttccttctggatgcttagcctgggagactaaatggatcaggggaatgatacactagaagtcctcttatctgaggcctgcccagcccatctttgtaagcaggactccagagcccaagaacttgatggggaaaacaaaattacatctctatttttattaatgtttctatctaacatttagtatttctttcagggagaaattagtatttttttaactacctttccatctaaaatttagtatttctttcagttagacaacaaaactacaatagtagtagaagtacctgtgactttgtcatcaataggaaccatggatattttcacgtgacatt

SEQ ID NO: 949956 - DNA, 597 bp, Homo sapiens
ctaccagaggtacaaagagaagctggtaccattttttctgaaagtattccaaacaattgaaaaggagggactcctccctaactcattttatgaggccagcatcatcctgataccaaaccctggcagagatacaacaaaaaaagaaaacttcaggccaatatccctgatgaatatccacacaaaaatcctcaataaaatattgccaaaccaaatccagcagcacatcaaaaagcttatccaccacaatcaagccggcttcatccccaggatgcaaggctgattcaacacatgcaaatcaataaacataattcatcacataaacagaactaaagacaaaaccacatgattatctcaatagatgcagaaaaggccttcaataaaattcaacatcacttcatgttaaaaactctcaataaactaggtattgaaggtacacctaggtacacctcaaaataataagagctatttatgacaaacctacagccaatatcatactgaatgggcaaaagctggaagcattcccccttgaaaaccagcacaagacaaggawgccctctctcaccactcctattcaatgtactattggaagttctggcc

SEQ ID NO: 949957 - DNA, 605 bp, Homo sapiens
ttcttgatgctggggtgcttgtagattcgggctgccacagacattaacgtcaggatgtggttctgtcaggaaggaggagacaagaggcggagtgaagggttaagtctcagggcccttggcctggcctgtccgctgccatcacctcttgttatggggctgagcatcagattcctaccaaagcctcacaatacccccgaggtctccgtgttactcccttcattttgcatgtgagaaaacaggctcaagaacctgcacgaggtcacaaagctgatgcatgaacagtggtctttgaacccagacctgccttgctccgaacttgtgtgtctaacatccaggacagcttcaggggacgacctaaatccaaattcattaaaatccaaaaccttaaacttatagcgtggcacaggccacatttctagtgcttcaatagtcatatatggctcgtggctactgcactggaatgtgcagatacaaagttctactggacggcatggcttattctgccttaatcctgacaccgtctccttgccaaccacccccacccgtccccggcctcagcccagaagcaaagttytgagcgctcaaggttagtagaattccctctt

SEQ ID NO: 949958 - DNA, 580 bp, Homo sapiens
agggatgctgcaaactcgccctggggacatgtggttaagtattcaggcttcttaggcaatgggcagggccgtagcattcccaagagattatgacctttgtcttcagttaacagggtgggtasagaaagaccaccaggtgggggcagggataggcatgtctgagcacagacttttcttgggtggggcttgctgtggtggctatgggaaatgggggtgtggttcccaggccaatggagttatattcccagaaggattatggctgccactgctgagtcatacaattcaccaggcaaaatgggggagagctgtcagtcaaaggtctcactccactcccacacagaccacagtcctaaaggccagtctcacccccaccgtgaccccccagcagcaccgagtctatttccaggcagccagtgaccagggctgagaacttgccccagaccacaggcctccctgttgagaaagaaagcagactcatagtttttcggcatctcagggagcctgcagcagtgatccagttccttcagagggtctgtggattctctcagctttcctggcatgttcccgtggtagctcttgg

SEQ ID NO: 949959 - DNA, 561 bp, Homo sapiens
aataggagtggtgagagagggcatccctgtcttgtgccagttttcaaagggaatgcttccagttcttgtccattcagtatgatattggctgtgggtttttcataaatagctcwtattttgagatactcccatcaatacctaatttattgagagttttcagcatgaaggttgttgaattttgtcggagccttttctgcatctattgagataatcatgtggtttttgtctttggttctgtttatatgatggattacgtttattgatttgcatatgttgaaccagccttgcatcccagggatgaagcacacttgatcatggtggataagctctttgatgtgctgctgcattcagtttgccagtattttattgaggatttttgcatcaatgttcatcaaggatattggtctaaaattctctttttttgttgtgtctctgccaggctttggtatcaggatgatgttggcttcataaaatgtgttagggagaggaaatattccctctgtttctattgattggaatagtttcagaaggagtggtaccagctcctctttgtacctctgg

SEQ ID NO: 949960 - DNA, 638 bp, Homo sapiens
aaatcaggtcactcccaccctaatactgcgcttttccaatgggcttaacaaacggcacaccaagagattatatcctgcacctggctcggagcatcctacgcccacggagccttgctcattgctagcacagcagtctgagatcaaactgcaaggcggcagcgaggctgggggaggggtgcctgccattaacaaggcttgagtaggtaaacaaagcagccgggaagctcgaactgggtggagcccaccacagctcaaggaggcctgcctgcctctgtaggctccacctctgggggcagggcacagacaaacaaaaggcagcaataacctctgcagactcaaatgtccccgtctgacagctttgaagagagtagtggttctcccagcacacagcttgagatctgagaacgggcagactgcctcctcaaatgggtccctgacccctgagtagcctaacggggaggcaccctccagtaggggaggactgacacgtcacacggccgggtactcctctgagacaaaacttccagrggaatgatcaggcagcagcatttgcggttcaccaatatccgctgttctgcagccaccgctgctgatacccaggcaaacagggtctggagtggacttccagcaaactccaa

SEQ ID NO: 949961 - DNA, 638 bp, Homo sapiens
aaatcaggtcactcccaccctaatactgcgcttttccaatgggcttaacaaacggcacaccaagagattatatcctgcacctggctcggagcatcctacgcccacggagccttgctcattgctagcacagcagtctgagatcaaactgcaaggcggcagcgaggctgggggaggggtgcctgccattaacaaggcttgagtaggtaaacaaagcagccgggaagctcgaactgggtggagcccaccacagctcaaggaggcctgcctgcctctgtaggctccacctctgggggcagggcacagacaaacaaaaggcagcaataacctctgcagactcaaatgtccccgtctgacagctttgaagagagtagtggttctcccagcacacagcttgagatctgagaacgggcagactgcctcctcaaatgggtccctgacccctgagtagcctaacggggaggcaccctccagtaggggaggactgacacgtcacacggccgggtactcctctgagacaaaacttccaggggaaygatcaggcagcagcatttgcggttcaccaatatccgctgttctgcagccaccgctgctgatacccaggcaaacagggtctggagtggacttccagcaaactccaa

SEQ ID NO: 949962 - DNA, 610 bp, Homo sapiens
aactggagccactatctgcatggattttccccatgtactcctttttcctttcacatcccaaagctgtgcacattaggttaattggcatgtctacattgtgctacctgaggatgtgtgtgagtgagtmcttcaagggaagaatgtactctccagggttggttaccacctttcagcctgaacttatgggatagactctggccaactgtgactcacacctgaaataagtgaattggaattacttaattaattaatacaaattattgcaaaacaaaaattcatgaagtgtaccataatcattcaaatgcacaatgataaacagtggggtaaaaaagtgcactgccagataagttattgtttgattttaaactgtgtggtggtaggacatgctttctgcaattttcactttgcaagtatttattccttgatttaatccaccatcagtatgatcccagtcactcactgatgagccaaaaaatgggcaaataattatgttttcattaaaatttttgaaatatgtatagctcacatgtatttcaatgtttaatattaaaagtgctttggtctttatttagatgtttgatgatggtgacatcaccacatatatgccata

SEQ ID NO: 949963 - DNA, 601 bp, Homo sapiens
gtcctattgagcatgcaaaactacaacgctaaataagattgttcaatggcatttccttgcaggccaaaggcttccaataagtgtttaatacacccccaaagaacaccacaaatgcagcaagacggttttgcaataaaaatgccttcaattcacgtaaaacaataaaatccgggcagcttgtattaactaccattttagacaacaatctccaaagtaaaaagcaaaacttcaaagagttaagctcaaagctcctgttcctatagcacattacaaaatttctataaaatgcattttataatggtctttaccaaataaaaaacactagttaaaggcccttaccttttccaggagggagctatccgttctgggttgattctgttccagtgtatacaatttctccatctttaaccatttcattccacagaccacagagcccatctcttgtgaatgcaagctggcaatgataaaygagataagctcacactcacactgcaatttttaaagaatgatatgggaaaaaatctcaatcccccttatgtattcgatcattcagtaataaaatcaatgatttactgaattagtgacttaatcattttacatt

SEQ ID NO: 949964 - DNA, 601 bp, Homo sapiens
gtcctattgagcatgcaaaactacaacgctaaataagattgttcaatggcatttccttgcaggccaaaggcttccaataagtgtttaatacacccccaaagaacaccacaaatgcagcaagacggttttgcaataaaaatgccttcaattcacgtaaaacaataaaatccgggcagcttgtattaactaccattttagacaacaatctccaaagtaaaaagcaaaacttcaaagagttaagctcaaagctcctgttcctatagcacattacaaaatttctataaaatgcattttataatggtctttaccaaataaaaaacactagttaaaggcccttaccttttccaggagggagctatccgttctgggttgattctgttccagtgtatacaatttctccatctttaaccatttcattccacagaccacagagcccatctcttgtgaatgcaagctggcaatgataaacgagataagctcacactcacactgcaatttttaaagaatgatatgggaaaaaatctcaatcscccttatgtattcgatcattcagtaataaaatcaatgatttactgaattagtgacttaatcattttacatt

SEQ ID NO: 949965 - DNA, 636 bp, Homo sapiens
ctgattgcttctctctgtccagaacaatgagaacaagagcrcactgcagttggagcagcaagtaaaggagctacaggagaagcttggtgaggtgaaggagtcggaaacctccacccccatccaagaagggctgggaggcgggcagcagcctctggggaggggaggtaccaggccagaggcagcttccagcctgggggctggtgaccacagcaccccccagggcagtcctgtttcttgcttcctgcctctgacttttaaaggtgggtagccctgggctcctctcaggtctggacatcatcatcctagctagaggcatggagcccccaatcacaggggaagagacagtggtataacaggctccttatgccaggtgcagtggctcatgcctataatcccagcactttgggaggctgaggcaggagaatcacttgaggtcgggagtttgagatcagcctggccaatgtggtaaaacctcatctctactaaaattacaaaaaaaaaaaaaaaaaaaaattagcaggacattgtggcacatgactgtaattccacctactcgggaggctgaggcacgagaattgcttcaacccaggaggtggaggttgcagtgagctgagattgcaccactgcactccagcc

SEQ ID NO: 949966 - DNA, 636 bp, Homo sapiens
ctgattgcttctctctgtccagaacaatgagaacaagagcgcactgcagttggagcagcaagtaaaggagctacaggagaagcttggygaggtgaaggagtcggaaacctccacccccatccaagaagggctgggaggcgggcagcagcctctggggaggggaggtaccaggccagaggcagcttccagcctgggggctggtgaccacagcaccccccagggcagtcctgtttcttgcttcctgcctctgacttttaaaggtgggtagccctgggctcctctcaggtctggacatcatcatcctagctagaggcatggagcccccaatcacaggggaagagacagtggtataacaggctccttatgccaggtgcagtggctcatgcctataatcccagcactttgggaggctgaggcaggagaatcacttgaggtcgggagtttgagatcagcctggccaatgtggtaaaacctcatctctactaaaattacaaaaaaaaaaaaaaaaaaaaattagcaggacattgtggcacatgactgtaattccacctactcgggaggctgaggcacgagaattgcttcaacccaggaggtggaggttgcagtgagctgagattgcaccactgcactccagcc

SEQ ID NO: 949967 - DNA, 489 bp, Homo sapiens
gatcagatcaggataatcagctatccatcacatcaaaaatttataattttttttgtgttgggaacattcaatgtcctccttttagttatttgaaactatacaatatattcttgttaactatacttatcttatactactatagaacactagaacttatttctcctatctagctgtaattgtatacttttttttttgtatacttttttttggagatggagtgctgctctgttgcccaggctagagtgcagtggtgcgatcttggcttgctgccacctccgcctctcaggttcaagtgattctcctgcctcagcctcccaaatagctgggaatacaggcatgtgccactgtgcctggctaatttttatatttttagtggagacgaagtttcactattttggccaggctggtctcaaactcctgacctcacgtgatccacccgcctyggcctcccaaagtgctgggattacaagtgtgagccactgtgcccag

SEQ ID NO: 949968 - DNA, 604 bp, Homo sapiens
cttcatataaaaactagacagaagaattctcagaaacttctttgtgatatgtgcattcaactcacagagtggaacattcctttcgatagggccgttttgaaacactcaattcgttgaatttccaagtggatatttagagcactttgaggcctatggcagaaaaggaaatatcttcgtagaaaaactagacagaatcattatcagaaactactttgtgatgtgtgcgttcaagtcacagagtttaacctttcttttgattgagcagttttgaaacactctttttgtagaattagcaagtatgtatttagagccctttgagggctatggtagaaaaggaaacatcttcataggaaaactacacagagtcattcacagaaagtactttgtgatgtgtgcattttactcacagagattaaccattctttagatagagcaggtttgaaactctctttttgtaaagtcttcaagtgtatatttggagcgytttggggccttctttggaaaagggagtatcttcacataaaagtagacagaagtattctcaggaactactttgtgatgtctgcactcaactcacagagttgaaatttccttttgatagagc

SEQ ID NO: 949969 - DNA, 604 bp, Homo sapiens
cttcatataaaaactagacagaagaattctcagaaacttctttgtgatatgtgcattcaactcacagagtggaacattcctttcgatagggccgttttgaaacactcaattcgttgaatttccaagtggatatttagagcactttgaggcctatggcagaaaaggaaatatcttcgtagaaaaactagacagaatcattatcagaaactactttgtgatgtgtgcgttcaagtcacagagtttaacctttcttttgattgagcagttttgaaacactctttttgtagaattagcaagtatgtatttagagccctttgagggctatggtagaaaaggaaacatcttcataggaaaactacacagagtcattcacagaaagtactttgtgatgtgtgcattttactcacagagattaaccattctttagatagagcaggtttgaaactctctttttgtaaagtcttcaagtgtatatttggagcgctttggggccttctttggaaaagggagtatcttcacataaaagtagacagaagtattctcaggaactactttgtgatgtctgcactcaamtcacagagttgaaatttccttttgatagagc

SEQ ID NO: 949970 - DNA, 601 bp, Homo sapiens
ttaatgcactcccaaatatccctttgcagattctgcaaaagcagtgtttccaaactgctgaatgaaaagaaagttttgtctctgtgagatgaaagcacacatcacaaaacggtttgtcagatagcttccttcaattttttatcctgggatatttgctttttttgcccttggcctcaatgagctcccaaatggaatggacaaaaccagtgtttccaaactgctgaatcaaaagaaaagtttaattctgtgagatgaaaacacacatcacaaagcagtttctcaaaagcttctttctactttttatctgaagatattttctttttcaccatagccctctgccaagaccagctcattcagggagaccctaacccagtggtgctagaggaattaacaacacacacacagaaatacagaggtgtgaagtgggaaatcaggggtctcactgtcttcagagctgagagcctcaatcagacayttacccacaaatttattaactgcaagccagtcattaacattgtttctatagatagtaaattaacttaaagtatctcttatgggctatgaagggatgggcaaaattaaaggaataggttggggtagt

SEQ ID NO: 949971 - DNA, 735 bp, Homo sapiens
gaggcatgcccccataacctcaggcagacgcttcacttctctggcctgtttctgcctcaaactgtgtccrgaattggtgggttcttggtctcactgacttcaagaatgaagccgtggaccctcgtggtgagtgttacagttcttaaaggcggcgtgtccggagttttttccttctgatgttcggatgtgttcggagtttcttccttctggtggggttcgtggtcttcccggctcaggagtgaagctgcaaaccttcgtggtgagtgttacagctcttaaggcggcgcgtctagagttgttcgctcctcctggtgggttggtggtctcgctggctttaggagtgaagctgcagaccttccccgtgagtgttacagctcataaaggcagtgtggacccaaagagtgagcagcagcaagatttactgcaaagagcaaaagaacaaattttccacaatatgtatggagaccccacaggattgctatggagaccccagaggattgccactgctggctcaggcagcctgcttttatcctcttatctggccccacccacatcctgctgattggtccattttacagagtgcccagcagtctgttttgacagggcgctgattggtgcgtttacaatccctgagctagacacaaaggttctccacgtccccaccagattagctagatgcagagtgtggacacaaaggttctccaagttcccactagagtagctagatacagagtg

SEQ ID NO: 949972 - DNA, 201 bp, Homo sapiens
accccagcccctgggactgcctctcgctggccaagaactacagcttcccctaccccttctcagtccgtctcctggccccgctggacaggcgctcaggtccasacacccccaggagggcagaagcatgtggctggggcctcagactaggcaggcacgtgtgggtttctattaacacgactatactgagcactcactccaagg

SEQ ID NO: 949973 - DNA, 214 bp, Homo sapiens
caccccagcccctgggactgcctctcgctggccaagaactacagcttcccctaccccttctcagtccgtctcctggccccgctggacaggcgctcaggtccagacacccccaggagggcagaagcatgtggctggggccycagactaggcaggcacgtgtgggtttctattaacacgactatactgagcactcactccaaggcgcctgaccatt

SEQ ID NO: 949974 - DNA, 668 bp, Homo sapiens
aaatttaaagtgctggagtgatattcctgtttcctatagattgaaaaaagagacagggggcttcaaataatcataatccaaatattttttgaggccccaagcaattcttttttcctattgtgaaaaattgtcaagtcatgaaaacataagcacacaatcagtattgtttcatgaccaaacttgtcatgaagttatcctgacctaaatacatactcagatcattcattttaactttctatgtacaaacctgaacaaaaggaagatccatctatctgtcttctgtattgacacaactggctctcttaaaactctctcctccctagccttcatggatactacactattccggatttctgccaacattcagcccactcacatctccccttgttttgtacctcttctgtctcctgtttacctgatgtaggtgagtaccaacactaaggaaggaagaaaaggtatgtagcttaaaccctccctgactaaacagcctggtgaagacactcctgccatcaatggttgactcaagtgccacccagactgttggcactcracactgagttcttccctcatcccctgccctcactgacactgctggaccgagagacctgagggtaggtttatggtgacagccccagaattttccccaaaacctgctggcttttttgcag

SEQ ID NO: 949975 - DNA, 742 bp, Homo sapiens
cctacatagcccacaagaaaaagaacacaagactttcctataaaagaattcacctttcatagaaaacacttgaaatttaaagtgctggagtgatattcctgtttcctatagattgaaaaaagagacagggggcttcaaataatcataatccaaatattttttgaggccccaagcaattcttttttcctattgtgaaaaattgtcaagtcatgaaaacataagcacacaatcagtattgtttcatgaccaaacttgtcatgaagttatcctgacctaaatacatactcagatcattcattttaactttctatgtacaaacctgaacaaaaggaagatccatctatctgtcttctgtattgacacaactggctctcttaaaactctctcctccctagccttcatggatactacactattccggatttctgccaacattcagcccactcacatctccccttgttttgtacctcttctgtctcctgtttacctgatgtaggtgagtaccaacactaaggaaggaagaaaaggtatgtagcttaaaccctccctgactaaacagcctggtgaagacactcctgccatcaatggttgactcaagtgccacccagactgttggcactcgacactgagttcttccctcatcccctgccctcactgacactgctggaccragagacctgagggtaggtttatggtgacagccccagaattttccccaaaacctgctggcttttttgcagca

SEQ ID NO: 949976 - DNA, 591 bp, Homo sapiens
cttccagatgtacaaataagagttggtaccaatcctactgaaactattccaaaaaatcaaggaggagggactcttccctaactcattctatgaggccagcatcattctgataccaaaacttggcagagacacaatgtaaaaagaacacgtcaggccaatacccctgatgaacacagatgcaaaatcttcaacaaaatactagcaaaatgaatccagcagcacattaaagctaatgcaccatgatcaagtaggctttattctcatgatgcaaggttagttcaacatatgcatcagtaaatgtgattcatcacacaagtagaactgaaaacaaaaacaacatgatcttctcaataaacacagaaaaggatttccataaaattcaacatcccttcatgttaaaaatctcaacaaactaagcattgaaggaacatatctcaaaataagaagatccatttacaaaaaacccacagccaacawcataccaaacaggaaaaaagctggaaggattccctttgagaaccagaacaagacatggatgcccactttcaccactcctattcaatgtagtgttgaaagtctgagccagagcaa

SEQ ID NO: 949977 - DNA, 603 bp, Homo sapiens
cataagagccaccgagttgtgacgctcctgagccattcatcagccctggcagcaggacgttgatgttgatgaagcagcaagcatggggggaggaatgaaagatgctcccgtgcctccgccttggcgccgtcttccctccacacgccagggcaggggagcatctgcctcctcaggtgacacggacgctgctccctggctgagagatgaattatagacagattgaagacactccctttagggatgatgctcttcctcacccccacccataatgcaaaattaatatgaggaggggtgaatgcaaatctctatccacatgaagcaggaaagaagcttttaaaataacattcacctgggaaggaagcattgcatcatgtggagttgcttaataaacctcaagaaaagctcccaagagcagagaggggcacttggcagggcccctgttgactcacagaatatccaggaacagcctccatcggctgccctttcccgagcactgggggcttaccagcgtggggagggcctggaggacgagcgtgkgctgcttctcccttcatacttttgactccctctgccctttgccaacaccaagaggcctttgtacca

SEQ ID NO: 949978 - DNA, 613 bp, Homo sapiens
ttctattagggttctccaaagaaatagaaccaactggatgtgtgttttgcggggtgggaatggagagakagagaaaaagagagaggaattttaaagaattggttcacatcactgcggaggcttgatgagtctcaaatatcatgggtgggctggcaggctggagactcaaggtagagttgcaattcaagtgcacccctggcagcagaattctctcttgctcaggaaaggtcagtcttttgttctactcagtcctttaactaattgaattgggcccactcacattatggagggtaattcaaatttcattaatttaaatgttaatcttctccaaaaaacaccttcacagaaacacccagaataatctttgaccaaatatcagcactgtggcccagccaagaggtcacataaaattaactatcacaggttggtacttcatgtgtcctatttaataagtctttccttacctcaacatcttaagattttctcctatgttttcttctgaaagttttttatatttatcttgtaaatttaagtctatgatctatttcaagataatttcaagctaatgtgtggtgtgatagaagggctgaaatgtattttattccatatgaat

SEQ ID NO: 949979 - DNA, 563 bp, Homo sapiens
taccctcccattagaaatgccatgtgaatgcaactgatacacccagggccagcaaggggacccaattttttgatgttcakttggctcactttccctttcttgattaattgcccccaatcctagaatactatattatacttctgggctccaaatcggcccccaaaccatagcattctacttcctcttcctatagagatggacaggacagctagggtatcaacattctagtaagagctgactagaaactgttccacataataagagctctccatgccagccattgactttggcatgttactgacattatccctaactttgctatatctctgcaaggtaggtgctgcagtttccaagttatagaccaaaagaaggttacttcactttttaaagctcttacagcctgtaaattagagagctgggcttcaaatccagccctatgtgacccaaagcccagcccatggtcttcttatcataacccactgtctcttcttctcagtttccaacaaccaaaatctgtttagctttcagcttgaataattcaagtagactttcctctacttggg

SEQ ID NO: 949980 - DNA, 631 bp, Homo sapiens
ttttaaaaccttttttcttccctgactacaattataatacatgctggtggtaaaaaataactcaaacatttcatatacatgtgccaagaaagtgaaagctccctataatctatgccctacagttttgggggctgttcctccatgttttacttcctagacacaaactaacatgtatttaaacaatgagatcattttatagatgtttttcttctttttctaacttaacagttcatattgattatcattatatttctatacagtcaggtttgcctcatccattttagcactgaatagtgttccgttgtgtgaatgtgtaatcatttataaacagttccctattggtggacattagggtagcattcagttttttaatcttacaaaccatggtgcagtgaacactcatacatctatctctgcgcacagatatgaacatttctctaggagagacttctagaagtagaattgcttactcggagaatatgaacatttttattttattttatttatttttttgagacggagttccactcytgttacccaggcatggagtgctatagtacaatctcggctcactgcaacctccacctccgggttcaagcgattctcgtgcctcagcctcccaagtagctgg

SEQ ID NO: 949981 - DNA, 672 bp, Homo sapiens
gagggctgcccctgagacctaaaaacaaaatcctaaactcctcaactgactgaacaagccccctcttgatcaaggggaycccagaaaaaccttaaagattgagttcccagtcatgatgtgatgggaggttggacacacatcattacactccttccctctttcagtttagacacaacatctgaccagcactaatgttaaaatagagatcataagacttgacagaatggaatctgtggcaatacgatgccaaattataaacaagacctaaggctgtgccaggcaagggttaagccatgcaccccacacttaaagaatgaattctgttctcactgccatgaggtttttctttttcaccagcagctaaacaagcactggcctcaagataagcaatgtcgaaacaattgcagctcagccaccgtcagacactgactaactaagccccctgttctaccagccaagctacagctttgattggattgactggacaagagactgatttctatgactttctcctaataagagaccacccaccatggactggctctggctggtttgaggaggctgtgcactgagtgccttcatgccgccccagcttcatcttttgacatataaggcctaactgtaatacatttaagtctccaccccaaggtgaacatgggacacatgcaacat

SEQ ID NO: 949982 - DNA, 815 bp, Homo sapiens
ttttgggtggtgcttgcgtatcatgcagaaccatctgtaaaccaggcccttgtcttctcttcctttttcaactgttcacagggagctccccatgaggccactrgtgcaggctgggggaaagagagctagatggcaggagcagggaccatgggcatttgagccacttgctcacataacttacttgtgccctcaggacttgctcaagcctgatcacatatataccacttcgatttgatgatggaatgccgctgtgcatgccccactttatggctagatgggtcagaaagcacgagtttatgacaggcagtttaggttacatggtgacttgatggcccatagtcaaacattcagtttctaccaaagcccagtaaccagccaagaactgtctctcaaaaggagagtagttatctgcagaagataggtccttgctccaaaatcctagaggcctctgctgtgattcacctatgggggcctgctaaaggctccaaatagcatccctatctgccactgacatctcaagcaccattgaatctgctaggtaatatggcccaagtggcacagcagctttcacaacagcctagacctgttgcagagccttctcctgttctggaccctactcaaaactggcagccttttaggtcactcgataaatgggctggagtaacacaccagaatgaggaatgtattgcctccaaaatccaaatagacccactaggcgttgtccctctttcttggttgtaggagggggcaaatgcagcaacttatccttcaccttagaaggaatatcttgagaggccccacaccactggaccact

SEQ ID NO: 949983 - DNA, 696 bp, Homo sapiens
gccaagaactgtctctcaaaaggagagtagttatctgcagaagataggtccttgctccaaaatcctagaggcctctgctgtgattcacctatgggggcctgctaaaggctccaaatagcatccctatctgccactgacatctcaagcaccattgaatctgctaggtaatatggcccaagtggcacagcagctttcacaacagcctagacctgttgcagagccttctcctgttctggaccctactcaaaactggcagccttttaggtcactcgataaatgggctggagtaacacaccagaatgaggaatgtattgcctccaaaatccaaatagacccactaggcgttgtccctctttcttggttgtaggagggggcaaatgcagcaacttatccttcaccttagaaggaatatcttgagaggccccacaccactggaccactagaaattttactgaggtagaaggtccctgaattttagttaatttcccatcccctggcatgcaaatgtctcatcaataagtccagtgtgttggctacttcttgctcactagatccggtcacatactgtcatcaatgtaatgaactaatgaactggtgtgatatcctgcggaagggaaaagtgatcaagatctctgcaaacaagattatgacacaaasccggagagctgatatacctctgaggtacgacagtgaagg

SEQ ID NO: 949984 - DNA, 682 bp, Homo sapiens
gactaggtggtggtgagtagaaggaggccaaggcaataatctggccagagagggtggtggcctggaccagggttgtaggatagaggtggagtgaagtgatcagatcctgcatgtgttttgaaggtagacccggcaggacatgctgacagattggacaagcatgtggtcttcgagagaaaggaaggaatgaaacatgactcctagattttgtcctgagcaactggaaggatggcgtgggccctctctgaaatggaaggctgtgggaagagcaggcttaatgtttacagggtcaggatgggaatcaggatttctaagaaatcctgactcttgcagaatcctgatgtaaacttagggaggaagaaagatggagaacaccattaaggggtcagccagcaagcctcagggagagtgctcactgtggctgcagctcatctgatgagcacctacctgccaggtggcgtggaagcactcacctcatcagcttaacgctgcggcaggagctaaccaccactggggactcagctctcactgaggagactagagtcaagtgcaggacacrctaacttccagggcaagatagtggctttgtagagtctgactccagggccatgtagatctgactttgatatatttgatgtctctcaacttggctgcttatataaataataaatattattaaggg

SEQ ID NO: 949985 - DNA, 481 bp, Homo sapiens
ggctcacatgattatggggtccggcaaatccaaaatctgtagcagctgatgtcctagtttccaagcccaacaggccagaagtcgctgtggaaccaggaacaagcctatgttccagttcacaggccatcaggcagaagaattcttaattgggggagggtcagcgtttttgttttattcaggccttcaactaattgggataaggcccaaccacgttaaaaaagataacctgctttactctgtctactacttaaatgttattctcagcaaggtgtggtggcacatgcctgtaatcccagcattttgggagtctgaggcaggtggatcacttgagtccaggagttcaagaccagcttkggcaacatgatgaaacttacatctctgcaaaaaatacaaaaattagccaggcatggtggcacgtacctgtagtcccagctactcagaggctgaggtgggaggatcacttgagcctgggaggcagagg

SEQ ID NO: 949986 - DNA, 590 bp, Homo sapiens
gagaccaaatggcctgcaatgcctaaaatatttgctacctagccctttacagaaacagtttgctgacccctcatgtataaggttattcactgcagtgttgcttgtaataattaaagattagaaacaacctaagtggccatcaatagaaaactggttaaatgatgatgtgttcatgccgtgaaaatgtaggcagttgtaaaaacaaaatgaagaagctttttaagtattgatatgaaaaaaatctccaaaataggccgggcgcggtggctcaacaacttgggaggctgaggcaggccgatcatctgaggtcaggagttctagaccagcctggccaacatggtgaaaccccgtctctactaaaattacaaaaattagccaggtgtggtggtaggtgcctgtaatcccagctaatcaggaggctgaggcaagagaatcgcttgacattaggagatatacctaatgtaaatgaccagttaatgggtgcagcacaccaacacggcacatgtatacatatgtaacaaacctgcatgttrtgcacatgtaccctagaacgtaaagtacaataaatatatatacaaaaaaaaaaaaag

SEQ ID NO: 949987 - DNA, 646 bp, Homo sapiens
ttggtatcagtagagtggggcactactgaaaagatacatgaaaatgtgaaagtgactttggaactgggtaataggcagagattggaacagtttgaagggctcagaagaagacaggaaaatgtgggaaagtttgrgacttcctagagacttgctgaatggctttggccaaaagcctgatagcgatatggacaataaggtccagactgaggtggtctcagatggagatgaggaacttgctgggaactggagtaagggtgactcttgttatgttttagcaaagaaactggcggcattttgtccctgccctggagatttgtggaactttgaacttgagagaggtgttttagggtatctgatggaagaaatttctaagcagcagagcattaagatgtgactcgggtgccgttaaaggtgttcaattttttttttttttagcttttctgtatttttttttaatatactttaagttcaggggtacacgtgcagaatgtacagatttgttacataggtatacacatgctatggtggtttgcttcacccatcaacctgtcatctacattaaatatttctcctaatgctatccctcccctagtcccccatcccccgacaggcctttcaccttctgccatgatggtgaggcctcccc

SEQ ID NO: 949988 - DNA, 646 bp, Homo sapiens
cattttcccttgcaaagaaaggacgccactgtggttattgcacgtggctgtcgccagacgttttctgaagccagatgaagtgagcccactactttggggagatcagtcagctctgtttgtcgtcagaacatctgagcattcaaacaaatgctagagtttggggaacgagtatcccccactgtgagtttggcagtttcccaacatgtacagactcctgaggcgctcggtgagaatgaggatgaatgcgacttactcaccttgtgaagtagaatgtgctgacttacggagatctgcttagctaagtgacccagtatctgctaatgaccagtgcaagctgttacaaaattatgcgtggttaaaagagtcaaagtgcactatgaggctgggcacagtggctcacgcctgtaatcctaacactttgggaggccgaggtgggcggatcacctgaggtcaggagtttgagaccggcctggccaacatggtgaaaccctgtctttactaaaaatacaaaaaatagctgggcatggtggygcgcgcctgtaatcccagctactcgggaggctgaggtgaggcagaagaatcgcttaaacccgggaggtggaggttgcagtgagccgagatcgcgccactgcactccagcctgggc

SEQ ID NO: 949989 - DNA, 611 bp, Homo sapiens
ttgatggaaattgcattgaatttgtagattgctttcggcagtatggtcattttcacaatattgattctacccatccatgagcatgggatatgtttatgttttcatttgtttgtgtcatctatgatttatttcagcagtgttttgtagtttttcttgcagaggtcttttacctcctcagttaccaaacccaaacctagaagaaaggaaataaccaagatcagagtagaattaaatacaattgagaaaaaaaatacaaaagataaatgaaacaaaaagcaagctgtctctttgaaaagataaataaaattgataggccattagcaagattaaccaagaaaagaagagagaaaatcccaataagttcaattggaaatgaaacaggagatattacaactgacaccacagaaatacaaaaggtcattcaaggctactatgaacatctttacatgcataaactagaaaacctagaggagatggataaatacctggaaagatacaaccctcctatctgaaatcaggaagaattagatacactaaacagaccgatrataagcagcaagatagaaatggtaattaaaaagttaccaacaaaaaaaaatccaggaccagac

SEQ ID NO: 949990 - DNA, 576 bp, Homo sapiens
gagttgtcaggtgtgctgtcctgagccaatatatacacatatacaaatgaattggctcatgtagttatggaggttgagaaatcccaagatctgcagttgccaagctggagacccaggggaacaaatgatgtaaattccagtccaagtccaagcccaaaggcagaagcctaatgttcccagcgcaaaaacagtcagccagagagaacaaatgttgttatattcagcctttttgttgtattcaggccttcaacgattgaatgaggcccacagacatgggggagggcaatttgcttaactcagtcaacctatagaaatgttcatttcatccagaaacaccctcagcgttacactcagaataatgtttaaccaaatatctgagcatcccgtggtccagtccagttgacacataaaatgcacagataaaatccagactttttttttttcttttgagacggagtctcactctgttgcccaggctagagtgcagtggygcgatcttggctcactgcaagctctgcctcctgggttcatgccattctcctgcctcagcctcccaagtagctgggactacaggca

SEQ ID NO: 949991 - DNA, 217 bp, Homo sapiens
aaactccttcctcaagcattgagctaccacacttttgtcctaaccatttctktgcttttctttcccatttatacttttgttttatagaatatgaggagagactttatatgttttatagaatggaaaaggctttagaagtcaccacctaacacaatcctctcaatttatacatgagaaaaactaagggcctgtaagacaaagacatttgtcctgggtt

SEQ ID NO: 949992 - DNA, 598 bp, Homo sapiens
tgtgacgcctccatctttgttttttttgctcaggattcctttggctacccaggctytttttcagtagcaaacgactattaggattgttttttccatttctgtgaaaaatttcattggtattttgagggagaatctatagattgctttgggtactgtggtcattttaatgaccattaatttttttgatccatgagcatgggatgtctttccatttgtttgtgtcctcttcaatttttttcatccaaagttttgtagttttcccttacaaagggttttttttttttttttttttttgcgcctccttagttaaatttattccaaggtattttattttattttttgatagctattataagtattgtaagtgggattgtcttcctaatttctttttcagctagttcattattggtgtatagaaatactacagatttttataagtgaattttatatcctgcaactttactgaatctgtttatcagttataagaggtttttggtgaagtcttcagggttttctaaatgtaaggtcatgtcatctgcaaagacggacagttgccttttatttctttctctcatctgattgctctggctaagatttc

SEQ ID NO: 949993 - DNA, 647 bp, Homo sapiens
ctttatcttctgagctccgcctcctgtcagatcagccrtggcattagattctcaatggagcacaaaccctgctgcgagctgcgcatgtgagggatccaggctgcgtgctccttaagagaatctaactaatgcctgatgatctgaggtggaacagtttcatccccaaccccctaccccggcccctgtccatggaaaaactgtcttccacaaaaccagtccttggtgccaaaaaggttggggaccactgtcttaaagaccatgtgtcattttttgttgttaaaagattgagtgacatggctgggcacagtggttcatgcctgtaattccaacactttgggagtctgaggcgggcagatcacttgaggccaggagttagagaccagcctgggtaacgtggagaaaccccatctttactaaaaatacaaaaattagctgggtgtggtggtgcgcacctgtaatcccagctactcaggaggctgaggcatgagaatcgcttgaacctgggaggtggaggttgcagtgagccgagatggtgccactgcactcctgcctaggtaacagagcaagaccctgtctcaaaaaaaaaaaaagattgagtggccgtgtctgtctccgtcccctggacatgtggcttccttgctgccgac

SEQ ID NO: 949994 - DNA, 601 bp, Homo sapiens
agctttatcttctgagctccgcctcctgtcagatcagccgtggcattagattctcaatggagcacaaaccctgctgcgagctgcgcatgtgagggatccaggctgcgtgctccttaagagaatstaactaatgcctgatgatctgaggtggaacagtttcatccccaaccccctaccccggcccctgtccatggaaaaactgtcttccacaaaaccagtccttggtgccaaaaaggttggggaccactgtcttaaagaccatgtgtcattttttgttgttaaaagattgagtgacatggctgggcacagtggttcatgcctgtaattccaacactttgggagtctgaggcgggcagatcacttgaggccaggagttagagaccagcctgggtaacgtggagaaaccccatctttactaaaaatacaaaaattagctgggtgtggtggtgcgcacctgtaatcccagctactcaggaggctgaggcatgagaatcgcttgaacctgggaggtggaggttgcagtgagccgagatggtgccactgcactcctgcctaggtaacagagcaagaccctgtctcaaaaaaaaaaaaagattgagtg

SEQ ID NO: 949995 - DNA, 565 bp, Homo sapiens
ttcaccacatgtacaaagaaaaactaatacgaatcctattgaaactattccaaaaawtaagggagtaggggctcctccctaaattactctatgaagccaacatcaccctggtaccaaaatctggcaaaaatacaatgaaaaaaggaaacttcaagccaatatccctgataaacatagatataaaaatccttgacaaaatattagcaaacaaaattcagcagcacatcaaaaagttaattcgccacaatcaagcaggctttaatcctggggtgtaggactgcttcaacatgcccaaattaataaatgggattccccacataaacagatttaaaaaaagaccatatggtcatcacaatagatgtagagaaaaacacctttgatataatccgacatgctttcatgataaaaactctcaacagactggctatcaaacaagcatacttcaaaataacaagagccatctatggaaaacatatagatgaatgagcaaaagctggaacgttctccttgagaactggaacaagataaggatgctcactttcaccacttgtattcaacatagtac

SEQ ID NO: 949996 - DNA, 581 bp, Homo sapiens
caaaaatataactttactgtcctacctcagaggtatatcaactytggctttgtgtcataatcttatttggagagactttgattgttttccacttccacaaaatatcacactggttcattacattgatgacattatgctgattggatccagtgagcaagaagtagcaaactcactggacttattgatgagacatttgcatgccagaggatgggaaataaatatgattaaaattcagggaacttctacctcagtaaaatttctaggagtacagggatgtggggcctgtcaagatattccttccaaagtgaaggaaaagtttctgcatttggcctctcctacaaccaagaaagaggcacaatgcctagtgggcctacttggattttgctggcaacacattcttcatttggatgtgttaccccagcccatttatttagtgacccgaaaggctgccagttttgagtggagtccagaacagaagaaggccctgcaacaggtccagtctgctgtgcaagttgctctgccacttgggccatatgagccagcagatccaatgatgcttgaggtgtcagtggcagatagag

SEQ ID NO: 949997 - DNA, 581 bp, Homo sapiens
caaaaatataactttactgtcctacctcagaggtatatcaactctggctttgtgtcataatcttatttggagagactttgattgttttycacttccacaaaatatcacactggttcattacattgatgacattatgctgattggatccagtgagcaagaagtagcaaactcactggacttattgatgagacatttgcatgccagaggatgggaaataaatatgattaaaattcagggaacttctacctcagtaaaatttctaggagtacagggatgtggggcctgtcaagatattccttccaaagtgaaggaaaagtttctgcatttggcctctcctacaaccaagaaagaggcacaatgcctagtgggcctacttggattttgctggcaacacattcttcatttggatgtgttaccccagcccatttatttagtgacccgaaaggctgccagttttgagtggagtccagaacagaagaaggccctgcaacaggtccagtctgctgtgcaagttgctctgccacttgggccatatgagccagcagatccaatgatgcttgaggtgtcagtggcagatagag

SEQ ID NO: 949998 - DNA, 645 bp, Homo sapiens
tttctgagatgaccatttttgaagctgtcatgtttaaaattctagcttttctgaaattttgtcttaagaattaaagaaaagctactatcaccaccaacaaggagaaaaattagwtttaaaggtagaaaaattacttggtctcctgctaaatgctaatggagcatagcctctggcctgaagaagataatttaggttcaaatacctccccaaagaggatgttacatctgataacacattctagtctcatataagaaaagcacatcttggttgttaacatgaagtcagctctgcagtttctgcatcaaccccactactgtcaggttaagagctcttgattccctcctaaccctgggttaagtcacaaaattcattcaattaacagtgaataatgaggcgtcaggagccagttacaatctttctgattccaaatctctcatctaacaggaagtgactggaattaacttatccagctacaaaaataatatttaaaaagtgcttgttttcaagttgtgagaattttaacttcatgcctctgataagttttttatttagtttttttttctttttctttattttttgagacaaagtctcactctgtcacttaggctggagtgcagttgtgcgatctcggctcacggcaacctc

SEQ ID NO: 949999 - DNA, 618 bp, Homo sapiens
tattctttcatcatttactgagtrcctgacatggactaggccataaaaatccatacaagacacagatcttcttgaggctcaaagtcttttgaaggagacaaatgtgtaagtaaatgatggcaattcagagtaattaggcaaattacaaagagaacaaaagggaatccattaatactacctgaggaaattgtagagataacattgtaactgtgtctcaaaggaaaaggaggagctgtttgttgggagttaaggttgggtaggatgggaaggaaggggaaaaggccactttaggctgagcaaataacatgtgcaagggtattggaaatcttaagtgtgtggtgtagctgcaggtaaagagtaagggaaggtctttggctcatgcctgtaattccagcactttgggaggccgaggtgggtggatcacctgaggtcaggagtttgagaccagcctggccaacatggtgaaaccccgtctctactaaaaatacaaaaaattagccaggcgtggtggtgggcacctgtaagcccagctacttgggaggctgaggcaggagaatcgcttgaactcgggaggtggaggttgcagtgagccaagattgcaccattgcactccagcct

SEQ ID NO: 950000 - DNA, 682 bp, Homo sapiens
agtttcatcacctcatcattcctggtcagtgaaaaaattgtcttccatgaaaccagtccctggtgccagaaaggttggcgactgctgtcctaaagtaactcttttaacatttcttgtgaggcgtgtgtacagtcaacaaattctctcaatttttgttcatctgagaaagtctgtgtcttttgaaggataattttttggggtacagaattctaggttggtgggtttctttctcttaatactttaaatatttcactctgctctctttttgcttgcatggtttctaaggagaggtcaggtgggtgtaatttttatttttgctcctctttatataaagtgtttttttccctcctggcttctttcaaaactttttgtttgtctttgattttctgaatattgaatatgatatgtccaggtggagtgtgtgtgtgtgtatgtgtgtgtgtttgtgtgtgtgtgttctctgagcatcttgtatttttgatttggtatctgacattgatttggggaaattctcagtcatttttgctccaaatattgcttctgtttctttctgtcttcttcattgttattttcattacatggatgtttccatttttgtagttgtcccacagttcttggatattctgttcttttttttttcctttgcagttttgsaagtttctattattatctcctggagctc

SEQ ID NO: 950001 - DNA, 722 bp, Homo sapiens
ccctgggagactctccagagcacattctttgagccccagcttcttagataatgctatcgagactttgcctgggtctgggctttgcctgttactgcctttgggatgagtcagcctaatacagaaagattgtttctttctctttttaattttacttttctttctttaatttccagcctcaagggtgatgggagaagatgtaagaaaagttatagggaaaaatgcaaacctccttggtaggccaaaaactttggagaataatttagctgaaggcagctaaattctcttaagggcaaaggttagataacaagggaatgtaaagaaacatatctagaaaaattggtttacttatgtctcaggaaaccaacctttgatcattcatgtgcaagactgctctctactcaggggtcaacaatgttaatttcccacaaattatgtttgctccaggcctttgtcttcaaatctgtactaaattaatacaaagttctctggcttagtgggactgtactctcattggtgatgctaagcagtgcagtcccctagctgcattctcaggcaaaataactgtgtctgaatactttcttcattggtcgctcagccagagtgtgcrggatggacccgacacaagagaacaaagctggggcctaatacaagtcccccagagttagagcacacagtccagaagttgggagctgagtgttggtgccataaaatatcccagaaat

SEQ ID NO: 950002 - DNA, 585 bp, Homo sapiens
ctgtcacttcctccccatcagtccttttaaacaacattccaccgacatagggtgagtgygccccctactggaccccggggccgttcagggatggaggacgtgagctgcggaaaggagctaggcattctgccaagtgctggctttgagacagtgcagactgcggggacccggctccctcctctggacccctgttccctcccccagtcttcttccctcgacgttccacacccgatttctttcaaatgtccctgcacaagctgtggctcccaagccatcactatcccaatcacttgtccagatctgcaggtgctgaactccttgctgcctcggggcctttgcacttgctgttcctggagccggggagggttttccctgaaacactttccttcagggctcacatcaaatgtcagctcctcaggaggccttctctgaccacccaggctgggtcagggcccccataggttgttctttgggcactcaggtttttcctttaaggccaagtcatgacttcaattacaaatgaaggaggtaacaagtaattcagagtcagtctccccagagaggcctctccaacttcataaacat

SEQ ID NO: 950003 - DNA, 602 bp, Homo sapiens
gaagagatttggaatctgatctcactttactctgacatctaagaccttggaagagctgagaccccagcaggaccaaggttcyggtcaggcctggactgtggcaagtggtgcactggttgtgatgggacctgggttccagtcctaatgctcccattgatttgggaggggtctctgtacttctctgggccttagttccccacccaaagctgggcagtggccttccagatccagtgtggagctcacatacacgtggatgccccatagcacttttgcttcttccttccttattcagaatgtccagaaagccatccccttattcactggtttggagcgctatagactgttaagcatcttcacaggcatagcttcatttgaactctaccacaaggctgtgaggttggcatgaccactatcctgtgtcagatagtaaatagaggctgagagagtggaaggagcttgcttcaagtcatgcaatctttgggacatccttgcaatcccttcatttttaacctacaaataaaaatatatatgatgctgaatatcggaattaagagacagctcagagatcatcccaacctatctgtttgtttgactgataggga

SEQ ID NO: 950004 - DNA, 576 bp, Homo sapiens
gcaaccttgtgaaaccctatgcagtgaacccagttgagttgtgaccaaattcctgacccacagaaaatacgagasaataaatacgtttttttcctccttttttttttttttttttgagacagtttcactcttgtttcccaggctggagtgcagtggtgcgctctcagctccccacaacctctacctcccgggttcaagcaattatcctgcctcagcctcccaggtagctgagattataggcatgtgccaccacacccagctaattttgtatttttagtagagataaggtttctgcatgttggtcaggctggtcttgaactcctgacctcaggtgatctgtctgcctcggcctcccaaagggctgggattacaggtatgagccacggtaactggccttttctcatatgtttatagcagcacaatctgcaactgaaaaaatatggaatcagttcaaatgcccattagtgaacgaatggataaagacaatgtggtatatatgtagcatggaatactactcagccataaaaagaaacaaaataatggcatttgcagcaatctggatggaattggagactt

SEQ ID NO: 950005 - DNA, 576 bp, Homo sapiens
gcaaccttgtgaaaccctatgcagtgaacccagttgagttgtgaccaaattcctgacccacagaaaatacgagacaataaatacstttttttcctccttttttttttttttttttgagacagtttcactcttgtttcccaggctggagtgcagtggtgcgctctcagctccccacaacctctacctcccgggttcaagcaattatcctgcctcagcctcccaggtagctgagattataggcatgtgccaccacacccagctaattttgtatttttagtagagataaggtttctgcatgttggtcaggctggtcttgaactcctgacctcaggtgatctgtctgcctcggcctcccaaagggctgggattacaggtatgagccacggtaactggccttttctcatatgtttatagcagcacaatctgcaactgaaaaaatatggaatcagttcaaatgcccattagtgaacgaatggataaagacaatgtggtatatatgtagcatggaatactactcagccataaaaagaaacaaaataatggcatttgcagcaatctggatggaattggagactt

SEQ ID NO: 950006 - DNA, 607 bp, Homo sapiens
ggcagtggttctgagcctttctgggacagagctttcaggggaagtgatgggtcaccatctttgctgtttcatagccttagctgttgttgccttcagggtctaaggagtctgaggtgactgaggactggagcagtcccccggcacagcacagcagctccacaaagaagtggccagactgctttttcacccaggtcttggatctcatttcttttcattgtgtggagtcacccgactgaggtctacaaccacccctgtcagtgtgtttaggtcagtaacaggtccatacctctctgggatggaattcccagtgggaggggcaggctgccatctttgctgtattgcagctttcactgttggtaccttcaggtgctggaaaatctggggtggctagggactgcagcagacccctagcacactgcagcagccctactcatacataggtccctgatcctgtatctcctcactgggcaggtcctcccaacctgggtcttcagctacccacygctgaggtcattgagtctatagcagctctgcaactcactgaggcagagttccagaggaaggggaaggttgccgtctttgctatttcacacttctcgcctttgct

SEQ ID NO: 950007 - DNA, 733 bp, Homo sapiens
ctgggaaggctctggccggccctcagttcttggcgacagggtgaatgaggaaggggagggccggcaccttctgggcagcagataagtaaggtgctagagccatggccctgccagggtgagcggccacccagcttcatccccagagcttgttggtgactggggctttcagagctgagctggcaagagttctggggagccctgtggaggcccccactcaatctcctcaccagagatgtagcggagatccccgccttctctggaggtgggtgaaggtcccttcattcaaaagtgaccttcctaggccaggcagtgtctgagggcctcataacgctggccactccaccatatgccttccacactgggtgctcaccctgtccatatgctaccaatgctcaccctgtccatgcgctaccaatgctcaccctgtccatgcgctaccaatgctcaccctgtccatgcgctaccaatgctcaccctgtccatgcgctaccaatgctcaccctgtccatgcgctaccaatgctcaccctgtccatgcgctaccaatgctcaccctgtccatgcgctaccaatgctcaccctgtccatgcgctaccaatgctcaccctgtccatgcgctaccaatgctcaccctgtccatgtgctaccaatgctcaccctgtccatgtgctaccaatgctcaccckgtccatgtgctaccaatgctcaccctgtccatgtgctaccaatgctca

SEQ ID NO: 950008 - DNA, 559 bp, Homo sapiens
atagaggtatttatagtattctctgatggtagtttgtatttctatggaatcagtggtgataytccctttatcattttttattgcgtctatttgattcttctctcttttcttctttattagtcttgctaacggtttatcaattttgttggtcttttcaaaaaaccagctcctggattcattgattttttgaagggttttttgtgtctctatctccttcagttctgctctgatcttagttatttcttgccttctgctagcttttgaatgtgtttgctcttgcttctctagttcttttaattgtgatgttagggtgtcaattttagatctttcctgctttctcttgtgggcatttagtgctgtaaatttccctctacgtactgctttaaatgtgtcccagagattctggtatgttgtgtctttgttcttgttggtttcaaagaacatctttatttctgccttcatttcattatgtacccagtagtcattcaggagcaggttgttcagtttccatgtagttgaatggttttgagtgagtttcttaatcctgagttctagtttg

SEQ ID NO: 950009 - DNA, 593 bp, Homo sapiens
aacgcagaagatgggtgatttctgcatttccaactgaggtaccaggctcatctcactggggagtgacactggggagtgttggaaagtgggtgcaggacagtgggtgcactgcacccagcgtgasgagaagcagggcgagacattgcctcacccgggaagcgcaaggggtcagggaattccctttcctagtcaaagaaaggggtgacagatggcacctggaaaatcaggtcactcccaccctaatactgcgcttttccaatggtcttagcaaacagcacaccaggagattataccccatgcctggcttggagggtcctaagcccatggagccttgcttattgctagcacagcagtctgagatcaaactgcaaggaggcagcgaggctcggggaggggcacctgccattgctgaggcttgagtaggtaaacaaagtggccaggaagctcgaactgggtggagctcaccacagctcaaggaggcctgcctgcctctgtagactccacctctgggggcagggaacagccaaacaaaaggcagcaaaatcctctgcagacttaaatgtccctgtctgatagctttgaagagagtagtg

SEQ ID NO: 950010 - DNA, 593 bp, Homo sapiens
aacgcagaagatgggtgatttctgcatttccaactgaggtaccaggctcatctcactggggagtgacactggggagtgttggaaagtgggtgcaggacagtgggtgcactgcacccagcgtgacsagaagcagggcgagacattgcctcacccgggaagcgcaaggggtcagggaattccctttcctagtcaaagaaaggggtgacagatggcacctggaaaatcaggtcactcccaccctaatactgcgcttttccaatggtcttagcaaacagcacaccaggagattataccccatgcctggcttggagggtcctaagcccatggagccttgcttattgctagcacagcagtctgagatcaaactgcaaggaggcagcgaggctcggggaggggcacctgccattgctgaggcttgagtaggtaaacaaagtggccaggaagctcgaactgggtggagctcaccacagctcaaggaggcctgcctgcctctgtagactccacctctgggggcagggaacagccaaacaaaaggcagcaaaatcctctgcagacttaaatgtccctgtctgatagctttgaagagagtagtg

SEQ ID NO: 950011 - DNA, 678 bp, Homo sapiens
agattttttgagattaggaaatgcaaagaagtcacaaggagctgaatcagactgtaagatggattcctaacgtattcctatcaaagatcttgcaaaattgcccttgtttaatgagaagaatgatcaggagcattgttgtggtgaagaaggactccctggtgaagctttcctggaagttttactgtgaaagctttggctttctcaaaacactctaagaacaagtagttattatttttcttcagccctccagaaagtcaagaagcaaaatgcctcaagaatccccaaaacttttgccataaccttgactcctgattggtccactttggctttaaccagaccaccgtcacctcttggtaaccgttgctttgattgtgctttgtcttcaggatggtactggtagagccatgtttcatcttctgttacaattcttcaaagaaatgcttcaggatcttgatccaacttgcataaaattttcattgaaagctctgctgttgtcaggagctgatctggacacaacagttttggcacccattgggtggaaagcttgctcaactttaatttttcagtcagaattgtgtgagttgaaccaactgagatgtctgtggttctggctattttttgmactgttaatcgctagtcctctttaattagggcatgcacaagattaattttttcctc

SEQ ID NO: 950012 - DNA, 648 bp, Homo sapiens
atgaggtcaaagcaagtctcaggaccaagcccagtatcagatggacaggaagtgtcctcccatggaggaggaggagagggagtaatatttttgaatgggaatccaatataccacgctaagaaacacaaggttttatcttgaaggtaaatgaaaacaactctaaagtttttggagcactagaactatatggcgcccacgtatttcagagaaaaataagcttctacaggtgtactatggagactaaaagaaaagaatcagggagactggtcaaaaggctaagcaatacagctatgtgggaggcaatactttctgttaaatttggggtaacatggcaattacatttcaaagaagcagataccaaaatcacttcaaagtaagaaggcatgaaacttaaaaattcttcatatacggtcatgtgatgcagaaagatgttttggtcaatgatagaccacctatatgatggaggacccataagtttatgatgagttgaaaaattccaattgcctgtgatgtcttgatgatcctgaccctgggaatgcctakgctaatgtgtgtgtagatgtcttcatttttaacaaaaagtttaagaagtaaaaaaaaaattttaaatacagaaaagagcttatacaataaggatataaagaaagt

SEQ ID NO: 950013 - DNA, 648 bp, Homo sapiens
atgaggtcaaagcaagtctcaggaccaagcccagtatcagatggacaggaagtgtcctcccatggaggaggaggagagggagtaatatttttgaatgggaatccaatataccacgctaagaaacacaaggttttatcttgaaggtaaatgaaaacaactctaaagtttttggagcactagaactatatggcgcccacgtatttcagagaaaaataagcttctacaggtgtactatggagactaaaagaaaagaatcagggagactggtcaaaaggctaagcaatacagctatgtgggaggcaatactttctgttaaatttggggtaacatggcaattacatttcaaagaagcagataccaaaatcacttcaaagtaagaaggcatgaaacttaaaaattcttcatatacggtcatgtgatgcagaaagatgttttggtcaatgatagaccacctatatgatggaggacccataagtttatgatgagttgaaaaattccaattgcctgtgatgtcttgatgatcctgaccctgggaatgcctagkctaatgtgtgtgtagatgtcttcatttttaacaaaaagtttaagaagtaaaaaaaaaattttaaatacagaaaagagcttatacaataaggatataaagaaagt

SEQ ID NO: 950014 - DNA, 587 bp, Homo sapiens
aagatatttgtgtttaaattcatgatagaaattggtccatagtcatcttttttgtaytgtctttgcttttggtgtcaaggtaatactggcctcataaaacgagttggcaaagtatgccctcctcttgtattttatggaagactgtgtaaaattggtattgattcttctttaaatattatacttctccagcaaaacaatctggtcctggatatttctttttaagagtttagaatcacaaattcagtttcattaatgtgtgtagggactattcaggttgtttaattcttcttgattgagttttggtagtttagggtttttgaggaattgatctgtttttttcgaagttgccaaacttatgaacataaaatgtgtttgcagttttttcttattgcctttttaaaatggctttagaatatgtagtgatgtttcctgattcatttctgatattgatatctgtgtgtcttctcactttttaatctttgtcagaattactagaggtttattaatttcattgactttttccaaagaaccagctttttgtttcattgattttccccatttccctgttttcaatttcattgatttgt

SEQ ID NO: 950015 - DNA, 587 bp, Homo sapiens
aagatatttgtgtttaaattcatgatagaaattggtccatagtcatcttttttgtactgtctttgcttttggtgtcaaggtaatactggcctcataaaacgagttggcaaagtatgccctcctcttgtattttatggaagactgtgtaaaattggtattgattcttctttaaatattatacttctccagcaaaacaatctggtcctggatatttctttttaagagtttagaatcacaaattcagtttcattaatgtgtgtagggactattcaggttgtttaattcttcttgattgagttttggtagtttagggtttttgaggaattgatctgtttttttcgaagttgccaaacttatgaacataaaatgtgtttgcagttttttcttattgcctttttaaaatggctttagaatatgtagtgatgtttcctgattcatttctgatattgatatctgtrtgtcttctcactttttaatctttgtcagaattactagaggtttattaatttcattgactttttccaaagaaccagctttttgtttcattgattttccccatttccctgttttcaatttcattgatttgt

SEQ ID NO: 950016 - DNA, 601 bp, Homo sapiens
gctgctgagaagattgtatattctgttaatttgtggtgaagagttctgtagatatctgttaggtttatttggtccagagctgagttcaagtcctgaatatccttgttaattttctgtctcattcatctgtytaatattgacagtgggatgttaaagtctcctactattattgtgtgggagtctgtctctttgtaggtctctaagaacttgctttatgaatctgggtgctcctgtattgggtgcatatttatttatgatagttagctcttcttgttgcattgatccctttaccattatgtaatgcaattctttgtcccttttgctgtttgtggtttaaagtctgttttatcagagactaagattgcagcccctgcttttttttttttttgctttccatttccttagtagatctcccaccatccctttattttgagactttgtgtgtctttgcatgtgaggtgggtctcctgaatagagcacactgatgggtcttgactctttttttttttttgaaacggattctcactctgtcacccaggctggagtgcagtggcgccatctcggctcactgcaagctccacctcccaggttcacactgttc

SEQ ID NO: 950017 - DNA, 601 bp, Homo sapiens
gctgctgagaagattgtatattctgttaatttgtggtgaagagttctgtagatatctgttaggtttatttggtccagagctgagttcaagtcctgaatatccttgttaattttctgtctcattcatctgtttaatattgacagtgggatgttaaagtctcctactattattgtgtgggagtctgtctctttgtaggtctctaagaacttgctttatgaatctgggtgctcctgtattgggtgcatatttatttatgatagttagctcttcttgttgcattgatccctttaccattatgtaatgcaattctttgtcccttttgctgtttgtggtttaaagtctgttttatcagagactaagattgcagcccctgcttttttttttttttgctttccatttccttagtagatctcccaccatccctttattttgagactttgtgtgtctttgcatgtgaggtgggtctcctgaatagagcacactgatgggtcttgactctttttttttttttgaaacggattctcactctgtcacccaggytggagtgcagtggcgccatctcggctcactgcaagctccacctcccaggttcacactgttc

SEQ ID NO: 950018 - DNA, 609 bp, Homo sapiens
aggtcacttgcatgcatgtttttctccctcctacagcttgctgcaaggcggggtctgtgttattcttcacactgtggaaagaaggacaggtaggaggacagggtggtggggagcaagagaaggaaggaaggagcctgccagtagcctgacccctaagttgcccagaagccctaggtagtcagtccaccttataaacttagttcctgccttactgcctcccaaactttccatgtctatccaaaatgttgtgcaattacattctctaccttcttctgcacttttaaaaccacaagcagtcccagaataggttgtcaaattcctgagccttcagcactaggccaagagtttcttgaagggaaggaagaggaagtacaggaaatatggaagaagcacttagaggagtcaggccaggccagtgaagggaatgggaagcccgcacagtaggtatagcaatttggctggtagtgttgtgccagaaccacgaagtagtggcatcaaattaactcaaatggttgygtcaactactacctcaactgtaaaaccaccaggtgtccctactctttccaaggacagaaggacaaggctctgagatgaagagtcctcccctgg

SEQ ID NO: 950019 - DNA, 598 bp, Homo sapiens
atttgtgaacacatatgactgtatgcttttagaagaagccaggtcatatctcgaatgctctgttgcttagaaatttcttctgccagataccataaattcatctctctcaagttcaaaattccactgatttctaggttgcaggcaaagtgctgccagcctctttgctaaagcatagcaagggtgacctttgctccagttcccagtaagtttctcatctccatttgagaccacctcagcatggacttcgttgtccatatcactagcagcattttggtcaaaacgattcaacaagtctctagggagttctgaactttcccacatcttcgtgtcttcttctgagccctccaaacttccaacctctgtccattacccatttccaaagttatttccacattttcaggttatctttatagcaggaccccattatcccggtaccaattttctgtattagcctctttccacactgctgtaaaaaattacccaagactggrtaatttataaaggaaagaggtttaattgactcaaagttccacatggctggggtgggctcaggaaacttacaaacatggcagaagtttaaggggaagcaagcacattg

SEQ ID NO: 950020 - DNA, 608 bp, Homo sapiens
cagacattagaaaaaaacttcaaaagtcygccttaggccccgagcaaaacttagaaaccctatttaacttggtaaccttggttttttataatagagatcaggaagagcaggcggaacgggacgaacaggataaaaagaaggccaccgctttagtcatggccctcggcaagcggactttggaggctctggaacagggaaaggctgggcaaatcacatgcctaatagggcttgcttccactgcggcctacacggacactttaaaaaagattgtccaaatagaaataagccacctccttgtccatgccccttatgtgaagggaatcactggaaggcccacttccccagggaatgaaggtcctctgggtcagaagccactaaccagatgatccagcagcaggactgagggtgcccggggcaagcgccagcccatgccatcaccctcacagagccccgggtatgcttgaccattgagggccaggagtttaactgtccccaggacactggcgcggccttcttagtcttactgtcctgccccggacatctgtcctccagatctgtcactatccaaggggtcctaggacaggcaatcactagatacttctcccaga

SEQ ID NO: 950021 - DNA, 580 bp, Homo sapiens
aagtatgtctcttccagaatcgaagttgtaaaactacaaatsgttcttcaaatggagccccagatgcagtccatgactaagatctactgcagacccctggaccagcctgctagcccatgctctgatgttaatgacatcaaaggcacccctcccgaggaaatctcaactgcacgacccctactacgccccaattcagcaggaagcagttaagagcggtcgttggccaacctccccaacatcacttgagttttcctgttgagagtggggactgagaggcagtactagctggatttcctaggctgactaagaattcctaagcctagctggggaaggggaccgcacctacctttaaacacggggcttgtaactcacctcacacccaaccaattaggtagtaaagaggactcactaaaataccaattaggctaaaagcaggaggtaaagaaatagtcaaatcatatattgcctgagagcgtgggggagggacaatattcgggatataaaccctaggcattcgagacgggagtgggcaaccccctttggctcccctcccattgtatgggagctctgttttcactct

SEQ ID NO: 950022 - DNA, 620 bp, Homo sapiens
ccctgaaatcccagcgctttgggaggctgagctgggcggattgcctgaggtcaggagtttgagaccagcctgcccaacatggtaaaaccccatctctactaaaaataccaaaaattagccggatgtggtggtaggcacctgtaatcccagctactcgggaggctgaggcaggagaattgcttgaacccgaggcagaggttgcagtgagccgagatcgtgccactgcactcctccagcctgggcaacaacagcaaaataccatctcaaaagaaaaaaaaaaaaggcaattctactacttaagaagagttttgttttaagcctttaaatactctatatagaggtctatcatcacaatttaaatacaaaagagaataatatttagatcaggtcctcagtgagaaaattaacaaagcactaactcataactagtgagaaaactcacagtgataaatgacatcacagagagcaaaaacagggtgtattctatagcagactctccaaagagatgtgcgtgygtgtgtgtgtgtgtgtgtgtgtgtgtgtgtgtgagagagagagagagacagacagacagagagagagagggaatgctctttcatccatttgtctgtcctaatcct

SEQ ID NO: 950023 - DNA, 717 bp, Homo sapiens
tcccaagaccatggggaaatgtctgcaggccatgtcagagaccttcatggcagcccctcccattgtgtccagaatttattccttctggtgggttcttggtctcgctgacttcaagaatgaagccggggacccttgtggtgagtgttacagctcttaaaaatggtgtgtctggagtttgttccttcagatgttcagatgcctccggactttcttccttctggtgggttcttggtcttgctgacttcaggagtgaagccgcagacctttgcagtgagtgatacagctcttaaagatcgtgcatctggagttgggtgtttgttcctcccagtgggttcatggtctcactgacttcaggaatgaagctgcagaccttcgcagtgagtgttacagcttgtaaaggtagtgtggacccaaagagtgagcagcagcaacatttatcatgaagagcaaaagaacaaagcttccacagcctcgaaagggacccgagcaggttgcttggcactgctggctcgggtggccaggttttattcccttatttggccctgcccacatcctgattggtccattttacagagtgctgattggtccactttatagagtgctgattggtatgtttttacagagtgctgattggtgcgtttataatcctttagctagacacagagtgatgattggtacattyacaatcccttagctagacacaaaagttctccaagt

SEQ ID NO: 950024 - DNA, 578 bp, Homo sapiens
cttatcttaggatcagagaaatgtatctttgcaaagaagaaactcaggcaaagaccaatgaaagcatgccaagaaggggcactaaacagcagccatttcattcctgctcccttgggagcatttscaaacccttcaaaacgatgagcagcaacaaggactttacaagcgtcaggggggttacagttttggcatctacagaaccattggggtgtgttattctctatgaccttaaaagaaaagcctcttcaatctgtaaggtcagtgggcatgagattaagtttgaaacccacaaaagcaccatacctttgccaatctctcaaccagagtatttactcagtgagtattaggaagctacatgagaatatgggaaacaaaagaaggaaggtgcaattctgattccacttttccaggcctctgatctgaagactctgaggtgggactaccctcagtggtagtcaggccaggtttgctctgttgaacgcgggcaccagtccttaaatagccatgccttggggtcaggccccaggatagcaaagcctctctttcatgcttaaactcgcattccagagataaccagc

SEQ ID NO: 950025 - DNA, 731 bp, Homo sapiens
ccaaatttaatatgttgaaacttaatcctgaaattcatatgttgattggaggtgtggcctttggaggttattaggactagacaaggtcatcaaggtagagccctatgatggaaccctgatggctttataggaagaggaagaggaagagagacctgagctgacacgctcttgccctctcacgatgtaatgccctctgccatgttatggcacagacagaagtctctcatcggatgcaggcaccatgtccttatacttcccaaactttcctccaaatggatctatagccatttactcaggtaagtgtgtaaaatgtggaagtttggtagaatcattgccatagtacatgctatggtgttttaggatctttcttcctgaggacccagttctctctttgatcaacgggcttcaggtcttaaattggctcaggtctagaaactgaacaagggtaatgatttattcgggtgattatgcttagtctgctgaacctctgtacttaatttcttttgctgcagcaggctgagtattaccctagtccactgcccatttactttgcctgtaaagacacatctcctatattttctatagatctgacccactggaagccactctaaccttgccaggaatcacaattaatcattacaccctggatttcattattcaagcaccaccacatggcytcaattattttggggtgtcatcaactccattgctataagtcaagtaaatagcaa

SEQ ID NO: 950026 - DNA, 566 bp, Homo sapiens
taataatagccattctgacatgtgagatagtatctcattgtggttttgacttgcatttctctgatgattagtgatgtgggtcatttttcatgtttcttggctacttgtatgccttcttttgagaaatatctgtttatgtcctttgcccactttgtaatgaggttatttggtttttgcttaactatttaagtttcggatagattctggatattagatctttgtcagatgcatagtttgcagatatttccttccattctttagtttgtctgtctactccgttgataatctcttttgctgtgcagaaactctttagtttaataaggtttcacttgtcaatttctatttttgttgcaattgatttttaggagttagtcataaattcttacccaaggctgatgtccacaatggtgttttcattatggtagattttctagaaaatcctatatttcttttagggttcttagagtttgagttcttacatttaaatttttaatccatcttgacttaatttktttgtatagtgaaaagcagagctttagtttcattcttctagcatatagctagcc

SEQ ID NO: 950027 - DNA, 550 bp, Homo sapiens
tactatgtgccagaagcaaactaagagacamagatgaataagacatggttcctgccctcaagtttacttcagaggtgggggagagaaagtggcagatagtaacgttgccttaaggtaaacataataattatcatatttattaaacaatctggctgggcgagctgtttggaaggcccaggcgggtggatcacctgaggtcaggagttccagacaagcctggccaacatggtgaaaccctgtctctactaaaaatacaataattagctgggcttgctggctcccacctgtaattcccgctactcgggaggctgaggcaggagaatcgcttgaacctgggaagtggaggttgcagtgagccaagatcatgccattgcattccaccctgggcgacaaggtccccatcagtccccaaaaaataaataaataaaaataatctgtcacattaacttacagttttccagcactatacggtttgtctcctttatagctatttcatttggacttcaagaaaacatgaaaaaggtagaaaatagattcagaaaggttataa

SEQ ID NO: 950028 - DNA, 467 bp, Homo sapiens
ggatgccaaacaactggactcctcatacattgttgatagaaatgaaaaataatrtagatactttggaaaacagtttggcagtttctaataaagttgaacatatttttactctacaatccaggacacccgctcccaggtatttaccaaaatgaagtgaaaacttacattcaccccaaaacctgtgtgtgattgtccgtggtggctttattcttaattgccccaaactggaaacaaacccagatgtctttcagttagtgaatagctaaacaaactgtgtctagccacagaatggagtactgcaaaggattataaaggaaagaaactactgatacaggtaatgacatggatgcatctcggattcattatgccaagggaaagaaacaagacttaaaaaggtacatactggttacatactgtatgattccaattatatgacataaaggcaaaattatagacacagaaaacag

SEQ ID NO: 950029 - DNA, 467 bp, Homo sapiens
ggatgccaaacaactggactcctcatacattgttgatagaaatgaaaaataatatagatactttggaaaacagtttggcagtttctaataaagttgaacatatttttactctacaatccaggacacccgctcccaggtatttaccaaaatgaagtgaaaacttacattcaccccaaaacctgtgtgtgattgtccgtggtggctttattcttaattgccccaaactggaaacaaacccagatgtctttcagttagtgaatagctaaacaaactgtgtctagccacagaatggagtactgcaaaggattataaaggaaagaaactactgatacaggtaatgacatggatgyatctcggattcattatgccaagggaaagaaacaagacttaaaaaggtacatactggttacatactgtatgattccaattatatgacataaaggcaaaattatagacacagaaaacag

SEQ ID NO: 950030 - DNA, 642 bp, Homo sapiens
aacttgtgtttgcgcctcagtttcaggtaagatggaagtgctgatgagtgtgtcattgacctgttgggatgggccattgtggtaaagcccaggaaggggactagcacagagcgatgagacaggttaactgtatttgcagagggaatgagctcctttcagggcccacggctttccctgtacagtccactgaggtgtgttccaagaccttagcaggtgcctgaaatctcagacagtaccaaaccctatatatactatttattttcctctatgtacatacctatgccaaagtttaacttgtaaattaggcacagtaagagattgacaataataataaaatataaagcaattataacagtatactgtaataaaagttatatgaatgtggtgtctccctctctcaaaatcttattgtactgtactcacctattttctgatcgtggttgatgcaagaaactgaaatcaaggctgggcacatggctcacacctgtaatcctaacactttaggaggctgaggtgggcagattacttgatcccaggaatttgagaccagcctgggcaccatagcaagaccctgtctctacaaaaagtacaaaaattagctaggcatggtgacacatgcctrtaagtcctagctactctgga

SEQ ID NO: 950031 - DNA, 634 bp, Homo sapiens
agaacatttacatcactccccgcattcttcatgttgtccttttatagccatgccatctcgctttccctcccatccctccttgacccaactagtgtacttctctctggtttttaaattttatcatttccaggatggtatatagatggaatcatacagaatgtaaccttttggaattggcttttttctctcagcattgttctctggagattcctccaagctgctgcatgtatcaacaggttctttcctttttattgctcagtggtattctatagtatagatgcaccacagtttgttcaaccattcactcattgaaggacttatgggatgtttcttgttttgtactattataataaagcttctatgaacacagctttttgtgtgaatatgttttaatttttttctgggataaataggagtgtgaatatgttttaatttttttcttggataaatatctaggagtgtgaatgtgatttaatttttttctgagataaatatctaggagtgcaatygctaggatgaatggtaattacatgtttagcttttaaagaacctgcaaaactactctccagaatggctgcaccattttgcattcccaacagcaatgtatgagtgacccagtttctctgaattgttc

SEQ ID NO: 950032 - DNA, 547 bp, Homo sapiens
gagatcttaccactgcactccatcctggggacagaasaagactccgtctcaaaaaggaaaaaaaaaaagaatattatcttttgttgaggtgacaggaggagagaaggtgccttgtggggctggtgtcgcctttaagctgagtggactgttggctgtcctggggagatggggaattcagcacagtgcaggcagcagctagggaaggagctggagctggactgtggcctcccttgggtctggcttcaatcctgccaagaagggtttaaggaaaactgccaggctgcagtgagtaggggagaaagggcccccactcactgcgtggtgcttacccaggcgctctaacgggatgttctgctcagtcaagggatctgccagagacacaaacggggggagtggagtacccctccttccagccactgcttcattcctggaatttctgggtggtttgtgggtatgactctgatctgccccttggcctcttgctcagatctgagttctcctttgatacttgtgaggaagggtagagcctagagaacaccccgacccc

SEQ ID NO: 950033 - DNA, 594 bp, Homo sapiens
ggcatctgttcctccacagaggagaaaggacacgcttgctctgttcatggaattctctccccaggagtcatgtgtgttcctggggccagcctgtcttcagagtctctgcccagacccctgctcaggccccactgattcaggatgggccgtgctgggaggtgagcagggctgggcaagctgaagacgtctcttgtcaatttcttctcattgtggtaaagtatacggactataaaattgaccattgtaaccatttttaagtgtgcagttctgtggcattaggtacattcacactgttgtgcaaccatccccgccatccatctctggcactttcttttcttttcttttctttcttttttttttgagacagagtcttactttgtccaggcccggctaatttttgtatctttagtagagacggggtttcactatgttgggcaggcgggtctccaactcctgacctcaagtgatctgcccgcgctcagcctcgcaaagttctgggattacaggcrtgagccactgctccgggcccatctccggcactttctatcttccaactgaaatgcggcatccattcatctcggggcccttcttgct

SEQ ID NO: 950034 - DNA, 659 bp, Homo sapiens
ggcgcctcaggcagtgcagggtttatcccctcagacaaaggtggaaaggctgaccgcagcgtgggtcggggaggagacgttgccactactggggatggggaacctgtttcttctggcaraaaaggtttatcagcatttacaagctcagtgtccctagcttcagcagggtcctcccacacttccccattcttttccaatcaatgccctcactttaataagtagacacctagcgaggtgtctgtgcatgcaccttcattgcaggtcagccacttgcatgagaagagcttgtgtctgtttttccacaatttcagctctttctctacaggagataagactcactcatgataatcttagcagatttgaggctcagtatctgcttctgaagccggaagttagaatccctgagttcatcattttctttcatcactttgtccggtgaacttagaagcaaccaatcagcttcattatgttccttggttctccacatatagtcagaggtattcagtctagagtcactgaactcccctctcaggagcgctgaatcaggagtgtcaaatgcatttattgtgcataactctccaaatagctcatgccaaggactcccagtgttctccatactattagaagtagagtccttagcattttgggatctaatcata

SEQ ID NO: 950035 - DNA, 672 bp, Homo sapiens
aaaacagttgagggcaggtcaccaggctgttgcaggctccattaagaaatggctctgagagggttactttagagcaagggaagggtcttctgttgcaggggctctgtgcctggccagcaccacctcccccgccttttttttttttttttttttttgagatggagtctcgttctgttgcccaggctggagtgcagtggcgcagtctcggctcactgcaacctctgcctcccaggttcaagcgattctcctgcctcagcctcccaagtagctgggaccacaggcgtgtgccaccattcctggctaacttcttgtatttttagtggagacgaggtttcactgtgttagccaggatgatctcaatctcttgacctcgtgatccacccaccttggcctcccaaaatgctgggattacaggcgtgagccactgcgcccggccagccagtcccttattttatggaaaccccagcctattccagccacccaagaaccttcgttaagtggctctgaagtgggaatggctacttaatttgcagggatcagcacaaaatgaaaatcaataattttcagaaattaagattcaagatggtaatagagcattcgagtgagcattggggacccttctgagcacagggccctgtctgtgcagttwgcacacagcccaggtctggggag

SEQ ID NO: 950036 - DNA, 621 bp, Homo sapiens
taaggaggctagggatagaaaggaactgaggcagcagtagacaacttgtatgtgagggttggcrggaaaaatgaccgagtgtgaaagctagaagggacagaagggtcataaagtccccatttctcttcaaacagttgcaggctcacaatttgctaactgctttgctggggtgagcagaaacaggcgtggtctcaaacttcatcaagcatctacacttgtaaagaaaatagatagtaataaatcatcctccaaaattgtataaaatggcagctcaggtaaatggtttgaaggagaggtccacggggtgttgagaagctataatggacatggacctagttagaggaggtttctctgaggacatgagatctgaagggaagaaggctttccgtggtatggcaacaagtgcaaaagccctgtggtaggaagggacatggagaccagtgagagtatagaagcccaaagaaatatggcaccaggtgaggcaggaaggggctggccatgcaggactgtgagcactactatgggatttttgtctgtattttaagagtactgggaagccagtcgggcatggtggctcacgcctgtaatcccagcactttgggaggtcaaggcaggcggatc

SEQ ID NO: 950037 - DNA, 584 bp, Homo sapiens
atcccagcactttgggaggccgaggcaggcggatcacgaggtcaggatatcgagaccatcctggctaacacagtgaaaccctgtctctactaaaaatacaaaaaaattagccgggcgcggtggcaggcgcctgtagtcccagctattcgggaggctgaggcagtaaaatggcgtgaacccgggaggcggagcttgcagttagcagacgtcgtgccactgcactccagcctgggcgacagagcgagactccgtctcaaaaaaaaaaaaaaaaaaaaaaaaaagactcaacacaataagctttgaatatatgtgccttgcacattaaaaaggcagtcagatagaattgaataattattataaacctatacccaaatgactgtctccgtaaatccatatcctatatcctaggtatggagcaaaaatatatttatcattaagaagaagaaagatcaatactggctgcagctactaaggagggaacacactkgaaaacccctacttaaaggagaaggaacactatggtggttatttgagcaacaggaaacagatgatatttaacatggagaagacaatattttgtgagt

SEQ ID NO: 950038 - DNA, 597 bp, Homo sapiens
agcctcacaaaatctttcttccattaatcaaaactttacaaaggagataaacagtgatttttacctctcattcagccgatttgcatagagagagagagagaaagagagagagascagaagcctagctagtaagaaatccttccccttttgccagtatgccaggtttctttgttctctttccttgacacaccctaatgacccggctggctgcactctagccctgggggccaagccacaacaaaagggaaaagtattttttttccattttggccagagcaaaatacatgttacaaaacatagacattagccactatgcttagcacccaatatcaaactggcaaggctaaaacttgtccccagttggggcccatcatagttaatccaacctccaaccaggagttttaacctgtggtctttgggcaagatggtctccccgagtaatagaaaagataagggtaagaagagacagaaaagcattgcctgtggcagggtggggaaggtgaggtgttcaagggggccagagaaaagacccaccaattgcagctgacactgaaaagctcaggctgttgagtgtaaaaggcagattattccaaagag

SEQ ID NO: 950039 - DNA, 772 bp, Homo sapiens
cagaccttaacgtatgatacatataaaataatttaactttttcttgtaatgtcatgactagtctcagctttttggaagcacttccttcctcaccagtggcactttgtattkgtcccatagtgttattctaggtttatggtattgcatgagacactaacactataagaactgcaagagatcatcttttactacaatatgcaatttactggagagacaaactgctcatgcagagatgattagtgtgaaatggtgttttaagcagattgagctcactgcaatagcaatgggagctggctatgaaattattacggtaatatagtatacactaaagttaactttatgcagttgtgatttaatgctacacctttacatttgtttatatttttctcagttgtaaatgtttccatgtctagtctgtgtttgtgcataagttttgataaattttcactttttataatagatttgtatacattttattatagcaaatgatgaatagtatgtacatacatttttgcatctaggacatacctgaccttttttttaaactttttaaaaatatttctagactacaggtttatatgtatatttttttcaacgtgtcacaaatcttcaaaaaatcttccagtatatttattgaaaaaaatccacatataggtagacctgtgcagttcaaatatgtgttgctaaagtcaactgtattaaaatatgggtcagaaaactttttatataaagagctagataataaatattttagactttgtgggctgtatgt

SEQ ID NO: 950040 - DNA, 687 bp, Homo sapiens
catccctttatgattaaaatcctcagcaaaatcagcataaaagggacacagcttaaggtaatgaaacccatctatgacaaacccacagccaacattacactgagcagggaaaagttgaaagcattccccctgagaactggaacaagacaaacatgcccactttcaccacttctattcaacatagtactggaagtcctagtcagagcaatcagacaagagaaagggcatccaaatcagaagagaggaaatcaaactgtcactgtttgccgtgatataatcatatacctacaacaccctaaagactcatccaaaaagctcctagagctggtaaatgaattaagtaaagtttcaggatacaaaattaatgtacacaaatcagtagccctgctgtacaccaacagcaaccaagctaagaatcacattaagaactcagcctcaggggggtggggccaagatggccaactagaagcaaagccatttggaggttcccatcagaaaaaaaaaaacataataaacatgtgaatccatcactggccatcaaggtatccaggttctctcatcgaaattgactagaaggctggcrtgagccacggagaggaggaagagtggtgtggtgcggggcccacctgagagccacacggggaagaggaaccccatcctggccgccaagggaggcggtgagtgagc

SEQ ID NO: 950041 - DNA, 583 bp, Homo sapiens
acctcccctgagtccctcctacaacaygtgggaattctgggagatatgattcaaattgagatgtgggtggggacacagccaaaccatattattctgcctctggcccctccaaatctcatgtcctcacatttcaaaaccaattatgccttcccaacagtcccccaaagtcttaactcatttcagcattaacccaaaagtccacagtacaaagtctcatttgagacaaggcaagtcccttccacctatgagcccgtaaaatcaaaagcaagctagttacttcctagatacaatggggattcaggtattgggtaaatacagccattccaaatgggagaaattggccaaaacaaaggggttacagggtccttgcaagtccgaaattcagtggggcaatcaaattttaaagctctaaaatgatctcctttgactccaggtctcacatccaggtcatgccgatgcaagagatgggtgagcatggtcttgggtagcttcacccctgtggctttgcaggctacagcctccctcctggctgctttcatgggctggcactgagtgtctgtggcttttccaggtacacagtgca

SEQ ID NO: 950042 - DNA, 558 bp, Homo sapiens
acttaaactctcgaccgtgacacctagaaataacccggtyaagagaaatgcacaacagctatccatcctgccctggttcaagcaaaaaggaggacaaaccaggcagtcagtcaatgtgttttagagttcagaattaaaatcacacaataactccaggcccaaggcattaaggcagaaaaggcctataaaccctggagaactgaagacaaggttttagaccatactgaaaactcaagactgtccaactgatgtcacaaggcaccagtgcttgggcctgatttcttatctgtgtgttcccatcaccccatccctgcccaaagccattcgaggatgcttatgtttctgggctgctgtacatatttgtgcatgtgtgtttaagagaaagataaagaaacagtcaaggcaggaaggcactgaaccaatgtctatgggtcaatgcaaatggcctgacaagaaaaactgccataggctaatggtttttcagaacattttgcaaggtatgtaactggaaatgcctctagcctttagccacccacatctctcttctcattctgtcct

SEQ ID NO: 950043 - DNA, 629 bp, Homo sapiens
ggagtcaccacttggttaagcttatgataatccactgtccttctccaagatccaactgtcttctgcacaggccaaataggagagttgaatggggatgtagtgggaattgccacccctgcatctttcaagtccttggtgttggcactaatctccacaatccctccagggatgcaatattgtttttgatttactgtttttctaggtagagggagatctaatggtttccatttggcattcccaccataatagccctcactctaccagtcatggagccaatgtggaggttctgccagcttgcaagtatgtctatgccaattatgcattctggcactgcagaaatgaccacaggatgagtccggatacactgtaagtcagatccaagctaaagctccatgaattacctgatctctataagcccctactttaactggaggaccacaatgaccttttgggtcccctgaaatcgatgtcagttcagagccagtgtccagtaatccctgaactgtctgaacattttcctttccccartgcacagataccctggtaaaagactggaggtctccttggggaaggagagagaaaaattaacagtataaattgttggtagtgtagtagggtccttcctcaag

SEQ ID NO: 950044 - DNA, 599 bp, Homo sapiens
gcactattcacaatagcaaagacttggaacctacccaaatgtccatcaataatagactggataaagaaaatgtggcacatatacacaatagaatactatgtagccataaaaaagaatgagttcatgacttttgcagggacatggatgaagctataaaccatatttttaagcaaactttcacaagaacagaaaaccaaacaccacatgtttctcactcataagtagaagttgatcagtgagaacacatggacattgggaggggaacatcacacaccagggcctgtcagggagtggggggctaggggagggataacattaggagaaatacctaatgtaggttatgggttgatgggtgcaacaaaccaccatagcacgtatatacctatgtaacaaaactccacgttctgcacatgcaccccagaacttaaagtataattaaaaaaagaagcaataaaaacaatctaaatatctaaaaaagaaaaaagaatgaggagcaaatatgaatatatggaaagaattttgtgtaagagaacttaattttttttagatttaagatttaaatacrgaaaattgaaaactaaaaaccatgatttggcagt

SEQ ID NO: 950045 - DNA, 635 bp, Homo sapiens
tccttgttctgaagtccactttgatactactatactaagccagctttcttttttcagtgtttgcattatataycattttctctcttttacttttaacctatctgtgtatttatgtttaaagtagctttctttgttaacaacctatatttgggtcttttaaaatcaaattaaatttaattaaaaaaatttttagagacagggtctcactctgtctcccaggctggaatgcatggtgtgatcatagctaactgcagcctctaactcctgggctcaagagatcatcctgcctcagcctcccaagtagccagactacaggtgcacacccttttcccaagtaattttttactttttgtagaggcgggatcttgcaatgtcatccaggctggtcttgaactcctggctccaagcaatcctcccaccttggcctcccaaagtgctcagattacaggcatgagccaccacacttggccagatattttttaaaaaaaaaatctaatatgagaacctcttccttttagttggaatatttagactatttacatttaatgtaattattgatatagttaggtttaaacctactatcttgttgttttctatttcttatctttcttcctttttccctttttttcctttac

SEQ ID NO: 950046 - DNA, 635 bp, Homo sapiens
tccttgttctgaagtccactttgatactactatactaagccagctttcttttttcagtgtttgcattatataccattttctctcttttacttttaacctatctgtgtatttatgtttaaagyagctttctttgttaacaacctatatttgggtcttttaaaatcaaattaaatttaattaaaaaaatttttagagacagggtctcactctgtctcccaggctggaatgcatggtgtgatcatagctaactgcagcctctaactcctgggctcaagagatcatcctgcctcagcctcccaagtagccagactacaggtgcacacccttttcccaagtaattttttactttttgtagaggcgggatcttgcaatgtcatccaggctggtcttgaactcctggctccaagcaatcctcccaccttggcctcccaaagtgctcagattacaggcatgagccaccacacttggccagatattttttaaaaaaaaaatctaatatgagaacctcttccttttagttggaatatttagactatttacatttaatgtaattattgatatagttaggtttaaacctactatcttgttgttttctatttcttatctttcttcctttttccctttttttcctttac

SEQ ID NO: 950047 - DNA, 659 bp, Homo sapiens
gaggggaaacagggtggcaaatarttacagtttacttttattattgagatgaaatttacgtaacataaaattatccatttttcagtgggagatttgtggcattcggcaccatcacggcatagcacaggcatcgcctctgtgtagttccaagacatttccacggccccaaaaggaaaccccatacgtattcaacagttgctccttgctccccactcccccggcccctgggttctgtctctgtggcctcgcctcttcgggacatttcacctggacctttgtctggcttctgtcactcagcatgaggtcttctgggctcctccacactgtggcatgcaacaggccccgttcctgagaggggtgaatagtgttccatcacccgttcatctggggacggacatgtgggtgccttccaccctttggcgattacgaaaagtgctgtcagggacattcccgttacaaatatctgagtctctgctctcagttctcttgggtacgtaactaggccccaggcgtgacattgctgggtaattcttttgttttttgaggaactgctgcgctgttttccacagtggttgagtcatgttccattcccaacagcagtgcacaggggtctatcccgtcctccccgccccgtgttattctctggtgtgtgtctaact

SEQ ID NO: 950048 - DNA, 659 bp, Homo sapiens
gaggggaaacagggtggcaaatagttacagtttacttttattattgagatgaaatttacrtaacataaaattatccatttttcagtgggagatttgtggcattcggcaccatcacggcatagcacaggcatcgcctctgtgtagttccaagacatttccacggccccaaaaggaaaccccatacgtattcaacagttgctccttgctccccactcccccggcccctgggttctgtctctgtggcctcgcctcttcgggacatttcacctggacctttgtctggcttctgtcactcagcatgaggtcttctgggctcctccacactgtggcatgcaacaggccccgttcctgagaggggtgaatagtgttccatcacccgttcatctggggacggacatgtgggtgccttccaccctttggcgattacgaaaagtgctgtcagggacattcccgttacaaatatctgagtctctgctctcagttctcttgggtacgtaactaggccccaggcgtgacattgctgggtaattcttttgttttttgaggaactgctgcgctgttttccacagtggttgagtcatgttccattcccaacagcagtgcacaggggtctatcccgtcctccccgccccgtgttattctctggtgtgtgtctaact

SEQ ID NO: 950049 - DNA, 635 bp, Homo sapiens
cagtactaaaaatatataaaacagctctagctaattggctaaaatataaaagcacttaaatcggataatcaaaagaaaagactagtcaaatgctttttcaagttaatgtgatttaagtaaaatttttaataaaataatctggctttaaaattattggtaaaataatattagagatgtcttaaaaattgttagcatttttgatctactggttttgtgctcactcctgcagaattctataagccataagggttataaaactatagcatttttgatcaagtggttttgtgcttactttggcagaatactataagccataagggttataaaactataaaatccagctcaagacaaaatgatctttgcttgtataattttcgacaagtaagacatggaatattcttggtttaatgaaaacagctaaatcccaagttattggtaaaaatacccttatatttaaccttaagtttcttacttaagtaagcacctaaaattcacagctataaaaatagttaacagggaaataaagaatgactatcacagtttttgtaaataatctaggtaaattatttaataaatcaatcgatcaggtaaatgtaatrgaataaacaaatgcctgtaaacaaacatgttatata

SEQ ID NO: 950050 - DNA, 540 bp, Homo sapiens
tcccaatatccctcataagyacagatgcaaaagtaataaacaaactactagtaaatcaaatccaacaatatgagaatacgtcatgaccaagtagagatatccaggaatacacaactggtttaacattcaaaataaatgcaatttaccatcttaatgttataaaagaaaactacatgattatttaaacagacacaaaaattgtatgtgataaaatccaacatccattactgattaaaaaaaaacaaccctttataaattaagaatagaaaggaactcctcactctggtgaaacacatcttatgagaaacctaaagctaaaatcatgctaaataatgaaagactgaatgctttccctccaagttcacaaacaagagaaggatatctattctcaccacttctattcaaccctgtattggaagttctagccagtgcaatagagcaaaaataaataaaatgtattcagattgtgaagcaagacttaaaatggtctttatctgcagatgacatgattgtctaattagaaaattcaatagaatctac

SEQ ID NO: 950051 - DNA, 716 bp, Homo sapiens
ggaataatgaatgcacttgagggmagatgagaaggtgccctcaaaagagctctgggaatagcaccaagctgaagcatgtgtgcaaagggctcttctgttttctggggctccagcctccctcaaggttgatgggccttctccactccgccccatcctgcctgccccgccggcccctctccttgcctgctgtggcaccactgagccaccactggaaaatgacctgactgtggtcttctttgacaaactcagtaacaaagatgcccgcccaacagtggacctcatggtcgcttaaagagttgagaagccacctccccacatcttcaaggggcacaacagacctgggcgttttagtgtaatatttaatttattagaatgacaaatgtaaaagcccagtttcctagagccttttttttgtttttgttttgttttgttttgtttttttttttgtagagacagagtttcgctatgttagccaggctggtctccaactcctggcctcaggcaaattctctgttacccaggctggagtgcagtggcgcaatcatagcttactgtaacttcaaactcctggcctcaagggatcctcccccatcagcctcttccaaaacactgggattgcaggcatgagccacctcacccagccctttgagtagtttttgactggcttgagttgaaaggactaaattccccttaaactattagtgccatttatgtta

SEQ ID NO: 950052 - DNA, 632 bp, Homo sapiens
cactgcaacttctgcctcccaggttcaggcgattctcctgcctcggcctcctgagtagctgggattacaggtgcctgccaccacacccggctaatttttgtaattttagtagagacggggtttcaccatgttggccaggctggtctcaaactcctgggctcaagtgatccacccgccgcgccctccgaaagcgctgggattacaggctccagcaaccacgccaggtcgcctctctcgtttttattctctcttcctctatctgtcttttttctctttctccgtctctctccctctctctcgttctgtctcccccgcctgtctccctccctccctcttccactctccctgcgtctctccctgtttctttctttccccttcttctcctgtctccgtctgtcccctctgtccctctctctgttcttttttctgtctctccctccctttctctgggcctctccctccctctctgtcttctgtctccccctctccgtttccctccctatctctccctccctctctccctccgtctctgtstgtgtctctttctctctgtctctccccacttgtctttctacctctccttccttctctctctgtgcctcttcttctccccgtccctccacgtcccccgt

SEQ ID NO: 950053 - DNA, 746 bp, Homo sapiens
caggctgtagtgtagtggtgcagtcttggctcactacaaccccacctcccaggttcaagtgattcccttgtctcagcctcctgagcagtagctgggatcacaggcatccgccaccgtgcctggctaatttgtgtatttttagtacagacggggtttcgccatgttggccagacttgtctcgaactcctgacctcaagtgatccacctgcctcagcctcccaaagtgctgggattacaggtgtgagccaccacgcctggccttgtccctgtatttttaaatattacttatttatttaattaattacatatttatttatcttagagactgtgtctcactctgcttcccaggctagagtggagtggcacgatcatagctcactgcagccttgaactcctgggctcaagcaagcctcctgtcccagcttcatgagtagctgggactacaggcatgcaccaccatgcctggctaatcttaaaaattttttgtagagatgaggtcttgttgtgttgcccaggctggtcttaaactcctggcctcaagctgtcctcccactttggcctcccaaagtgctgggattacaggtgtaagccactgctctgggcaatgttatttatttattaaacccttttatttatttatttattttttgagatagamtctcactctgtcacctaggctagagtgcagtggcacaatctgggcccactgcaacctcccaggttcaagcgatcctcctgcctcagcc

SEQ ID NO: 950054 - DNA, 563 bp, Homo sapiens
taaggtgaaaatgaagaattatatgctgaattaataaagacacataaacacaaggtacatcaaccctgggtacaagaggtgtcagtgatagcatttggtatttttctctaaactcctcattacattatagtcacaaggtcaggaaaaagtatggcaaataggatagttaaaaaaaattcagcaaggaacaatgtcagtaccatggataactaaattagaaacttgatggtaaggtcatagataattagcaacaaaaagaaaagagggagtgttgggaggagaagaggaaggagaggaaatagtagaagcaactgattctggaaataaagagatgaaccagtcatggtggctgacacctgtaatcccagaactttgggaggccaaggctggaggatcacttgaggccaggagttcaagactggcctgggcaacatggcaagtccttgtctctacaaaaaataaacaatgagctgggtgtggtggtgcgygcctgtagtcccagctacttgggaggctgaggcatgaggatcacttgagcccaggaggttgaggctgcagtgagc

SEQ ID NO: 950055 - DNA, 575 bp, Homo sapiens
agtaagaaggtaaccatttgcaagattagaagcaggccattaccaaaacccaaccatgctagacccggatcttatgcttcagtcttcagaactatgagaaataaatgtcagttgtttgagttacccagactttgatatagcagcctaagcagactaatacaatatacttgaatttaataatttgattaaaagtttccaaggacatattaacgtgcgaaggcaggtctagtgtaggagtttgaaatacattactcactagtggagaatgcctatccctggtcctgttgctattgactctgcatgtcatacatagagtctgcttagattcaggatgatgaagaaaggaacatttatacttttacttatgatatgccactagaatacacttcatgtcaacacgaggcaaattaaccaagagatcagactccaaattctggaaataatcatcaaaagctaaatggtttgcttccaattcaacacttcaaagatgagcaaattagtaagccgaaataaaagtttaaaaacctcaycagcgtagatgaaagagaattttccaagattttgaaaaatttaac

SEQ ID NO: 950056 - DNA, 567 bp, Homo sapiens
  misc_feature 253: n = A,T,C or G
acctgaaactggtgacctgcttcctgaggagatctcaggagttgggcaaatgggctcakgcatgtgcactaaggggcaaaatggatgatgaccttcctctaggggcactggatgggtaaggggaaaatgcctcaagtgagcatgcgcacacctttattaaacataccatgcccatgctcccctctcaatgctggcaggccactgtgcatgcacacaacccaccccagggaagaatcggggagaagagatgcanaaaccccaagctgccagtgaataaaactccaagccacaggtcaaacagtgcacttgatctctcaagtctcctgcttgatcctcttccaaatgtactttacttcctttcattcctgttctaaagctttttaataaactttcattcctgctctaaaacttgcctcagtctctcactctgccttatgccccttggtcaaattctttcttctgaggaggcaagaattaaggctactgcagacccatatggattcgctgcctgtaacatttccacatttatatttccagttcagattccctcttggaatttcagactag

SEQ ID NO: 950057 - DNA, 749 bp, Homo sapiens
ttctccttagctaagggtacgtagatatcctctcctattatgtatctgttggtgtgtgctctgagaatactaaagagtaattttagtattagcccaagtactggatgactgtgtattayatatgcctctgttctcattcctatgcctgctggatgggatggacaaggagctggctttgaggacggaagtcctgccatacctagccatgtgatcttgggcaaccatatgtgggcttcagttttctcatgggtaaaattaaataaaaaggtgaatcactgaagtttcttctgttcttatattgcatgattttaaccttttaagtcaacgtgtattgaactactgatgggccagatactgtaccatgtgcctcccaggcattctctcatttgctcctcccagcagccctcagaagcagatacaattattcatcccattcacaggtgaggacaccgaggcctagagagagaaaagtcaagctctgcatctcatgcccagacatatgcctgccatgtgcctccctataacaggtcttaggtgttactttttcccttccttctttctttctctgccttttttctttagtattaaaattattgtttttatggaaatactatttgctaattgtttaaaaaatcaataaatacataacagcatgaataacaaaacaaaactaatctacatcatcaccatccaggaaaaacttactaatattaggtaagcattattccagataccttgctatacacgtg

SEQ ID NO: 950058 - DNA, 442 bp, Homo sapiens
tattccaaatccaaagactaatccactcatattttattacatgaaattccattaatattagcaaaaatctaaaattcctagcagaatggcaatacaacaagaaacataacataaattttaaattatttatatttgcaattttttcctatatgttatttaaaaatcacttaggacagtaatagaattagcacagtttcctttatattcttttttgttgtttgtttttttacgtaatggattttcttctctagttttactaagggataattgacaaataaaaatggtatgtatttaaggcatataatgtgatgttttgatatacatatacattgtgaaaggaatcacaatcaagttacttaacacactgatcatctcacagttactgtgtrtgtgtgtgtgtgtgtgtgtgtgtgtgtgtgtgtgtgtgtgcatgcgcgcgcgc

SEQ ID NO: 950059 - DNA, 205 bp, Homo sapiens
cttggagtgagtgctcagtatagtcgtgttaatagaaacccacacgtgcctgcctagtctgrggccccagccacatgcttctgccctcctgggggtgtgtggacctgagcgcctgtccagcggggccaggagacggactgagaaggggtaggggaagctgtagttcttggccagcgagaggcagtcccaggggctggggtgagga

SEQ ID NO: 950060 - DNA, 563 bp, Homo sapiens
ggctgaggcaggagaatggcgtgaacctgggaggcggagcttgaagtgagctgaaatcatgccactgcactccagcctgggygacagagcgagactccgtcaaaaaaaaaaaaagaaaaaaaagaaatgaatttaaacagaaaccctacacccttcatgaaaatttattcaaaatggatcaaagacctaaatgtaaaacacaaaaccataaaattattttttacaggataattacagccactatttttacaggataaaatggaagaaaatataaatgaccttaggtttggtgatgactttctagatacaataccaaaagcatgattcatgaaagaaaaaaacacaaactggacttcattaaaatttaaaacttcgctgcaaaaggcactgccaagataatgagaagacaggtcacaacctgggagaaaatacttgcaagataaataactagtagtaaaggactgttacccaaaatgcacaaagaactcttaaaactcaacgataagaaaatgaacaaattcattaaaaatgggccaaatacatgaacagatggcaaataagca

SEQ ID NO: 950061 - DNA, 605 bp, Homo sapiens
agctcacgactgtaatcccagcactttgggaggccgaggcaggtggatcatttgaagtcaggagttcgccaccagcctgactgacatggtgaaaccgtgtctctactaaaaatgcaaaaaagttagctgggcatggtggcacatgactataggcccagctactcaggaggctgaggcaggagaatcgcttgagcccaggaggtggagattgaagtgagccaagatcacgccactgcactgcagcctgggtgacagagagagactccctctcaaaaaaaaaaaaaaaaaaaaaaaattctcgatgtcactgttttcacatctctggcaaatgaactgtgtttttcatacttgcctgaatggtgaataaaacaggttcttcccacactctcccattcacaataaagccttggtttgtcccatctgtggccatgaaagtaaagcagtcagtctgggagtcccctcctgagtgccgataggccacawtcttgctgtccacatcctgctgggtgaaattgtgttgaagtagccctgtcccccacaggtagagctggccatgctgggggagctgaaccaagaggaaggtgaggttctccgcaggtgtatca

SEQ ID NO: 950062 - DNA, 759 bp, Homo sapiens
agaattcatcacctactgactaaagagccctagagccatgaataatcagcagcagtacccaggtagtatatgctgtggatatactacacagcatatactagtttgtaaacctagattacaacacccaagtccctgtgaatacctcgaaagctttcccaagaaggaagggtacaaacaagcccagactgtgaagactacaataaatacctaactcttcaatgcccagatgctgacaaacatccacaagcatcaagaccatccaggaaaatatgacgtcaccaaaagaactaaataaggcactagggaccaagtctcaacttgggtgagactctgaaacatgctggcttcaggtgtgacccagcacattcccagcagtggtggctacaaggagagactccttcaagcaaagggaagagtaaacaggattttgccttgcagcttaggtaccagtgtgaccaccgtggagtagagcaccaggtgggctcttggggtccttggttccaagaccgggctgttggatggcatttctggacctgtcctgggccagaagggagcccaatgccctgaagggtgagtcccaggcatagcagtattcaccacaagctgactgaacagcccttgagccttaagcgaacatcagcagtagcttggcagtactccrgtgggcctatggcgatggtggcatggaaagaagctcctctgcctgtggaaaggggaggtaagagtgggaagaactttgtcttgtgatttgggtgccag

SEQ ID NO: 950063 - DNA, 634 bp, Homo sapiens
atttatacatttaacttgtcataggtatgtatgtacagaaaaaaccccagtgtatatacagttcagtattatccatggtttcaagcatccactagggatgttggaatgtatctccatgagtaagagggggctctgtatttttatggatagttgtacggaagtatgtctggaggacaaaaggctacggtctaatggtaatagactgcgggagtggggggtggaatttagcaaggcctgtttgttcagtcttctcttgtcttctttcctttcttccgggtatagggagggcccttctgaaatgagagttttacgaccgattttcaggggaaggtcagtgaggtttaatggcccatttcaggggaaagagggtgagggaagatcagagcgtgaccttctgcttttacggttttctcaatttccttcaagtctaaaatatatagtatgacaagatgacgtattctggggtagcgtgttctgaactccgtcagtatcctcatttgtaaactggggataataatgttacctaactcagaaagatcttgtgatcacgaagttcatacttgtaatacactcagaacagtggctggtaattgcatcagcaasaaatcccatctgaggaaggggaaacaacagg

SEQ ID NO: 950064 - DNA, 528 bp, Homo sapiens
gtttggaacttcctagaaacttgttgaatggctttgaccaaaatgctgatagtgatatggacaataaagtccaggctgaggtggtctcagatggagatgaggaacttgttgggaactggagtaaaagtcattattgctatgcaaagagactggtgacattttgtccctgctctagaggtctgtggaactttgaacttgagagatatgatttagggtatctggcaaaagaaatttataaatggcaaagcgttcaagagatggcagagcataaaagttcagaaaatttgtagtctgacaatgtgatagaaaataaaaacccattttctgagaagaaattcaagccagccgcataaatttgcataagtaatgaagagccaaatgttaatcaccaaaacaatgggaaaaaagatctgtagascatgtcagaggtctgcacagtagcccctcccatcacaggtccagatacctaggaggagaaagtggttttgtgagccaggcccagtgtccctatgctgtgtgcagcctagg

SEQ ID NO: 950065 - DNA, 534 bp, Homo sapiens
aggggccaatatagagcttgggccatggcttcagagggtgcaagcctcaagccttggcagcttccatgtggttttgagcctgctagtgcrcagaagtcaagaattcaggtttgggaacctctgcctagatttcagagtacatatgcaaatgcctggatgtccaggcagagttgtctacaggggcagagccctcatggagaacctctgctagggcagtgtggaagggaaatgtagggtcagagttcctacacagagttcccactggggcattgcttaatggggctgtgagaagagggcttctatcttccaggccccagaatggtagacccactgacagcttgcaccatgtgcctggaaaagccacagacactcaatgccagctcatgaaatcagccaagaggatggctgtaccctgtaaagccaaaggggcagagctgcccaagaccatgggaacccacttcttacatcagtgtgacctggatgtgagacatggagtcaaaggagatcattttggagctttaagatttgactgcc

SEQ ID NO: 950066 - DNA, 469 bp, Homo sapiens
agactacaatacagggaaagggtgagtgagagaccctcagtagtccacattatcaccatggactcctgcaatcctagccatgggagagctccttgacccatggccaggtgcggtggctcacacctgtaatcctagcactttgggaggctgaggcaggcagatcacttgaggtcaggagatcaagaccagcctggccaacatggtaaagccctgtctctactaaaaatacaaaaattagcccagtgtggtggcaggcacctgtaatcctagctatttgtgagtctgaggcaggagaatcactcaaacccaggaggcagaagtcgcagtgagcccagatcgcatcattgcaygccagcctgggcaacaagagcaaaactccgtctcaaaaaaaaaaaaaaaagaactttgtcttcaatagactgaatgctatcctgcaacccagtagcaccagggctgaggtgcgggagaa

SEQ ID NO: 950067 - DNA, 768 bp, Homo sapiens
gcagatgagggcaggacatctccaaagcctcgttctcagacaatcacttatttgacctgtctctgggttcccrgaaagatcacacttgcaagcgttcccggaaagatcacacttgcaaggctgtcttcactgacctggctcagaactcacccgtgcaggaggccttttccccatgggcatttgtcaaaaacatttagaggcaattgtttaacttcatggtttccttggaaggaaacccactagctgcccactaagctaactgagcagactttattggccacatatgacaaagaatacagacttcacaaaattagcgcagaaaagtccctaaacaaacagtaacaactacaagaagcagcaataaaaaatcctggagagggagtagaatctaattccagaggggccacattatattatttcaaatgcccactttcaacctatcatcacaaaacacgcaaagaaacaagaaagtattgcccatatacaacaaaaaaagcaatcactagactgccctgaggaagcccagacactggacttaccagacaaagacttcaatcaactattttaaatatgcttagagctaaaggaaactagggacaaagaactaaaaagaacaaggagaataatgtctcaacaaatagagaatatcaatagagaggtagaaattataaaaaggaaccaaaaagaaattctggctgggcatggtggctcacacctataatcccagcattttgggaggctgaggtaggcagagtgcctgagctgagg

SEQ ID NO: 950068 - DNA, 568 bp, Homo sapiens
aaaaactgaccctgatgtcctatgtagcaccaatttgctgagcacgtaggccctccatggttctctgctgtcctgacctcctyttaccctctcctcacagctcttcctgttgcagggactggcttctgctgtgtcatgtggctgagctcactctgtcatcctacttgaagtttctagttctgaaaaatgaattataataaattgtcactaaatgttcattccgttgaatttatgaaaaatgaaggacttatacaattttgtttattatattttgcatgtgtcaatttttttttttttttttgagacggagtcttgctctgtcacccaggctggagggcagtggcacaatctcagctcactgcaacctccacctcctgggtttaagcaattctcctgcctcagcctcctgagtagctgggattacaggtgcaggccaccacgcctggctaatttttgtatttttagcagagatggggttttgccatgttggccaggctggtctggagctcctgacctcaggtgatctgctcgcctcggcctcccaaagcgctaggattacaggtgtgca

SEQ ID NO: 950069 - DNA, 638 bp, Homo sapiens
  misc_feature 631, 632, 633, 634, 635, 636, 637, 638: n = A,T,C or G
acatcagggtgaatggggtatctatcacttcaaacatttatcctttctttcaaacacttatcctttattgctagggctttgtttcttaaattgtcaaccatccatttcctaagatgtccattaycacagacacaggctggaacagcacgacctctctgatgctaagtattaaagttagattctgctccctagtgttgaagaaaagtcagattttaagatttatttctcaccagaaaagagaacttctaccattgcttggaaacagaagcactgaaataaaaggtgagtgggcagaatactgacacacacagctctgttcagagcatactctggggtttaggttgaaagaaaaaaaaaactgaaaaccactctgctgtctacggacaaggtaaagaggacttcaaggttacttaccatatttgaacccctcaactaccccttcaacaagaagtagagagcaggagtacctaggaaggacacgggtgactggcgcacggccataaatcttggataaatcttgggaaagttgattacagaaactgggtcattcttgtcatacccaactaaatcagagtcaagggaccaaggggaaaaagtgctcggggcacacaacacctgctccaagaattcnnnnnnnn

SEQ ID NO: 950070 - DNA, 803 bp, Homo sapiens
gagccgttaaatagttacttcaatgttttatccagctcttaactttaggctcttttctgtcgtggtaatcatctgagatgaggttaatagaatatgaaactactttgagagaagacagaagacagaatggccatgtcacataagtaactcttctgaatggttcatctcaatgtactacatttatttattttttgtttcgcttttttttttttttttctgaggtggagtctcgctctgttgcccaggctggagtgcagtggcgccatctcagctcactgcaagctccgcctcccgggttcacgccattctcctgcctcagcctcccgagtagctgggactataggcgcccgccaccacgcccggctaattttttgtatttttagtagagaccgggtttcaccgtgttagccaggatggtctcgatcttctgacctcgtgatccgcccgcctcggcctcccaaagtgctgggattacaggcgtgagccaccacgcccggctgttttgctttttgagacagtctcactctgttgcccaggctggagtgcagtggcgtgatttcagctcactgcaacctctgcttcctgggttcaagtgcttctcctgcctcagcctcctgggtaactgaattacagatgtgggccaccaggcctggggctaatttttgtatttttagtggagacaggggtttcaccatgttagccaggctggtctcgaratcctgaactcaagtgatctgccccctttggcctcccaaagtgctgggattatgggcgtgaaccgtcatgcctggccacaaatgtac

SEQ ID NO: 950071 - DNA, 566 bp, Homo sapiens
caggtgcccgcgaccacgtctggctaatttttttgtatttttagtagagatgggttgtyaccgtgttagccaggatggtctcaatctcctgacctcatgatccacccgcgttggccgcccaaagtgctgggattacaggcgtgagccactgtgcccgacctttatttatttatttatttattttgagacagggtcttactgtgtcacccaggttggagtgtagtggtgtgatcatggctcactgcagcctcaacctcctatgctcaagcaatcctcccgtctcagcctcccaagtagctgggactacatgcacaagccaccacatctggttgatttttaaattttatgtagagacagggtgtattagtccattttcacactgttataaagaaatacctgagactgagtaatttataaagaaagaggtttaattgactcacagttatacatggctggggaagcctcaggaaacttacaatcatggcagaaggcaaaggggaagtaagaaccttcttcacaaggcagcaggagagagagaagggaaggaggaactcccaaacacttgt

SEQ ID NO: 950072 - DNA, 598 bp, Homo sapiens
taggtttgtagccttggaaccataggttataccatacagccttaggtgtatagtaggatccgccatctaggttttggaattacactctgtgatttttgtacaatgacaaaatcacctagaatcacatttctcacaacattcccatcgttaagaaacacctggccgggcgcggtggctcaagcctgtaatcccaacactttgggaggccgaggcgggtggatcacgaggtcaggagatcaagaccatcctggctaacacggtgaaaccccgtctctactaaaaatacaaaaaaattagccaggtgtggtggcgggtgcctgtagtcccagctactcgggaggctgaggcaggagaatggcgtgaacccgggaggaggaacttgcagtgagccgaaatcgaaccactgcactccagcctgggcaacagagtgagactccatctcaaagaaaaaaaaaaaaaaaaaaaaaargaaacacctgactgtattaaactgttttaataatattgtctgatccatgaagatctgcatattttaatatgctaccaaatgagatatccagtgatacttgccccagccaaaataaagtatgtgtataag

SEQ ID NO: 950073 - DNA, 610 bp, Homo sapiens
attttaaattcccagttcaataattgcaaagtttctgctgtatctaagtaggttatgatgtttgttttgtctctttaatctgtgttctctgactttaacttgccttgtaaaatatgatgcatgagggaaaataaaacacatagtgccttagcctgaggttttatgttagtctgcccaggatttaagctgtgtctactatttgctgtagctatatgtgacagagactaaaatgtttttgtctcccctgttgttattgggttgccacagagaacttatcttaaataagatctgagacatgaaggcttttcacttgtattccctcattattatgcaggagttctgctgatgtggtgatagggtgtgagggaggataggcattctacagtctcataattaggtctcagtgttttagtgagcctgggcccctgggttgtgaccatcacaagggtttctcggctttttatccacttatgtgatacaagaaggctagagggagctggggttaggtatttctcttctttaagattaattcagctctggtaaaacctcagtccattgggctgtartaaactagttttctttgagggtaggcctttgttaagaacaggat

SEQ ID NO: 950074 - DNA, 570 bp, Homo sapiens
tcacgggctgcgtttgagtgtctgtggcttttccaggtgcatggtgcaagccatcagtggatctactgttstggggtctggaagatggtggccctcttctcacaactctactaggcagtgccccagtagggactttgtgaaggggctccaaccccacatttccatctgtactgccctagaagagattctcgtgaggtccctgtccctgcagcaaacttttgcctgtgcatccaagagtttccatatatcttctgaaatctaggcaaaggttcccaaacctcaattcttgacttctgtgtaccttcaggctcaagaccacgtggacactgccaaggcttggggcttccaccctctgaagccacagcctgagctgtacattggccttttcagccacacctggagtggctgggacacagagcaccaagtccctaggctgcacacaacacagagaccctgggcctggcccatgaaaccactttttcctcctgggcctctgggcctgtggtgtgaggaatggccgtgaagctctccgacatggcctggagatattttccccatagtcttgaggat

SEQ ID NO: 950075 - DNA, 570 bp, Homo sapiens
tcacgggctgcgtttgagtgtctgtggcttttccaggtgcatggtgcaagccatcagtggatctactgttgtggggtctggaagatggtggccctcttctcacaactctactaggcagtgccccagtagggactttgtgaaggggctccaaccccacatttccatctgtactgccctagaagagattctcgtgaggtccctgtccctgcagcaaacttttgcctgtgcatccaagagtttccatatatcttctgaaatctaggcaaaggttcccaaacctcaattcttgacttctgtgtaccttcaggctcaagaccacgtggacactgccaaggcttggggcttccaccctctgaagccacagcctgagctgtacattggccttttcagccacacctggagtggctgggacacagagcaccaagtccctaggctgcacacaacacagagaccctgggcctggcccatgaaaccactttttcctcctgggcctctgggcctgtggtgtgaggaatggccgtgaagctctcygacatggcctggagatattttccccatagtcttgaggat

SEQ ID NO: 950076 - DNA, 598 bp, Homo sapiens
atcttttccaatccagggcccaacctaggatcacacattgcatttagtagtcatgttctcttaatcttcatctagcctttttctgtctatcataacactaattttttagaatccaggcaagctgggtttataaaatatgcctttaaaaaaattatcctggctgggcgcggtggctcacgcctgtaatcccagcacttcgggaggccgaggtggacggatcacctgaggtcaggagttcaagagccgcctcaccaacatggcgaaaccccgtctctactaaaaatacaaagaaaaaattagctgggcatggtggcaggtgcctgtaatcccagctatgggaggctgaggcaggagaatcgcttgaacctgggaggcggaggttgcagtcagccgagatcatgccattgcactccaacctgggtgacaagagcaaaactccatctaaaaaaaaaaaaaaatcctgagggctgggcacagtgactcacgcctgtaagcccagcactttgrgaggcagaggcaggtggatcacttgaggtcaagagtttgagaccagcctgaccaacacggtcaaacccagtctctacaaaaatacaaaaat

SEQ ID NO: 950077 - DNA, 647 bp, Homo sapiens
aagtgttgaagtgaaagaaagagctgtatgtctttaaatgaaaagctagaaattattaagcttagcttggaagacatgttgaaagctgagataggctgaaagctagacgtctgtgccaagcagttagccaagttgtgaatgtaaagggaaagttcttggaggaaactaaaaattctattccaggaaacacacaagaaagcaaaacagccttattgcctatatggagaaaagtttgagtggtctgaataggagatccacccagctacaacattttcttaatacaaagcctaactcagagaaaggctttaactctctccaattctgtgaaggctgagtgaggtgaggaagctgcagaagaaaagtttgaagctagtagcagttgtttcgtgaagtttaaggaaagaagccatctctataacataaaagtgcaaggtgaagcaccaaatgctgatgtagaagctgcagcaagctctctagaagatctagctaggatcattgatgaaagtggctacattagacagcagattttcratgaagatgaaacacccttttattgaaagaagatgccatctaggactttcatcactagagaggagaaggcaatgcctgacttcaaagtgacaaaggacaggctgactctcttgtta

SEQ ID NO: 950078 - DNA, 637 bp, Homo sapiens
agttatttggtcagaagcaatattgtgagtggtaagacagtgaataagcatttcatacatccgcagatggcaaagggcagagtaggctgatttgcattctgtagaaaggcctatttaatagtggagagaaactgttgctcctctgtgatggaagagatccactgtaattaatgtgccaccatgtgactagatggttttccagaaaatggcaccacattgggctttcagcattgatccctgctgctggcaagttactactcagcagaggtggtaggcagattaggattgatgggtggaggccctttttgagttcatacatagcctccattcctgagtgggatgagtgagcaatcacataggacacaaatgtacacaactcatccccatttgtaggggtacacccacatactctccctgcagacctccctggggaaagacatatttttcttgttcttttcaaacaccatctgtgtagccaaaccattagccactgcctgtgaatcattgtagacccgagttcctgataatcttatccagacaaagtagrtgacaaaatgtgctgctcaatggtctaggagggtctctcttgactactattttttgagatactcctgattggggttgaacttctgcagct

SEQ ID NO: 950079 - DNA, 554 bp, Homo sapiens
ttatcctgatggagttccctttgtatgtgaccagtcctttctctctagttgcctgtaacatatttttttcattttgatcttggaaaatctgataattatgtgtcttggggatgatcttgtgtagagtcttgcaggagttctctgtatttcctgaatttgactgttggcctctctagcaaggctgaagaagttttcatggatgatattctgaaatatgttttccaagttgtttgctttctcctcctctctttcagggatgccagtgattcatagatttggcctctttacataatcccatacttcttggaggttttgcttattctttttttctttatttttgtctggctgccttatttcagagcaccagtcttcaagttctgagattctttcctcagtttagtttattctactgttaatacttgtgaatgcattgtgaaattcttgtattgtgttattcagctctgtcagacctgttagtttcttttttrtactgactacttcattcttcagctcctgtattgctttattgtgattcttattttccttgaattggg

SEQ ID NO: 950080 - DNA, 467 bp, Homo sapiens
caagaatggaaacctaagttctctacacaaagaaaacttgagatgggatgtctgcataaagcctgaagcttcaaaggactgtctgaattcrggtcccagaataaacactgccactgcccgagggatgcagggagtaagccagacaaccactttggaataagtcacctccgagaagttagacgcccaggcctgctctgtgcatgggcatcaagtccaaatgcacacagttcacatgccgtagaaatcctgaactgagaaacaaacctaaaaatgcatccttgaagtctttagggcactgagcaaagacaaactcaaaacctctcaatacagatgtatttacagcttagggcatgtgttagacaattactactagagataagctcagagtaaaagaaagattacaaaacaaagaagaaacaaccctttgcctgtctgagaaataatagcaaacacagcaaatgattaaa

SEQ ID NO: 950081 - DNA, 553 bp, Homo sapiens
ctgaaatttacctctttaactcatcttgagtaaatttttgtatatcgtgtaatgtaggggtctagcttcaaacttctgcatatggcaagctagttatctcagcactatttattgaatacagagtcatttgccaattgcttatttttgttgaatttcttgaaggtcaaatgatcatagttgtgcagctttatttctggattctgtattttattccattgggatgtgtctgtttttgtgccaataccatgctgtttagatactgtacctttgaagtatactttgaggtcagacaatgagacacctctagctttgttcttttgcttagaattgctttggctatttaaactcccttttattggcatatgaactttagaatcacttttttctaattcagtgaaaaatgacattggtagtttgaaaggaatagcattaaatttgtagattgctttgggctttatggtcattttaatgayattgattcttcctgtcagtgagcatggaataattttccattcatatgtatcatacatgagttctttcagcaatgttttgt

SEQ ID NO: 950082 - DNA, 700 bp, Homo sapiens
ggcagggcagggcagggccccaggacaggacagtagctgcagmccacagggcaggagagggcaggaccccaggaaaggtcagcactgcagaccacagggttgggcagggcagggtagggccccaggacaggtcattagctgcagaccacatggcagggcagggcaggaccccaggacaggtcagcactgcagaccacatggcagggcagggcaggaccccaggacaggtcagcattgcagaccacagggcagggcagggcaggaccccaggacaggtcagcactgcagaccacagggcagggcagggcagggcagggccccaggacaggtcagcactgcagaccacagggcagggcagggcaggaccccaggacaggtcagcactgcagaccacagggcagggcagggcagggccccaggacaggtcagcactgcagaccacagggcagggcagggcagggccccaggacaggtcagtagctgcataccacagggtagagcagggcagggcccaaggacaggacagtagctgcagcccagatgcagttactgttctgggaccttcctgaagtaaagggcagaggcccagtgcctcagagacctaatacctctgaactctctcccctctcaactcctgctccttcctcccagatatccaggggaggccatggctcattcactccctgcctgagcctcagag

SEQ ID NO: 950083 - DNA, 722 bp, Homo sapiens
tgggtctgggtcacctacaaccaagtttgcacagcctgttccagagtgctgcttttgttgactctctgacttcttggattttggcagctccccactccctgacctacaaagattttatctgatcataacttgtgcttctaggacttgctctctggtctgtttagaactctagtgcttgccataggccttctgcttatcttccctctgcagcctggtgtctcatggccagacctggcctgaccagtcttgttactgcccacactgagtggggacctgaggtagtgggatggaggctaacatctgtgctcgtcagcccaggttcttccccaggttctcctcgggttaatacatgtccttggggttcccatgtcctgaatgttccttcctctattctctgcattacccatcactgcttttttttaatgcctcattttcaatggcacctcttctgagaggttctcatggaatacctgatctaaaggaggtgatttctcttgtaatttgtctcagctcctcttctgttttcatcccacaaagctaaactgcagagcaactttgattgattttgtccatcctttctactatccatcactgccatgaaagcagakcctgccctgccctgccctgttccgcatcacaccatggatccctacacagggacagacacagtgtagatggccattatgaagctgttgaatcaacattgaattatgagaaaatgc

SEQ ID NO: 950084 - DNA, 586 bp, Homo sapiens
tagtttagtaagttgggtgataaaatctttgagaagccatgcttttcattggaactacaacctactccagacagagaaagaagataataaacttctacaaaatacagatacagccaaccacttatgctgaagaggatgacatagaaaaaaaggcagatggggaattaaaagtttttgtttattttaatctttccttgttcatcagtaaatcaaatgtagaagatactggtagaatgtgcatatgtcaagaaatgaaataaaaacagttgagatagttgcagcatccccactgttcttgtagttagctcattggatctgatattgcatgatacaaatgaatgataaaatccttggtaataattctaatttaaattttctttacttacaattatattaaatagctaaaaaaattaccattataaggttaagaaagagagaccaggatatacatttaaaggttytatattttagtatatttaatgtactttttctgcttttctggctttttaaagagatctcaatttttagttagctttggtccctccaaattgtataatgaacttagtgtcacatgaatatgtatttc

SEQ ID NO: 950085 - DNA, 570 bp, Homo sapiens
tgggagaattgcttgagcctggaaggtagaggcagcagtgagcagtgttcgcaccactgcactcagcctgggctacagagcaagactctctctcaaaaaaacaawtaaataaataaaattaaaataagttgcaacaggaactctcgttcaatgctagtggaatgcataatgatacagcaacttcagaaaacaatatggcagtttttattaaagttaaacatactctcaccatagaggcactcctaggttttgggggtttttttgtttggttttgttttttgttttgttttgttttgttttgagatggagtctcactctgtcacccaggctggagtacagtggtgcaatcttggctcactgcagcctccatctcccgggttcaaccaactctcctgcctcagcctcccaagtagctgggactacaggcaagtgcctccacacccagctaattttttaattttttgtagtcgggatctccctatgttgcccaggctagtcttgaactcctgggctcaagtgaccctcccacctcagcctcccatgtagcttggacttaaggcagggaccaca

SEQ ID NO: 950086 - DNA, 641 bp, Homo sapiens
ttagctggcagtcagtcctcctcactcaccagaggacacacacaggggagaagccctatgtctgcagggagtgtgggcggggctttagcaataagtcacacctcctcagacaccagaggacacacacaggggagaagccctatgtctgcagggagtgtgggcggggctttcgcgataagtcacacctcctcagacaccagaggacacacacaggggagaagccctatgtctgcagggagtgtgggcggggctttagagataagtcaaacctcctcagtcaccagaggacacacacaggggagaagccctatgtctgcagggagtgtgggcggggctttagcaataagtcacacctcctcagacaccagaggacacacacaggggagaagccctatgtctgcagggagtgtgggcggggctttcgcaataagtcacacctcctcagacaccagaggacacacacaggggagaagccctacgtctgcagggagtgtgggcggggctttagcgataggtcaagcctctgctatcaccagaggacacacacaggggagaagccctacgtctgcagggaggatgagtaagtcattagtaataaaacctcatctcaatagccacaaraagacaaatgtggtcaccac

SEQ ID NO: 950087 - DNA, 619 bp, Homo sapiens
cctgcccacattaggtgatggtggctcttccttattcagtccattgattcaaatgttgatctcttctggtaataccctcamcaacatacccagaaataatgctttatcagctatctggtgaagttaacatctaacttgcatcagctaggtcttctagtataatgttaaataggcctggtgagcgtcaacatccttgccttattcttgatcttactaagaaagcatcaaatttcttattgtatatgctataggttttgtacatgctctttatcaagttgaggtaatccctctctattcttagtttgctaagagcttttgtcataaatgggcattggattttaacaagtgattattctgaatctacctatatgatcatatgatttttctccattagactattgatgtgaggatctttgaatgttgaaccagcctcatatactttcaaataaatcatatttggtcatggtgtataattgtttgtaaacagtttcgtattcaattagctaatatcttgttgaagatttttgcatgtatgttcatgagagatattggtttgtagtttttcttttctgtcaggtctactttggtatcacggtgatattggcctcgtagaatgagt

SEQ ID NO: 950088 - DNA, 581 bp, Homo sapiens
aatggataaactgtggatcattcatacaatggaatactactgagcaataaaaaagaacaaactataaatatatgcaaacaacttgcatgaatctataggcaattttactgagtaaaagaggccagtctcaaggttgtatactataggattctatattttaacagtatattaatattttacaacattatcaaaaagacaaaactaaaataatggagaacacatcagtggttttcagggattagggacgggatgagcatgtgattataaaggtatatagcacaagagagttttgagagtgatcaaaatgttctgtatgtccattgtgttggtcattatataaacctttacatgtgtgtaagtcataaagctgtatgtagagaataattttattgcatgataatttaaaaaataaaaatgaaaaacaaaaggactatgctggataaaaaagaggtttgctggttaaatgtggctcagtgctacgtctttccccaaagtagatgctcaattaacttttgctaaacaaaaaccctgaaaactggctgtaatgwctgctttaatatcaatctcatttacatccctaa

SEQ ID NO: 950089 - DNA, 572 bp, Homo sapiens
ggctatactttaatgtatctctgtatgccttttgatttttttgaaaactggagatttgaatctaaaagtgtgataactctagaaatcagaatctacccccttcccagagtttgctgtgtgttttttttttttttttttttttttttattatttaggatatctttgtgccaaggatcagcctgagtgtaaatttaaggtcttctcaggcattttctgagcctgtgccttcccctgggtgtttatggtgatttctaatttccctcatatatgtggttgcttttgaatgtcctacttgtcaatgtatggctctcaaaaaataaaaaaaaagagaaaatgaaaggagggagaggaagacaccaccttttaaatttcctgaaagtcactttagctagaggaggaggggcttgcaacaatgtgggtaggtgcaagaataatagctgctacctctttgtccacacctctgtggtcaaaagtagaaatcagtgataagagcacagatcmctgatatttgcagaacaggatcctttttgcctaccctggctcccttaacctgtgtgaaagctgcatgagaa

SEQ ID NO: 950090 - DNA, 563 bp, Homo sapiens
taggtgtcaaaaaatgattctaaagtttatagggaaaaccaaaaaggccaggatgaccaatgaaatattgacagagaagaacattgcaggactgatactacccaacttccagacttaccataaagctaccataataaaatacagtggggtattaacaaatagatcagtggaacagaacagaaagcccacgaatagacccacgtaaatataatcagttgatttttgagacagagcaagataaatacaatgaagaaaagagaatcttttttcagcaaatggtgctggaacaactggactgccacctgtaaaaatggattcagacacagaccttaaactcttcacaaaaaattaactcaaaatggatcacagatttaaatgtaacatgcaaaactataaaaccctagaagaaatataggagaaaacctagattaccttggatggtgataactttttttgatatatgccaaaggcataatccttgagaaaartaattgataagctaggcttcaataaaatgtaaaagttctgctctatgaaagacaatgtcaggagaatgagaagac

SEQ ID NO: 950091 - DNA, 613 bp, Homo sapiens
actcccagagagagaggcaggccaccatctttgctgtttgggtgatttagccatttcattcttcaggctttggagagtccaagccaactgaggggagacatgataccctagcacagcacacctgctctatgaaaacatagtcagactactattactttttgaagaaggccctcaatcccattccttttcactggaaaggacctcccaactgaggtttacagccacctcctataggtgcattcgagccaacaataggttcatgcctccctgggatagagatcccaaaggggagagacagactaccatatttgctgttttgaagccttcactgttgatatctccaggtattggaaaatctgaggtgactaaagactgcagtgggcccccagaatacttcagaagccctacgaaaaagtggtcagactgctacatgggtgattgttcccacatctccttattgggcaggtcctccaggccaccagcctccccctgccagagctatgagccagtagcagctctgcaagttactgggcagaacycaggaacaactgaaagcctctctgccactttctctgtagtggaactgcccttgccacccttgaactaatgaaga

SEQ ID NO: 950092 - DNA, 634 bp, Homo sapiens
gtctggacaggggccattagaccagttcagtgctctgtgggctgtggccagaggcaccttgactggggctgctgtccccatcctcatcctcctccacttgctaggcccacttcgtgaggtgccgaaggtgaaacagccagagaacttcacttgcccgcaacaaccttagagtcagatgcaggtggggaaaaagccatatatcatcaggtaacttcatagagttataaacttaagaaatgcttggggccaaagagagagatcatctttcattcattcaactaatatgtactccatgagatctgagccggaagcggaattccttggacagtttttgctattctccatgcccgtgttccctctgggcctagaggtttctttttagtctgccctcatcccccgtttctgtcttctctctcttcatgcaaatatttcttggaaatttcaacaagggttacatgccttctagcatctgcctagacactcccaaaatatagtagaaagctgtttgaatrcatggctagatgtgcaatttcagaagtgcaccattcactaagtcttctgagggactgtgaagtgtgtgagccagccttgattcttcatttacatcttttctacctgcaaaaggacaccctaa

SEQ ID NO: 950093 - DNA, 536 bp, Homo sapiens
ctttcatagagcagaacttttacattttattgaagcctagcttatcaattayttttctcaaggattatgcctttggcatatatcaaaaaaagttatcaccatccaaggtaatctaggttttctcctatatttcttctagggttttatagttttgcatgttacatttaaatctgtgatccattttgagttaattttttgtgaagagtttaaggtctgtgtctgaatccatttttacaggtggcagtccagttgttccagcaccatttgctgaaaaaagattctcttttcttcattgtatttatcttgctctgtctcaaaaatcaactgattatatttacgtgggtctattcgtgggctttctgttctgttccactgatctatttgttaataccccactgtattttattatggtagctttatggtaagtctggaagttgggtagtatcagtcctgcaatgttcttctctgtcaatatttcattggtcatcctggcccttttggttttccctataaactttagaatcattttttgacac

SEQ ID NO: 950094 - DNA, 720 bp, Homo sapiens
cagtgcctactcagggcattgtggtgctcttggtcttcatggggaaggagagtgtgatgtctagttttgtrtgtcgacttggcttggctgtggttctcagttgcttggtcaaacaccagactggaggttgctatggaaggtctttgtagatgtgattctcatttacctcaattgactggaggtaaagcagattgtctccatcatgtaggtgggtctcatccaaccagttgaaggtcttaagagggaagactgaggtttccttgagaagaagaaattccacgtcaagactgcagcacaggaagcccgcctggctcccctgcctgccagcgggtggagttgagacttgatactgcagcgtcagctcttaccgagcttccagcgtgatgacagccctttcgggtctgtaatttgtgagccaattcccagctctatgtccatgtgtgtgcatgcgtgtgtgtgtgtatgtgtgtgtgtgtgtagagagagtgtatctatgtgcttctctggagcacccagactaacactgagtgtaatcaagacattatagccatataattgatggtaaaataaaattggcaattagagagtatgcaagccctgaagaagatgggaagactcacagtgagcttccctgttaggtgagccattggttgagagcaggacttgccatactggccagccagcggagacaattcaggcaaagaaaagagactgtgcaat

SEQ ID NO: 950095 - DNA, 479 bp, Homo sapiens
tataggtgcagaccaccaagaagccaatcttgaagaaaaaaatacaagtcaaagcttggctgagccggycatgtggtacacctatgactggcaggttcatgtatatgtcattattactgagtcaactgcattcttttcttaattccatgaaaagcagtctactatacatactgtcaggggaaatctactaagaagatgactgtgattggctattacagacttgccatgtctcgtttcactggtattacaggaaaaaagaaatttctttaaataatactttaagtgccacgaagacgggacaatttgtacttcttggtatcctctatcctctctctcaaagtgctagaaaaatggaccgatctaactaatatagaaaaccgagggataagattattttggtcagtctataaatccatatttttgaattcttttagaaataaagtcttcctcatcgatatcacagagatggtatacactat

SEQ ID NO: 950096 - DNA, 551 bp, Homo sapiens
atcttatatagtaaacttacacaggcccaagrtaagaattcttgctctaggaaatcaatattgattttatttttttaactcctaacaatctttccaattaccttatcatcctaactgctataaaacatttttgtttttaaagaaatgaaattttcagtcctagtggaaagcaaaagagtgtactgatagcttgctttgtgttagtgggagggtccaaatatcaatagcatatagatcctgtctttaaggaatctggccgggtgtggtggctcatgcctgtaatcctagcacttttggaggctgaggtgggaggattgcttaagctcaggagaccggcatcagcaacatagccagaccctgtctctacaaaaaatgcaaaaattagctgggcatggtggtgccccactgtagtccctgctacttggcaggctgaggcaggaggatctcttgagcctgggaggacgaggctgcagtaagtggagatcatgccactgcactccagcctgggtgacagagtaagactctgtctcaaaaaaaaaaaaaaaatccat

SEQ ID NO: 950097 - DNA, 719 bp, Homo sapiens
gcacacctaagcattcaaacgtatttatggattcgttgactaccagcacatgctatattgttataattattaattaatacattcaacaaatattattgaacccctactatgtgctaagcattgttttagttcccggatacatcagtgaacaaaataaagacccctggaatctttgggagggagaaagacagtatatataccataaaaaatgagtaaatatatagtacattagaagatgataaatactgtgacaacattaaagacgagaagagcatgctcaggaagatgaaaagtgggtgctgagacaggaatgggggagcaggttgtgatgaaaacaggatgtctaggagaggccttactgagaagatgatatttaaacaaagacatgaagaagtcaaaggaggtaggcaagctaataccttgtaaagaggttttactccaaatggcaagaacagccagtgcgatgccctaaggcaggtgcatgttcaaggaattgcaaggaggcctgtgtgactggagcagattaaggggcagagaaatagaagatgaggtcttggaagcaaggggaaggacctgtagcctttgtaagamttggggagctgttttgagcagagttttgagcagcggggtgacacaatctgacttctgatttagaaggatcacttgcttctttgttgaagggtacaaagcaggaggcaggaaactgattaggaggcctc

SEQ ID NO: 950098 - DNA, 632 bp, Homo sapiens
atattgaattttatcaaatattcttttcagcattaattgaaataatcacatgttttttgtccttcattctgttgatatgatgtatcacattgattgatttgcgtatgttaaatcatccttttacatccctggaataaatcccacttgtcatgatgaatgatatttttatgaccttttaaaggtattgttgaattcggtttgctaatattttattgagtatttttgcatcaattttcatcaggtatattggcctgtagttttcttttttagatgtgtctttgtctggttttggtatcaggataatactgacctcgtagaatgagtttggaagtattccctccctctgtttttcagaacaatttgaacagaattggcattagttattctttaaatgtttggtagaattcagcagttaagccactgggcttttctttactgggagaatttttagcatggcttcgatattgctacttgctattgatctgttcaagttttggatttcttcatggttcaatttttataygatgatgataaaggtttatatgtctaggaatttatcaatttcctctagatattccaatttattggcatttagttgctcatagtagcaactaatgatcctttgaatttct

SEQ ID NO: 950099 - DNA, 657 bp, Homo sapiens
agcaggcaggagaagatggaagagcagacttgctgagtcttctggccttcatctttctcctgtgctggatgctttctgccctyaaacatcagactccgtgttcttcagctttcggactcttggactcatgccagtgatttgcccaaggctcttgggccttcgacaacagactgaaggctgcgctgtcggcttccctacttttgagattttaggacttggactggctttcttgctcctcagcttgcagacggcctattttgggacttcgcttgtgattgtgtgagtcaatactccttaattaactccacttcatatatacatctaccctattagttctgtccctctagataaccctgactaatacagccacttaaaagaaaaatacacaaagcactagcagacactctcctgttctgttgtccttgaagaagcaaactacctgttacagagtgggctgcatggcaggaaattctaggtccccctaggagctgacagcctcaatcttacaaccacaaggaactgaaatttgccaacaatctgaataagcttagaagagaatctgagctccaaagagagtgcaagttggcagacatcttgattttgacttaataagacagtgagcagagaattcagctcactgtcttattcaagacagtg

SEQ ID NO: 950100 - DNA, 752 bp, Homo sapiens
aaacattaataaaatagcctgtggtttgtggggtggcaaactcctgtaattccagcactttgggaggccaaggctggttagatggcttgaggcaaggagtttgaaccagcctggtcaacatggtgaaaccccgtctctaataaatatacaaaaattagccaggtgtggtggcacacacctgtaattccagctacaccagaggctgaggcagaaaaatcgcttgaacctgagacgcagacgtttcagtaagctgtgatcacgccactgtactccagcctgggtgacaaagcaagactctgcttcaaaaaaacaaacaaacaaaaaacattaacaatgataataaaataggataattagaacaatattatatttaaaagttatgtaactatagtctgtctctttctcaaaatatcttattattacacacgcaaatttaatacctttccacttaactaagcacttgtcatatactgtggccacaacttaacttttgtagtttgagttgtgacagcaaagctagcaagaatttatttttccttcttcacaatttttgagatagaagattcatgcatactgtagatcttagcaaccacgccatacatttttttctttgcttattaggtaatgaactttcaccttttcaattgaaggaagcattttatggcttatctttggcatatcagaattgccagcatcactactcttrcattttggggccattattaagtaaaacaagggttacttgaatacaa

SEQ ID NO: 950101 - DNA, 587 bp, Homo sapiens
ctttcagtccagttgccactgtcattctagatatgtatgcaattccgtaagttgggcttaggtttcatttggagctgccttcaatatttattgataattctgtagcatcattcaaatcaaggaaaactccaycttgcctagtcaaactcacattacctgctttttgaaaaaaggagagaaattctctctcttctgacatttgttcttaaaaaaaaaaaaatatatatatatatatatatatatcaagaaacctctttcttctttttgttgttaaatgtggttggtacacatagtagagggagggtatacatttcatgttgcatttgtgcctaatttactagctactatattaataaccattattaaaaatacttttttgaacatattacttgtttttacaaattaacttacattatatggttaaaaaatgaattttcttaatgttgtttgaccttgtaggacaacactttttactgcttattgaccacaggtaatgaatgactataaaacataaacatatatatttatgcaaaaaatcacaaaaattagcaatcacaatttaattctttagccaataatatctgtag

SEQ ID NO: 950102 - DNA, 544 bp, Homo sapiens
aatgtaacacaggaacagaaagacaaatactgcatgttttcacttrtaagtagaagctaaaattgagcacatatggatataaatatgaaaacaatagagactacaaactactaaaggtttggggggagtgagttaaataactacctatcaggtactatgttcacatctgtgtgatcggaatcatactccaaatgttagcatcacactataatcccatataacaaacctgcatgggtaccccaagtaactaaaataaaaggcgaagcttaaaaaacagtaggcatataaaaagatactccacatcatatgtcattagggaaatggaatttaagacaacaatggaagaccaccacataccttttagaatggccagaattcaaaatactgacaacaaatcctggtgagaacttggagggagaggaactctcattgctaatatatggaatctacagaaatctcctactttggagaacagtttagtggcttcttacaaaactaaacatatcattatcacacaatccagtagtcatagtccttgatgttt

SEQ ID NO: 950103 - DNA, 548 bp, Homo sapiens
tcgtaatgtaacacaggaacagaaagacaaatactgcatgttttcacttgtaagtagaagctaaaattgagcacatatggatataaatatgaaaacaatagaractacaaactactaaaggtttggggggagtgagttaaataactacctatcaggtactatgttcacatctgtgtgatcggaatcatactccaaatgttagcatcacactataatcccatataacaaacctgcatgggtaccccaagtaactaaaataaaaggcgaagcttaaaaaacagtaggcatataaaaagatactccacatcatatgtcattagggaaatggaatttaagacaacaatggaagaccaccacataccttttagaatggccagaattcaaaatactgacaacaaatcctggtgagaacttggagggagaggaactctcattgctaatatatggaatctacagaaatctcctactttggagaacagtttagtggcttcttacaaaactaaacatatcattatcacacaatccagtagtcatagtccttgatgttt

SEQ ID NO: 950104 - DNA, 544 bp, Homo sapiens
aatgtaacacaggaacagaaagacaaatactgcatgttttcacttgtaagtagaagctaaaattgagcacatatggatataaatatgaaaacaatagagactacaaactactaaaggtttggggggagtgagttaaataactacctatcaggtactatgttcacatctgtgtgatcggaatcatactccaaatgttagcatcacactataatcccatataacaaacctgcatgggtaccccaagtaactaaaataaaaggcgaagcttaaaaaacagtaggcatataaaaagatactccacatcatatgtcattagggaaatggaatttaagacaacaatggaagaccaccacataccttttagaatggccagaattcaaaatactgacaacaaatcctggtgagaacttggagggagaggaactctcattgctaatatatggaatctacagaaatctcctactttggagaacagtttagtggcttcttacaaaactaaacatatcattakcacacaatccagtagtcatagtccttgatgttt

SEQ ID NO: 950105 - DNA, 579 bp, Homo sapiens
acaaagttgcccaggctggccttgaactcctgggctcaagtaatccaccttcctcagcctcctgagtagctggaactataggtgcatgccactgcagtcaacttctcctaatatgtttgcatagttgtctctaaaaacaattttcactattcttgttacatttagaagctgattcatggtactttttatactaccaatccagaagcggctaggtcacatttcttctaaaatgtctgtctaccttctcgtcgtaagtttgttttgcctcagcattgatttttaggcttaacatgagttgcttaagacctagtcataggttgtcactattgcctttgttaaaacttcccttctttgagatagagtctacatgtttctcatcctaatgacccagaaacgcaacacatcacagaggtgatgaccatgatataacctaatgatcaataccagagtcatatgataattttccccttcatgtgtgttcccttaagctagccattcctcaactcctgyggagaagcctaggaaataatacctaaggtccttaataaaagccttcctacaagggttccccctcgcact

SEQ ID NO: 950106 - DNA, 561 bp, Homo sapiens; identical to SEQ ID NO: 946632

SEQ ID NO: 950107 - DNA, 703 bp, Homo sapiens
tgtagggctgctgcagtatgctgggggcccactccagtccctagttgcctcagattttccagtacctgaaggtattaccagtgaaatatgagaaayagcaaagatggcagcctgccctttttccgaatagctctgtaccagggaggtacagacctgttgctggcccaaacacacctctaagaggtgtctgaagaccccagttgggaggtctaacacagtcagaaggactgtgttaatacctcggtgatgggttgatagctgcagcaaaataccatggcacatatttacctatgtaacaaaccttcacatcctggacatgtatcctggaacttaaaataaaacaaatacaatgaacaacaacaaaaataaattattaataaataacaactgaatgaagaaaagaaagaagaaagaaagaaagagaaagaaagaaagaaagaaagaaagaaagaaagaaagaaagaaagaaagaaagaaagagagagaaagaaagaaagaaaagaaggaaggaagggaaagagagacaaggcaggatgatgtcccacccaggagcaatgcagaggcaaatgaacctcccagggaagtgatgagtcaatgtgaagccccaggtaacatgcttctcccacagatctctgcaaccctcgggtcaggaagttccctcatgagcccactccaccagggctttaagtgtgacacacagagc

SEQ ID NO: 950108 - DNA, 732 bp, Homo sapiens
agtctggtcacttttctgtagggctgctgcagtatgctgggggcccactccagtccctagttgcctcagattttccagtacctgaaggtattaccagtgaaatatgagaaacagcaaagatggcagcctgccctttttccgaatagctctgtaccagggaggtacagacctgttgctggcccaaacacacctctaagaggtgtctgaagaccccagttgggaggtctaacacagtcagaaggactgtgttaatacctcggtgatgggttgatagctgcagcaaaataccatggcacatatttacctatgtaacaaaccttcacatcctggacatgtatcctggaacttaaaataaaacaaatacaatgaacaacaacaaaaataaattattaataaataacaactgaatgaagaaaagaaagaagaaagaaagaaagagaaagaaagaaagaaagaaagaaagaaagaaagaaagaaagaaagaaagaaagaaagagagagaaagaaagaaagaaaagaaggaaggaagggaaagagagacaaggcaggatgatgtcccacccaggagcaatgcagaggcaaatgaacctcccagggaagtgatgagtcaatgtgaagccccaggtaacatgcttctcccacagatctctgcaaccctcgggtcaggaagttccctcatgagcccactccaccagggcyttaagtgtgacacacagagctacgtggagtcta

SEQ ID NO: 950109 - DNA, 615 bp, Homo sapiens
ggagcctaaaaacctacctgcccagcccactgctgccaatagtgccatctgagaaagccacgtggaggccccaagaaatgacctatctgaacccactaacaccagtgtcagcatatgccaccctggggtccaaggagaggcacgaggaaagtcagcttacccctgccaccagtgaggcgtgaagacttatctacgtggcatccctgtcaccagaaaaacttcattacagcctctactaataactgcattctaagccactgaggaaattacagattccactgatgctgtttgcagatgaaaaaccatacagaaactacactactgaatacacccagaatcaaagccaaagtaggcccctgctcaaccaacatcatagatacacctttaggaaaaaatactctcttacaaaagtaaagttaaaaaattggaagaagtgactatcacacctgatgtgcagatatcaatgtaaggaaacagaaaacttgaacaygcaaggaaatatgacaactccaaaggaacgcaataattccctagcaacagatcctaatccaaaagaaattcacaaaatcccagaaaaaaaaatattgattttaaagaagctcagtgaaatccaac

SEQ ID NO: 950110 - DNA, 502 bp, Homo sapiens
ggcgcaggtcagtgggtgcagcgcaccgtgcgtgagccgaagcagggcaaggcattgcctcactcgggaagcgcaaggggtcagggagttccctttcctagtcaaagaaaggggtracacacggcacctggaaaatcgggtcactcccacccaaatactgcgcttttccgacgcgcttaaaaaacggcccaccaggagattataccctgcacctggctcagagggtcctatgcccacagagtctcactgattgctagcacagcagtctgagatcaaactgcaaggcagcagcgaggctgggggaggggcgcccaccattgcccaggcttgcttaggtaaacaaagcagccagaaagctccaactgggtggagcccaccacagctcaaggaggcctgcctgactctgtaggctccacctctgggggcagggcacagacaaacaaaaagacagcagtaacctctgcagacttacatgtccctgtctgacagctttgaagagagc

SEQ ID NO: 950111 - DNA, 563 bp, Homo sapiens
gattcaagtgctcacttctgaatggttctcaggcaacaggcacagtgcctgctcccagaaacggctctctctgcaaagacgaacagaacacaatggcctccttgtgtgacatgctaaattcgagccccatacggagccgggagcagaagtcgcagaagcacatcgggtgggacagaggggctcctctaggaattatctggtcggggcatgagcaggtggctggacttctggcccctttatggccagaagaccaattcttggctggtctctaagcaaacaaagggagcagcaccttgtcagcggatgtgatttttgtgacatctgttccgcagcccccatcaattcacacccagcgtctgcgtgactcatgtccttgaattagccattgttgggcccgagggaggcgaacgggaaaaccgaacggaagaaaggtttggggaagggaacgttctgttctstcctccaacgataagcgcctgtttggcagcgtcatggcagggacaatgcagagatggccttgaaaattctcaggctgtcggtcaggctgaggggcaaagaaaagt

SEQ ID NO: 950112 - DNA, 649 bp, Homo sapiens
acaaaatgccgcagactaggtggcttcgacctgttaatttctttttctttttttctttttttttttttttttttttttkgagatggagttttgctctgtcgcccaggctggagtgcagtagcgcgatctccgctcactgcaagctccgcctcccgggttcacgccattctcctgcctcagcctcccgagtagctgggactacaggcgcctgcaaccacgcccggctaattttttgtatttttagtagagaccgtgtttcaccgtgttagccaggacgatctcgatctcctgacctcgtgatccgcccacctgggcctcccaaagtgctgggattacaggcgtgagccaccgcgcccggccctgttaatttcttacagttctggaagctggaagttctagcgagctccctcttcctggcttgtagatggtgacttctcattgtatccttacacttgatcttagccaaaaggtcaagaagcgatatcactgtatcgttgcaatgtaagaaagagagcaagttcctggtgcctcttctcataagggcgctactccccttcatgagggctctaccctcatgacttaatcacctcccaggggccccacctcctagtaccaccccattgggacttagggcttcaacacataaatt

SEQ ID NO: 950113 - DNA, 657 bp, Homo sapiens
aaatgccgcagactaggtggcttcgacctgttaatttctttttctttttttctttttttttttttttttttttttggagatggagtyttgctctgtcgcccaggctggagtgcagtagcgcgatctccgctcactgcaagctccgcctcccgggttcacgccattctcctgcctcagcctcccgagtagctgggactacaggcgcctgcaaccacgcccggctaattttttgtatttttagtagagaccgtgtttcaccgtgttagccaggacgatctcgatctcctgacctcgtgatccgcccacctgggcctcccaaagtgctgggattacaggcgtgagccaccgcgcccggccctgttaatttcttacagttctggaagctggaagttctagcgagctccctcttcctggcttgtagatggtgacttctcattgtatccttacacttgatcttagccaaaaggtcaagaagcgatatcactgtatcgttgcaatgtaagaaagagagcaagttcctggtgcctcttctcataagggcgctactccccttcatgagggctctaccctcatgacttaatcacctcccaggggccccacctcctagtaccaccccattgggacttagggcttcaacacataaatttggaggggaca

SEQ ID NO: 950114 - DNA, 462 bp, Homo sapiens
gccctgatcccttacttccacaccccaacctcttatatctctgtgccccgatcccttatttccgtgcccctacctctcccgcttttctggagggtaagaacccccaaaccccttccctccrtttctctactctctcttttctctgggcttgcctccttcactgtgggcaaccttccaccctccattcctccttctcccttagcctgtgttcttaagaacttaaaacctcttcagctctcacctgacctaaactctcagcatcttattttcttccgcaatgccacctgaccgcaatacaaactcgacagtagttccaaatagccagaaaacggcactttcaatttttccatcctgcaagatctaaataattcttgttgtaagatgggtaaatggtctgaggtgcctgacgtccaggcattcttttacacgtcggtccctctctagtctctgttcccaatgcaa

SEQ ID NO: 950115 - DNA, 613 bp, Homo sapiens
ggaagacaatttttctacggcagggtgggtaggggttggggagatggttttgggatgaaactgttaggcattagattcttataaggagcacacaacctcgatccccttgcacgtgcagtttacaatagggtttgttctcctgtgagaatctaatgtcactgctgatctcacagacaataatgctcgctcatctgtcactcatcacctgctgtatggcccgattcctcacaagccatgaagcagtactggtccacagcccgagggttggggacccctgttctgtagcactgtagggtgactgtacttaacactaattcattgtatatttttaaaatcactagaagagaggattttaaatgtttctaatacaaaaaaaaaatgaggtgatgaatatgctaattagcctgatttgatccttacacattatctatatgtatcaagatatcactctttaccctatacatgtgtacaactattatgtgccaatttaaaataaagataattttaaaaagacaggcaatataacaacaaayaagaaagagattttaagagaaaaaaatgtatcttagttcaggtcgttataacaaagtatcatagactgggttggttataa

SEQ ID NO: 950116 - DNA, 620 bp, Homo sapiens
tcttgtgtctttatttcttacaatctctcgtctcygcacacggggagaacaccctcaaagccccgtagggctggaccctacaccatagattagttttgcttagctttaaacgctttataaatggaattacacaggatgcattattgtgcctgcattcattcaacactatgtatgccagatttacccatattattgtatgtagctgtattgttcatacatttgtattgctgtataatattccagtgtatgaatatgccataatttatttatccattacactgtcattgaatattgggttgtttccagtttgggtttattacaaataatgctgccatgaacctctttcatatctttagttatacttgtgtaaccatttatttaatacatatagataggcaggaagttactggattatacaatacatgcatactcttctttagtacataatgtcaaacattttccaaagtggttctaccaatctacatacccagcatcagggtataagagctccagttgctccataatcttgccagtatttgatatagaccatctttttaattttagccattctgatgggtctgtagtattaactcattgtggttttaatgtgtattttcctg

SEQ ID NO: 950117 - DNA, 742 bp, Homo sapiens
aatcataaaccagggagatcagatttgctaactggccacacttaggttatatccccatccctgaagccatgggaaggggtcaatctacccaaatttaaaggaaaatcagatgctatatatctttgtccagacaatgagaagaaagaaacaatagctactttctataataggtatccttgttttccagataaagaaactgaggcacaacaaaaggaagtacctgccaaacattattagcaggtgaaaaggcaggattgaattcaggtctctttctctagagcctgtgctcctccagggcaacagacagggtctttctcatttctgggtcccctcactcacgcccccaagatcttagccgacaattggtcctcgattccagtggtcctcaaagtgtggtccgtggaccatgcaaatcagctaactccttgttcctagaccacagtgagctaagtaccaaaatcctgagtaaaaaattagaaatgttttatagtaatttggaattgccacaacatgcaaggggtgtgacctgaaaagatgggtctgagatcgattgtagataatttgagaaacactgctctattcagttatacctagaaggaaggcatgagccgtgggcctgcagaggaaagcatggggtctccaatagatccacmacagggaggcaggtgggcagactgcccatcccaccagtcagatggtggtcttcacttggccagcctagagaagtcttcctaggaacccc

SEQ ID NO: 950118 - DNA, 577 bp, Homo sapiens
caaacagggctctgtgctctgtaagcrcagactcccatcttgcatccccagcccctggcacccaccattctgctctctgtccctgtgaatatgactgccctggggatgtcatgtgagtggaatcagacagcatttgtcctttcctgactggcttacttcacttagcctcatgtcctcaaggttcatccctgctgcggcaatgggcagaacttcctttttaaagctgaacactgttccattgtgcggatggaccacattttgtttgtccattcacccattgatggacactgggttgtttctgccttttggctgttgtgaatagtgctgctgtgaacatgggtgtgcaaatacctctccgagtccctggttccatttctgttgggtgtatactcagaagtgggattgctgggtcagattgtgattggatgctgactgttttgaagagccgccatactgttttccacagcagctgcactgctttaccttccctccaccactgcacaaaggtcctggtttctccacatcttcgccatcactcattactttctgtttttctttaataatagccatcctaatg

SEQ ID NO: 950119 - DNA, 591 bp, Homo sapiens
gctcactgcaacctttgcctcctggttaaagcaattctctggcctcagcctcccaagtagctgggattacaggcatgcaccaccacgcccggctaatttttgtatttttagaagagacagggtttcaccatgttagccaggctggtctcaaactcctgacttcatgatccacccgccttggcctcacaaagtgctaggattacaagcatgagccaccactcctggccatgaatgtatttcttaaataataagacttgaaattctaacttatcccttgatccatgggctgcacaatagatgttgtgttagagggcatgaaacaacactaatctccttgtagatatccatcagagctcttgggtgactaggtaaattgtcaatgagcagtaatattttaagaggaatatttttttctgagcaataagtcacttaagtaggcttacaatattcagtaaaccatgctgtaaacagatgtgctgtcatctaggctttgttgttttatttctagaacataagcagagaagatttggcataattcttaagggccctagsgttttcagaatggtaaatgaccactgacttcaacttaaa

SEQ ID NO: 950120 - DNA, 584 bp, Homo sapiens
ctcactgcaacctttgcctcctggttaaagcaattctctggcctcagcctcccaagtagctgggattacaggcatgcaccaccacgcccggctaatttttgtatttttagaagagacagggtttcaccatgttagccaggctggtctcaaactcctgacttcatgatccacccgccttggcctcacaaagtgctaggattacaagcatgagccaccactcctggccatgaatgtatttcttaaataataagacttgaaattctaacttatcccttgatccatgggctgcacaatagatgttgtgttagagggcatgaaacaacactaatctccttgtagatatccatcagagctcttgggtgactaggtaaattgtcaatgagcagtaatattttaagaggaatatttttttctgagcaataagtcacttaagtaggcttacaatattcagtaaaccatgctgtaaacagatgtgctgtcatctaggctttgttgttttatttctagaacataagcagagaagatttggcataattcttaagggccctagcgttttyagaatggtaaatgaccactgacttcaa

SEQ ID NO: 950121 - DNA, 663 bp, Homo sapiens
aagaccgctcaaggagagtctgaggtcagacacgcctrccactgcctctacctgatggtccttccctacctaccctggtaactgaagacaaagggcatatactcttgggagttcaagggggtggtggtgccccccaccacctgttcctccccattctactaccgctgatgctcttgaaatcaccaccttccgcaggaggacaaccaacccaaaaatagtgcattaagcaaccaaagccaaggaccctcacagagcccattttactcccccaccacctccaccagagcagatgctggtatcaatggcagaaagactcacagatggttcacatcagaggattctgtgcagacaacctccagtaccagcccagagcctggtagacttgctgggttgctagatccagaagagagataacaatctttacagcttggctctcaggaagccacatccctaggaaaagggggagagtactacatcaagggaacactccatgggacaaaacaatttgaacaacagcctttggccttagacctctgtgacaaatgagaagaaaccagaaaaccaactctggcaatatgacaaaacaatgttcttcaccacccaagaaaaaatcacactagcccaccagcaatggattccaaccaagaagaagtccctgattta

SEQ ID NO: 950122 - DNA, 632 bp, Homo sapiens
ttcacttattatctaatgtcttcagggtttgtggtgatatcagttgtttcatttttttatattggtaaatcgcatcttctctttmttttccttgtcactcttgctagaaatttgcaagaaccaactgtttctttttctctctttttctatttttaattttgttaatttctactcttatctttattatttcctttcttttgcctgctttattttatttattcttcttttagtttcttgaggtggaagctaagactattaatttgaaatgtgtcctgcattccaatgtaagcatttagtgctataaatttttctctcagtactgctttagctgcatcccacaaattctgacatgtattatttccattttcattcagttcaatgtatttttttatttcccttgagagttcttctttgactcaaaggttatttagaagtaaattgtctagtttttaagtgattggaggttttactgttattttttaaaataatttctagtttgatgtcactatagtcagagaacatgctctggatgattttaattgttataagtttgttgttgttctttttatgactcagaatatgatttaacttggcatatgttccataggtgcttgaaaaaaatttgtattctg

SEQ ID NO: 950123 - DNA, 586 bp, Homo sapiens
agaaactaagaaatacccattttgcaaatatgagaatgaagcatagaaggcccaatcaacttacctaagatcccacagttagtaagaaatggttgcaggagattcacctaggcatccttagagtttgctttcaactttaatagacaactgcacctcataatgtctctacccctaatgagatatataagtgaccagttactctgaaaagtgcaatggagacttggggcagacatagggtgcagctataggagcacaagatgggcatataaccctgcttttgaggggaggcttgagtatcagggaagatatcctaagggaagtgatgatattgagctgataaagatttttttttttaatttaaaaaaattttaagttcaggggtatgtgtgcaggatgtgcaggtttgttacatagataaatgtgtaccatagtggtttgctgcatagaccatcccatcatccaggtattaagtccagcatccattagctatccttcctgatgctmcccctcctccccattaccctctgacaggccccagtgtgtgttgtttcccccgatgtgtccatgtgttctcatcattcagttc

SEQ ID NO: 950124 - DNA, 606 bp, Homo sapiens
ggtgtcctcataagaagagattaggacacagacacacacagagggaaggccacgtgaagacatagggagaatacaaccatctataagccaaagaaagagtgcacagtgaatcagcaagagaactaacataaccaactccatttttgtttaaggggcctttacccattcctgcacatggacaaggataattttagagcactgagataatatgcaaaaacagcaatcaggtagtttttaaaactaactctgagattaaaggagaagtgtgtgaacaactatgtttcgttaaagattgatgagagcactgtgacttgactaaggacaaggatattcccaacctccttggacccttgccggcgcccagatgtctgtggtcgtcagttacctcttcatcccaaccctctccccttccccctgccttaacataaaaacagcctaaaatgtgttctgacttcagagggtcctctgggaygctagtccaccatcatcttcgtttgctggctctccagataaacctgcttttcctcccaccaactctcgtctctcgtgggtggctttcaagtggcacgcagccgaacttgggttcagttatgagaggcctcagaa

SEQ ID NO: 950125 - DNA, 747 bp, Homo sapiens
tccacaactcggtgtctgaggggttcttgtctgtggctcgtcctgctacatttcttggttccctgaccaggaagtgaggtgattagtgggaggccgagtcagcccmttacgcagcttaggcataccctgtggagcatccctgtgggggactccggccagcttgagtgatgcagatcctgagagcgctccccagatcctgagagttctcccaggtaggcatttgccctggtggaatgcctcatcagagcggtgcatggcaggcccccgcggaggatcaacacagtggctgaacaccgaaaggaactggtacttggagtctggacatctgaaacttggtaagactggtctttggaacttgctcactccatttgagtggaagtgtagcctgatcacccatgacgtgcctgtaccggcactttggtttttgtttttgacttgacttggattgcttgatactttggttttggttttgacctggcttggatttcttgatactctgttttgattttgattctggtttggtgtaaactgtaaaagtgtgtgtgtgccctttttacccattctttgttttgtggcgtgtgtgtggtgtgagcgtggtgttttgtctcaaggaaacataggtcaggcacaaagtaagcccaccccactaggaactatattgaaaaatttcaaaaagggatttaggggagactatgaagttactataacaccaggaaaacttagaactttgaaatagactggccagga

SEQ ID NO: 950126 - DNA, 566 bp, Homo sapiens
ttcccacaattcaggatgtgakatcaaataggatcagagatgggctactgaaagtttaacaaccgactgttggagaagatactgatttgtagatttgcaaatctctgtggtatattctggccgatttctagctattaccatggtgtcaattggccctctaaactgctggagatttaataattcactctcaccagtttgtgtgagctggctctgctatcttaccaataaagggcaaaattagactttcccccatttctctagctgaaattattgaggtactaaagaatattctagaagcttagaactaaaagggtctttgaaggtcactgccctacatctcttattttacaggtgaagaaactgctgtccacaggggttaattgttacctttccttaacctgtatttttatgactgctgcctttgtggcaatgtgacataacagactggagtgggtcaaatgttcattcttcacaagactggattaaagatcagcctttgatttgcagctactgacactgtttgctgagtttttgctgtttatcacttaaaataataaaattataaa

SEQ ID NO: 950127 - DNA, 587 bp, Homo sapiens
catcaagtgtagggtctgaaaaatacttcaagcaccgatcttaggttttaaaatagcgatattattcctatgagcaattgggaaggtttagaatcttgtggcccctagctgcatgactcctaaaacataatttctaatcctgttgctaatgtgttagtcctatgaaagcagtctggtacccaggaaaacaagggtttgttttggaaggggggtgttacattatctttgtttcaaagttaaactataagttcctcccaaagttggtttagcttacgtccagaaataaacaagaacagcttggagattagaagcaagagggagtcggttatgtcagatctctttcactgtcatattttttctcaccattataatttttgtaaaggcagtttcactaccatcgtcagcaaggtatagttacaggaaaggggccccaatccaaaccccaagagagggttcttggatctygtacaagaagtaattcagggcgagtccatagagtaaagtccatagagttcacagagtaaagaaagaaagtagaggaataaaagaatgtctactccatagacagagcagccccaagggatgtt

SEQ ID NO: 950128 - DNA, 634 bp, Homo sapiens
ctgaactctaaataaggcctgctgaagggggactaggggtaaaasatggaataagctaaagaacaacagagaaaccatgaattttagtgaaaataaaatgaatccccttttgccatatctcctccagtgcataggctcactgcctcagaggttccttatccaagaatgcatgtggttgaggccacagggaaccattggtaaggatttctctctcacataggaagcttgttttaggtgggcagtacatttgaaacccacttggaggtctgtctaatgttgacagtggggtgttaaagtctcccattgttattgtgtgggagtctaagtctctttgtaggtctctaaggacttgctttatgaatctgggtgctcctgtgttgggtgcatatatatgtaggatagttagctcttcttgttgaattgatccctttaccattatgtaatggccttctttgtctcttttgatctttgttggtttaaagtctgttttatcagagactaggattgcaacccctgcgtttttttgttttccatttgcttggtagatcttcctccatccttttattttgagcctatgtgtgtgtctgcacgtgagatgggttccctgaatacagcacactgatgggtcttgact

SEQ ID NO: 950129 - DNA, 755 bp, Homo sapiens
taaatctctttggggagagatgaaggagtgcggtgttcccctctcctcacttaagccaggtgaaaaagttctcaatagaacttctgggaggtgtgccctgtgttggaggacacagaggctagtttctggtacacatctagaaatattaaatgtgaggggctggttataccttccccaggtcagagagttgggagtgcagcagcagcaggaataagaagtacttttagctgtaatgggacaagtgtggtccttggaagatagttggggctatgttgaatttaaagcactctgccccaaagttctgcctgtgccagtgaggtaaatcacaagccaagagcctatctttcactggaacaatgtagagggaggcccctaagtggggagttccccaaaaaatggactaaagagaaagggctagcatttaggtatctgacccttacagggagctctgaccccagattaatatcagtgaaatgactttttaatctatctctcttctcttctgctggcccccattctcagcagagaagtgagaaaggaagtaaaacaaaaataggaaaagctgtctttctgctcccttcttctactgcctcccaatcaggtttctaagctcagatcaaaccaagcattttaaatgaaattaggttgaaattttgacttagatttcattaaacatttgaataccccagaatgagagtgttatttatgtttaatactttaaattgactgaaaargctacaagatctgcttcaaat

SEQ ID NO: 950130 - DNA, 618 bp, Homo sapiens
ggcaatccctcaaaaatctagaaccagaaataccatttgacccagcaatcccattactgggtatatacccaaaggattataaatcatgcacacgtatgtctgttgcagcactgttcacaacagcaaagacttgggaccaacccaaatgcccatcaatgatagactggataaacaaaatgtggcacatatacaccacggaatactatgcagccataagaaaggatgagttcatgtcttttgcagggacatggatgaagctggaaactatcgttctcagcaaactaacaagggaacagaaaaccaaacgctgcatgttctcacttataagtgggagttgaacaatgagaacatatgggcacagggaggggaacatcacatatcagggcctgtcaggggttgggggccaaggggtgagagaacattaggacaaatacctaatgcacgcagggcttaaaacctagatgacgggttgacgggtgccacaaaccaccatggcacatgcatacctatgtaacagtcctgcacattctgcacstgtatcctagaacttaaagtctaataataatttaaaaaattgggattgtgtgttaccaagcagtatctaacctttgcatctaa

SEQ ID NO: 950131 - DNA, 640 bp, Homo sapiens
aagtctcacgagatttgatggttttataaagggtggttcctctgcatgcactctcttgcctgctgccatgtaagacatgtctttgctcctccttcawcttccatcgtgactgtgaggcctccacagccatgtgaaactgtcagtcccttaaacctctttttctttataaattacccagtctcgggtatttcttcatagcagtatgaaaatggactaatacgagatcccgcaaataagtgagaacatgtgatgtctgcctttctgcacctgggtttcttaaaactctcaaaagtagaattaactctttctcactggaacactcttttgctaattcagtaaaaatgttctggaacagcatttctcaaagcaagttctattaataattgttctatgaaagaatggatctgtgttcaagtaagtttggaaaatgctaagtttataatgttaaataaattaaccttcctgcaaagcactgtaatctctattatatatatattttcccccaatgtgcttcctcttttttttttctttttttgagatgaggtattgctctataaacccaggctgtagtgcagtggcaccaccacgctcactgtaaccccaacctctagggctcaagtgatcctcccacctcagcctc

SEQ ID NO: 950132 - DNA, 689 bp, Homo sapiens
ttcatccaacataaactatccaactgggaaggcttaaaactggaatctttctacacaattaaccagccaaggggacatgcatagaaataagatgttggaaacatttaccctgggctgctgggggcagagtgggctgccaggcagtcagtggtgaagccgtccaggccactgcccccagcttggggacaattaaatgatccttccctttgccattagccacagactcagctgctgagggcttaaatgttcatgagaagatttgcgcggatccacatggcacctttgcaggacatctctctgaagggtgcttgtgaacctgtgcttggtatttttttttttttcactaattccgggcctctccctcttctgcctctgaggttccttgttagaaggagtgggagccacgcagtgggtgccaggagagaaagcctgtaccaacccatggaacccactttgctcactaggctgggaccccaggggacccagcaggagcaacagggcagcggtagcccgtgactttgatgtttgcctgtcttcactcgctgtctttgttcttaayggaagctgcttctctcacttctcttgtggtttttagaaagaccttgaagcaaagatcagaagagctggttcctggtaaaccattaactgggcatttattatgtgagcaggttgttgctgagtcaggccag

SEQ ID NO: 950133 - DNA, 571 bp, Homo sapiens
gcctcagtctccccctctggaggatgccrttgctagaaagcacaccatggcacgatggttcagaggccccagcccagcaccttctgctcagcatccctgtgctcaccaggcacagagcaccatggcactcttatgtggttaacaaacagcagactgtggggttatacaggcagctctgtagctacaaatcaccaaggagaggctgaggcccagcacagccctgaggctggacacccaccagcatggacctcatcgacttgctctgaggatcacatgatataagaaatgtaaaatgcttcattgagtgcccggtatataataaaatcttgataaatatcaactattaggagtaacagcccacatttatagagtgcttatgtgcattagccactgttatgagaacattagggtgactaactcattgaatcctataccatccccagaacgtaggcgtccccatgtcaggaggaaacagagcacagagatgtgaagttattgccaagagtcacacagctctcatggtggccccaggatgggagcccaggcagcctggctcctgaggccacattct

SEQ ID NO: 950134 - DNA, 602 bp, Homo sapiens
gaatatacttgatatcattttgatttttaaaaatttgttgagacttcttttgtggcatagtatatrgtcactcctggagaaagttctatatgttcatgagaagaatgtatattctgcagttgttggataaaatgttctgtacatgtctgcctgttaggttcatttggtctaaagtccagtttaagtccaatttttttccctgtctgaatgatctatgtaatgctgagaatgaggtgttgaggtccctcactattattgtattgctatttctttctttagatctactgatattttctttatgaatctgagcactccagtgttgggtgcatatatatttataattgttatagcctcttgctagattcatccctttatcattaaataatgaccttctttatttctttctatgctgtttttggcttaaagtcttttaaaatctgatataagtatagctactgctgctcatttttggtttccatttgcatggaatatcttttttcatccctctacttccagtctatatgtgtctttataggtaatgtgtatttcttacaggcagcatatggttggattatgttttatccatgtagccagtctatgtt

SEQ ID NO: 950135 - DNA, 604 bp, Homo sapiens
tagcatacagaagagccaacacgtattcctggtttttcttctcagtccctggccctgacttctcattttcttctgctgaattcaccttttcttgatgagtcttaggtgttggtgtgccccttttcttccctctgtacatatgttcaccagatgatcttttgcagtctcggggcataaagtaccatttatattctaaagactctcaaatcttacgtgcagtttcaacttcttcctgaacttcagactcatatatccaactgcctactgaacatcaccatttagttgtcatcacaaatacatcatgtcctaaactaaactcttgattttctaccccaccacacctgatcttcccccattcacaaaattgcccaggtccaaaattttggtatcttcttgactctttctcatatctcaaacccaacgtagtaataacttgtcagccctacttccagaatgtttcctgaatccagccatgtctttccacctccatttctgtaattccagtcaatactgtcttmatctctttgcagaacctatgcagtggcttcctacctggtctccttgcttctacttttgtcccctagatctgttatctccagagcag

SEQ ID NO: 950136 - DNA, 573 bp, Homo sapiens
ctgcgggatagtctgctgtgtccatggagcagccattgtgctgtgcaatgttactctaataaacttgttttctttcactgtcagtttgctcttgaattcttcctgagtgtggccaagaaccttcccaaacccattcccaatttgtgggttcactggcatcagcttacatccagttttacagcaatcttctccacctttgaaatgctacaaacatgtttgtatttttatcatcagtaatatttttcaatcttgtgagaatgtttctttcaaaagaaggtactttatttccatcccatattgctttctatattttatttgatcagtttgaccatggcaagaacaagtatgactttgatggtatggggtattagaattttacttttaaataagaaactctagaataaccacctaaatctttaccattaagggtatttccacagaattattgtgttaagcatggactgacttgttaaaaaattrctatagtaattgttcttcatatactagacagtaaattttgaaatcttttgctaataattacggcttaatcctattattttctagtatctcagg

SEQ ID NO: 950137 - DNA, 670 bp, Homo sapiens
aagaatagagaacccagaaacaaagccacttacttacaaccaactgatctttgacaaagtcgacaaaatttttttttcaatrctaacgtttatacttgttattaaatttgtggctgaaattttattatttgcgcttttaatactgcatgtaatcttttattccgtttcattttcaaactggacattgttttctgtaggtatacttttcctataaaatattaacttggaacatagtaatctattaaattataatttataaaatgtttaagttaatcacattaagctttcaaggtaatcaaatttacctttcaagtaataaacattttactatatcctttcccatattgatacctttctttattctcatttctaattatagtagctaccgtctcctaaacaatgttacataataatgtcaatcatggggatctattttatttctattttagaaaggataatttctgctattgtttcattactttgaagttggctttttggccaactcttttttatctatttctatatattccaagaatttaaaaaattatccatttattccaaatcttataatatttaatattattttgcattttataaaatgcttttcagcatttgtagaaagaattatatatttaatctgattatttaattgatcataaaaatgcatttc

SEQ ID NO: 950138 - DNA, 598 bp, Homo sapiens
agtaaaccttgacttttaatactcggccaatacactttggggcttttaaaagaaagaatttaggagcttccactattaaaatgtgtaaatttcaggtcayttaaaattttacatttttgtacttttaggatttgttataacactttttttttttttgagacggagtctcgctctgtcacccaggctggagtgcagtggtgcgatctcggctcactgtaagctccgcctcccgggttcaagccattctcctgcctcagcctccctaagagctgggactacaggtgcctgccaccttgcctggctaatttttttttttttttggatttttagtagagatggggtttcaccgtgttagccaggatggtctcgatctcctgacttcgtgatccacccgcctcggcctcccaaagtgctgggattacaggcatgagccaccgcgcccagccaacgctttcttaaaatagttatttactattttaaaaccagaaagaatacaactgggggaggtcccagatccctgtaaatgacttgatgacttaaagtcaattttccacgtaaggcaagtcaacactcttcttttctcctaaaactgtgctat

SEQ ID NO: 950139 - DNA, 558 bp, Homo sapiens
agcctcagggtagtttttktttgtttgttttttgtttttgagacagactctctttctgtcacccaggctggagtgcagaggcgtgacctcagctcactgcaacctccgcctcctgggttcaagtgattctcttgcctcagcctcccaagtagctgggatcacaggtgcgtgccaccacgcccagctaatttttgtatttttagtagagacaagagttggccaggttggtctcgaactcctgacctcaggtgatccacccaccttggcccctcaaagtgctgggactacaggtgtgagccacccttcctgggctagggtagtttttaaaatgcctgatggcgcaaggacagcactacccagccaaggggtggctcccaataggcctggcaggacctgccctctattatcccaagggcacaacactgggcagcagcaggaggaggaaagtttccagggaagggaaacagggccccaggggagcgggagaggggaggctggggcagcggaaggttcttgtgggtcaggtagccggacgtaagcaggacacgtagggcaacc

SEQ ID NO: 950140 - DNA, 558 bp, Homo sapiens
agcctcagggtagtttttgtttgtttgttttttgtttttgagacagactctctttctgtcacccaggctggagtgcagaggcgtgacctcagctcactgcaacctccrcctcctgggttcaagtgattctcttgcctcagcctcccaagtagctgggatcacaggtgcgtgccaccacgcccagctaatttttgtatttttagtagagacaagagttggccaggttggtctcgaactcctgacctcaggtgatccacccaccttggcccctcaaagtgctgggactacaggtgtgagccacccttcctgggctagggtagtttttaaaatgcctgatggcgcaaggacagcactacccagccaaggggtggctcccaataggcctggcaggacctgccctctattatcccaagggcacaacactgggcagcagcaggaggaggaaagtttccagggaagggaaacagggccccaggggagcgggagaggggaggctggggcagcggaaggttcttgtgggtcaggtagccggacgtaagcaggacacgtagggcaacc

SEQ ID NO: 950141 - DNA, 580 bp, Homo sapiens
ttaggaaagtgtctgaatctggttaagtatcagcacacgtgaggaacttgctaaagggtagaagcctggtaaagttaaaggggtgagggctccactcacctcccctgcatattgcaagcctccctgagagagcaggttccactccggccaagccagcacacctggctccccagcaagcttttctcaaaggatgccgcatggggcacgaagccaggaggacctggtgcagtggatgggatcacatcctcagcctgcattctgggaggggccttcacacttttttgtttgtttgtttttttgagtttgagtcttgctctgttgcccaggctggagtgcagtgccacaatcattgctcactgcagcttcaaacatctaggcttaagagatcttcctgcctcagcctcctgagtggctgggattacaggcataagccaccatgcctggctaatttttaaattgtttgtagacacagggtctcactaygttgttgaggctggtttcaaactcctggcctcaagtgatcctcctgccttggcctcccaaactgcagggattttgtgtgagccactgtgcttggcca

SEQ ID NO: 950142 - DNA, 594 bp, Homo sapiens
gcttctgcaattagcagcaggggttgtattacctgcatagtttggccttgaaggtgcaggcgatctttgcaggccacctcrtagaagtcgtaatactccagaaaggacttctccatcacccctctggaaaacaagcagaaaagtgtaagtgagaaacccaggggtacaggtcaccccttccttacctaaccttttttttttttcagatggagtcttgctctgtagcccatgttggagtgcagtggtgcaacctcagctcactgtgacctctgcctcccggattcatgcaattctcctgcctcagcctcctgagaagctgggattacaggcatatgccaccacgcctggctaatttttgtttttagtagagacggggtttcaccatgttgcccaggctggtcaggaactcctgacctcaactgatctgcctgcgtcggcctcccaaagtgctaggactacaggcgcaagccaccacacctggcctctttacctaaccttaatgccaaattaaatacctaccattcccaagtccagatctgttttctacaaagatcttttcattttatttattttttatttttttgagactgagtc

SEQ ID NO: 950143 - DNA, 752 bp, Homo sapiens
gaaggctaaaaagcagtgccagtggggtgtgcagcggggcttgaagtcactcaagcttcctstctctcaggaaactatgagctctgatatattcctggcttcgggtctcacagcatgttgtgatttgaagagaggtggaaccacagggtctgtgtagttgggaaatacattttactgaaatgcctctagtgcatcacatgatgaccttggtcagggtcagtgcaggacctgtactgggggctagccagttgcttataaatcaaaataaaccgattgggtattctacaacccaagtgttattcttacatcaactggtaaagtatgatttggtgctgaaacccagcagttcttctctgtactactttagttcagttgaacaaagagctagaaagagaaaccacaatatgaattccaagttaattaaagtatcttattgaaaagaaatgtattggtcgggcgtggtggctcacgcccgtaatctcagcactttgggaggctgaggcgggcggatcatgaggtcaggagattgagaccatcctggctaacacaatgaaaccccgtctcactaaaaatacaaaaattagctgggcgtggtggcaggcgcctgtagtcccagctacttgggaggctgaggcaggagaatggcgtgaacctgggaggcggagcttgcggtgagcagagatcacaccactgcactccagcctgggcgacagagtgagactctgactcaaaaaaaaaacgtattttataat

SEQ ID NO: 950144 - DNA, 472 bp, Homo sapiens
caagaagtgagctctcatggccttgggcagctctgcacctgtggctttgcagggaatagcagccctcccagcctctttcatgggctaggattgagtgtctgtggcttttcccagcacacagtgcaaaatgtcagtggatctaccattctggggtctggaggatggtggccctcttctcacagctccactaggcagtacaccagcggggactctgtgtgggagttccaatcccacatttcccgtccgcactgccctagcagtggttctctatgagggctatgcccctcagcaaacttctctctggacatgcaggcatttccatacatcctctgaaatttaggtggaggttccccaacctcaattcttctgtgcaccctcaggatcaataccacakgaaagctgacaagtcttggggcctgcatcctttgaagcaatggcctgagctgtaccttggcccaatttaaaaatgttc

SEQ ID NO: 950145 - DNA, 596 bp, Homo sapiens
ccagggctgcaaaaagcagcaaggtcctgggcccyggcccatgaaaccagattttttcttctaggcttcttggcctgtgatgggtggggctgccatgaagacctctgacatgccctggagatattttccccattttcttggtgattagtatttggctcctcattacttatgcaaatttctgtggtgagcttgaatttctcctcagaaaatgaggttttcttttctatcgcatcatcaagctgcaaattttccaaacttttatgttctgctttctttttaaacataagtttcaattccaaaccatatctttgtgaatgcataaaactgaatagcttctaagagaacccaagttacctcttgaatgctttgttgcttagaaatttcttctgccagataccctaaatcatctctctcaagttcaaagttccacagatctccagggctgggacaaaatgccatcagtctatttgctaaagcatagcaagagtgacctttaccacagttcccaacaagttcctcatctccatttgagaccacctcaacctggtcttcattgtccatatcactatcagaattttggtcaaagtcattcaaca

SEQ ID NO: 950146 - DNA, 578 bp, Homo sapiens
taatgaatgatgttgggaaaactggctagccatgtgcagaaaactgaaactggatcccttccttaaaccttatacaaaaataaactcacgatggagtaaagacttaaatgtaaaacctaaaaccataaaaaccctagaaaaaaacctaggcaataccattcagaacacaggaatgggtgaagacttcatgactaaaacaccaaaagcaatggcaacaaaagccaaaatagacaaatgggatctaattaaactaaagggcttctgtacagcaaaagaaactatcttcagagtgaacaggcaaccaaagaatgggagaaaatttttgcaatctatccatctgataaagggctaatatccacaatctacaaagaacttaaacaaatttacaagaaaaaaaatcccatcaaaaagtgggcgaaggatatgaatagacactcgtcaagagaagacatttatgcagccaacaaacatakgaaaacaagctcatcatcaatggtcattagagaaatgcaaatcaaaaccacaatgagataccatctaacgccagttagaatggcgatcattaaaaagtcaggaaa

SEQ ID NO: 950147 - DNA, 609 bp, Homo sapiens
ggataaagctccaaaagtgagccctgggccctgaacaaaatctggaggcattattaaacctagcaacctcrgtgttctataatagggaccaagaggaacaggcccaaaaggaaaagcgagatcagagaaaggctgcagccttagtcattgccctcagacaaaccaaccttggtggttcagagaggacagaaaatggagcaggtcaatcaccaggaaagacttgttatcactgtggtttacaaggatattttaaaaaagattgtccaatgagaaacaagctgccccctcgtccatgtccactgtgcctaggcaatcactggaaggcacactgccccagagggcaaagtttctctgggccagaagcccccaaccagatgatccaacaacaggactgagggtccccagggcaagcaccagctcatgtaatcaccctcactgagccccaggtacatttaaccattgaggaccaggaaattgacttcctcctggacactggcgcagcgttctcagtgttaatctcctgtcctggacgactgtcctcaaggtccgttaccatccaaggaatcctgggaaagcctgtaaccaggtatttctcccacctcctcattt

SEQ ID NO: 950148 - DNA, 609 bp, Homo sapiens
ggataaagctccaaaagtgagccctgggccctgaacaaaatctggaggcattattaaacctagcaacctcagtgttctataatagggaccaagaggaacaggcccaaaaggaaaagcgagatcagagaaaggctgcagccttagtcattgccctcagacaaaccaaccttggtggttcagagaggacagaaaatggagcaggtcaatcaccaggaaagacttgttatcactgtggtttacaaggatattttaaaaaagattgtccaatgagaaacaagctgccccctcgtccatgtccactgtgcctaggcaatcactggaaggcacactgccccagagggcaaagtttctctgggccagaagcccccaaccagatgatccaacaacaggactgagggtccccagggcaagcaccagctcatgtaatcaccctcactgagccccaggtacatttaaccattgaggaccaggaaattgacttcctcctggacactggcrcagcgttctcagtgttaatctcctgtcctggacgactgtcctcaaggtccgttaccatccaaggaatcctgggaaagcctgtaaccaggtatttctcccacctcctcattt

SEQ ID NO: 950149 - DNA, 609 bp, Homo sapiens
ggataaagctccaaaagtgagccctgggccctgaacaaaatctggaggcattattaaacctagcaacctcagtgttctataatagggaccaagaggaacaggcccaaaaggaaaagcgagatcagagaaaggctgcagccttagtcattgccctcagacaaaccaaccttggtggttcagagaggacagaaaatggagcaggtcaatcaccaggaaagacttgttatcactgtggtttacaaggatattttaaaaaagattgtccaatgagaaacaagctgccccctcgtccatgtccactgtgcctaggcaatcactggaaggcacactgccccagagggcaaagtttctctgggccagaagcccccaaccagatgatccaacaacaggactgagggtccccagggcaagcaccagctcatgtaatcaccctcactgagccccaggtacatttaaccattgaggaccaggaaattgacttcctcctggacactggcgcagcgttctcagtgttaatctcctgtcctggacgactgycctcaaggtccgttaccatccaaggaatcctgggaaagcctgtaaccaggtatttctcccacctcctcattt

SEQ ID NO: 950150 - DNA, 609 bp, Homo sapiens
ggataaagctccaaaagtgagccctgggccctgaacaaaatctggaggcattattaaacctagcaacctcagtgttctataatagggaccaagaggaacaggcccaaaaggaaaagcgagatcagagaaaggctgcagccttagtcattgccctcagacaaaccaaccttggtggttcagagaggacagaaaatggagcaggtcaatcaccaggaaagacttgttatcactgtggtttacaaggatattttaaaaaagattgtccaatgagaaacaagctgccccctcgtccatgtccactgtgcctaggcaatcactggaaggcacactgccccagagggcaaagtttctctgggccagaagcccccaaccagatgatccaacaacaggactgagggtccccagggcaagcaccagctcatgtaatcaccctcactgagccccaggtacatttaaccattgaggaccaggaaattgacttcctcctggacactggcgcagcgttctcagtgttaatctcctgtcctggacgactgtcytcaaggtccgttaccatccaaggaatcctgggaaagcctgtaaccaggtatttctcccacctcctcattt

SEQ ID NO: 950151 - DNA, 524 bp, Homo sapiens
gttgggtcccaccaggattaggcccttcccttcaaggcagcaagtttctttctggcccagtgtatgtctagaaatattgtctgggaaccagtatctggaatggagatctcacatttctgtctggtgccctatcctacagtggctgagctggtatccaaaatgaaagacaaagtcctctttactcttcccactcctctcttcaagcagaaggaagaaatctcttttggagccataagttttgcagcctggggttgaaggaagagtggtgcaagcactcccttagccaccaaggctattgtctcagtaggtcacgtaccttccaagttcactggttctaagcccagctcaccagtatgactcacctaggagttgcagtctttgtggcctagaatgtctttcaagtttatttagggccccaagtactttagtccacaatggcaagtttgctagaactcaagttccaaccmctgggatgggtgattcaccttctgctaaggccactttgtatgttccctctgtagcag

SEQ ID NO: 950152 - DNA, 690 bp, Homo sapiens
cacaagacaaaatcctgtgagacatcctcacaactgtttattccaaacatccaatttaaaccaagtctctctgattatttctcttaggtatatgctgaatcttacctcttcattctcattgccattgccaaggcatttttctcaactgtgctattatagcaacctgtgattcatatccttaattccaaatatataacattcaagtgtatcagaatgatctttgaatgtgatcccattgctcagaaccctattgtctaccaaactaagatccaatctgctttacataaagatacactctcaaaaatctgtcccttacctacgtttctagcttaatatctcatccacttcccttttgaaatgtatacttcaaaatactcttttaggctgtttacagtaccctaaaaaaaccgagatcacgccactgcactccagcctggatgacagagcgagactctgtctcctaaaaaaaaaaaaaaaaaaaaaaaaaaagaaccttgtgggttcccttcacaaactgttttctttggcctaaattctcttgttactatcttcttcctgcagaacccctagtcattttccaaaccgkggcacagttacgactttctctgaaatcatataataaaaattaagtatccctttattatcttttacatatgtttattactaagcacatattttgttgatatgcct

SEQ ID NO: 950153 - DNA, 714 bp, Homo sapiens
cactgtgagggtaaacctgcctactcaagtctcagaatgtggacgcttcttccccccaccaagtttgagtgtcccggcttgccttctgactgctgtgctggcagtgagaatttcaagccagtggatctgagcttcttgggctccgtgggggtgggaccttccaagccaaccacttagctccctggcttcagccccctttccaggggagtgaacggttttgtctcactggcattccaagcgccactggggtatgaaaaaaaactcccgcagctagcttggtgtctgcccaaacaactgctcagttttgtgcttaaaacccagggccctggtggcataggcactggagggaatctcctggtttgcaggttgcaaagaccatggggaaagcacagtatctaggccagagtgcactgttcacagtccctcatggcttcccttggctagggcagggaattccttgactccttgcacttcctgggtgaggcaataccccaccctgctttggctcaccctccatgggctgcacccactgtccaaccagccccagtaagatgaactgggtacctcagttggaaatgcagaaatcacctgccttctgcgtcgatctcrctgggagctatagactggagctgttcctactcaattattttgccagcgatctcattcaccggtttttaagttgtctttaaagcatgcagtttctaaggcctaata

SEQ ID NO: 950154 - DNA, 578 bp, Homo sapiens
cttgaaaacctagcctcaagcgttcctcccaccttggcctcccaaagctctagaattacaggcatgagccaccacacctggccttaaaatgttattttagattaggcaatatcagttgaaagatgggagaagaaagaagaaaaaacgggtatcagttgaaagttgggagaagaaagaaaaaaaagggagattaagcaatagagagaaaattcaaaacaagacattgggaataccaaggaatttactgaccactgatcaggagttctagagggcatagtaaaagggtttggcagagagagactgggcagagagaattgggctagatttggggctgacagagccaaacagggtaggggttctggatgacaaatatatctgaaagctttggcttggtcctggaagtgactgtggtcaacagagagacagaacccaaggatcttggttgcccacctttctacaagaggaatcaggacaaggaatagaccttggtgctgacctgaatggtttcaaggcctttggtgactgattcctatggcttaaggggggatrtgagtggtggctaatcccatgggagatgt

SEQ ID NO: 950155 - DNA, 566 bp, Homo sapiens
aaaaggggccaagatacggcttgggctgttgcttcagagggtgcaagccccaagccttggcwtcttgcatgtggtgttgagcctgtgaggcttaggaacctccacctagatttcagaggatgtctggaaacacctggatgtcaggcagaagtctgttgcagggtttaggccctcatggagaacctctactagggtggtacagaggggaaatatggcgttggagcccccacacagagtccccactggggtactgactactggagctgtgagaagaaggccaccatcctccagaccccagaatgatagatccaccaacagctcacaccatctggaaaagccacaggtactcaataccagcccacaaaagcagccacagggatggagctgcccaaggccatgagagcctgccccttgcatcagtgtgtcttggatgtgagacatggagtcgaaggagattgttttggagctttaagatttaatgactgcctgttgggttttgggctttcatggggcctgtagtccctttgttttggccaatttctcccttttgatgggagcatttacct

SEQ ID NO: 950156 - DNA, 566 bp, Homo sapiens
aaaaggggccaagatacggcttgggctgttgcttcagagggtgcaagccccaagccttggcttcttgcatgtggtgttgrgcctgtgaggcttaggaacctccacctagatttcagaggatgtctggaaacacctggatgtcaggcagaagtctgttgcagggtttaggccctcatggagaacctctactagggtggtacagaggggaaatatggcgttggagcccccacacagagtccccactggggtactgactactggagctgtgagaagaaggccaccatcctccagaccccagaatgatagatccaccaacagctcacaccatctggaaaagccacaggtactcaataccagcccacaaaagcagccacagggatggagctgcccaaggccatgagagcctgccccttgcatcagtgtgtcttggatgtgagacatggagtcgaaggagattgttttggagctttaagatttaatgactgcctgttgggttttgggctttcatggggcctgtagtccctttgttttggccaatttctcccttttgatgggagcatttacct

SEQ ID NO: 950157 - DNA, 639 bp, Homo sapiens
tgaaagaatgaataaatgactagatgtaataagtgaataaacattctttccatcaggctcttgaaaaatgggaagtaaattacacatccccaaaaattaactaattaaacaaactatttattsagcactgggtgctaggcactatgagtggaaaagtttctgatcttaaggaactcagactcatgggagcagcagacaagaaactggatgattacagttgaggtcacatgaaaaaggagaacaaaaggttttatagaattacagaaagcaatatctggcttcttctggaaaagattagggacaacttctcaaagaggatgatgcccagtcctgaagagtaaatgagggaaactcagtgcaaggaatgtctccttcaagcaaaagatcctcaacacaaagggtgaaacttgtttatccctccacgtgcataaatctcctatagggccaatagtcaaagagaggatacaatatagcacagaagttaagaatacagtccctggaccgggcgcagtggctcatgcctgtaatcccagcactttgggaggccgaggcaggcggatcactaggtcaggagatcaagacgagcgtggccaatacggtgaaaccccatctactaaaaatacaaaaattagctgggtg

SEQ ID NO: 950158 - DNA, 589 bp, Homo sapiens
gggaggctgaggcaggagaattgcttgaacctgaaaggtagaggttgcagtgagtctagatcgtgccactgtactccagcctgggcaatagagagagactccgtctcaaaaaaataaaataaaataaaatatgaaaagaaaaaaccttccccacaaaagtgtcagtcgtgaggactaaataagagcacgtgcagaagagaatgacaagactttctagtcttcaggaatttctgcagagacccaaggctgagaacaagggatgagcagtgcccacatctcaagagaggtgccagcacaccttcaggactcggcgagagaacagagctatcccatttggccccgcactgcttgcgtggaagtcatgctcaggggaggatttattgaaagagttctgctcttgaccaggcgcggtggctcatgcctgtaatcccagcactttgggaggctgagatgggcagatcacttgaggacaggggttcgagaccaggctgggcarcatggcaaaaccccatctctactaaaaatacaaaaattagccgggtgtggtggtgcacgcctgtagtcccagttgttcaggaggctgaggcaa

SEQ ID NO: 950159 - DNA, 589 bp, Homo sapiens
gggaggctgaggcaggagaattgcttgaacctgaaaggtagaggttgcagtgagtctagatcgtgccactgtactccagcctgggcaatagagagagactccgtctcaaaaaaataaaataaaataaaatatgaaaagaaaaaaccttccccacaaaagtgtcagtcgtgaggactaaataagagcacgtgcagaagagaatgacaagactttctagtcttcaggaatttctgcagagacccaaggctgagaacaagggatgagcagtgcccacatctcaagagaggtgccagcacaccttcaggactcggcgagagaacagagctatcccatttggccccgcactgcttgcgtggaagtcatgctcaggggaggatttattgaaagagttctgctcttgaccaggcgcggtggctcatgcctgtaatcccagcactttgggaggctgagatgggcagatcacttgaggacaggggttcgagaccaggctgggcagcatggcaaaaccccatctctactaaaaatacaaaaattagcckggtgtggtggtgcacgcctgtagtcccagttgttcaggaggctgaggcaa

SEQ ID NO: 950160 - DNA, 582 bp, Homo sapiens
attttaaaggtaagcttgactgccctcatttaatttgcctctggagtcaggagtttacarttcttcctctgtatctattaataagcagtttgactaatattactagaagctttaatctttaattttggcatttgttttgcggatgctctacccatggtaccccaggaccagaaggcaaccatatttcagatttaccacttctagacagtcccaagtaaggttaattgataagttatgggcctccaaagctaagttgctgcttagcattgaaaacattaaggctgagtgcagtggctcatgcctataatcccagcactctgggagactgaggcgggtggatcatctgaggtcaggagttcaagaccagcctagccaacatggcaaaaccctgtctttactaaaaatacaaaacttagctgggcatggtggcgcatgcctgtgatgccggctactcatgaagctaggacaggagaatcgtttgaacctgggaggcagagattgcattgagccgcgatcatgccactgtactccagccggggcgacacaaaaaaaaaaaaaaaaaagagaataagagaatgttaa

SEQ ID NO: 950161 - DNA, 593 bp, Homo sapiens
caggtggtgcctgcatatcatgcagaaccgtctgtgagccagaccctagtcttctcttcctccgtctattgatcataggaaactccccatgaggccatcagtgcaggctagggaagagaaggcaggatggcaggagtggaggccatgggcatttgagccacttcctcatgtaacttacttgtgccttcaggacctgcttgagcccaatcacatatataccacttccatttgatgatggaatgctgcagtgcatgatccactttatggctagatgggtcagaatgcacccacttcatgataggcagttcaggttgcatggtgtcttgttggcccatagtcaaacattcagtttccaccaaagcctagtaacaggccaagggctgtctctcaaaaggagagtagttacctgcagaagatggcagagccttgctccaaagtcctagaggcccgcaccgtgattcacctatgggggcctaccaaaggctcaaaacarcatccctatctgccactgacacctggaacaccattggatgtgctgggtcatatggtccgagcagcagagcagcttgcgcagcagcctggacctgttgcag

SEQ ID NO: 950162 - DNA, 633 bp, Homo sapiens
gtcctagaggcccgcaccgtgattcacctatgggggcctaccaaaggctcaaaacaacatccctatctgccactgacacctggaacaccattggatgtgctgggtcatatggtccgagcagcagagcagcttgcgcagcagcctggacctgttgcagacccttgccctgttctggatcccactcaaaactggcagcctttccgatcactcgataaatgggctggagtaacacacccaaatgaggaatgtgttgcctccaaaatccaaataggcccactaggcattgtgcctctttcttggttgtaggagaggccaaatgcagcaacttatccttcaccttagaagaaatatctcaacaggccccacaccactggacccctagaaattttactgaggtagaagttccctgaattttagtcagatttatttctcatcctctggcatgcaaatgtttcaccaataagtccagtgtgtttgctccttcttgctcactggatccaatcagcayaatgtcattaatgtaatggaccagtgtgatatcttgcagaagcaaaaagtgatcaagttctctctaaataagattatgacacaaagccagagagttgatacacccctgaggtaggacaacaaagg

SEQ ID NO: 950163 - DNA, 711 bp, Homo sapiens
atcagatagtatcttgtcataactgtacagagtaactttggggactttagccataaggawtagctggcaacaacaaaaaggacattgttggaattcactcagatatacttccacatgtgcaaatgtggaagtgcaatgttgctaattgtctgatgtggtttggctctgtgtccccaaccaaatctcatcttgtagcttccataattctcatgtgttgtaagagggactggatgagagataattgaatcatggcagtgggcctttcctgtgttgttctcatgatagtggataagtctcacaagatgtacctcacgatatctgatggctttcaaaaccggagtttgggtcgggcctgttggcttatgcctgtaattccagcactttgggaggccaaggctggtggatcacctcaggtcaggagttcgagaccagcctggccaacactgtgaaaccctgtctctaataaaaatacaaaaattagctgggcatgctggtgggcacctataatcccagctactcgggaggctgaggcaggagaatggcttgaatctaggaggcagaggttgcagtgagctgagatggtgtcattgcactccagcctgggtgagaagagcaaaactccatctcaaaataaataaataaataaataaataaaaataaaaataaaaaaacaggagttcacctgtacaagctctctctttgcctgccacc

SEQ ID NO: 950164 - DNA, 709 bp, Homo sapiens
cattgcctcacccgcgaagtgcaaggggtcagggaattccctttcctagtcaaagaaagtggtgacagatggcatctggaaagttgggtcactcccaccctaacactgcgcttttccaatgggcttaaaaaatgtcacaccaggatattatatcctgcacctggctcagagagtcctacgtccatggagcctcactcattgctagcacagcagtctaagatcaaactgcaaggtggcagtgaggttgggggagggacgcctgccattgctaaggcatgagtaggtaaacaaagtagccaggaagcaggaactgggtggagcccaccagagctcaaggaggcctgcctgcctctgtaggctccacctctgggggcagggcacagacaaacaaaaagtcagcagtatcctctgcagacttaaatatccctctctgacagctttgaagagtgtagtggttctcccagctcacagcttgtgatctgagaatggacaaactgcctcctcaagtgggtccttgactcctgagtagcctaactgggaggcaccccccagtagggttggactgaaacctcacacagcctggtactcttytgagacaaaacttccaggggaacgatcaggcagcagcatttgcggttcaccaatatccactgttctgcagtcaccgctgctgatacacaggcaaacagggtttggaatggacttccaa

SEQ ID NO: 950165 - DNA, 709 bp, Homo sapiens
cattgcctcacccgcgaagtgcaaggggtcagggaattccctttcctagtcaaagaaagtggtgacagatggcatctggaaagttgggtcactcccaccctaacactgcgcttttccaatgggcttaaaaaatgtcacaccaggatattatatcctgcacctggctcagagagtcctacgtccatggagcctcactcattgctagcacagcagtctaagatcaaactgcaaggtggcagtgaggttgggggagggacgcctgccattgctaaggcatgagtaggtaaacaaagtagccaggaagcaggaactgggtggagcccaccagagctcaaggaggcctgcctgcctctgtaggctccacctctgggggcagggcacagacaaacaaaaagtcagcagtatcctctgcagacttaaatatccctctctgacagctttgaagagtgtagtggttctcccagctcacagcttgtgatctgagaatggacaaactgcctcctcaagtgggtccttgactcctgagtagcctaactgggaggcaccccccagtagggttggactgaaacctcacacagcctggtactcttttgagacaaaacttccaggggaacgatcaggcagcagcatytgcggttcaccaatatccactgttctgcagtcaccgctgctgatacacaggcaaacagggtttggaatggacttccaa

SEQ ID NO: 950166 - DNA, 538 bp, Homo sapiens
ataggtggcactgggattggaataagttccgtctcaccctggaccaccatttccatgctgtgtctccactagatgatcctttctttggttattctaagtcattagtcatcaataatttacctccaaactgtaggtttcacaggaggagatgccacttgaagcttcatggcttaaaatggagatggaatgtggaacatggtgggaagcaccgggaggggtttattgataaatttcaagtactttgtggggctctgaaagactgtctccaaattatttgtcctactacctctttcatattagttcaaatgtcatatgggtatatcttttgggttaaattaaggaaaatctccatgaaaagtaaaaaacaacaaaaaaaccccaaaagactagaaagagatactatgaaaaatccactcagatttctcagagttttattaactcaaagaagccttggtccagttggaagaagacagaattaattgtgacaacctctagcaaaccctttagcgttcaatgyactctagaccatgagtataaa

SEQ ID NO: 950167 - DNA, 472 bp, Homo sapiens
actgttccgtcagagggcctagggtgtccacagtcttgggcccgctattcctcagcccagccctgccctgccctggcaggggggcacctgtccttgggtgcaagctcacacgcgttgcccgggtgcctgctggccaggtagcttgcctggtcatcctcggggtgtgggggaaggaccccaggagggggaagtggccgcggggcagcgcggtgtgtcgtctggcctccgctgtgtaagctgacagtggcctgaagggctttgggatggggcagccccttgcaggcctatccaggcccagccccattgctttggtgtgtcaggtccagagccgtgctcctgcctcgtggcctgtgggctccaagggcgggttttgaagccccaggaagggtcacaccagaggcaagcggtcgtagctgctcttcccagagtaagactcarccgtctgtcactgggtgtggttttgtccctgacc

SEQ ID NO: 950168 - DNA, 483 bp, Homo sapiens
aaaatggtcatactttccaaagtaaactacaggttcaacactattcctatcaagctaccaatgtcatttttatagaaawagaaaaaaaaattctgaaatttgtatggaataaaaaaagagcccaaatagccaaagcaattctaagtaaaaaagacaaagctggaatcatcacactaccaaacttcaaactacactataaggctacagtaattaaaacaacatggtactggtacaaaaacaaatatatacaccaagtgaacagaacagagaactcagaaataaagccagaaagtccacaaaaataaccaattgagaaaggactccctattcaataaatggtgttgggaaagctgaatagtcacatgcagaagaatgaaactggactcctacctttcaccatatacaaaaattaagatgaattaaagatttaaatgagtatattgaagaggtacctgcactcctatgtttgttgcagcattgttt

SEQ ID NO: 950169 - DNA, 551 bp, Homo sapiens
aaccctatcctttataaatcacccagtctcaggaagttctttatagcagtgtgagaatggactaatatagtaaattggtacggggagtggggtgctgctataaagatatccaaaaatgtggaagtgactttggaactatgtgacatgcagaggttggaacagtttggagggctcagaagatgacaggaaaatgtggaaagtttgcaactgcctggagacttgttgaatggttttgaccaaaatgctgatagtgatatggacaatgaagtctaggctgagttggtctcagatgcagatgaagatgagaaacttgttgggaactgaagcaaaggtgactattattatgctttagcaatgagctaaaggtagcattttgaccctgccctagaggtctgtgggactttgaacttgagggaaatratttagggtatctggcagaagaaatttctaagcagcaaagtgttcaagaggaagcagagcatgacagttggaaaaatttgtagcctgacaatgtggtagtaaagaaaagcccattttttggagagaaattc

SEQ ID NO: 950170 - DNA, 762 bp, Homo sapiens
tgtgtcccagctgattcagttccagccatggctaaaaggggtcaaggtacagcctgggccattgccaaagaaggtgcaagccccaacccttggtggcttccacacagtgatggtcctgcaggtgtgcagaagacaagaattgaggtttgggaatgtccacctagattttagaggacatattgaaatacctggatgtccaggcagaagactgctgcagggcacagccctcaaggggaacaactgctaggacaatgtggaagacacatgtggagttggaattcccacacataagggcactgcctagtggagctgtgagaagagggccaccatcctccaggccccagaatcgtagattcactggcagcttgcaccatgcacctggaaaaactgcagacactcaatgctaacccatgaaagcagccaggagcggggctgtaccctgcaaagccacaggggtggatctgcctaaggctgtgggagcctacctcttccatcagcatgacatgggtgtgagacatggagtcaaaggagatcattttggaactttaaattttaatgactgccctattggattttgggctgcatggggcctatagccccttcattttggctaatttcttccatatggaaygggtatatttaactaatgcttgtacccccattgcatctaggaagtaactaacttgcttttgattttacaagctcataggtggaagggccttgccttatctcagatgagactttggacttggacatttggtt

SEQ ID NO: 950171 - DNA, 610 bp, Homo sapiens
tccttgaatatcctagaaatagagtgttaccaacctgctgaataaaaaggaacatttaactctatgagctgaatccacayattacaatgcaatttcacagatagattctttatagtttttttttccccctcaggtataacgttttacaccgtagacctcagtgggctgtgaaatgtccctttccagacactacaaaaagagttcttccaacattctgaatcaaatatttcaaaagaaatattaaactctgagagctaaatccatgcaccacaaagcaatttcacagatagctttgttctagttttgtgtgtgtgttttggcggggggggggggggatattcaatttttcactataggcctcagtaggcttagtaatgtcccttcacaggttctacaaaaagagtatttccaacctgttgaataaaagaaaggcttaacagtgaactgaatgtacatgtcaaaaaggagtttcacaggtagcttatttctcatttttattatgggatattccattattctttgtagacctcagtgggctccaaaatgtccctttgcagattccacaaaaggagtttttccaacctacttagtgaaaagaaaagtttaactc

SEQ ID NO: 950172 - DNA, 813 bp, Homo sapiens
gcaaacatcccaagcagtttcacagatagattctttctagtttttattgtgggatattttgtatttcaatatacgccytagtgggctttgaaatgtcctttccaagattctacaaaaaaagtgtttccagcctgctgaatcaaaagaaagttttaaatctgcagtatgggtccacaatcacaaagcagtttcacatagtttctttttattttttatcatgagatattcagtttttcactgtaggtccagtgggctttgaactgtcacttggtagatactaaataaaagagtatttccaacctgcagaatcaacggaaatgttaaactctgttagatgaatacatatatcacaaagcagtttcacagacagcttctttctagttgttatcatgggatattctatttttcaatataggcttcagtgggctctgaaatgtctctttgaagatcctacaaaaagggtgtttaaacctggtgaatcaaaagaatgttttaactctgtgagctgaatccacacatcacaaagcagtttcccagaggccttctttctagtttttactgcaagatattcagtgtctttactataggcctcaaagcactctgaaatgtccctttgcagattttacaaaagagtgtttgcaaaaaactgaatcaaaaataaagtttacctatctgtactgaatgcaaatatcaaaaagtggttttacagagagtttctttctagttttcatcacaggatattctctttttcactacaggcctcactacactccaatttgttccttcacagattctacaaaaagtgtttttcca

SEQ ID NO: 950173 - DNA, 582 bp, Homo sapiens
tgtaggggtcttccgcgagagaaacgggcaccaagctccaaagcatggggcattacagcttgtcccggacagctytgggggcttctggggtgagagaggccttcttgggaggcttccttgcggtatcttcgcttctcccttcggccttcctcaacgtgccctgagtccctacaggccccccaatgccaccctgtggccttattttcgcttgttggagccttttgcgagagacgcaggtatcctgctctgaagccagggtctttaaagcccgcccgacacacacctgggagcttctaggatgggagaggcctctttgaaacgctcccagaattttctgcagtctcaccgcttctctcctctgccagcctcaacgtccccctgagtaactgcgatcctccctcgccaccctgtggcaccaatttgtatgtgggggccttctgcgagagacataggcacactgcttcgaagcctgggtctttacagcctgcccgggacagccctggaggcttctgggatgaaagaggcctctttgggaggctcccagcctaccctgcggttcgctgcttctctcctgggccggtc

SEQ ID NO: 950174 - DNA, 772 bp, Homo sapiens
aggcagcatggctgccaacatgtctcacctcccgccatagggcgatttttctcctatctcagaatttaacaaatgtacaatcaggttttataccgagacactcagttcccaggacaggaaggagacagtgaccttcctctatctcaactgcaaaaggctttcctcttttactaatccacctcagcacagaccctttatgggtgccgggctgtgggatggtcaagtctttctcagcccatgaggccatattcaaactatcacatgaggagaaaccttcgacaatacccagctttccagggcagaggtccctgtggcttttcacagtgcattgtgcccctgatttgctgagactagagaatggtgatgacttttactaagcatactgcttgtaaacattgtgttaaaaaagcacatcctgcacagccctagatcccttaaatcttgattccatactacacatgtttttgtgagctcaaagttggggcaaagtggctttggcaaagttacaaattaacagcatctcagcaaagcaattattcaaggtacaggtcaaaatggaatttcttatgtcttccctttctacatagacacagtaacagtctgatctgtctttattttctcaacagcagggaatgctgggagcctcacaagcagtcctctcccattccagaaccccctgtgatgtgccargtgggttgtaaagccccggctttgaagcaggatgccagtgtctctctcagaaggccctcacaagcgaaaatgggaccgcaaa

SEQ ID NO: 950175 - DNA, 577 bp, Homo sapiens
ctgaccttttttttgttggaaggttttaaattactacttcaatttttcatttgttattaatctgttcaggctttttatttcttcttattcagtcttggtagattgtttctttctargaatttatttcttctaggttatccagtttttggcatatagttgttcataatagtctcttattatcctttttgttttttgatgtgtctattgtaatgtccccactttcatctctgattttattttttgaatcatttctcttttttcctagttaattcatttaagagcttgttgattttgtttaatttgtttaaaaaataactcttaatgttgttgatttttttgctatagtttttctattctctagtttatttatttctgctttgatctttttcatttcatttattctgctaactttgggtttattttgttcttttcctagttccttgagaagtaatttcagattgtcgagatttttcttcttttttttcataatattgccatatattacccaaaacttttctcttacaacttcttttgctgcttcccaaaggttttattatgttgtgtttccattttaatt

SEQ ID NO: 950176 - DNA, 742 bp, Homo sapiens
tttgtttcacatgaaagtgtagattttaaaagttactcatggcatggcatggataagagaggatattttatagactggagaccagcctaatgttcagaaactgacgacagttacccttctctagagggagacacaaagcccaggattttcgagagatcttgaacttttaagtacttttgtcattgccctccacagcgctctaaggatacaaatgaccccaagcttttccagttaataatgtggcaagacaaagtgttctcacagggaggcagtgagggtcctggtgagagggcctgagtgtgacattcacatgtcaccatgcctcatgtgagctgagaagccaggagggagccagcctgcagggcacgcccgaggaagggttcttccctttcatttgtgacccaaaagctctgaatcccctgagagctattgcatggaggcatcagctccaagtgccgctggaggcaaggaagccagtacaatgtctgccctcattcaggctggtgttggaagcaagacaggaaacaccactctgctcttgagtaaacacccttcttctgctgggaacgagtttcaggctctgcctgcatggccacaagcctggaaaaacggtatgaagttactactccttgcakcttttgaggtccagggcacccactgggctgtgcttttcttttttctttttttttccatttattatttatttgtttatttgtgtttaagttctgtgcagaacatgcag

SEQ ID NO: 950177 - DNA, 606 bp, Homo sapiens
ctgaccccatgactaacactgagtatgtgcaagcttggcttatttttgtttctctccctcccttctcttctgattaattgtataaagtttctagggacagtttcaggggtgatagatgatgatggtacgagatttgcagtagaagggaaggagaaggttctggaaggggaaaagaggaccagcagggtccctccatcacctccaggtctgcaggaggtggcaggagggcctggaatgaaaaacagccagtggctgggcgcagtggctcacgcctgtaatcccagcactttggggggctgagacgggcagatcacgaggtcaagagattgagaccatcctggtcaacatggtgaaaccccgtctccactaaaaatacaaaaattagctgggtgtggtggtgtgtgcctgtaatcccagctacttgggaggctgaggtaggagaaccacttgaacccgggaggtggaggttgcagygagctgagaccgcaccactgcactccagcctggctacagagggagactccatctcaaaaaaagaaaaagaaaaacagccagcgcatgagagaagatgtgagcatcgtcctcagggaagagtcagtttttgtc

SEQ ID NO: 950178 - DNA, 556 bp, Homo sapiens
gggtccacactgcctttatgagctgtgacactcactgsgaaggtctgcagcttcactcctgaagccaacgagaccacaaacccacggggaggaatgaacaactccagacacgccaccttaagagctgtaacactcaccgcgaaggtccgcagcttcactcctgagccagagataccacgaaccccctcagaaggaagaaactctgaacacgtccaaacaccagaaggaacaaactccggacacgccgcctttaagaactgtaacactcatcttgagggtccgcggcttcattcttgaagtcagtgagaccaagaacccaccaattccggacacactatcttgatggatatggagtcatagcgtttgaaaagaaaaaaaatattgagaactgagaaaaggcactttgggaggtcgaggtgggcagatcacctgaggtcaggagttcaagaccagcctggacaacacggtaaaaccccgtctctattaaaaatacaaaaattagatgggcgtggtggcaggtgactgtaatcccagctacttgggaggctgagacagg

SEQ ID NO: 950179 - DNA, 458 bp, Homo sapiens
cagtaatacatgcctgtagtctcacctactcacgaggttgaggtgggaggactgcctgaggtcaggagttcaagactgtagtgtgctataatcatgcctataaatagccactgcacttcagcctgggcaacatagactccatctctaaaaaaataataatatgtaaagcaacaactgatataactaattagatagaaaaacccatcataactggagattttaatacttctctcagagacagaaacattgaaaaaagagcatatagaaaatcagctatagaaaatctgaatagcgttatcaaatatcttgatgtcaatgatttttatagactcctatagccacaactccagaatacacactctttccaagtatacatgaaaccttctttaagaaaaactaaatgccrggccaaaataataagtttaggaattttcaaaaaactgaaatgtttgagtgtg

SEQ ID NO: 950180 - DNA, 622 bp, Homo sapiens
  misc_feature 409: n = A,T,C or G
gtttcttcttcttcttcttttttttttttttttttttttttttgaaacagggtctcactcttggaccctaagctggagtgcaggggggcaatctcgggtcactgsaacctccacctccccactttaagcgattctcctgcctcaacctcccgagtagctgggactacagtcacccgccaccacacctggctaatttttctatttttagtagagatgggggtttaccacgttggccaggctggcctcaaactcctgacctcaagtgatccacaagcctcggcctcccaaagtgctgggattacaagcgtgagccactgcacccggccataaaagtatttgttttttataaatcgagtgtaacctaagtgtacagggtttataaagtctacagtagtgtacaggaacatcntaggccttcacattcactccccacccagtcactgactccctcagggcaactttcagtccttcaagctccatccatattaagtgccctatacaggtgtatcatgttttatcttttatatcatatgtttgccacacctcttctatgtttaaattcacaatacttctaagtttaaatatacaaatacttacacctctgtgttaaaagtgactacag

SEQ ID NO: 950181 - DNA, 606 bp, Homo sapiens
catgttggccaggctagtcttgaacccctgacctaaagtgatccacccacctcagcctctgaaagtgctgagattacaggtgtgagccaccatgcccagcctataattttcttaaaaagttaaattaaagggtaaaatattcctcaacccaataactccacttttagatttttatccaatagaaatgaaaataaatggcaacaaaaagatgtggacaagaatgtgtgtagcacctttttttgtagtagtctaaaactagaaacaatccaaaagtccatcagcaaaaggatggataaaaatttgaagtattctcatacaagatgctactctggaataaaaaagaacaaattactgatatggggaacaacctggatgcctttcataaccattatgctgaatgaaaaaagctgaacaaaaagaatacatggttatgatatgggagctaaaaagaaattatttaggtagttagtgakggtaagagattcattggtaaggtttcccttttaataaaaagcagcctccaaatcatttatttcctaaaaaagagcagcctgaaaaattaagctgcagacataaataagcaagttagaagcttgcatggatgaa

SEQ ID NO: 950182 - DNA, 604 bp, Homo sapiens
ttttgaaaagaacaacaaaattgatagaccgctagccatactaataaagaagaaaagagagaagaatcaaatagatgcaataaaaaatgataaaggggatatgaccaccgatcccacagaaatacaaactaccatcagagaatactacaaacacatctatgcaaataaactagaaaatctagaagaaatagataaattcctggacaaatatatcctcccaagactgaaccaggaagaagttgaatttctgaatagaccaataacagactgaaattgaggcaatgattaatagccgaccaccaaaaaaattccagggccagacagattcacagccaaattctaccagaggtacaaagaggagctggtacctttccttctgaaactattccaatcaatagaaaaagagggaatcctccctaactcattttatgaggccagcatcatcttgataccaaagcctggcagagacacaacaaaaaaagagacttttagaccaatatcccttattgggaaaacccatcyccaatatttcaacataggttctttctattttccctaagtgtcgaccagtctgagaaacaaaaagaaagagtacaaagagagg

SEQ ID NO: 950183 - DNA, 536 bp, Homo sapiens
tcaaagatcagatggttgtagatgtgtggtattatttctgagggctctgttctgttccattgayctatatctctgttttggtaccagtaccatgctgttttggttactgtagccttgtagtatagtttgaagtcagatagagtgatgcgtccggctttgttcttttggcttaggattgtcttggctgtgtgggctcttttttgattccatatgaactttaaagtagttttttccaattctgtgaagaaagtcattggtagcttgatggggatggcattgaatctataaatgaccttgggcagtatggccattttcacgatattgattcttcctacccatgagcatggaatgttcttccatttgtttgtatcctcttttatttaatagagcagtggtttgtagttctccttgaagaggtccttcacatcccttgtaaggtggattcctaggtattttattctctttgaaacaattgtgaatgggaattcactcatgatttggctctctgtttgtctgttattggtatataagaatgc

SEQ ID NO: 950184 - DNA, 578 bp, Homo sapiens
caggccccatacaagcacaaaatcaaatagggcagtcattatgccttagagttccaaagtgatttcctttgactccatgtctcacatacaggtcatgctgatgcaagaagtgggctcccactgccttgggaatcttcacccctgtggctttgcaggatacagtcccccttctggctgctttcacgggctggcactgagtgtctgtggcttttccatgtgcactgtgtaagctgtcagtggatctaccattctggagtccggaggacagtggccctcttctcacagctccactaggcagtaccttagtggggactctgtgtgagggttctgaccccacatttcccatccacactgccctagcagaggttttccatgagagctccacccctacagcaaacttctgcctggacatccaggcatttccatacatcctctgaaatctagggggaggttcccaaacctcgattgttgatttctgagtacccaccggctcaacgctctgtggaaaccaccaagrtttgggacttgcaccctctgaagcaatggcccaagctgtaccttggccccttttaaccatg

SEQ ID NO: 950185 - DNA, 553 bp, Homo sapiens
gcagatgctggatattagacctttgtcagatgaatagattgcagaaactttctcccattctgtaggttgtctgttcaccctgatgayagtttcctctatcgtgcagaagctctttagtttacttagatcccatttgtcaatttttgcttttgttgcaattgctttcggtgttttagtcatgaaatctttgccggtgcctatgtcctgaatggtattgcctaggttgtcttccagggtttttatagttttgctttgtttgtttgtttgcttgtttgtttgttttttgagacagagtctcactctgttgcccaggctggagtgcagtggcacgatcttggctcactgcaacctctgcctcccaggttcaagtgattctcctgcctcagcctcccgagcagctgggactacaggtgtgagccaccactcccagctaatttttgtatttttagtagagacagggtttcaccatgttggccaggctgctcttgaactcctgacctcaagtgatccacccgccttggcctcccaaagtgctgggatttcaggtgtgagc

SEQ ID NO: 950186 - DNA, 562 bp, Homo sapiens
aggagattatatcctgcgcctggctcggcaggtcccacacccatggagccttgctcactgctagcgcagcagtctgagattgaccggcgaggcagaagcctggcagggtgaggggcatctgccattgctgaggcttaagtagataaacaaagcagccagagaagctcgaactaggtggagcccactgcacctcagcaaggcctctgcctctatagactccacatctggaggcagggtatagctgaacaaaaggcagcagaaacttctgcagacttaaacatccatgtctgacagctctgaagagagcagtggttctcccagcacagtgtttgagctcagagaatggacagactgccccctcaagtaggtccctgacccctgtgcagcctaaaagggagacacctcccagtaggggctgactgacacctcatataggtgggtgcccctctgggacgaagcttccagaggaaagatcaggcagcaatatttgctgttstgcaatatttgctgttctacagcctccactggtgatacccaggcaaacagggtctggagtggacct

SEQ ID NO: 950187 - DNA, 539 bp, Homo sapiens
ggtgcccacccggattgagggkgggcctccctttctcagtccactgattcaaatgttaatttcctttggcaacaccctcacagacacacccaggaacaatactttgaatccttcaatccaatcaagttgacactcaatattaaccaccacacttgggaaacttgagaatgaagacccaacttcccagtaagttacagaaactcatgtattattccgaggccacagtaaagagtggagactcaaagcatggccagaaacaggtaaattagttttagtggcaacacaggttaagagagagaggaaggaagaagctcggctagcaaaggtggccttgttatgtagacgaaccttttctcagaagcaaaagatggtaaatgtttctatccagatctttaaaggtgtcagactctcaatcgctctggatcctgggaaaggcttagaaacaggagagggtatggctgcattaatggacattgtccacagacgcaaattttcctcagttaagacagttttgcaatgccacttctgcttgttggcca

SEQ ID NO: 950188 - DNA, 602 bp, Homo sapiens
tgtttatttcacctgggtgcaggcgggctgagtcctaaaagagagtcagtgaagggagataagggtggggccattttataggatttggatagataaaagaaaagtacagtcaaaggggggttgttctctggcaggcagagtgggggtcacaaggtgctcagtaggggagctattgagccaggatgagccaggagaaggaatttcacaagacagtgtcatcagttaaggcaggaacaggccattttcccatcttttgtggtggaatgtcatcagtaaggcaggaaccggccatctggatgtgtacatgcaggtcacgggatatgatggcttagcttaggctcagaggcctgacacacagtagaactgatttatttgcaaaataagttttgttactatacttggtctgattttttgcataaagggcagcaagaataattatttactatataggctcctttttaaaaaatggctttgctggaacattcttttttrtaaagaatctcatattagacctcttaaaagcatcctgagcccaaccaaggatttatctgtttctacgagatacctgtatgaattaagtgaattctctctcaaggtcccaa

SEQ ID NO: 950189 - DNA, 600 bp, Homo sapiens
gctagctaactccctggagtctcttttataagagtgctaatcccattcttgtggacagagccctaatgacctaattaccttccaaaggccccaccttctaatactttcaccctggtgatgagttttaacgtgaacttttggggggatgcaaacattcggaccatgcctatccttctaaggaagccatgagaagacagagaaacacacacagattgaagcaggtcatgtagtgatggaagcagagactagagttatgtatccacaagccaaggaacaccaaaaattgctgacaaccaccggaacttaagagacaaatgagacatattctctctccaagtttacaaaagaaaccaattgtattagtctgttttcatactgctatgaagacctgccttcatagactgggtaattaataagaaaagaagtttaattgactcacatttcagcatggctggagtggccttaggaaacttacaatcatagtggaaggcgaaggggaaacaaggyatcttcttcacaaggcagcaggaaggagaaaagctgagcaaagggaaaagccccttataaaaccatgagaccacatgagaactcactcactat

SEQ ID NO: 950190 - DNA, 600 bp, Homo sapiens
gctagctaactccctggagtctcttttataagagtgctaatcccattcttgtggacagagccctaatgacctaattaccttccaaaggccccaccttctaatactttcaccctggtgatgagttttaacgtgaacttttggggggatgcaaacattcggaccatgcctatccttctaaggaagccatgagaagacagagaaacacacacagattgaagcaggtcatgtagtgatggaagcagagactagagttatgtatccacaagccaaggaacaccaaaaattgctgacaaccaccggaacttaagagacaaatgagacatattctctctccaagtttacaaaagaaaccaattgtattagtctgttttcatactgctatgaagacctgccttcatagactgggtaattaataagaaaagaagtttaattgactcacatttcagcatggctggagtggccttaggaaacttacaatcatagtggaaggcgaaggggaaacaaggcaycttcttcacaaggcagcaggaaggagaaaagctgagcaaagggaaaagccccttataaaaccatgagaccacatgagaactcactcactat

SEQ ID NO: 950191 - DNA, 631 bp, Homo sapiens
acctgaacgtaaatgaaaaaattatgtactgctgaactgtacactttaaatgagtgaattttatggtatgtaaattatatcccaataaagctatttttaaaatgggtcaatcaaggacactaagagttgtttatttgaaaagttcaaaaaaattgacaaaccattagctagatcaagaaaaaactcaaatcaaatcagaaatgaaagaggagggattataactgatgccacagaaattaaaaggataagaggctactatgaaaaattatatgccaacaaattagataatccaaaagaaatggattaattcctagaaacatacaacctaccaagactgaaccataaatagaaggtcttaacagacctataagtagtaagaagattaaatctactaaaataccaaaaattagccgggcatggtggtaggtgcctgtagtcccagctactcgggaggctgaggcacaataatcgcttgagccccggaggcggaggttgcagtgagccgccgagatcatgccactgcattccagcttgggctacaaaataagactctctcaaaaaawaaataaataaataaataaaggaggtatatctcattttacccatttcattccacaataatgaaaaataa

SEQ ID NO: 950192 - DNA, 677 bp, Homo sapiens
aaaaaggaaatgtctcaataatgagaagaaaacttgatcaatagatacagaaatgrcaaataagatggaattagtaggcaacaatattaaaacagttattgtaatgataacattccacaagaagaaggtaaagggaagctagaacatggaagtagagacatggaagacccagcttgaatttctagaggtgaaaaatacaatgtctgagatgaaaaatatactaaatggcatttaaaatagaatagatattatataaaaaaggattggtcaactggaagatgtagcagtagaaactatcaaaaatggaacatggagaaaataatggaaaaaactgaacagaaaatcagcaccaacaggactaatatatgtggaattggagttcctgaagaaggtggggaggagtagaagaaaaaatatttgaaaaaactgtggctgaaaaaatttaaatttgagaaaaactgtaaacccagagatctaagaaccaacgaacccctagcacaagagacatgaggatgacacactgaagcatatcataatcaaattgcccgaaaccagtgacaaagataaaatctgaaaggttaccaaagggaaaaggacattatacagagaggaacaaagatgaaaataggctgagcgtggtggctcacacctgtaatcccagcactttgggaggctga

SEQ ID NO: 950193 - DNA, 606 bp, Homo sapiens
tgtaggtcatgtgtagagattttatttatttgtttgtttrtttatttatttatttatttatttatttgcacgggaaggtggggggacggagtttctctcttgctgcccacgctagagtacaatggcataggggactcaaggagttaacctgtggcagagacgacacgtcattctgagtgtaagggccgcaacgaaaagtgtcatggctcctgtttttaaaggctgaaatcccggcggctcaggcctgtcgtcccagaactttgggaggcacaggaaggtggatcacttgaggtgaggagttcaataccaacgtggccaacatggagcaaccccgtctctactaaaaatagaaaaattagccggctgttgtggtgcgcgcctgtaatcccagctaccgaagaagaaacactggaacccgggaagaagaggtttcagtgagccgagagagcgccacttcaacgcaggctgggtgacagagcgagagagactcagtccaaaaaaaagaaaagaagaaaaaagaaaaagaacaggcccaaatactgcattgtcgctgaatgttcccccaaaaggccggaaaccccctgactcaggtacaggaggtgctgt

SEQ ID NO: 950194 - DNA, 460 bp, Homo sapiens
atgacactataaagaaactgcatcaactattgtgcaaaataaccagctagcataatgatgataggatcaaataaccagctagcatcatgatgacaggatmaaattcacacataacaatactaaccttaaatgtaaatgtgctaaatgccccacctaaaagacacaaactggcaaattggataaggagtcaagacccatcggtgtgctgtattcaggagatccatcttacatgcaaagacacacaaaggctcaaagtaaaggtatggaggaaaatttaccaagcaaatggaaagcaaagaaaagcaggggttgcaatcctagtctctgacaaaacagactttaaaccaacagagatcaaaaaagacaaagaaaggcattacataatggcaaatggaacaattcaacaagaagagctaactattctaaatatatatgcacgcaatacaggaggacccagatt

SEQ ID NO: 950195 - DNA, 613 bp, Homo sapiens
ggcccaaaagaatcaccctgatcacttctaggtcctaaaagcctcaatgattaggcaatactgtatagcaasagtggggaaggagttcacccttcctgtaggaagaccacatggtggagttcaaacgacacagagtaaatttccaaagctgcagaccatttaggcctacccagaattccactgggactggacggcccccaccgggctataatggatatgtggacatagagcctacactaagctgcctgatcagtggacaggtagttgtgttattggcactattaaaccatctttcttcctactgcccataaaaacaggcgaactcctgggcttccctgtctatgcttcctgcgaaaagagaagcatagccatagataattaaaaagatgataaacggcctcctgaaaaaattatacaatactatgggcctgccgcttgggcacaagacggctcgtggggataccgaacccccattaacatgctcaaccaaatcatgtagttgctgtcttggagattatcactaataaaactggtaaaaccttgactgttctggcccggcaagaaactcagatgagaaatgttatctatcaaaataaactgactctcgactact

SEQ ID NO: 950196 - DNA, 621 bp, Homo sapiens
ccctcagcagaggccacacaatcaagaagagacccccaggtcaatgcttatctcagggctaggaaaaagtttgtctatgtgtttaacatcyaacttttctttgtgggttttccagagaactgacttctgtactgccaagcttgcagccctgataggattagaacaatctagccacttgggggataaacaaagacagaaagttggcctagaagtcatcatagctcttctccttagctcagcacagagcaaatagagaaaatgttcccagctcccagcttctccttcagagggaaatagttgatcaatgaattcgatgccacattttggaaggctgcccccagaactagtttttgtcttgcttgtcttggggcactgacaaaatcagacacaatctacccatctgggggctactgaaacacagattaaggtttgggctggtagtcaccatagcctctctccagattcgcacagagtgcatgattaaaaataaacccaatttctaggttctccttggggaaagaaataattaaatgaaacatcacatgatccgatattttgggggagggcacctgaggaactcgcttcaatcttacttgtcttacttcagtgcgctgatatgac

SEQ ID NO: 950197 - DNA, 629 bp, Homo sapiens
ttgatgtttaaaatgctgctctgcaaaattgaccactctagttttagctgaaatcatcttttctctamgcattttaattttttcctgtcctggtatatgtctcaaatttggagtataagactagtacccagggactatttaaattcataaaattcatatagaaaaacaatttaacattttatgcatactttgctgcactaacagatatccataaattaagatacctatatttttctgcctaacaatgaacctgtctgattaaaacgtgttgattaaatgtgatattgcagatcctcctttaattgaaactctagaatttcattttgggatccagtgaacaattctaagtgccactcaaaactacaggtcaagtctgctctttttgctcacacaaatctgcaaagcttccatgttttggagatgatcttcagaggggaagaggccaaatggggtgacgtcaactgcttgctggctgtgacaatacagtagctgtctacatagcttttcatggtcctctaacacatatcctgcctgttttttaagccaccggactaactaatggagcccaagaagttccaatagaaacagaaactgcaactggtatgtgtaaatcaggacttgacaagcca

SEQ ID NO: 950198 - DNA, 406 bp, Homo sapiens
gttaacaaatttcctcaacttgtaaaaaaagtgctgggattcaaactcaggtgataggtttcaagtatttaccctttaaattcagtatgtctatggccagttatcacacatccaccccacattttgtagactgagatttgttcctgctgcaaaattaagaagctatttaattaacttactatatttcaaaattagatacaatctcactgaactcaaagtcatgttatctttacattttactttaaacttctgtgtttttaaatttctttttttttttttgctcttaaaaaatttggagtctaaaataaggtaatttgtatggcaactaaacaaaatatttaaacagctagatgcaaataatttttcaaccartttttgagctttcatgctgttaagcacttcctat

SEQ ID NO: 950199 - DNA, 571 bp, Homo sapiens
gacaggtcaggtctttcctttcccacgaggccatatttcagactatcacatggggagaaaccttggacaatacctggctttcctaggcagaggtccctgcggccttctgcagtttttgtgtccctgagtacttgagattaaggagtggtgatgactcttaaggagcatgctgccttcaagcatctgtttaacaaagcacatcttgcaccgcccttaatccatttaactctgagtttgacacagcacatgtttcagagagcacgaggttgggggtgaggtcacagaatctcaaggcagaagaatttttcttagtacataacaaaatggagtctcctatgtctacttctttctacacagacacagtaacaatctgatctctcttgcttttccccacacatttgttttaacattgtcatatgtaggggtcagtttttcatatttggaagctcaagctccctgagtgaaaatattttaaaataactggggtttaagcatcaytgtaacaaagatttgttggttcagagttcgaggagatcagtaaagaaaagtaggagtccaagccaggtcttga

SEQ ID NO: 950200 - DNA, 593 bp, Homo sapiens
aaagcactgaattctaaagtagactatagattagaggtaaattatccagatatggatcagaagactaaagcatacacataagcattaaagggagctataaaaatwaagtttatatgtattaaaatattttaatttgcacatgggtctgttatagcacgtgcattaactacattatgaacatctcataaagaacataaagcaaaaactatcataaagcagagagaggccagaatgtaaaaactgttcagtacttacagaagtccaaatccttcatctgaaatatttaaaccctggctggtcaaagaaatatattatatataccatgtaaaactaggctaaaataaatagatggtattgtacataaaaaataactggacaatacatagtaatgctctaagtcccatcttgtgtatttgagtgaaattcttaaggtctgaccgattaaacatttttaattactaccaaggcctaagtagaaagaaaatgagcatatacagataagaagaacataagaaagaaaaagtcaaacagaaaaatatatatatggctataaactaaaatagaaaagacatcaaaaagatattaaaatatac

SEQ ID NO: 950201 - DNA, 628 bp, Homo sapiens
acctgaaggcatgactggggaaagatccacttcactcacatgcctgtcaccaggattcagatccctaatgcctggtggcctccttgccacatggcctctccatagggcmgctcccatcagggccactggcctctcccagagtgagggttgtgacttcagagagggacaagagggggagagcaagatggaagtctttttgtaacccgttacatttgccatactccacacagttgatccatcatgacgccctgccctcactcaaggggagagaattatacaagggtgtgaacaccaggagccagaggtcagtggggaccattgcgagggctcccttcactggagatgtgtattggtcagggttttccagagaaacagaacaaatagaatatcagtaggatgtgtgtgtgtgtggagagagagagagacttatttaaggaattaatccatgcaattgtggaggctggcaaactcaaaagtccatagagcaggcagcaggctggagacccagggaagagctgaggttgccatcttgggtataaagactgtttggaggcagaattccttctctggggaaactcagtcttttctcttaaagccttcaactaattggatgagggccactcccatt

SEQ ID NO: 950202 - DNA, 443 bp, Homo sapiens
ttttctcttaaagccttcaactaattggatgagggccactcccattataaagagggatctgttttaatcagtcaaccgatgtaaatgttaatctcatttttttttttttttttagatggagtctcgctctcttgccctggctggagtgcagtggtgtgatctcagctcactgcaagctctgactccctgattcaagagattctcctgcctcagcctctcgagaagctgggattacaggcatgtgccaccacgcccagttaatttttgtatttttagtagagacagagtttgaccttgttggccaggctggtcttgatgtcctgacctggtgatccgccmgcctcagcctcccaaagtgctgggataacaggcatgagccaccgtgcctggacaatctcatttttaaaatgcctttgcattgacatctagacaggggtttggcc

SEQ ID NO: 950203 - DNA, 707 bp, Homo sapiens
gtccatgtcctagtaacccagcccctgtcagagagagaccgtatttgataaaagggtctttgcagatgtgttttgagatgagctcatcctgggttacccaggtgggccctgaatccaaagaccagtgtccttagaagagacagaagaggagagagcaagactacatgaactacaggaagacaaaggcagagattggagggctgaagccgcaagccaaggaatgcctggagccaccagcatctggaagaggcagaaaggagcctccctttgagcttctggagggagtagggtcctgctgacgccttgattttggacttccaggctccagaactgttagagaataaattgctgtcgttggccgggcgaggtggctcatgcctatagtcccagcactttgggaggccgaggtgggcgcatcacttgagcccaggatttcaagatcagcctgggcaacatggcgagaccctgtctctacaaaaagcacaaaaattagccggatgtggtggcggcttgcctgtagtcccacgctgaggcaggaggatcaattgagcccaggaggtcaaggctgcagtaagccatgattgtgccactgcactccascctggaccacagagtgagaccctgtcaaaaaataataaaaaaataaaaataaatcactgttgttttaagtttcctggtttgtggtcatttttatggcagccctagga

SEQ ID NO: 950204 - DNA, 568 bp, Homo sapiens
gcagggtaacctccccatgccgatatccttaatcacatctgcaaagacatgattattttctaaataatgtcacattcacagcttcctggtatccttgagtggccrttatttcctttactacactgaggctgaaagagaggtgagatagtttgtccaaaaaacacccagttgctcagttatagaatcaaaatgaaaatccaactcttccaactcccaagcccgtggctacttctgaggaccaggagatcatctgccagatcggccaggtgctagagggcctaggccattcctaacctgcaattttccagccatggtgccttgagcaagtcgcttaatgtgagcattttcctcctgcagaaaatcgagatgttaacagtagcgttctttagatactgtaaaggtaaaaagacttgacagggcacagtggctcacacctgtaatccctgttttgggaggccaaagtgagaaggttgcttgaggccaagagtttgagactagcctgggcaacacagcaagatgccatctttataataaaaataaaaataaaaatcaattagctgggcatggt

SEQ ID NO: 950205 - DNA, 750 bp, Homo sapiens
gtagtacacagtaatgtgctaggccttcacgagttcactcaccactcactcagtgactcatccgcaacaacttccagtcctgcaagctccactcacggtaagtgttctttaygggcgtaccatttttactcttatattttttgaaacacagtctcactctgttgcccaggctggagtgcagtggcgtgatctcggctcactgcaacctccacctcccaggttcaagcgactctcctgcctcagcctcctgcatagctgggattacaggcgtgtgccaccacacctggctaatttttatatttttagtagagatggggttttgccatgttggccaggctggtctcgaactcctgacgtcaagtgatctgcctgcctcagactcccaaactgctaggattacaggcgtgagccatcgcacccagcccattttatatcttttatacagtatttttactgtaccttttctatgtttagatctatttagatccacaaataccttccatcgtgttgcaatcacctacagtattcagtacagtcacatgctgtacaggcttagagcctaggaggaataggctatgccacatagcccaggggtgtagcaaaatcacctaaagatgcatttttcagaatcttgagcgacgcatgactataatcttaaaatgaagatgatgtatcagggtagtgaaaaggtggttgtagggaaggtgacagagtggacagcacctgagccaagaggtgaaaggttagcag

SEQ ID NO: 950206 - DNA, 633 bp, Homo sapiens
agaggggacccaccgggcaggatgactggcttctacaggtaacagggcatggtataaagggctttggactcagagcagagcaggcacggacaaggcgtgtctgagaatcctgccaggacctcagagttctggtgcaggctggaccactgagagtggggtgaccgtctgtgcctggcaggaacccccaaagagctcttgccctctttaagtcctttttcctcacctgcaagacaggagggggtggcagagaagaacctcagctctgaagaagctcactgcccagccctgggaaggagagacatgttagagtatgaatggccgagcctggaaggggtgcctgctggccctagattctaggggcacatgaggctcgagtgagcaaccagtgtcccccagaaagcaggtgggtgtgcagggagccttggaggatggagggaagtcgccttccagcaggtgctggaaagaccacttggagtttagtgggcctctgcccggcctctggaccccaccagggctggaggagggaggcctgggatttcgccccttctgaagctgatgggtgrctggactggtgacttccttctctggcctcattcccctcccagggtaagtaagtgggttggaccagagcag

SEQ ID NO: 950207 - DNA, 574 bp, Homo sapiens
ccaaggacacagagatgcagagtgtagccctgccctcctggagctcccakcccagtggggagcccggaatggagggggcactgattaggtctgcccttgggggttggcgggccctggcagcttcacagaggaggttgtgtttaggctgagctttggaacactgaggagttcccaggggagcaggattggaaaaggccttttgggcaaagagaacagactgtgcaagggcacagaggcatgcagaccgcctgcagagcacgctcaactgtggtgcacagcagagcagagaaagcaggacatgctatgcaccctcagaaagacagggcctcctctggctgcgtatgggtgggggccagcctgaagctgaagccctggatgggagccattgggggaacaggcctttctcagttggggggaattctgccctgagtttggggccagtagacgcagcagcccctgctggtagaatagaactggaccatccttccctcctggctggccctgcagccacaggccagaagtctggtgttggccttactgccctggagctaaggccagggggtcacagatcagc

SEQ ID NO: 950208 - DNA, 583 bp, Homo sapiens
aactgaatttaaatttcatttcatctttgttaagttgaatttaaactgaaaaactgatactcaattcagtgataggaaaaatgtatgtgtggaacaacttsgagctagtttttcaattgcaaattttatgaaatctaaatacagatcaagtatttccaatgaagatttagcatctgaattgaaatgtacttaaagtgtaaaaacacatgctgaaaatacatgactcagtacaaaaaagaatataaaatattaattttaaaatatggattacatgttaaaatcgtaatatttcggatatactgggttagctaaagtatgtttttaaactaatttcaccccgggcttttctcttttgtttttactttccaaatgcagttaccagaaaattttgaattacataagtggcttacatatatttgtattgacatgtgctggtctaggagcctgattcaatttaggttaaacattttgggcaaaaatacttctagacgatgtggatttcaaattttatcacattggaaggcacatacgtcagattgtgctaccattagcgacgctaactttgatcactgggttaagatgg

SEQ ID NO: 950209 - DNA, 583 bp, Homo sapiens
aactgaatttaaatttcatttcatctttgttaagttgaatttaaactgaaaaactgatactcaattcagtgataggaaaaatgtatgtgtggaacaacttggagctagtttttcaattgcaaattttatgaaatctaaatacagatcaagtatttccaatgaagatttagcatctgaattgaaatgtacttaaagtgtaaaaacacatgctgaaaatacatgactcagtacaaaaaagaatataaaatattaattttaaaatatggattacatgttaaaatcgtaatatttcggatatactgggttagctaaagtatgtttttaaactaatttcaccccgggcttttctcttttgtttttactttccaaatgcagttaccagaaaattttgaattacataagtggcttacatatatttgtattgacatgtgctggtctaggagcctgattcaatttaggttaaacattttgggcaaaaatacttctagacgatgtggatttcaaattttatcacaytggaaggcacatacgtcagattgtgctaccattagcgacgctaactttgatcactgggttaagatgg

SEQ ID NO: 950210 - DNA, 596 bp, Homo sapiens
catgtggtgctaactctgcagacacaaagagtgcatgagctgtggggccatggcggcctccactgagatttcaaagggtgttgtggacagcctgggggctcagrcagaaacttgctgcaggagtgaagctgccacagagaatccctacctaggcaatgactagtgaagccatgggaatgaggccaccgcagaaaactcccactatggaaatatctactggagctgagggaacaagaccaccaccaagactccaaaattggtgtctcagttcattttgtgctgccataacagaatatcactgcctgggtgctttagtgtaatctaggctgggattgccgcagataccagactccagcttgagagagatgaagcttggctgagcccagcaaagttgtgggggtagggctgcctgggccatgggggcttaacctccacccaggtgtgcccaggattcaggatttggagtcaaaggagattattctccagctttaagacatactgttgctttccctgttgggttttatagttagttaggaccagttactcctttcttcttgcctatttctcccttttggaatgggaatgtttattatatg

SEQ ID NO: 950211 - DNA, 525 bp, Homo sapiens
gattggttaacatacaggactgagagcatgtgctcatcacacacattcatgtgggtatgtgagtgaaatacactgtcaaaaatgaactgatatatcaatgagggtaagtattagcaagatagttaagattcagtaagatattagtaagatagtaagatattagctaaatcttatagaagtacagttattcaaattgctgttttaacataaattttagaatgaactatttgataagaaatgaactttttcctggctctgccaccagtgagctttatgcttgggctgcttacctgattgtgatgtttcccacctattttccaaaaggcaatgggaatggctaccactcttaccagggcaattactagacttaactatagtctgaagagttaaaaatagatacatgtggctgggattgagttgctgkttccgattccgagctgctggttccttccccctctccattacccatttctccaaggaactcttcccaatgccagacccatgactggggatgccacagctgct

SEQ ID NO: 950212 - DNA, 525 bp, Homo sapiens
gattggttaacatacaggactgagagcatgtgctcatcacacacattcatgtgggtatgtgagtgaaatacactgtcaaaaatgaactgatatatcaatgagggtaagtattagcaagatagttaagattcagtaagatattagtaagatagtaagatattagctaaatcttatagaagtacagttattcaaattgctgttttaacataaattttagaatgaactatttgataagaaatgaactttttcctggctctgccaccagtgagctttatgcttgggctgcttacctgattgtgatgtttcccacctattttccaaaaggcaatgggaatggctaccactcttaccagggcaattactagacttaactatagtctgaagagttaaaaatagatacatgtggctgggattgagttgctgtttccgattccgagctgctggttccttccccctcyccattacccatttctccaaggaactcttcccaatgccagacccatgactggggatgccacagctgct

SEQ ID NO: 950213 - DNA, 574 bp, Homo sapiens
tgtcataaatagctcttattattttgagatatgttccatcaatgcctagtttattcagagtttttagcatgaaggctgctgaattttgtcgaaggccttttctgcatctattgagataatcctgtggtttttgtcattggttctgtttatgtcatggattacatttattgatttgcatatgtttaactagccttgcatgccagagatgaaaccaatttgattgtggtggataaggtttttggtgtgctgctggatttcatttgccagtattttattgaggatctttgcatcgatgttcatcaggaattttggtctaaaattctctttttttgtgtgtgtctcgccaggctttggaatcaggatgatgctggcctaataaattgagttagggaggagtccctctttttctattgattggaatagtttcagaaggaatgttaccagctccttttcatacctctggtagaattcggctgtgaatccatcaggtcctggacttttytgattggtaggttattaattattgcctcaatttcagagcctgttattggtctattcagagattcaaattctt

SEQ ID NO: 950214 - DNA, 644 bp, Homo sapiens
ccgcaaactgtactttttttctctctctcccccataaaaaaaggttcttctgttagaattctaggcatggcacacagtactgggagataacacaaagagtcaggtggaaactattctgtttaatcaagartgaactaaatgtcagagactcaatgttctagatcaacaatttccaggattgatatatcttaatcaagtaattaggtgactttttcggtagtgttttccacaccagagagaggaacagatttgccgctttgctccgatggctgctagcagcagtgttggttgttaacagagacatttacatggaaccaccagttggcagggcgaacactttattacttgctattcccacatgctgaggattgtgggaaggctgccaagctctctgtctcatgtagctcttcagtataataacaacagcaacaaaaagacttggaaaaaacaaaacaaaaagaagaaaagtgagtaaaggaaacgatggaacaaagtccccggcttcagactaaatatggatgaaataaaagacttttagcggtgcttttcttttactttctttttcctctccctccctctcattcttcctttctctctctctctctctgtctccatcccaccatttaaaaatcattttaaattga

SEQ ID NO: 950215 - DNA, 595 bp, Homo sapiens
tttttagtagagatggggtttcaccrtgttagccaggatggtctagatctcctgaccttgtgatccgcccgcctcggaaatactttgcattgttggattgattgggtttgagcccctgttgtacttaagtgattatgaacaagtcttttataatctgaatttccctttcctagtttgtaatattgaggataataatttctaacttgcatgattgttgtgaagattaaataagacaatgatattggtaggagctctttataatctttctctcttatgtacaattcaaatatatgtcggtttaaataccaaaataccactttaaaaaatctgggctgaaatggacacttctaatgtaggagtagtgctttagaaaataatgctttgtttcgtattcttttcctagtattttatgtctagtaactcataaggaaaaaatgatcagataagtatattttttagatgctgattacagcattatttaaatagtagaaataacaactgttcagtgataagacaatgaataaattctgttcataaacattacaaatgttttttaaatatttttcatatgtgtgaaaagtaggattaaaaataa

SEQ ID NO: 950216 - DNA, 595 bp, Homo sapiens
tttttagtagagatggggtttcaccgtgttagccaggatggtctagatctcctgaccttgtgatccgcccgcctcggaaatactttgcattgttggattgattgggtttgagcccctgttgtacttaagtgattatgaacaagtcttttataatctgaatttccctttcctagtttgtaatattgaggataataatttctaacttgcatgattgttgtgaagattaaataagacaatgatattggtaggagctctttataatctttctctcttatgtacaattcaaatatatgtcggtttaaataccaaaataccactttaaaaaatctgggctgaaatggacacttctaatgtaggagtagtgctttagaaaataatgctttgtttcgtattcttttcctagtattttatgtctagtaactcataaggaaaaaatgatcagataagtatattttttagatgctgattacagcattatttaaatagtagaaataacaactgttcagtgataagacaatgaataaattctgttcataaacattacaaatgttttttaaatatttttcatawgtgtgaaaagtaggattaaaaataa

SEQ ID NO: 950217 - DNA, 706 bp, Homo sapiens
aaaggttttataatttttttggagacagggtcttggtctgttgcctgggttggagtgcagtggcatgatcatggctccctgaagccttgcactcctgttctcaagcgatcctcctgcctcagcctcttgaatggctaagactataggtgtgcaccaccatgcccagctaattttttaatgtttctgtagaaacagggtctcactatatttcccaggctggtcttgaactcctgggctcaagcaatcctcccatcttggcttcccaaagtgctgggattacaggctcattcatgagtctccacacctggccaattattataattattgtactttaactcctttctttgcccaccgacttgcggtgcttaaggcagccaggtaagtagttacagattccaggtcagtggaacctcagtgtgtgccctcacagagatatctcctgggaaaccagaacttctaacacaacagagtccaaagttccggaaacaaaaagcaaaaattcctcaaatgtatcactgggtataatagtgaaaggggccacttctacttccatcccttggtttctggattcrttctttctagccattacagattagtaccatatattggtctttatttcaaagtgtataataacctggaggactgtgccacaaccctgtgagatgttgtcgcctcgctttgccttatctgagtctcaacaggcttt

SEQ ID NO: 950218 - DNA, 730 bp, Homo sapiens
atctcactcactgcaacctctgcctcctggtttcaagctgttctccagcctcagcctcccaagtagctgggactacaggcacccaccaccatgcccagataattttgtatttttagtagaaacagggttttgccatgcttgtcaggctggtcttgaactcctgacctcaagtgatccacccacctcagcttcccaaagtgctgggattgcaggcgtgaaccactgcacctggccctgattgattttcaatgtgaaaataaaatataaaaactattcttggagttatttctaaacagaactaacatcagaatcatctgaatcatcagaattgtctatttcagaaaaattaaattcatcaaatgaatctttggccaacaactaagaaccatgttaacatcttgcataggaatgctacgttttctaggatttgtcattttcggcaatcaagaatgactatgttttgtaaatggaagtactactactaaaaccagaatggtttaaatagaatgatgtcttttgtttccaaagtcaatacactaaagcaatacgaaaataataataaaagcgagatatgtcatggcaaagttatcttggggtaaacgtggcagccacaaggactgccagccgyaagcattgccagcaaacaggaaaagggttaacattaccattgattgctgtagatgctacatcggtgccctgcctgaatttcactcacagggccaagacccat

SEQ ID NO: 950219 - DNA, 652 bp, Homo sapiens
ccattccccacacccccaaaggtctatcttaacctgagctctgacccatgacaaagtggtctcctcgatcacagggctgtgtatgtggcctttgtcatggaagctgcttctgttcacagtgatcactgtgtcttggggacattgctgtctgggccaagggctggccaaatcagaatttctggccatcctaaaggttgattgcagcaggcagtcatagccaccattcatcctcccattatcatggtcaataataccactcatctaggcttggctgtgattcagggacctggctgaggtgactgatgctgaccaaaagtcattttttttttttttgagatggagtctcgctctgtcacccaggctggggtgcagtggtatgatctcggctcactgcaagctccgcctcccgggttcacaccattctcctgcctcagcctcccgactagctgggactacagacacccgacaccacgccaggctaattttttgtattattagtagagacggggtttcactgkgttagccaggatggttttgatctcctgacctcgtgatccacctgcctcagcctcccaaagtgctgggattacaggcatgagccactgcacccggccctgaccaaaagtcttatccacacacctgtaaatctaaa

SEQ ID NO: 950220 - DNA, 532 bp, Homo sapiens
atttctttcaaacatcttgtctccattcagactttctcaatccccctaaggattcagatgtattgaccctagatttctgagtctagagcctttctttctgccttgatgcagcttatcattgaraaaattagcccagaacagctcagccatttgatgaggaaggagaggaatagcaaagggagttgggggttggatcagttaatcagctaaccagccaaaatctcgatatattatccctccacgaatgtttcggggttgttggtgagagttttcaaatccataacaaaataaccagaaaaagaatgtctactctgtgttgcaatttgcctatgacttggatgagtctgtttcaaatgaccctccgtgaggactgccacattcagttgtgcagcctgtgcactgcacaaaggtgctcctgcccaggggagcaggaggaagctggaattcaccagggactctgcttacgagctgggcctgcctgggcctctttcaatcatagcctggggctctttcaatcttagagaggagcctc

SEQ ID NO: 950221 - DNA, 532 bp, Homo sapiens
atttctttcaaacatcttgtctccattcagactttctcaatccccctaaggattcagatgtattgaccctagatttctgagtctagagcctttctttctgccttgatgcagcttatcattgagaaaattagcccagaacagctcagccatttgatgaggaaggagaggaatagcaaagggagttgggggttggatcagttaatcagctaaccagccaaaatctcgatatattatccctccacgaatgtttcggggttgttggtgagagttttcaaatccataacaaaataaccagaaaaagaatgtctactctgtgttgcaatttgcctatgacttggatgagtctgtttcaaatgaccctccgtgaggactgccacattcagttgtgcagcctgtgcactgcacmaaggtgctcctgcccaggggagcaggaggaagctggaattcaccagggactctgcttacgagctgggcctgcctgggcctctttcaatcatagcctggggctctttcaatcttagagaggagcctc

SEQ ID NO: 950222 - DNA, 532 bp, Homo sapiens
atttctttcaaacatcttgtctccattcagactttctcaatccccctaaggattcagatgtattgaccctagatttctgagtctagagcctttctttctgccttgatgcagcttatcattgagaaaattagcccagaacagctcagccatttgatgaggaaggagaggaatagcaaagggagttgggggttggatcagttaatcagctaaccagccaaaatctcgatatattatccctccacgaatgtttcggggttgttggtgagagttttcaaatccataacaaaataaccagaaaaagaatgtctactctgtgttgcaatttgcctatgacttggatgagtctgtttcaaatgaccctccgtgaggactgccacattcagttgtgcagcctgtgcactgcacaaagrtgctcctgcccaggggagcaggaggaagctggaattcaccagggactctgcttacgagctgggcctgcctgggcctctttcaatcatagcctggggctctttcaatcttagagaggagcctc

SEQ ID NO: 950223 - DNA, 532 bp, Homo sapiens
atttctttcaaacatcttgtctccattcagactttctcaatccccctaaggattcagatgtattgaccctagatttctgagtctagagcctttctttctgccttgatgcagcttatcattgagaaaattagcccagaacagctcagccatttgatgaggaaggagaggaatagcaaagggagttgggggttggatcagttaatcagctaaccagccaaaatctcgatatattatccctccacgaatgtttcggggttgttggtgagagttttcaaatccataacaaaataaccagaaaaagaatgtctactctgtgttgcaatttgcctatgacttggatgagtctgtttcaaatgaccctccgtgaggactgccacattcagttgtgcagcctgtgcactgcacaaaggtgctcctgcccaggggagcaggaggaagctggaattcaccagggactctgcttacgagctgggcctgcctgggcctytttcaatcatagcctggggctctttcaatcttagagaggagcctc

SEQ ID NO: 950224 - DNA, 490 bp, Homo sapiens
atggtgcctcaggcctataatcccagcgctttgggaggccaaggggggcagatcacaaggtcaggagatcgagaccatcctggctaacccagtgaaaccccatctctactaaaaatayaaaaaattagccaggcatggtggcaagcgcctgtagtcccagctactcgggaggctgaggcaggagaatggcataaacccaggaggtggagcttgcagtgagccaagatggtgccactgcactccagcctgggcaacagagagagagactctgtcttaaaaaaaaaaaaaaaaaaaaagaaacatcaaagtcaaacttctgaaaactagagattggattaagttaagtttgtacttaatccaaggagattaagatccaagaaaaaatactgaaaacagctagataaaaacaacagtttacttacgagagaaaagcaattcaaatgacagcagatttctcatcagaaaccatggaggccagaaggaagtggcc

SEQ ID NO: 950225 - DNA, 490 bp, Homo sapiens
atggtgcctcaggcctataatcccagcgctttgggaggccaaggggggcagatcacaaggtcaggagatcgagaccatcctggctaacccagtgaaaccccatctctactaaaaatataaaaaattagccaggcrtggtggcaagcgcctgtagtcccagctactcgggaggctgaggcaggagaatggcataaacccaggaggtggagcttgcagtgagccaagatggtgccactgcactccagcctgggcaacagagagagagactctgtcttaaaaaaaaaaaaaaaaaaaaagaaacatcaaagtcaaacttctgaaaactagagattggattaagttaagtttgtacttaatccaaggagattaagatccaagaaaaaatactgaaaacagctagataaaaacaacagtttacttacgagagaaaagcaattcaaatgacagcagatttctcatcagaaaccatggaggccagaaggaagtggcc

SEQ ID NO: 950226 - DNA, 560 bp, Homo sapiens
aactagattcctatctctcaccatatacaaaaatctgaagatggattaaagacgtaaatgtragacctaaaactataaaaatactagaagaaaacctagaaaaagttcttctagatattggtctaggcaaaaattcaagactaagacagacctcaaaagcaaatgcgacaataacaaaaatagaccaataggactttatcaaacttaaaagcttctgcacagcagaagaaataatcaacacagtgaacagaaaacctagagaatgggagaaagtatctgcacacaatgcatcttacaaagaactaatatccagaatctacaaacaacaggaacaaaaagtatccctatttaaaaagtggacaaaggacataaacattttttcacaataagacatacacatggccaataagcatatgaaaaatgctctggccgggcacggtggctcacgcctgtaaccccagaactttgggaggccgaaatgggtggatcacaaggtgaggagttcaagaccaacctggctaagatggtgaaatcccatatctactaaaaatacaaaaaaa

SEQ ID NO: 950227 - DNA, 738 bp, Homo sapiens
gactgagtgataaatttatcatttaagattagttggccttcgttagagttaggtgacagaggtatgcttcctcaactcctcyctttgtctctccagaaaggcggtaggattttcttcctttccctgtgttatagtggtttcttcctagttttccttagtccttctaacactcaagttagcaaacgtctgcggcaccaatctccatattctgattctgcgtcccactacactgggaactgcctgctggcctgtggggagttgttctctttcctctgttgtcatcttatcattgacctgactgagataccagagattgccaaaatctcaggctgcagttatggcggcacttgaggttaactctctcatttgaggttagtgtctgatgtagcagtaacattatatctatgtcaaatcaaaggtttgtcctaacccttgtaaaacatcaactagagccatcagggttatctgagaatttacctaggtctattttgtttcaggtctgagagggagaaaggttcatacactctgactgggccgaattctccagaatacatattaggggagtttttgccttggggggaacgtttcccatctgaaaaaaagaacacagggatgccagcacccctagtcattttccgaagccgatgagcattagtcctagagcgtcctctatgatcctaatgcttattctcttccagggtgcgtaaccacccatagacctctgcttatcggattagt

SEQ ID NO: 950228 - DNA, 592 bp, Homo sapiens
gcttggagaaagatgacctgactcagtctctttcaaaatctctgctaatgtttgaaacatgtcaaaaatcccaatgttcacttgtcacccccataattccagtttggctttgaatgcagccactttatctgccaacttgaacacagttgttgttctctcctggcatgacagattgaatttattgagcaggttgaatataccacacaagtaagtaagttatgtgacccattctgtgtcaatgaaatgtgctgccagtgatgactggttttctaaacgaaatctctggagtggctctcatagttcaaaaactctggccagtgatctacctttaggaagccaatgctcttctgtgtataagagaagacatgtgtgctctgtgtccatctcctcacagagctgcatgaacagatatgaattaagggcatgtactttaatgtagttgataattttaatcacatcccacaaaacattgttaagttcaggtgatatttttcagctagccagcatttctctatggctgacacagtgcatagactcayattcagaagcaacttctttgaactgagtagtgaaaccagaaagctgtccagtc

SEQ ID NO: 950229 - DNA, 612 bp, Homo sapiens
attttattgtttcataagaatggttaatgtcattaatccctgttgccttttttgtgtgcaatttaattccaggacatctgactaggggcattttgtcactgtctcacattaaaaagaactttcagggaggagtttggtaccaaagtacctctctgataattgacctctctcaccagtatccacagttgtttcagctttgggcaccaaaaccgggttccttcagtcatgatggaagtggcagtatcacattatctaaggctttgcaactttacaaagactcacctagggcaactgttatccaaagggagccctggcgctagtagacactcggaggtttacagtctcttgtaccatgcaggtttccaaagcttcacattgatctcattgcccaacctgactccttcgagatgaaagactgagtttgctgcctggccatattgagaggagaagcagaggggcttctccgtccggtggggacttggagaacttttctgtctrgctaaaggtttgtaaacgcaccaatcagcactctgtaaaaacggaccaatcagcactctgtaaaatggaccaatcagcaagatgtgggtggggccaaataagggaataaaagct

SEQ ID NO: 950230 - DNA, 589 bp, Homo sapiens
cagtaaatcttgctgttgctcactctttgggtccacaccacctttaagagctgtgacactcatcacgaacgtccacggcttcattcttgaagtcagcgagaccacraacccaccaaaaggaagaaactctggacacatctgaaggaacaaactccagacacaccatccttaagagctgtaacactcaccgcgaaggtccgcggcttcattcttgaagtcagcaaaaccaagaacccactggaaggaaccaattctggacacaagatgaatactaaattatgattattggtagtttgaattactttctgttcatttctttctgagcctgttctttagaaatgagcttttgaaacatctgaacatgcaccaaatgaggatgcctcacagggcctagtctgtcagtaagcacactgctctccatccccagaaatgagctgaccagaaatatcatcagggtaatttgacatttgctaagaatataaggtcccccacgtaccctcacagtatcataaatctcagtaatttctgtcagcaaaggcaaaggttcatctaattgcaggcttcccttttatggagcgagaaccaaagt

SEQ ID NO: 950231 - DNA, 472 bp, Homo sapiens
gaggttgctggaggtccactccagaccctatttgcctgggtatcaccaacagaggctgcagaacagcacatgttgctgcttgatccttcccctggaagcttcatccctgargggcacctgcctgtatgagctgtcagtcagcccctactgaatggtgtctcagagttaggctacacgggggtcagggaccacttgaggaggcagtctgtccattctcagagctcaaacaccatgccgggagaaccactgctctcttcagagctgtcagacagggacgtttaagtctgcagaagtttctgctgccttttgttcagctatgccctgcccccagaggtggagtctacaaaggcaggtgggcctagttgagctgtgcgtgggctctgcccaattcgagctttcccagccgctttgtttacctactcaagcctcagcaatggtggacacccctccccctgccaggctgctgccctgc

SEQ ID NO: 950232 - DNA, 539 bp, Homo sapiens
gttcccatgtttatatccatgtgtgctcaatgtttagctcccacttagaagtgagaacttgtggtatttgactttctcttcctgcattaatttkcttaggagtatagcctccagctccatccatgttgctgcaaaggacttgatttcattttttctttcatgtctgtgtagtattccatgatgtctatgtaacacattttttccctagttgttttttcatttggtttttttgttgttgttattggttttttttaacttttattttaatttcaggggtacatgtgcagatttgttatataggtaacttacatgtcacaggagtctggtgtacagattatttcatcacccaagtaataagcatagtaccaatagatagtttttcatcctcatcctcctctcgccctccaccctcaagtaggccccagtgtctgtttttcctttctttgtgtccatttgcactaagcgtttagctcccactgataagagagagcatggggcattcagttttctgttcctgccttagttcacttaggataatg

SEQ ID NO: 950233 - DNA, 431 bp, Homo sapiens
ggccaattacactttccataaattattttctctctgccttggtttcttcacttgtaaaaagaaaataagattattatgaggatgaaataaaatagtatatgtaagcaggaccggttatataattagttgggcctgatgcaaaatgaaaaagtgggctccttgatcaacaactattaagaattacaagatggtgacagcagggcattaatccaaatgtggggcccttttaagtgcaggaccttatgcaactctacaggtcacatgcctctgatgccagacctgtgtgtgagaaatagagtgtaaaacacatagcasgtgcttaatatatggtaactgctgtccctttctttgctattttcattcagatttccttttcctgaatgaaaaaatatgtattcactgtaatcagattttgttttacctgtagtatt

SEQ ID NO: 950234 - DNA, 759 bp, Homo sapiens
ggcatacttctgctaacctttcacctcttggctcaggtgctgtccactctgtcaccttccctacaaccaccttttcactaccctgatacatcatcttcattttaagattatagtcatgcgtcgctcaagattctgaaaaatgcatctttaggtgattttgctacacccctgggctatgtggcatagcctattcctcctaggctctaagcctgtacagcatgtgactgtactgaatactgtaggtgattgcaacacgatggaaggtatttgtggatctaaatagatctaaacatagaaaaggtacagtaaaaatactgtataaaagatataaaatgggctgggtgcgatggctcacgcctgtaatcctagcagtttgggagtctgaggcaggcagatcacttgacgtcaggagttcgagaccagcctggccaacatggcaaaaccccatctctactaaaaatataaaaattagccaggtgtggtggcacacgcctgtaatcccagctatgcaggaggctgaggcaggagagtcgcttgaacctgggaggtggaggttgcagtgagccgagatcacgccactgcactccagcctgggcaacagagtgagactgtgtttcaaaaaatataagagtaaaaatggtacgcccrtaaagaacacttaccgtgagtggagcttgcaggactggaagttgttgcggatgagtcactgagtgagtggtgagtgaactcgtgaaggcctagcacattactgtgtactac

SEQ ID NO: 950235 - DNA, 597 bp, Homo sapiens
gaagagactatcttttcccactgtgtagtcttagctctcttgttaaagatcatttagctgtatacatgaaggtttacttctatgctgtctattctgttccattggmctgtacatatctgtttttatgccagtaaaaactggcataaatactgttttgatgacagtaattttgtaatacgttttgaaatcaggatgtgtgaagcttccagctttgttctttctcaggattgttttggcttatagaacatatattttgtattcctcgtttcattctagtgactctgtgccatccatataccccctttatctagatctgtggtaaacaacaagtcatctgccctttactgcactgatgcaactcgggtcagatctgtagcttagaaaactgtggaatagtttttatcaggataaagccaactggctcaactcacatacttagtctaatagtatcttaaccagctaaatttgtagaccccaatttcatattttagtcagagcagaaaggaaacaatttaatatcccaaatatcataatttgagtccaggaacaaaaccagcttgtcactcttaaaagggtagaactggagactacaccagt

SEQ ID NO: 950236 - DNA, 609 bp, Homo sapiens
ttatattggttagtatttatggaatattacctatgcaccatgtaatgggccaaactctattaactcaactcatggatgaagtaattgaggtacagaaagtcacagagaaagtaaattttgggactggagccaattcagagccttctgacactgaaaccagatcttctaagtgtaatagtctaagttctttctagtttaatatatgttatcatattaagaaagtattcattaatttttatcttattagggaatgggtattaaattttgttaaaggaaggtctttttagcagttatggggtgatcatattatttttctctttttatatcaattaatatggtgaattacattaatggatttttaaatgagagttttaaagagagagagaattaatgtaaggatcttttaactgaacttcccaataaatgtgaaagaagttataacacagaaaacagccattttaaattctcaatgaaataattaactttgacaaggatcctcagtccttgtcaaaataattgtggggaaagtttgtggggaaaggaggtctagaggtccagagattcataccaaccattacctstccaccccccacctacccctatgttttc

SEQ ID NO: 950237 - DNA, 552 bp, Homo sapiens
ttgcaataaagaaagagtaaatcatggagagccagctgtgcgggagactggagttttattgttacccaaatcagtctccctgagtatcccggaagcagtgattttaaggataacttggtgggtgggaggaatccagtgggccagaagtgctgattggtcagagatgaaatcatagggagttgaagctgtcttattgtgctgagtcagttccccagtgggggccacaagatcagataagccagtttatccatctggtgccaactgatctatcaagtgcagggtctggaaaatatctcaggcactgatcttagaagaagtttagggagggtcagaatcttgtagcctccagttgcatgacccctaaacaataatttctaatcttgtggctaatgtagtcctacaaaggcaatccagtccccaggcaagaaggagttctgctttgggaaggggctattattgtctttgttttaaagyataaaccataaacaaattttctccaacagttagtttagcctacacccaggaatgaacaaggacagcttggaggttaga

SEQ ID NO: 950238 - DNA, 585 bp, Homo sapiens
ctcttatttagtggctaatatagctggtgactttaagctaaagccaacgttcatttactattctgaaaatctttaagattttctttttttttttttaaagtgcctttaggaattatgctaaatctactctgcctatgctctgtaaatggaacaagaaagcctggacgacagcatatctgtttacactgtggtttactgaatattttgaggcctaacactcagaaaaaagattcttttcaaaatataactgctcattgacaatgcacctagtcacccaagggctctgatggagatgcccaaggatatgaatgtggttttcatgcctgctaacacgacatcttttctacagcccatgaaccaaggagtcattttgactttcaagtcttattatttaagaaatacattttccaaggctacagctatcatatatagtagttttttttgttgttgttkttttgggtttttttttgtttttttttgagatgaagttttgctctgtcgcccaggctggagtgcagtcagtggcgggatctcggctcactgctacctccgcctcccaggttcaagcaattctcctgcctcagc

SEQ ID NO: 950239 - DNA, 619 bp, Homo sapiens
ctctctaaccacttttcttggtggaagatcctaacatgttcggtaggattctgaaggtagggagcagatttgcatagagcaggaatcttcactacagcctgcctggaactggccccatcactgatttctccaatacacttcagtgcccaccctaggttgtttgatggaagattagctttaattgtataaaatgaggctgggtgccgtggctcaagcctataatcccagcacttgggaggccgaggtgggtggatcacctgaggtcaggagttcaagaccagcctggccaacacggcaaaaccccgtctctactaaaaatacaaaaaattagccaggagtggtggtgagcacctgtagttccagctattcgggaggctgagggaggagaatcgcttgaacccgggaggcagaggttgcagtgagccaagatcgagccaccgcactccagcctgggcgatgagtgaaactctaaaaaaaagaagaaaaagaaaaagaaaaattgtataaaatggacaaaccccaaaataacactggcataaacaastcagaactttatttctctcctaaggaaaaaaatagttttgagggaaataaacttctgtcttgtttattctactgt

SEQ ID NO: 950240 - DNA, 466 bp, Homo sapiens
cccaccatcacacctggttaatttttgtatttttagtagggtttcaccatgttggccaggctggtctccaactcttgaccacaagtgatccacccacctcagcctcccaaagtgctgggattacaggcatgagccaccgtgccaggacgaatttatgtttttatataattaatacatttgtggggtatgacatgatgttttgattcatgtatgcattgtatagtgatcaaatcagagcagttaacatatctgtcaccttaaacatctatcatttcttttttcttttttttttttttgagacaggggactcactctgtcacccaggctggagtgcagtggcgcaatctcggctcgctgcaacgtctrcctactgggttcaagcaattctcccactttggcctcctgagtagctgggattacaggcatgagccaatgcacccagctaatttttttgtatttttagtag

SEQ ID NO: 950241 - DNA, 505 bp, Homo sapiens
  misc_feature 364, 493, 494, 495, 496, 497, 498, 499, 500, 501, 502, 503,504, 505: n = A,T,C or G
acatagtcagactactattactttttgaagaaggccctcaatcccattccttttcactggaaaggacctcccaactgaggtttacagccacctcctataggtgcattcgagccaacaataggttcatgcctccctgggatagagatcccaaagggagagacagactaccatatttgctgttttgaagccttcactgttgatatctccaggtattggaaaatctgaggtgactaaagactgcagtgggcccccagaatacttcagaagccctacgaaaaagtggtcagactgctacatgggtgattgttcccacatctccttattgggcaggtcctccaggccaccagcctccccctgcagagcntatgagccagtagcagctctgcaagttactgggcagaacycaggaacaactgaaagcctctctgccactttctctgtagtggaactgcccttgcacccttgaactaatgaagaaggaaataccctaaannnnnnnnnnnnn

SEQ ID NO: 950242 - DNA, 616 bp, Homo sapiens
cagagaaaaagagaattttaccagcagattacacctggaccaaaactgcatctcttttctgcgtttccagcctgctggcctcccaggcgtaatttggacctgccagtagccataattgcatgagtcaattctttaaagtaaatctccctgtttctcttgagaattgtgactaatacaccataaaaggacattattaagaaagtgagagataacccatagaatgggaaaatatttgcaaattatatatctgataagagtttgatatccagatcataaaagtactcctacaacttaacaaacatcaacaacaaaaataaaaaccctaattttaaaaatggtccaagtacttgaataagtgtttctctaaagaaggtatacaaacagccaacaagaaattgtaaagatctgtttcattaactattagggaaatgcatatctcatatccatttgacataaaggacaaatattctatgattccatttatatgaaatgtgtaaaataggcaaattcatagattcgtttagatgtygatctaatccaaactaatctaacctaggaagtatattagagattaggggggttaaaaaaagaagggaatgcagatttattgctttgt

SEQ ID NO: 950243 - DNA, 579 bp, Homo sapiens
atatgttgtttaaggcaccacgtctaaggtaattttttgtatcagcctaagatattactcaacatgggcaggagtaacatattctctggcttttcctmatcaggagtgacaatgaggaacaaaacaacaggaaatcagttgtttggcgataaaattagtatctgttcatctagtaaaattgactatagggagatcaaggatggatattttctgctcttcagaaaaaaaaaaatggagaatattccaaacctaagagatactaacttataatattacaaaaaatagatactttgaatttttaaatattttctcttaccacatatggttaacgttagtattggagtttgtaaacagccattagaacatttactaataaaacatgaatttcttctttccttttttgtaataaacaaaaatgtaaggcataaaaatcttacagaacaaaactaatgtataccattgcatttaagaatatttttcatgatttgtaaactaaatgtcatagaaacttacctctgaatacagatctgaatacagaaagtaggcagaccaggatttcagactattttttctattaaa

SEQ ID NO: 950244 - DNA, 582 bp, Homo sapiens
gaaaccccacctctactaaaaatacaaaaattagctgggtgtggtggcaggtgcctttaatcccagctactcgggaggctgaggcagaagaattgcttgaacctgggaggcggaggttgcagtgagattgcgcctttgcactccagcctgggctgacagagcgagactccgtctcaaaaaacaaaaaaaccccctgcttgttggatttagcaacacacgggacctctgcagcaagagccacctgcactgttgtctatgcagagatgtgagcatgcagatacacacatcctttctacctccaggcactaaacacacgctgtcccaaacatgcagcccaccttccaggtcctggttcttgggtggggaggggaagaacttagcgtgactgacctttagtggaagaggtgatgctgaagaatcagtctcagcccttggagtcagctccttgtcacagtcaaattttctacacactcaaatcctctacacagttagggcctccacactctgctgctcacytttccataacccttcagagttcacaacgtgcattcgttcattcctcaaatactgactgggagtctg

SEQ ID NO: 950245 - DNA, 554 bp, Homo sapiens
aggaggcataggctggggccatgaagtccattgcggtcacctgcaaactaatgctgtgatactgtaataaccattaacattttaaagcatttatgatgagccttgcttctctgctaaatgccttaaataagataatccatgcttaattctcacaacaacccttcaaagtagatggcagtttaagaccacaagctctggagccagacaacttgagcttgaatcctggctttgccactttctagctgtgcgaccttgggcaaattactcaatccccctgtgccgccacgtcttcatctctaaataacgacaatattagtacctttctcagaaggttggtatgatggttagttgagctaataaatataaaacagttagaactgtgctttgcactcaataaaatcttggttattgttcctttttttttttttgagacggcgtctcgttctgtcacccaggctagagtgtaatggtgcaatctcggtcactgyaacctctgtctcccaggttcaagtgattctcctgcctcagccttctgagtagctgggattacaggc

SEQ ID NO: 950246 - DNA, 751 bp, Homo sapiens; identical to SEQ ID NO: 945711

SEQ ID NO: 950247 - DNA, 611 bp, Homo sapiens
cctagacccagcaaaggggcacatgctgttgcttctgatctctttactcctcttagcaatttccaccagctaattccgacatagcctttcagccacagtttacatgtcctttccccggaaatgcattccttgaccctcaggcttcgttccttagtggattatcagtaccctgtaactttcccttcacagtacttatttaaagattatttgagtgattatttgaaatgtctgtcttatgtacttaaaaactatttgtggttatttttgtaaagtctagcttgtcactgctgtttcctcagaacctagcatggtgcctggcacagaattgatcctcaataaatatttgatgaatgagtgaataatgaatggatactatctttgggacctatgttgtccatatcctaagaaatgatcctcagcccccagcagctatcttccttcctaatcttgcagagcctaccagccaatatgtaggtgtaattgccctatgatgccagggaactaggagaccaggctcactgsggtgcagcaagccaataaaagtgcaaagaccttcatgtagatcatgggcctcttgtattcctgtgatcactagctaacaccttgatgga

SEQ ID NO: 950248 - DNA, 636 bp, Homo sapiens
tttggtataatgattaaacaacatgatttgtaatactcattaatcggaattcagcacataggtaaactaaagcatatatgttaacgtactataaagctttgtgaactgaaaacaattatgttctgctttatcttacataattcagagggttctttactctatttaaccttgtatgtatattttacaaaatctatgttcctggatgggtttttcttttgtgacttgtgttgattgtgttaaggctatatttaatccacagtcttaactaaattatgtttacaaacacgcagaaagaaatgcaaaatcatgaagatgttaatgttggttctattttgattcaacatcacaaaaaagaaaaattcagtggttccagtaaagatttgaaatttgttaaaatgagaaatacctttggaagccatacatatgaaaatcaggtacaactttccaaattaaaaataatttatttttaatatatatagtgtttatagaacagttttctttagcttttaaaaaatatataaaaatgagttatgtatccartagctagattaagaaatagagcattaccagtttttaagacctgctgtattattttcttttttcttttttttttttgagatggagtcttgctctgtt

SEQ ID NO: 950249 - DNA, 553 bp, Homo sapiens
gcaagtctcaaattcagtggggcagttaaatcttaaagctccaaaatgttttctttgactctatgtcttacattggggtcatgctgatgcragaggtgggttcccattgtcttgggaagctccccttttgtggctttgcagggcatagcccccctcctggctgttttcatgggctagtgttgagtgtctgtggctttttaggtgcgtggtgcaagctgttcatggatctaccattctggggtctggaggacagttgccctcttctcacagctctactaggtggtgtcccagtagggactctgtgtggaggctctgaccccacatttcctttcttcactgccctagtagaggttctccatgaagaccctgcctctgcagcaaaattcagcctgggcatccagtcttttccattcatcttttgaaatctaagtggaggttcccaaacctcaactcttgtcttttgtgcacctgcaggctcaagaccacatctaagctaccaaggctcggggtttccacctgctgatgcaacagcctgagctataccttggcccct

SEQ ID NO: 950250 - DNA, 688 bp, Homo sapiens
gtcgctagtggtctccactccatacctgctgccacccagctccacctgctgccactgtccagcgatacctttccttcatcattgtccacttcagctctccctgtctcttggctcacctttccccacctccaggaagctttcctaagtggaactacatcccaggaatgtgggcattactattatgctcttttacagatgttaaaactgaggcttagataggctaagtgacttttctaaggccacacagctagtaagtgggaggcccagtctgtctgaccccaaagcccaggctaggaaccattctgcatgcagacatcaggagctgaatgatgctggtcccagaatcacagtggtagagccaacagtgagcgggtggtccatgctctgggccccagcctgggcctccagggctccccagacccttgcctgggttgctggttatgttagcgctaaccactgtctcctgtgcaggggacactgttgttcacgtgtctgcctcccccttttgcctgaaagcccctggaggaaagaatccacatcatatgcagtcccatggyctccctgcccaccttcccatacgtggtgccttatatacagtaggtgctccatccacactgctcagaaaggggttcagtctgctccttctctggctgtgggagccaatgaaaaaggaggctggtggcctctt

SEQ ID NO: 950251 - DNA, 652 bp, Homo sapiens
gaggctgtgtccccttcagaaagaaccccattacattactgaaaagttatgtagtgaatctttctcccatccttccccaaggataccaccaaccttttaccagggtaactgtgcactgaggaaaggaatgtgatcagatattttggggactcctggacactggctctgagctgacattgattccaggggacccaaaatgtcatcctggtcctgcagttaaagtaggggtttatggaggtcaggtaattgatggagttttagcacaagtctgacttacagtaggtccaatgggtccctggactcatccttttgtaacttccccagtgccagaatgcataattaacatagacataattagttgctggcagaacacacacattggctccccgaccggtaggttgaggcaactatggtgggaaaggccaaatggcagccactagacctgcctatacctaggaaaatagtaaataaaaaacaatattgcatccctggagggattgtggagattagtgccaccatcaagaacttgaaagactcagggttagtgattcccaccacattccattcaactctcccatttggcccgtgcagaagacagatcaatcttggataatggcagtrgattgtaagcttgaccaagtggtgactccaa

SEQ ID NO: 950252 - DNA, 603 bp, Homo sapiens
tttttcatagacctaggggttacagagtcacatggttcagcaggccaggcatttgatttatttgacaatacaactctctcaaaaacatagtaggcttctgatctactttcttctggtcagttctatgcttaagttataacaatctaagattttattagttgtgtttttaagactgagcactcttttcttttcttactgctctctgtattctgccccccgccagacccaccttaatggcaactgtcctgagcctaggtgaaccaataagctgttggcaaagaaaacactcctaatctaatcttacacccttaatttaatctgtgctgctagactggctcttactgtctagcagaacactcttaacagaaagtgactgaaaaagctatatgagccttatctccttctaaggctgttactcaaattcacaatttctaactccttcaatttggggtgcagagacagctaacatcaaacatgcaaggacctaaattgcatcaacttaattgcaggtaacaggcagagtgcctcccctagctaatctcactaagggtacgtatgtgttctgcagagagctgtgggyatccctgctgcatagttccctga

SEQ ID NO: 950253 - DNA, 549 bp, Homo sapiens
ataccaatctaagaatataatgaataaacwgacatacaacaaaaatttcaagatcaaaactacatttgcttgagtataaatacacatccatgcacataaaaatacattacacacacacacacacacacacaaacacacacacactcttaatgatgattgtctcactgatgtctccactcaacttctaaatctttattacaagctctaacctgtgcttcagacttacttatgcaagtgcctactagtcatctcttcctagatgtctgacaagccatcaaaacatctgacactgaacttatgaccctcccttctaacctggccacttccctcctatttccaatatcaactgaagtgaaggctagctggtgtatcctagatgcataacattaactcactcttcctcatagtcaatcagttggcaaatctttactttacctccaaactattttctccattgtgccatctcttctctatcctgaaatcacttttcctatctgatctttatcttctctttcctggcttgttgcaatagctttcatatacccaagt

SEQ ID NO: 950254 - DNA, 724 bp, Homo sapiens
agactctgtctcaaaaaaaaaaaaaaaaaaagaaaaagaaaatgtgttatatacatacaatgaagtattattcagccttaaaaaaagaaggaaatgctgtcacaggtgacaatagggaagaaccctgaggacactatgttaagtgaaataagctaatcaaaaaaagacaaatacagcatgattctacttataatagaaggtatctaaagtaatcaaacacactttaaaaaaatagtagaatggtgattgccagggccagggggaaaaggaaaagaggtgttgttcaaaaggtgtagagtttcagttatgcaagataaacaggttctaaagttctgttgtacaataatgtgcatacagttaaaaatactgtactatagccttaaaactgttgaggataaatttacattatatatttttaccagtttttttaagtataaaatctatagttttcatagaaaatagtgcataaagcattagtattcaagtgttttcacacaaggtataatgtcaaacaaaataaagaaattcaatcttgggtttctggaatttcatataccatacactataccgaatggttttcaaggttctaagaataagaataaagaaatatatgtgaaagaatmttgctaaagaaaaaaaatgcttccttcctgtaggagatagctaaaaataaagaaaaaaaaggaaaaaaatgctgcaaagtatttattattaaattatatga

SEQ ID NO: 950255 - DNA, 627 bp, Homo sapiens
caccactccattaagcttataataattcactkttattgtctaagatccaactgtcttctgcacaggccaaatagcagagttcagtggggatgtggtgagaatcaccactcctgcatctttcaagtccttgatggtggcactaatttctgccatctctctgggattgcaatatggcttctgaactgatcaatgacagttcagagccagtgccctgtagttcctgaaaggtctgattacttcctttccctcaatccacaattgccccagtgaaagcctctaggtccctttggagaacactggtagaaatattttcaacagtgtactggggccctttctcaagggggcccagcccctccttcattcaaggggttctgggtctgtaaactggcttaagtctgagaattgattgaggtgccaagactctgtttttgtgattcaaattagatttttgttcacttgtccttgaactttcctgcttatacaagtcaataacaatttagtaggcttcctatcagtttcacttctaggaatgtcatgatcaagtagccaacgtcatagatccacaggagtctgactattctgagtgctgccttggctctgctgtccattagagtagctgtacctacc

SEQ ID NO: 950256 - DNA, 627 bp, Homo sapiens
caccactccattaagcttataataattcactgktattgtctaagatccaactgtcttctgcacaggccaaatagcagagttcagtggggatgtggtgagaatcaccactcctgcatctttcaagtccttgatggtggcactaatttctgccatctctctgggattgcaatatggcttctgaactgatcaatgacagttcagagccagtgccctgtagttcctgaaaggtctgattacttcctttccctcaatccacaattgccccagtgaaagcctctaggtccctttggagaacactggtagaaatattttcaacagtgtactggggccctttctcaagggggcccagcccctccttcattcaaggggttctgggtctgtaaactggcttaagtctgagaattgattgaggtgccaagactctgtttttgtgattcaaattagatttttgttcacttgtccttgaactttcctgcttatacaagtcaataacaatttagtaggcttcctatcagtttcacttctaggaatgtcatgatcaagtagccaacgtcatagatccacaggagtctgactattctgagtgctgccttggctctgctgtccattagagtagctgtacctacc

SEQ ID NO: 950257 - DNA, 470 bp, Homo sapiens
tcggtcagggacaaaaccccccccagtgacagacggytgagtcttactctgggaagagcagctacgaccgcttgcctctggtgtgacccttcctggggcttcaaaacccgcccttggagcccacaggccacgaggcaggagcacggctctggacctgacacaccaaagcaatggggctgggcctggataggcctgcaaggggctgccccatcccaaagcccttcaggccactgtcagcttacacagcggaggccagacgacacaccgcgctgccccgcggccacttcccctcctggggtccttccccacaccccgaggatgaccaggcaagctacctggccagcaggcacccgggcaacgcgtgtgagcttgcacccaaggacaggtgcccccctgccagggcagggcagggctgggctgaggaatagcgggcccaagactgtggacaccctaggccctctgacggaaca

SEQ ID NO: 950258 - DNA, 785 bp, Homo sapiens
ccagctgacatttctgtgtctgtctgtcactcygcgggtgtctgtctgtcactccgtgggctgtgttaaggacagtcttgtactgcactgtgttctcagcatccagcatatccacgtgggctcacagtgaacaaatgaatgcatttgtctgatggttctttttgttctgttttgttttgttttgagacagagccttactctgtcgcccaggctggagtgcagtggcataatctcagcatactacaacctctgcctcctgggttcaagtgattctcatgcctgagcctcccaagtagctgggattacaggtgtgcatcaccatgcctgaataattattgtatttttagtaaagacagcgtttcaccatgttggccaggctggtctcaaactcctggcgtcaagtgatctgcccaccttggcttcccaatgtgctgggattacaggctggagccactacacccgtgcagtctgatagttcttatatgcacttcttactctcatagtgtttttaaacaatttttaattgatgcctaatagatgttcatagttcttccatgacttaagctaaatcttgctcttcctggcctcagatatgtggccaagactcacatcctcctaaaagccattcccaaatgacttcaaaaaaaaaataggaggaggaattcaggaacaatccataacaggcaccacagtgaaacgccaggtgcagcaactctggcagaggaagggctggtctgggaaggtgcagtgctagggcgggtcccagaattgctaagctctgtgtc

SEQ ID NO: 950259 - DNA, 648 bp, Homo sapiens
gaaatgaaattgtctttttcacagtgacatgattgcctatctagaaaataaaaagaagaaaagtactcctgatactaataaataattataccaaggttgcaggataaaggttaatacacaaaagtctattgcttttctaggcagcagcaatgaacaagtagaatttgaaaataaaaacaaaataccgtttatattaataccccccaaaatgaaatacatagatatataaatctaacaaaatatgtacaaaatctatatgaagaaaactataaaactatgttaaactaaatcaaggaaggactaaataaagaggtattcatattcatggatagaaagatttaatattgtgaagatttcacctattcccaacttgatctatagactcagcacaatcctaatcaaaatcccagaaggttattttgtagatattgactaactgattctccgatttacagggagaggtaaaaggcccacaatagccaacataatattgaaaaagaagaacaaagttgtgtcactgacttctagacttactgtaaaactacaataatcaagatgatgtggtatcgtcaaaaaatagacaaggcartggaacagaataaaaaccccagaaatagacctataagaatatagtcagggccacgcacg

SEQ ID NO: 950260 - DNA, 648 bp, Homo sapiens
gaaatgaaattgtctttttcacagtgacatgattgcctatctagaaaataaaaagaagaaaagtactcctgatactaataaataattataccaaggttgcaggataaaggttaatacacaaaagtctattgcttttctaggcagcagcaatgaacaagtagaatttgaaaataaaaacaaaataccgtttatattaataccccccaaaatgaaatacatagatatataaatctaacaaaatatgtacaaaatctatatgaagaaaactataaaactatgttaaactaaatcaaggaaggactaaataaagaggtattcatattcatggatagaaagatttaatattgtgaagatttcacctattcccaacttgatctatagactcagcacaatcctaatcaaaatcccagaaggttattttgtagatattgactaactgattctccgatttacagggagaggtaaaaggcccacaatagccaacataatattgaaaaagaagaacaaagttgtgtcactgacttctagacttactgtaaaactacaataatcaagatgatgtggtatcgtcaaaaaatagacaaggcagtggaacagaatraaaaccccagaaatagacctataagaatatagtcagggccacgcacg

SEQ ID NO: 950261 - DNA, 227 bp, Homo sapiens
agtcagcagtaggcagaggacaggagaatctggaggtatcagtttaacattattggtccacttatcttctgattttgttatatgagcaaaaacatgttaagactatgaggctggatttttttgttacttgttgttaaaaacaatcttaatgaatamattttctaaatgatgtctctaagaatcataagggtgtgaaataattgatttccaggtttcacaagcaatga

SEQ ID NO: 950262 - DNA, 613 bp, Homo sapiens
caaagcaggcacagaggcagggctgcctaagcccttgcgagcccatcccacacaatcatgtatccaggatttgggacrtggggtcaagggagattatattgaagctttaagatttaatgtcttccctgctgggtttcagacttgcagaggcttgttgcctctttcttgtggccaatttctctcttctgggatgggaatattcactcaatgtctgtgtcaccattgtatcaatatattgggagtaaacaacttgtttttgatcttacgggctcataggtggaagggaattgccttgagtctcagatgagactttggacttttgagttgatgctggaatgagttagaacttttggagactattggggaaggatgactgtattttccaatgtgagaaggacatgaatttggggggcaaggaatggaataatatagtttggatttttgtcccctccaaatcacatgttgaaatctgatccctcatgttggaggtggggcctggtgggagatgtttggatcatgggggtgaatcctccatgaatggcttggtgacctcttcatggtagtgagtgagttctcactccattagttcatgtgatagctgttgtttaaagag

SEQ ID NO: 950263 - DNA, 784 bp, Homo sapiens
agggcaccaagtccctaggctgcacacagcatggsgaccctgggtcaggcccatgaaaacattttttcctcctgttcctccaggcctgtgatgggaggggctgccgtgaaggtctctgatatggcctagagacattttccccatggtctttgggattaccattaggctctttgctacttatgcaaatttctgtagctggcttggatatctccacagaaaatggggttttctttcctattgccatcaggctgcaaattttccaaacttttgtgctctgcttccctttaaaactgaaagcctttaacagtacccaagtcacctcttgaatgctttgctacttagaaatttcttccaccagatatcccaaatcatctctctcaaattcaaagttccacaaatctctagggcagggacaaaatgctgccagtctctttgctaaaacataacaagagtcacctttactttatttcccaacaagtttctcatctccatctgataccacctcagcctggaccttattgtccatatcaccatcagtatattggacaaagctattcaacaactctcgaggaagttccaaacttttccacatttgcctgtcttcttctgaggcctccaaactgttccaacctctgcctgttacccagttccaaagtcgtttccacattttaaggtatcttttcagcaatgcctcactctattcataccagttgactttattaatctgtttttatactgctgataaagacataccaaagattgagcaatttacaaaagaaagttt

SEQ ID NO: 950264 - DNA, 659 bp, Homo sapiens
agcaatatacctttactgtcctacctcacgggtatatcaactctccagcttygtgtcataatcttatttggagatatcttgatcgctttcacttccacaacatatcacactgctccattacattgatgacattatactggttggatccagtgagcaaaaaatagcaaacacactggacttattggtgagacatttgcatgccagataatgagaattaaatccagggaccttctacctcagtaaaaattttatggttccagtggtgtggggcctgtcgagatattacttgtaaggtgaagagtaagttgctgcatttggcctctcgtacaaccaagaaaaaggcacaatgcctagtgggcctatctggattttgagggcaacaaaatcgtcatttgggtgtgttactccaacccatttatcaagtgatccagaaggcttctagttttgagtggggtccagaacagaagaaggctctacaacaggtccaggctgctgtgcaagctactctgccacttgatccgtatgacccagcagattcaatggtgcctgaggtgtcagtggcagataggaatgctgtttggagcccctggcaggcccctataggtgaatcacaggggaggccactaggattttggagcaaggcgctgctatcttctgca

SEQ ID NO: 950265 - DNA, 445 bp, Homo sapiens
ttttgagtggggtccagaacagaagaaggctctacaacaggtccaggctgctgtgcaagctactctgccacttgatccgtatgacccagcagattcaatggtgcctgaggtgtcagtggcagataggaatgctgtttggagcccctggcaggcccctataggtgaatcacaggggaggccactaggattttggagcaaggcgctgctatcttctgcagaaaactactcttttttttttttttttttttttttttttgaaaaggagtctcgctctgtcgcccaggctagggtgcgggggctcaatctgggctcactgcaacctctgactaccgggttcacgccattctcctgcctcarcctcctgagtagctgggactacaggcacacaccaccacacccggctaattttttatatttttagtagagacagggtttcactggttag

SEQ ID NO: 950266 - DNA, 677 bp, Homo sapiens
ttcaagtctgggcaataaggcagactgaactaacacaatctgttatgttcttctctcctgcccaacttccacctttttttcagatgataaaatatgcataacaaagaatttgccatattgtttttaagtatactattcagtgacattaagtacactcccattgttgtgcaaccatcaccaccacccatctccagaaccttcttcatcttcccagactcaaactatacgaatcaaaccagaactctccattcttctctccctgcagtcctcacaaccacccttctatattctgtctatgaatctgaccactctacgtagttgacataagtagaatcatacagtatttgtccttttgtgactcgcctttttcactaagtataatgtcttcaatgttcatccatgttgtagcatttttcagaatttccttacttttttaaggctgaacaatattccattgtatgtatataccacattttgtttatctgttcattcactgatgaacatttgggttgcttccaccttttggctattgtaaataatgctgctatgaacaygggggttttacaaatgtctcttcaaaatcctgctttcaatttttttgggtatatacccagaagtgaaattgctggattgtttgacagttctatttttgatattttgaggaaccactatactgt

SEQ ID NO: 950267 - DNA, 599 bp, Homo sapiens
tctattgatgggcgttgctcttgagtgcctggcctggaggcttcctgtaggcagtagatacacaataagtaygtatggatggtgagcaagattttgttgattcaggtcattttttaaatagtaaatacattcaacgaccaatcttccacggtgagggagagcgtgtgctgtgactgaaagccacatgtcaccaccagtcccattcgaatactgatcgtcagcgctgtgaactaaagcagaactaatacttttacctttcactcttctcctgaccccatttgccaagataaagatggaaagaccccggcattgtccagtgggagggaaaaatgaagctccgcagaacttttctaaattggattagcatctcctgccgtatgcgcttatttattcagggaatttccaagtcagtgttgcagacatgaatgtggcaggggattgcacgctttcaggatgaaagtatttgggcttcctaagtgcgtcgacgagaagagaccagttacctcacgtttcttcttattttatctttagcctctaaacatagcacacagtaaatcatcttggacatctagggatccctttcttcagatgattataaa

SEQ ID NO: 950268 - DNA, 602 bp, Homo sapiens
gaaataaagtgctagggagtaaagaatagctgagagtttgggatcagcaggttttctttaactaagttaagatcaggcccatgatgcccggataagatttcaaggatgaaggctgctttgctccctcagtcctttgagtaagtatcagaaggatatgtcattacacagataatggggaaaatactcagttgcatccagaatgagctagactagtttattgcgagagaaataaaattactctaagtcagacaaaattcctgttcaaataatattaaaaattataaagattttcatctttttggtcaccatgtgctcaaaccccttacaggaatgggaacacacagacaggcaagtgaaagagccagagcaagcactatgggctcctgccccatggtagtgtctaggagtgggtgtctgtaactcctgaagcccatgtgggcatgtgttacagtgcactcttttagctttgccatccgcagayagcttaaagttaaccagctcagtgtcctcttggtacccaggtccttgtccagcgtccaggaaaaatcaggtcacacacggacttgaaggatgaatgtgggggttttactgagcggtggagg

SEQ ID NO: 950269 - DNA, 560 bp, Homo sapiens
agtagggagtggtagaaaatgaattatgtttattgaagctcactctggctgctgggagagggcattaggagaaaatagttggaatagtccttttggatagaaaagtggcaaggagtaaaatggaagtgaatatatttgaaataaatcttggaggcagaactaataatactcactaatgagttacatacacagagagaggaaagtgaagaactaaagggtgactcccaaatttccagcctaaacaactgggtggagagttaagacacttcgggttttctatgttgctatttttttctacaataatgacttaaatggttatgcagtcagttgacatagggtaagttacttaatcattactttatgttgaaggtttgcattgaaagttgatttgcatccagctttatcttttaccgtaacctcaatagttaacctctaagtacattaaagttttgtgtattttagattmttttttaggggtgagtgagtggattcctagaaatggaataagtgggtcaaagcatttcagtgatgtcttttttttttctccagagttcatttct

SEQ ID NO: 950270 - DNA, 546 bp, Homo sapiens
ctgtgtgtggtgtgtgccagcccagacaccatcccagatgaacagctcttatccaaaggtaaactgatgatactgacaaggcctaacacagaaagatgaagccaaaragactaggagaatcagaaaatttatgtaataaagacttgagattattttaagtggtcatttggaaatacaaaaatacagctatttttcccactgccatttttgttaatgtcgacagtgtgccaaaattcattcttccttactatgagacgtacttgacagatgccacagttgatttgagaaagagttaaagttggtgctcaggaaaatgaaaatgaagtcatttacatgtctttatgcctagattttagctatgtgattttatgtaaaaatcctcaaagttagaggcagcaaaccaacatggcacatgtatacccgtgtaacaaacctgcacattctgcacgtgtatcccagaacttaaagttaaatttaaaaaagattacatataatggtgtcaaaaaaatcctctaagttaaccttgtccttgcaattttccgcaat

SEQ ID NO: 950271 - DNA, 546 bp, Homo sapiens
ctgtgtgtggtgtgtgccagcccagacaccatcccagatgaacagctcttatccaaaggtaaactgatgatactgacaaggcctaacacagaaagatgaagccaaagagactaggagaatcagaaaatttatgtaataaagacttgagattattttaagtggtcatttggaaatacaaaaatacagctatttttcccactgccatttttgttaatgtcgacagtgtgccaaaattcattcttccttactatgagacgtacttgacagatgccacagttgatttgagaaagagttaaagttggtgctcaggaaaatgaaaatgaagtcatttacatgtctttatgcctagattttagctatgtgattttatgtaaaaatcctcaaagttagaggcagcaaaccaacatggcacatgtataccygtgtaacaaacctgcacattctgcacgtgtatcccagaacttaaagttaaatttaaaaaagattacatataatggtgtcaaaaaaatcctctaagttaaccttgtccttgcaattttccgcaat

SEQ ID NO: 950272 - DNA, 471 bp, Homo sapiens
ttttttacctgctcaagcctccgcaatggcgggcacccctcccccagcctcgctgccaccttgcagtttgatctcagactgctgtgctagcaatgagcgaggctccatgggcataggacccgctgagccaggcgcgggatatagtctcctggtgtgctgtttgctaagaccatcggaaaagcgcagtattagggtgggagtgacccaattttccaggtgctgtctgtcacccctttccttggctaggaaagggaattccctgaccccttgtgcttcctgggtgaggcgatgcctcgccctgctttggctcatgctcggtgcgctgcacccactgtcctgcacccactgtctgacaatccccagtgagatgaacccagtacctcagttggaaatgcagaartcacccgttttctgcgtcgctcaagctgggagctgtagactggagctgttcctatttggccatcttggaac

SEQ ID NO: 950273 - DNA, 616 bp, Homo sapiens
taactctttgaactttaaaaaataagttaattaatgcatgtcagtgtcacctatatagaaaaactgatgattgagtratagggtaacttttttttctttttgagatggagtcttgctctgtcgcccaggctggagtgcagtggcgccatctgggctcactgcaagctccgcctcctgggttcacaccattctcctgcctcagcctcctgagtagctgggactacaggcgcctgccaccacgcccagctaattttttgtatttttagtagagaaggggtttcactgtgttagccaggatggtctcgatctcctgaccttgtgatccgcccacttcggcctcccaaagtgttgggattacaggcgtgagccaccgtgcctggctgtgatagggtaattttgtactagaatgttacccactcattacattgcacaaaataggtccttaaagtaataattttatcaccaactataagaaaatagcttttctaagtagtgccagaaagagctttagataagcattgtctgactgctttcagacttgcgaagcaaagtaaaggttcctgagagcccactagaacgatgtggtagactcaactcgaatttctttaactgtatt

SEQ ID NO: 950274 - DNA, 614 bp, Homo sapiens
ataagagtcaacccattttaatcatttttcctagaagaaaagcttttaaagcaaatatcctgaatgaaattatgtatacattttattatacacattggaatgtatcataataactccagaacaacccaaggaacttcccagataatattttttttttgcctgagacattttacatgttcttctatataaagtgttttctacttccactcccttagactcccaaacccttcacttgaataacttgaatttacccttctgtgtttttctgaactatccttctcttctgttagcctgtctttactctccatggtaaatatccttgcttcaggttgttacaattgccctcaatacatcacagcatttatcctaatggataaattttatatattcaataactgttggatgaattaataaatgaatgtattcataactacagtttagaggttacttaacatgatatttatatgctttttttctaactcgtataatggccctgtgaaattgtcagtaaaatattagtaactcagttttatacrtaagtaaataataaagagattccattcttacacaaaaccatatggctagtatattagtccattttcacgctgctataa

SEQ ID NO: 950275 - DNA, 558 bp, Homo sapiens
attctatcagacattcaaagaagaattggtaccaatcctaytgacactattcaaaagatagagaaagaggaaatcctccctaaaccattctatgaagctagtatcaccgtaataccacaaccaggaaaggacaaaacaaaaaagaaaagagaagaaaactacagaccagtatctctgatgaacacaggtgcaaaaatcctcaacaaaatactagtgaaccaaattcaacaacatataaaaaaaaatccaccatgatcaagtgagtttcataccaggaatgcagggagggtttaacatatgcaagtcaataaatgtgatacagctcataaacagaattaaaaacaaaaatcacatgatcatctcaatagatgcagaaaaagcatttcacaaactccaggaacctttgatgattaaaacccacagaaaaattggcacaaaagaaacattccttaaggtaataaaagccatctatgacaaacccatagctaacattatactgaacagggaaaagttcaaagtgttccccctgaaaagtggaaagagaaaaggatgcccact

SEQ ID NO: 950276 - DNA, 607 bp, Homo sapiens
gctcggttttcacacaagccatttgtttatcaaactagatctgctaatactgaagacagtcgatttggtgattgtagttctcatacaattataaatatcttattgaggtaacattttgacagtttcactgactttccaaataaacatttgattggaagaaaacagatcaaatatggatttcacaaaccaaaagtttataaactcaatgcaatacaaatcctttttattgtaaaagctgagttgagactaaaagatttataaaaactattacttttggccttaaacagtaccaactcttatgatcaaaaaaggccacaacatttaagactgtattgctcgattttattttacactaggtggtgggcacaaagcaatcctccttaataaaggtgacaattgcttcactcaacatttttaataatgcacattaaaaaaaagttcatcttacaaattcttctgcaatccaaacatacaattgcttggagaacaacatttagaaaacaaaagccaatgtaaaaagacagattmaaacaactagaaaagtacaggttttgtttgtatgactcggattttacagttttcttactgcatcatcaatgacagaaat

SEQ ID NO: 950277 - DNA, 613 bp, Homo sapiens
gaggaacggccactgtgcaccccactgtgctgggcacctggcttccctgacctcctcagtcctcaggataccacacacagtagagtcaggattcaaactccagtctgtctgatgccaaatgcaggcatattgtctccatttggaaggtttgcctccatttgttttataatgaacagaatctcactaatttgcaaaacaggaatggagacggtgtttttaccctcattttaccagaggaggcagctaaagtccagagaggggaaatgatttgccagagacacaatgctaatgagtggtagagcagaaaactcaaggaggtgggtgacttcacgcccttttgcactcattccacagggcccttgtcgagctccgagcccccagttctaatggtgagaagcactgataacctccagcaagaggcagatgatccagatgtgctaggttgaggttggggagagggagaaggaaatctagaggggcaaatcctgtttccttgagttccacccttacagcaggcccagacccatccacaacctcccacacatttcttcctacttcyactggggccccagggaagcgggaggggccagaaagtgaagctggctgtggctgc

SEQ ID NO: 950278 - DNA, 542 bp, Homo sapiens
atggttttattggagaattctttttgttttgttttgkttttggtttttatttttgagatgaaatctcgttctgttgcccaggctggagtgcagtggtgtgatcttggctcactgcaacctctgcctcccaagttcaagcgattctcctgcctcagcctcctgagtagctgggattataggtgtgtgccaccacacccaactaatttttgtatttttagtggagacggggtttcaccatgttggccaggcaggtctcgaactcctgacctcaagtgatccatctgcctcagcctcccaaattgctgggatcacagagccaccctgccgggccttactggagaattctaccaaatgtttaaataaaaattaaagtcaattttacataatctcttccagaaaacaggagactagagaatgctaccaaattcattttatgtaggcagtattgtcctgatactgaaaccaaataaagacaatatgaaaaaagaaaactacatatcaatatctcttatgaatttgaatgcaaaaatattcaataaaat

SEQ ID NO: 950279 - DNA, 542 bp, Homo sapiens
atggttttattggagaattctttttgttttgttttggttttggtttttatttttgagatgaaatctcgttctgttgcccaggctggagtgcagtggtgtgatcttggctcactgcaacctctgcctcccaagttcaagcgattctcctgcctcagcctcctgagtagctgggattataggtgtgtgccaccacacccaactaatttttgtatttttagtggagacggggtttcaccatgttggccaggcaggtctcgaactcctgacctcaagtgatccatctgcctcagcctcccaaattgctgggatcacagagccaccctgccgggccttactggagaattctaccaaatgtttaaataaaaattaaagtcaattttacataatctcttccagaaaacaggagactagagaatgctaccaaattcattttatgtaggcagtattgtcctgatactgaaaccarataaagacaatatgaaaaaagaaaactacatatcaatatctcttatgaatttgaatgcaaaaatattcaataaaat

SEQ ID NO: 950280 - DNA, 547 bp, Homo sapiens
acgaattgttggatgttcgatgtggacacatctgagagttaaaaactccaggaagacccagacagagaagggtccccacacttctgtgagtttgacacctagcttgaccgggttcycacagtgaatgttggagaaaaatcttctcatgcttccagaaagggaaggtgaaaaggaaccgtcttgaagtacaccagagctttctgttcttcttaacaaggtctttcctcaagggcaaatatttcacctaagctactggtgttttgttttcttttgttttgttttgttttgttttttgttttcagagcctaacctgcctggaggaaggaaattacccacctctggccatcctgtcccatgtaagggtggtgatgggagggagggctgagaagctcttgtgaaggtcacagcccagaggcacaggctccctaaaggactcagacctaatcacaggactacagaacctttccccttcccacacatgttacttatagtactgcaggcctctttacagcagttacagttacttttacctggtacatcacatctg

SEQ ID NO: 950281 - DNA, 580 bp, Homo sapiens
acagagatatagaccaatggaacagaacagagccctcagaaataatgccgcatatctacaaccrtctgatctttgacaaatctgacaaaaactacccatggggaaaggattccctatttaatacatggtgctgggaaaactggctagccatatgtagaaagctgaaactggatcccttccttacaccttataataaaattaattcgagatggattaaagatttaaatgttagacctaaaaccataaaaaccctggaagaaaacctaggcaataccattcaggacataggcattggcaagtacttcatgtctaaaacaccaaaagcaatgataataaaagacaaaattgacagttgggatctaattaaactaaagagcttctgcacagcaaaagaaactaccatcagagtgaacaggcaacctacagaatgagagaaaatgtttgcaatctactcatctgacaaagggctaatatccagaatctacaaataaccgaaacacatttagaattaaaaaaacaaccccatcaaaaagtgggtgaagaatatgaacagacacttctcaaaagaagacatttatgc

SEQ ID NO: 950282 - DNA, 717 bp, Homo sapiens
tacccagatggagggccagtgccttcggaaatggatgttcccccagctcatcctgaagaagaaattgttcttcgaagttaccctgcttcagrtcacactacacccttaagtcgagggacgtatgaggtgggactggaagacaacataggttccaacaccgagggtgagtgcattagaaaactgggtgctaaggtttcatcttaaccatgctggttttgcatagcgttgtgatttttctcttaagtgggtaggtgaaaagtttagcaaaaagaagattggatctaatttttaatccctgtgtttcaagagatagagtaaatttcctttgccaaataaatcttggcaggcagattctgttcggaatctcttgatcattaataatgtttttttaaaatatgggcctcatgaagtgagtgggggaaaactgggtttgttatgccagctacgctctcaagtgtaatgaactatttcagtttgaaagttcagcaaaggtaaaacattttgcggcttcatacacattccagtgatggacgggtttgtgctttttaaagtggtgagttgtgctggctcagatgaacatgccagattcatactctgttgtgagacaagcctagcgcttcccttggttggggagatatgcttgtgatgtgtgggagaggagagcccacagggaaagaaaatgactaaacacctgtgtctgttgtcatttctggttca

SEQ ID NO: 950283 - DNA, 594 bp, Homo sapiens
agctgtccttccctcccatrccccatgtccttccctcccacaccccatgaccttccatcatcaaggattaactgccaacccaggtgagggagttgggggagagggtgtggaggagatagagcctgagggtgggtaggaaggagcaggactgggataggagtcagagctggaagtcaggccaggccaggcccatttgaaaatgccagtgtggccaatggccagggcaatggccttgcaggagggcagccctcaggcccacagcaaagctcctcctttcagtggactggagcaggggagcccctcctctgcctccctgagagatgccctttagcagcactgggctggctcctggatctgctcaggaggcagactttgttggtttagttccgctacaaggctttctgctcctgccctaactgttacagccttcaattcctggtaccaatttgattgaacaacttaattaaaatgcaataaaaggaaagtgagccaaatgtgcccaggggagaggaggcaagctacgagtcccctgactctcccttgagccctgtgctcttctccatcctgcctaaaggctctaagcaggctgtggcc

SEQ ID NO: 950284 - DNA, 594 bp, Homo sapiens
agctgtccttccctcccatgccccatgwccttccctcccacaccccatgaccttccatcatcaaggattaactgccaacccaggtgagggagttgggggagagggtgtggaggagatagagcctgagggtgggtaggaaggagcaggactgggataggagtcagagctggaagtcaggccaggccaggcccatttgaaaatgccagtgtggccaatggccagggcaatggccttgcaggagggcagccctcaggcccacagcaaagctcctcctttcagtggactggagcaggggagcccctcctctgcctccctgagagatgccctttagcagcactgggctggctcctggatctgctcaggaggcagactttgttggtttagttccgctacaaggctttctgctcctgccctaactgttacagccttcaattcctggtaccaatttgattgaacaacttaattaaaatgcaataaaaggaaagtgagccaaatgtgcccaggggagaggaggcaagctacgagtcccctgactctcccttgagccctgtgctcttctccatcctgcctaaaggctctaagcaggctgtggcc

SEQ ID NO: 950285 - DNA, 724 bp, Homo sapiens
gacaggctgtagtaagggagttgcagtagaggtgagcagagaacacagactttagatacattcatattataaattgaagagactggatggcaggagtgaagcaaatgamaaacagaatgttccctatgtttccaacttgaattgagtgggaaatagtaccagttactgaggagaggaagacacaggaaggggaagggcagtttggggggcttttttagaagtccgtgagacatccaaggcaaggtatcaagtaggtaataaaaaggaaattctaaagctcaaagaaatgatctaagctggagatataaatgtgagactcatcagcatacagatggtttatgcattgatgggaaatgttcaattcatgtaacatttcagcctaaagagaagtttccattggcttcacaacatgaagatctttgatgaccttgacaaagtgggtttcagtgggactgggatagaggttggtacatgatggcttggagggtgcatgggagatgaagtagggagagcctcagtagacagtttttccccccaaaatttggctatgaagtggagaaatgggccactggatggcaatggatatgggaatgtgcatgtgtgtgtatgtgtgtgtgtgttacataccctttttaaaattgagtgatacatataccagtacagattagggaaagttaatgatgggggaaatggaagaagccaagtttctgagaagaaaaaaagg

SEQ ID NO: 950286 - DNA, 580 bp, Homo sapiens
gagtcatcacttggttaagcttacaataatccactgtcattctccaaaatccatctgtcttctgtacaggccaaacgaaagagttgaatgaggatgtggtaggaatcaccgcctctgcatcctttaagtccgtgatggtggcactaatctctgcactccctccatggatacaatattggttttgatttactattttcctaggtagaggcagatctaatggcttccatttggcttttcccaccataatagccctcaccctactagtcagcaagccaatttgggaattctgccatctgctaagtatgtctatgccaattatgcattcgggcactggggaaatgaccacaaaatgagtcttgggactcactggaccaactctaagttggacctgtgctaaatctctattaagtacctgacctccataagcccctattttaactggaggaccacagtgatgttttgggtccccaggaatcaatgtcagctcagagccagtgtttagtagtccccaaaatatccaatcatttcccttttcccagtgcacwgttacccccataaaaggccagagatctacttgggg

SEQ ID NO: 950287 - DNA, 634 bp, Homo sapiens
agaaaatgatcttctgctttccctaagaagcagagaacccacacttccccatagtggtaaaagatgggggctaagtggacacgcagcttccttacacagataccgtctccacaaaaggcagcgtcaacattcttcttttttttgagacgaagtctcgctctgtcacccaggctggagtgcagtggcgtgatctctgctcactgcaagctctgcctcccgggttcaggccattctcctgcctcagcctcccgagtagctgggactacaggcgcccaccaccacgcccagctaattttttgtatttttagtagagacggggtttcaccatgttaaccaggatggtctcgatctcctgacctcgtgatccgcccccctcggcctcccaaagtgctgggattacaggcgtgagccaccacacccggcaacattcttctatttagcgacaaagaactatttggagagaggtctgcactaatgtcatctcgaaatgagtgaatcttctgtattgtcctacttagacatacaagcagcccggttaaataacmgtaggtgtcatttgtctagaggctactgtgtcagatgtagtgctaagaatctgacatatatttatatccagagaggttgcataatttgc

SEQ ID NO: 950288 - DNA, 584 bp, Homo sapiens
ctagcaatgagcaagactctgtgggtgtaggaccctccgagccatgtgtgggatataatctcctggtgtgccgttttttaagcccattggaaaagcgcagtattagggtgggagtgacccgattttccaggtgccgtctgtcactgctttctttgactaggaaagggaattccctgaccccttgtgcttcccgggtgaggcaatgcctcgccctgcttcggctcgtgcacggtacgctgcttccactgtcctgcacctactctctgacactccccagtgagatgaacctggtacctcagttggaaatgcagaaatcacccgtcttctgtatcgctcttgctgggagctgtagactggagctgttcctattcggccatcttcaaaacatagttttcatttcatgtaaacttcctttttttttaaatagttactttagaatagaacaagtgagtgggatttagggtctgaacagagagaaagaggccctcaacaatatagggccaagcagattaagttggtagyccctagaaaaatgattctggaaagaacctggagtgggctttggcagagggagagagttcata

SEQ ID NO: 950289 - DNA, 575 bp, Homo sapiens
aactagactaaagtcctggcaggcccctaaaggtgaggttgagagtgtgaccaatgaggaggtgtgtgctatactcaaaaagarctgtttatctaatttatatgaacagaaatcaggggaacagttatgagaatgggtattaaaggcatgggataatagcagaaagaacatagagttggatcaggctgaatttattgattttggccctctagttgggactctgtttttaattttgcagctcagggagttaagaaaaggttctcaatagtttatttgcttggtaagctgaaatacggattaaaagatggcccactaggagtgagctggaaatgcctgatatcccttggtttaatgtcaaggaagggacccaaaggcttaggaagattgggatggtggagtggattcgtcactttagacttactcatcccagctgggagggtccagaagacatacccttgaccaaggcatttagaaatagatttatgagggcagcacctgcatctttgaagaggactgtaattgctcttctctgtatgtgagatctaacggtgggaactgcagtcactcaactacag

SEQ ID NO: 950290 - DNA, 637 bp, Homo sapiens
aaaaggctgccagttttgagtggggtccagaacaggagaaagcttgcagcaggtccaggctgctgtgcaagctgctcttccacttgggccatatgacccagcagatccaatgttgcttaaggcttcagtggcagataaggacgctatttgaacatttggcaggcccccataggtgaatcacagaggaggcctcaaggattttggggcaagtccctgccatcttctgcagataactactctccttttgagagacagctcttggcctgttactgggctttggtggaaactgaatgtttgactatgagtcatcaagttaccatgcaacctgaactgcctatcatgaactgggtgctttctgacccatctagccataaagtgggtcatgggcagtagcatcccatcatcaaatggaagtggcctatacgtgatcgggctcgagcaagtcctgaaggcacaagtaagttatataaggaagtggctcaaatgcccatggtctccactcctgccaccctgccttctctcccccagyctgcactgatggcctcatggagagttccctaagatcagttgacagaggaagagaagactagggcctggttcacagatagttctgcttgacatgcaggcaccacccaaa

SEQ ID NO: 950291 - DNA, 615 bp, Homo sapiens
cacaggtgaagtgattattgcagcaggaaggttaasgactgaaagggctctcaattctgtttacataaattcgaatcccactcaataacttaacagctatgtgacttgaacaagttatttaaactctacattcttcatctgtaaaatgtaaataactataatacctaaatcatagtgatagcaataggaggcagacactttccttggcagacagggattggtctctggtgaaacttgaccttcaagccaaggccagactgaagccttaacaccaaactaccagttccagatagagtccactgacccgagtgagaacttccattccccttcagtgtgctcagcccatgactggtcctgggccaagcctccacttcagcccccacttcagcccccgattggctctttacactatcatacctctttctgaatggtgctttttccaagcctacctataaaccaatcagcatgcatttcccgactcagcctcacaactggcaatccacttacaggtacccacttgctgctgagagctttctttctgttgctaaataaaattatactctgccttgcttactctctggtgtccacatacctcactcctcttggttatgagac

SEQ ID NO: 950292 - DNA, 796 bp, Homo sapiens
atggattatccctcatacggtttcgttaatgtatcactctctagatgacgttagagtttttgyttagacatcatgacatatttattaggttgatgcgccgaactaataatcacagaagctgaggacagagaaactgaaactactgccaatcaatggtcaatcagaagtgaaggtcacttgtctcctgaaattatcatgtgattcaataagaaaataggaatagtttatggaattttagtgtacgtttgaattttaggtcattggattaagtgctgtagacctaagtttatttgaagggacattatttttaaatcactataaaagccacatgtggccgggcttggtggctgacgcctgtaatcccagcactttgggaggccgaggcgggcggatcacgaggtcaggagatcaagaccatcctggctaacacggtgaaaccccgtctctactaaaaatacaaaaaattagccaggcgaggtggcgggcgcctgtagtcccagctactcgcgaggctgaggcaggagaatggcgtgaacccggggggcggagcctgcagtgagccgagatcgcgccactgcattctagcctgggcgacagcgagactccgtctcaaaaaaaaaaaaaagccacatgtatatttaaaacatttgggaaaatgcatttaaaagatgattcctaattccagaaacaaaacctaaccactaatatactggtttaatttctttcaggcttttttctctgtctaggcttaatgttttagattttttaaatatcaattttagattattctctgtgt

SEQ ID NO: 950293 - DNA, 796 bp, Homo sapiens
atggattatccctcatacggtttcgttaatgtatcactctctagatgacgttagagtttttgtttagacatcatgacatatttattaggttgatgcgccgamctaataatcacagaagctgaggacagagaaactgaaactactgccaatcaatggtcaatcagaagtgaaggtcacttgtctcctgaaattatcatgtgattcaataagaaaataggaatagtttatggaattttagtgtacgtttgaattttaggtcattggattaagtgctgtagacctaagtttatttgaagggacattatttttaaatcactataaaagccacatgtggccgggcttggtggctgacgcctgtaatcccagcactttgggaggccgaggcgggcggatcacgaggtcaggagatcaagaccatcctggctaacacggtgaaaccccgtctctactaaaaatacaaaaaattagccaggcgaggtggcgggcgcctgtagtcccagctactcgcgaggctgaggcaggagaatggcgtgaacccggggggcggagcctgcagtgagccgagatcgcgccactgcattctagcctgggcgacagcgagactccgtctcaaaaaaaaaaaaaagccacatgtatatttaaaacatttgggaaaatgcatttaaaagatgattcctaattccagaaacaaaacctaaccactaatatactggtttaatttctttcaggcttttttctctgtctaggcttaatgttttagattttttaaatatcaattttagattattctctgtgt

SEQ ID NO: 950294 - DNA, 532 bp, Homo sapiens
ggtatgtttatcttgtagcttccaatctttcaaaactcattcattagttctcagagtttgcttgcttatttgtttgtttgtattcatagattccttgagattttctatgtagataatcatgctacctacaaacagagacagttttatttcttcctttcctttatttttttttcttgccttattgggctggttaaaactttgagcactgtgtagagtaagcagtgagatttagtatttccagttcaggggaaagcattcgatctttcactgtcatttatattttcaaagaaccagctctttgtttcactatttcacattgttttcttcattattattctgttttcaatttcattgatttctgcttttatatttattatttccttccttgcgcttgcttttagtttatttttctcytctttttctaggttcttgaggtgggagcttagataattaattgagacttttcctcttttcaaatgtatgcatttaatgctatgactttccctctcatcacagctttaattgtgtctcg

SEQ ID NO: 950295 - DNA, 585 bp, Homo sapiens
caaccaaaatagcataaaatgtaaatcaatgaactagttaaaaaygatttcacagagaagatgaacaaagccaaaatttctttttcaaaaaaaataccaataaatgataagccattgacaagattgatcaagaaatgtaaagaagacacaaataaataatattctggatgaaaatgagaacatatccagcaataaagctgaaaatgttccataatcaaaggaatcataatcaaagctgtttccagtatttacatggaaaagtatttacatggaaaagatgaacttggattctgatcactcatcatgtaggaaaaaaatcaattccaggtgtatcaatatcttgaaggtcaaaaaaaatcttaaatcctcactagatgatttatgtgattttttttatttttaggtagataaatacctcctgaccaagacaaaaatattattattcgaaaagaaatgactgataattttaactggataaagctttagaaaacttaaccatcaaaaatcacatttcagactgagagaaggaattgtgataaacccctttaacgcctatctctcctctgctctctatgtggactctat

SEQ ID NO: 950296 - DNA, 567 bp, Homo sapiens
cctcccccaaggaatgcaattcctttcccagggtcttaatattaatattccttgctaggaaaagaatttagcaatatctctcctmcttgcgtatccgtttataggctctctgcaagaagaaaaatatggatctttttgcctgatcctgcaggcccttagaccttatggttgtcttcccttgttccctaaaattgctgttattctgttctttttcaaggtgcactgattttacattgttcaaacacacatgttttacaatcagtttgtacagttagatacaattatagtggtcctgaggtgacgtacatcctcagcttacaaagataacaggattaagagattaaagtaagacaggtataagaaattataagagtattatttgggaactgataaatgtccatgaaatcttcacaatttatgttcagagatggcaggaaagacaggcataagaaattataaaggtattaattttgggaactgacatatgtccatattaaaatgaaatcttcacaatttatgttcctctgccacggctctagccggtccatccattcgcaatccctgact

SEQ ID NO: 950297 - DNA, 550 bp, Homo sapiens
tgggacttcctgtcaccatcctagaaatttcccttatactgtcctgatttggatttcctggacctcctgttttcctgtttattggttttctctctctttttagtggagtgcacccttcaraagcttcctgagaaagggtgaatgtttggtaaagttttgagacttcacatatctgaaaatgcacctttatcttgcctcacagttaagggatggcttgtttaaatgcatttctgtattagaaatccttacccttagagtttttgaaaaaatttgctccatggcttcctagttcccactgatattgttgagatgttctgtgctattctgattctggaccttttgtttggaaactatggaagcttcaggatcttgcctggcctactgtcccgagatgttaatagcattgtgcttgttgagaggctttttcttcactgtgctcaaccccaggtgaggccttttcacagcctgaaaactcatgtccttctgttttagaattttttttttgttttgagacagggtctcagtgttgccttggctgaagtacagtggc

SEQ ID NO: 950298 - DNA, 252 bp, Homo sapiens
ctttaaactgtcctcggcttgaaggtggggttccactgggaacccatccctgtctgcctaggatttgtctgcctcctgccactatcyattcattcctctagggtttgttgagtgctggctctgtgccagccaccccccaaggcactgggggtatagcagtggagtagacaaatctctgtcctgttggagattgtattctagaggggaggtggttggcagtcaaacgaagtcaatagataagtgacaatgtgg

SEQ ID NO: 950299 - DNA, 739 bp, Homo sapiens
tatagttttagctcttaatttacgccttcaattcattttgtattaattgttatatacatggtgaggtaggtgtccaaattcattcttttgcatgtggctatccaggtgtgctagcattggttgctgaggagactattctttgtccattgagttgtcttggtacactttttaaaaaccagttgacaacagatgtatagttttatttctggattctcaattctgttccattggcctatatgtctctttatgccagtgtcatacagttttgattactgtagctttgtggtaagttttgaaataagagaaaaatgagagtctcactttgttctttttgcacacttgttctggctcttctataataggtcccttgaatttccatgtgaattatattttattttatttttgagacagagtcttgctctgtcacccaggttcaagtacaatggcacagtctcagctccctgcaacctgcacctctcgggttcaagcaattctcatgcctcagcctcccaagaaactgggaatacaggcatgtgccaccatgcctggctaatttttgtatttttagtagactcagggttttgccatgttggccaggctagtctcggactcctggcctcaagaaattcccccatctcagcctcctaaagkgctgggattacaggcgtgagccactgtacctgactgtgaattttaatttgtcagtttctgaaaaaaaaaaaaaaaaaaaaaaaaaaca

SEQ ID NO: 950300 - DNA, 692 bp, Homo sapiens
ggcttaaaatattcagtaaacaatggtgtaaacagatgtgctgtcatccaatttttgttccatttgtggagcacaggcagaaataatttagcataatttttttaattatttatttatttttgagacaagatctcactgtgtcgcccaggctggggtgcagtggtgtgatcaaagctcactgcaacctcaaactcctagtctcaaggaagcctccctcctcagcctcctaagtagctaggactacaggtgtgtgccaccatgccaagctaattgtttttttaaaaaaatttttgcagacatagggtcttgttatgttgcccaggctggtcttaaatatctggcctcaagtgatcctcctgcctcagcatcccaaagtgctgagattacaggtataagccactgtgcccagcctatataatacatatatgtgtgtgtgtgtatatatatatatgtgtgtgtgtgtgtgtgtgtgtgtgtgtgtgtgtgtgtatttttttttgacatgtagtcttgctatgttgcctaggttggtcttgaactcttgggctcaagcaatcctcccacctcagcctctcaggtagttgcaattacagyagctagaattacaggcatgcaccactgtgcctggctctttgatttagcatagttcttaaggactctaggatttttggaataataaatgagcattgact

SEQ ID NO: 950301 - DNA, 621 bp, Homo sapiens
cagagtggtggttgctgaaagttgaggtcactgwagcaatttcttaaaataatacaagaattgagtttacccctttgattatatcttcctttcatgaaagatttctatgtagtatgtaatgccatttgatagcattttacccacagtagaacttccttcaaaattggagtgtttcctctctgctgctttatcaactaagtttaggtaatttctaaatcctttgttatttcaacaatgaacacacagcatcttcaccaggaagatattgcatctcaagaaaccactttcgttgctcatccataagaaggaattcctcatgtgttctctcatgagattgcatcaatccagttccatcttcagactccacttctaattctagttatcttgctgtttccaccacatctgcagttacttcctccactgaagtcttgatgccttcaaagtcatccatgaaagtggtaataaacttcttgctaagctcctgttaatgctgatattttgacctcctcctacaaatcatgaatgttcttagtggcatctaatatggtgaattgtttccagaagattttcaatttattttgcccagattcttcaagtggaatcactgtctgtggcagctag

SEQ ID NO: 950302 - DNA, 618 bp, Homo sapiens
cctagattttctcctacctcatttgctgctctgtcttagcttcctttgctggtcctyctcttcctcctaaccaagacctccttaacattgggggatgctatggcttagtccttgaacctgttctcttttctatccacactccctttcctggtcttctcatccaatcccatggttttaaataccatgtctatccttatactgcccacgtttatatcttcatccctggcttctcccctgaactccaggatcatagatccacctactactcaacatctgtagttggatgtctaactggacatgtcaaaaagcaagttcctgctcttaagcaccaaatttgcttctcctcggcattttccacatcaaataatggcaactctcttcttctaagtgctctgtacaaaatgcttggcatcttcctcagtttctctttttctcttatattagatatgagataacctatcaagaaatcctgttggctcttccttcaaaatatatacagaccctgaccacttcctatccttttgttgctgttaccctgggacaggctaccattatttcttgtctggatatttggacacaggtttgccttctccatctaacagtctgttctttatttag

SEQ ID NO: 950303 - DNA, 609 bp, Homo sapiens
aaaagctagaaagatctcaagttaacaacctaacatcacmagtaaaacaactagagaaccaagagcaaataaaccccaaagctggcagaagacaagaaataaccaagacaagagcagaactgaaggagatagagacatgtaaaacctttcaaaagattaacaaaccaagtgctgatttttttaagaaaattaataaaatagatagaccattagccagactaataaagaaaagagggaagactcaaataaacacaatcagaaatgataaggggggatattaccactgaccccacagaagtacaaacaaccatgagaggatattatgaacacctctggacataaattagaaaatatggaagaaatagatatattcctgggcatctgcacacttacaagactgaaccaggaagaaattaaatccatgaatagaccaataatgagttctaaaattgaggcagtaataaataccctaccaaccaaaaaaatcccagaaccagacagattcacagcttaattgtaccagacgggtggaaaaaaaaaaaaggctgtaccattcctactgaaactattttttaaaaaaattgtgaagaagggctgtggtggctcaca

SEQ ID NO: 950304 - DNA, 631 bp, Homo sapiens
tctctatgtaaatgtctaataggcatctcaatttttttccgggccaaacccgagcttctctataattgccaccccttaatatttctcctgtatcttctccatttaaaaaataatggtgatttcatttttccagttttttccattttccaggtgatttcatttttccagaacaatgcctgatacataataaggattgacaaagaataaccttggtttccatatcccaggactatggtttgaatacaagctaaccagaaccaaactgaattttttaataactgataatagtaaaagagaagcatgctttgtgggtgaagaaaagctgaagcccaggtctgaaatgttaagactcctacactcactaataccttgtccagaccgcaaatgctatacgaaagacagtgtgtgattttactctatgttgtcgtttctgattgtgcctacttggatcttctctttttctttgttaatctagttaggggtctatcagtcttaattattcatctgaagaatgaactcttggtttcattgaccttttgtgtggatttttgcatcccaawttcattaagttctctaatttcacctacttattttctggtgctggctttggaattggtttgttcttgttttt

SEQ ID NO: 950305 - DNA, 567 bp, Homo sapiens
  misc_feature 1, 2, 3, 4, 5, 6, 7, 8, 9, 10, 11, 12, 13, 14, 15, 16, 17: n = A,T,C or G
nnnnnnnnnnnnnnnnnacataggaaaacattctacccaacagcagaagaatatacattcattctcaagtgtacacagaacatccttcakaatagatcacatgttaagtcaaaaaacaagtcttaacaaatttaagataaaaattgtttcatgcatttttttctgaccacaacagaatgaaactagaaatcaataatagttaaaaaaaggaaaatttacaaatacatgaaaactaaacaacagactcttgaacaatcattgtgtcaaacaggaaatcaaaagggattttaaaagcatatcttcagacaaacaaacaaaaacacaacctatcaaaattcatgagactcagcaaaagcaatactaagagagaaatttatagtattatatactgtattagtccgttttcacgctgctgataaagatctatctgagactggacaatttacagaagaaaggtttaatagactcagttccacatggctggggagacctcacaatcatcgcaggaggtgaaagccatgtctcaagtggtggccgacaagggaagaaagcttgtgcgggaaactc

SEQ ID NO: 950306 - DNA, 436 bp, Homo sapiens
cagaattgaaagaagggactgaaacccacactacagtattcagtacataatcccctcctccagaagtattaccccatctacacatagccagaatcacatttaggtgattacttactgactttcactaagaatatttctatgagagtcaaattatttaaaaatgttatagagtacatagtattccattttatggatacaccataattcctttagtgctagcatcatttcaaaggtcagtgattccaattttccctcctaaaaataacactactgtaataacctgggaagcaaatatttatgtacatcttcartgactttctcaaaaaagacatgagagtcaagaaaaacaaccattaagagtcaatactccaaatactcaaaatctactaaaatttgctttctaataaggttcataatatcctagcaaatgttacca

SEQ ID NO: 950307 - DNA, 652 bp, Homo sapiens
tgaaaaattcccatcacctagtgatgttgtggccattctaacgtcctagcacaacagattacttacrtctttctggtgatgctgatataaacaaacctattatgctgccagttgtttaaaagtataatacacacaattatgcacagtgcatagtatttggtaatggtaatggtaataaataactaacttaatactggtttacatatttaccatacaataatttctatcattatttcagattatcctctttctactttatacacacacagacacaacaaatatatatgttaactgtattatatatatacataacacatatatatgttaactgtaaaatgacagaaagtatagcataataaatacataaatgaaaatacacacacatatgttatatatataatatataaatatattataatgtaatgtatatgatgtatttatgtatttgtatacaatatgtatatgtaccattatatatgttaactgtaaaacatcctcaggcaagtccttcagtaggtattccagacgacgtattgttatcagatcagatgacagctttatgcatgttattgcccctgaagaccttctagtgggacaagatgtggaggtggaggacagtaatgatgatgattctgaccatgtagactaatgt

SEQ ID NO: 950308 - DNA, 607 bp, Homo sapiens
taaaaaatgatttaaactgaacgataatagtgacatacctatcaaaacctcttggatacagcaaagccggtgttaagaggaaagttcatagcattaaatgcctacatcaaaaagactgaaagagcacaaatatacaatgtaagcacacacttcaaggagctagagaaacaagaacaaaccatacccaaaccaaacagaagaaaataaataaccacgatcagaggagaactaaataaaattgaaacaaaaaaaattacaaaagataaatgaaatgtaaagctggtatttgaaaagatacataaaattgataaaccattagcaagattaaccaagaaaagaagagagaagatacaaacaagctcaattagaaacaaaatgggagatattacaaccaatatcacagaaatacaaaaggtcattcaaggctactatgaacacctttatacacatgaactagaaaacctagagaagatggataaattctggtaatatacaaccctcccagattaaacctgaaagatgtagaaactctgaacagaccaataacaagcagcgagattgaaatcataatgacaaagttaccaasaaaaaaagtcttggaccagat

SEQ ID NO: 950309 - DNA, 611 bp, Homo sapiens
gctgaggcaaggagaattgcttgaacmtgggaggcggaggttgcagtgagccgagattgagccactgcactccagccctggcgacggtgtgagactccatctaaaaaaaaaaaaaaaaaaagaaagaaaagcctcaaaataaaccaacacaaatttggtgagctgatcttgacaaaggaggaaaggaaaaaaaaatgcagcagcaaaggtagccaatggttctggagagctggccatccacatgcaaacaaatgaatctggatacacatcttacacccttcacaaaaattaattcgaaatggatcatagacctatatgtaaaacacaaaactgtaaaacactaagaacatagactaggagagaaattttttttattttactttaagttttaaggtacatgtgcacaacatgcatgtttgttacatatgtatacatgtgccatgttggtgtgctgtacccattaactggtcatttaacattaggtatatctcttcatgctatccctcccccctccccccacctcacaacttagatttgatgacgactttttagatactatatcaaaaagacaatccatgaaataacttattggtaagcacgttttttctgtg

SEQ ID NO: 950310 - DNA, 611 bp, Homo sapiens
gctgaggcaaggagaattgcttgaacctgggaggyggaggttgcagtgagccgagattgagccactgcactccagccctggcgacggtgtgagactccatctaaaaaaaaaaaaaaaaaaagaaagaaaagcctcaaaataaaccaacacaaatttggtgagctgatcttgacaaaggaggaaaggaaaaaaaaatgcagcagcaaaggtagccaatggttctggagagctggccatccacatgcaaacaaatgaatctggatacacatcttacacccttcacaaaaattaattcgaaatggatcatagacctatatgtaaaacacaaaactgtaaaacactaagaacatagactaggagagaaattttttttattttactttaagttttaaggtacatgtgcacaacatgcatgtttgttacatatgtatacatgtgccatgttggtgtgctgtacccattaactggtcatttaacattaggtatatctcttcatgctatccctcccccctccccccacctcacaacttagatttgatgacgactttttagatactatatcaaaaagacaatccatgaaataacttattggtaagcacgttttttctgtg

SEQ ID NO: 950311 - DNA, 485 bp, Homo sapiens
taagtgcccttatatgagggcatggcagttggctttccagattraaagaacccaggaacagagcaaggaggaagacacaaggccttttacgacctagtcttggaagttgcacaccttcgcttctgacacgttctagtatcagtgaatcactaaggccaccccacactcaggaggaagggaggtaagctgtgtcccaaattggtgagttcttggtctgacttcaagaatgaagccacagaccctcggggtgagtgttacacttcttaaaggcaacgtatccggagtttgttccttctcatgttcagatgtgttcaaagtttttcccttctggtgggttcgtggtctcactggttcaggagtgaggctgcacaccctcgcggtgtattgcagctcttaaggaggcgcgtctggagttgttcattgctcctggtgagtgaagctgcagaccttcacgtattacagctcattaagactgtgtagaccca

SEQ ID NO: 950312 - DNA, 499 bp, Homo sapiens
aggccgcttaagtgcccttatatgagggcatggcagttggctttccagattaaaagaacccaggaacagagcaaggaggaagacacaaggccttttacgacctagtcttggaagttgcacaccttcgcttctgacacgttctagtatcagtgaatcactaaggccaccccacactcaggaggaagggaggtaagctgtgtcccaaattggtgagttcttggtctgacttcaagaatgaagccacagaccctcggggtgagtgttacacttcttaaaggcaacgtatccggagtttgttccttctcatgttcagatgtgttcaaagtttttcccttctggtgggttcgtggtctcactggttcaggagtgaggctgcacaccctcgcggtgtattgcagctcttaaggaggcgcgtctggagttgttcattgctcctggtgagtgaagctgcagaccttcaygtattacagctcattaagactgtgtagacccaaacagc

SEQ ID NO: 950313 - DNA, 499 bp, Homo sapiens
aggccgcttaagtgcccttatatgagggcatggcagttggctttccagattaaaagaacccaggaacagagcaaggaggaagacacaaggccttttacgacctagtcttggaagttgcacaccttcgcttctgacacgttctagtatcagtgaatcactaaggccaccccacactcaggaggaagggaggtaagctgtgtcccaaattggtgagttcttggtctgacttcaagaatgaagccacagaccctcggggtgagtgttacacttcttaaaggcaacgtatccggagtttgttccttctcatgttcagatgtgttcaaagtttttcccttctggtgggttcgtggtctcactggttcaggagtgaggctgcacaccctcgcggtgtattgcagctcttaaggaggcgcgtctggagttgttcattgctcctggtgagtgaagctgcagaccttcacgtattacagctcattaagrctgtgtagacccaaacagc

SEQ ID NO: 950314 - DNA, 780 bp, Homo sapiens
cttttttgtagaatctacaagtggacattttgagcgctttgtggcctatggtagaaaaggaaatatcttcaactaacatctacacaraagcaaagtgagaaacttctttctgatgtgtgcattcatctcacagagttaaacctttcttttgattgagcatttatgaaattctctttttgtaaattctacaagtggacatttggagcgctttgaggactatgatggaaaaggaaatagcttcacataaaaactagacagaagaattctgagaaacttctttgtgatatgtgcgttcatcacacagagttgaacctttctttgaattgagcagtttggaaacactctttttgtagaacctgcaagtggacatttggagcgctttgaagcctgtggtggaaaagcaaaaatcttcacatgaaaactggatagaagaattttaagaaacttctttgtgatgcgtggtttaatctcacagagttgaacatttcttttgatggagcagtttggaaacactctttttgtagaatctgcaagcagacatttggagtgcttttgggcctattttagaaaggggaatatcttcatataaaaactagacagaagaattctgagaaacttttttgtgatgtgtgcattcatctcacagagttgaacctttccttgaattgagcagttttgacactctttttgtagaacctacaagtggacattcggagctctttgcggcctctgttagaaaaggaaatatcttcacataaaatctacacagtagcaatctca

SEQ ID NO: 950315 - DNA, 780 bp, Homo sapiens
cttttttgtagaatctacaagtggacattttgagcgctttgtggcctatggtagaaaaggaaatatcttcaactaacatctacacagaagcaaagtgaraaacttctttctgatgtgtgcattcatctcacagagttaaacctttcttttgattgagcatttatgaaattctctttttgtaaattctacaagtggacatttggagcgctttgaggactatgatggaaaaggaaatagcttcacataaaaactagacagaagaattctgagaaacttctttgtgatatgtgcgttcatcacacagagttgaacctttctttgaattgagcagtttggaaacactctttttgtagaacctgcaagtggacatttggagcgctttgaagcctgtggtggaaaagcaaaaatcttcacatgaaaactggatagaagaattttaagaaacttctttgtgatgcgtggtttaatctcacagagttgaacatttcttttgatggagcagtttggaaacactctttttgtagaatctgcaagcagacatttggagtgcttttgggcctattttagaaaggggaatatcttcatataaaaactagacagaagaattctgagaaacttttttgtgatgtgtgcattcatctcacagagttgaacctttccttgaattgagcagttttgacactctttttgtagaacctacaagtggacattcggagctctttgcggcctctgttagaaaaggaaatatcttcacataaaatctacacagtagcaatctca

SEQ ID NO: 950316 - DNA, 719 bp, Homo sapiens
cattctgagaaacttctttgtgatgtgtgcattcatgtcccagagatgaacctttcttttgaaggaccagtttcgaagtactctttttgtagaatctgcaagtggacacctcragctccttgaggcctatattggaaaaggaaatatcatcacataaaaactagacagaagaattctgagaaacttctttttgttatgggcgttcatatctctgagttgaacttttcttatgattgaacggtttggaacactctttctgtagaatctgcaagtggacatttggagcgccttgcaacttaaggtggaaaaggaaatatcttcacataaaatccagacagaagcaatctgagaaacttctttatgatatgtgtattcatctcaaagggttaaccctttcttttgattgagcagttttgatactctctttttgtagaatctgcaattggacatttctatcgcttagaggcctatggtggaacagggtatatcttcacataaaaactagacagaagaattctgagaaacatctttgtgatgtgggtattcatctcacagagttgaacctttcttttgattgagcagtttggaaacacactttttttggactctgcaagtggacatttggagcgctttgcggcctatggtaaaaaaggatatatcttcacataaaatctagacagacgtaatttgagaaatttctttgtgatgtgcacattcat

SEQ ID NO: 950317 - DNA, 431 bp, Homo sapiens
gttgaacctttcttttgattgagtatttttgaagaastctgtttgtagaatcttcaagtggatatttggagtgctttgtggcctgtggtggaaaaggaaatatcttcacataaaaactagacagaagcattctgagaaacttatttgtgatgtgctcattcaactcacagatttaaacttttcttttgattgagcagtttggaaacagtcttttagtagtacctgcaaacggatatttggagtgctttggggcctgtggtggaaaaggaaatatatacacatgaaaactagacagaaacattatgagaaactgctctgtgatgcttgcattcatcaccagagttgaacctttcttttgattgaacagttttgaaacattctttctgtggaatctgaaggggatatttggagcgctttgcggcctatggtga

SEQ ID NO: 950318 - DNA, 366 bp, Homo sapiens
gaagctgctcactttacagttttacctaagggtratcctatcgaaagttctggattttgtagagaaggatacaaagtagtgaatagtttgatttgagaaaattgaaaattgccagttttctttgctttaaccaatatgtttgctctccctctgaaaatcccttgttacaagtccttagttttagtttgccacattatgacacgatgggaataatgcacagcagtgatcctcagttggtttgggttttcaatacacaattgatccatggttgtggcatgcattgtagaatgtccagctagaacacctattctttcagttactttcattactttcaatggcaaaaccacaattacttttgcactaacc

SEQ ID NO: 950319 - DNA, 366 bp, Homo sapiens
gaagctgctcactttacagttttacctaagggtgatcctatckaaagttctggattttgtagagaaggatacaaagtagtgaatagtttgatttgagaaaattgaaaattgccagttttctttgctttaaccaatatgtttgctctccctctgaaaatcccttgttacaagtccttagttttagtttgccacattatgacacgatgggaataatgcacagcagtgatcctcagttggtttgggttttcaatacacaattgatccatggttgtggcatgcattgtagaatgtccagctagaacacctattctttcagttactttcattactttcaatggcaaaaccacaattacttttgcactaacc

SEQ ID NO: 950320 - DNA, 366 bp, Homo sapiens
gaagctgctcactttacagttttacctaagggtgatcctatcgaaagttctggattttgtagagaaggrtacaaagtagtgaatagtttgatttgagaaaattgaaaattgccagttttctttgctttaaccaatatgtttgctctccctctgaaaatcccttgttacaagtccttagttttagtttgccacattatgacacgatgggaataatgcacagcagtgatcctcagttggtttgggttttcaatacacaattgatccatggttgtggcatgcattgtagaatgtccagctagaacacctattctttcagttactttcattactttcaatggcaaaaccacaattacttttgcactaacc

SEQ ID NO: 950321 - DNA, 477 bp, Homo sapiens
atttctgaatcaatgtaagtgaatgcaaatcaccacgttcacttagctgatgctcctttattaacagggatagaaaggaggtcattcgaagagatgatggcacgggacccaggacctgaggaagctgcagtgggtgaaggggagaaacagaggagcaggggctggagaaagagtggggagtcatcaaccaccctcctttctcctggcgtctggtgttcggagcccagaggtattctctagggcctcggagaagcttccaagtctgctcatttctctttccccatccctgcttgtatcacaaataaagaaattattgacaactgagttcctgacaaggtggcaggattttagggamccttcacctcgtctgaaactcatgaaggtagtgggaatcccatgggttggttagcaatagtccctgagattatttggtcatataaataatcagaaaactcatagtcatcttgcttttctcat

SEQ ID NO: 950322 - DNA, 591 bp, Homo sapiens
ttcaggtacaccaatcagacatagatttggtctttttacatagtcccgtatttcttggaggctctgttcatttctttttattcttttctgctaaacttctcttctcgcttcatttcattccttttgtcttccatcactgataccctttcttccagttgatcgcatcggctactgaggcttctgcattcatcacgtagttctcatgccttggttttcagctccatcaggtcctttagggacttctctgcattggttattctagtgatccattcatctatttttttttcaaagtttttatcttctttgccattggttcgaatctcctcctgtagctcagagaagtttgatcatctgaagccttcttgtctccactcatcgaagtcattctccatccagctttgttccattgctggtaaggagttgtgttcctttggaggcggagaggtgctctgaagtttagagtttccagtttttctgytctatttgtttcccatctttgtggttttatctaacttgggctttgatgatggttatgtacagatgggtttttggtgtgaatgtcctttctgtttattagttttccttctaaca

SEQ ID NO: 950323 - DNA, 547 bp, Homo sapiens
ttttaaacaccctttttgtaggatctgctaggggacatttggagcgatttgaggcctatggtggaaaaggaattatcttcacataacaactagacaaaagaattctgagaaacttctctgtgatgtgtgtgttcatgtcacagagttgaacctttcttttgattgagcagtttggaatctctttttgtagaatcagcaagtggacatttggagggctttgcagctatggtagaaaaggatatatcgtcacataaaatctagacagaagcaatctgataaacttgtttttttattattattattatactttaagttttagggtacatgtgcacaaactgcaggttacttacatatgtatacaagtgccatgctggtgagctacacacactaactcgtcatctagcattaggtatatttcccaatgctatccctctcgcctcctcgcaacccgcaacastcccctgagtgtgatgttccccttcctgtgtccatgtgttctcattgttcaattcccacttatgagtgagaatatgctttgtttgttttt

SEQ ID NO: 950324 - DNA, 620 bp, Homo sapiens
atctcacaaagttgaacatttcttttgattgagcactttggaaacactctttttgtagaatccacaagtggacaatttggagtgctttgcggcctttggtagaaaatgaaatatcttcaactaaaatctacacaaaagcaatctgagaaacttctttgtgatgtgtgcattcatctcaaagagataaacctttcttttgattgagcagttttgaaactctctttttgtataatctgcaagtggacatttggagtgctatgaggcctatggtggaaaaggaaatatcttcacataaaaactagacagaagcattctgagaaacttctttgtgatgcatgcattcatcgcacagagttgaacctttcttttggttgagcagtttggaaacactgattttgtagaatctgcaagtggacatttggagcgctttgtgacctatggtagaaaaggaaatatcttcacataaaacctagacagaagcaatctgcgaaacttctttgtgagatgtgaattcatctcataragttataccattcttttgattgagcagttttgaaactctcttattgtatactcttcaagtggacatttggatcgctttggatcctatggtggaaaag

SEQ ID NO: 950325 - DNA, 658 bp, Homo sapiens
tttggagcattttgaggccaactgtggaaaagcaaatatcttcacataaaaactacaaagaagcattctgataatcttctttgtgatgtgtgcattcatctcacagagttgaacctttcttttgattgagcaattttgcaacacactttttgtagaatctgcaagtggatatgtggaggcctttgaggtctcctgtgtaaaaggaaatatcttcacataagaactacacagacgcattctgagaaacatctttgtgatgtgtgcattcaactcacagagttgaacctgttttttgattgaggagttttgaatttctctttttgcagaatctgcaagtggatatttggagccctttgctgcctattttggaaaaggaaatatcttcaaataaaaactacacagaaacattctgagaaacatctttgttatgtcagcattcatctcacagagttgaatctatcttatgattgagcagttttttgaaactctgtttttgtagaatcagcaaatggatattttgagtgctttgtggcccattgtggaaaaggaaatatcttcacataaaaactacacagaagcattctgagaaactcctttgtgatgygtacattcatctcaaatagttgaacatttctttcaatttagcagttatgaaaca

SEQ ID NO: 950326 - DNA, 426 bp, Homo sapiens
ttttgggttcttggtcacaaaatctttgtctaatccaatgtctaaagtttttatggtttcagttcttagatttaagactttgatacatcttaagttgattttcatttaaggggaaagttgaggattcagtttcatttttttatatgtggcttgccagttaccctagcaccatttgttgaatagggctttttccccccactttatgttttggtttggtttgtaaatgctcagttcactttaagcatttggatttatttctgttctctattctgttccattggtctatgtacctatttttataccagtaccacactgtttcagtgactatggccttayagtatagtttgaagttgggtaatgtgatgcctccagatttgttccttttgcttagtcttgctttggctgtgtgggttcctttttggtttc

SEQ ID NO: 950327 - DNA, 426 bp, Homo sapiens
ttttgggttcttggtcacaaaatctttgtctaatccaatgtctaaagtttttatggtttcagttcttagatttaagactttgatacatcttaagttgattttcatttaaggggaaagttgaggattcagtttcatttttttatatgtggcttgccagttaccctagcaccatttgttgaatagggctttttccccccactttatgttttggtttggtttgtaaatgctcagttcactttaagcatttggatttatttctgttctctattctgttccattggtctatgtacctatttttataccagtaccacactgtttcagtgactatggccttatagtatartttgaagttgggtaatgtgatgcctccagatttgttccttttgcttagtcttgctttggctgtgtgggttcctttttggtttc

SEQ ID NO: 950328 - DNA, 712 bp, Homo sapiens
gtgcataatctgccctttctctctggctgccattaacattttttccttcatttcaaccttgatgaatctgacaattatgtgtcttggggttgctcttcccaaggagtatctytgtggtgttctctgtatttcctgaatttgaatgttggcctgccttgctaggttggggaagttctcttgaataacatcctgaagagtgttttccagcttggtgccattctccccgtcactttctttctttttttttttttgtttttttgagatggattcttgctctgtcgcccagagactggagtgcagtggcgccatctcggcttactgcaagctccgcctcccaggttcaggccattctcctgcctcagcctcctgagtagctgggactacaggcgcccgccaccatgcctggctatttttttgtatttttagtagagacggggttataacgcgttatccaggatggtctcgatctcctgacctcgtgatctgcccgccttggcctcccaaagtgctgggattacaggcctgagccactgcacccggcctccccatcactttcaagtacaccaatcaaatgtagatttggtcttttcacattgtcccatatttcttggaggctttgttcatttctttttactcttttttctctaaacttctcttctctcttcatttcattcatttgaatttcaatcactgataccctttcttctacttg

SEQ ID NO: 950329 - DNA, 377 bp, Homo sapiens
cttctatgtctttctctcttcatatgcatctaaaagaagtgagttaggaactcgaacaatgaakaaatagccttggccaaatccacaagttcatggggtacctttcctgttctccacattaccactggcaaaggttttattcattgtactggtaggtcctcttttccctagtccccagtagtgacttcttcactgccttcatagcctctgctaatagtctcctcattgacctataggtcttcacctatcttctaatctcagagccaataccacgggtttaaaatttttgttacagttgcaccccacttctggtaacaatttctgtttcattatctaccactgcattacaaaccattttaaaacacagtggcttaaaa

SEQ ID NO: 950330 - DNA, 743 bp, Homo sapiens
tgctatggcactggtgcacagtgcttgcaatttggtgggtatatgaaaataaacagaacattttaatgtggggcatgaagcgctattataagaggcctcgttaggatggttttggtgctgggttaatgcaaagacagggcacttaactcagacatgaaaacagaaagaaagaaacgaatcacagtcatatatacttgacaccaaagaagtaaatatttggcaacattttgatagataaaaatctttacttttaatagaaatattgtcatcttgttgacacactccaaatggtcctttgcccaaattatttagattatcacttgaattatttactttgcaaaagggagcccaatttaatgagaggtttgaggttcccatttagaattattgtttgaattctctactttgcaaaacagagcccaatttaatgagaggtttgaggttctagagtctcactcctgcggttaattgttgtgaccatgggtaagtgacttgattctcagtgtactggtgtctagataacttaaggcatgtcaagtgtctgcactttactaatcggcctcttcagatattagagttttatggatataaagcctctctcttctgtgcctttcagtaatggcrctcagacaacatgcacagaagatgagctggaattctgcctggcttcttgcagggcactctcatttttcgcactctagaaccatttagagaaggccccatttagaatttaaaatgtagtt

SEQ ID NO: 950331 - DNA, 582 bp, Homo sapiens
ctgtgactaaaagggaccaaggtacagcttgggctattgcttcagagggtggaagccctgagccttggcagcttccatgtgatgttgagcctgtgggtgcccagaagtcaagaattgaggtttgggaacctctgcctagatttcagaggatgtatggaaatgcatggatgcccaggcagaagtttgctgcaggggcagggccctcatggagaacctctgctagggcaatgcaaaagggaaatgtggggttggagaccccacagggagtccctactagggcactgcctagtggagctgtgagaagagggctgccatcctccaggtcccagaatggtggatccaccatgcttgcaccatgcacctggaaaagtggcagacactcaacaccagcttaggaaggcagccaggagggcagctataccctgcaaagccgtgggggaggagctgcccaaggccgtaggagcccaccttttagatcagagtgacttggatgtgagacatggagtcaaaggagatcattttggagctttaagatttgactrccccactggatttttgggcttgcatggggcctgtagcccc

SEQ ID NO: 950332 - DNA, 563 bp, Homo sapiens
gctcagaggcctgacattcaccttgtgctaacagggtcaacctggaaaaccgttttttcccatgtgatgcccacggcctctctactgcaggagctcaacccactcatcagcacagcctgcaagtacaggaagttaatccctccccactggaggaaccctcaaccagagggagtaggaaccagtgggtgaatgctccaactcagagggccttagacctcttctctgggggctatggaagaatccagcctgcaatctggagaacacattatttctcagcattccttctttccttgcttctttccccccactctttcttctattttctggaatcaccttcagataaactactggcacccaagcctttgcctctggctctgttttgtggggaacccaagctaagatgtcacctcaacattttaggactttatttttcttctcttcaaaataaggggctttcagacacagtgccttgggggctatcctgggaggaagggtatcctccctgtggctagaagagtccakcagaaagctgcccacaccactgggacagagcagctccaaat

SEQ ID NO: 950333 - DNA, 569 bp, Homo sapiens
ttgttactagcatttttttaaaagaaaatatgaaattcacctttttaaagaaaattcttaattgttaccacattctcatccagcaaaatatattcgagctttttctcttgttgttggtaccaaagaatgctcattgtcctctaagtgactgaacctatcagcccaggaaaaataagtgagtataaatcacaaagttcaattcctttcatttgtatgctgctttggaatttgtaaaggcctttaacataacttattaaagcatgtgtctgacacacaggtataatcctttgagtgaactgtttgttacaagagtttagttcttgcctgggaagttcagagtatttggttcttcaggaacagaatttagtttgtctgggttcaatcttcgaagcagcatcaagtgctgaaactgctgacagtacaactcttctcagaacgtatatgcagtatctgaattctccatgtaagaacaactccgtattctacccttctgtatggcttagagaagayactaatgctcagactaccaggaaaagtgtcatgtcataatggatttgggttttaaatag

SEQ ID NO: 950334 - DNA, 486 bp, Homo sapiens
cctgtcacacactgacaaatctgttgttcatattcaggcaggatgtgcgtgttcactcgccatcagtatcatccatctagcgcggggggtgcggagtagcctcgtcccctcgtgcctatggaccaaacgctgttattacatctttctgaaggatcacaacgaaacaactcatttactttttatgatggggcctggcaaatgagacaagtaagacagcctgctcaatttttgtttctctttcttcgttcaatacaccaagacagcctgtattaccatttcatgtcacatacataaaatcataactctaaatggctccaaaccgcttttttgaaaatccacaaggcagaaggaagggcaaatataagaaatattaaattaaaatgctgttgttagaggggagaaaatcatttgaacacagtgtggggkgggtttttttctctctctctcttttatttttcaggcagcactgactttcagaatgatctc

SEQ ID NO: 950335 - DNA, 563 bp, Homo sapiens
attcaatgtaatcccaatcaaaattytagcaagttattttgtggatattgacaaactggtggttttaaagtttatatggaaaggcaaaaaaactcagaatagccaatgcgatattgaaggagaagaacaaagtcagagaactgacactacctgacttcaagacttactataaagctgcagtaatcaaaacagtattggtgaaagaatggacaaatagatcaatggaacaaaagagagtcctgaaatagatacacacaaatatagtcaccttatctttgataaagcaacaaaagcaatacagtggggagaggataatcttttcaacaaatggtgctggaacaactggacatctacacagaaaaaattaatctagacacaaaacttatgcctttcataaaaattaactcatacatagatcatagacctaaatgtgcaacgcaaatctataaaactagaagataacgttaagagaaaatctaggtgatcttgggtatgacaatggctaaaaacataacactgaaagcagaatccatgaaagaaaaacctggcaagttggactccat

SEQ ID NO: 950336 - DNA, 618 bp, Homo sapiens
ccccccacactgctcaccccagactgaggtcccagatactgtggagcagaggatatcttttcctgacaaatctccagttaaacaacctacagatcctctgaagatacaaaaattgttgtggctttatggcacaaagtttggagtgttttattatgaagcaataataattgatacacttttcctccctgtgtaagaaaattacacagggaggaaataatatgctgattatgcttttaataaaatttaagatataaatatgctaagacaatgtataaataatgaagtcaggattgaggaatcatgaaattttttttgttgtaagctttttaaagaactaactgatttaaaaaattatattacacaaattatttgtacttagtcctttcattaataaaattaaagtttatttttttcaaaaatagctaactggaacatcctacgaatgaataaatacatttttctcttctatctctaaatccaaatcttcaatgaatttgggtctctctcttgytatcactctctcacatacacagagatacacacacacacacacacacacacacattgcagcataggatagagtagatcactgagaactctctggaagttatgatacag

SEQ ID NO: 950337 - DNA, 753 bp, Homo sapiens
taaaaatctgaatggcacgcctaccaggaaaaggctaacgtcaaaagaaaatactttttccccctcacgtacaaaccatcaatgagacttcaatgcagcataaagtcacgattttatattgttgtctaccaatgtgtgaaaaaacaggtactcagatatggggacaaaccctagttctactgtctttctaagataataaaactcaattaattttaattttttcgtctgtaaattcaaagtgatgaaaccaaagtttttaggcaattttaaaagttaaatcggggaggagccaagatggccgaataggaaaagctctggtctacagctcccagcgtgagccacgcagaagacgggtgatttctgcatttccatctgaggtaccgggttcatctcactagggagtgccagacagtgggcgcaggccagtgggtgcagtgcaccgcgcaggagctgaagcagggcgaggcattgcctcactcgggaagcacaaggggtcagggagttccctttcctagtcaaagaaaggggtgatggacggcacctggaaaatcgagtgactcccacccgaagactgcgcttttcctaccggcttaaaaaacggcgcaccaggagattatatccgcacctggctcggagggtcctacgcccacggagtctcgctgattgctagcacagcagtctragatcaaactgcaattcggcagccaggctgggggaggggcgcccgccattgcccaggcttgattaggtaaa

SEQ ID NO: 950338 - DNA, 708 bp, Homo sapiens
agaagtggtatatacataattgggctcaagcaggtcctgaaggcacaagttacatgagaaagtggctcaaatgcccatggtctccactyctgccttctctaccccagcctgcaacaatggcctcatggggggttctctatgatcagttgacagaggaagagaagactagggcctggttcacagatggttctgcactatatgcaggcactaccaaaagtggagagctgcagcactacagcccctttctaggacatccctgaaggatagcagtgaagtgaaatcttcccagtgggcagaacttcgagcagtgcacctggttgctcactctgcatgtaaggagaaatggtcagatgtacgattatacaccgattcatgggctgtagtcaatggtttggctggatggtcagggacttggaagaagcatgcttggaaaactggtaacaaatttggggaagaggtatgtggatggtcacctctaagtggtcaaaaactgtgaagatgcttgtattccatgtgatattaaccaacatgtgacctcagcagaagagaattttaataatcaagtagatagaatgacctgttctgtcaacacaactcagcctctttcaccagccacctctgtcatcgcccagtgggcccatgaaaaaagtggccatggtggcagggatggaggttacgcatgggctcagcaacatgtacttccactca

SEQ ID NO: 950339 - DNA, 696 bp, Homo sapiens
cttctcatagtatgaccatgccctgtgattaaggtcaatgggaaactacaacagcccaattcaggcaggactacaaatggtccagacccctcaggaatgaaggtttggtttactccagcaggaaaaaacccgcgacctgctgaggtgcttgctgaaggcaaggaaaacacagaataaatagtagataaaaggtaatcatcaataccagctataaccacatgaccagctatggaaacgaggactgttatcatgagtatttccttcttcttttgttaaaaacatgtttgtgcatatatacacttgtactaagaaaatgtcttccttttatttcctttttctttatcacgtgacatgagattttttgacttcatatcacatttaagtgttgttaactttctgtaatagtatttgggttggggattggtgcatttctagttgtatgaagggtagttgtattatgttaggcgtaattatgacattgtctttatttgaagattatgtatgatctcgggagatgtgtatgggttcaagttgacaaggggtggacttgtgatggttaatactgagtatcaacttgattggattgaasgatatacaaagtattgatcccctggatgtgtctgtgagggtgttgctgaaggagattaacatttgagtcagtgggctggggaaggcagacccacccttaatctggtg

SEQ ID NO: 950340 - DNA, 607 bp, Homo sapiens
gtaatggcgtgatctcggctcactgcaacctccgcctcccagattgaagcagttctcctgcctcagcctcccaagtagctgggactacaggcggccaccacaatgcctggctaatttttgtatttttagtagagacggggtttcaccatgttggccaggctggtctcgaactccttacctcaagtgattggcccacttcggcctcccaaagtgctgggattacaggcatgagccactgcgcccacccagagtagttattactaaaaaaaaaagttatttcataacacaataatacacaaatattttataagatacataaatataatgagagaaaagtgaaaggcttccctcccaaagggtaaccactgtgaacagtttcccacttctctaaaatgtttatgtgtacatgtacatatacaaatatattgttgtgttttttcttttacctaagtgggatcatactgtaaatattkttctgcaactgccttttttatcctttccaaaatgtcttctttatcttcatatactgatacatgtagaccggcttcgcttgtttcaagtgctgccttgcatctcatgatgcagataatccatggtttatctcacc

SEQ ID NO: 950341 - DNA, 528 bp, Homo sapiens
gcccatgaggccatattcaaactatcacatgaggagaaaccttcgacaatacccagctttccagggcagaggtccctgtggcttttcacagtgcattgtgcccctgatttgctgagactagagaatggtgatgacttttactaagcatactgcttgtaaacattgtgttaaaaaagcacatcctgcacagccctagatcccttaaatcttgattccatactacacatgtttttgtgagctcaaagttggggcaaagtggctttggcaaagttacaaattaacagcatctcagcaaagcaattattcaaggtacaggtcaaaatggaatttcttatgtcttccctttctacatagacacagtaacagtctgatctgtctttattttctcaacagcagggaatgctgggagcctcacaagcagtcctctcccattccagaaccccctgtgatgtgccargtgggttgtaaagccccggctttgaagcaggatgccagtgtctctctcagaaggccctcacaagcgaaaat

SEQ ID NO: 950342 - DNA, 458 bp, Homo sapiens
caaaaagagatttagctatgtgagctcaatccacaaatcacaaaacagtttcacagatagcttctttctagtttttatcgtgggatattgttttttactataggcctcaaagcgctctgaaatgtcccttcacagattctacaaaaacagtttttccaaactgctgtaacaacagaaaggtttaactctatgagctgaatccacatatcacaaagcaacttcacagatagcttctttctagattatatcatgggatatttggttttacactataggtctcaatgtattctgaaatgaccctttgcagatccaacaaaaaacgtgtttttaaactgctgaattgaaagaaagttttacccctgtragctgaatccccacatccccaagcatttgcaaagatagctactttctggtttttaacactggttattccgtttctcactataggcttcagtgca

SEQ ID NO: 950343 - DNA, 560 bp, Homo sapiens
atataaaaggaattgaagcaggccatgtatggtggctcacgcctgtaatcccagcactttgggaggccgaggcaggcagatcacctgaggtaaggagttcgagaccagcctgaccaatatgatgaaactccatctctactaaaaatacacaaattagccaggtgtggttgcatgcgcctgtaatcccagctactcaggaggctaagataggagaatcgcttgaacctgggaggcggaggttgcagtgagctgagattgcgccattgcactctagcctgggcaataagctcgaaactccatctcaaaaaaaaaaaaaaaaaaaaaagggggcgggggggaattgaagcaatgagtgtaaacaccttggctctgtagctgaccctatcaggtggggaagaacagagcaagatcagaagtatgcttctattcacaaaatcttctatagacatgtttgattcaactccaagacaccaagttaactttcagcagaggttcccaaattttcttgattcatgaatctcccacgtagygggagagtgattaatctcccactatggtgg

SEQ ID NO: 950344 - DNA, 753 bp, Homo sapiens
gacaggatcaaattcacacataaaaatgttaaccttaaatgtaaatgggctaaatgcaccaattaaaagacacagaatggcaagctgaatagagtcaagacccactggtgtgctgtatttaacagaccyatctcaccagcaaagacacacacaggctcaaaataaagggatggaggaaaatttaccaagcaaatggcaagcaaaaacaaaacaggggttgcaatcctagtctctgataaaacagattttaaaccaacaaagatcaaaaagacaaagaagggcattacataatggtaaagatcaattcaaccagaagagctaactattctaaatatatatatgcccaatacaggagcacccaggttcataaaacaaattcttacagaactacaaagagacttagacttccacacaataatagtggaagactttaacactctactctcaataataggtcattgagagagataattaacaagaatattcaggatttgaactcagctctggatcaagtggacctgatagatacctacagaactctctacgccaaaacaacagaatatacattctcctcggcaccacgtggcacttactgtaaaaccagtcacataattggaagtaaaatactcctcagcaaatgcaaaagaactgaaatcatgacaatctttcagaccacagcacaatcaaattagaactcaagattaggaaactcactcaaaaccacacagctatgtggaaattgaataacctgct

SEQ ID NO: 950345 - DNA, 802 bp, Homo sapiens
gggttcatctcactggggcttgtcagacagcggatgcaggatagtgggtgcagcccactgagcatgagccgaagcagggcgaggcattgcctcacccgggaagcccaaggggtaagggaattccctttcctagccaagggaagctgtaacagaaggcacctggaaaatcgggtcactcctaccctaatactgcgcttttccaatggtcttagcaaagggcacaccaggagattatatcccacgcatgcctcggagggtcccatgcccatggagccttgctcattgctagcacagcagtctgagatcgaactgcaagttggcagccaggctgggggaggggcgcccaacattgctaaggcttgagtaggtaaacaaagtggccaggaagctcaaactgggtggagcctaccgcagctcaaggaggcctgcctgcctctgtggactccacttctgggggcagggcataactgaataaaaggcagcagaaacctctgcagacttaaatgtccctgtctgacagctttgaagagagttgtggttctcccagcatggagtttgagatctgagaacgggcagactgcctcctcaagtgggtccctgactcctgaatagcctaactgggaggtaccccccagtaggggcagactgacacctcacacagccaggtacccctctgagacgaagcttccagaggaacgatcaggcagcaacatttgcggctcagcaatatccgctgttctgcagcctcygctgctgataccaaggcaaatggtctggagtggacctccagcaaactccaaca

SEQ ID NO: 950346 - DNA, 532 bp, Homo sapiens
gatggggtttcaccatgctggtcaggctggcctcgaactcctgacctcgtgatccacccaaagtgctgggattacaggcatgagccacagcgcgtggctctctatgcagcttcctagagttctttatacatatggcgacttctctgccattcttccctgcagattcaagccacctctgtctccccaaactcaggtcttccctgctcaactcagtgaagcttccattttctacttctgttgttaccctttcctgtgctgaggtctaaaaagtgcctccaggttgaaagctgttgtgcttaatgggctcacttcatttgtttaccttctcttagcagtcagagttctttaagatttgctgttcaatgtctgaaatagctgtttcatgtgtcttgccaattttttcattttttaatggggtggagatggagtagacacaataccagttactctactatgaccaaaatgaaagtcaaaagtgtgggttttagaatctaacayatgagtttagatcctgactctgccaatttcttgc

SEQ ID NO: 950347 - DNA, 447 bp, Homo sapiens
ggaatgcttatgcactgttggtgggagtgtaaattagttcaacytttgtgaaagacagtgtggtgattcctcaaagagataaaagcagaaataccatttgactcagcaatctcattactggtgttatggggtctttggtgtgtcgtttcaccagccagaagcctctgtggtcagtggtgcctttgcccaagttttgctctggcctactgggtcattctgctcacttggccttggcaagctgcacttggcttccactactggcctggatctcatgtctccaagggcaagcctggtgcagagtggtgaggggtgtgagtgagagtggtgtctggccattgcgcatagccaggcatgcgagctgcagtggggtgggcagctccaggcactggcatgtgtgccagatacctgcgaggctgtggctggaccaggtgtaccataagcagcttc

SEQ ID NO: 950348 - DNA, 523 bp, Homo sapiens
attgtaggcacctgtggtttcttcccctccctgccccatccactccyttctgccatttatgaaccctcaatctgggttggttttcctgggagaggagggacataccccctcccccattctccttccatgcatctgggatgggctctccccttggcttcagtgatgaaccgtgtggcccaggcctggccaaccaaagctctgcattccctggccctatggagcttgtattctgattaaaaagatggatgatgagcaaattaacagataacataatgtcagattaatgcagtgaagagaaacaagtgggataggagaaagagggtgctgtggtctgaatgcttgtgtccctgcaaaattcatgtgttgaaatctaaccttcaaagtgttggtattaacaagtgaggcatcagcctggccaacatggtgaaaccccgtctctactaaagttagccaggcgtggtggtgcatgcctatagtcccggctacttgggaggctggggcaggagaatcgcttggacctggg

SEQ ID NO: 950349 - DNA, 523 bp, Homo sapiens
attgtaggcacctgtggtttcttcccctccctgccccatccactcccttctgccatttatgaaccctcaatctgggttggttttcctgggagaggagggacataccccctcccccattctccttccatgcatctgggatgggctctccccttggcttcagtgatgaaccgtgtggcccaggcctggccaaccaaagctctgcattccctggccctatggagcttgtattctgattaaaaagatggatgatgagcaaattaacagataacataatgtcagattaatgcagtgaagagaaacaagtgggataggagaaagagggtgctgtggtctgaatgcttgtgtccctgcaaaattcatgtgttgaaatctaaccttcaaagtgttggtattaacaagtgaggcatcagcctggccaacatggtgaaaccccgtctctactaaagttagccaggcgtgrtggtgcatgcctatagtcccggctacttgggaggctggggcaggagaatcgcttggacctggg

SEQ ID NO: 950350 - DNA, 550 bp, Homo sapiens
caggctctttcacaagctggcctcaggtctcatctctgaaggaatttaattttacatttaaatttgagtcttagtacctcttaggcttgcttcagaamgaatggtttccttgtaattgataccttaactatttcttaaaataaacaaaaaacctagcaaagacgtagaataaaagcaccagatggttaaacatatagatctggcagtgtatgcaagaaaggaagtgatcatgtcaggaacctcagatatgtttgttactaaatgtaagaataaaatagcaccaacccccctgactgccatggcaaaaacagaaaagtgatgaattgcccggctttgattatgtgatcaaaagtgtcattatccattcttcagaggagacaaccttcttctactgggcagaagatctgaggaagagttttatcacctgaatccttatatgagggatacaaagtcacataaaggaccagatcttcaacactgatctttcaggcaatggggaaacattctacatataacaaattattatactgacacttaaataaaagctgag

SEQ ID NO: 950351 - DNA, 651 bp, Homo sapiens
ccttttgccaaacagagaattcagtatactataaagaacaaaaactacattaaaagatagccaaactcccaggaatatttattttctttttgatgtttttttttttttttttttgaratgcagtctcgctctgtcgcccaggctggagtgtagtggcgcaatctcggctcactgcaacctctgcctcccgtgttcacgccattctcctgcctcagcctcctgagtagctgggactacaggtgcccaccaccacgtccagctaattttttgtatttttagtggagacagggtttcaccgtgttagccaggatcgtctccaactcctgacctcgtgatccgccagcctcagcctcccaaagtgctgggattacaggtgtgagccactgcgcctggccaggaatatttattttctttattcctttccatgagtatcacttctactataccatcaagagacttaccccagctaaaagttttgcaagttaacactcaattgttgtgaaaatattcctcttgtacaaaagttttttgtttgtttttgtttttttttttttaagacagggtctctttccattgcctaggccggagtacaatggtgtaatcatggctcactgcaacctctgcctcctgggctcaagcgatccttctgct

SEQ ID NO: 950352 - DNA, 597 bp, Homo sapiens
ctttaattcagtccttagaactcagtgaaggtaagactgtaaacatttacactgactctcggtatgcctgtttaaccctctaagtgcatgaaaaattatattaaaaaaagagcctgttactctaggaaaaaggggaaaaaaacccagagaatgcaactcagcttcagcgtttgcagaggtactgagaagcacttctgcagaggctaagagttggtagaaaaaagcaagtaatataaaaaagatttcagaaatttttcaaggagctgacaagagcctaagtcagttttataagagactctataaagcattctggctttacaccccatttaaccctgaggccgctgaaaatcagtatatagtgaatacttcatttgtaaagcaagcccagggtaacatcaagcagaagctgcaggcatgaataccacctagtctataaaagtggccaccaaggtgtatgttaactgtgaccaaggaacaaaactaggaaagagcaaaagaaaaaaaaaaaagactgagagtaagtgtgaaraagagaatcagaaggaaacaggagagacagaccgcagtgcgcagggcagggcccgtgctgttgcctgg

SEQ ID NO: 950353 - DNA, 622 bp, Homo sapiens
aggcaagagaatcgcttgaacccaggaagcggaggttgtggtgagctgagactgcaccactgcactccagcccgggcaacagaatgayacgtttcaaagaaaaaaataaatgaaggcttaaaccttaaacacaattttacctcaattgcatttctttacgtttctgcatttcttgattgtgaagttcttccatgcgtcttaattcttcctgtcgtctcatcagatctgaacattggaaaatatttggattcacattaacaaggttctaataaggtgaaaaacaattgaccttagcaatgatgttcacgcacaggtctttttaccttggcgcaaaagatttgcctgatgttcatgataggcatcttccatttcactttccaatttgtcttttgcatctttcatgtttttttcaacttgttccctttgctgtttttccatttcatccaaagacttccatcgctgagaatattcgtactcaaacgtgccatgctgggcaaaacgaggaggggtttctctctccctaacaatacacaaaattttaacatgaaccgatttgtgaatgcataccagaaaatacttgccctagtactgatctttttcctgttctatttcttgtaaagag

SEQ ID NO: 950354 - DNA, 622 bp, Homo sapiens
aggcaagagaatcgcttgaacccaggaagcggaggttgtggtgagctgagactgcaccactgcactccagcccgggcaacagaatgatacgtttcaaagaaaaaaataaatgaaggcttaaaccttaaacacaattttacctcaattgcatttctttacgtttctgcatttcttgattgtgaagttcttccatgcgtcttaattcttcctgtcgtctcatcagatctgaacattggaaaatatttggattcacattaacaaggttctaataaggtgaaaaacaattgaccttagcaatgatgttcacgcacaggtctttttaccttggcgcaaaagatttgcctgatgttcatgataggcatcttccatttcactttccaatttgtcttttgcatctttcatgtttttttcaacttgttccctttgctgtttttccatttcatccaaagacttccatcgctgagaatattcgtactcaaacgtgccatgctgggcaaaacgaggaggggtttctctctccctaacaatacacaaaattttaacatgaaccratttgtgaatgcataccagaaaatacttgccctagtactgatctttttcctgttctatttcttgtaaagag

SEQ ID NO: 950355 - DNA, 643 bp, Homo sapiens
attggtctgaataaacataactaayttaaataattctattaccactctctgaaaacacagcatttattttcagttcattctcctgagttctggactgttgcctatgacaatactcctaaaaagaaaaaaaaaataataattaaaaatagtgaatacaatgaatttaagacaaccagtcattcaacagaaaatgataaattgtggtcaagtctggtcaatgaattgtataactgaattgaaccaaaatacacaggtatgcactacccttttggtgctctttggctgacaacactaatcacccaatacattattttctatggtatccaggtgtgacatcaaaatctttgtcaacaaaatccctccattcactatcaatagggagcagacatattgaattacaactattttccctacttgtttttttttttttttttcttttttttttgagacaagatctcactctgtcacccaggctggagtacagtgacgcgatctcgtctcactataacctacttctgggttcaagtgattcttctgcctcagcctcccaagtagctgagactacaggcacatgcctccatgcccggctaattttttaatttttagtggagatgttgcccatggtcttgaactcctggcctca

SEQ ID NO: 950356 - DNA, 622 bp, Homo sapiens
aattccctttatttccttttcttatctgattgccctggccagaacttccaataatatgttgagtaggaatggtgagagagggtatccttgtcttgtgctggttttcaaagtgaatgcttccagcttttgcccagttagtatgatattggttgtgagtttgtcataaatagctcttattattttgagataagttctactgatacctagtttattgagagtttttttagcatgaagggatgttgaattttatcgaagtccttttgtgcatctattgagataatcacatggtttttatcttggttctgtttatgtgatggattatgtttatgatttgtgtatgttgaacagccttgcatcccagggatgaagccgacttgatcgtggtggataagctttttgatgggctgctggattcaaattgccagtattttcttgaggattttcacatcgatgttcattagggatattggctagaaattttctttttttgtkgtgtctctgccaggttttcgtatcaggctgatgctggcctcattaaattagttagggagaagtctctctttttctcttgtttaaaagagtttcagaaagaatggtaccagctcctttttgtacccctggt

SEQ ID NO: 950357 - DNA, 600 bp, Homo sapiens
attgccattttaacagggatagaatgacatctcattgtgaatttcttttgtttttttgagacagagtctcactctgtcaccaggctggagtgcagtggcacagttacagcccactgccatctctgccttcyaggtggaagtgattctcctgcctcaacctccctagtagctgggattacaggcatgcactaccacgcccagcaaatctttgtatttttagtagagacggggtttcaccacattggccaagctggtctcaaactcgtgacctcagatgatccacctgccttggcctcccaaagtgctggggttacaggcatgaaccaccatgcctggccatcattatggattttatttgcatttcccaagtgactagtcaggttgagcatcttctcatatacttattgggcatttgtatttcttttttggaagaatgtctattcaagttctttgttcatttttaattggtatgattgtttcattgaataacacagttattttaaagtctttacctagtaaatctgtgttttggggaggatgggaaaggaatttatttctggaaatttattttcttgtttggaatgggttttacatgttttc

SEQ ID NO: 950358 - DNA, 672 bp, Homo sapiens
tggagccatccttgcagtttggaccaatgatatgttgaaggagtggttaatggactcacgctcaccctgaccatcagccaaggaccactttagggtagaagrgagattatcaggcagcgatgcctccttctgcatccctttttacctgaccatgctttgtggttgatttgctttatcttagaacttgttgcatgacctctgaatagaggtctcaattgaaataacttcatcattgcattgataatgctgcattttgacaccatctgattacctatctctttctaacttagcatcagacttgtttaaatccaaacctcatttttcagaactgcataaaactttgaaggcaatagctgttattgtctgccaaaatgcatttctggacatgttgtgagcacttccttcacatgttgtcattgaatttgattttggctttctttcttgaaatgtgaagctgtggcacccagaaatcaggggctgagtttgtcactgaaactagtgactaggatcaaatgattcatcaaagcagaatattatcctgtgtttgttatcaaatctgtccatataatttgttttcactctggtatttacaaaatattgaagcataattgaaaggttcaaatatgtactaaaaccttactattttatatcaaacatttattctgacatcct

SEQ ID NO: 950359 - DNA, 619 bp, Homo sapiens
tagaaagtttcacctcttcagctatttgttcatattcagagtttttgttactttctgtttattgaaagtggatagaaccaaatttggggaaaaaaatcttaatttttcagaaggttttatttcaatttcgaaggtgtcatcatttctaaagttcacaagtttagtcacactactagctctcttccagcaagacccatacctttgttaataaaaataacaatctggaaaccagtgtttacacattttgtgttctgagctgggggtgggagggggatggctgatcccagggaatggtgttgatggagaatctcccatgtgaatgttggggtggctacattctaaaatggagaacacagactttcttatgtaaaaggatgaagtatgtgttccactacagagtcatcaggatcctggaaagaaaagataaatatgacttccaagaaataaaagttaagctgttcatagtggctcctgcctgtaatccaagcactttgggaggccaagatgggtggatcacttgagcccaggagttagacactaccttgggaaatatggtgagaccctgtctttgtaaaamataaaagataaaaattaactgagcatggtggcacatgcctgt

SEQ ID NO: 950360 - DNA, 683 bp, Homo sapiens
tatcatgcggggcacttggaattcaaagcctgcttgctaatgaggtgagaggtaaccaactggctttagaggctgttgtgaaagttatatttagtagagtcctttgtgctaaggacgctctgcatcctgcatgtatatgaaagagtctcccataaaaaggcaagttaaaactcctcaaatgtggctgatttcacgaatctcaacactgtggggatcccagaatgttgaatatactttctctttaatttaacttcatcaagctcaatcaagcttaccgcccaaaaattgtgccctgttcataaatgattttattcgtctcagctcacgaagaaggattttgtggtttccattaacctcaacatcttggactgggatttagagaatatgcttttattaattcttctttatttcactctttccaaaatggctatatctggaaaaactttgtaatcttcctgaaaactagagtgcttttaggccagtgagggaaaccaatagtcaacaactgcaaatgtaaggttaaaaagaggagcaggaacttaaacctgcagatttcgataggcctgtgtcatcaaaagattttaaaatgagtctactataccaaaaactcttaagatgatcttaagmagcagtataccatagtggttatactgctatgtataagcagtatacatagtgacctc

SEQ ID NO: 950361 - DNA, 446 bp, Homo sapiens
cttaaggaaatactttcagtatcctggaatactccctgtgggccgtggtggtagtggtcacagattgaggctcctctgcctgtggaaaatggggggaagaggggatagaactgcatctcgtggtttgaatgccagcaaagccacagtacaatagaacaccaggtagacttctaaggattttactctagtccctggctactgaatggcacctctggacttggcaggggcctgtgggaagtctgtgccctgaggggaaagacacaggcctggctggctttctcacctgctggttatagagccccaaggccttgagaaaacaytggaagtagccaggtagtgtttatagcaggccatgagccaggctcagtcctgtgctggtttcaggtctgatcgagagcactctgatgcttgtggccacaggggtgcttgtgtcaccccattcctag

SEQ ID NO: 950362 - DNA, 633 bp, Homo sapiens
attaataggcaaatgccagcaatattttgggttcaggtgcgatccacagaaatgaagcaaatatcacaataatgcaagtcagattaatttcttggtttcttaatgcatataagacatatttgcactgtattgtattctatttagtgtttaataacactatgtctattgaaacaacatgcataccttcattaaaaacactttattgctaacaaatgctactgttcatctgagccttcagccagtcgttaattgttctgctggtggagggtcttgcctcaaccttgatggctgctgactgctcagagtggtggttccagaaggctaaggtggctgcagcaatgtcttaaaataagacaacaatgaagtttgccacattgactgagtgctctttcatgaatattggagtcaattctctgagactctgccacttctttatcaactaagtttatgtaacactcttaatactttgttgtcatttcaacaatgttcatagcattttcgccaggaatagattcyatctgaagaaactactttcattgctcatccataaaaagcaactcctcattgttaaagttcgatcatccccagtcacattttcaggttcctcttctaattctagttcttttgctattt

SEQ ID NO: 950363 - DNA, 586 bp, Homo sapiens
tacttagaaattcagttggcaaaacagtataaaatgagaagactcacactttagcctattagtacctctatgcctaaagttttataatctcaaactcaattatttttaggattataacttcttctctacttaatatgcttctgttctccttgtatgtcatgtttctttgatttagcaacattaaacaatatctttgattctcaatatgtactataatatattcagtggtaaacatttataagtatgcaaatatttttctttgtactataagtagtacaattggttacatagagaaggaactataatctaaatccttaaactttgctcttcaaaggggaattttcagagtatcaatgtcagatgcatgatccttttgatttttcaaaatattttgttttctactaagatcatagctggttttgttattgttttttcttagctttaacttgcaattcygcctgtttcattgttgaaggaaatgatgcaagaagagctggcctcctgattttacttcactttctcattaaagatatttattattcatggaaacttccaacttcctgttttagtttaaacaagattattt

SEQ ID NO: 950364 - DNA, 753 bp, Homo sapiens
ttatcatgagctgggcattatgaatgcaacaaaagaaaaatatggattctttggggccttatattcaaggggtggggtggaataaataaaaatatagcaggcagtggtataatactgcaatagagaaacatgaatacaaaactatgagggaaaatgggccctgggatggggcatggggaaagaggagctgctgttgtaagcagtgggagagggggtcaaggaaagcctcactggtacctgagctttgagcagagatctgaaggaggtgagagagcaagtcctttgtctatcagggtgctatagactgacagtttatattcctctaaaattcttagttgaaatcctatcgccaaaggtatgacattaggaaggagggtgtctaggaggcgattaggtcatgaaggtgaacagagccctcattaatgaaattagtgcccttatgaaagagaccagagagctccctttgccccttctccataacagagcatggtgagaagagagccatctatgaaacagaaaggggaccctcaccagacactgaatgtgccagcaccttgatcttggacttcctagcctctagaaccataagaaatgcatttctgttaattataagccacccattctatggtatttttgtcgtaacagcccaaacggactagaacactagaactttcaggcagagggaatggmaaagacacatataccaaagaaggagccttcttgttttggttcagagaattttacagaggctag

SEQ ID NO: 950365 - DNA, 599 bp, Homo sapiens
cagcttcacaacataccaagaccctgtctcaaaaaaaaaaaattagattttggtaagtattaccaattatttctctaaaaagagtttgccaatattattagtacgtaaaatgtttgccaacctgatgggtatcttgtttgcatttttttagaagatgaggttgaatattttatttgtttattgcttttttgtatttcttattttttggttcacctttgttatattatttggtcatttttctactgagttgttggttatagtcttagtcatttgcaggagtgcttaatataaatcttttctgttatatatgttctaaatacgttttcccagcctgtgtgttatttttttatcttcatgttttcttttgccaaacaaaagttttaaaattgtatgcagtcaatctgttgccatttttctttatgacttctagactgggtatcatgtttagtgtcaaaagacaaaatcacaacaaatttagttcaaagatcttatgtggggccgggygctgtggctcaagcctgtaattccagcactttgggaggccaaggtaggtggatcacctgaggtcaggagttcgagaccagcctggccaacatgct

SEQ ID NO: 950366 - DNA, 568 bp, Homo sapiens
attccgaagcccgcttttaacgggtgagttggacttatccaggatagaagaaagacaccattccagaaaaaaagaaaccacaaggagcaaaggcacagaagagaaaagcttggcgtgagagggccacaatttctgagacagggacaggtgagagttatggcttgaaaggaagaccttgccgccgggcgcggtggctcacgcctgtaatcccagcactttgggaggccaaggcgggcggatcacgagatcaggagatcgagaccatcctggctaacacggtgaaaccccctctctactaaaaatacaaaaaaaatagccgggcgtagtggcgggcgcctgtagtcccagctactctggaggctgaggcaggagaagggcgggaacccaggaggcggagcttacagtgagcggagatcgcgccactgccctccggcctgggcgactgagcgagactctgtctccaaaaaaaaaacaaaaacaaaacaaaacaayaataacaacaacaataaaacaacaataacaacaaaaaaaaaaacaaaaaaaggaagacctttattcaaagtaccca

SEQ ID NO: 950367 - DNA, 568 bp, Homo sapiens
attccgaagcccgcttttaacgggtgagttggacttatccaggatagaagaaagacaccattccagaaaaaaagaaaccacaaggagcaaaggcacagaagagaaaagcttggcgtgagagggccacaatttctgagacagggacaggtgagagttatggcttgaaaggaagaccttgccgccgggcgcggtggctcacgcctgtaatcccagcactttgggaggccaaggcgggcggatcacgagatcaggagatcgagaccatcctggctaacacggtgaaaccccctctctactaaaaatacaaaaaaaatagccgggcgtagtggcgggcgcctgtagtcccagctactctggaggctgaggcaggagaagggcgggaacccaggaggcggagcttacagtgagcggagatcgcgccactgccctccggcctgggcgactgagcgagactctgtctccaaaaaaaaaacaaaaacaaaacaaaacaacaayaacaacaacaataaaacaacaataacaacaaaaaaaaaaacaaaaaaaggaagacctttattcaaagtaccca

SEQ ID NO: 950368 - DNA, 754 bp, Homo sapiens
gactgtaataagccaagggcagtaaatattaaayatttatttacagttacataactaagcttgtgaatccacgaaagaattttccagggaaaaaagtgctgagaaaaaaattttataacctgccattttagaaaactatttattagaaataatctccaacttatcaaaaagttgcaagaataaaaatagtaaaatgaaaaccatataccccttacccagattcacctcttgctaatacttaactccattttctttatcatttgaactctcccacacatgtgcctgatctctcctttatatatatacacatgtgatattttaacatgccatttgcactctaattctatgaattgactcactaatgtcctttatagcatttttatcactctggtacgggatccaggctgggatcaaatattgcatatatttgaagtgtctctttagtctggaacagttcctaactgatttgttttttaaacaataaaatggtagtactgtatctgtctcatatcattaatgctatttataggtactctcagcagattgtgaacttcttagcatgaaaaaaggtagaattccagtactctttagtagaaaaaaaggatattttagctgcatgtaattaaatcaaaaaggaaagccatagcgaaaccataaaaatttgaaatacttgaaccgaaattagaaagtggtttatataaattaaaatggaaagtagtgttcttttatcacttaaaaacatctgagagtaatt

SEQ ID NO: 950369 - DNA, 644 bp, Homo sapiens
ccacaatatcaccccttaccacaaaatcttccttcagcttaatctctcccactctagcttcccacgctgcccctaatcccacttgaagcagccctgagaaacatcgcccattgtctctccataccacccccaaaaattttcaccatcccaacactttaccactattttgttttatttttcttatttatataagaagacaggaatgtcaggcctctgagcccaagctaagccatcatatcccctgtgacctgcatgtacacatccagatggccagttcctgccttaactgatgacattccaccacaaaagaagtgaaaatggccagttcctgccttaactgatgacattccaccacaaaagaagtgaaaatggcctgttcctgccttaactgatgacgttatcttgtgaaattccttctcctggctcatcctggctcaaaagctcccctactgagcaccttgtgtcccccactccttcccaccagagaacaacccccctttgactgtaattttcctttacccacccaaatcttataaaacggccccaccccatctcccttccctgactctcytttcggactcagcctgcctgcaccaaggtgattaaaaagctttattactcacacaaagcctgtttggtggtct

SEQ ID NO: 950370 - DNA, 718 bp, Homo sapiens
ataatagatgtttctaacaatcacagaccctctgcctcaagacatttagtggtttcagtacaaccacttcaagccacactgtttatggaaatgacctgagacctcagagattattttaattcrgtgtaaacattgccagacataatttgatggatctgtatgtgaattttgtttcttcacggtatttaacttctgtcaccagcgttagcctattctaggctagtaaaaaaatgtgtaattgttagataaccaatcatatcacctctgtggtttcctggaacccagcaccaggctgagcctgggttaggtgggaataggtgaagcctatggcagagggagagaccaatacctgctcagaagcctgatgaatggcacatgaccctcaaaatccatttaggcagtaccatctttaaggtaaaaattcggcccacctctggaattatgagatttcttgccacaactactttctctttatgtaagttgagtaagctggtcatgagaatagactagggggtctaccctactgtgtggtagagatttccagctctaccacacactagctgcttgatcctgagcctcagttttcttgtctgtaaaatgcagataataatattaccatccacatgagattgtggttagggttaaataagtgtgaaggcattgagaccagtgcatcaatattgtgaagactcagtaaatgttagccagtgccatggtc

SEQ ID NO: 950371 - DNA, 622 bp, Homo sapiens
gttagaaggaaaactaataaacagaaaggacatccacaccaaaaccccatctgtacatcaccatcatcaaagaccaaaggtagataaaaacacaaagatggggagaaaccagagcagaaaagcrgaaaattctaaaaatcagagagtctctctctcctcctccaaaggaatgcagctcctcgccagcaacagaacaaagttggatagagaatgactttgacgagttaagagaagaaggcttcagataatcggtaataacaaacttctccaagctaaagaagggtgttcaaacccatcgtaaagaagctaaaaaccttgaaaaaagattagacgaatggctaactagaataaacagcatagagaaggccttaaatgacctgatggagctaaaaaccatggcacgagaactacatgacacatgcacaagcttcagtagctgattcaatcaagtggaagaaaaggtatcagtgactgaagatcaaatgaatgaaatgaagtgagaagagaagtttagagaaaaaagagtaaaaagaaatgaacaaagtctcgaagaaatatgggactatgtcaaaagaccaaatctacgtctgattggtgtacctgaaaatgacggggagaatgg

SEQ ID NO: 950372 - DNA, 547 bp, Homo sapiens
gctgaaatcctaggctatctagtcatcatccttctgggaactactatcacctcactcctatgtcagatctcctgttcaatgtattttattgtcttcttcttttttgtttcacagttggttttggttgagcacatccttgacttcttgaaaaaatatacaggaggggtaaattattttgatactttgcatatatgaaaatgtctttattctaccatcatacttgacatttggttggatgtagtatctagactggaaattatttaccttctaaattttgaaggcagttgtattagtccattttcatgtggctatgaggacatacccaagggtaattataaattaaaattaaaaattaccaagggtaatttataaagaattttaattgactcacagttccacatggcaagggaggcttcacagtcatggtggaaggtatgtcttgcatggcagcaggtgagaaaagcgagtgacgagcgaagggggaagccccttataaaaccatcagmtctcatgagaactcactcactatcaagaataacatgaaggt

SEQ ID NO: 950373 - DNA, 632 bp, Homo sapiens
caccatgcccggctaattttttgtatttttagtagagaccgggtttcaccatgttagccaggatggtctcgatctcctgaccttgtgatccacccacctcagcctcccaaagtgctgggattacaggcgtaagccactgcgcccggccagaactgacataatttttaaagtctacggcatattttgtgtgtcagctcagggaccagttgtcctgtgtgctcacctggccttctacacggccctactgcacttctgtttctacagaaacagtcctttccacattattttagcattggccataggaaatactgtctgtttcattttctgactctcaacattgtttttgaaaatataattaatttttttcatgatattgggccattatgaatacccacaggctccattgttgacagaaaataaaattactctcttcttgataaaatgtcaatgaagtagggagacattatttgaggaagaattaagaatattctccatatttagttctttttttttttttttttttttttttttgccattggtagagcaaattccagtggtggtaaatcaagaactctaaagttcagtagagasaggtgttttgaatgtcaaggaaatcactgaggtagatttgg

SEQ ID NO: 950374 - DNA, 606 bp, Homo sapiens
ctcccaaacagagtctctccctgtcctgagccacctgaaactgggggtgtagtgatgcaagcacccctgtggtcaccaccactgggactgtactgggtcagacctgaagccagcacagctctgggtcttgcccaaggcctgctgtaaccactacctggctactacctatgttcacttaaggccctagggctgtacaatcagcaggtggcaaagccagccaggtttatgtccttcccttcagagcagcaagttcccctaggcaggtccagagatgagccagggattggagtcaaaaacctgatacatttgtctgatattctagtctactgtggctaagctggcactgaaaccacaatacaaagtccttcctgttcccctctctgctttacttaggcagaagagcctctgcctatggccaccatcagcccagagcggggttctgccaggccactcttgattttcacttaaagcccargggctcttcagtcagcttgtagtgaatgctaaaaggcctgggactcacctttcagggcagtgggctcccctccggcccagtgcaggtccagaaatgctgccaagagcctaggtctagacttgggaactgca

SEQ ID NO: 950375 - DNA, 669 bp, Homo sapiens
ttcagccgtttggagaaactgtttttgtccattctgtgaatggacatttgggagctctttgaggccaatggtgaaaaagcaaatatcccaggataaaaactagaaggaaactatctgagaaacagcattgtgatgtgctcattcatctcacagtgttaaaactttcttttcattcagtagtttggaaacactgttttgatagaatctgtgaagggatatttgaaagctcattgaggccataggtgaaaaagcctatatcccaggataaaaattagaaggaagttatcttacaaaccgctttgagatgtgtccattcatctcacagagttaaaccttttattcagcagtttggagaccatgtttttgtataatctgtgaagggatatctgtgattgcatggaatcctatgctgaaaaaggaaatatctttggatactgactagaaagaagctttctgagaaactgctttgtgatgtgtacattattctcacatagttaaaactttcttgtgattcagcagtttagaaacactgctttgtagaatttgtgaagggatatttgatagctcattgaggccactggtgaaaacttgaacaycccaggataaaaactggaaggaagctatttgagaaacctcttagtgatgtatgcgtacatctcacagagttaa

SEQ ID NO: 950376 - DNA, 518 bp, Homo sapiens
aaacactttcatattatttagcacttctgttttcattaggacatatgaacatatttaaattcaacattgagtaaatataattcagtatgtatttatttgacctccatgtactcagaactatggcaactgctatgaacaatgtcaaagaaatttaatatcactgctatggtctgaatatcctctccaaaacacatgttgaaatttgcccttgtggtggtgggaatttgggaggtgatggggccatcagggctctcccctcatttgtagaattaatgccattttaaaagaatgaattaggctcccatttgccctcttttccttggatcttctgccatgtgagatgaagtatttcttcctccaggaggacaacacagcattcaaggcactatcttagaatcatcaaatctgccagcatcttgmtactggactttccagccaacagaattgtgagccaatacgtttccatttataaataatccagtctgtggtagtctggtatggcagcacaaaacaaacta

SEQ ID NO: 950377 - DNA, 658 bp, Homo sapiens
tacaatacaaaattactatttaataatttacacatggcattaattctaattgtgtttaaatatcagagctttttcagtcttcattcatgtaatcaacagccacatgctaaggtactagaaccagcactggaattacaagatgaagatggcatggtccacctcccaacagtcataagctctaacctaaaaaacagacaggcaggcaatgtccatatagagtcatagataccatgacaggtatagagcagggcactactggaacacagagaagggacatctatccacttttatgtcaatatcatgggctttctggtggaggagataacataggttgatacctgaaggacaaggaaaagcttcccagatagaggaaagaggcaaaggcaaagagcctgaggtgaggaagagccctgcagagttccactccatccagtttggtgctagaacaaagggcagagtgcagtaagcggtgagaaacaaggctgagtaacttgacaagaatcacattgacatgggtgtttttatttcatggtgaaaaatttggaacttttcctgagaacaagtgtaagccaatracacagtaaatgacaggagatttaaaatgtcacctgtgaagtgactgcttatgaagggttattgctcagctaagtatttctga

SEQ ID NO: 950378 - DNA, 642 bp, Homo sapiens
tcccccaatgacttaactcattccagcatttactgaaatgtacaaggacttacagaccccatgcaagtcaaaaacccagcaggccagtcattgaatcctacagctccaaatcatcttttctgaatctacatctcacatctagagcacaggtgtgtgatgcctgggcttccaaggccttgggcagctctgcacctgtggctgtgcagggtctataccccacagctgccctcatgggctgggctgatgttgagtgcctgtagcatttccatactaagggtgccagctgttggtgagtctatgaatctggagtctggagaatggtgcctccatatttagggactccagccctaaattctccttctgtactgccctagtaaaagtttcccacgaggctctgcctcttggaaaagattctgtgtgaacacccaggtttttccgtacatactctggagtctagacaaaggcttgcaagcgtctagttttgtgctgtgtgcagctgctggcttaacacwatgtggaagccaccaagccttgaagcttgcaccctctgaagcagtgacccaagctgtacctgtgcatctttcagccaaggctggagctggagcctcaggaatgcagccagcagtgtcctgaggttggaca

SEQ ID NO: 950379 - DNA, 673 bp, Homo sapiens
gactgtagccttgacccagatgagactttggactttgtaactttgagttaatgctgaaatgagttaagactttgggagactgctggcaagrcatgtttgtattttgcaatgtgaggacatgagattcatcgggtcaaggacagaataatacggtttttgtctatgtccctaccaaaactcatgtggaattatattttggaatgttacaggcaaggtctaggtggaaaaagatttagtcataaaatggtgcaggtagatacttcacgaatgataaagaaccatcaccttgatgctatcctcctgataatgagtgagttcccatgagatctggttgtttaacagatctcatcctcctgctcctgctttaggagacatctcattgtcccttggctttctgatataatgaggaggcttcctgattcctcccagaaacagaagacactatacttccttcacagcttgcagaaccatgagtcaattacacctcttttatttacaataatacagaaaagtagaactgcagagaggagctgtgaaatgccttcaaggcctttttccctttgttttggctattagcacagggattctttatatgcaaatttctgaaatcttcttgaatgtttccccttaaatgggatttttgttattgctacatagacaacctgctatacag

SEQ ID NO: 950380 - DNA, 613 bp, Homo sapiens
ctaaccaagcaggacagtcactcatgtcattgtgttctcccgtgtcctcctctggagattcttcacagtcacctcattcatcaataatataccatatgttcttactgccatcatccagcagctcacccccagccacccatgactctcctgtctgtcccagctactcttcaaccacgcccagatttcagcggcagtctgtaccccacaccccagaaacacctacaaactcacagacctcagtgagatcctgggcagtctctctcacgtcttcacccccagcccttacggaccctccagtctgtcccagctactctccaaccacgcccacatttcagcgcgggtcagttccaggaacccagggatcaccgccaagcccaccactttcactgagttactccccagtctctagcacgtctttatctccaaccctcagggactcgcctgtctgtcccagctactctccaaacacgcccacacttcagcgggagtccgttgcaggcacccagaaataaccaccaaactcaccaatttcactacgttactccccagtctctctcakgtcttcaccatcactcagggactctcccgtctgtcccagctactctccaaccac

SEQ ID NO: 950381 - DNA, 400 bp, Homo sapiens
ctgttgttcacattcccttgcagggtggccaacagaacaccatcctggccctgcaacacttatgtgccctgtgtggtcaccctctggccattgagagggataagggaacacatttcactggacaacacgtacaacaatgggcacaacaaatggacataaagtggggattccatgtgccatacaacgcgcaagctgtgggtatgattgagcgatataatgggctcttaaataatggattatggttgcatgtcacatcccatctttgcagggctggagttccaggtgctycaaaccttgaatgaatggccacggaaaggggccccagtagaggctttgttacaccgggctgctgcccccattcagttgcagatacataccaaggatgacctcctccaaccag

SEQ ID NO: 950382 - DNA, 599 bp, Homo sapiens
gaggctttgttacaccgggctgctgcccccattcagttgcagatacataccaaggatgacctcctccaaccaggtatggggatgaatggtaacctgtttttgcctgcccaaacacccgtgaaggcaagggaacagaaaatttggatgtggccatggacccttcaagccccccactgctggcggctggccatcatagctccctgggagaagggcctacagtatgacttcatgtcactctttgggtgttcattacatggcccccacactttactgtttgtaggggaatggccagggaaggacccctcctctaggggacatatatactgtctgtgtggcctattaggagctcccccatgactttggcatggatacaggactcaaagggaccgtggggagctgagaaggtgtggtatcattgacgaggcaaaagcctttggcaggtgcattcttatccaggatgaaaggttaacctgtattttgcctgagggacatgatttacttgttagtacctatgcctgctctgtcatttcratcatagtttaacatgctccaactgcattttggactggacccacacctacgcttaggtgaccaatgtt

SEQ ID NO: 950383 - DNA, 447 bp, Homo sapiens
tactttctagtttgcctgcgtggattgattttgcacaaagtttgctataattccaagtggtaatagctactctggaggtgaagaggaagagaagtccaagattagttcctggaagaaaaaaagactgaagagataataggcctctgaacaccacacaaatcaacagaatggaaaagggcccaaggggagttacctccatgcaattgtttgcagagtgattatcaagccctggcatctggagcttagaatgattactgaatttcttagaattcaacatagagctgaactgaaatttgcaggttgatttactgaggaagctccctgaaatccttaccaacttaagttgtgggaacttcagacaaagctccttgtcccttctcttacctccttatttagagttttctttcagttcstcacttttcaatgcagtatgtagatgcctcaacg

SEQ ID NO: 950384 - DNA, 599 bp, Homo sapiens
agcaagaccacgaacccaccaggaggaatcaacaatatggacgtgccacctttaagagctgtaacactcactgtgaagatctgcagcttcactcctgaagtcagcgagaccacraacccactgaaaggaagaaactccagacacatctgaacatctgaaggaacaaacttgggacacaccatctttaagagctgtaacactcaccgcgaaagtctgcggcttcattcttgaagtcagcgagaccaagaacccaccggagggaataaagtccagacacactgggttcacgcccttctcctgcatcagcctcccgagtagctgggagtgcaggtgcctgccactacgccaggctggttttgtttttgtatttttagtagagacggggttgcaccatgttagccagcatggtcttaatctccttaccacgtgatctgcccaccttggcctcccaaagtgctgggattataagtatgagccaccctgcccagcccttattttttttattttttatttttaaaaaaatatatataggctaagatgttgacgtactttcacagccaggtaaaaggaagttaaatcttttatgtgtggtaatgact

SEQ ID NO: 950385 - DNA, 599 bp, Homo sapiens
agcaagaccacgaacccaccaggaggaatcaacaatatggacgtgccacctttaagagctgtaacactcactgtgaagatctgcagcttcactcctgaagtcagcgagaccacaaacccactgaaaggaagaaactccagacacatctgaacatctgaaggaacaaacttgggacacaccatctttaagagctgtaacactcaccgcgaaagtctgcggcttcattcttgaagtcagcgagaccaagaacccaccggagggaataaagtccagacacactgggttcacgcccttctcctgcatcagcctcccgagtagctgggagtgcaggtgcctgccactacgccaggctggttttgtttttgtatttttagtagagacggggttgcaccatgttagccagcatggtcttaatctccttaccacgtgatctgcccaccttggcctcccaaagtgctgggattataagtatgagccaccctgcccarcccttattttttttattttttatttttaaaaaaatatatataggctaagatgttgacgtactttcacagccaggtaaaaggaagttaaatcttttatgtgtggtaatgact

SEQ ID NO: 950386 - DNA, 581 bp, Homo sapiens
tgatgaagggtaccccagatcccagggaggagaatgtcagcacaaacccccatgatggtatctggctgataaaagtgagtgaagtcccagcacattagagaggtagagagccaccctctgtaacttamctttccactaggaatctgaccaacccaagctgagagagagcactttgtttcttctaaactctgtatttaacatggagtgaggtttggagacactgtgagggaaacacaatgggaaaagctgtaaacgttttcccagacacagggctgagggcaggacatcatttttaatcaaggcacttacaaagtcagccattcaagctgagaaccaaataaagaacacaatcacatttacaatagccactccccaaaataaaatagctaagaatacagctaacctaatgagaaggatctcaaggaaaactacaaaacagtgttaaaaggaattatatatgacaaaatcaatggaaaaactttaaatgtttatgaattgaaagaattaatattctttaaatgaccatactgcccaaagcaatctacagacttaatgctatttctatcaaactaccaatgtca

SEQ ID NO: 950387 - DNA, 638 bp, Homo sapiens
tatgggcaaagctctacattaggcattttgaggaggaataggaacaaggaattcaaagtattgyaacaggcttgaatctgaaatgcaagagttattcctaaccctttccatctcacattttatttgtgtatgtgtgtctctgtgtgtgcacatgtacatgactttctcttctaaccagatatggtgactttggggcagaagtaatggattttccttttcctcattttctcaaaactcctagcaaaaaagcctgacaaatagtaagttaacagtaaaaacttgagacttaatgaaatttaaatttaaataaagcaaaattctatttttatgggttaggtagggattacctaaccatatcttccaattaaaaaaatattatcctaggaacatgtctttgagtaaggtgagcatgctctctggttttctccagatattcatggtttacatctgttttccttagcattattattaatgttaccttcttttactctcaaaaatgttcttgatcaaacaataaattgtttatttttgtttacatttacctatgaagcaacttcttgttatgtaagaaaagagactcttcctaaaacttgctgtccagtggtctcacacccagaatttatgtaccgacactctga

SEQ ID NO: 950388 - DNA, 529 bp, Homo sapiens
tttggccatctgatgggtgctatcaatgcctaagtgaaaggtttggtgaagggttttaagtaaggttccattggttagctgcaggcaaaagtatttttccttcttcggtggctagccatcctgaggggaggaaactacgtcctcatgaggttccccattctatttattctgctgagtactggggcttggtttcccagaggggattaccccatactaggggtccttctataaacatttctaatggagggtcccactttgtggctcttttggcagttcccttctatttccctttcctttcctttctgatgaccccagcagtgtaagactgcctcctctttaggtttctatacagccaataataataacctcctaatggcttcctgatgtttgataggtgttccctcggaagttaggagttcctttctctccatattgctgcgtggacgtggaggrctaggtaagcatactcagagtctgtatatatacttaccttttttccttctaattctaagtgccgagtgagggtatt

SEQ ID NO: 950389 - DNA, 591 bp, Homo sapiens
gtaaaatgaggcagacgttttagaaaatagtttggcagtatcttcagaaataaaaaaaaagtttgaccatatgacctaggaattttattcctactttctacacaagagaattgaaaacatatcccaacaaacatgtccacaaatattcatagcaacattattcataataagcaaaaaagcaaacaaatcaaatgtccatcagttgatgtattgttaaacaaaatatgacttatccatacaataaaatattattcatccataaaaaataatggtatactggtatgtgctacaacatagataaaccttgaaaacattatgctaagtgaaagaagacagaaacaaaagaccacataatgtataaatcaatttatatgaaatgtccaggatagacaaatccataaagacagaaagtatattagtggtttccagggcctagaggcaagggggaatgtgatctggacacggggtttttttatgaggtaatamattttctctgaattagatagtggtgagggttataccagtttgtgactatactaacccactaattgcatattttaataacatacattttatggcatgtgaaatatc

SEQ ID NO: 950390 - DNA, 591 bp, Homo sapiens
cctcttgcttagctcctcagaaatgcaaatgtaaccttttccttccttcgtttccaccagtgaaacaacctgcaagtattgccagcttatctaagtatatgtttccttagaaattctaaggaccaaatgttgaaccaaagcaggcaacatccagaattctccctcacagggagactgtctcaagacaatagttaatccacattccgactctttcctcaatgacactggtcagactaacagatgaccccttagctaagttttacagcaagtcacatagaccccgcacctccatgttccttctgcataccctgcacaagaaagtttctcttcttaaaaccctgctttcttcccggaaaactgaagcggctcctttagatatgaacctggttcttctccattgctaagctgtgaaataaagtcactttctttttaccaccctcttgcttgttatttgatacggtaagtgacaagtggccaaacctgtgtttggtaacaaatttggtggcctgtatggggagcattatgtgctctgggcaacccaagcctgtgagccyggttttgctaccaaggtggagggttgcctgtgagcac

SEQ ID NO: 950391 - DNA, 609 bp, Homo sapiens
cagaatatcaatagctattgacgtgggtggcarcatattacaaaatggaactgtagatcatttggggaaaatattttgatgaaattcacccctctgggtgatgtgctgaatcttaaaccagaaagaaagaacatcaaaccaaacaaaaaaggttatttttttcctttgaatggacagatagcaacatctttaaatgctaaataaagtagccctgagcttctgagggtgcccctcagggactattgtctgaactgtcaatcaagtctcttggatttctgccctcaatgcttctttccttttccagctttccttcaaatgttcagcagtgataaatagagagttgtttgtcttttatttcaaatgccttccttataatatcagagctatgttagcatcatttacaaatcaatctagcaggatggcttaatgtcatcacaattttatggcagccagtgatatccaaactatctctagagtcttgatttatttctgtttggctctaaattaggttatttctcctccaaaggttaccaagtgctttagaaactgatgccctgatgccccttactcccacacgtgagagaaatgcctccagggtcaggatgaaga

SEQ ID NO: 950392 - DNA, 545 bp, Homo sapiens
gccaacatggtgaaatcccatctctactaaaatgcaaaaattagtggagcatggtggtgggtgcctgtaatgccagctactcgggaggctgaggcaggagaattgcttgaacctgcgaagtggaggttgtagtgagccaagatcatgtcattgtacttcagcctgagtgacaagagcaaactctgtctaagcactgtctcaaataaataaataaataaaataataataggaaaaaaaggagaagtgaagatatgtgaattttatatatttatgaagtaagtatgatattttaatagcagcatacaatttgtaacaaacaaatcaggataactggggtatccatcacatcaagtattatctattttgtgtgtgttaggaacattccaattccactctttcagttattttgaaatatacaataaattattgttaaccaagatctgtggaaattaaacaataccccataartaaccaacgggtcagagaagaaatctaaagtgaaattggaaaataataaaaatgaagacacaacatatcaaacttac

SEQ ID NO: 950393 - DNA, 653 bp, Homo sapiens
agactgaggctggagaactgctttaacgcgagaggcggaggttgcagtgagccgagatcgcgacaccgcactccagcctggatgccagagcgagactccatctcaaaaaaagaaaaaaaaaaaaaaaaagaatggagccgcgggccgggcacagtggctcgctcactcatactttgggacgccgaggccggcgattcacgaggtcaggagatcgagaccatcctggctaacatggtgaaacctcgcctccactaaaaatacaaaaaattagccgggcgtggtggcgggcgactgtagtcccagcttaccccagaggctgaggcaggagaatggcgtgagaccagcaggcggtgcttgcagtgcgccgagattgcgccactgcactccagccctgggtgacagagagacttcgtctcaaataaaaaaagaaaaaaaaaaaaaaaagaatggcgccgcctaccttcctggtgagtgttacagctcttaaagatgacactgacacaaagagtgagcagcaaggagatttattgtgaagagcaaaagaacaaagmtcccacaaggtgacgggacccacgcaggtctgctgccgctggctggtggtgggggcgggggtgcgggcttttattccgttatttgtccccgcccatgccctg

SEQ ID NO: 950394 - DNA, 638 bp, Homo sapiens
ccaaacaaaagtaacttcaaaagcaagaagtgtcagcttccctagatgataaggatccagcataagaattctggtaccatgtaaaatctgaatgctgtgaaaccatcaaaggatcacactagctctctagcaatggaccctaaccaaaatgaaaattcggaaattacataaaaattcaaagtatagattgtaagaaaattcaatgagatcaaagaaaaggttgaaaaccaacacacagaaaccctaaaagcaacccaggaaatgaaggaagagatagatgtcttaaaaacaaaaacaaacagaacgtttggaaatgaaaaatccacttaaatgagttcaaaatacagttgaaagctttaagagtagactagaccaagcagaagaaatcatttcagagctcgaagattggtctttcaaattaacccagttagacaaaagtaaagagaaaatatgttttaaaaaataaacaaagccttggagaaatatggaattatgtgaagtgaccaaacctatgaattatagttactcctgagagagaagaagaaaaactaagaaatgtggaaaacatatttgaaggaayaatgcaggaaaatttccttgatcttgctagagatgcagaaattcagatacaataaact

SEQ ID NO: 950395 - DNA, 611 bp, Homo sapiens
agaacagaaatgaagccagggtgactggagctgggtggcaatgctcctcaaggtggtcaaggacctagaagccacagaagggcatkcaagcatgagcgacatgatctgacatttttcaagatcattctgggagctgaatgtggtatgaatggatgcaggaaaagcagttaggagtccagaagaggctgtagtgaagatggagagaagaggatgattatggcatatgtttcagaggtggagacaaaagaacacgctgatgagggggatgatgatgagacaaagaacagagcctgagtatccacttcatcaactaggtggatggtggcaccatttgctgaaatttataaaatggagggagaggcaggagttacaggaaagggaacaaaggcattgaaaattcagagctctgcccatgaggaagaagccaaggggagtcgtccagtagttgtttcagtcaagggtctggaactcagggctggggacacacatttggtcaccatctacctatgaatggtatttagagacactggaataaaaaagactggaaccgagaaacaagccctggttgttcagacaaaggaagagccagcaaaggaaacttcagacacagc

SEQ ID NO: 950396 - DNA, 751 bp, Homo sapiens
ttgtaactccaatctcagtgatctaacataagaaggcacaaagttgccctagttaagaaaactgggagtcatctgtgatggctttgtggtgtcattttggccaggctaaacaatatccccataattccctttctagtatgtttctgattagggtgggctacaaggaagaccttctcctgaaagttggtagatggaagggagatatggccgtctgtagcacccacatacactcactcaaatatgcaatccaacatgaatctaggtgctgctgtgaagggattttgcagatgtaattaaagtccctaatcaggtgactttataggagattatgctaaataagctgataatcagtggaaggcagagaggagagagagataaaaagagaaaagggaaagaagacaggaaggaagggggaggggggaagaaaaagaaagagaaagaatgttgcaggagaaagggaggaaaaagaattgcttcctacctgtgggcaacaagattcagcctatgggattccaaattgcctagccagttctcaattgcataagccaattccttgcaatgcatccctttaattcatacatatctagatacccacatactcactttgtagctacttgttctgtttctctggttgaaccctgacaaaccctgacatcaatgtttcctcttccctcctcacctcagctcaaatcaagttgattccatctcttcaatagttctctgattyaatccctcctctccagaaacaggg

SEQ ID NO: 950397 - DNA, 574 bp, Homo sapiens
tgaaaagactaacctgcttgtagtaagaacatactagaagcaagaaagcctagattctgatcgtggaaaacctgtgcaccatyaacagtctccactttgtcacttgtaaaatgaatgcactgaggatagagtcaactatcctgattatatggcagtttgagttttcaaaaataccttgccaggacccaaaccaacaattcaaagctcaggaattagtgccagcaggaggcatttcctcacataattgcattcttctcagacagctggattctgtgtcattagaagaagaaaaaagacaacagagtctaaggtctatttcttagattctcagtattctgttacagcttcgcatgcacgtgacaagtcacctggagaggccccttagacagagatgagaacaaacagacaaaagagatgagaacaaacagacaaaagtcccagagggaatcacaccacacactattaatgtgaccaaacttgaactcaaatgttcagattacactgcctggtgacccccgtccctggcaaatcagtgagatgaaatctcttacagatactgaatttgtactagttg

SEQ ID NO: 950398 - DNA, 633 bp, Homo sapiens
cacccagctaatttttgtatttttagtagatggggtttcaccgtattggccacgctcgtcttgatctcctgacctagtgatccgcctgcctcggcctcccaaagtgctgggattacaggcatgagccactgcgcccggtccagggactgtattcttaacttctgtgctatattgtatcctctctttgactattggccctataggagatttatgcacgtggagggataaacaagtttcaccctttgtgttgaggatcttttgcttgaaggagacattccttgcactgagtttccctcatttactcttcaggactgggcatcatcctctttgagaagttgtccctaatcttttccagaagaagccagatattgctttctgtaattctataaaaccttttgttctcctttttcatgtgacctcaactgtaatcatccagtttcttgtctgctgctcccatgagtctgagttccttaagatcagaaacttttccactcatagtgcctagcacccagtgctsaataaatagtttgtttaattagttaatttttggggatgtgtaatttacttcccatttttcaagagcctgatggaaagaatgtttattcacttattacatctagtcatttattcatt

SEQ ID NO: 950399 - DNA, 694 bp, Homo sapiens
ccactgtcaaataaagaagctaccactaaatatttgaaacaaacaaacaaaaaagtggaatttattgcttgctaagtgagggaaaactgtacttgtaagatgcagcctctctaaacaaaaggaaaattacttttatgtgaggtttggggaattatggagttcaaagatcgttggacttttggaagtggaagtgtttcgggattagttgaactttaactgtagaagcatcaccaatgacattcagaagtgtggttactgctgccaagatatctttgattgcttgggacagttttaaaatctggatttgttactgtggccaaaaaacaatcagatttttccttgaagaataggaaccttttattcttaccaccagaagttagtttacgaagtcagaggctaagtggcagtcctccttaagccatttccactttggggaaccccacagaagagtggacagttgctcaagtcaacaaacaggagctcttggggcatcagtgtcacatggttccaactttgatctggacagttccaaggcagcaagtcatgttgaaagtttcctgagaacattcctttttgatcagaggcaggacttgcttcccactacagtacaggatggagtggggctggagcacagggaatgtggggcyccccttgttgtaggcaaactctaggctcacaaagaatggtgactaag

SEQ ID NO: 950400 - DNA, 603 bp, Homo sapiens
gagtgggcaaccaactatccttaccatcttcagtccatactcctctggagtgtatcctgaatctttgggactgttttsaccctcagaccctggagaaaaaatgcctcatagccctctgcacaaaggtttggacatattatgatctgcaggaaggactggcttggcctcaggaaggaaccattcattttgatacaatctttcagttggactttttctgtaaacacaaaggcaaatggtctgaggccccatatgtgtaggctttctttaccttgcagggtaatacagacctttgccaacatgtaggattgatccggctctcctgtttgccatctcaggagaggctgcacgggtcaatctcagggaactaaaaaatcaaaccccagagaaacctccagcaggggatccagctccctctagccctgctcccctggatccaccttggcctccctatccagtttctctctttagcttgcctcctcctagaaatcctcaccctagacaaggcccagtaccacttatgcccctccaacagatgcctggtgaatttggccccagtaaaatccaggtccccttctctctacaggaattaaggcaaattaaggc

SEQ ID NO: 950401 - DNA, 575 bp, Homo sapiens
gcttctgcacagaaaaaaaaactaccgacagagcgaactgacaacttacagaatgagagaacgtatttgcaaaccatgcatccaacaaagggctaatatccataaactacaaggaacttgaaaaatgttcaacatcactaatcatcagagaaatgcaaatcaaaaccaaaatgagataccacctcataccagtcagaatggctattattaaaaagtcaaaaaataacagatgttggtgaggcggtggagaaaaggcaacaccgttggtgggaatgtaaattagttcaacccctgtggaaagcagtttggagatttctcaaataactaaaaatagaatgagactaccaatcgattcagcaattccattaccaggtatatactcgaaggaaaataaataattctaccaaaaagacacatgcgctcacatgttcatcgcaacaccaatcacaatagcagacatgaaaccaacctatgtacccattgatggtggaytggataaagaaaatgtagtacatatacaccatggaatactacacagccataaaagaaaaacaaaatgttctttgcagcaatgt

SEQ ID NO: 950402 - DNA, 650 bp, Homo sapiens
ccactgcgcctggcctccaaaaccttttcattcaaatcccagtggccaaccargtctaccccaacctcatcattcccaagagaggctgtccctgagataagctttctgagatgtgaccttattttctctctaccttattctctctctatgttctcattcttgtcttgaagaatattcctttgtgggccaaacctagacctaataatcaagaatataaaaggcagaccagggcgcggtggttcacgcctgtaatcccagcactttgggaggccgaggcgggtagatcacctgaggttgggagttcaagaccagcctgaccaatatgaagaaaccctgtctctactaaaaatacaaaattagccaggtgtggtggtgggcgcctgtaatcccagctacttgggaggctgaggcaggagagtagcttgaatgcttgaaccagggaggcagaggttgtggtgagctgagatcgtgccattgcactccagcctgagcaacaagagtgaaaccctgtctcaaaaaaataaaaataaaaataaaaataaaaggcagatcaacccagtagtctccaaccttgggaggcttcaaaaggagagaaatctgtttctcattggcacccgggcacttccttttgcagtgagcaaaaggaactg

SEQ ID NO: 950403 - DNA, 636 bp, Homo sapiens
tatttagatatataaacaacttatatgtggacaatttatataaataattacataaaggtataatttgaaacaatttatatgcccacaaaaaagataaatatttcttcagtrtgataatattcaattttaaaaatcatgtttaaactagtttatcataagcgaaaaagctaagaacgtaatttcagtggaaaaagaacaaggtgcaaatatctttagttatatctatatctgtatctgtatctatatctaaatctgtatctatatttttctctgtagctctttatctatatttctatctatatctttatctatttctatgtctttatcatcacactggaaaagattagataccatcccataaagaggataatactagttttgcgggcatggattattttgtgctgttgttataaaagttgtacttggattgtgtaggggtttaggaagttggggaagaataaagaaaaaaaaaaggacacaatttggcaataactggaaagcatcctattcattcacaggtcctgttttggaagttcttgcatccatcaaacccaattcccaggaaagggtatgaagtccatgtgtgtaaggaaggatagaatacagtaacaaacaatcccaaaatatcagtgactt

SEQ ID NO: 950404 - DNA, 575 bp, Homo sapiens
ctgagcctcaattttattttcccttaaatggaagcagaggttgcatttaaaaataggacttgtctcttcttactgaggtgcagatgaatgagacagtatgtattaagtacttttgctggcttgggacatactaattagttaatactaatgtcactccttctccaacctcacttcgagccactgttcccttcattccatgctcttcagcctcactaactgtcccaattcctcttaaggttctaggctgtttcctgaacgagtcttcaggtccatggtttcttctcagtctgaagtttctcttcctgtcctttgcaagggctacatatcaaggttctttgatcataagaaaaggaaacaaacttcagttaattttactaagaataaattgaccaacaggatgacagtttacaaaaatgaaaagagctgaagagctgggtcatagaaaaaaggagaatcaggactgctgttctagtgtctattgctgggtaaccaactgcccccaracttgatggtgtaaaagaacaacaatcatttatttcatttatgactcttcaatgtgggcagggatcagaggg

SEQ ID NO: 950405 - DNA, 592 bp, Homo sapiens
tatgaacattggtgtataagtatctgtttgaatagctgttctcgttttttttaggtatgtacttcaaagtggaattgcagattatatggtaattctatrttgaactttttgaggaatcacaaaagttaatttgttattaactttatggatgtgttcaagcaaataaggaagccattaggcccatgcggtgcctcacacctgtaatccaagcactttgggaggccgaggagggatcacttggggttagaagttcaagaccagcctggccaacatggtgaaacacatctctactaaaacttcaaaaattagctgggtgtggtggcccgtgcctgtaatcccagctactcggaggactgaggcaggagaatcgcttgaacccaggttgcatgagccgaggtcgcaccactgcactccagcctgggtgacagagcaagactgagtctcaaaaaaaaaaaaacaagaaggaggccattagcctgaggttgtctctgcacctagagctcttatataagcaaactgaaactgaagtggaagcagttcttgtaattaacttaaaaaaaaacaaaacccaccagcttctgccaatcacaaa

SEQ ID NO: 950406 - DNA, 474 bp, Homo sapiens
catgggggcttgagagttggccagcagctgcaactaaactgccaatgccacacatatatctaggagccagagaacccaccttcccatccagcctactgctgcaactgctagcacctcagtaagctacttaaaggcccaaggactggcccactagaaactgctaccatgagtgcccttaccaccactattaccctcacaaatgtgccatttagaagcccaagggcctgtccactccactcctactaccactggtccttgatgaccagcttgtctggcatacctagtctcaagcaaagcctcacacagtctccactaccaactacagcccaggccactgagggtctcasggacaccattgattctgattacaaccaaaaagtttacagaaagactacattgttatgccccaccagaataaaagacaaagcaccctacgcaaccaacactgtaggtacttatacaggaaagtttttc

SEQ ID NO: 950407 - DNA, 647 bp, Homo sapiens
gccagcatgaccagaataaaagcaggcagaagaacatggcaaaactagactggtttagtcttctggcctacatcttcctctcatgctggatgcttcctgccctcaaacatcagactccaagttcttcagcttcaggactcggactggcttctttgcttctcagcttgcggacagcctattgtgggacctcaccttgtgatcatgtgagtcaatactccttaataaactcccctttatgtatacatctatcctattactttggtccctgtagagaactctgactaatacaactactgttaaacagaagccttaccaataacatagtcaattaacacatatcttgtatgctgtatgtgttatatactgttttcttacaataaagtaagctagagaaaagaaaatgtgaaggaaagcataatgaagagaaaatatatttgttattcattaagtggaagtgggtcatcctaagggtcttcattattattttcacatttagtaggctaaggagaagagaaggggttgattttgctctctcagggatggcagaagtggaagaaaatctgcatataaacagaccctccaagttcaaaactttgttcaagggtcaactctgtrtgtgtgtgtgtgtgtgtgtgtgtgtgtgtgtg

SEQ ID NO: 950408 - DNA, 611 bp, Homo sapiens
gctgcagcaagttatccagaatatctagctaagatcactgatgaaggtggctatttaagwctagattttcagtgcagacaaaatgtagcttagggtccctgggtttttgggtatccactgtgaaaaagcactcacttgtaagtgttataccttgagcttttgttatttcaaaaaaacttccaggaagaagcttagccccagaaaaaccagttggatctagagatgcgtcagttgcagatgaactttggcaaactcccttcaatgcatactaaaatccctgcccagagagaagcttagcccccattttctatacacgcagcatatatagaagcatcatcagggactgctcgggtgctgcctttactccacctcaacatacaatgactcagttaaccagcccaataaaagcttgttttcaccattgttcaggaaggttttgctttgggaactatcctcagcattcttcttattacaagtaataaaatctccttgctgaatcctcgattatggtaaatggactgtcatccaccaagcaatcaaacccacccattgtgtgggtaacaaacagccttcttttggaagaagaggccatctaggactttccgagctag

SEQ ID NO: 950409 - DNA, 563 bp, Homo sapiens
aactattcctaaattcccctccagctccttgttttacgtattttgaagctatattattaggcaaataaaccctgataattgttatgtccttttgatgaagtgactccactatcattatgaaatgacttcctttatcattaggaatattctttgctgtgaaatctactgccagttggtgcaacgattccagctttcttttgactcatgttagcatggtatatcttttcaacttttactttgaacctatttgtaccttatatttaaactgcattttttgtagggagtgtatagttgggtcttgctttttccccctctgccttttaattggactacttaaaccatttaagccattaacatttaatgtgattgttgatatggttaaatttaactctatcatcttactacatagtttccatttttactatctgctctttgttttctttttgccccttttttacttcttttaaattgggtcaatgttatatttttagctataactccttgttttagctataactccttgttgtgttattgtaatcrttgcattagtggttacagtgaat

SEQ ID NO: 950410 - DNA, 551 bp, Homo sapiens
tctggatcagctgcaccctccaatctctgtgactatggtcacattgtctctttatcttctgtctgtcttctcttctttgtgtcttttataaggatacttgtagttgaacttaagatccattcagatgatccakgatgatctctgtatcttatgattcttaactaattaaatacatatattttttagatggagtctcgctctgtcgcccaggctgaagtgcagtggcacaatcttgactcactgcaacctccacctcccgggttcaagcaattctcctgtctcagcctcccaagtagctgggattacaggtgcatgtcacgttgtcaccaggccaatttttgtattttttgtagggaccggtgtttcaccatgttggccaggcgggtctcaaacttttgacctcaggtgatccacccaccttggcctcccaaagtgctgggattacaggcataagccactgctcctggcacctaattatatttgcaaagactcttttcccaagtaaggtaacattcatagggttccaggggatcaagacaaggacatatctt

SEQ ID NO: 950411 - DNA, 586 bp, Homo sapiens
ctgccctgcctgacttgttctgtacctgtgcattcttaagccactcgactttgccaagatcatttaaaaatagcatttttggtgttttcttgmaatagggagggcatttaactttttgtgggggtgcaaaaattcactttttgtgggagtcaaggcaaaaatattctccacccttgggtggttcatttctcttctcagaaacacaaacatccattgtaaccttttccttactcctatagttcaggttgtttctgcttaatcacttaatgtttaatttccagtactgctgcagaaaacgaaaaaatgcaagaaaaataagagataaaaaatcactcccctaagaaaacacccgtcacatttcagtgggttgtcttctggtcgttaaaattttattcccctttcttaatacaaagtagacagcatactctttccacaggttctttactgcttctttttgctggacactataacaagcattcctccatgatttctgagatctttttgtagatataggtaaaatgacctttcgtgggttttctcttatttcaaatatgaaacatattatttattaacattagaaaagctc

SEQ ID NO: 950412 - DNA, 604 bp, Homo sapiens
tgcagcagatccccagcatggctgtcccatccctgtttaacacaccagccagatccacatctttctgtttcggattccactctgttaatctgatccttattcttctccgcttcctaccttgatagtttggtgttggttctcctgctgtctgccatacagccattgtcggagggccttgaatgaattttatttcatttcctgtatttgttcctattggccattactactttattctatggtcactaacatttgaatgacattttcacttatgtcatgtcttttaattttctcaaaaatgctataaagtaagcagagcagatattatttttaaccttttttattttttattgtttttgagacagagtctcactctgtcacccaggctggagtgcaatggcgctgtcgtggctcactgcaaactccacctcccaggttcaagcgattcccctgtctcagcctcctgagttgctgggatcacaggcgcacgtcaccacgcccgactagttttytgtattttagtagagatggggtttcaccgtgttgcctaggctggtcttgaactcctgagctcaggcaatccacccacctcggcctcccaaagtgc

SEQ ID NO: 950413 - DNA, 594 bp, Homo sapiens
attatgaaaggaaatatctcatataaaaactagatagaataattctgagaatcaattttgtgatgtgtgtgtaaaactcacagagtttaacatttcttttgtaagagctgttttgaaacactctgtaaagtaaacctgtggatatttggacctctttgaggtcttctttggaaacgggatttcttcttataaaactggacagaagaattctgagaaaattctttgtgatgtgtgcattcaactcactgagttgaaccatcctttcgatagggcagttttgaaacacactttttgcataatttccaagggcatatttagagtgctttgaagcctattgtaaaaaaaggaatatcttcatataaaaagtagacaaaatcattctcagaaacaactttgtgttgtgtgtgttctactcacagagtttaacatttcttttgatagagcagttttgaaacactccttttgtagaatttgcaagtggatttataaagcactttgaggcctatgttagaaaagtaaacaktttcataaaaaaccagacagattcattctcagaaactactttgggatgttttcgttcaactcacagtgttc

SEQ ID NO: 950414 - DNA, 536 bp, Homo sapiens
tgtggtgaaagataaaaagtatctgcgttaaggcaatggtagagagaaagtggaagtggatatctggggaagatctcaaggtcaattatggatgtgttaccttggaaatgtgtggggacacgtgcatgacgtctgtcagctattgcgtctataaatctgaaatgctctgaagaaaggtcaggctgagttctagtcttaagaggcatcagtaagcagatgtggactggaaatatgcaagtggatgagaacatcggattgagtgagtgtgtgggcaaggtgaggagggcagaaggccaagggcagtgtctggaggaccacagtaattaaagtgtaagagggccaggcgcggtggctcacaactgtaaccccagcactttgggaggctgaggtgggtggatcacctgaggtcaggagttcgagacagcctgaccaacgtggtgaaaccctggctctaccaaaaatatgaaaattagctgggtgtggtggtgtgcacctgtaatctcagctactygggaagctgaggcaggagaatcact

SEQ ID NO: 950415 - DNA, 631 bp, Homo sapiens
catgaggaaatgaatgtctcaacctttcacaatgtttgtttccttatctgtaaaaaggagaaccataacatcttcctcccctagtggttgtaggaattatccatgagcacagcatcagggagcatgaattacatggtagggaagcagaactccatacatggtggaatgtgccccaaatctgttgaaaattcctgtggacccaaggaaggaaatactctttaagaatttcaaaacatgaaagaacctacacaagagtacatgaaatcagctatacaaattgaaattttcgagtcatgatttacctggtaatcatcaaaatagctaaaaaatttctcacattagaaagtaaatattatggcggggcgtggtggctcaagcggtggcagcactttgggaagccgaggtgggcggatcatgaagtcaggagatcgagaccattctggctaacacagtgaaaccccgtctctactaaaaatacacacacaaaaaaaattagccrggcgtggtggtgggtgcctgtagtcccagctacacgggaggctgaggcaggagaatggtgtgagcccgggaggcggagtttgcagtgagccgagatcacaccactgcactcaagcctgggtgacagagcgag

SEQ ID NO: 950416 - DNA, 457 bp, Homo sapiens
cagctacttgggaggatcaggcaggaggatttcttgagcctgggaggttgaggctgcagtgagccgagattgctccactgcacttcagcccgggcaatagagtgagatcctatctcaaagaaaaaaaragttattgtgttatatcttttttaatccattttcttttaaccctttatatccttatatttaaactagagtttctgtcaagtgcacgtagttagatctttttaaaaaattcattctgtttattaattgggtaatttagaccattaacatttaatgttgttattgtcatggttggatttaaatctaccatcttgcatttgttttctatttgtcccatttgttttttgcttattacttgcctcttaaaaattaatttaatttttttataattacattttatttcttctttgaggtataagctagaactacttgtttgttgtcatagcattgc

SEQ ID NO: 950417 - DNA, 590 bp, Homo sapiens
atgtgtataatatatatatagagagtgtgtgtgtatatatatagatacatacatatcacacatgcatttaaaaaggacaaaaatagccattggaatcttgcataagaataacaggtcrggctgggcgtggtggatcactcctgtaatcccagcaatttgggaggctgaggtgggcaggtcacctgaggtcaggaggttgagactagcctgaccaatatggagaaaccccatctctactaaaaatacaaaattagtcaggtgtggtggcacatgcctgtaatcccagctactcaggaggctgaggcaggagaatcatttgaacccgggtggtggaggttgcagtgagctgagatcgcaccattgcactccagcctggggaacagagccagaatctatctcaaaaaaacaaaaacaaaaaacaacaacaaaacaaaacaaaaaaagaataacagggcaggcatggtgtctcacgcctataatcccagtactttgagaggctgaggcaagtgtatcgcttgaggtcaggagttagaccaccctggccaacatggtgaaaccttgactctactaaaaaaatacaaaaaattagc

SEQ ID NO: 950418 - DNA, 607 bp, Homo sapiens
cctttcacataaaagggcatattaaaaggtgtatccccttcccatagatggagagtaggcttagtgacttgcttgaataatagatcttggtgaaaatgatgtctgggacttcccaggtcaagtcatgagatgctttaaaacttctgctttgttggcaagctcttggaagacttgctcatggattctagctcaggccaggtgcagtggctcacatctgtaatcagcactttgggaggccgaggtgggcagatcacctgaagtcaggagtctgagaccagcctggtcaacatgacaaaaccccatctccactaaaaaaaaaaaaaaaaaaggattcttgctcttgaaattcaaacaccatgcttgcagaagaagcccaagtcacatatagagagcatgtgtacttttcatacttaagtgcctaactaaacatccaaacagcagccaacatcaactaggtcagttttcaggtaattccagtaccagcatcatttgacaaacaccacatgaaatatccsaagcaagaaatgctacattgaggccagtcaacccagagaacctcagaatataatgagatgttgttttaagccactaaattttgatgttgtta

SEQ ID NO: 950419 - DNA, 792 bp, Homo sapiens
gccaaaataagctttaaaggacagcatgataattaagaattgctatttatcttacttttattagaaaactcaatgctggaatgaatgcaataatgtcaagaaatatgaatttaaataatttcctaaatattttactttctaatcccaaatatcaggatattttaaacttcctcatcaattctactttatatacaaaaattcatacagtattaattagaacttttgctttcaacacagatatcttaaagacaaggaattatgtatttataacttcttaataaaactatgggtacattcttatttttgattgtggcagttttttcataaaaaggctactgaaatcaggcttatttaaaaaatactaataatgttatctaatatagaacagagggtaggaagtctctgtaaacaaacctatatctatatcaagagtgattctaagagaatattctctcccttacccaggtactcaagttgtagggtaacataactagtgtaacgtaactagtgatttccagtcaccttttaggtttacttaggaacattaaaagaaatgctgccattgtagacttcatttcaattatttaatctctttccagttcacgacctttactttcttctggtttcagcaagaaaaacaacttcataagtgtcttacattataatcggctrctaatcatcatcaactcaacattagttttaaacagtctgattccataacaaatttgtaatagggatattttctatacattttataatagccatggatagaaaaatagtattatttatata

SEQ ID NO: 950420 - DNA, 611 bp, Homo sapiens
tcctgggttttttaacttgcattatttcttcctgataatgacatttaggccagtcaaatcctgtattaccrttttaaacaaagaaaaaaagattatgagttgcttttaaaattcacgtgtgacaagcagaaaaaactcgtggaggcagtttcaacatttaacctaagtgtacttagcaactacacttaatagctttttaaaaagcctcgtttttaaaaaaagtggatctttctttgcagagtgacttaaaatacatcatcatagtcttattaattaaacatgttcttatcagaaaaaagcgtctcgaaagctagtatatatgcttaattaagctgtatgcaaccatcagtccatatcttgaattaggctacatgtgaggccctgatttgccccattctttctgctacccagaacagcactgctcactgcctaccagtgtttccagcaaagatataaagttctacatgtctaaacgtttttgccctgatatcaaaagcaaagcaaaacaggtcttctccattcccattttggttaacagcatcaccatctgcccactggcctgatccacccagaagcctgtcttcttttttgaacttgaaatactcatgtgc

SEQ ID NO: 950421 - DNA, 611 bp, Homo sapiens
tcctgggttttttaacttgcattatttcttcctgataatgacatttaggccagtcaaatcctgtattaccgttttaaacaaagaaaaaaagattatgagttgcttttaaaattcaygtgtgacaagcagaaaaaactcgtggaggcagtttcaacatttaacctaagtgtacttagcaactacacttaatagctttttaaaaagcctcgtttttaaaaaaagtggatctttctttgcagagtgacttaaaatacatcatcatagtcttattaattaaacatgttcttatcagaaaaaagcgtctcgaaagctagtatatatgcttaattaagctgtatgcaaccatcagtccatatcttgaattaggctacatgtgaggccctgatttgccccattctttctgctacccagaacagcactgctcactgcctaccagtgtttccagcaaagatataaagttctacatgtctaaacgtttttgccctgatatcaaaagcaaagcaaaacaggtcttctccattcccattttggttaacagcatcaccatctgcccactggcctgatccacccagaagcctgtcttcttttttgaacttgaaatactcatgtgc

SEQ ID NO: 950422 - DNA, 588 bp, Homo sapiens
ctttgaaaccaataagaacaaagacccaatgtgccagaatctctgggacatagctaaagcagtgtttagagggaaatttatagcactaactgcccacaggagaaagggggaaggatccaaaaygacaccctaacatcacaattaagagaactagagaagcaagagcaaacacattcaaaagctagcagaagacaagaaataactaagatctgggcagaactgaaggagatagagacagaaaaaaaccctccaaaaaatcaatcaatccaggagctggttttttttaaaagattaacaaagtagacctctagccaaactaatatagaagaaaaaataatcaaatagacaccataagaagtgataaaagggttatcatcgctgatcccacagaaatataaactaccatcagagaagatgataaacacctctacacaaataaactagaaaatctagaaattcctggacacatacatcctcccaagactaaaccaggaagaagccgaatccctgaatagaccaataacaagttctgaaattgaggcagtaattaatagcctacaaaccaaaaaaaagcccaggaccggatgg

SEQ ID NO: 950423 - DNA, 576 bp, Homo sapiens
ttctcctgtatgtattcaatttctcatccccactgttaagttaactcttccctggcacagatgccctcatctctctgctagggttctgataattctttatcccaggtatgtagatgaaaatggaaattaagtgatttgtccatggtcacgtgataggctattaaaggaattacagtccctgtcctttggcctgttttttgtttgtttgtttgtttttgagatggagtctcactctgtcgcccaggctggagtgcagtggtgcgatctcgggtcaccgcaacctccacctcccgggttcaagtgattctcctgcctcagcctcccaagttgctgggattataggcgagcaccaccacgcccggccaatttttgtatttttagtagagatgaggtttcaccatgttggccgggctgttcttgagctcctgacttcaggtgatccacccacctcggccttccaaagtgctgggattacaggcgtgagccactgcatccagcttctttgkcatgtgttaatgataacttaatataattggtgatcaaaacatgaactttaaagttgcttaggtctaggtt

SEQ ID NO: 950424 - DNA, 702 bp, Homo sapiens; identical to SEQ ID NO: 948851

SEQ ID NO: 950425 - DNA, 775 bp, Homo sapiens
tatttactatttcaatataccatgtatattcatgattttattttacagttgacccttgaacaacatgggtttgaactacgcgggtccacttataggtggattattttcaataatttgaaaaaaaaattcaaaaaattatttctaataattgaaataattttttcaatgtgttagaaaaatttttggacatctgtgacaatttgaaaaaacagatgacccaagtagcctagaaatactgaaaaatttaagaaaaacttaggtatatcatgaatgcagaacatatatgtagatactaggctgttttatcatttactgtaaaatatacacaagtctattataaaaatgtaaaatttattaaaacatacatacaaacatagactacatggcaccgtttgtagttgagagaaatataaacaacaaagatgcagtattaaatcgtaactgcataaaactaactgtagtacatactgtattgtagtaattttgtagccacctcctgctgctattgccatgagctcaagtgttgtgcatagccacttaaaatgtcatgtgatgctaatcatctctgcaggagcagtcaatctctccagaaaattgtgtatcacagtaaaaagtgatcttttgaggttctcatgtatttttcattgtgtttagtgcaatacttccattgtgttcagygcaataccttgcgtcacaccatgggacccatgcaatgctggaagtgctcccaagaagcagagaaaagtcatgacattagaagaaaaagttgaattgc

SEQ ID NO: 950426 - DNA, 451 bp, Homo sapiens
agaaacacgctaacagagtgtgattttagtatgttgccaatcacagaagagcatatgtgagacctttaccaagtgtcttttttgtggacctcccctttctcctcagtcacatgtccttcctacggcacacgtgtcctaacccacgtgcacccccggtacttgtcagaatttgactctctcctagccacacagggtgatcctgctattagcagctttttctgggtgatttcactgcttatcaactctctgaccgaacctgtgccccagtttcttcatctacaaactgggaataatagtagcacctgccaccactttgacagcctggttgttacaggctcctagtrtatgggttctcttaaagaaatttgtggccagacgtggtggctcacgcctgtaatcccagcactttgggaggctgaggcaggcacatcacgaggtcaggagatcaaga

SEQ ID NO: 950427 - DNA, 451 bp, Homo sapiens
agaaacacgctaacagagtgtgattttagtatgttgccaatcacagaagagcatatgtgagacctttaccaagtgtcttttttgtggacctcccctttctcctcagtcacatgtccttcctacggcacacgtgtcctaacccacgtgcacccccggtacttgtcagaatttgactctctcctagccacacagggtgatcctgctattagcagctttttctgggtgatttcactgcttatcaactctctgaccgaacctgtgccccagtttcttcatctacaaactgggaataatagtagcacctgccaccactttgacagcctggttgttacaggctcctagtgtatgggttctcttaaagaaatttgtggccagacgtggtggctcaygcctgtaatcccagcactttgggaggctgaggcaggcacatcacgaggtcaggagatcaaga

SEQ ID NO: 950428 - DNA, 597 bp, Homo sapiens
cagtctgatccatagattgcacagtgatctgagttacctgctcagccctgccggggggcagggcagttcagggagcaagatgggcagggccagattgagcaggcccrcatagaggtcccctaatgccagacacaagccccagcaccaaggcagaatctagcaggtggccatcaagcacctggtagtgtgcctagccacagagttgaggaatctcttggcctcaagttctctgcatggggaatggaggcaacctagactcctaactcaggggagggagtgctccagatgcctggagatctgtctgtgtgtggagtgtagagggccctgatgcaccacaatctccacacatggagggtgaggttattcagtctgcaaatccatgcaaatgtgtgctttgaattatttttatacaggtaaatacacctgaacttggggcagggaaggcggcactttaccacagtatgcaaaggaaggatgggccagctcaggctgctgattcaagcaagtggtcacactaaatgcctagagatctgcctggacatggagcagagaggatgctgcttcattataatgtctgtgcgggaaggatgggttagc

SEQ ID NO: 950429 - DNA, 571 bp, Homo sapiens
gaaagaaagttacatactgtgggatttcatttatacgatattttggaaaaggtgaaattgaagggatagcaatagaatcattgtttttaaagactggggagggtgggttttttggaacgactgacatgatgggaatactgtgtgctgattgtggtggtataataccccgtctacctttgtcaatattcattgaattgtacctttacaaatttggttattgtgatgtatgtaaattaaaccttcaatgatctgattttaaacattacagtgaagtcaggagtggtggtatgcacctgtagttccagctactcaggaggctgaggtggaaggatctcttgagcctggaaattcgaggctgtagcatgggtgtccaaccttttgactaccctgggccacattggaagaagaagaattgtcttgagccacacataaaatacactaacactaacgatagctgatgagttgtttttttttwaaaaaaaggtccatgcataatttttgtgatatctgtcatgccaccacagatatcaaagaagtcctcacattcaaaggattttacacctatgcatgt

SEQ ID NO: 950430 - DNA, 563 bp, Homo sapiens
agcgatttcatctactcaggagccctgggctggcctgcagagcttcagtactatctcagtggtgatcacggtcacacaagtcacctcattcaacagaagaaaacagtctgcccagcaaaaccatgcctgcatgacaaacagccaggcctcccatcaatgggaatcatgttcacgacggaatcctgcttgcatgactggctgaacatggatcaaaacaaactggcttccaggacactggcaggttccaggatgcaaaacgacattcactatgagtggggcatataaaagtaggtcagagaaaaagaacaaaatttatactatgttgccatcaaataaattctaaaatatcaccaatggaaaaaaatcctccttaaagaaatgtcaccccaaactgcccctaagcatctgtttttaatctcttcatgtgactcctcatccctgggtcttcctagtgaccaaaacacaggcccccaattttkttttctctcttaagcttttagttttccgtgtcacttttctaagttgtgggatgtgcttcccatggaccctcttgacggctggca

SEQ ID NO: 950431 - DNA, 688 bp, Homo sapiens
  misc_feature 34: n = A,T,C or G
taacctcacaagcacatcgtctgctcattcctgngcacaggccaagcyaactatgggaggaatttagtgtatagtttaattttaaaacaaaaatgaggctgggtgcggtggctgacacctgtaatcccagcactttgggaggccgaggcaggcagatcatgaggtcaggagattgagaccaccctggctaacacggtgaaaccccatctctgctaaaaatacaaaaaattagctgggcatggtgacgggcacctgtagtcccagctactcaggaggctgaggcaggagaatggcatgaacccgggagacagagcttgcagtgagccgagatcgtgccactgcactccagcctgggcgacagagcaagactccgtctcaaacaacaacaacaacaacaacaaatgatgatagcctcttcctgaaactaaccccctttttgcaaggggaccaaaactgcctttataaaactttataaaactaacaaattgtccataagtttagaattatggcttagaagttatgaagccaaaggtcacaagatttgtaacctccccaattgctcctatagataacaccactattgtaaaacctaagaccggtatttgagatatttttcagaccttgcattctgaggaaccagatgttaccacccagaccagtaacctaagtcaggaaactgactcaacca

SEQ ID NO: 950432 - DNA, 617 bp, Homo sapiens
ccctgctggggacccttggaaaggagggcagctatgtctctttccggatttcagtgcatgatttctgaaaaaggctcaaatacttaaatgattgggctgatctttactagatattaattcagatcacatcacctctctgtttaaaaccctccaatgggctgggtgtggtggctcatgcctgtaatctcagctctttaggaggccgaggcgggcagatcacttgaggtcaggagtttcagaccagcctgatcaacatgctgaaaccccatctctactaaaaatacaaaaattagccaggcgtggtggcgggcgcctgtaatcccagctactcaggaggctgaggcatgagaatctcctgaacctgggaggtggaggttgcagtgagccgagatcacaccactgcactccagcctgggcaataggttgagactcagtctcagaaaaaataaaacaaaaccttccaatggctgcccgtttcactcagggtgarggtcaaagtcatttcaatgctcacaaggtccccatcgtgtctctgactgcatcgcctcccagtctccctctcggatattcctggccaccttactgctcattgtacccaccaggtgtgttccttcctg

SEQ ID NO: 950433 - DNA, 617 bp, Homo sapiens
ccctgctggggacccttggaaaggagggcagctatgtctctttccggatttcagtgcatgatttctgaaaaaggctcaaatacttaaatgattgggctgatctttactagatattaattcagatcacatcacctctctgtttaaaaccctccaatgggctgggtgtggtggctcatgcctgtaatctcagctctttaggaggccgaggcgggcagatcacttgaggtcaggagtttcagaccagcctgatcaacatgctgaaaccccatctctactaaaaatacaaaaattagccaggcgtggtggcgggcgcctgtaatcccagctactcaggaggctgaggcatgagaatctcctgaacctgggaggtggaggttgcagtgagccgagatcacaccactgcactccagcctgggcaataggttgagactcagtctcagaaaaaataaaacaaaaccttccaatggctgcccgtttcactcagggtgagggtcaaagtcatttcaatgctcacaaggtccccatcgtgtctctgactgcatcgcctcccagtctccctctcggatattcctggccaccttactgctcrttgtacccaccaggtgtgttccttcctg

SEQ ID NO: 950434 - DNA, 566 bp, Homo sapiens
caccaaagaaagtatacagatggcaagtaagtacataaaatattttcaacatcactaatcattagagagatacaaattaaagccacaatgagatacctgtacatttctacctcaatggctaattgaaaaagttgaccatgataagtgttttcaaaaatgtaaaagaactggaattctcataccacgttgataggaatgtaaactggtacaactgcttggaagacgatttctcaatttcttaaaaatttaaacatatgtctcccatatgacttagccattatactgctaggtttttacccaatgtaaataaaagtatgttcatgcaaaaacatgtagatgaatgtttatagcagttttatttgttgtagtttcaactggtacccaaaagcccatcaacagtgaatggataaacaaattgtggtatattcattaatcaggatgttactcagcarcaaacctgaataaactattgacacatacaataacatggatagattaaaaagtaattatattgagggtaaaaagtcaggccccaaacaactacatacttaataattccattcata

SEQ ID NO: 950435 - DNA, 566 bp, Homo sapiens
caccaaagaaagtatacagatggcaagtaagtacataaaatattttcaacatcactaatcattagagagatacaaattaaagccacaatgagatacctgtacatttctacctcaatggctaattgaaaaagttgaccatgataagtgttttcaaaaatgtaaaagaactggaattctcataccacgttgataggaatgtaaactggtacaactgcttggaagacgatttctcaatttcttaaaaatttaaacatatgtctcccatatgacttagccattatactgctaggtttttacccaatgtaaataaaagtatgttcatgcaaaaacatgtagatgaatgtttatagcagttttatttgttgtagtttcaactggtacccaaaagcccatcaacagtgaatggataaacaaattgtggtatattcattaatcaggatgttactcagcaacaaacctgaataaactattgacacatacaataacatggatrgattaaaaagtaattatattgagggtaaaaagtcaggccccaaacaactacatacttaataattccattcata

SEQ ID NO: 950436 - DNA, 669 bp, Homo sapiens
agaggaaggaggaggcccttccccacagtgacctgctcgccattcacgtgcagcgacaggcccacctctcagaggaggatgctgaggcacaggcaggagcagtgtagagagacactgggaagaggcaccaatcacagctctgagctgtcctctggacctccaggggtgggggaaggagacccgttggtgatgaagacagctcagcgggttgtggcagaggctcttcccaggactgggagacgacagtgactcaatgctgttcacttctagactgtgccttctgaaagtggcccttcagttaccctcacagttaccccacacctgtctgggatggccaggtaggccgagacaagcagagactcagggcgagggcactagggcgtgtgggcagggacagaggccaacggggcaggtgaggggaaattttcatctacttgctggatctgcccctttcctgggctctactttactctttaccctctgcctctggctccctgcctggctcctcctcacgttcttgcctcctcactccagaagtcccaggggctcagcccaccaccatttgtccccaggttgtagctgccccttccatgtccatcccatgaggaccytcatctgcatgagcacacctctggtctcctctgaaatcagaagccctatctccctgac

SEQ ID NO: 950437 - DNA, 598 bp, Homo sapiens
tcaagtgccattcaaaacttcatgtatcagtaataactttaaatgtaaatggattaaattatccacttaatatgtataaagtrgctgaatggataaagaaaaaatatccaattatatgctgcctacaagaaatatactttatctgccaagacacatataaacttaaagtaaagaaatggaaaaaaatattacacaaaatgaaaaccaaaagcaagcaggagtagctatacttatatcagataaaacaaactttgagtcaaaaacagtaaacaaacaaacaaaaccaaagaaagtcactatacagtgataaagggagcaatccagcaaaatgaaataacaattctgaaaacatatgcactcagcactggagcacccagatttgaaaagcaaatattactagatctaaagagagaaaaacattccaataaaacaatagtgggggagttcaacaccctactctcagcatgagatagatcatctagatggaaaaatcaacaaagaagcagtggatttaatctgcgctttaaaccaaatggacctaacagatatttacagaacattttatccaacaactacagaatatacattcttctcatca

SEQ ID NO: 950438 - DNA, 455 bp, Homo sapiens
gtctgtagtcccagctactcaggaggctgaggcgcgagaatcacggtgagctgagatcgtaccactgtactccmgcatgggggacagagcaagaccctgtctcgaaaataaattaacaaatacataaatgaaaatgaagtcttctgccatctgattttacctacatctcttactttctgtccaactatgcccattgaattcacagctcttggtgaataagggtctttgtcctccactccaataagtcagttcagaactttataaatgagttatagaataaaaacattgtaaatcagcaatatgtggattttcaaaaaggctgttgggcccgatttactcagttatacccagatcaatcaagctatgactctaaccttacacagattcatttctctatatttctttcttttatttttttaatcttcaaagcctctacctagtgtttccctcaatct

SEQ ID NO: 950439 - DNA, 637 bp, Homo sapiens
gatgcccttcatttcaagataaacaaatccagcataaggaaagaccaacataacgaaagaaaaggaaacgtatgaagccatccctgtggctacaccagcagatgtgaaaaccttgctcttctggggaaatacctttttctgtaattttgaaaatgcagcttttatgtaggtgtatgattgggtataagaaaggcatacatttagagtctaatattattcaagaaaaagcaaagtcattaaaggatgacttattcaaaaggaaggtgaaggatctaaagctggagaatttagtgttagcaaaggatggtttgataattttacaaagatatttggcttaaaaattgtcaagataatgagaaaaacagcttctgttgcccaagaagcagcagacaagttccaagacaccattaagaaaaccactgaggagaaggaatatttgctgtaacaggtttttaatgtgtgtcaaagtcctctattctgtacagaaaaataccacaaagaacatttattagtaaagaatagaagtgagctctaggatttaaggcaggaaggagtaagctaaccctcctgttttttgacaatacagtcaggtttattatgatcatgmcttttcttatctacacagttgctaatcttc

SEQ ID NO: 950440 - DNA, 596 bp, Homo sapiens
gttgtggaacagagtattccaacccacttgggattggttttaaagctatttaaattcctagaatgttacaactgaaggaagctttcctcctgtgtgatgtagctgatgtttcttaacctctctgtgcttgaatgtccacatcaatatagtgaatattaaacaggttgttgtaaaaaaaaaaaaatatgttacatgtaaagcacttagaaatgtgtgtcttatataataatcaatcaatttagctataatttttattatgatttgtttttattatctatcttttcattattatttatctttcattattattattgattaattgagtgcatactatacacctggctctggttctgaaacagacgatgtttcagatgataccagggatatagcagtaagcagatatgttccttgccttcatgaaagttacagtctaataaaagaaatgggcaagaagataattatgcagataggtactaagttacaacaggaataaatgctaccatgagcatataccaaagtgtaacagacactgtcaagccttgagtggcctrctcatgttctcctggcccacccagaatcagattgtgttgaacttc

SEQ ID NO: 950441 - DNA, 561 bp, Homo sapiens
ctataagccaatgactatatgacagcatttctcaaactttagcatgcctcagagtcactgggagggcttattaatacacagattgctggccaggtgcagtggctcacgcctgtaatcctagcactttgggaggccaaagcaggtggattgcctgaggtcaggagttcgagaccagcctgggcaccatggtaaaaccccgtgtacgctaaaaatacaaaaaattagccggacacggtggtgtgtgcctataatcccagctactcgggaggctgaggcacaagaatcgcttgaatctgggaggtggaggttgcagtgagctgagattgcgccactgcgctccaatctgggcgacagagcgaggctgcgtctcaaaaaaaaaaaaaaaacaacaacacacacacacacacacacacacacacacatacacacacagattgctagrcccaaccccccagagttactgattcagtagatctggggtgggacctgagaatctgcatttctttttttttctccccctcctattgtaagaatttgcctttctaaggtgttactaggtga

SEQ ID NO: 950442 - DNA, 557 bp, Homo sapiens
catcacctagtaacaccttagaaaggcaaattcttacaataggagggggagaaaaaaaaagaaatgcagattctcaggtcccaccccagatctactgaatcagtaactctggggggttgggyctagcaatctgtgtgtgtatgtgtgtgtgtgtgtgtgtgtgtgtgtgtgttgttgtttttttttttttttgagacgcagcctcgctctgtcgcccagattggagcgcagtggcgcaatctcagctcactgcaacctccacctcccagattcaagcgattcttgtgcctcagcctcccgagtagctgggattataggcacacaccaccgtgtccggctaattttttgtatttttagcgtacacggggttttaccatggtgcccaggctggtctcgaactcctgacctcaggcaatccacctgctttggcctcccaaagtgctaggattacaggcgtgagccactgcacctggccagcaatctgtgtattaataagccctcccagtgactctgaggcatgctaaagtttgagaaatgctgtcatatagtcattggct

SEQ ID NO: 950443 - DNA, 640 bp, Homo sapiens
ccctgtggctttgcagagtacaggctccctcctggctgctttcatgggctgatgttgagtgtctgtggtttttccaggcacacagtgcaagttgttggtggatctaccattctggggtctggagaacagtggccctcttctcacagctccactaggtatgccccagtagggactccatgtgagggctcagaccacatatttcccttccgcactgccctggcagaaattctccatgagagccctgcccctgcagcaaacttctgcctggatatctggacatttccattcatcctctgaaacctagacggaggttcccaaacctcaattcttgactactgtgtacccacaggctcaacaccacatggaagctgccaagggttggggctttccccctctgaagtcatggcctgagctgtaccttggccccttttagtcatggctgaagtggcttggatgcaaggcatcaagtccttagactgcacacagtgtgggaaccctgggcccagcccatgattccattctttctttctaggtatctgggcctgtgatgggaggggctgctgggaagacctctgacatgcccrggagacatttttcctattgccttggggattaacattcagctcctcgttatttatgc

SEQ ID NO: 950444 - DNA, 598 bp, Homo sapiens
agctaacccatccttcccgcacagacattataatgaagcagcatcctctctgctccatgtccaggcagatctctaggcatttagtgtgaccacttgcttgaatcagcagcctgagctggcccatccttcctttgcatactgtggtaaagtgccgccttccctgccccaagttcaggtgtatttacctgtataaaaataattcaaagcacacatttgcatggatttgcagactgaataacctcaccctccatgtgtggagattgtggtgcatcagggccctctacactccacacacagacagatctccaggcatctggagcactccctcccctgagttaggagtctaggttgcctccattccccatgcagagaacttgaggccaagagattcctcaactctgtggctaggcacactaccaggtgcttgatggccacctgctagattctgccttggtgctggggcttgtgtctggcattaggggacctctatgygggcctgctcaatctggccctgcccatcttgctccctgaactgccctgccccccggcagggctgagcaggtaactcagatcactgtgcaatctatggatcagactg

SEQ ID NO: 950445 - DNA, 850 bp, Homo sapiens
gaaacaaaagggatgggccatcaaactccaaatggtcatgcaactggaacattggacgatggstaccttttactggggaccctgagataggcctgcctatctgactgctgtttttgcaaaacagcgccccctgtcagcagggggcagttaagatcagtcttcatccctatgctaacagcacttagatgtacctcttcagagaggaaaatgatagagacaggaggcagacaaatgcctaggcagataggggcaggtccccagtgaaacccaacctttaagctgaaaacagtccagggtaaatcatcagaccagattgagaacccaccttcctgtttggcatgctgtcctctgattgatccccatactttgcctattttacatatacctaccctttcctaattggttttctacactgtcatgccaacctttgaatggtgtctttgctttgaccattttttgcatactcacaaaccaatcaccacacactccctattctgaacccataaaaagtcccatgctcagccatattggggaactttcctgtcttcaggcagaagaacagcccccttgcattccctctgtttgctgagagctttcctttcacttagtaaattctactccattcactctttgatgtctgcatgcctaattcttcctggtcatgacacaagaacccagacctagctgagctaaggagcaaaaatcctgcatcactagtatctgatacactcctcaaggaagctgaaaaataatttatttaaataactttccaaatggaagtcatcaggagcatccaggagaactctgcctatggtattcctcagaaggttctctaccatggcttagatgg

SEQ ID NO: 950446 - DNA, 762 bp, Homo sapiens
ttgcatgcaaatgactggcaaaccagttaggaagtccattggtattcgaaaatgataggagcagtccctagcaagacctggaaagcaaatttactgactgaccatcagtgraggtaaatattcagaatcagaaactacctttaaacaaatggcctgttggagggaaggctggaattcatgtgcgggttaggaactgtaaaaggaaaataaatcttggaacctcaaattcactaagccaaagggaaagtcaagctcggaactgggtcatgaaaacttgcctcccattttgtgtcctaaattagatagctacaaagatgaaaagctacatacctctctcacattttgcccacaaagaaattccttgtggaccccaagatcttcgccctaaagcatttctgttaaagttcaccatggcaatgtaaattcatagcttatcttcataggtgcagggacatagggcagaactcaaagtcatcctctgaccacctgagacaaatgcatatctgattgttgcctctgccttattgtctatgtaatcttttgtaaaaatgcagattcactgagccagacaaaggcatgaatgactctattcccctacccctgctctcacatgaaaattgaatatttctcaatatcctgccctttcccctgtgaatactgaagccctcaaaaccatcttcaggaaaggtctcccaggtgtgtgtccttaagtttggcaaataaacctcctaaaatgattgaggcttgcctgggtcatttttc

SEQ ID NO: 950447 - DNA, 493 bp, Homo sapiens
aaactaaacatcctcttatgatacaatccagcaatcacactccttgagatttmcccgaaggaggtgaaaacttatgtttacataaagacctgcacactgatgtttctagcagctttattcacaattgccaaaacttggaagcaaccaagatgtccttcagtagatgaatggttaagtaaactgtggtacacctagagaatggaataatatttggcactaaaaagaaatgagctatcaagccatgaaaagacatagaagaaacttaaatgtgtattactaagtgaaaaagccaatctgggaaaaaagctatatactttattattccaactatatgacattctggaaaaggtagaatgactatgggaagagtaaaaagatccgtggttgccagggatttggggtgatggagagattaatagagcacagaggatttttacggcagtgaaactaatctatatgatactataatgatagatacagatacatgttatta

SEQ ID NO: 950448 - DNA, 493 bp, Homo sapiens
aaactaaacatcctcttatgatacaatccagcaatcacactccttgagatttacccgaaggaggtgaaaacttatgtttacataaagacctgcacactgatgtttctagcagctttattcacaattgccaaaacttggaagcaaccaagatgtccttcagtagatgaatggttaagtaaactgtggtacacctagagaatggaataatatttggcactaaaaagaaatgagctatcaagccatgaaaagacatagaagaaacttaaatgtgtattactaagtgaaaaagccaatctgggaaaaaagctatatactttattattccaactatatgacattctggaaaaggtagaatgactatgggaagagtaaaaagatccgtggttgccagggatttggggtgatggagagattaatagagcacagaggatttttasggcagtgaaactaatctatatgatactataatgatagatacagatacatgttatta

SEQ ID NO: 950449 - DNA, 583 bp, Homo sapiens
caaacagggctctgtgctctgtaagcrcagactcccatcttgcatccccagcccctggcacccaccattctgctctctgtccctgtgaatatgactgccctggggatgtcatgtgagtggaatcagacagcatttgtcctttcctgactggcttacttcacttagcctcatgtcctcaaggttcatccctgctgcggcaatgggcagaacttcctttttaaagctgaacactgttccattgtgcggatggaccacattttgtttgtccattcacccattgatggacactgggttgtttctgccttttggctgttgtgaatagtgctgctgtgaacatgggtgtgcaaatacctctccgagtccctggttccatttctgttgggtgtatactcagaagtgggattgctgggtcagattgtgattggatgctgactgttttgaagagccgccatactgttttccacagcagctgcactgctttaccttccctccaccactgcacaaaggtcctggtttctccacatcttcgccatcactcattactttctgtttttctttaataatagccatcctaatggtgtga

SEQ ID NO: 950450 - DNA, 407 bp, Homo sapiens
tttccagctggcaggtcctgtgactcggttcctccccagggctgagccgagggggccgcctctcccacagctcatcagccattaagagaaattcagaagaggctggggtcctcgtctttttctgagttgtgaggaggggccgcgtccttgtgcttctgcaccaagcacgaatctgccctgcaggagggaatgggcgtgttcctcaaatagaacacgggaagccaggaggaaagagcagagcggccatggccgccctccccagccaggacccgaggcctgagctccagagggaggggctggacmtaaggaggcggtcacaacgccggtgggtcaagcctattagaaagcagcaggtggtcatgaaatgttgttgaaacagaggctaagacagggctagcaattgttct

SEQ ID NO: 950451 - DNA, 670 bp, Homo sapiens
cattatgtggaaggtaatgaggggatcacatggatcaagtagatatttcagagaagacctaggcttgagtgatctggacaggttcctctccacagggcaaagaaacctcatccaaaggaggctatgtggactgagccgcagaaggagtctataagaagtcagccagacagtggcgatgtcagcaagatggcagaatagaaggttcttaccctggttttcttactgaaacaccaatttaacaatatctacgaatgagagcacctttgtaggagttccagaacccaggggttgagcaccccagtagtgcacaaaagcccaggaaaactacattaaaaagcacaatttaaaaatttccattttattcatatctctagtgccaagaaagatgtcctcactctgatttctccagtgggttaaagagagaccaaggtgggtgttcagcttccccagcatttggggcccttcccaagaggcccacttctgtctcacctcaaacagaacaccgaggaagcaagcatggctaggccacctggggacagctaggaacaaagaaagatggtggcatctttcggtggctagggtgcatggatcttggcagtagtccmcagccacagtcattggcctggcctgactgaagcccctctctctggcctcacctgttcaggagcca

SEQ ID NO: 950452 - DNA, 571 bp, Homo sapiens
tcaggttacaaaatcaatgtataaaacttcgcagcatttctttatgacaaaactgttcaaactgagagccaaaataagaactcaattccatatgcaatagctcacaaacgtccaaacaaattacctaggaatacatctaaccaatgaggtgaaagatctctacaaggagaactacaaaaccactgttaaaataaaccacaagagacaaaaacaagtggaaaagtattccttgttcatggattggaagaatcaatactgttaaaatgaccacactgcctaaagccatctatagattcagcactattcctatcaaactaccaatgtcattttttacagaattgggaaaaaactattctaaaattcacatggaaccaaaaaagaacccaagtagccaaactaattcaaaacaaaaaaaccaaagccaaaggcatgacattarttgacttcagactgtactgtaaggctatagtgaccaaaacagcatcgtactggaacaaaaacagacaaaaagaccaatagaacagaatagagaacccaggaataaggctgcacaactatagccatgtaatct

SEQ ID NO: 950453 - DNA, 634 bp, Homo sapiens
aaagtgaaagataatttgctgcatttggcccctcttacaactaagaaagaggtagaacccctagtgggcctatttggattttggaggcaacacttttctcatataggtgtgttactccagcccatttactgagtgacctgaaaggctgccagttttgagtggggtccagaacagaagaaggctctgcaacagttccaggctactgtgcaagatattctgccacttgggccatatgactcagcagatccaatggtgcttgaggtgtcagtggcggatagggatgcagtttggagcctttggcaggctcccataagtgaatcacagcagaaggctctaggattttggagcaaggccctgccatcttctgcagataactactttccttttgagagacagcttttggcctgttactgggctttggtggaaaccgaacatttgactatgggtcatcaagttgccaagtgacctgaattgcctatcattaactggttgctttctgacccacctagccataaagtaggttgtgcatagcagcatcccgtcatcaaatggaagtagtatatacttgatcaggcttgagcaggtcctgaaggcaaaggtaagttayataaggaagtggctcaaatgcccatgg

SEQ ID NO: 950454 - DNA, 549 bp, Homo sapiens
cagactccataagcatgacagataaatttgtattgtttatgccacccagcctgtggtatttcattaaagcagacagagaagactaatacatcaatgactgaaagatctgctagttttaaataaagtccagcaaaagaaaaggctctacaataggtacaggctgctctgcaaactactttgctactagggccatatgatctagcagatttgttagtgcttaaagtgttagtggccgacagaaatgtcatttagtgccttcggttagcttgtataggtaagataacacagatccttagaattttggatcaaagctatgccatagtctgcatatgactgcacacatttttagaaaaccagtgtttggcttgctatgaggcccttataaagactaagcacgtaaccataggcaatcaagttaccattggamctgagctgcccatcaaaacatcataaactgggtgttgtctgaccgcaagtttgggcatgcacctatatgacattgggctatatgcagaagaggcctacatgacactgggcgtcagcagactc

SEQ ID NO: 950455 - DNA, 562 bp, Homo sapiens
ctggtctgtgacttttttgattggtaggcttttttttttattattactgattcagttttggaactcaatattggtgtgtttagcatttcactttcttgctgcttcagactcagaacattatatgtttctaggattttatgcagttcctctagagtttcaagtttatgtgcagagaggtgttcagaatagtctttgaggatcttttgcatttcttgaggattaggtgtaatatcacctttgttatttctgattttgcttatttaaatctgctttcttctttgttaatctagctagtagtctattgatcttgtttatcctttcaaaaaaccagtttatgattttgttgattattttatgaaattttgtttctcaattttgtttcattcctctcagatttcagttattgctcttctgctaactttgagatttgwttttgtgtttctatttcctctaggtgctatgatagattattaatttgagatctttctagctttttgatgtaggcatttaccactatcagctttactcttaacattagatttcctgtatccaagagattttg

SEQ ID NO: 950456 - DNA, 609 bp, Homo sapiens
ggtctttgtaccttttggaaaccattatcagaaagaaccactgaggtgggagagctgaaagctgctgttgccatggacacgatggccacggagatctgaaaaccatcaactggtttgagagccacagggaaaagccatgtaccccagtctctgggtgctggagaaagcccaggccatagtgggacaggaatcagggtagtaggcaggctggagaaggaggaaaagggggggaacggaactgagagggtcaggccatgtctagggattctggtccaggaccctgataagagggctatgtccccttacagatgacctgggtaaaggcccggaggggtgatgtttgtctgggggttccaacactatggtccaagtggtgctgctttgatgggacccccacctagagcagctctgaagacattccccaggggctgcttgattgggaatgtggagatgggcagttattaggaacagagcacaggctgtctgcagggctytgcacttcttcctcctcatcactcttcggaagcccagaggcccccagagggatgggttacttggaagtcatcgtaatgttctgtacctgagagttagttggccctaggaaattgt

SEQ ID NO: 950457 - DNA, 594 bp, Homo sapiens
cctgtaatcccagctactttggaggctgaggcaggataatcacttgaacctgagaggtgaaggctgcagtgagctgagattgcgccattgcattccagcctggatgacagagcaagactccgtctccaaaaaaaaaagaaaaatgcaaattaaaattcaaatgactctgagctaccatttctcaccaattagactggtgagtccatgtggaaataaacactgtcatatattgttgctaggaatgctaactagtacaacacttttggatggaaatttggtcatttttaacaaagctacacatgcagttttatcctttgacccagtaatcccacttgtaagaatttatcatgcaacaataccactactaattgcaaagttattcattgcagcaaaatattggaagctacctaaaaacccaaccataggagttggttgagtaaaatatgtacaatgactttttttcctttccattttggtggrctggttgaagatgaaatccactgagaagggaaggcctgggtcttcagcaccctgtgtgccagtccagaactggcctatctacagaccccctgaaaatcaaatgggcttggattt

SEQ ID NO: 950458 - DNA, 594 bp, Homo sapiens
cctgtaatcccagctactttggaggctgaggcaggataatcacttgaacctgagaggtgaaggctgcagtgagctgagattgcgccattgcattccagcctggatgacagagcaagactccgtctccaaaaaaaaaagaaaaatgcaaattaaaattcaaatgactctgagctaccatttctcaccaattagactggtgagtccatgtggaaataaacactgtcatatattgttgctaggaatgctaactagtacaacacttttggatggaaatttggtcatttttaacaaagctacacatgcagttttatcctttgacccagtaatcccacttgtaagaatttatcatgcaacaataccactactaattgcaaagttattcattgcagcaaaatattggaagctacctaaaaacccaaccataggagttggttgagtaaaatatgtacaatgactttttttcctttccattttggtgggcyggttgaagatgaaatccactgagaagggaaggcctgggtcttcagcaccctgtgtgccagtccagaactggcctatctacagaccccctgaaaatcaaatgggcttggattt

SEQ ID NO: 950459 - DNA, 739 bp, Homo sapiens
atatttctctgatgattagtgatattgagcatttcttcatgtgtttgttgtctgcctgtatgtcttcttttgagaagtgtctgtttatgtcctttgcccaccctttaatggggttgttttttgcttgttgatttaagttctttatagatgcttgatattacacctttgtcagttgcatagtttgagaatatttcctcccatttctgtaggttgtctgtttacagaacagtagtttcttttgctgtgcagaagctctttaatcagatggaaaggggaatgtttgattataaacagtcatgtgagatcttatttgagtaaaagaaatgttctgtaactggattgtggtgatagttttatagctctgtacattttctaaaaatcattaaattgtatgtctaaaacaggtgaattttatggtatgtaaatgacacttccataaagctgtttgttttgtttcattttgttttgttttgtttaagacataggctgaatgcagtggctcatgcctgtaatcccagcacttttagagggcaagatacaagtatcgcttgaggctgggagttcaagattagcctaggcaacatggtgaagccccatacaaaaatacaaaattagccaggtgtggcagcttgctcctgtggtcctagctkcttgggaggctgaggtagggggattgcttgagctcaggagttcaagaccagcctgggcaacatagcgagaccttgtctctaccaaaaat

SEQ ID NO: 950460 - DNA, 526 bp, Homo sapiens
agaggggatgcaagggtgattcctgcatccaaagtcaggtggtctcttcctccagtgtrgctgggtccaggacttttgtgggctcagaatgggggagtgcatgctgattggtttgtgagtatgcaaaaaagctaaaacgaagacaccactcaaaggtgagcacaacaatgtgaaaaaaccaattagggaagtgtagatatgtgtaaaataggtgaaggctgaggatcaatcagaagaaagcacgacaaacaggaagagatattctaaatctggtctgtggatttgacttgtagcttggctttcaggctttgaactgtcttttgcttgaaggtggagtttcacccgggacctgtccctacctacctggacatttgactgcctcttgctgctatcaaaatgatatgccccccagaaactcagaatgtgactttatgtggaataagggtccttgtagatggaattgaggtaatgttctcgagatgagatcatcctggattagggtgtgacctaaattcaattacaggta

SEQ ID NO: 950461 - DNA, 596 bp, Homo sapiens
tctctgtctcaaaaaaaaaaaaaaagtcgtcaggtaacaacaaatgttagcaaggatgtggagacatctgaaccctcattggctgctagtgggaatgtaaaatggtgcaacagctttggaaaacagtctggcagctcttcagttgattaaatgtagttaccatgtaatccagcaattccactcctagttatatactcaagagaaatgaaaacctgtgtccatgtaaacatttgtacatgactgtttatagtagcattattcataataaccaaaaggtggaggctgggcacagtggctcatgcctgtaatcctagccctttgggaggcagaggcacgtggattgcttgcagtcaggagtttaagaccagcctgggccacacagaaaaactcccatctctatgaaaaaaattttaaaattatttaaaaataataaatattattattatttttaatagagatggggtctcgctattttgtgcaggctggtcttraactcctgggctcaagaaatcctcccacctcagccttccaaagtgctgggattacaggtgtgagccaccatgcccagcctagaaataataaataattttaaaatt

SEQ ID NO: 950462 - DNA, 476 bp, Homo sapiens
gaattacaggcatgagccacaacgcctggctaagttttatatttttagtagagatggggtttcactatgttggccagactggtctgcctgccttggcctcccaatgtgctaggattataggcgtgagccaccatgcccagcccatccaaacttttaaaaaatacaatatgcaaagtagtgaaacataaaacagaaaaatcacccgtagtcatggcccttacatagtataccataagcagtgcaaatcccttcttctgccccatgtgggctagattcttttccttctcatcaacccccttctgtaacccatggttgataatgtggtggccatccttccttaattttcctacgttttttataatcaagtctgcaaatgagcataaactgtayagggggcttattcatctgttggatcaaagtaatgatttatttttaatgttaaaattttttttcaaaaatggattcttcactcaaag

SEQ ID NO: 950463 - DNA, 605 bp, Homo sapiens
agagaacttcacagcagcccctcccatcacaggccaggagggaaaaatggttttgtgagcagggcccaggacccagttgctctctgcagccttgggacatggtgccctgtgtcctagccactccagctccagctaaaaggggccaaggtacagctcaagctgtggtgtcagagggtgcaagcctcaagccttgccaactttcacatggtgttggacctgtgggtgcacagaaggcaagagttgaggtttgggaacctctctctagatttcagaggatgtatggaaactcctggatgtccaggcagaagtctgctgcaggggcagagccctcatgcagaacctctactagggcaatgtagacgggaaatgtggggttggagcccctatacgcagtaaccactggggcactgcctagtagagctgtgagaagggggtcaccattattcagaccccagaatgtagatccactgattgcttgcactatgcacctggaaaagccacaggcactcaatgccagcctgtgaaagctgycatgggggctgtaccctgcagactcacagaagcagagatgcccaaggccttgagagcccaccttttgcatcggt

SEQ ID NO: 950464 - DNA, 642 bp, Homo sapiens
gatgttgagcctgtgagtgcacagaagtcaaaaactggggtttggaaacctccgtctaratttcagaagatgtatagaaatgcctggatacccaggtagaagcttgctatagcagtggagtcctcctggagaacctctgctagggcagtgcagaagggaaatgtggggtgggagccccacacagagtccctactggggcaccacctagtggacctgtgagaagagggccaccatcctctagaccccagaatgatagatccaccaacaacttgcaccatgcaccaggaaaagccacagacactcaatcccagcccatgaaaacacctgggagggaggctgtaccttgcaaaaccacaggggctgagctgcccaagaccatgggaacctacctcttgtatcagtgtgacctggatgtgagacatggagtcaaaggggatcattgtggagctttacgatttaactgcctgctggattttggacttgcatggagcctgtagcccctttgttttggccaatttctcccatttggaatggctgtatttacccagtgcctgtgcccctatagtatctgggaagtaactaacttgcttttgattttacaggctcataggcagaagggacttgccttgtctcagatgcgat

SEQ ID NO: 950465 - DNA, 832 bp, Homo sapiens
tgggttgctcctctctgcaggcaggtgatcccattgtcttcctagctcctagcagagaggacgccctgtagtgagttgctcctctctgcagttggtagtccagacatctctgcaagtctctgaagacctcagcagagaggaggccctagtgtgggtagttcctctctgtagttggtcatcccaacatttcctgctatcagcagagagagtagctcctctctgccactggtcctcctgttgtccattcagctctggctgagacttaggcttttatggacatcagtggcgaggaagtacacactgattggtccattgacagccatgggaagcccagaaaagacactacaaattcccactctggtctgtaggacaggtagcccagctcccagccttcaggctccccctggcctgaaggtgggtcctcaacagggacctgcccccttctgctcaggaatctatctcctcctgctgccattcatggtgccctggcctggcccaactttgctccaagatcagagccagggatgacagcagggagaagccaggcagtgggagcaggcatttccaagcctgcaaggtcagggtgtgccttccccggcccccaagagcaatttgggaggctgcagttgtgctctggtgggtggagcttcttcctgctccatgtagtgggaggcctaagtctgtagccacaatttgggtggctgctgtggcacctggggagctcccaccccaattcagaagaggcagggatgttgcttttcccttccagctccatggattcctcaaccctggtggtgcttccctgccgcagctcrcatgatggcagcagcag

SEQ ID NO: 950466 - DNA, 737 bp, Homo sapiens
tactgagttactgctgtaagtaaggtttatggctagatgccaagaggcctaccaagctgattatgacatagctcctgtttttttttttttttggtggaggagggagmttgtaagtacacccataactgaaaggcatggcagaatgtgctagagattctcagaggagtacaaagaaatagattcaaaaagaagggagaaacatttgtttagaagatgtggaaaaattgcatgaaaaaatatcttttgagatgtgcactgaaagatgagtaggatttgaaaagacagagcttgttcagggtaaaggaattccaggaaaaaggaacatcatgaattcagctataaaatctgggaaagtgtgaagtacaattgaagaagaatgggtagtcatggctgaggccttgggggcttatagaggaatagacagatctttgcccatctaagcctcctactcccctctctagtgtatatgagttataacccaatcaaagactacgtttcccatattactttggaatggaggcagaaatgatgggttatttccaggcctcatgtgccagttagatattaaattatgggataaccttgaaagcctcatattgaagttgatatagcttctgtcagcttggatgctgaatgactgagtggagcagagcactccctacctttcctttcctaccttgagtaggaaaaggaaaaaaaaatcccttcagtgtgttaagccactgagatattgagtt

SEQ ID NO: 950467 - DNA, 622 bp, Homo sapiens
gtctgggccataagaactgtattagtccattttcatgctgctgataaagacatacccaagactaggtaatttataaagaaaaagaggtttaatggactcacagtwccacatggctggggaggcctcacaatcatggtggaaggtgaaatgcatgtcttacatggtggcagacaagagagaatgggggccaagagaaaggtgaaaccctttataaaatcatcagatctcgtaagacttattccctaccacacgaacagtatgggggaaaccgcccctatgattcagttatctccctccaggtccctcccacaacacatgggattatgggagctgcaattcaagataagatttgggtggggacagccaaaccatatcagggacaaaatcatgaggaagatatgggccctgctttttccatcctctctgttctatttcttaggagagttccttagtctaaaaccttctttgtaactagaaatatctatgccctatataaattctcagagttatacatgtaacagttagctttcccttctatccttgtaaaaacaactaaagtttagttccttttcagagaagtaacacctctccctgagcattattttattaataaggcaaagta

SEQ ID NO: 950468 - DNA, 476 bp, Homo sapiens
tcagtaataaaccacacttatgacagtggtcccataagattataattctgtatttttactgtatcttcctatgtttagatatgtttatataatacttatcatagtgttacaactgcctacaatattcagtacagtaacaagctgtacagttttgtagcctaagaacaataggctaaaccatatagcctagctatgtagcaggctataccatctaaatttatgtaagtacaccctatggtgtttgcacaatgacagaatcacctaataacacatttttcacaatgtattcccatcgttaagcaacatatggctatttgcacagtcttcaagttttttccacattgatcgtttttatttttaattaatttatttatttttgagacaggktctcactctgtcactcaggctggagtgcagtggtgcaatctcagctcactgcaggcttgacatcctgggctcagacaatcctcccacct

SEQ ID NO: 950469 - DNA, 639 bp, Homo sapiens
aggccagcaggattggagcagaatgggcatgtggacaaaagtagtgcatagggaggcctgagaaagtagactctggaccacttattttgactttgcatgaaatgagaagtccctgcagggttctgggctgaaatgtaacatgatataacttaactttcagcaggatcactctgggagctgtgttgagaatgtagaggaaaacaggggagaagcagggtggacaattaagaggatattatagaaattcaggcaagagatcacagtgcttaggaaaaggtagtgagagatacttggattctaggtaaatttttaaagtagatttcctgataagattaaattagacatatgagagaaagagaggggaggcaaggatgactctgaagccttgggtctcaactaccagaaggatggaacgatggtcaagtgacatagcaggcagagcaatttttggagaggagaatagcagttagcagttcagtttcatatacactaaatttgagatctctatcagactrtaaataagatgggttttattacacccaaatttatagatgtaaataggaaaaaaaattgatcattcaaagtaattatctagaatgaaaagaaaccaattgccagtttaagtcagtagtcttcaat

SEQ ID NO: 950470 - DNA, 574 bp, Homo sapiens
gttcaagccgtgttcaaataaggtaaactccaagctgtagccagtctggctgtttctgcaccttacttctgttttctgtatgtcattttcctttttctgaccataaatgtgatccaaccacgagatagcccccaggtcgctctggccctattctggttctgggtgttgctctatttacaaattgttttttgctcaattaaactttgtctaaagttttccttttaccaacacagaaatacacaagacagaaacacacattgggaggctaacagggcagagaggctttttgatgtccagtgtgggctggtaagtaggggaggagtagaggccctaaggagatcctgcagggaccctctgagcattccatggaaagttatggcaatagacaggaagaaggtgcaatggtccaaaactattgctttgctacaagaaaatattayatttgttcttcctttccaattattggaaactgtagaggtacaagtagaagattttaaaataagacaaccaattatacagtggaagacgagacattaaaaaataagctggatgcagtggctcatgcctgtaatcc

SEQ ID NO: 950471 - DNA, 796 bp, Homo sapiens
gaggcagctggcttccgggtggyggccctggacgctcacacctgttgggctggaagactgaggagaccagggccccaaaatacaagataaacttgaaacagacaagaacatttcccaggccctatcactagcccccaactctgctccttctgtccccaggcctccatcttcaaggtctaaggagccatgtgctggttgcccagggtaggtgggcaggcaagtgataatggactgctgcctctgtgacctgctagaaatatgggatctccttgttcacatgcagcaatagacagatcttttcctgcatgtaacctggagctaggtgggcagaggtcctaacctggagcctggttcacctattcacacacagagacatggctgccatagcaacggggagggcagaggggagctggcagcttgacacttccagtaggctttgggctgaaatacaagtcactaaccttttccttcactgtaaggctgagaacctgactgaacttggcactggcccatctgattctggatataccatgcacaaagcttaagtccgaaagaatctccccactccaacaaaagcccctctcaggttgtgcccatgcagattcactgaccacacgcctcacggttgtcacagctatgggtcaccactgccctctgctggccactctaggcactagcatccactcagacaccaaagccatcatctccccacataagcaaacacacttcagtcatcacctccatctgtgggcactgaaatgcaactccattcagccgtcctctgagccagggggct

SEQ ID NO: 950472 - DNA, 828 bp, Homo sapiens
agaaaactcattccactgagaagcagagatggctcatgtgaccttctatatccccaaaacaaggccaccccaaagtctccatctgcattagagctgaaccaacacttccacaaacacctgcagccaaggctactcagacagctacaaacatgcagacattgattacaaccaaataaatatcatgaagactgcactactgtactcatgcagaatacaaaccaaagcaccctacccaactgacactatgagacacatctacaggaaaaagttttttcctactaaaactacattctaatattaggagaaattgttttgtcagatgtatagatactaatgtaggaacacaagaaatgtctaaaaagcaagaaacatgacacccccaagggaacaaaatcattttctaattccatatcccaaagaaaaggacagctacaaaatgcctatatgatttttaaaataatgatgttaaagatacgccgtgagaatcagtagaataaaaatagacaattcaaaaagtaggaaaacaattcatgatctgaatgagaaattcaacagagatattacacaaaaagaactaagcagaagtcttgaaactgaataataaaatgaatacaatttaaaaaataaaatcaagagcttcaacaacagactagatcaagatgaaaaaagaatttctgaacctggagacaggattttyggaataagccagtcagacaaaaaagaataagtaagaataaggaatgcctacaaaatgtgtggaacaaaatgcaggggacaaatattcccattatgggagttctagaaggagaagagatcagaaaggtgtag

SEQ ID NO: 950473 - DNA, 586 bp, Homo sapiens
ataactgttgttttaatttacaaatccttaatgatatatgatgtagagcatgttttcatgtgcttatttgccacataccatttttggtaaggttttcatttatgtcttttgcccattttttattcaacttgttcattttcttattgttgagtgtaattggtttgatctttttcttattatttattttcctatagttgagttttaaaggttaaaaatgtcagttatttccaaaatgagctatagtttcaatgaaatctcaattaaaacccagcaaattatttaatgtacattgacaaacggattcaaaatttatatgggaaggaaaaaaatacagagtagccaacataatattaaaagagaggaataaagtcacagtgttacatgatccttggggtatagtttttctggccagaaaggtgcctctgaagccaggggcgcctttggctgcattttgccttggatctgcaaggcttgttttgcccactcagcytatcaagctatgctcagctcaccctagaggcctcagtctcacacctgccaagggagagtcaagtatggaacaaagaggggtgtgtgagtgaatccg

SEQ ID NO: 950474 - DNA, 460 bp, Homo sapiens
aaagattggggtataacattcataaagtgcataaaatacacgaatgttaagcttaattaaatatatatktatctatatatgtacatttgtataaccgccatccagatcaagatataaaatacttcctgcaccccaaaaagttatcttgtgttccttccccatcaataccccctctcgaagttaaccactattctgacctctatcaccatcaattagttttccttgttcttgaacttcgtgtaaatggaattatacattattttctattttgtgcctgacttctttagctcaatgtacctgtaagatttcctccatattgttgtgtgcatctgttattccttctgttttattgctgtctagtgtttgattgtatgagtatgccacaattcatctatccattctcccgttggtggatgtttggattgtttccagtttttgcctattatgcaataatgctgct

SEQ ID NO: 950475 - DNA, 579 bp, Homo sapiens
caccttaaacaaagcacttgcatgcgaatcatcttggggtcttttgggaaaacccagctwagataatacttaaagtgtttggtctttgattttcttttctccctgaccttctctgcagtccattgtgagatgtgtccctggcgttggaatctactttggcactctctactctttgaagcagtatttcttgcgaggccatcccccaaccgccctggagtcagtcatgctgggggtgggctctcgctctgttgcaggggtctgtatgtcacctatcactgtaatcaagacgcgctatgaggtgagttcaaccactttagggcctcaggatagttcggcttagccactgggctcctggggagtgaccaccgatgtcaactcctgatttgtaatctaacatagagtctgatgtggtcagacaagccatatgtgaactagatcccatggtaatgccccataacctgcagtctgcttgttcagtgctgaaatgcagcgcctccatgcgagtcactggttctgtgctctctttgcagagtgggaaatatggctatgagagtatctacgctgccctgaggagcatct

SEQ ID NO: 950476 - DNA, 750 bp, Homo sapiens
taacaacaatcaataacggcaagttttcagtctctacttatgatactgagttttgattgaaaggttactgtccactatatattttttatttttttcctgtagttacataccaatatatwttattttatttttattttttatttcttacatgagaagaaacatcagacacagttgagggatcaggaagtgggtcctccagggaagatgaggcattgtgtttgatggcttttaaacgtctcttctagaggcatctgcctcatcaacaatggtttttgtctagaagtctctgtttgattttataagctgacataatttcttgttgctgttatgaatgcatgctgctgtagtccttccataagcctgtcaaatattttcaccatgtcatctacaggcactttttatgcagtattaatagcatcatcttcattgtcactataatcacaatcaccttgattcagaatcactccagccatttcaccatcagtcaatgaatagacaactggagcctcatcattgatgtcaaaacttcaatatccacttcttccagcctactgacagtctctgaaggtatatttttgcatatgtaaggaggtcagacatctttttttttcacttggcatacagaatcctttaaagttaccacttgttcaacatcatcaataaacacaatcacaggcttgatgttgtgccaggcatgcacaactatgtctttagtcattgtgttccaagtgttggcaacaacatatatgg

SEQ ID NO: 950477 - DNA, 750 bp, Homo sapiens
taacaacaatcaataacggcaagttttcagtctctacttatgatactgagttttgattgaaaggttactgtccactatatattttttatttttttcctgtagttacataccaatatattttwttttatttttattttttatttcttacatgagaagaaacatcagacacagttgagggatcaggaagtgggtcctccagggaagatgaggcattgtgtttgatggcttttaaacgtctcttctagaggcatctgcctcatcaacaatggtttttgtctagaagtctctgtttgattttataagctgacataatttcttgttgctgttatgaatgcatgctgctgtagtccttccataagcctgtcaaatattttcaccatgtcatctacaggcactttttatgcagtattaatagcatcatcttcattgtcactataatcacaatcaccttgattcagaatcactccagccatttcaccatcagtcaatgaatagacaactggagcctcatcattgatgtcaaaacttcaatatccacttcttccagcctactgacagtctctgaaggtatatttttgcatatgtaaggaggtcagacatctttttttttcacttggcatacagaatcctttaaagttaccacttgttcaacatcatcaataaacacaatcacaggcttgatgttgtgccaggcatgcacaactatgtctttagtcattgtgttccaagtgttggcaacaacatatatgg

SEQ ID NO: 950478 - DNA, 635 bp, Homo sapiens
gcaaattatgcaacctctctggatataaatatatgtcagattcttagcactacatctgacacagtagcctctagacaaatgacacctackgttatttaaccgggctgcttgtatgtctaagtaggacaatacagaagattcactcatttcgagatgacattagtgcagacctctctccaaatagttctttgtcgctaaatagaagaatgttgccgggtgtggtggctcacgcctgtaatcccagcactttgggaggccgaggggggcggatcacgaggtcaggagatcgagaccatcctggttaacatggtgaaaccccgtctctactaaaaatacaaaaaattagctgggcgtggtggtgggcgcctgtagtcccagctactcgggaggctgaggcaggagaatggcctgaacccgggaggcagagcttgcagtgagcagagatcacgccactgcactccagcctgggtgacagagcgagacttcgtctcaaaaaaaagaagaatgttgacgctgccttttgtggagacggtatctgtgtaaggaagctgcgtgtccacttagcccccatcttttaccactatggggaagtgtgggttctctgcttcttagggaaagcagaagatcattttctt

SEQ ID NO: 950479 - DNA, 609 bp, Homo sapiens
gaggaagccaaagagtctggagccagagaaggcatttggactcaaatgggatctattggattgtaccctattggcactaaggaactactgcctaccccccgcccmggcttctcatgcaggactatgacctagaattggagttatgttatagaaagatggcttcaagttcccctttgaggagctccacagtaaataagccatttaggagagaggtccccatttctctggactcaccattgcctccaaaaaaaaaaaaaaaaaaaaaaggctaaaatctccccaaaagaatggcaaatgaacaagggaaggaaggagctatttcttagtgttctttagactttaacagagtattatgtactgctattattattttttaggttaacaaaagtaatacattttctctagtgactccctgaatgctcctttgtagcttaatagttgaggctgaatgtagctattcagaatacctggacagctatggatggaaggggcttctctaggctaacttttgctctcttgtctcctgaataatctgaggggtggcatgggatgcagtctgttaacctcttagagcctgtacaacagaaatacattacatttgacttaata

SEQ ID NO: 950480 - DNA, 631 bp, Homo sapiens
tcagagctgcttgggtagctttgctcagccccgctctgagcctcggtttcctcatctgtgaaatgagttaataataacgacctcacagggctaatgtgaggacaatggatgatgaatgccagtgccccttcccatttccctccactgcttatcctacaagtgatcagacagaaccaccatctgtatgtgttatcctgctatttcttgcatctgtgcttttgcacagatttttgttattcccactgctttaaattcctgtattttcttctttgctggtcaatttatcctgtttttcttttcttttcttttttttgagacagagtcttgctctgtcgcccaggctggagtgcagtggcacgatctcagctcactgcaaccttcgcctcccgggttcaagtaattctcctccctcagcctcctgagtagctgggattacaggtgcatgccaccatgcctggctaattttttttattatttttagtagagacgtggtttcaccatgttggtcaggctggtctcgaactgaccttgtgatctgtctgcctcggcctcccaaggtgctgggattacaggcttgagccactgtgccwggccaatttctcctgtttcaatactctgttcagtatcattt

SEQ ID NO: 950481 - DNA, 596 bp, Homo sapiens
tgccttggcatagtggacatggatgagggggcagcttgtttctcattggacaatcttttttaaagtgtcctagtaaaccatactgrtaacaagtcttaccgggtgtttggcctgctccattttctgtcctctctgaaccaccaaggtttgttggtctgagggccatgactaaggctgcggcctttctctgatctcgcttttccttttgggcctgttcctcttggtccctattataaaacactgaggttgccaggtttaataatgcctctaggttttgttcaggacccagggcttgcttttggagctttctcctgatatctgtggctgattgggtaataaacttatcttttagaatcaattgaccctcaagtgattcgggtgacaggggagtatattttcttaaggcctctcgtagccgcttgaggaaggcagaaagattttcttcctttccctgagttatggtggacatcactgaataattcatgggcttttttctaattctccttggtccttctagaacacaggtcaacagatgtttacgactccagtccccatgatctgcatcaaggtcccagtggggatccatagtggggatg

SEQ ID NO: 950482 - DNA, 613 bp, Homo sapiens
gcttgggaggatggcttaaggccagcaattgggagactagcctgggcaacatggcaagatcccgcttctacaagaaaaaaaaaattagttgagcatgatggcacgctcctgtagtcctagctacttgagagagactgaggcaggaggatcacttgagcctgggagtttgaggctacagtaagctatgattgtgccactgcaccctagcccggatgacaagatgagaccctgtccttagaaaaacaaacaacaacaacgaaaaacaaaaaacaaaaaaaaaattagagttctggaggatagaaataaaagtgttggctggtcatggttgctcacaactgtaatcccaacattttgggagaccaagaggggaggatctcttgaggctaggaatttgagaccagcatgggcaacagagcgagacccctgcctctacaaaagaaaaattttttttgagacagagtcttgctttgttgcccaggctggagtgcagtggtgcgatctcagctcactgcaagctgcrcctccggggttcgcaccattcttctgcctcagcctcccgagtagctgggactacagacggccgccaccacaccaggctaattttttgtatttt

SEQ ID NO: 950483 - DNA, 612 bp, Homo sapiens
aaatgattaacccacagacattaaagacacacaaactcagaaagatgmcctgcagagcacttgtggtcatttcggcacatttgattgaaaaatggttagaggccgggcgtggtggttcatgcctgtaatcccagcacttcgggaggccgaggcaggcggatcacgaggtcaggagtttgaaaaatggttagacagagaatcttaatagatttaatttaaactgagatgactcaagtattgcaaacaaaaattttctgcatgaagcagcaccattcaatttagattgaaccgccctgtgattacttaattaggacagtgtttgctgaaacactgccatagatacacgtgtcaaaggaatttgccacagattgtcaaacctccacgacataatagtacaaatccaggggactgaccactcagtaagtggcccctagctcctttaatgaaaactgcctttattgccaaatatcataagctccaggacaaaaaaaaaaaaaaaatagtagaggtcgcctggctagtcaccccagagggtcacaggaccccatattaatttttggagaggatgttaaattaagaacaaagaatcatggaaacagagcagaaaaacaa

SEQ ID NO: 950484 - DNA, 601 bp, Homo sapiens
ggggtgaggcctgtgactgctggctttcccccacttccctagtgacctgtatgactcagcagaggcagccataatcccacagggaacataacttcttcggcctgagaaccacacccccatcctccacagcagcaacaggaagacccacccaaaaagaggctgagctcagacatgcctatccctgccccacctggtggtctttctctacaggccctcatagctgaagacaaaggacataatctcttgggagctctatggccctgcccaccacctgagaaacacaaatacttaaccaggtgtccctagagcaagtttgcatcctccctatacagctgcagctgatgcactcttgatagcaccacctcctggctggaggccaaaccaacacaaaactagcacactaaacaatagtacaacaaaggaccctcccagagtccacttcactcctctgctacctccagtggagcaggtgctggtatccacggctgacagagctgaagacagatcacatcacaggactctgcrgacactccccagtaccagctcagagactggtagctctgctgggtggccagacccagaaaagtgaaacaattgctgc

SEQ ID NO: 950485 - DNA, 548 bp, Homo sapiens
tgggtacctgccatcatgcctractaattcttgtatttttagtagagacggggtttcatcatgttggccaggctggtcttgaactcctcacctcaagtgatccacccacttcagcctcccaaagtgctgggattacaagtgtgagccctgagccaccatgcctgacatgaattttttatgtcagatgttgtacttttcacctttagaatttctatttagatcttttgattgacttctgtctttattgatactctcaatttggtgagacatttttctcataatttcctttaattttccaacataatcctcttcagctctttgagtatatttcaaatagctagtagtatttctcttgtaaatccaacatctggaccttttcagggaaaatttctattgactggtttcttccttcactctatgcattttctgtacttttttgcatgcatcataaatgtttactgaacactgaacattttaaataaaacaatggcaattctggaaatgagttctctctcccctcatcccctcacagtttgtggttgctgttt

SEQ ID NO: 950486 - DNA, 545 bp, Homo sapiens
tgggactagggtgaaaagaaaaatgcatggcaagtgcagagggcttgctgtacctcagcttcagccaactgtctcagtacaaggatggttgccaattattgccagatcttctgattttttttcttttaagagaagtcaaaaacacagattttccatgtgaaatctacccgatttaaaattggggcaggaaattcactttttaaacaaatgttacaggggccaagtaaaataagttgtcaggctgaatttaatacatgggcaactgggttgcagcctctattctaaactatattagcatggaccaggtgtgtcagattaaccagaaaaaaaattgtcccaacaccctcaatttaggtgattgggtcttgtaggtgatgggtactcataaatgccactgcaagtgtggcagaaggacagagatggtaaaagcaaagattagccatgtgagcatctcggcagtggtgtgctggtaaatggttaacaaccmcctttggggttggggcaggtctaatttgtaaagtgttgattcccatggtgcaagtacc

SEQ ID NO: 950487 - DNA, 462 bp, Homo sapiens
tgaataatccggttgggagagcagccaaaaatattgatttatttgttccacagattcagaagcatttttaatgagcagagtgtggtgatgccttgccagtatatcttcggatgactcaatctgaggcacacacccaaatgcacacacggtttgcaaggggaaacatgaagttccacaaactggaggtctgtcgaacatgaaccctcacagatggagaggcattggtttctctccttccaactgtctgctcatttcccagccaaaccaatcaacaccatcatgggactggtgcttacaactgagcctggctttctaaggcagtccccacccctacccactattgaagggtcaaaagggatttcaagttggttytccttaacaccgtcctctgaaataattctttcatccattcgcccattcgtgtggttgttacttctaagcacctactaagtgccaggcatt

SEQ ID NO: 950488 - DNA, 624 bp, Homo sapiens
ttgaaataatccaagtgtccatcagagagaggatgaatgggtaaacaaaacacggtcaatccccacgatgaaatattatgcagccatgaaaaggaaagtatggatttatctgctgcatgaatgaatgctgacacattctcttaagtgaaagaagtcagtgatgaaggaccccacactgtatgatttacatgagatgatgtccagaatagaaaaatctatagacagaaattagatttgtgtttgcctaggactgaggaggggagtgtgggggccgactgtgaaagccatggttttctttctagggtgctatgaatgatctaagattgatgatggtgatgattgcataattctgtaaacataccaaaagccatgaaattgcacaccttctatggatgaatgtatggtatgtgaattatagctcaggaaagctattaaaaacatcaacctaaacctttgtacatggctggtaggaatgtaaaaatggtcctgttkctgtggaaaacagtttggtggttcttcaaaaagttaaaaatagaattattatgtaaaccagcaattttattcataggtatataccctgaaaattgaaaacagatgttcaaaccaatacgtgtacacatgcca

SEQ ID NO: 950489 - DNA, 801 bp, Homo sapiens
atcagaagggacagactccagacgcgccaccctaagagctgtaacactcactgtgagggtccrtggcttcattcttgaagtcagtgagaccaagaacccacccattctggacacactgggattacaggtgtgagccactgtgcctagccgacatgattccatttataggacattctggaaaaggcaaagctgtagtgacagagaacagatagtggcggccagggataagggatgcacggccacagaggggcctcacagacttcctgtgtggtgacggagccgctctgtcccgactgtgatgttgatgacatgaacttggacgtgttttaaaactcctctgaggaagctggctcctggttaaaaaggtctgtgcgaaatttcaggcacaaacataaacaatcaccaaggctttaccctgtgggcctcatggaggaaaactgccctccccacaacggacgtggtgtacagccaacgtactgtggatgctacaggactatgatgtggtccccggtcctgagtgtattgttgatgctgatgtcccatctatgtacacccctgctagcctttgccccagtccctgatgggaactgctgcagttagggccgttacagagcagcataggaagactgaatccacccgactcaggctatggctagttccctggccattggatcaggccgccggccagcctcagactggcaggtaaaacaaggttcctggtggagacaggactttttaaaaaaaaaataatttcaactttttctttagatccacaagtccatgtgcaggtttgttttgtgg

SEQ ID NO: 950490 - DNA, 801 bp, Homo sapiens
atcagaagggacagactccagacgcgccaccctaagagctgtaacactcactgtgagggtccayggcttcattcttgaagtcagtgagaccaagaacccacccattctggacacactgggattacaggtgtgagccactgtgcctagccgacatgattccatttataggacattctggaaaaggcaaagctgtagtgacagagaacagatagtggcggccagggataagggatgcacggccacagaggggcctcacagacttcctgtgtggtgacggagccgctctgtcccgactgtgatgttgatgacatgaacttggacgtgttttaaaactcctctgaggaagctggctcctggttaaaaaggtctgtgcgaaatttcaggcacaaacataaacaatcaccaaggctttaccctgtgggcctcatggaggaaaactgccctccccacaacggacgtggtgtacagccaacgtactgtggatgctacaggactatgatgtggtccccggtcctgagtgtattgttgatgctgatgtcccatctatgtacacccctgctagcctttgccccagtccctgatgggaactgctgcagttagggccgttacagagcagcataggaagactgaatccacccgactcaggctatggctagttccctggccattggatcaggccgccggccagcctcagactggcaggtaaaacaaggttcctggtggagacaggactttttaaaaaaaaaataatttcaactttttctttagatccacaagtccatgtgcaggtttgttttgtgg

SEQ ID NO: 950491 - DNA, 634 bp, Homo sapiens
tctccaaaactgagaaataaatttctgttgtttaagctccccagaatatggtattttgttatggcagactgagcagactaacccattctctcatctaatttttctgtaataacacttagcaggatctgaattttttcctgcttacttactaccctgttctttttttgtcctccagcaagtaaacactgtgttggcaggaaatatatatcgctaatgctctaatatacccatagtacctagcacagtaacttaaaagaagtcaataaatattctattttatctgaagtagtctagatagaaaagagcatcaggaccaaaactaccatccatagaaagccctgcttgcaagactggcccctggctggcatctgagaacatgggtttcaggaacgtccctactatttcctaactgataattactatgccgagactgtatacaaacaatatgatcaccacatgttaggcagagaatacctacatgaccagctcccagtaaagaccttgggcacttatctccaatggtccttcctgggcagaaacatcaaacacatgygttactatatttttgctgcagagggatagtaaactttgacccttacaggagggagggagcttaggaagcctgcacatgggt

SEQ ID NO: 950492 - DNA, 474 bp, Homo sapiens
ttcctttattgagcataaattatttgtatgttgaataaaataatgcacttaaaacaccatgtagaaattgtgaacattatgttgtaattattgtaaaaatattgtgagctattattcccagagtgaatagaataatataattcagggatggatgaagtgtgtctactccacactgcctacctagcctctctttataaacagacctctggtgtcctgagagctcaggtgactgctgtcagacatgggtacaaatctcttaacccagcttgtgaggccctttacagatgggctgcctgacctcgatagggataggcccatcttcttgtccctcctccttccctycttcccctctgcctatgttcaggcatccctgcgatgcccttctgtggctgggccctgcctccagggtttgaatgctctgctccctctgccaaggccatgccctgcccagctcatgctccctacaccttcctt

SEQ ID NO: 950493 - DNA, 556 bp, Homo sapiens
gctgtgacttgggcacccctgtgctcttgggagctaggaacaggcaggagccccrccctccaaggcactgctacagccaccctgctgtagctatggatccaggcatctctgcactgtcgggggcctgggaaggtcccccgctgcccacaggcttggaagtacctgctcctgctgtttggcttctccccactgtcactgcctgctctgatcttggagtaaggttggggccaagcttgggtgctgttgcaacctggccagatgtgtgcatgcttggggcagtgctgacatgctaggccctgtcaccttggccccctctggactttgtgcaccgatgagcacaggaggaaggctgaggaggggggcgctgagggcagctcattcctggcctgcaggcaacccttggcatgaacagcctgagtcccataaacagtggtgggtggtgaacaagctcctgggcagaaagggccaggtccctggtgaagccccaccttcaagctggggaaggcctgaagccaggtggctgggctgacagtcccacgaaccacagggggacctt

SEQ ID NO: 950494 - DNA, 556 bp, Homo sapiens
gctgtgacttgggcacccctgtgctcttgggagctaggaacaggcaggagccccgccctccaaggcactgctacagccaccctgctgtagctatggatccaggcatctctgcactgtcrggggcctgggaaggtcccccgctgcccacaggcttggaagtacctgctcctgctgtttggcttctccccactgtcactgcctgctctgatcttggagtaaggttggggccaagcttgggtgctgttgcaacctggccagatgtgtgcatgcttggggcagtgctgacatgctaggccctgtcaccttggccccctctggactttgtgcaccgatgagcacaggaggaaggctgaggaggggggcgctgagggcagctcattcctggcctgcaggcaacccttggcatgaacagcctgagtcccataaacagtggtgggtggtgaacaagctcctgggcagaaagggccaggtccctggtgaagccccaccttcaagctggggaaggcctgaagccaggtggctgggctgacagtcccacgaaccacagggggacctt

SEQ ID NO: 950495 - DNA, 573 bp, Homo sapiens
ggataggaattgtgttgattctgtagatcactttggtaagtattgccattttaacaatattaaatcttctgacccatgagcatgtatgtttttccagttagttagtctttctttaatttctttgaacagtgttttatcattttcaaagtataagttttacattgcttttgttaaaatattttaaagtattttattctttttgaagctgttgtcaatggaattgttttcttaattttattttcagattgtacattgctaagtgtagaaatacaactgtattttgcagcatatcaatattatactatgcaactttgctgaacttgtttcaaattattttattttcttgcctaattgccttgcatttgacctccagtacaatgtggaatagaaatggggaaagtgtaatccttgtctcgttcttaaaagaaaagctctcctttttcaccattaagttggatggtagctgtagattttttatattrattgatgtactctatcaggttgataaagttcccttccattcctaattttttgaagcttttaatccagaacgagtcttggattttctgcatc

SEQ ID NO: 950496 - DNA, 604 bp, Homo sapiens
atattttcttaaagagataattgcacaagagtattagtccattcttaaactgacataaagaactacatgacactgggtaatttataaagaaaagaagcttaatcagctcatggttccatgggctatacaggcttctgtttctggagaggcctcaggaaacttacaatcatggcagaaggtgaagcacatcttcacatggctggcaagagagagcaagcaaagggggaagtgctacacacttttaaacaaccagatctcatgaaaactcactcactgtgacaaaaacagcaaggggggaagtccacccacatgatccaatcacctcctaccaggcccgtcctccaacattgagaattataaattgacatgagatttgggtggggacacagagtcaagccatatcattctgtccctggcctgtcccaaatcttatgttcttctcacatttcaaaacacaattatgccttcccagttatcccccaaagtcttaactcactccagcattaactcaaaagtccaagtccaacatctcctctgagacaaggcaagtcccttctgcctrtaagcctgtaaaataaaaatcaagacatccgagacacaatgg

SEQ ID NO: 950497 - DNA, 821 bp, Homo sapiens
tcacatcttcaggttccacatttagttatagttcttttgctgtttctatcacatctgcagttacttcttccactgaagtcttaaacccctcaaagtcatccataaggactggaatcaacttcttccaaactctcgttcatgttgataaaaatgtcaatacctcctcttctgaaccaaaatgtatttaatggcatcgaaactggtgaattctttccaggtggttttttgattggctttgctcagctctatcagaagaatcactacctatggcaactatagccttacagagtatatgtttaaaataaaaagacttgaaagccaaaattaccccatgggatgtaaaatggatattgtgttatcaggcatgaaaacaacctttattttccttgtgaatctttatcagagctcttgagtgactaggtgtgttgtcagggagcagtaattttattcatatatttttaaatttattttaagttctgggatacatgtgtataatgtgcagaattattacataggtaaacatatgccatgatggtttgctgcacctatcaacccatcacctaggtattaagcctggcatgcatttagctatttttcctgatgctctcccccacttcccccaagcagtaatatttttaaaggaattttttttcccctgagcagtagatctcaacagtgggcttaaaataytcagtaaaccatggtagaaacagatgtggtgtcatctaggctttgttggcgccacttacagagcacaggcaaaatagatttagcataattcttaagggccttggtatttttggaatggtcaatgagcattg

SEQ ID NO: 950498 - DNA, 609 bp, Homo sapiens
gccgaactgcagcaattgtttcacttttctgggtctggccacccagcagagctaccagtctctgagctggtactggggagtgtcygcagagtcctgtgatgtgatctgtcttcagctctgtcagccgtggataccagcacctgctccactggaggtagcagaggagtgaagtggactctgggagggtcctttgttgtactattgtttagtgtgctagttttgtgttggtttggcctccagccaggaggtggtgctatcaagagtgcatcagctgcagctgtatagggaggatgcaaacttgctctagggacacctggttaagtatttgtgtttctcaggtggtgggcagggccatagagctcccaagagattatgtcctttgtcttcagctatgagggcctgtagagaaagaccaccaggtggggcagggataggcatgtctgagctcagcctctttttgggtgggtcttcctgttgctgctgtggaggatgggggtgtggttctcaggccgaagaagttatgttccctgtgggattatggctgcctctgctgagtcatacaggtcactagggaagtgggggaaagccagcagtcacaggcctcacccc

SEQ ID NO: 950499 - DNA, 624 bp, Homo sapiens
gtttgttacataggtaaatgtgtgtcatgggggtttgttgtaccaattatttcttcaccaggtmtgtaagcctagtatccatttgttatttttcctgatcatctccttcctctcatccttcagcctccaacaggaaccagtgtgtgttgttcccctctatgtgtctatttgctctcatcatttagctcccacttataagtgagaacatgcggtatctggttttctgttcctgtgttagtttgctaaggataatggtctccagctccaaccatgtccctgtaaatgacatgatctcattcttttctttcttatggctgtatagtagaatgcctattttaaaacagggagatttccttttttcccctgtaccccagaattctcaccttaaccttaaaaacaaacatttcacaatgtctaaataaatatagtgaatgtcatctgttaatacttgaagctatttacggcaataagcatcacagcaacagccccaacatcatgaacgtgcagaccaaatgcattgctagaaatgtgttttcatttaatttactgagcccatatagactgtaactctaatgtaatgcaaatggtacaggttgagcatccttaatccaaaatccaaaatgc

SEQ ID NO: 950500 - DNA, 639 bp, Homo sapiens
tctcagctttgcatatgtaaggctgaaaccaaagtttcacaaaacaatacctacttttgaaaccacctttgcaaaattataactgaggaaatgacaacagtgaaagaaawcagacctaaccgactccatctcgcttctaacctttaagctgtccttgttcattcctgggcatgggctgaacaaactttgggatggaattcagttcatggtttgactctgacacagaattgataatagccgtttccggaaaagaccccctgcttgcctggggaccagtctgcctttgcaggactaacaaattagctacaagatgagaagttacagtttaggggtcatgcagcctctggctccaagagtctaaacccccccagattgctcctaggaataagatcactgttgtaaaacctaagatcagcgcttgagatattttgcagagcctgcattctgatgcaccagctaacaccacccagaccagtcatctggctcagccagttctgctatcccacccaggaacagaagacagcaagaaaaactcacttcaaacccctgattccatctccagtctggccaatcagcactccccatttcccaagcctctaccggccaaattatctttaaaagctctgatccctgaatgct

SEQ ID NO: 950501 - DNA, 576 bp, Homo sapiens
  misc_feature 136: n = A,T,C or G
tgcccagctaattttttttaagtgtatgattttttgaagagacagtatctcactgtattgcccaggctggtcttgaactcctgggctcaggtaatcctcctgccttggtttcccaaagtgctaggattataggtgntgagccacacgtgcccggccaggtaattattttttagatgactttaaggatgtctaagcccctaaactcatgcttcagagagccccacctcatctccccaagatgcagcctggccatgccaggggcacatggtgggaagccactcaatggagccccacgttcctgccctggggcctttgctcacgctgttccttcttactggattgagtacttctcacacccgccctcagctctgccgagcagaatcccatggatctcagagagcctggctccgccttccatgaagcctttcctgagacccctctggactgagcaacttatcttgttttcatgacactcatggtaactccagaagtcagatagtattatccccattttatatatggagagaccgaggctcagcagrtacaggggcttttccaggaggtcacacagctggt

SEQ ID NO: 950502 - DNA, 608 bp, Homo sapiens
caacaaacagggtagaaccagcagaacattccctttccatccttggggaccctgcagtctgggaggccactaggatttcttgtctctttctgggaactgcctgacactaatttgtagtatttaaaaaagtwtacaaagggatcccttcccaccatttactctgagagagtaaattcaacaggttgcctcttagggaggaattacaccggctccaattcctaccgaagacttggctgcccatttttgatctgagttgagggtaacttatttgtcaaaattaatttaacaggtttaaaactttggagatcaactgcagagggcaacaagcctgagggacaagttcttcccaccccaagttgtggctcctatcgaagaagccacgtgggacctcattatggcaactctttccaacctcatccactttaaccagcttccattatttcatccccaagggtgaagcagcaagcccgctttgggggaataaaaaaataataatcatattgttacttgatattgtttccaggcaccaaagctttaacatttaatccattcatattctttaggttcgtatgacattatgactaggaaaaactgaggacaagtgaccc

SEQ ID NO: 950503 - DNA, 571 bp, Homo sapiens
tttgggatttcaacagataggttgctttaacattctagtgcatgtgtaggggtgaatatgagaattcatatctgttgggtacttacttagaggaagaatcgctggttgtggatttgtattagtccgttttcacgctgctaataaagacctaccggagactgggtaatttataaaggaaaagaggttttatggactcacagttccacatggctggagaggcctcacaattatgatgggaggcaaagggggaaacaaaggcacgtcttacatggtggcaagcaagagcgcttgtgcaggggaactcccctttataaaaccatcagatctcatgagacttattcaataccaggagaacagtatgggggaaactgcccccataattcaattatctccacctggccctgatcttgacacttggggattattacaattcaaggtgagatttgggtggggacacagccaaaccatatcagggttatttgtatgtatatttcactttagtagctgtgccaaactggtgcggtagtttctccagaagctcttgaggtcatacrggagtgagagaagcaaa

SEQ ID NO: 950504 - DNA, 686 bp, Homo sapiens
ctcctctaaccctaagtaattcacttggaagttgagatcacccaagaggccttgctcaaagttttcttaggaattaagtgattttagtacaggaagagtacagttaacagcaagagatttaaagtcagaggcacccatggcctgacacagctcttccacttattaaatgcgactttaatcaagccgaacaacgtctctgaactttagtttccttgtctgcaagaaaagtggtaggtttgttgatgccttcctctgtcagttctcgtgaggataaaatgagaacacgcatcaagcatccacccagtgcccaatgcacctcaaaagctccgcaaagggtagctgctgctgagttgtagcaattagtattaatttgcatatacctcccagtatcacccaggagaatcattaaccatcattaagtaattaactctcagccactactcaccctagagcaagccgcattgagttggccacatgagaaacagcttgatctcaaataaacaacccataattcagaaagtctacccttgtgacttttaatttggactgcactctctckccttctctctctcttgctgtctctctctcgctctctctctctctctcattttaaacctctgcatgttttttataatcctgcattttataacgaatggtgcatctttccagaaagccccacagtttct

SEQ ID NO: 950505 - DNA, 452 bp, Homo sapiens
gggagtgaagtggactctgtcagagtccttggttgtagttttgtttagtgtgctgtttttctcgaatgctggttatactagcaatgaagttgctacatggacagactcagggcctctggggacccaagatgttacaggcagtggaattggctgttgttttctccttttttggagcagtgctgttctgttatgagttgctgtaatggcttgagttggttggcctcccactaggaggtggtgctttcaagagagcattagctgtggtagtataggggtggatacaagcttgctctaaggtcacctgggtaagtatttgggtttctcaggtgatgggcagggccrtagagctcccatgagttcgtcttttgtcttcagctaccagggctggtaaagaaacaccattaggttggggcagtgttaggcatgtctgagctcagactctcctagggctg

SEQ ID NO: 950506 - DNA, 452 bp, Homo sapiens
gggagtgaagtggactctgtcagagtccttggttgtagttttgtttagtgtgctgtttttctcgaatgctggttatactagcaatgaagttgctacatggacagactcagggcctctggggacccaagatgttacaggcagtggaattggctgttgttttctccttttttggagcagtgctgttctgttatgagttgctgtaatggcttgagttggttggcctcccactaggaggtggtgctttcaagagagcattagctgtggtagtataggggtggatacaagcttgctctaaggtcacctgggtaagtatttgggtttctcaggtgatgggcagggccatagagctcccatgagttcrtcttttgtcttcagctaccagggctggtaaagaaacaccattaggttggggcagtgttaggcatgtctgagctcagactctcctagggctg

SEQ ID NO: 950507 - DNA, 514 bp, Homo sapiens
tgagacaatggccccggtatctagaagacattcctggaaaggcacaggatttctgtgcaacattttcaattgtttttctttgacaattccaaattcttctcaagaagaaggmatttctcttaaggaaaatgcctgttgacacacagtttgtaagtgtggatgccatctgaaaccactgtttagttgataatgaactctggcatttgcccaccaagaaattctgtcagtcacctatagtgtgtatggtgaggtgtatacatcttaattcaattgaaacagagaaaccgagagaaataaaatttccttttcagaggaaagaagacgactttaccatgtgaacccctgtggcttcctcagagactgtctgctctggcacatgctcctccaggtcttccaggtcacctaggaaacagagtcgctataagcacatgagctccactgagtgaatccctcaggtggtcttggagctgtggacacggggctggcgtgtgtggaaaggtgtgttcacagcaca

SEQ ID NO: 950508 - DNA, 563 bp, Homo sapiens
ccaggtgtggtggtgggtgcctgtaatcccagctacctggaagactcaggaacaagaaccgtttgaacccaggaggcggaggttgcagtgagctgagatcacgccaccacactccagcctgggtgacagagcaagactctatctcaaaaacaacacggtagcctcatcaccgacaacttagagcccttcccagagagccccttttgtccctctttgcaatgcacacggtggcaggtaaggatgaaaagacatttcccagggacaaaccccagagcacaggtgatggcctcggtcattggcttgggccgcaaagctaactaactatggtgactgctcttatttctcaaactaacttaaaacaaaaacctagtgtaaaaagacgacaaaaggtaacgacttccgcaccaacaccaagaccttcagcttccgtggttttcctaaagcaacatcttgactaccccctgggctgacggcagcggcgatgaagacatgtgtgaaggcrgcttcccaaattccaggcgcttccccaaccttcagacagagcaaaccaaattaagctgaca

SEQ ID NO: 950509 - DNA, 703 bp, Homo sapiens
tgcccagtgcagtggcgcaatcttggcccgctgcaacctccgcctcctgggttcacacattctcctgcctcagcctcccgagtagctgggactacaggtgccyaccaccacgcccggctaatttttcgtatttttagtagagacggggtttcaccatgttagacaggatggtctcgatctcctgacctcgtgatctgcccacctcggcctcccaaagtgctgggattacaggtatgagccaccgtgcccagccagaaaaaaaaatttttaaacaggctacctcagattgggtaatttatacagaaaagaagtttaattgacttgcagttccactggctgtacaggaagcatggctggggaggcctcaggaaacttacaatcatgatggaaggcgaaggggaagtcttacgtggctggagaaggaacaagagagcaaagagggaggtgctacacacacttaaacaaccagatctcgtgagaactcactatcatgagaacagcaagggagacgtccacccccatgatccaatcacctccccccaggcccctcctccaacactggggattatgatttgacatgagatgtgggcagggacacagatccaaactacatcataggccccagtgggaggtgtttgggtcacgggggtggatcccccatgaatagattaagctcttcctgggaggtgggggtgagtgagtt

SEQ ID NO: 950510 - DNA, 565 bp, Homo sapiens
agggaaagggtaccatatcaagggagcaccctgtgggacaaaattaattagagtgcagcctttgagtcctagaactttctgcttgtgggaagtttctttcagcagaggcacagatgcagtgctgggctaagtggtagaaagactgtcattctaccccagcagttgggcagccccagtgctcgtgaagggacctggagaaggggacttctaccctttgcctatcactgcagacgtggctgggactcctccacaggagcttggcttgggtgcacctatggatggcctttctggagcactttggggtaggttcacaatccctctctacatgaatgtcagcatttctgcagatccacagaagtgcctcgtctgatctgaatatccagaacattgcgacatgagtgtgacagggaggcagattgctttcgtgctggtctggaagagragctgaggtggctccctccctttctcctgcaaagacctcagtgcctttcaaggagagctcccccagttgcttctgtcaaggctgggacttctgtccaccactggggtattgcatatatccatc

SEQ ID NO: 950511 - DNA, 615 bp, Homo sapiens
ggtaggaggattgcttgagcctgggaggtccaggctgcagtgagcagtgattgcaccgccgtactcagattaagtgacagggtgagactccrtttcaaaagctaaaccaaaaaaagaaaaaaactcaacttcaagatttttatacttctttctctttgttttctatctcattttattttatatttgcatttacttttataattccactctaatcactttgagtttatttgcttgtgctttttccagcttcttaagttgaacacttagttcattttttctcatctcatttacttcttttccaatatcatcattgaaggctataaaattcctcctaagaagcaatttaatgccatcccacattgtgttaaatagcaattttattatcattcagttataagcatttaaaaatttttctttattaattcatctttaattcataagtgattcagaggtttgtttttaaattataaaaatttgtagattttatcatagagtccagggagtcaaattctaactcttaaatttcccctgtcacacctatccctatcatcacaaattgaatccagcatctttcccaccattgccctagccatcttctaggctttctagggaagt

SEQ ID NO: 950512 - DNA, 560 bp, Homo sapiens
tcctgcaggttatggatttttttttttttttgagacagagtcttactctgtcacccaggctggagtgcagtggcatgatctccacttactgcagcctcgtcctcccaggctcaagagatcctcctgcctcagcctgccaagtagcagggactacagtggggcaccaccatgcccagctaatttttgcattttttgtagagacagggtctggctatgttgctgatgccggtctcctgagcttaagcaatcctcccacctcagcctccaaaagtgctaggattacaggcatgagccaccacacccggccagattccttaaagacaggatctatatgctattgatatttggaccctcccactaacacaaagcaagctatcagtacactcttttgctttccactaggactgaaaatttcatttctttaaaaacaaaaatgttttatagcagttaggatgataggtaattggaaagattgttaggagttaaaaaaataaaatcaatattgatttcctagagcaagaattcttaycttgggcctgtgtaagtttactatataagat

SEQ ID NO: 950513 - DNA, 475 bp, Homo sapiens
tatgtatagaaagccctaaagactccacattataaaactgttagaattagtaaatgacttctgtaaggttgcagaataaaaatcaatatactaaaatcagttgcatttatatgcactaaaaacaaactacccccmaaaaaattaggaaaacaattccatttacagtagtataagaataaaatacataggaataaatttaaagagctgaaagagctgtacacttaaatctgtaagatatcactgaaaaaaaatgaagaagacacaaataaatgaaaagatagcccatgttcatgtggagaaatagggacacttttaccctgttggtgggagtgtaaattacttcaaacatgacttcaatcatggcaattcctcaaagatctagaaccagaaataccatttgagccagcaatccttactgggtatatacccaaaggattaaaatcattctactataaagacacatacatacatatgt

SEQ ID NO: 950514 - DNA, 599 bp, Homo sapiens
gtagactgcatcttgcttggggtacaaagaagagaagagttgtaagaggtgatgagtgcttttcattgattgtgtcctacacacctaccccaccatcccacaatttataggctgaagctccaacctacaatgtgatggatttttagaactaattggatttaggtaaagtcataagggtagagccccagtgacatcattagtgcccttataagaagagataccagagagctctgtctttctctcccctacccgctggtcccctgccccccttcccctaccgttcctctccctctccctcttgtagggacatcacagtaaatcacttgcctgttaaatacattagagtgctgaaaatcttattagagagattctttccttctaaatattttagatgttgtaatcatcttttttaaaaaagtggcaaaattggccaggtgcggtggcttatgcctgtaatcccagcactttgggaagccaaagtgggtgaatcacctgaggtcaggagttggagaccaacmtgctcaacatggtgaaaccccatctcttccaaaaatacaaaaaaaaattagctgggcatggtggcaggcgcctgtaatccc

SEQ ID NO: 950515 - DNA, 560 bp, Homo sapiens
aaaccccgtctctactaaaaataaaaaaaattagccaggtgtagcagcacacacctgtaatccaggctactcgggagrgtgaggcaggagaattgcttgaacccaggaggtagaggttgagtgagctgagatggcggccattgagctccagcctgagtgacagaatgagataccatctcaaaaaaaaaaaaaaaaaggcgtatgcatatgttactgcatttcatttttacagcaattgcgtaaactgaaggtattttatcttcatagtaaggatgaataaaccaggtttttaaaaaattgagttaccttcagaaaaatctagaatttagtaagttgtacaaatagaacagaatcccaggaaagaaaagacttgaaagtccagtagactcaaatctcaatgctcacactacatttaatatgtctaatactcggatgagtatgtactctccctaagaagcttttgtgtgtgtttgcatctgtgcagatgggcatggccatgtgtgagaaccatggagctgagaatgcctgaatcacaggtttgttgcaaagaaacatgagct

SEQ ID NO: 950516 - DNA, 382 bp, Homo sapiens
gaaatcaggaggctgaggcagcagaatcgcttgaacccaggagacggaagttgcagtgagctgagatcacaccactgcactccagcccagccaacagagcgaaactccaactcaaaaaaaaaaaaaaaaaccatcagaccttgtgagacttatttaccatcactattgcgagaacagcacagaaaaaccctgcccccgtgattcaattaccttccactgggtccctccaacgacacatggggattatgggagctacaattcaagatgagatttgrgttgggacacagccaaaccacatcagacatgatttgtttagccctaccaagtcgcatgttgacatctgatccccagtgatggaggcgggcctggtgggaagtgttca

SEQ ID NO: 950517 - DNA, 559 bp, Homo sapiens
actaatgtgcaaacgacaggccgactcattcagaaatgaatgcaagaaaccccatgcctctgtgcaggtaaggctgtctgtccctgcccacccaccacagcaactcaaagaaggcagcaaccagaaaggttccatcggggcctttcacttccatttccaatgagtccaaatttagaccgtgctctggaacaaagtggaaaaactatcttgaagcatgtttttggagttctttaatatccactggatgactcacagttatgcatcatagaggccaggtacttttatttctataaaaggaatatgtttgagagttgggaaggccagcctagagctcaaaagcctggtgatcaggctagaaaaacaagggagaaactggctgtctccagctcaggcaaagtggttttaaggaccaaaagctggtttaaaatgtcacacttgagtttrcaatttattttccagcatagtcccatgaatctagtcaacatctaaatactactcagtagtgctaattgggtgtacctcttaaaagtctgtttaacaagctattcaaaacactctg

SEQ ID NO: 950518 - DNA, 828 bp, Homo sapiens
taccatgaccattttagagtgggcagtaagctaggtgtggtggctaacacctataatcccagcactttgggaggccgaggcgggaggatcggttgagcccaggagttcaagacctgcctgggcaacatagtgagacctatctctacaaaaaaaaaaaatacaaaaattagccaggcatggtggtgtgtgcctgtagtcccagctacttgggaggctgaagcatgagaattgcttgaacctgggaggtggaggttgcagtgagctgagatcatgccactgcactccagcccgggcaacacagcgagactctttgtctcaaaaaaaaaaaaagagtgggcggtcaaggaaggcctcactaaggaggtgatctgacaaaggagcaagctagagaaaagcacagttcccagccagagggaacaggaagtgcaaagtggctgcagggtggtgaggggacacccaggagctgaggcaggaggaggaagaggctggggagggcatgctggctctttggattttgttctaagaacaggggaaaccattagagggtcttcacctggaggctggcatagcttggtttacctgtaagaagagaccccccggctgccctggggagactgggatgtgcagaggggaggcagggagacgagcaaggaggctgctgtgcttcccagggaggtaccaggtagctcagaccagtgggaagtggagttaggcaagaagcaggaggcctcccaaggggcrgtgatcagccaggctgcttttccttcaggttcctttagcaaatttgtgaatgtgatatcagccaggacggccattggccacgaccgg

SEQ ID NO: 950519 - DNA, 513 bp, Homo sapiens
gtttagccaaaaagtcatctctagggggtctgcttakgatgctgtttctgcacctccaccaccatcttcttcctggttcatgccttccaggtcatccagtctaaagactgatccaaataaccaaaccagggcagctaatgccctcaatgtcttgaccttggagatttcctttagatacacacagcctccgttcatgactgattccatgctcaagcccattaaacagccacatttgcacaatgaggcattctgggctatgccaggagagcctggccaagattaggttacccagaaagcggaccctgtacaagtagtttctttgggtggagatcccagaaagcaatggtggggaactggggaggtgaggcaaggaaggaggccaccgtaggttacattaatgagcaggttactgctgtgagcttttgaagctcagtgcttctagagacttctgggagacagcatagaatgagtctcagagttgttccttttgaggggtaaagatgctgggatatt

SEQ ID NO: 950520 - DNA, 666 bp, Homo sapiens
atgcctttcttccccacagagcctgagaccctcatyccttccctgagaaagtgccctccagagtctacttaccctcctaagaacagcgtatcagtgagtgaaaaaattggtttcgcaaaatttttttacaaagtactttatccaagtaagggaggctgaatttccactgagagctaacgtcactagtcagaacagtagcaaaatgtaccaaatcttagggacaggctagcacataatgagcaaatgagtaagaaatcaggggccttggccgggggcggtggctcacacctgtaatcccagcactttgggaggatgaggcgggcggatcacgaggtcaggagatcgagaccattctggctaacacggtgaaaccccgtctctattaaaaataccaaaaaaaaattagccgggagtgatggagggcacctgtagtcccagctattcggagaggctgaggcaggagaatggcgtgaacccgcgaggcggagcttgcagtgagccgaaatcgcgccactgcaatccagcctgggcgacagagtgagactctgtctcaaaaaaaaaaaaagtcaggggccaagggcaatacctagtgaggcgcaagtttgggttgggtctagtggtatgagggcagtctccttgggaatctgaacttgtgccagaggacgg

SEQ ID NO: 950521 - DNA, 595 bp, Homo sapiens
cagccagggcaggtgaagtcaggtgtccccgtgtggataagctgtgtcacgatccacagggccttgagcagggctcaactgcatgtcacatgcctggggtcagtaaaactgtaacggcttatgtcaccctaaaaagagtccaaagcattgtcttgccttcaccctggtccacccataaaagttaacaggccctctgggaaatgctgccttggacagcagggcagaagggccccggcagagagagagagcgctgtggcccgcagcgacctctccgctcgagacctctcccggtgtgggcatgtcttcccgcttggtgttgggttaacttgcttctggtcctctgttcggtggtggcgttgccttctgcgctggccccgtggatggatgttccttttttccgtggtgacctcctctccaggctctgcttggtgggcttctggtgtggccgcgccctgtgtgtgtctctctctgtgtcctgccagtggttttaccctatggtaggttacgtcatgctgttctaccacagggtagaaccacggacaggataccggggcaccctctgcgtcracggactcctcgtctgcccagccacaaa

SEQ ID NO: 950522 - DNA, 584 bp, Homo sapiens
aaaaagaatgggaataatgaatcctgaattcaggaggttatcttgggaggaggcagacaggtgtaatgagaaaagagtacagagaaagtttctaagatactggtcatgttgtttctttgcctgggtggtggctcccaagtgttcattattttattcttctttaaacgaaatatatatttagagtcttgctctgtcaccctggctagagtgcagtggctcacccacagctcactgcagcctcaaaatcctgggctccagggatcctcttgctttagcctcccaagtagctgggactacaggtgtgtgccaggccctacacctgctgccaggctctttttattatttatttatttatttttaaatttgagatggagtcttgctctgtcgcccaggctggagtgcagtgccacgatctcggctcactataaactctgcctcccaggttcaagcaattctcctgtctcatcctccrgagtagctgggactacaggcacatgccaccatgcccgactaatttttgcatttttagtagagacggggtttcaccatattggtcaggctggtctcaaactcctgacttcagg

SEQ ID NO: 950523 - DNA, 550 bp, Homo sapiens
ggaatgtattggctcatgtaactgaaaattctagatatcaatcctgattccaagcgaagcttgggctactcaacaatatcaccaaggaatkggcttttctcccatttttctgctctgccatccactgggtcaacttcctattgtcttcgggtccaaaataatagccagtggcccccaggaccacatgcttcctcagtcatattcagaaaggatgagcaactattatttttcctagatttgctagcagatgtcctgagattggctgtggctggctcaacatacatcacatgtgcacttctggtccaggcaaccatgcaactctgaggttgggaacagagtcagcttccccagaaccacatggatccccaaattagaaattgagagctaatggcaaggagggattgggtgctgcagaggcaaccacagatgtctgctataatcagctaagccccagcaacctctgtgacagggcctgcccggctgtgctaggcatcctgagacttttctagaattgggggatgggagtggggtggtcattatattcattctg

SEQ ID NO: 950524 - DNA, 595 bp, Homo sapiens
aaaataatttttctgtcgaagaggcatattttgcggtgatatattctggttttttctttttcttttttcattgagatggagtctcgctgtcacccaggttggagtgcaatggcgcgatctcggcycactgcaacctctgcctcccggttctcaagcggtttctcctgcctcagcctcccgagtagctgagattacaggcgcccaaaactgcacccggctaatttttgtatttttagtagagatggggtttcgccacgttgaccaggatagtttcgaactcctgacctcaggtgatctgcctgcctcggcctcctacaagtgctgggattacagatgtgagccaccacacctggccttattctggttttctttaggtgtcttcattgaacaagtaggtattgtctggcatacccttctgggttatctcgtcttatggggtcttacttttgtctttaagctatctagagctctagtggagcattgtatatataccatcattaatgagttaaatggtatctttgacatatgttcattttatatttgtgtgagagtcataattttattttaaaaaaaagatatgctttttttttttttt

SEQ ID NO: 950525 - DNA, 651 bp, Homo sapiens
cgaaagtaaaagttgctaagagttaacagtgtaacatgtatttgagactactgaagaaacagttctacacacaaagtgtgtaaggaaagcagaatgtacttttggtaaaagattttaagaargcatgggaatatgaatttctcacctaagtttagagggttaaaggattgtgttaagtgaggaaggaaaaaatctaaaggtttaaacaagttgtgaaaggtttataaaaaattaatgtgtgcaaacatattggcctaaagttaaagaggtattattctgtttttccataaattgaacattggaataaaagtgcaacagagttttcctaaatcattgttctgctctttaacaaaaaaaatattgtaaagggttataaaaggtttataagaatcttaccttatggtcaaactaactaaaactgaatagatttgtaaaatgctattaaactaaatttaggctggacgtggtggctcacacctgtaattccagcactttgggaagccgaggcaggcggatcacctgaggttaggagtttgagactagcctgaccaatatggtgaaatagtgtctctactaaaaattagccgggtgtgttggcgggtgcctgtagtgccagctactcaggaggctgagacaaaagagttgcttgaa

SEQ ID NO: 950526 - DNA, 552 bp, Homo sapiens
taagagtattttttttcataggatttttatgataattaaattagcaaactcacataatacayttagcagagagcaccaaaaaaatcagatgttgaatacattttaaatatgatcatgatcatttattattatatagactttttatacagagactggatattttttattcatcaaattttttaccaaaaatacactgtgaagatttttttctatctctttaaatatctctttaaacctatctctttaaatatccaaaatatcatttcaatgtttgcttagtattatgttatatgaacagataattttaatcaaatctttcttgatgggtatttatattgtttccaaactttatctgtcacaattattgctgtgattaataatcttagaaatgtatgttcataattttttagaacattttggaactgatacatagagccaattgcaaagaaaaatgttgctatttactactcaccaaaagtatagaaacattctcttcccaccatgtactataatatgacaccattttgttttaaggtgttcaataattgagta

SEQ ID NO: 950527 - DNA, 586 bp, Homo sapiens
tcctcagaaagtgggtttttctttcctattgcatagtcaggctgtacattttctgaacttttatgctctgcttcctttttaaacatatgttctaattccaagccatatctttgtgaatacataaaactcagtgctttttaacagtacccaagtcacctcttgaacactttgctgcttagaaatttcttccactagatattctaaatcatctctctcaagttcaaagctccccaaatctctaggataggggcaaaatgccaccagactctttgctaaaacgtagcaagagtcacctttgctccagttcccaacaagttcctcatctccatctgagaccacctcagcctagactttattgtccatttcattatcagcatttgggtcaaagccattcaataagtctctaggaagttccaaactttcccacatcttcctgtcttctgagccctccaagtcattaggaagttccaaactttcccacattttcctctcttcttctgagcygtccaaactgtttcaacctctgcctgttacgcagttccaaagtcacttccacaattttgggtatctttacagcagtacccca

SEQ ID NO: 950528 - DNA, 605 bp, Homo sapiens
atacttaccactaatgttgagttcaaaataaatgaatttaaaaataatctacagtatttcctaatttcatattatacatcatttaaagtatttttaaacttacccaaatgaagtaatgtaaactgggctgccagttcctttgcatcttctaacgtagtacagagtttgtctggcatgaagtaactctgggatccatttgcaatagcaggaataactatcttatacaccaagagtactttcccatcttgacttgttgttgaatataaataatattctggtggtgcccagttatttttgttgcagtaataatccaaatgcattactgcagaattaaaatgattggattttaaagaatacatactaattggagtaagctttgttccaggataaaaagggtaagtgcatctttcaacttcaggcggacttgggctatgctgaccattgagacgagcaggaagagttggcagcttgcctagagtttttgggtggctctcttctttgttagcaaacacaatcagattttcagaatttggactaatctgaccrttaagatgctgtctccaagtgttttctttatttactggtttagctagtgttacctcaat

SEQ ID NO: 950529 - DNA, 583 bp, Homo sapiens
tactcaggaggctaacgtacgaggatcgtttgagctctggaggcagaggttgcagtgacttgagattgtaccactgcactccagcctaggtgacagagtgagatctcatctcaaaaacaaaacaaaacaaaaaaacccaataaaaataactgaaagagtggaattggattgtccttacacaatgaaatgataaatgtatgaggtgatggacaccccaaatgccctgttgtggttattacccatcacatgcctgtatcacaacattgcatggaccccgtcagtgtatacccctattatgtacccataataattaaaaattttttaaaaagagtgctccaagtaagtgagccacaggcacaaaggcctggagatgggaatgacacatccaaggaacttcaagaaggctggcgtggctggatctgagtgagtgagttaggccatgagatcagagaaactggcaatgcaagggctggtctttgcatgctgtgggccttggtcaagatttctgattttattctcagtgtgatagcaagccgttaagattttgagataaagagttacayggtaaggttggtgttttaaa

SEQ ID NO: 950530 - DNA, 673 bp, Homo sapiens
agtcaagggtctctgcaaagtatctctctcctatatcccaaagccttctctacactctctaaatcatggcttcttatacgccatgcaaaattcttaccacgaattttggatctgcactataaaaagtgtttcccttgttgctgttgaacgtggaaagatgtggatactcaatattcctattgggggaacgtccttagtaaggatggagaacatgtaatgctgagggttcatatgtgttcttcattagctctgttcaaaacaggattaagaaaatgcttatttaaactggatggcatttattactctgaaagttctgaaaaaaaaaattattgcgagatacccgctttctagggtgctaaagaaagactactttaaattgttattaaaaattacagaacatagaagatatctgcatcttgaactctgcataaaactgatttttctgtgtggttaaattcagactatactttttggggggcaatatctcagtaatgatgctgtgttcttcggtgtgcgtcagcacatcacaaaaatttgtccttgtgcagttgattttaaaatttacttcaagagctctcggaaatattcatttcactgtagagttaattatttttctcctcattattaagtatctttwtgtagccaaagaagagctgtgcataaatcatcacat

SEQ ID NO: 950531 - DNA, 579 bp, Homo sapiens
ctttcttaggttttctttgcatatgtctrtctttggaaaatgaagactcttatctttgtttacaggccagaaaaatggggtaaaacacaggctcttccacttactggatgtttgacaaaatgttctttttgggcgaaatacattggcattactagtgagcttgttagaaattcagaatctcagactttatttcacatcttctgaaaaaaaaaaatctgcataagatctccagtgtattgtacacattaaaacttgagaggtgctgtctaactcaacatgtcatttttgcctaaaaaatatgcactactcattctttgtgatgcaaatataacactaaaaaatatacatgtttgtgttcatgcctttcgtttttatactttattgttcataaaattatcatatatacagcggtattgtggatcttataccattctcttctctcagagttagagaatacattagagaatatttctgtgttgaaaattgttggatgatttcagttattcctgtaagtcagaaccaattttctttactctctcatttaaccttaattcaaatgataaattctgcccgtggaca

SEQ ID NO: 950532 - DNA, 563 bp, Homo sapiens
tggtggctcatgcctgtaatcccagcactttgggaggccaaggcaggtggatcacgaggtcacgagatcaagaccatcctggctaacacggtgaaaccccgtctttactaaaaaaaaaaaaatacaaaaaagttagctgggcatggtggtgggcgcctgtagtcccagctactcgggaggctgaggtaggagaatggcgtgaacctgggaggcagagcttgcagtgagccgaaatcatgccactgcactccagcctggacaacagagtgaaactccgtctcaaaaaaaaaaaaaaaaaaaaaaagagtcactcaagaatttgtaagagctctctaagcagagaatgtagtaaggagggtatttgatggagagggaataggaggaacaaaagaacaaagatatggaaatatgtgaggccttcagggaacaactttttgattgtaaagaggaaaatgaagtattaataagagatattactatcttaattacatttagtaaatacttgataagcacatggctagaagccmtaagcttccattagatttaagtttcttaggacaagt

SEQ ID NO: 950533 - DNA, 622 bp, Homo sapiens
aaatacctcactaacataccccactctgaaatcagatgcaagaagtcagcttgaaataaagaccctgcagaaagcctcagcctggtgraaacatccaaaaaagaagtatattgactgctctcggtctacactgaagttaaaagaacatccacacacagagatgaggaagaaaaatgcaagaactccagtaactcaaatggccacagtgtcatctgttctccaaatgactgcactagttcttcaagaagagttcttaaccaggactaactggctgtaatgacaaaaatagaatttggaatatttctatagataggagcaaagatcataaagattcaggaaaatgggaaaaccaatccaagtaaaataagagtcacaataaagtcatacaggagctgaaggacaaaatagctagtataaaaaagaagctagtgggtctgacagagccgaataacacaatacaagaatttcacatgcaatcacaagtattaacaacagagtaaaccaagcttaaggaagaatctcagaacttgaagactggttctctgaaataagaaagtcagacaaaaataaagaaagaataaaaatgaataaacaaaacctccaagaagtatggaattatgta

SEQ ID NO: 950534 - DNA, 594 bp, Homo sapiens
aaccatctgattttcgacaaggtcaatgaaaacaagcaatagggaaaggatttgccatttgataaatgtttcaggttaactggcttgccataagcagaaaaatgaaaccaaattcttatctttcactaatacaaatatttactcaagatggattaaatatttaaatgtaagatctcaaactataaaagcactagagtaaaacctaggaaatactcatgtcaacactggccttggcaaataatttttggctaagtccccaagcaattgcaacaaaaacaaaaattgacaagtgatacctaattaaactaaacagcttctgcacagcaacagaataagcagacaacctatggaatgggagaaaatattcattaactatgtatctgtattagtctgtttttacactgcttataaagcattacttgagactgagtaatttatttaaaaaaaaaaaaagatgaggtttaattgactcccagttccccatggctggataggactcaggaaacttacagttatrgcaaaaggtcaaggggaagaaggcacttcttacctggtggtaggagacagagagcaagaaaacaaggaagtgccaca

SEQ ID NO: 950535 - DNA, 633 bp, Homo sapiens
tgcagtccttgatggtttcctcaccttgatgttggtcccatggccatcggtgttggcctcaccatcaccactttcagtctctgaacagcaacaggctccactgagcaggtgcccagtgacacctggtgcgttggagggtggggctgagccctggtgagccaggacctgctgaaagatcagggggaagagaatagacccccctccaccagccctggggacccacaaaggaacattcaggccgccccagtttgagccatgagttgtgtccacggcagcctcgcttcctttgctgggccttggcagcgataacgcctgaatctgtgcaggtctcaggtgagccttctccagctcagcctctgtcgcctcacaggacgcctcggttcccgggcattgattcagcacctgctgtgtgaagggaaaccagagaggccagtccttgctcctgaggactcaagggtctggatgtgggggggaaacccacaccccacaatgctcccagacgatggacgcagcgcaaggtctaggctcactccaggaatgtggggcacagggcccagagcccatttggatgaggaggcgccgtgccctcygtgggctggagggacagggggcctttggtggccggtgaaagcg

SEQ ID NO: 950536 - DNA, 603 bp, Homo sapiens
gatgaaatgaaatgagattaaatgagatgaaaaatgatgagatgaaaaatgatgagrtagggaggagccaagatggccaaataggaacagctccggtctacaactcccagcgtgagcgacgcagaagacgggtgatttctgcatttccatctgaggtaccaggttcatctcactagggagtgccagacagtgggtgcaggtcagtgggtgcgcgcaccgtgcacgtgccaaagcagggcgaggcattgcctcacttgggaagcgcaaggggtcagggagttccctttctgagtcaaagaaaggggtgatggatggcacctggaaaattgggtcactcccacccgaatactgcacttttccaacgggcttaaaaaacggcgcaccacgagattatatcccgcacctggctcggagggtcctacgcccacggagtctcgctgattgctagcacagcagtctgagatcaaactgcaaggcggcagtgaggctggggtaggggtgcctgccgttgcccaggcttgcttaggtaaagcagctggaaagcctgaactgggtggagcccaccacagctcaaggaggcatgcctgcctctgtaggatccac

SEQ ID NO: 950537 - DNA, 583 bp, Homo sapiens
gagtctcgctctgccactcaggctgtagtgcagkggctcactgtaacctccacctcttgggttcaagtgaatctcctgcctccacctcccgagtagctgggactacaggcatgcaccaccatgcctggctaatttttgaatttttagtagagacagtgtttcaccatgttggccaggcttgtcttgaattcctcacctcaagtgatccacccacgtcggcctcccaaagtgctgggattacaggcatgagccactgtgtccggccccctgacattgctttctaaagtaagattacctgtagttctcagtgttcgccaagcatgtatgaaacacaacgtatgttaagaggctgtttaattacataaatgcttatttgggggattcttgttctcagtggccttctctcttttggatggatatacacagtttgattggcactcctattgacactttatttggtttgtgacttgtttgtctcggtgcctttctattaatatattttttctatttaaactaccctctttttttcagtacagcactggacattttctttgaaatcttccagattcatttggttgtcttc

SEQ ID NO: 950538 - DNA, 586 bp, Homo sapiens
ccaagatggtgcatgcttgtggtcccagctactcaggaggctgaggtgagaggatcacttgagcccaggaagtcaaggctgctgtgagcagtgtttgcaccactgcattccagcctggatgacagagggagaccttgtttcaaaaaaaaaaaggaaatatcattcacaataaatgtgaaataaaaacctttcagacatgcaaaagctgaaagaactcatcaccagtagaccagtgctataagaaatgttaaaaggttttcagagagaacaacaataatgctagatgaaaatggtaaaatgtgagtaaatataaaagactggttctctaattttttaagtcacttttaatctccaaataaccaaaactatcttaagaaagaacaactaagctggtgatctttcacttcctgatttcaaaacatattacaaagctacagtagtcaaaacagtacagtactggcataaagaagacatatagaamaatggaccaaaaaagaaaagcttgatggcattgaatttggcaatgatttcttggatatgacaccaaaaacacaggcaataaaagtaagaataaacaaatggacta

SEQ ID NO: 950539 - DNA, 458 bp, Homo sapiens
tgttgttgcaatgaatgactagaggaggattagattagtaaagagaaaaagactccatcatacaatattcactcaacagatatttgagtgcctatggagtactagacacagttctagaaaccaggggggagaacagtgcaccaaaaacttcaaagtccttgccctcatagagcttatattctagctgcagaaagatagacaataaatagtaattaaataagttgctaaatgtagaatacggcagatagtgatcagtgcaaagttaaaaagccaagcatagtaagagagattcgcagtgttgacatagggactggagtgattattagtgttttagagggtgatcaaggaagccctcactaagctttttcttgggcagagactgggrgaaagtgagagaatgggtagtgaagctattcgagggaagaatgcaaaatacctgaggcagaagttagttggga

SEQ ID NO: 950540 - DNA, 458 bp, Homo sapiens
tgttgttgcaatgaatgactagaggaggattagattagtaaagagaaaaagactccatcatacaatattcactcaacagatatttgagtgcctatggagtactagacacagttctagaaaccaggggggagaacagtgcaccaaaaacttcaaagtccttgccctcatagagcttatattctagctgcagaaagatagacaataaatagtaattaaataagttgctaaatgtagaatacggcagatagtgatcagtgcaaagttaaaaagccaagcatagtaagagagattcgcagtgttgacatagggactggagtgattattagtgttttagagggtgatcaaggaagccctcactaagctttttcttgggcagagactgggggaaagtgagagaatgggtagygaagctattcgagggaagaatgcaaaatacctgaggcagaagttagttggga

SEQ ID NO: 950541 - DNA, 616 bp, Homo sapiens
taattgttcattttagcacattagccatgggaagagttgacaggcattctaatatctgctcaacagtggtagagatatggtgtatctgactctcaaacctctcacctcatctaccatataggtaccaagattctaatgaatctgtccatttacttccttgttttcttagactagaaaagctattcttagagggaagtcctttttcatatacctggattcatccaactagccatataataaatgctgcccacccccagccctgctttgtttttaacctgaactaatcattatttgtacatctctattttctaatatttcctctgggtatcctgtttaggtaaaacacagctttatgatgcccttcccaatcaacattagactacttgtttcaagatagtaattaacttcctgcctaatttgtcacacttaatttgaaattaggcatgcaaagctattaaacactgtggttgtggtgtttgcatctggctgaggcaatagctactggcagccttgatttatcactcttcatttaaattcctgtgccmatgatttcagttcctaaatgctgtgactggcatttatggatttcaaaatcaaagtgaaaataagctgcagt

SEQ ID NO: 950542 - DNA, 522 bp, Homo sapiens
accccaagatagggttctgggatctcatgcaagaaagaattcagggcaagtccagagagtaaagtgaaagcaagtttattaggaaagtaaaggaataaaagaatggctactccatagacggttgcccattttwacagttatttcttgattatatgttaaacaagaggtggatgattcatgcctcccctttatagaacatatagggtaacttcctgacgttgccaaggcgtttgtaaactgtcatggcactggtgggagtgtagcagtgagaatgaccagaggtcactctcgttgccatcttggttttggtgggatttagccagattctttactgcaacctgttttatcagcaaggtctttatgacctgtatcttgtgctgacctcctatctcatcttgtgacttagaatgccttaactgtctgggaatgcagcccagtaggtctcagcctcatgctacccagctcctattcaagatggagttgctcttgttcacatgcctctgacataagggtcaccctttg

SEQ ID NO: 950543 - DNA, 587 bp, Homo sapiens
agaaaattttctattgagataaaatttatataacataaaatttaccattttaactattttaaagcacacaattcactggtgatyattatattcacaatgctgtacagccatctctactatctagttccagaacatctcagttatccaaaaagaaaccctgtatctcccaaatctcccctcccctcagtgcctgacaaccacgaatctactttctgtctctatgcacttgcctttgcatttgcatatgaaatgcctggacatttcatacaaatggaatcaaataacatatgaccttttgtttctcacttattttgcttggcatagcgtgtctaaggttcatccatgttgtagcatgcatcagtattcattcctttttatggttgaagaatattcccttgtttggatatactattttgtttatccattcctcaattgatggaataatgctgctatgaacatccatgtgcaaatacctgtttgagtacctgttttcagttcttttgggtatatacctatgagtggaatagttgtgtcatatggtaacactatatttaactttttgaggtactgccaaactcttctccaca

SEQ ID NO: 950544 - DNA, 604 bp, Homo sapiens
taatacacaagaatatatatatataatccagcctttaaaatgtgtgtatgcaaatgcacaaatgtatctggttatgtaaatggatattatgttctcttgccttttgagacaggttatacaaaaaaaaawtttttttttttgagacaaggtctcactccatcaccctggatggaatgcagtggcacaatcacagctcactgctgccttgaactcccaggctcaagtgatcttcccacctcagcctcctgagtagctgggactacaggtgtgtaccaccacgcccagtaaatttttattttttttatttttgtagagataggggggtctcactatgttgcctaggctggtcttgaactcctgggctcaaatgatcctcccaccttgttctcccaaagtgctgggattagaggcatgagccactgcacccggccaggttatacaaattatcgtttgcctttcttaaatgacacacaatgaccatctgtcattgtactttgctatagtgtgttgatctcttggtattttagggctgtttggtcccgggaatttgtgctttttgagttctcaggtcagctcgtcatagtatttctagctcccctctcat

SEQ ID NO: 950545 - DNA, 505 bp, Homo sapiens
cttcagcctcacctatggctaaaaggggccaaggcacagctcargcccttgcttcagagtatgcaagccccaagccttggtagcttccacatggtgttgagcctgtgggtgcacagaagtcaagaattgaagtttgggaacctcttcttgatttcaaaggatatgtggaaaagcttggatgtccaggcagatgtctgctgcaggggccctcatggagaacctctgctagggaagtgtggaagggaaagtggggttggagccctggcacagagtccccactgggacactgcctagtggagctgtgagaagagggccactgtcctccagaccccagaatggtagatccaccaacagcttgcaccatgtgcttggaaaagctgcactcaatgccagcccatgaaagcagtcatgagggggcctggatcctgcaaagccacaggggcagagctgctcaaggccatgggagtctccttcttgcatcagcatgacttggttgtgagacatg

SEQ ID NO: 950546 - DNA, 551 bp, Homo sapiens
tacaaaacattgctgaaagaactcatgtatgatacatatgaatggaaaattattccatgctcactgacaggaagaatcaatrtcattaaaatgaccataaagcccaaagcaatctacaaatttaatgctattcctttcaaactaccaatgtcatttttcactgaattagaaaaaagtgattctaaagttcatatgccaataaaagggagtttaaatagccaaagcaattctaagcaaaagaacaaagctagaggtgtctcattgtctgacctcaaagtatacttcaaaggtacagtatctaaacagcatggtattggtacaaaaacagacacataccaatggaataaaatacagaatccagaaataaagctgcacaactatgatcatttgaccttcaagaaattcaacaaaaataagcaattggcaaatgactctgtattcaataaatagtgctgagataactagcttgccatatgcagaagtttgaagctagacccctacattacacgatatacaaaaatttactcaagatgagttaaagaggtaaattt

SEQ ID NO: 950547 - DNA, 747 bp, Homo sapiens
ctgtgcctaagtcaggaaaagaacctgtgacttgtctccactcaaggtccttggggagatggtaggaagaaggtcaaagtgaactctgtgatgtatatggcaaaacacaggctgggaacyggaaagccggtctctaccataaaacagggctctatctgagaggctgctgaggaacaagggaggaatcactgtggcaaatgggggtgggaggaacaccaggaggctgacaaaggctgtgatgctgggagcagcagctaatgaatgcaggcagaaaccctctcatttttgtgtcaaggaagcaaaggcactgaggcgcctttcccaaacatcatggtaccaccattcacactgagactaccatatccaggtgctcttgaaggcagctctctgtattagaatcaccttaggggagatttttttttttggggggggggaaatggagtctcacttctttgcccaggctggagtgcaatggtgcgatctcagttcactgcaacctccgcctctcgggttcaagcagttctcctgcctcagcctcccaagtacctgggattacaggcacacgacaacatgcccaagtaatttttgtatttttaatagagacagggtttcaccgtgttggccaggctggtctcaaactcctgacctcaagtgatctgcccgctttggcctcccaaagtgctgggattacaggcagagcaaccacacccagcctgggagagatttttaaaaactgttagtgatttc

SEQ ID NO: 950548 - DNA, 655 bp, Homo sapiens
aacattcagaccacagcaggagagttctggaaccctatgtgagggacaaacattcagacactcatagcagtgttctggaatcctatgagagggacaaacatttagacccacgtaccagtgtgctggaatagtacgtgagggacaaacactcagaacacaacagcagtgttctggaatcctaagtgagggacattcagatgatggcaggagtgttctggaatcctatgtgagggagaataattcagaacctcgtagcagtgctctggaatcctatgtgagggacaaactttcagaccccagcagcagtgttctgaaatcctatgtgagagagaacctctcagaaaccagcagcagttttccagaatcttatatgaaggccaatcattcagacgatagctggggtgttctggaaacctaactgtgggacaaacattcagaccctcgtagcggtgttcgggaatcctatctgagggacaaacatttagagacacgtagcagtggtctggaatcgtaaatgagggacaaacactcagaacccaacagcagtattctggaaacctaagtgagrgacacgcattcagacaacagcaagagtgttctggattcctatgtgagggagaaacactcagaacccagcgtcattgttctggatcct

SEQ ID NO: 950549 - DNA, 655 bp, Homo sapiens
aacattcagaccacagcaggagagttctggaaccctatgtgagggacaaacattcagacactcatagcagtgttctggaatcctatgagagggacaaacatttagacccacgtaccagtgtgctggaatagtacgtgagggacaaacactcagaacacaacagcagtgttctggaatcctaagtgagggacattcagatgatggcaggagtgttctggaatcctatgtgagggagaataattcagaacctcgtagcagtgctctggaatcctatgtgagggacaaactttcagaccccagcagcagtgttctgaaatcctatgtgagagagaacctctcagaaaccagcagcagttttccagaatcttatatgaaggccaatcattcagacgatagctggggtgttctggaaacctaactgtgggacaaacattcagaccctcgtagcggtgttcgggaatcctatctgagggacaaacatttagagacacgtagcagtggtctggaatcgtaaatgagggacaaacactcagaacccaacagcagtattctggaaacctaagtgagagacacrcattcagacaacagcaagagtgttctggattcctatgtgagggagaaacactcagaacccagcgtcattgttctggatcct

SEQ ID NO: 950550 - DNA, 797 bp, Homo sapiens
gctaattgagggaaaaacacacagatcacagaaggaatattctggaatccattgtgagggagaataatacagaccctcgtagcagtgttctggaatcctatgtgagggagaaatgctcaacccagaagcagtgttctgcaatcctatgtgagggacaatcattcagactacagccggggtgttctggagtcctacgtgtgggacaaacatgcagacccgcgtagcatttttctggaatcctctttgaggaaaatacattcagaacacaacaggagtgttgtggagtcctatgtgcgggacaaacattcagtccctcgtagcagtgttctggaatgccatgtgagggagaaacactcataacccagtagtagtattgtggaatcctatatgagggacaatcattcataccacagttgaggcattctggaatcctatgtgtggggcaaacattcagacccggacccttgtagcactgttctgcaatcctatgtgaggaacaaacttttagacccagggagcagtgttctggaaccgcaagtgagagacaaacacttggaaccctacagcagtgtcctggaatcctaattgagggacaaacatacagaccacgaaggaatcttctggaatcctatgtgagggagaataattcagaccctcgtagcagtgttctgcaatcytatgtgagggaaaaactttcagaccacagtagcagtgttctggaataccatgtgagggagaaacactcacaacccagcagcagtgttctggaatcctatgtgagggacaatcattcagac

SEQ ID NO: 950551 - DNA, 765 bp, Homo sapiens
gaatcctgcttgtgggacaaacattcaaaccctcgtagcattgttctggaatcccatgtgaggaaaatacattcagagcacttcaggagtgttctggaatcctatgagtgggacaaacwttcagaccctcgtaacagtgttctgggatgctatgtgagggccaaacatttagacccacgtagcagtgttctgtaatcttacctgagggacgaacactcagaacccaacagcagagttctggaaacttaagtgacggacaaacattcagaccacagcaggggtgttctggaatcctctgtgaggtagaataattgagactctcgtgacagtgttcttgtatccaatgtgagggataaaaactcagaactcagtaccattattctggaattccatttgagggaacaacactcagaccagagcaggaatgtttggaatcctatatgagggagaaacattcagaccacagtaggattgttcttgaatcctttgtgatgcacatacagccaaaccacagcaggagtgttctggaatcctatgtgaggtcaaccattcagaccacagcagtagtgatctggagtcctatatgagggacaaacattcagaccacagcaggaatgttctcgaatcctatgtgaggaagaaacattcagcccacagcagcagtgttctggaatcctatttgaatgaaaaacattcagaccagagcaggagtggtctggaatcctatgtgaggtacaatcattcagacactcgtagcagtgttct

SEQ ID NO: 950552 - DNA, 538 bp, Homo sapiens
aagcacagattggccaggggtattatcaaggggccctggattcctttcactgtgaaattctaggcacgcccaactgtgcggcaagagatgccataaaaatccaggttttccgagctccctgaaaaggccagtgcctgctcctggctatgcaaactccaggaaggtcaagcctggtagtggttgtgaagaatactcttaagcttcttttttatggtttttagaaatctttttaaagaaaacagctcaacacctttttttcttcttcttttttttttttttttttttttttttttaagagacagggtctccctatgttgcccaggctggtctcaaactcctgggctcaagttatcctcctgcctcagcctcccagagtgctggaattacaggtgtgagccaccacacccagcctagytcaacacctttctttttttcgtttttttttttgagacaaagtctcactctgtgtcccaggctggactgcagtggtgcaatctcggctcactgcaacccccacctctaggttcaagcgatcctc

SEQ ID NO: 950553 - DNA, 755 bp, Homo sapiens
tacacaggtaggttatagtaaagttttaatttcctctgtgtttttcacttactttccaatgttactgcaaatctgtatctttatctatctaaagagaaatagatattatagtagaagcrgtaagaaaattttaccaaatgccttagttttagtcataagaagctttttttctaatgttaaaactttataagaaatgataaattttactctatttccacaattcagaaaatgacacttgcaaatttttaagtttgaaaccaacttttcaaaacaaacaaacaaaaaaccctttatttttcaacttttattcctttacatataatttaaatttctcctagtggcattcttatttagaggaatttaccaaacagtatccttacctttgatatggcaaggccttttagataagaaaaaggctccccaactggggaggcacagataagtgaggtgtactatcaaacatctactcatcatagaaagcatgctggaatgtactccacatttccttacattgcaaaccctgagccttggctctattagtgtcgggacaaagcgggtaactgggcagacttttcataaaaataaggtggggcttgtttgtgtgcaattttgaatgtgatacccttaacaaaagtgtctggttctgatttgatgacactgaactcaagaaaaatagccagattaggatcagaagggaagttgcaaaatttcctgatttgctgaatatgacattaatatacagggggaaatatgct

SEQ ID NO: 950554 - DNA, 747 bp, Homo sapiens
aggtacagggaaaagtggacagttagcaaggcaaagaggagctttattgagtgacagaacagctcagaggagacctgcattgggtagctcctctccacaggcagggcgtcccgatgagtgttcagttctcaacagagaggagaccctggagtggggagctcctctctgcaggcaggttgtcctgtcatctccttgagtctgtctgagtctggggtttttatggacttcagagaggaagaagtgcctactgattggtccgtgggtggccatgggtgggcctggaaaaagtaccgtaagttcccactctggtctgtggggccggcagcctggccgtcaggcttcaggccttccccagctcgaaggtagagcttcactagggacccactcctttccacccaggagcctgtctgcctcctgctgtcacccaggctattcatgctgagggacacctaaaggcccatgcagagccgcccttagcccccactcaggctccctcccatgcttaccagtgcccaaagtccagaggcagccaaggcagcagggggctggagcgtcagtgctgccccaattgtgcacacacccaaccaggttgcaacagctcctgggctcgacctcaactttgctccaagatcagagtaggtgcagggagcagggagaggccaggtagtgggagcaggcacttccaagcctgcaggtgggarggggcctttccccaggcccccaagaggggacgcccaggtccgtagc

SEQ ID NO: 950555 - DNA, 534 bp, Homo sapiens
aagatcaggaataagacaaggatgttcgttcttgatacttctattcaacattatcctggaggtactagccagagcaagtaggcaagaaaaagaaataaaaggcatccagattggagaggaagcagtaaaattgtttctattcacagatgacctgatcttatatatagaaaatcctaagaaatccaccgaaaatattttgtgctaatgaacaagttcagcagtttcaagatacaagatcagtatacaaacatcagttgaatttctatacacttgcaataactaatctgaaaattaacaaaaaaatccatttatagtagcatcagaaacaataaaatattaacactaataaatttttttaaaaagtaaaaaattatactctgaaaactacaaaacattgtctaaaktaattaaaggtcaatgtaaatgcaaagacattccatatttacagggatcagaagacttaatattgttaagattgttgacatgacaatattctccaaattgatctacagattttacataatccctgttgaa

SEQ ID NO: 950556 - DNA, 597 bp, Homo sapiens
ctgtgactagatgacttcaggtgagactcagcacactcctagatgtggtggctatggagtgagaatctttctgcataagaaaagatgataaagtaacaggggctttgtcatgaatttgaagtaccagcttggccagagttgggtagagcaccaagtgggctcgtaaggccctaattctaggagttggctgttggacagcatttctggacctgccttgtgtccaagaggagcccactgccctgaaaggtgagttccaggccaggcagcattcactacaagctaactaaagagccctttgctttaaggggacattggcagtagtctggcaattctccctattggcctgcaagggcagtggctatgaagtgaggctccactgcctttggaaagagaagggaagaggaggaaggtctcctccttgtggtttgagtgccagctcagtcacattgcaatagaataccaagaagacatgtaagaatttttttcttccttgctctgtcgcccaggctggacagtggcacaamcttggctcacggcaacttctgcctctgggttcaagggattctcctgcctcagcctcccgagtagctgggacta

SEQ ID NO: 950557 - DNA, 765 bp, Homo sapiens
atgggtacaaacaagcctagactgagaaggctacaataaatacctaactctttaatgcccagatatcaaagaacatctattaacaatcaacaccatccaggaaaatatgacctcaccaaataaactaaataaggtaccaggtaccagtcctggagaaacagacatggaagctctcagagaattcaagatagctatattgaggaaactcaaagaaattcaaaataacacagagaaataattcagaattctatcagacaaatgtaacgaagagattgaaataatttaaggtaatcaaacaaaaattctgaagctgaaaagtacagttggaatgctgaagaatgcatcagagccttctaagagcagaactgatgaagtggaagaaaaaaatagtgagcttgaagacaggctatttgaaaataaagtcagaggatacgaaagaaaaaagaataacaaacactgacgcattcctgcaggatacaggaagtagcctcaaaagggcaaacctaagaattactggccttaaagaggaggtagagatagacataagggtagaaagtttattcaaatggataacagagcacttcccaaacctagaaaaaggtatcagtatccaggtataagaaggttatagaacaccaagcagatttaacccaaagaagactacctgaaagcatttcataatcaaactcccaaaggtcaaggatgaagaaaggatacttaaagcagcaagagaaargaaacaaataacatacaatggtgctccaa

SEQ ID NO: 950558 - DNA, 566 bp, Homo sapiens
gaggtccttggtcaattcttccattgcaccatgcttccccccacccccgaccgtgcctttgcacatgccatccctcctgcctgaaatgctcccgaccttctttacctggttagctcttactcttccttcaaatttccttctttacctggttagctcttactcttctttcaaatgtcttatcacttctaggaagccgtccttcttagtattcatgattaagccaaatctccccatgatttgctgtttacaggcatttattttgcctttatagcacttacccgacttgtaattttacctttggtttctagtgatttgaccgttgtgtcgattgctctggaatgtaaactccctgagggcaggcgttgtgcttgttttgatcacctagtccttgcacttcacctgaaacatagtaggtgttcagcagagacttcttggatagataaaagcatggatggatggatggatgsgtggatggatggatggatagatgaatggatggatgggagcaagatttcacttcaggccaggcatggtggcccatgcctataatcccagcactttgagag

SEQ ID NO: 950559 - DNA, 600 bp, Homo sapiens
aactatcatcagagtgaacaggcaacctatggaatgggagaaaatttttgcaatctatccatcagaaaaaggtctaataaatatccagaatttacaaggatcttatatatttacgagaaaaaaaaaamaaccccatcaaaaagtgggcacaagatatgaacagacacttctcaaaagaagacatttgcgcagccaacaaacatgaaaaaaagctcggcatcactgattatcagataaatgcaaattaaaaccacagtgagataccacctcacaccagtcagaatggcaattattaaaaagtcaggaaacaacagattctggtgaggttgtggagaaataggaatgcttttacactgttggtgggaatgtaaattagttcaaccattgtggaagacagtgtggcgattcctcaaggatctagaaccagaaataccatttgacccagcaatcccattactgggtatatacccaaaggaatattaatcattctaccataaagacacatgcatgccacacgtatgcttattgcagcactgtttacaatagcaaagacatggaaccaacccaaatgcccatcaatgatagactggataaagaaaa

SEQ ID NO: 950560 - DNA, 650 bp, Homo sapiens
atttgtgggagctaagctatgaggatgcaaaggcatgagaatgatacaatggactttgggaacttgggcgggaagagtaggaggtgggagagggataaaagactacaaatatggtgcagtgtawactgttcgggtaatgggtgcaccaaaatctcaaaaatcaccactaaggaacttactcatgtaaccaaaaaccacctgtaccccactaacgtaatggaaaaaaaaaagaaaaacatgttaggattactaaggattgaattagttttcactttgggaaacattaaacattttataaagttacaatatgttgttatatgtgaaaagattaataaaaatttataaattgtgtctttggtttaccctaattggctataaagttcccgcctgtgggtctctgcttttagagttataaaaaggtgcatgcaaattctggtggtgaagcctcagcctcattctttggctgcagagtatgctttcttttgttctgtttttgtcttattttataaagtaatgtggggacttaaaaaaaaattaatacaacaaaacgtttggtttttgttggttattaactcacacaccttccaacccttcactatctgccttttggacaacaccatgtacataatccacccagtctctggtatttt

SEQ ID NO: 950561 - DNA, 539 bp, Homo sapiens
accacaaagatccctttatctatctttccagtctctacttcctcaggataaccactatyatgacttctaatattagtttatttttgaaaaatatagaaatagaatcatgtgattatatattcttctgtatgtggcttcttgtgctcacattatgtttctgagattcatttatattatgttgcatttacatgtgcttgcagattttaaaactattttattgctttataatatttccatgtattaatataatcacaattctattattattattttcagctcttctactatagatggacatttggcttatttccagtttgaagccattatgaattgtggtggccacatgcatattctactacatgtcttgttttacatatttaagcattcttattggatatatgctgaggagtgatattgctggtgtgcttatgttcagctttagtagatagtgccaaataattttcaatgttattataccaatttacatgatcagtagcagcacagtaatgcccctcccacttgattcatgatttcagttt

SEQ ID NO: 950562 - DNA, 701 bp, Homo sapiens
atacctgtaccccattgtatctaggaagtaactagcttgcttttgcttttacaggttcataggcagaagggactttccttgtctcaaatgggmctttggactgtggacttctgagttaatgctgaaatgagttaagactttgggggactgttgggaaggcatgattggttttgaaatatgaggtcatgagatttgggaggggctggggtggaatgatatggtttggctgtgtccctacccaaatctcatcttgacttgtaactcccataattctcacatgtcatgggaggaacctggtgggaggtgattggatatgggggttgggtctttcctgcactgttcttgtgacagtaagtctcacaagatctgatggttttaaaaatgagagtttccctgcacaagctctctttttgcctgctgttatcatataagacatgacttgctcctccttgccttctgccatgattatgaggtctccccagccacatggaactgtgagtccaattaaacctctttctcttgtaaattgcccagtttcaggtatgtctttatcagcagcatgaaagtggactaatacaatgagattaatcagatacaaaaatatttccaaacaaccagaatccaccttgaacaatgtatagcaagacagcaagttttgaaactgatcctttagatcaactcacatagatagtagagagggc

SEQ ID NO: 950563 - DNA, 606 bp, Homo sapiens
ccaccccagaccctgtttgtctaggtatcagcagcagaggctgcagaacaacgaatattgctgaacagcaaatgttgctgcctgaatgttcctctggaagcttcgtctcagaggggtacmcggccgtgtgagctgtcagtctgcccctactggggggtgccttccagttaggctactcaggggtcagggatccacttgaggaggcagtctgaccattctcagatctcaaactccgtgctgggagaaccactactctcttcaaagctgtcagacagggacatttaagtttgcagaagtttctgctcccttttgttcagctatgccctgcctccagaggtggagtctacagaggcaggtaggccttcttgagctgcagtgggctccacccagtttgagcttcctggccgctttgtttacctactcaagcctcatcaatggcaggccattgattcccccagcctcactgctgccttgcagtttgatctcagactgctgtgctagcaatgagcgaggctccatgggcatgggaccctctgagccaggtgcgggatataatctcctggtgtgccgtttgctaagactgttggaaaagtgcagtattagggt

SEQ ID NO: 950564 - DNA, 611 bp, Homo sapiens
acatgaatgtgttatgttcattgcagcactattcataatagcaaagacatagaatcaaactaagtgcccattgataaaagaatagataaaggaaaagtggtacatatacaccatgaaattctatgcagccataagaagaaatgagactgtgtcctttacaggtacatggatggagctggaggccattatgcttagcaaactaatgcagaaagagaaaaccaaatacaacatgtttcacttataacagcaagttaaatgaggagaacacatggacacatagaggggaactgcagacaatggagcctaccacagggtgatggttatggggaaggaaaggatcacaaaaaataactaatgagtaccagaattaatacctaggtgatgaaattgctgtatgctaaacccctatgacacaagtttaagtatataacaaacctgcacatttacccctgaacttaaaataaaagtttaaaacaaaatagcaggtgctgaagaggatgtaaagaaaaagtcttacatgctcttgggggkaatataggttagtacagccaccatggaaaacagtaagaagatttctccaaaaaaactaaaaatagaactatcattcaatc

SEQ ID NO: 950565 - DNA, 574 bp, Homo sapiens
  misc_feature 479: n = A,T,C or G
aacaccacctgtgcgtgtgcgccgctgaggacggcgggtggagcscatgccctgtgttcacgcgcacctatgactgctgagacccgggatgctacctccaccagtgcttcatttcatcttattcagatgaacacagcagggacccactcacgggttgggaacgggctcgattctgtgcctggacacaaagttagcaccgcagcaagcacgtgttccacctgcgagcggctcccgtgcggttctacaggggtgctgcgccccggcgggtcctgcacacactgctccagcgacacgttctgttctccaggcccctgcacacagccagtccatgtcgaagcttctgcgtcctgccccgtgccctctgatggaggaggaattaaacagggctcgagggcacatgggcatctaagagtcacagcacccggtgcaatgcaactgctcccagtcgacctgccactcgtgcccacaggctcagggcntgggactcagggccccacgtcaccctagggctgcccagccctcccgatccctccagcacctcacacaaacctcctggcctcccttggcagctaac

SEQ ID NO: 950566 - DNA, 739 bp, Homo sapiens
gaaaggctggaataaaagatcagagcaatgaacaattgtaaaataaatttaaatatctttataataatatcaaaaaatataaaatactcaggagatatagatatatatatatwttttttttttgagatggagtttcactcttgttgcccaggctggagtgcaatggcatgatctcggctcaccgcaacctccgcctcccaggttcaaatgatttctcctgcctcagcctccctagtagctgggattataggcatgtgccaccatgcccggctaattttgtatttttagtagagacggggtttctccatgttggtcaggctggtcttgaactcccgacctcagttgatccgcccacctcggcctcccaaagtgctgggattacaggcgtgaaccaccgtgcccggccactcaggatatatttaatgaaagatgtacaaggcctgaaaacaagaaaacattgccaagataaattaaaaatctagatcaataagatgtaccctatttatggattggaagattcaatatcatcaagatgttcattctcctgaaaatgtaccataaattcaatgcaattaaaatcacaatcccggcaagtttttgtatataaactcacaaactgattcttttttttttttttttttttgagtcagtgtctcactctgtcacccaggctggagagcagtggtgcaatcattgctcactacagccttgacctcccaggctcaagcaatcgtctcac

SEQ ID NO: 950567 - DNA, 542 bp, Homo sapiens
atatttggggcaaaaaatatataagatgaacctggaacatgttgaaattgcaaaaatccaagagagctatcaaatagtatcaracagtatataaaagagtcaggagacaacttgacaagtttccttctggcaaaagatgggataattcaagcatcaataaggtcaattggtgtgatggagtgaaacacaacaaatatgtatgaagttttgagcttatgatactaagcaacaacaacaaaatcctccttaaatatttttggaggatgctaataaaccaattcattgaaaattggtaaataaagaaataaagcatgcatttaaactgtttttcctgtgtgaactatatctcaaaataactaaatagttgatgaaagtttatgttaacagatgtattccattaatttatgtagacagaatggcaggattagatttttccattttgtaaccatatgaattatagatttaaatcaggggcagcaaactacagttggcaggctgacaacctgtttttgtaaatcaagttttattagaacacaaccctg

SEQ ID NO: 950568 - DNA, 562 bp, Homo sapiens
aaatgaaacaaattttttttttctttttgagacagggtcttgctctgtcacccaggctggagtacagtggtgcgatcttggctcactgcaacctctaccttctgagttgaagtgattctcctgcctcggcctccccagtagttgggattacaggcaccacccaccatgctcagctaattttttgtatttttagtagagacggggtttcaccatgttggccaggctggtctcaaactcctgacctcaagtgatctgctcgcctcagcctcccaaagtgttgggaatacaggtgtaagccaccacacctggcttctttttattctttatttaaaaaaaaaaaaaaaaacactcaaactactcacgtggggctgtgctctgcaggatgggtgatgagggtgactgtcccagtgtcagcatgttgttatgggctcgctgtttcatgtggaaatggactaatagccctgcagagctcagccaayatgggagcgggcatgtcacttaggctggctggagcatgaagccaaaatcttcccacagtgccggggagcccttcccgaagaca

SEQ ID NO: 950569 - DNA, 619 bp, Homo sapiens
cccaagtattaagcctagtgcccatcagttatttttcctgatcctctctccccttccatcctctaccctccaaaaggtgctagtgtgtgttgtttccctctatgtgtccatgtgttctcrttatttacctccaatttataagcaagaacatatggtatttggttatatgttcctgtgttagtttgctaaggatcatggcctccagctccatccacgtcgctgcaaaagacatgtgctgtctctctctccctctccctctctctctctctttatggctgcatagcactccaacaaaggtctaatatccagcacctataaggaacttaaacaaaattacaaggaaaaaacaaactaccacataaaaacgtgggcaaaggacaggaacagatacttctcaaaagaagacatacatgtgccaacaatcatatgaaaaaaagcataacatcactgatcattagagatcattgtgcaaatcaaaaccacaatgaaatgccatctgacaccagtcaaactggctacagatgatggcaaggtggtggagaaaaaggaacgcttatacactgttagtgggagtgtaaattactccagccatgtggaatacagtgtggtgattcctcaa

SEQ ID NO: 950570 - DNA, 574 bp, Homo sapiens
agatgtagttgggaagaagaaaataagcaaaagatgaatttatggttttgaaactgggtgacatgtactattaacagcattaatgaaatcaagaattactcgtcatgaaatctggcatggattcartgataaaatcttgggcatttttcctgacgtgtcatgttctcagaagaacacctcagaggtatagaactggaaatcaggtgagcagtcaaggttggaaataaaatgtggattacaggtccagaattaacacacagttaattgctagtgaatgaaacaaaaaacagaacatagcaagaaagcaggaatgagcatagaactttagagtcataggggaggaaagctagtgaggacaacgaaggaagcttggtcaacaaaaaggccagagaactggggagtgtgttatgcagaacccaaatgttttagtccgttcttatgctactaataaagacataccaaagactgggtaatttataaagaagaagaggtttaatggactcccagttctacatggctggggaggcctcacaatcatggcagaaaacaaagagtaaggggcatcttacatggt

SEQ ID NO: 950571 - DNA, 654 bp, Homo sapiens
aaataagagctggtatcattcctaataaaattattccaaaaaactgcagagaaggactcctacctaacttacctaactcattctatgaggccagcatcattctgataacaaaacstggcagagacacaacaaaaaaaacttcaggtcaatatctctttttttttttttttttttttgagatggagtttccctcttgtttcccaggctggagtgtagtggcacaatctcagctcactgcaatctctgcctcccaggttcaagcaattctcctgcctcagcatcctgggtagctgggattacaggcatgtgccaccacacctggctagttttgtatttttagtagagacagggtttcaccacgttgggcaggctggtctcaaactcctgacctcagacctcaggtgatccacctgcctcgggcccccaaaatactgggattacaggtgtgagccaccgcacccagcccaggccaatatctttgatgaacttgatgcaaaaatcctcaacaaaatacttgcaaacaaaatacagcagcacatcaaaaaactaatccaccaccatcaggtaggctttaccctttggatgcaaggttggttcaacatatgcaaatcaataaacataatccatcacataaacaggactaaagacaaaaac

SEQ ID NO: 950572 - DNA, 650 bp, Homo sapiens
aaagaatgggcaggaagccatccttgcagatatatgggagaagagcaaagcagacagaggaacagctcatggactggccctgaggcttgagaggcctgttgtggttgagaaataagggagcagtgagacacaaatgggttgatgaggagggagtggaagaggatgtggcctgagaaggaataggggtcgtgggccaggggagcaatcatgtgacgtttcctaggtgacagtgagacttgtaggttgaggtgggaagacgctgggacgttctgaacagaataaaggcatggttggacctgaatttctaaaggattgttctgactcctggataagagtagattgagcagcagggtagaagctgggggcatagttaggaggccactaccatgaccaggcacgagacaagagggcctcagcccagtgtggtacagtggaggtgtggagatgtggtcagactccatgttgaaagtggagccaatagtgctgccctgggtgcaagtgtgagagaagaggagtggrtatggacctcgtttgggtctacacccctaaagagataagagctgacatgaatgagatggagattgcaaggggagtgggatttttggcaggggagatgaggaactcagtcttggagcttgcattacctcttg

SEQ ID NO: 950573 - DNA, 614 bp, Homo sapiens
  misc_feature 1, 2, 3, 4, 5, 6, 7, 8, 9, 10, 11, 12, 13, 14, 15, 16, 17,18, 19, 20, 21, 22, 23, 24, 25, 26, 27, 28, 29, 30, 31,32, 33, 34, 35: n = A,T,C or G
nnnnnnnnnnnnnnnnnnnnnnnnnnnnnnnnnnntagtattcaacagaattctgatcaatgcatatttgtgaggaaagtacctgaggcctctaggggggygggggggaacaaacactggaaaggtttaaggcagggatgtccaatcttttggcttccctaggccatattggaagaagaattgtcttgggccacacataaaatatgctaaaacaaatgaaagctgatgggctaaaaaaaagttgcaaaaaaaactcataatgttttaagaaagtttacaaatttatattgggctgcattaaaagccatcctgggctgcatgtggcccatgggctgtgggttgaacaagcttggtttagggaaatcagtgcctggagctcagagaggatcagaatactgtatgttcccacaagtcaaactggaaaaacctcatgattcataggccactgggtggagtacattgaaggattttgccttagtaatcgctaataaataagcctagactgagcattgttcttgtcatatattagtaaacattaaaagcaatactggggaaaaaaagcaatactggaaaggatcaaactattttaagtaaattaactgtgtcctgcaaca

SEQ ID NO: 950574 - DNA, 605 bp, Homo sapiens
atacatactaaaatacatgcttaactattataagtrtaaaaaatagttttctatgtgtcaccaatgttatgtgccctgtgttgtctctgactctgctagtagactatgaaatatgtcttcttccctgctttatagtaatagaaatacattttgtttgaggaagcactgtgcccagtttaaaaatgctcacctctccaaactcctttgcagacatcccttgagttgcctgtgtgaccaaattctggccaataaaatctaagtttactggatggtactggataaaatttagttggcaggtgccttttgcattttcatcatcctatccctttctcccttttcttcttttctggagcctggattcagtccctggaagtgtggtagccacctctgtgaggatgaaaggaatatgctgagtggcagagcagaaagctagacgaagcctggtccctgttgccttcattttgcaggtactgtagccctgcctgcagttgagccattatagacgagtgttcgttacatgcagcgtaatataatcttacctgacacatacgttctggcaaaccctgggctagagtatagcgttcaagtctgcgaggccaggaggt

SEQ ID NO: 950575 - DNA, 562 bp, Homo sapiens
tgctggcacccatccatctccccagcatccatttctcttcatgggagcaccccagatttcacagctttgtgagttgaaaccctgttcttgctgagtctccactcccagggtaggtcygacaataagagaaatatttcactcagtggatcgttaactcaaggatgggcatatcacttaactcagggtagacagcaccaaggaaagtcaatttgggggacttctgacttcttccttcctactgaacatgaaggtctatatgtgattttcactattggaaaaagcctactgcaaactataaatctaaccaatagtatatttagccaaaatgtcatttctttttgcctaaaactggtatgtatggttattgaatacaagaagctctgatgggttgctgccaacagaacagaaatttttcttttcttttttttttttttttttgagacagagtcttgctatgttgtccaggctggagtgcagtggtgtgatcttggctcactataatctctgcctcccacactcaagccatactcccccctcagcctactgagtagctgggactaca

SEQ ID NO: 950576 - DNA, 621 bp, Homo sapiens
aaacaacttcagcaaagtttcaagaaataaaatcaatgtacaaaactcactagaattcccatacaccaacaacagtcaagccgagagccaaatcaggaaggcaatcccrctcacagttgccacaaaaagaataaaatacctaggaatacagataaccagggagattaaaggtctctacagtgacaactacaaaacactgtacaaacaaacagagataatgcaaacaaatggaaaaacattccatgatcatgaatagtaagaataaatattattaaaatggccatactgcccccggagcaatttacagattcaatactatcctatcaaactaccagtgacattcttcacataactagaaaattctatttcaaaatttatatggaaccaaaaaagagccaaaatagccaaggcaaacctaagcaaaaagaaaaaagcaacctaacaaaaagaacaatttgctaccaaatttcaaactatactacggggctacagtcaccaaaatagcatgatattgtacaaaacctgacatatataccaatgaaagagaatagatagtaaacagacaacctacagaataggagaacatttttgcaaactatatctgacaaagatctaatatct

SEQ ID NO: 950577 - DNA, 621 bp, Homo sapiens
aaacaacttcagcaaagtttcaagaaataaaatcaatgtacaaaactcactagaattcccatacaccaacaacagtcaagccgagagccaaatcaggaaggcaatcccaytcacagttgccacaaaaagaataaaatacctaggaatacagataaccagggagattaaaggtctctacagtgacaactacaaaacactgtacaaacaaacagagataatgcaaacaaatggaaaaacattccatgatcatgaatagtaagaataaatattattaaaatggccatactgcccccggagcaatttacagattcaatactatcctatcaaactaccagtgacattcttcacataactagaaaattctatttcaaaatttatatggaaccaaaaaagagccaaaatagccaaggcaaacctaagcaaaaagaaaaaagcaacctaacaaaaagaacaatttgctaccaaatttcaaactatactacggggctacagtcaccaaaatagcatgatattgtacaaaacctgacatatataccaatgaaagagaatagatagtaaacagacaacctacagaataggagaacatttttgcaaactatatctgacaaagatctaatatct

SEQ ID NO: 950578 - DNA, 541 bp, Homo sapiens
atgtctttttcagcagtgtgaaaatgaactaatatagtaaattggtaccagtagagtggggtgttactgaaaagatatacaaaaatgtggaagygactttggaactgggttacaggcagaggttggaacagtttggagggctcagaagacaacaagatgtgggaaggtttggaatctcctagaggcttgttgagtggttttgacagaaatgctgataattatatgaacaataaggttcaggctgaggtggtctcagatggagatgaggaacttgttgggaactgcagcaaaggtgactcttgttgtgttttagcaaagagactggtggcattttgcccctgccttagagacttgtgaaactttgaacttgggagagatgatttagggtatctggcggaagaaatttctagcagcaaagcattcaaaagatgacttgggtgctgttaaaaacattccattttaaaagggaaatagagcttaaaagttcaggaaatttgcagcctgatgatgtagtaaagaaaaacccatgttttgaggagaa

SEQ ID NO: 950579 - DNA, 657 bp, Homo sapiens
gcacactggattgggtggcagatgttcccagagcccggctctttggaaggagcagaacatctcttccaccagaaagcttcccaactccaaggcaatgggtagagagccatttcctggaaacaataatcttagcctggtggcgtggggagccactgtgctctgtcagcccacaccctccttgtgtgttccctccctgaatgccagccggccctgtgcttcggaggccagcacttcctgccagagcatctagaatccagcctatttggcctgtgtcttccagtttggctgactggctcggctctgtcctcagcactgctgttctctccaactgagttcttcagcatgctggacagcctgtctttctttccaaccttccacctgctgctctggcctgctgtctccccagcctgtcctctgtggagctgcccctcctgtggctgtggccctaggagagctcagtcaagttacttacctgcactggtctcagtttccttcccaaaaaacaaaacaaaaacaaaaaaacaaaatttaaggagagtcagactagattttttttgagacggagtctcgstctgtcgcccaggctggagtgcagtggcgctatattggttcactgcaagctccacctcccaggttcacacctttctcctgcctcag

SEQ ID NO: 950580 - DNA, 666 bp, Homo sapiens
aggaagcaggtagccacttaggcaaccatggtaggtgaggagtctgatgtcttattgcctagatgcagtgatctggtaartttcagtttattgacactatctaggaagcctgatggttggatgcctgagaaagaaactgagcaaagacaaatgtaacttcctcaagtttcaagactgggaggatcagtttctatgtttattcaaaagaagccataaatatcagttctatgggacaattggaccagtttcagaggtatattaggagaacacattctattgctttcaaatgcacagccaggcccggcaatgcgactgcatctgagcatcttctaagaaaataaaggctggccaggtgaggtaggtcacgcctgtaatcccagcactttaggaggccaaggtgggtggatcacctgaggtcaggagttcaagaccagcctggccaacatggtgaaaccccgtctgtactaaaaatacaaaaattagctgggcatgatggcgggtgcctgtaatcctagctactcaggaggctgaggcgggagaatcgcttgaacccgggaggcccaggaggcagaggttgcagtgagctgagattgcgccattgcactccggcctgggcaactgagcaaaactccatctcaaaaaaaaaaagaaagaaaatgattaaag

SEQ ID NO: 950581 - DNA, 497 bp, Homo sapiens
gctccctttatcacttcctggggagaacctgcctaagaatgaagccacgtagagataaatagaacccaatgatagaggcagatttcttcttaaataacgtttattgaagtgtaacttatattcactaaaatgtacccatgttaagtacacagtttgatcaattttgacacatacatacagtcaagaccaccatgacaatcaagagatagaaggttttcattacctgagaaggttgtttcacatacctgtttgcagtcaattacccccaccccagccccaagcagccaccgtctaccttttcagaatctcatataaatagaatcatacaatatacactttttagtgcttggcttctttcagtatacattctttttttttttttttttttttktttttgagacagagcttcactctagtcacccaggccagagtgcagtggcgtggtctcggctcactacaacctccgcctcctgggttcaagtgattctactgtctaa

SEQ ID NO: 950582 - DNA, 497 bp, Homo sapiens
gctccctttatcacttcctggggagaacctgcctaagaatgaagccacgtagagataaatagaacccaatgatagaggcagatttcttcttaaataacgtttattgaagtgtaacttatattcactaaaatgtacccatgttaagtacacagtttgatcaattttgacacatacatacagtcaagaccaccatgacaatcaagagatagaaggttttcattacctgagaaggttgtttcacatacctgtttgcagtcaattacccccaccccagccccaagcagccaccgtctaccttttcagaatctcatataaatagaatcatacaatatacactttttagtgcttggcttctttcagtatacattctttttttttttttttttttttgtttttgagacagagcttcactctagtcacccaggccagagtgcagtggcrtggtctcggctcactacaacctccgcctcctgggttcaagtgattctactgtctaa

SEQ ID NO: 950583 - DNA, 634 bp, Homo sapiens
gaccctgtttcaaaaaataaaaataaaaataaaagaacatgcttattcttccagcagaattactgttagtgtcattggccttatttctgcactccttctaagtcacagatggttttttaaccacagaatttataagataaattcagtgattcatattaaatcgaatgcctttgactaattgaaacagtaggcttactaaagtttttatactgtggtaacttgcccaaacagtggcattttaaaaacaccccttgcacatacgtttaggaattcaggatttccaaatattttaaataacatagaacacagcaattaaaaaaaaagttgtctttgaagggtcctaaataaagatagttaacttctttttttaatttaataagtttttttcctgctttttaaaagataataattctcatttagcagtttggaaaatacaaatgtgaaatgcttcatgttgtcatgcttgtatttccatcattccaaccttattatactattgtttaggtaagctcactgtctcatattttaacaagataaaataaaccctagcttttaaaaaagccatctaccacrcaccttaggagatgaattcagagctaagtgataacaataacaaagttcagcttggggaaaa

SEQ ID NO: 950584 - DNA, 599 bp, Homo sapiens
tatttctggttctctattctgttccattggtttgtgtgcctatttttagtaccagtacaatgctgctttggtgactatggccttacagtatggtttgaagtcrggtaatgtgatgcctccagatttgttctttttgcttagttttgcattggctacatgagctcttttttggttccatataaattttaggattattttttctagttctgtgaagaatgatcgtggtattttgattggaattgcattgaatttgtagattgcttttggcagcatgatcattttcacaatattgattctacccatccatgagcatgggatgcattttaatttgtttgtgttgtctatgatttctttcatcaatgtgttttgtagctttccttgtagaggtctttcacctccttgattaggtatagtcttaaggttttttgttttgttttgttttctgtttttgtttttattttctgcagctgttgttaaagaggttgtgttcttgatttgattctcagcttggtcgctgttggtgtatagcaggactactgatttgtgtacattaattttgtattttgaaactttactgaattcatttatcagttccagga

SEQ ID NO: 950585 - DNA, 708 bp, Homo sapiens
acacagcacttttgcccccaggtccgttgcacttgccatctgtttgctctggttgctgcctctgccttttgcaggtatctgtacaattccagtttctcggtggtcccttgatatgtccattctccactgcccacagactacgatgctcctgaattcccttagaccatctagttccacagagttcccacagccaagcatttctaagatttgtataaatttaaggggtatgagtgcaattttgttacatggctaggttgtacagtggagaagtctgggcttttagtgtgtccgtcactggaataatgtacattgtacccacgaaataatttcttatcacccacccttctttcaccctcccacccttctgaggatccagtgcttgtcattctatactctatgtccatgtgtacacattatttagctcccacttaaaagtgagaatatgtggtatttgactttctgtttatgagttgtttcatttaaagtgttggcctccagttccatccatgttactgaaaaagacatggtttcatttttttaatggctgaatagtattccattgtgtacatataccacatkttccttattcaatcatccattgatggacatttaggttgatttcatatctttgctattgtgaatagtgctgtgataaacatatgagtgcaggtatctttttgatataataatttgttttcctttgggtag

SEQ ID NO: 950586 - DNA, 559 bp, Homo sapiens
cactaacagtatatcagcattccctgttctccctatccatgmcaacatctgttgtcttttgactttttagtaatagccattctgactggtataagatgatacctcattgtggttttaatttgcatttctctgatgatttgtgattttcaacattttttcatatgtgtgctagccatttgtatgtcttcttttgataaatgtctgttcacatcccttacccactttttaatggagttgttgtttttgttgttgttgctgagttatctgagttccttgtaaattctggatgttagtccccgttggttgcatactttgcaaatactttctcctattctgtaggttgtctgttcactcttttgattatttcttttactgtacagaggctttttagtttaattaagtcccatttgttatttttgtttttgttgcttgtgcttttgaggttttagtcatgaattatttcctagaacatccagaagaaatttccctacattttcctttagtatttttatagtttcaggttttacattcaagtctttcatccatcttgagttgattt

SEQ ID NO: 950587 - DNA, 559 bp, Homo sapiens
cactaacagtatatcagcattccctgttctccctatccatgacaacatctgttgtcttttgactttttagtaatagccattctgactggtataagatgatacctcattgtggttttaatttgcatttctctgatgatttgtgattttcaacattttttcatatgtgtgctagccatttgtatgtcttcttttgataaatgtctgttcacatcccttacccactttttaatggagttgttgtttttgttgttgttgctgagttatctgagttccttgtaaattctggatgttagtccccgttggttgcatactttgcaaatactttctcctattctgtaggttgtctgttcactcttttgattatttcttttactgtacagaggctttttagtttaattaagtcccatttgttatttttgtttttgttgcttgygcttttgaggttttagtcatgaattatttcctagaacatccagaagaaatttccctacattttcctttagtatttttatagtttcaggttttacattcaagtctttcatccatcttgagttgattt

SEQ ID NO: 950588 - DNA, 605 bp, Homo sapiens
ctcccagcgtgagtgacgcagaagacgggtgatttctgcatttccatctgaggtaccgggttcatctcaccagggagtgccagacagtgggtgcaggtcagtgggtgcagcacaccgtgcgtgagccaaagcagggcgaggcattgccttactcaggaagcacaaggggtcagggagttccctttccgagtcaaagaaaggggtgacagacggcacctggaaaatcgggtcgctcccacccgaatactgcacttttccaacgagcttaaaaaatggcgcatcaggagattatatctcgcacctggctcggagggtcctacgcccacggagtctcactgattgctagcacagcagtctgaggtcaaactgcaaggcggcagcaaggctggggaagggtcacccgccattgcccaggcttgcttaggtaaacaaagctgctgggaagctcgaactgggtggagcccaccacagctcaaggaggcctgcctgcctctgtaggccccacctctggggrcagggcacagacaaacaaaaagatagcagtaacgtctgcagacttaaatgtccctggctgacagctttgaagagagcagtggttctcccag

SEQ ID NO: 950589 - DNA, 576 bp, Homo sapiens
agagacaaaccaaatctacatgctaaacctaaacagggtaactgtctgctgaaatcacagatttaaaaagcatcagaagtctcctaacataatatccaaaatgtccagggtacaaataaaaagcactggtyataccaagaaccaggaaaatcacaacttaagtgttaaaagaccaacagacaccaacactgagctgaatcagatgttgaaatatctgacagattttagaacagccatcataaaactgcttgaacaagtaattacaaatatccctgaaaagaatagaaaaatccagcaaatacagagaaattattattttaaaagtatcaaatagatattatccaactgaaaaatacaataacttaaattttaaaagtcattggaaaggcacaataataaagatgccaaaagataaaaatcagtgaacttgagaacgaatcaggagaacttagtctgaaaaacaaaaagaaaacagactgaaacaaatgaacagagcctgaaaaaacctgtggaactataattttttaaaaatatctagattagtattatcagagttccagaaggacaggagaaagg

SEQ ID NO: 950590 - DNA, 570 bp, Homo sapiens
agacacagccagcaagaacatatgccatggaaggactaagaaggactattcagtattattaaaaaaaaacgctggtgcagtctgagcacatattcagagggaagatgctgagaatagagggagaatagagggagaacagagatgctgggctgaaggaagaggaagctgggaactctgcctggggctaccccacaccaggattccttcgtggtccccaatgactactggcaaggggtgaatttcacagtcaaggaatgacttattcttgctatggacctctggaatcatggcagcaatagatcccatgacacccatggacacttgagcttgcagggaggtgtaggactccagcctctgcagtgcccagagtgtttggtacaggaatgtgttcagtggagtatgaccagggatgcctatcccccaaggttcgccatgtgccctttggagactttagccttagaggaactgttaggcctgaacagagcaaagtggcctcrgctgtaagatggggcagtctgacttgagagcccccttgtcagctggcctcttccagggcctcagcctcactgt

SEQ ID NO: 950591 - DNA, 578 bp, Homo sapiens
ccaagatacagaatcaacacaagtgtccttcagtggattaatggataaagaaaatgtggtacatgcatgcaagggaatactattaatacagcctttaaaaggagggaaatcctgccattttcaacaacatagatgaatctggaagacattatgctaagtgaaataagccaggcacagaaagacagataccacatgatttcacctacatgtggaatctaaaaatgttcaactcacaaaagtagcatagactgatggttaccagaggtcagaggagctgaaaaaagagggaatagggaattgttgatcaaagggcagagtttcagacagaaagaacaggttttgaaatctattgcacagaacagtcgctatactcagtaataacgtactaaatcaaatgtctgaccctaagaaatcataggtaatcaaattgatgaatgctaattcggttgatttaattattccacattctatgcatgtatcaaaacactgcatttcaccccataaatgtrtatttgttaattaacaacaataataaaaaattaaaaattgaacctaggacttccaggtagctgaagaaa

SEQ ID NO: 950592 - DNA, 474 bp, Homo sapiens
accagctgttctgaggggcccagcagaaagctgattcatggaagaatgcagtttccacatcctgattattattattattattattattattattttgagacagtgtctcactctgttgcccaggctggagtgcaacggcgcaatctcggctcactgcaacctcctgctcctgggttcaagtgattctcctgcctcagcctcctgagtaactggatctataggcatgcgccaccatgcccagctaacttttgtatttttagtagagatggggtttcaccatgtagtccaggcaggtcttgaactcctgacctcaggtgatctgcctgcctcagcctcccaaagtgctgggactataggcgtaagccactgcacygggtcaacacattctgattatttcgttcactttactccaaccaatcaatgaccccagttttctagcccttcaccctccatgatccccttaaaaacctttgc

SEQ ID NO: 950593 - DNA, 474 bp, Homo sapiens
accagctgttctgaggggcccagcagaaagctgattcatggaagaatgcagtttccacatcctgattattattattattattattattattattttgagacagtgtctcactctgttgcccaggctggagtgcaacggcgcaatctcggctcactgcaacctcctgctcctgggttcaagtgattctcctgcctcagcctcctgagtaactggatctataggcatgcgccaccatgcccagctaacttttgtatttttagtagagatggggtttcaccatgtagtccaggcaggtcttgaactcctgacctcaggtgatctgcctgcctcagcctcccaaagtgctgggactataggcgtaagccactgcactgggtcaacacattctgattatttcrttcactttactccaaccaatcaatgaccccagttttctagcccttcaccctccatgatccccttaaaaacctttgc

SEQ ID NO: 950594 - DNA, 605 bp, Homo sapiens
aagacatctgactaaagctggcaaggaggtaattacatatgaaattctaaggccagaggcaaagtttggcctgtcaacataaatttgtgagtcattcacatatggtagttgaaatcatggtcctaggaaattgctcatgaaaggaatatagtgcccaaagcaggtctactcttattccttaagaaattctgatatttaatagccaggtagagaaagatgagacagaaaagaaaacagaaatgagcagcttgagagcaggaggaaagcaaggggagtgtggttcccagaagctggggtgagagtgtttcaaataggatggaatagtgccaagtgctgccgagacatctgaaaagaggaggcctgggaaacacccattggatttagcaacatgggggtcttggtgagctaattttaaatttcctcaatggaatgatggaggcagaagccagattggagatggttgaggaattagtgggaagtgagaaaatgrtagacattatatggaccactttttttccttttttttttctgagactggagtgcaatggtgcgatcttggctcaccacaacctccatctcccaggttcaagcaattctcctgcctc

SEQ ID NO: 950595 - DNA, 583 bp, Homo sapiens
tctttggaaaagtgtctgttcaaatcttttgcccaytgccatgtcatcatattactgaattgtaagattctgtatacattctggaatatgtcttttatcagatatgtattttgaaaatggctttctttcaatcaatagcttgcctttcattaagtgtaatttgaaaaagagcaaaagtttttacttttagtgaagtccaaattatcagttttctttttatttaaggtttatccttttttatgcactaagaaatatttgctaccctaagatcaaaagatgttcttctgtttttttccctagaactttaatagttttagcttttacatttaagtctatgacctatttttagttaacatctgagtattttgtgatataaaggacacagtttctctctctctctccgtatggatatcaattgttttagcatcatttgttgaaagaactaacttctcttcattgaattaccttgaaacatttgccaaaaatgagtttatgtacacttgtggatctatttctgatatctctatttttttcgtccacatgtttattctcatgccaatcacatactgtctcaattaccagc

SEQ ID NO: 950596 - DNA, 627 bp, Homo sapiens
caagaagaatttggcaatctacaacccacaagagagccctcaccaaaactctaccatgctggcaccttgatctcagactctcagcctccagtaccatgagaaataaatttctgttgcctataagccacgaagtctaaggtactttgttataatagcctgaattgactaaggaaaatgcttattttgattctaaccctctgctatgtttcgaatgactgtcctctccaaaactcatgttggaacgtaatccccaatgtaacaatattgagaggtggggcctataagtgattaattcatttactggttaatggattaatgggttaatggattaatgggttagcatgggagtgggttagttatcatagaagtgtgcctgttacaaaaagtcaggttggctctttcttgcaaactcccttaccgtgtaatgctctatgccatcttgggactctgcagagaatccataccagcaagaaggcctagaagaccctcaccatayactgcccctagaccttggagtttcctggcctccaaaactgtaagaaataaatttcttttttaaaaaaattacccagtctcaagtactcatttatagcaatagaaaagggactaagacaccctccgaagaca

SEQ ID NO: 950597 - DNA, 756 bp, Homo sapiens
tatttctttgctgcaagctatttatgcactgaaggtcaccactgtcccattgacaagcaaggcactggagacagcccccagttcaatggaaccaagcaactgcttggacttgtctccaggtctgtcccaaggacaaaggggcactgagccatgggcagatgctcacaaggggctctaggttaggctcaccaaaatcatttatgggacgaacagattcatatgcccactgtgcagtaacagaccaattatactgagacagcagggtttgcagcacagaaagagttcaatgattgcagggatctgagtgaggagatgggaggaggccctcaaatccatacccccaaggagttctgggctgggatttttttttttttttgagacagagtctcactctgtaaccgaagctggagtgcggtggcgcaatctaggctcactgcagcctctgcctcccaggttcaagtgattctcctgccttagcctctggagtagctgggattacaggtgcctgctatgactcctggctaattttcaaatttttagtagacacagcgtttcaccatgttggccaagctggtcttgaactcctgacctcaaatgatctgctcgcctcggtctctcaaagtactgggattacaagcgtgagccactgagcccggcctgggctgggatttttagggggattgtggtgagcaagggasttaaaaattggggtaattgattggtcagggcaagggtgatgaaatcatcacaatgtgg

SEQ ID NO: 950598 - DNA, 692 bp, Homo sapiens
atgttgctgcagatgacatggttttattctttttcatggctgcatagtattccatggtgtgtatataccacattttctttacccagtctaccactgwtgggcaccttgggttaattccaggtctttgttattgtgaatagtgctgcgatgaacatggaagtgcaggtgtctttttggtagaatgatttttcttttgtatatgtatccaggaattaatggaattgctgggtcaaatggaacttctgttttgagttctttgggaaatctccaaactgctttccacagtggctggactaatttacattcccacccacagtgtataagcgttccctgttctgctcactcttgccagcatgtattgttttttgatattttaacaaaggccattctgactggtgtgagatggtatctcactatggttttgatttgcatttctctaatgattagtgatgttgagctttcttttatatgcttgttgaccgcatggatgtcttcctttgagaagcatctgttcatctcctttgagcaatttttacggggttatttatttttttcttgttgaattgtttgagttccttatagattctggatattagacctttgtcagatgcatagatgcaaatattttctcccattctgtaggttgtctgtttactctgttgatagtttcttttgctgtgcagaagctcttt

SEQ ID NO: 950599 - DNA, 615 bp, Homo sapiens
gcgacagcgctgggccggcttctkagcgccccttcccccagcccatcttggaaaccacagcagtgtccttcctcccaagtcccttcccagggctgacatcccacagcagggatgtatcccacaaaccccgcaggccctggtgcctacagcttggcctggtaacatcaaatcctaccctctcctcctggcagcaaagatggggtgcccccaccccagagttctcagcacccccagacagaagcagtcccccagcgacctcagaactcttggggcgctgccacacccttgcaggagggggcagtgttcctgggatgctcaggtcctggtatcacctctggccagatacggaaggtgaaactacagggcatccaattcaccttgaacttcagataaacaccagattatttttttgtatgtcccgtgcaatatttgggacacacttaccctaaagaagtattctgttttcatctgagaggcagatttaaccggcgtcccgtgtcttcctggcagtcctgccctggagtcacactccacaggtgcagggcagggcacggctccaagtagatggcggccaaagcacccgccccatgctcctgactcccggggctcttcagg

SEQ ID NO: 950600 - DNA, 615 bp, Homo sapiens
gcgacagcgctgggccggcttcttmgcgccccttcccccagcccatcttggaaaccacagcagtgtccttcctcccaagtcccttcccagggctgacatcccacagcagggatgtatcccacaaaccccgcaggccctggtgcctacagcttggcctggtaacatcaaatcctaccctctcctcctggcagcaaagatggggtgcccccaccccagagttctcagcacccccagacagaagcagtcccccagcgacctcagaactcttggggcgctgccacacccttgcaggagggggcagtgttcctgggatgctcaggtcctggtatcacctctggccagatacggaaggtgaaactacagggcatccaattcaccttgaacttcagataaacaccagattatttttttgtatgtcccgtgcaatatttgggacacacttaccctaaagaagtattctgttttcatctgagaggcagatttaaccggcgtcccgtgtcttcctggcagtcctgccctggagtcacactccacaggtgcagggcagggcacggctccaagtagatggcggccaaagcacccgccccatgctcctgactcccggggctcttcagg

SEQ ID NO: 950601 - DNA, 599 bp, Homo sapiens
tgtgctttgttaaacagatgcttgaaggcagcatgctccttaagagtcatcaccactccctaatctcaagtacccagggacacaaacactgcggaaggcggcagggccctctgccgaggaaaaccagagacctttgttcacatgtttatctgctgaccttccctccactattgtcctatgaccctgccaaatccccctttccgagaaacacccaagaatgatcaataaatactaaaaaaattaaaaaaaaaaaagaagatgacgtggttttaaagttgcactgtgtcaaatatacagacgctcttgtaaggcaggtgtggtggtatcacgattatccccattttacagacgaagaaatgggggttcagaggtaagacaatcagtttaaatctagatcaccttgattgattccagggccttacaacttacccatacgctgcactgatttcccactggagccgagcagtagggaagcacaggggcacacagcttgacractgtatattctcaattgggaggtcaagcaggagccaagaccttatgaaattgatgggtaattgctcacgcttggagcagccactgaggctcctcctgccatg

SEQ ID NO: 950602 - DNA, 589 bp, Homo sapiens
gctaatgtgctgagtcttgcctgaagccagaagttctcagaggcttacccaaggaccrtgatgtagtagctgggtttcactgttggtttattcagggcccaagggctcttcagttagcacgtgataaatgctgacaaaactgggtcctttcttcaaggcagcaggttcccttccggttcagggttattctagagatgttgtctgggagctaaggcctagaatggcagcctaattactcttactagtgccctatcctgctgtggctgaaatggtatccaagctgcaagacaaagttctccccactcttccttctcctttcttcaagtggaaggaaggaaactcttggctgcagtagctggtatttcagtatgttgcgtgcccccagccactccactgtctctgggcctagtttgcccctaggactcacctacaaattgcagtccttatggcttagacttcctttcaagtttccttaaatatccagagcactctggcactaggtggtgaggtttgtgggcactcacgtgtagactgctgggatcagcaattccccgctggctagggctggtttaaatcctccctccatggg

SEQ ID NO: 950603 - DNA, 589 bp, Homo sapiens
gctaatgtgctgagtcttgcctgaagccagaagttctcagaggcttacccaaggaccatgatgtagtagctgggtttcactgttggtttattcagggcccaagggctcttcarttagcacgtgataaatgctgacaaaactgggtcctttcttcaaggcagcaggttcccttccggttcagggttattctagagatgttgtctgggagctaaggcctagaatggcagcctaattactcttactagtgccctatcctgctgtggctgaaatggtatccaagctgcaagacaaagttctccccactcttccttctcctttcttcaagtggaaggaaggaaactcttggctgcagtagctggtatttcagtatgttgcgtgcccccagccactccactgtctctgggcctagtttgcccctaggactcacctacaaattgcagtccttatggcttagacttcctttcaagtttccttaaatatccagagcactctggcactaggtggtgaggtttgtgggcactcacgtgtagactgctgggatcagcaattccccgctggctagggctggtttaaatcctccctccatggg

SEQ ID NO: 950604 - DNA, 495 bp, Homo sapiens; identical to SEQ ID NO: 949171

SEQ ID NO: 950605 - DNA, 606 bp, Homo sapiens
tcattatttccacattgaaagaccaytcatttttgtatgttgatattgtaccttgcaactttactaaatttatttattagttataagagtttactaaatttatatgttagatataagagttttttggtggagtcttttgttttttctagatataagatcatatcaacaacaaagagggacaatttgacttcttttgcaatttggatgccttttatttttcttgcctgatttctctggctaggacttccagtactaggttgaacaggagcggtgaatcaggcatccttgtcttgttccaattcttagggaaacagctttaagcttttccctgttcagttaaatgctgactgtgggcttaacatatatagcctttattatgttgaggtatattccttatatgcctagttgttgagacattttggatttgtacatgctgaactatctttgcatccctgggataaaccctactacattgtggtgtattagtcttctgatgtgctattggatttggttcactactattttgttgagaattttttgcatttatgttcattagggatattagcccataggtttcttttttttttccttgcatccttgtctgat

SEQ ID NO: 950606 - DNA, 606 bp, Homo sapiens
tcattatttccacattgaaagaccattcatttttgtatgttgatattgtaccttgcaactttactaaatttatttattagttataagagtttactaaatttatatrttagatataagagttttttggtggagtcttttgttttttctagatataagatcatatcaacaacaaagagggacaatttgacttcttttgcaatttggatgccttttatttttcttgcctgatttctctggctaggacttccagtactaggttgaacaggagcggtgaatcaggcatccttgtcttgttccaattcttagggaaacagctttaagcttttccctgttcagttaaatgctgactgtgggcttaacatatatagcctttattatgttgaggtatattccttatatgcctagttgttgagacattttggatttgtacatgctgaactatctttgcatccctgggataaaccctactacattgtggtgtattagtcttctgatgtgctattggatttggttcactactattttgttgagaattttttgcatttatgttcattagggatattagcccataggtttcttttttttttccttgcatccttgtctgat

SEQ ID NO: 950607 - DNA, 571 bp, Homo sapiens
agcattatttctgagggctctgttctgttgcatcagtctatatctctgttttggtaccagtaccatgctgttttggttactgtagccttgtagtgtagtttgaagtcaggtagcgtgatgtctccagctttgttcttttggcttagcatcgacttggcgatgcgggctcttttttggttccatatgaactttaaagtagttttttccaattctgtgaagaaagtcattggtagcttgatgggaatggcattcaatctataaattactttgggcagtatggccattttcgtgatattgattcttcctacctatgagcatggaatgttcttccatttgtttgtatcctcttttattgcattgagcagtggtttgtaattgtccttgaaggggtccttcacatcccttgttagttggattcctaggtattttattctctttgcagcaattgtgaatcrgagttcactcatgatttggctctctgtttgtctgttattggtgtataagaatgcttgtgatttttgcacattgattttgtatcctgagactgctgaagttgtctatcagcttaagg

SEQ ID NO: 950608 - DNA, 599 bp, Homo sapiens
gaagagataggagagcagtctcaaatccmtctccctgaccaactaaaattgggggtttatgtagtggggaaggaatgtagctacatgtgggtaaacaggaattagggaggggtagggaagaagagttggccatcaaaaagcaggtggttggttaggcaatcatgatgggtgagaggtctggcaactcattgtccagatgcagtgttctggtgagtttcagctccttgatactatctgggaggcctgatggttggtttcctgagaaaaggactcagataggacaaatgtaactttcttaagttttaagactgggacggtcaatttctatgtttcttgaaaagaaaccaaaaacataagttctacaggacaattgggcaagtttcaccatgagcctgtgatctccaccctcagcacaaaaagctttctcaggatcattcaggatataactatctggaaagaggttagtgtcctccaaagggaaggaatctctgggcactgagtcacaatgcataggatacagaccttgtccagtcatagaagcatgccctatgttagacgctcaatgagatttcagaagctttgcggagaaattaggctta

SEQ ID NO: 950609 - DNA, 584 bp, Homo sapiens
attttattgggaatttctttttcttagttawaggtttgggtttttttaaaattatgtttttaaaaacccagcttgtcatttcattgctcttttgtattttttgtcttaattttatttattttgactcttattttattatttctttccttcttctaattttggatttggtttgttcttgcttttctcgttccttgaagtgcattgttaggttgtttatttaaaatctttttacttctttgatgtaggcatttattgctgtaattttccctcttagtatttcttgtgctgtatcccataggtttttgttatgttatgttttcattttcatttgtttcaagacattttaaaatttccttcttaatttctctattgacccactggtcattcacaagcacatttaatttccaagtattcataaagtttcccaagttccacatgttttgatttctagtgtacttccactgtggtcaggaaagattcttgatatgaatttgatttttaaaaatttgttaacacttgttttgtcatctcacatatagtctatcctggagaatgttccatgtgctgatgagaagaatgtgtat

SEQ ID NO: 950610 - DNA, 695 bp, Homo sapiens
attaagtgtgcaacagcattatgtctataagaataatatgcatatcttaatttaaacatagttgatcatttgagcccaggagttctgggctgtattatgctatgctggttgggtgtccacactaagtttagcatcaatatggtgatttcacaaagcagaggaccaccaggttgcttaaggatggttgagccaacccaggtcagaaatgcaacaggataaaactttcatgctgattaatattaggtccagagatagccagcccagagattctggacaggccatctgatatggtactaagcagaattcctgctggagtctttgggctggctggcctggagcctgggttagcaagtaggtgagcctgaagcctggttacacttgggtgaatgtgttgatttggtctgctagggtaggcctggagtctgtattcctagatcctccagagcttccctggttctggggcaagactgaagcctgctgccactacagttggtctaattatgatctgaacctgaaccccaaggttgctaagttgagttggtgaaggggcaatcctggaaatgctayggcaggtctagcattgtagcgggtccactaatagcctgtgagtagccactgcactctagcttgagcaccacagtgaaaccccatctcttaaaaaaaaagagaaggaactataaaggatcataaaggtc

SEQ ID NO: 950611 - DNA, 751 bp, Homo sapiens
gcaggactcccaggctgttttaaaatccaccttaggctgggcgcggtggctcacgcctgtaatcccagcacttcgggaggccgaggcgggcagatcacagggtcagaagatcgagaccatcctggctaacacggtgaaaccccgtctctactaaaaatacaaaaaattagccaggcgtggtggcgggcgcctgtagtcccagctactcgggaggctgaggcaggagaatggcgtgaacccgggaggcggagcttgcagtgagcggagatagcaccattgcactccagcctgggcagcagagcaagactccatctcaaaaaataaaaaataaaaaaaaaatccaccttaagcctaaaggagggccccggctaagggcctcggtagagcctgtggttttctgccggtgtgcaggcttcagcccccatccagggcagcctcgccggcaggccagacccccaggcccctctccccaggcccttgactcagcggctgtgaggagagtctctgcccctcaggccctgggcagtcatcacggggattgttgcctctactggaaagacaggtgagcctcagcctctgcgctgggatacaatgaagaaggtcccatgtttacctccaktctgatatctcagcattcacccatgtgcaccaggaggaagtgaggtcccttccccagcaagaccctgggaggcctgtagcctctgcattcccctggtggggggagagagacggaacacaaggacatccctgt

SEQ ID NO: 950612 - DNA, 616 bp, Homo sapiens
ctgagaagatctgggaaggagtccgtcagwgagcctcgggccagagttccaggagctctgggagtggctgccaggtgagttgaacagtccgattttcagtggggtcccgcacagatgggacatggcttaggtggaatcctgggctgtgggcattccttggccttgtggccagatttctggcacttgtagcaagctcctgggggaggcggttctggaggaatgcctggccgctgtggttcagacatttggaagttcttgtgtgcatgtggctggggtttgtcttagagtggaggcaaggaattgcaacttttttctattattgtacaccttgaaggcgaggttaattaagtcctgttgtggggtttgagggccagaatttaatttttggagtttcatttaatgtcgggagcagattgggtaataaaataaaatgcacatggagaataagacggccttctgacctttcagggtctagggctgtaaatcgtgtcagggttgctgccaaacaaaccatgaactgggctgggtttttatattcgatgaaaaagagcctaaatgctaactgattttgggagaggtcagataaagaaagaggagcattaaccttgactatgac

SEQ ID NO: 950613 - DNA, 725 bp, Homo sapiens
cagaagagtgagacatggaacagtcttcctctgacaatctaagaaacaaccaatcctgctaatactttgatttttgacttcccacctctagaaccgtgagagactacattttttgttgtttcaagccaacaaagtttatggcaatttgtttcagaagcccaaggaaactaatatacctgagtatacaatggcagtgagttagcataaaataggctttcttaaataaatctggcagagccatatctgtaccaagcaagcatccctggcaactgtggccctgtttctcctacctcccacctaaaaggaatccagaggaaaagaaacagtggccacaatagacctcgttttctactgccctgtatagcattttgcttcccataagttctgcatctttggctaaataaatcacaaacttgcagaggttatgattatctagtcttttccatcataacccaacccacctgaaatgctctgacactctagaaaataattctaattaatgaataaaacatggtaaactgataattagcttttgaaggtgaaagtgagctctttaacaggagggtaattcagtaatgttctaattgttttccccagcatcagacattacctgacacttcatttttgcttcagcataacaattcccagcctakgtttagaaagatcatgtacaatttcttaggatttggctagaaattattcataatgcctggattacacacttt

SEQ ID NO: 950614 - DNA, 653 bp, Homo sapiens
tttacaggtgggtctccgggggtgacatcacatgtcggaaggttctgtgatgcccctgacctgcaaaaccagcaagtttttattatggatttcaaaaggggagtggcgtatgaatagggagtgkgtcacagagatcacaggcttcaaaggcaataaagtatcacaagggcagagaggcagagcgagatcacaaggccagggtgaaactggaattactgatgaaggtccatgtcccgctgggcacacattgtcattgataaacatcttaacaggaaacagggtcccagagcagacaaccggtctgactagaatttcgccaggctggaatttcccaatcctaacaagcctgggggcgctgcaggagaccagggtgtatttcatcctttatctacaactgtataagacagacactcccagagcggccattttagagacctctccctgggaatgcattcgttttcccagggttattccttgctgagaaaagaattcagcgatatttctcctattcactttctggaagaagagaaatatgactctgttctgcctggcctgcaggcagtcagactttatggttatctcccttgttccctgaaaatcactgttatcctgttcttttcaaggtgcccagatttcatattgttcaaacacac

SEQ ID NO: 950615 - DNA, 591 bp, Homo sapiens
ccggcatgcctggacagaagtagacaagccccagcccatagtgcatgccactccttatttggagatgcttccttaastatccctgggcaacttccttttctttctttgttctattccccttacctaattaagaaagttttaaactaataaccaatcaggtaaagtgtaaaatgtgaggtcctattccagccaatgaaaactggacacagcagtagggtagacatgtcaggttataaattactctgtctcctttgtttggtgtgctctcgtggctggatggctactgagtagcaccctttctgcagaaagtaaagctcacctggctgagagattgtttgttcctgcattctttttttttttttttttcgacaccaaaaacttcattcccaacatccagatgtcctagatgatctctctcaagttcaaagttccacaaatctctagggcaggggcaaaatgccaccagtctcttagataaaacatagcaagagtcacctttactccagttcccaacaagttcttcaaccccatctgagaccacctcagcctggaccttattgttcatatcactatcagcattttggtcaaagc

SEQ ID NO: 950616 - DNA, 685 bp, Homo sapiens
gagagaaactgtggggctttctggaaagatgcaccattcgttataaaatgcaggattataaaaaacatgcagaggtttaaaatgagagagagagagagagcgagagagagacagcaagagagagagaaggmgagagagtgcagtccaaattaaaagtcacaagggtagactttctgaattatgggttgtttatttgagatcaagctgtttctcatgtggccaactcaatgcggcttgctctagggtgagtagtggctgagagttaattacttaatgatggttaatgattctcctgggtgatactgggaggtatatgcaaattaatactaattgctacaactcagcagcagctaccctttgcggagcttttgaggtgcattgggcactgggtggatgcttgatgcgtgttctcattttatcctcacgagaactgacagaggaaggcatcaacaaacctaccacttttcttgcagacaaggaaactaaagttcagagacgttgttcggcttgattaaagtcgcatttaataagtggaagagctgtgtcaggccatgggtgcctctgactttaaatctcttgctgttaactgtactcttcctgtactaaaatcacttaattcctaagaaaactttgagcaaggcctcttgggtgatctcaacttccaagtgaattacttagggttaga

SEQ ID NO: 950617 - DNA, 606 bp, Homo sapiens
cctgtctgttagaaggaaaactaacaaacagaaaggaatagcatcagcatcaacaaaaagaacatctacaccaaaatgccatccgtaggtcaccaacatcaaagactaaaggtagatgaaaccaaaatgaatgggagaaaccagagcagaaaggctgaaaattctaaaaaccagaacgcctcttctccaaggaatgcaactcctcaccagcaaggaaacaaaactggatggagaatgagtttgaagagttgacagaagtaggcttcagaaagtcagtaataacaaaattctccaagctaaaggagcatattctaacccatcgcaaggaagctaaaaaccttgaaaaaaggttagacgaatggctaactagaataaccagtgtagagaagagcttaaatgacctgatggagctgaaaaccacactacgagaacttcatgaagcatacacaagcttcaatagccgatttgatcaagtggaagaaagratattagtgattgaacatcaaattaatgaaataaagtgagaagacaagattagagaaaaaggagggaaaagaaacaaacaaagcctctaagaaatatgggactatatgaaaagaccaaatc

SEQ ID NO: 950618 - DNA, 605 bp, Homo sapiens
catagtccactcttagctgtaagcacyatctactggcttgtaggtcagactgcacagcccaatataaaacctggcgaaagaagtgcacagagctatagaagcaaagccaaaagatcctacacagcattctctacagttccgctccctacagagggagggaaagggaaaaaaatatagagaaagaaaaaaaggaaaagtcttacctgcatgaaaatgattatgaaaattagaagggcaagtatcttcagatgagaaggaacagtgcaagaattctgacaccatgaaaaatctgaatgtagtgacatcaccaaaaggattgcactagctctccagcaatggtccctaaccaaaatggaaactcagaaataacagataaagaatctaaatcatggattggaagggagctcaatgagatccaagataaggttgaaaatcaacagaaaaaaacttctaaaggaagagataaacatcttaacaagaaatcaattagagcttctggaattaaaatactcacttaaagaatttcataatacagttgaaaattttgatagactggaccaagcagaagaaagaattttggaacttgaagactggtcctttgcacc

SEQ ID NO: 950619 - DNA, 605 bp, Homo sapiens
catagtccactcttagctgtaagcaccatctactggcttgtaggtcagactgcacagcccaatataaaacctggcgaaagaagtgcacagagctatagaagcaaagccaaaagatcctacacagcattctctacagttccgctccctacagagggagggaaagggaaaaaaatatagagaaagaaaaaaaggaaaagtcttacctgcatgaaaatgattatgaaaattagaagggcaagtatcttcagatgagaaggaacagtgcaagaattctgacaccatgaaaaatctgaatgtagtgacatcaccaaaaggattgcactagctctccagcaatggtccctaaccaaaatggaaactcagaaataacagataaagaatctaaatcatggattggaagggagctcaatgagatccaagataaggttgaaaatcaacagaaaaaaacttctaaaggaagagataaacatcttaacaagaaatcaattagagcttctggaattaaaatactcacttaaagaatttcataatacagttgaaaattttkatagactggaccaagcagaagaaagaattttggaacttgaagactggtcctttgcacc

SEQ ID NO: 950620 - DNA, 569 bp, Homo sapiens
gaagaaaatctaggaaacaccattctggacattggatttgggaacaaatttatgactaagtcctgaaaagcaattgcaacaaaagcaaaaactgtcaattgggagataattaaatgagagagcctctgcacagcaaaagaaactatcaacagtgtgtaaacagacaacctatggaatgggagaaaatgtcacaaactatgcatccaacaaatatctaataaccagaacgtataagtaagttaaacaattacgcaaaaaacaaccccattaaaaaatgggcaaaagtcgtggacacttctcaaatagaagacatacaagcagccaacaaataaatgaaaaaatactccacatcacgaatcatcagagaaatgcaaatcaaagtcacaatgatatataaactcacaccagtcagaatggctattattaaaaagttagaaaacaggctgggcgtggtggctcatgcttrtaatcacagcactttggaaggcccaggtgggtggatcacctgaggtcaggagtttgagaccagcctggccaacatggcaaaaccccatctctacaggaaaata

SEQ ID NO: 950621 - DNA, 439 bp, Homo sapiens
ttttgtatttttagtagagacgaggtttccctgtgttggccaggctggtcttaaactcctgacctcaggtgatccgtccgtctcagccccctaaattgctgggattacaggcgtgagccaccgcacccggcctagaacccctttcttaaggaccctgagtgggcaagtataaaaatcatcccattcttattaatgagaaatagaagcttagatgagtactgactcatggttcatatttagcaaatgacagatctgggacaagaccccaggtctttggatttccttttgtcatgttcccatgactcatgccatgcccacgtgcctaaatgtccaaggcctgctcamcccagctattcttattcgtgtgtctgttttagattggcaaggaaaaaaagctttctaacttttctaggaatgggtctcaacccacagcataata

SEQ ID NO: 950622 - DNA, 651 bp, Homo sapiens
gttttaaaaaaaaagaaaagaaagaaagaagccagatgggagtattaaaggcaggaaccaaattaagcccgagattacccaggaagataaaaagatgactaggagagtaacwaccagtgctgaccagagttacagcacagccggccagccccgagcagacggacgtggctcagacttggctcaaacccaatacaagcacgctgtccccatctccagagcagccagggaatgaactgtgtgctaagcaactgaatcatcacatgctacaataacgtctacagtccatgcctaggaagaatgctttgagtagaaaatgcatctcctattgttgggcaggacgaatcccgcatacttctgcccaggggcaagagacaaaccaacaatgaataaaatacaactttgacatacacatacccagactgttttcaatcaaatttcaaaggaagcaaaatatgtaaagaaaacataactccaaattttctctttaaaaaacaaactagatcaaagggtttgaaagggttctattttatagtttcaaaaatgttagtcccactgaaacattttctggcctgcatgaatctttcccataataatcagtgtcctagaagtcataccccggatgtttaagtgtgcatcagctaccaaaatccc

SEQ ID NO: 950623 - DNA, 600 bp, Homo sapiens
aatgaatgaatgaatgaatactgtttcttcaaaggtcccaaaacacaccttctccatttctacctacaytgccttaaagttctccctgcctttaccccactggtttattctcctggtttattccattcacatttcaaagacaagctcaaatcccttctcttccattgagcatttgcaaagcactccagcttacctggatttttctcatccctagtctcctatagaaatcatccatctaggctgtgcgcagtggctcacacctgtaattccagcactttgggaggccgaggcgggtggatcacgaggtcaggagatcgagaccaccctggttaacatggtgaaaccctgtctctactaaaaatacaaaaaattagccaggcgtggtgtcgggcacctgtagtcccagctactcgggaggctaaggcaggagaatggtgtgaacccaggaggtggagcttgcagtgagctgagatcgcgccactgcactccagcctgggcgacagagcgagactccatctcaaaaaaaagaaaagaaaagaaatcgtccatctaggccaggcaaggtggctcacacctgtaatcccagccctttgggaggct

SEQ ID NO: 950624 - DNA, 456 bp, Homo sapiens
aaaataaaagtaataatgctttctgaagcattattatgtaggaaaaatattaatcaatttgggatataaatataatttgttaagcagtcatgaaagagcattaaatataaagattaatatgcaagaataaattaaaagtagaactttccttcatgaagacactattaagaaagaaaacggaaagccaagcatggtggcctgtgcctgtaatccaggagtttgagatcagcctgggtgacatagcaagaccctatttcaaagtattaggaaaaagtaaaatggattgctaccaatggaaaataacatgtttataatatttagatacttgttatgcatagatagtackcctggaaattaattgtaaaaaggtgggagaagtcataatttatgcaatttttgtatgtgttacacttcagtaaaatgcaactaaatgaataaatgaaagaaagggaaaaa

SEQ ID NO: 950625 - DNA, 601 bp, Homo sapiens
atatcctgtggaaaaaactttgggtactatagagattcaattgaaggggattaacaaaaagaccacttagttaagagaayaaactccttatctagctcattctttgatctatttgagtttacatggcttggtttatggggatcctggttaaggagcatattccaagctctcggttttatcctccaatagtcaaaataatagtctccttggtgtgttgtattctctcaaaggttttaaatgtttgcatgcagccatctctggaacatcaaatggtctctcttcaactggaatgacaagagctaaaagaaatgtgggaccatgaggacactgtaacctataaatgacatgctgagagcagacacaaaatgatggtaacagagaatggcactaaggccctaagttttggtcacactctcacctaagtgagcacctgaccaaacagggaggaactttttaaaacaaaattatgggagaccattgttttggattcagctcatgcactacacctcaacagaccaaaccaaacaaaactggagtcactcatgctaaaagtaacataatgaaactgagactttaaggaaacacatagatcttagaccag

SEQ ID NO: 950626 - DNA, 670 bp, Homo sapiens
tggtggctcacatctgtaatcccagcacattttgtaggctgaggcaggcagatgtcctcaggtcaagagtttgaaaccagctttgaccaacaaggtgaaaccccatcttccactaaaaatacaaaaattagctgggcatcatggcatctgcctgtaatcccagctactagggagactgaggcaggagaatcacttgaaaccaggaggcagaggttgcagttacccgaaatcaaaccattgcaccccagcctgggcaacaagagggaaactccatctcaaaaaaaaaagtcaaaaaacaacagatgctggagaggctgcagagaataaagaacacttatacaccgtcgttgggaatgcaaatagttcacacactgtggaaagcagtctggagatttctcagagaacttaaaacagagctaccacttgacctaggaatcccattactgagtatggaaaacagatcattataccaaaaagacatgtggactcatatgttcattgttgtgctgttcacaatggcaaagacgtggaatcaacctaggtgcccatcagtgatggactgaataaagaaaatgtgatacatayacaccatggaatactatgcagccataaaaaaagaatgaaatacatacaaagttgtatgtatgctcttttgaggtgttattccctt

SEQ ID NO: 950627 - DNA, 730 bp, Homo sapiens
cactgatgggtctgggtcacctacaaccaagtttgcacagcctgttccagagtgctgcttttgttgactctctgacttcttggattttggcagctccccactccctgacctacaaagattttatctgatcataacttgtgcttctaggacttgctctctggtctgtttagaactctagtgcttgccataggccttctgcttatcttccctctgcagcctggtgtctcatggccagacctggcctgaccagtcttgttactgcccacactgaggtggggacctgaggtaggtgggatggaggctaacatctgtgctcgtcagcccaggttcttccccaggttctcctcgggttaatacaatgtccttggggttcccatgtcctgaatgttccttcctctattctctgcattacccatcactgcttttttttaatgcctcattttcaatggcacctcttctgagaggttctcatggaatacctgatctaaaggaggtgatttctcttgtaatttgtctcagctcctcttctgttttcatcccacaaagctaaactgcagagcaactttgattgattttgtccatcctttctactatccatcactgccatgaaagcagakcctgccctgccctgccctgttccgcatcacaccatggatccctagcacagggacagacacagtgtagatggccattatgaagctgttgaatcaacattgaattatgagaaaat

SEQ ID NO: 950628 - DNA, 548 bp, Homo sapiens
agaagccacagggaaggagctgcctaaggccttgggaccccatcccttgcccttgcatcagtgcaccctggatgtgagacatagaatcaaaggagattattttggagctttaagatttaatgactgccctgctgccttgcatggggccttagacccttcttttggccaacttctgccttttggaatgggagtatttacccaatgcctatacccccattgtatcatggagtaactaacttgttttttattttacagggtcataggtggaaaagactagctttgtctcagatgagactttggactttggactttttagttaatgctgaaatgatttaagactttgggggactgttgagaagcgatgattgtattttgcagtttgagaaggacatgggatttgaaggtccagggtggaattrtatggttggatctgtgtccccagtgttggagatggggcctattgggaagtggttgcatcatggggttgtgatatggtttggatctgtgtctcccatcaaatctcatgttgagttgtaatcctcagtgtt

SEQ ID NO: 950629 - DNA, 548 bp, Homo sapiens
agaagccacagggaaggagctgcctaaggccttgggaccccatcccttgcccttgcatcagtgcaccctggatgtgagacatagaatcaaaggagattattttggagctttaagatttaatgactgccctgctgccttgcatggggccttagacccttcttttggccaacttctgccttttggaatgggagtatttacccaatgcctatacccccattgtatcatggagtaactaacttgttttttattttacagggtcataggtggaaaagactagctttgtctcagatgagactttggactttggactttttagttaatgctgaaatgatttaagactttgggggactgttgagaagcgatgattgtattttgcagtttgagaaggacatgggatttgaaggtccagggtggaattatatggttggatctgtgtccccagtgttggagatggggcctrttgggaagtggttgcatcatggggttgtgatatggtttggatctgtgtctcccatcaaatctcatgttgagttgtaatcctcagtgtt

SEQ ID NO: 950630 - DNA, 185 bp, Homo sapiens
ttattagtgtgtgatgcattctttcagaaaggttctgcaggagtgtawcatgatatactctaaaatatgtgctttggttagaagatggcaggttgagcacatgtttgccttttgagtcaccaaagctcactggggacaaaaaaggatagaagttgctaacccatagtgagaaggccaggataagg

SEQ ID NO: 950631 - DNA, 641 bp, Homo sapiens
ggattacagttgcctgccactgcactggctaatttctgtatttttagtagagacgggttttcaccatgttggccagtctggtcttgaactcctgacctcgtgatccacccaccttggcctcccraagtgctgggattacaggcgtgagccaccatgcccagcctattaatttcttaaggctgccataacaaattgccaccaacttgagcctcacagttatggaggctcaaggtctgatatcaaggtgtcaacagggccgtgctccctctaagaatccttccttggggcttccaaggttctagaggctctaggaatgttttggtgcaccttggcttatgggtacattgctgtcatctctgcctccttcattacttggccttcttctgtgtctgattgcacatggccttcctataaggacaccattcattggatttagggaccactctaatccagtatgccgtttggcatttgaactaattgcatctgcaaagatcccatttccaaatagggtcacattctgaggttgcaggtgggacatgaattttgggggagacactgttcaacccagtatagattatatagaagaatatctgaagacagagagaaatgtttacagtatattactgagtaaagaaggtggt

SEQ ID NO: 950632 - DNA, 641 bp, Homo sapiens
ggattacagttgcctgccactgcactggctaatttctgtatttttagtagagacgggttttcaccatgttggccagtctggtcttgaactcctgacctcgtgatccacccaccttggcctcccgaagtgctgggattacaggcgtgagccaccatgcccagcctattaatttcttaaggctgccataacaaattgccaccaacttgagcctcacagttatggaggctcaaggtctgatatcaaggtgtcaacagggccgtgctccctctaagaatccttccttggggcttccaaggttctagaggctctaggaatgttttggtgcaccttggcttatgggtacattgctgtcatctctgcctccttcattacttggccttcttctgtgtctgattgcacatggccttcctataaggacaccattcattggatttagggaccactctaatccagtatgccgtttggcatttgaactaattgcatctgcaaagatcccatttccaaatagggtcacattctgaggttgcaggtgrgacatgaattttgggggagacactgttcaacccagtatagattatatagaagaatatctgaagacagagagaaatgtttacagtatattactgagtaaagaaggtggt

SEQ ID NO: 950633 - DNA, 614 bp, Homo sapiens
tgtggggggacagttacacatagctttgaaaggctgcttagccgaagagtggcgagagtcggggagggagtgggagttgttcagcattgttaacttccaacatacgatgggcatttgggcacatcagagggatacaaccctatttttcgagcctgggttccaggggtgcagctgttttgggccatttacagcagtggaatttggatggcgcagatattgcccatagaagctttgcctgcctgccttcctttcttgttttgtttccttttctttttcttttttattttctcttctttcctcttttcttctcttctcttttctctttccttccttccttcccttccttccctccctctgtcacccaggctggagtgcagtgctatgatctcagctcactgcaacttccgcctactgggttcaagtaattctcctgcctcagcctcctgagtagctgggattacaggcgtgccgccatgcttggcttaatttttgtatttgtagtagagatggggtttcaccatgttggccaggctggtctsaaactcctgacctcaggtgatctgcctgcctccgcctcccaaagtgctgggattacaggtgtgagccaccgcacc

SEQ ID NO: 950634 - DNA, 590 bp, Homo sapiens
gccaggctgcccggattctcaaagctctgcctcacactagctgcatgaccacagacaaaatagccactctggggcttaatttcgccayctgtgaagtgggaatcatatatattgaatataatttatgatgaggattaaatgaattactacttgtaacgaactcagaagagtggcctataaatagcaagcacaatgtgttgtattgccctattattagtggtagaacagtatcctgggcactatgctaggcacagtcttataacagtcttataactttgatctacttagggatttaatttattggaaaactaacaaattacagcaatagcaagacctagaccttgaccccacactgtcacatcttttctcttatttgtctagccagtgtttatactccaaggggaacatggctgaaaatagggaaggtctggatgaaatgtcagcctagagtggcccatttcccaagaccctccagggtaattctggatatggtgatgttcgcatgctcccctgcctagtcagcaccagggcagcatgcaacctcactggccacacatgggctgctgcccaagacctttcaatgtaacatt

SEQ ID NO: 950635 - DNA, 613 bp, Homo sapiens
gcccgccaccacacccagctaatwtttttgtatttttagtagagaccgggtttcactgtgttagccaggatggtctcgatctcctgacctcttgatccgcccgcctcggcctcccaaagtgctggcattacaggcgtgagccactgcgcctggcccttcctagcattttttaaacctctgtctccaaaccctgctttttttttaggtgatgaacctatgcaactgactagttttgggtgtcttcatgtggcttccccaaggtgcctctatttctttactcagtgaaatgctaccacccaagtatcaccagccagaaatctggcagtcatctcacacttatcctattcttcctacatccaagaagcctccatacacggtattgattcaaccttctaaatgccccttgaagctgcccccttctttctattttcatagccaccaccttaattttgtcttatcttcactctcattttcttgtgttgattacaggcatgtaacacataacggcactttggttaaggatgcactgaatatacaacagtggtctcataagatgatactactgtatttttctgtaactcttctgtgtttagctatgtacacaaataccatt

SEQ ID NO: 950636 - DNA, 642 bp, Homo sapiens
aattgctaaataggacaagagttctttttattttctattcaaagtgtgtgtgtgtgtgtgtgtgtgtgttgccaggggagtattactgaaaaggaaacacaaataaatgcagtacatgttttcatgacctagcttatattatgtttaattgttttcctctggaaaaatgtcagtggatgtacgtgcatatatttagggcctgaagaacaaaacataggaattcagataattttgcaattaatataagaagcacccaatatttgtggcacaattaaatgctggacctgtttaaaaaataacatgcagagtctgttttttctttgcctactgttctatatcatcaaaaacaggtcagtatttcaaaaatgattttctcatttcatgtacagattaaattattttatcagatgactttctgcttcttattcttcctttaattccctggagtgaaagcacattcaaaagtgaatcatatgtctacctgatagcattggttacacaatgaaacaactgtaatytgtatacaccagaaaactctatagacttgaatgacctgataaaggaaagtagatgataatcagtttggtttctcacttaccaagtaaaggtcagaacatatttttaacttccgaatatctaagt

SEQ ID NO: 950637 - DNA, 532 bp, Homo sapiens
gaaggaaagaaagagagagaggagggagggagcaaacgaagaaaggactaaatagtaagaaaatcaacaackttattttttaaaatgggcaaaagatctaaacagacacctcactaacaataatatagagatggtaaatatgcatatgaaaatatgcccaacatcttgctattagtgaattagaaattaaaataatgatagatgccacaacccacctattaaaatggccaaaatcaaaaacatgacagcatcaaaggctgatgaggatgtgaagcaataggaactctcatttactgctggtgagagtgcaaaatggtacagccacgtcagaagagagtttggcagtttcttataaaactaaacatactcttggcatatgatccagcaatcccactctttggaatttactccaaagaactaaacatttacacacacatacacacacacacacacacacacatacacacacacacacacacaatctgcacttgaatgtctataacagctttattcatgattgccaaaacttgga

SEQ ID NO: 950638 - DNA, 611 bp, Homo sapiens
actggtctaaaatgaaaacataggggtaggttgggggtggasaggtaatggttggtatgaatctctggacctctagacctcctttccccacaaactttccccacaattattttgacaaggactgaggatccttgtcaaagttaattatttcattgagaatttaaaatggctgttttctgtgttataacttctttcacatttattgggaagttcagttaaaagatccttacattaattctctctctctttaaaactctcatttaaaaatccattaatgtaattcaccatattaattgatataaaaagagaaaaataatatgatcaccccataactgctaaaaagaccttcctttaacaaaatttaatacccattccctaataagataaaaattaatgaatactttcttaatatgataacatatattaaactagaaagaacttagactattacacttagaagatctggtttcagtgtcagaaggctctgaattggctccagtcccaaaatttactttctctgtgactttctgtacctcaattacttcatccatgagttgagttaatagagtttggcccattacatggtgcataggtaatattccataaatact

SEQ ID NO: 950639 - DNA, 572 bp, Homo sapiens
ttggacactgtcttctataccaggttattctcccaaatgacatgccatatgcatttcrataatgcagtcactatattctagaatagaaagccatcaagtggttaataaatcttgtttcttttacagtggtggctaatgaagagtaaacagatatcattggaagttgaggatctaggataccatgatctccacaatgaattcaggcagataagctctgcttatatcaacttgatatattgcatcttacgtatgtatatatgatgcagtatattaaattataatcatacatataaaattctacccaatgtttaataaaaaagtttatttgttagaaatgattataaacactgatgtatgcaataaatgttgtacaagtgggtggtactaaataattatatgattacaaagaaatttgattaacagaaataagtgttcagaccacataatattctttttaaatttattttcctttttttaacttttattttaagttcaggggtacaagtgtaggtttgttacacaggtaaacttgtgtcatggaggtttgttgtacagattattttatcacccag

SEQ ID NO: 950640 - DNA, 640 bp, Homo sapiens
atggacctatttggatgttggaggcaacacattcctaacttgggtgtgttactctggcccattatcaagtgacctgaaaggctgccagttttgagtagggtccagaacaggtctctgcaataggtccaggctgctgtgcaagctgctctgccacttgggccatatgacatagtaaattcaatggtgttcgaggtgtcagtagcagatagggatgctatttggagccttcagcaggccctcataggtgaatatagcagaggcctctagaatttttgagcaaagccctgtcatcttctgtagttaactactctccttttgagagacaactcttggcctactgggctttggtggaaactgaacatttgactatgagtcatcaagtcaccatgcaacctcaactgggtgttttctgacctatctagccataaagcgggtcgtgcacagcagcattccatcatcaaatgaaagtggtatatacatgattggactcaagctggtcctgaaggcttaaataagcgacatgaggaagtggctcaaatgtccatgttctccactcctgccaccctgccttctcttccccatcctgcaccratggcctcacagggagttccctttgatcagttgacagaggaagagaaga

SEQ ID NO: 950641 - DNA, 171 bp, Homo sapiens
atcattattagtgtgtgatgcattctttcagaaaggttctgcaggagtgtawcatgatatactctaaaatatgtgctttggttagaagatggcaggttgagcacatgtttgccttttgagtcaccaaagctcactggggacaaaaaaggatagaagttgctaacccatagt

SEQ ID NO: 950642 - DNA, 629 bp, Homo sapiens
aatcaaatgcaataaaaacagaaattgacaaatgagacctaattaaactaaagcgcttctgcacagcaaaaaaacccaaaacaaaacaacaacaacaaaaaactatcaacagagtaaacaaacaacctacagaatggaagaaaatatttgtaaatgattcatctgaccaagggctaatgttcacaatctacaaggaatttaaacaaatcaacaagaaaaagacaaataacctcattaaaaattaggcaaatgacatgaacagaccttctcaaaagaaaacatacaaacagtcaacaaacatatgaaaaattgctcatcattaattatcagagaaatgcaaacgaaaactacaatgagatactatcttataccagtcagaatggctattactaaaaagtctaaaaataacagatgttgatcaggctatggagaaatgggaagcttatacactgttggtggggatgtaaattacttcagtccctgtggaaagcagtttgtcctgcctagggacytagactccacacacttgacctactgcatcaccagccagacacattccacagcccactctgactcttacaagcacaggggattggtatatcaccggggtgttgtgggtctcctggtga

SEQ ID NO: 950643 - DNA, 718 bp, Homo sapiens
ccatggttgatgcccttcagcctccctgcatctccatctccataggacccgcagtggttgcacttcagcctccctgcatctccatctccataggacctgkggttgatgccgttcagcctccctgcatctccagctccgtaggaccccgtggttggtgccctttgggcaaacatcccatcagcgtgggccacatttattccactgaatgaagagcatttttgttttccgatcatggactgttagctgtgggatgcaccaaataacccttcatttcaaccctcctggttttacagagggggtagctgggctttaagcagtggaatgatgacacttggtggcaacactggcagagggcaaaggaggctggggcgcatgacccccgggggctgtaatggccatgtgacctgagttcagtcacatatgcagagcccagcatgacgcccagcagcctgtccagaggagagcttgatgcagaacttcataataccatagaactccattttaaaagcaaaaatatgtttcttttaaatagcctatgattaaatgttatttgatttaaaaagagagtgtactgcacagctactgaaacagagtttaggacttttgcaaacagattctagagaggcagttctctgaagactgaccctgaggcctccaggccacagcccttgaggacccgaggtcctgtcatctccagcagccacgcagggaagctgga

SEQ ID NO: 950644 - DNA, 609 bp, Homo sapiens
gacatttcattacgtagacctatttgactactctaaatactgcctctgtaaacatgtgtgtacatgcctttgtttgagtacctattttcaactctcttgggtgtgyacctagcaggagaagtcctggatcatatggtaattgatatggtttggctgtgtccctacccaatctcatcttgaattgtatctcccataattcccacctgttgtgggagggagttggtgggaggcaattgaatcatgggaccagtttcccccatactgttctcgtgatagtaaataagtctcacgagatctgatggttttgaaggagaaacccctttcacgtgattctcattctctcttgcctgccaccacgtaagatgtaactttgctcctcattcaccttctaccatgattgtgaggtcccccaagccatgtggaactgtgagtccattaaacctctttcctttataaattaaccagtcttgggtatgtctttatcagcagcatgaaaatgaactaatacagtaattctgtatttcgctttttgaggagcctggaagggaatattgatagcctcccaccttgccggctcttattaaggatagacttctgcagtgtttccct

SEQ ID NO: 950645 - DNA, 710 bp, Homo sapiens
cctgggcaatggcgggcacccctccccccagcctggctgccgccttgcagwttgatctcagactgctgtgctagcattcagcgagagtccgtgggggtaggaccctccaagccaggtgtgggatataatctcctggtgccgttttttaagcccgtcggaaaagcgcagtatttgggtgggagtgacccgattttccatgtgctgtctgtcaccactttctttgactaggaaagggaactccctgaccccttgcgcttcccgagtgaggcaatgcctcgccctgcttcggctcatgcacagtgcacgcacctactggcctgcgcccactgtctggcactctctagtgagatgaacctggtacctcagatggaaatgcagaaatcacccgtcttctgcatcactcacgctgggatctgtagactggagctgttcctattccggcatattctatttcaaacactgaataaatgttactagagatttttaagcaaatgcattttagctgcaaggtatagcagagacaaactgcatggacagttgacagaaaaaaatgtttgaaagaaataatagtctagacaaagaagacgttagaaatttgaaggaaatcagtgaaattaaagccaatgagattaactgggaatgatgtgtgaacagacttgactgctgttctttgtagtttcagatcgtagtaacagaggtagccagcttta

SEQ ID NO: 950646 - DNA, 746 bp, Homo sapiens
atgtgtggtgttatttctgaggcctctgttctgttccmttggtctatatatctgttttggtaccagtaccatgctgttttggttactgtagccttgtagtatagtttgaagtcaggtagagtgatgcctccagctttgttctttgcccatcttttattttttatttatatttatttatttactttttgagacagaatcttgctctgttgcccaggctagagtgcagtggcagtgcagagctgcagtgcagctcactgcaacctctgcctcctgggttcaaacaactttcctgcttcattctccctagtagcaatggccacctcgctcagctaattttttttttttttttttttaagagtcagggtttgatcatgttggtcaggctcatcttgaatttctgatctcaagtgacctgcccaccttggcctcccaaagtgctgggattacagacctgagccattgtgcccagcctctttggccatctttttgaaaagtctctaaacatatttataatagctgctttaaaactcatgtctgctaattccaacatttatatcatctccaggtcactttctactcacgatatttttcttgagtataggtcacctctccagcccccgcatgtccagtatgttttgattttatactggatgttgtggatattatgttataaagattgtattcagagtatttatttgaagtcttaatttttgttctagcaggtaattaaattactgactgacgtc

SEQ ID NO: 950647 - DNA, 622 bp, Homo sapiens
tatcatatatgcatttggtttttttcaccaagggatttttgtcttcctaactggatttagagctccttgaaaacagggycgatctcatgcatctctgggtcccccttggaacagccatggtgaggactgattgcctccttcacccccgcactttctactcttcttccttcctgtccccctacccaccacttgtcccttcctatcttggtgaaatcaagccacaccaacaagaaggcaaaaaaaataggccaggtttcacccttcctaatctccttccctgtgtggtttgttagtgtttgccttgtggttccacaatgtcatgagaaggaagtctttttatgagaaggagcttttctcatcaatgttatgagaaggaacttttcctctacttggcagagaggtactagccatgtcttataacccttggccctcttgagggtttccagaactcccttctttccatgtttattcaaattccattttcattatcgtacttcccagtttcacccaacatccacgttatcacccaagtatatgccaagagtccttgcctgcccattcccagcttatacatctatggagctactttctgcagtgagatctgttgggagcagcatggcca

SEQ ID NO: 950648 - DNA, 580 bp, Homo sapiens
tcttagagcaatagtgtgaatgtttgtgtaaccctcaacttcatatgttgaaatcctaaactcttgagatgatggtatcaagaagtggggcctttgggaggagattagggaaatagcctatgcctttatgaatgggattagtgtttgtatcaaagaggtctgaaaaagatcccctatcctctttgccttgtaaggttacaatgagaaggtgccatctatgaaggtaatgggcgtttaccagtcactgattttgttggcaccttgaccttggacttcccagcctccagaaatacgagaaataaagtactgttgtttataagtcacccagtctatgctatgttttaatagcagcttgaaagaactaagatacacagagtgatgaactccggacttgtgttaatttgcaaaataatttgtgataaaataattagttcagccactgtggaaagcagtttgcagatttctcaaagaggttgaaactaccactcaacccagcaawcccattactaggtatatatccaaaggaaaataaattgttctgccaaaaagacacatgtgctcatatgttcatcacaacact

SEQ ID NO: 950649 - DNA, 575 bp, Homo sapiens
atctcttgtgaaagcccatttgcagggagctttcacatccgacatcacctttgatattggtgaattacaaaacaaaattcttgatttaaataaacaaattccagagtttcagccttctttagaagactggactgaattccagcaaggcctggagagcgtcaacccttggacctatctaaagcaccacattaacatcttatatatagttcttggaataatgttgttttgtctctgtcttctgttcatagtctgtaaaatcggatggactgccaatcggagaatgaaagctacccagcctggccttacattctttcacttaatacataaacaagaagggggaaatgttgggagccaaaaaggccaaagggatggtgaccaactcagcattccactggaggctacatgatcaaacagcaaactgtttatcatgaatacagaatgtgggcaaactcgcttctgtgcctgcccagaaggtttgctgagggccatcgctccctggccccggctccttgaggttatctactgggacatctagagcctattgttygaggaatgcagtcttgcaagcctactct

SEQ ID NO: 950650 - DNA, 597 bp, Homo sapiens
tttagggtctcttacaaggaagcaaccaaggtatctgycagggctgggtcttatctggagactcaactgggaaaggatacactgctcatttgcatggctgttggcagattttagttcctagtgagctattggactgagggcctcatcttcttgctagctgtcacacaaaagcttccctgagttccttgccatgggggtctctccatatgatgataccttacttcattaaagccaaaaaggaagagagccattagagaaactggtagcaaaacaaaagctgcaatctcatttgcttcattctgttggttagatgcaattcactaggctggtccacactcatgagtaggggatttcacaaggatgtgaatatcaggagtgtgaatcattaaggactctctgaaagtctgcccaccacaagtacaaaagaatgcagggctgtctttaatctaccacagaagcttgctgctaaagactaaaaggagactgacaaatattaatatattcaacagtatttactgagtgccagctatgtgccatccagacatcagagcaggcccaagaaatacagggatgaataagacatcataactgccccca

SEQ ID NO: 950651 - DNA, 739 bp, Homo sapiens
tcctgagtctggtggggaggtagagaacctttatgtctagcccagggattgtaaatacacaaatcggcactaygtatctagttcaaggtttgtaaacacaccaatcagcaccctgtgtctagctcagggtttgtgaatgcaccaatcaacactcagtatctagctactctggtggggccttggagaacctttatgtccagctcagggactgtaaatacaccaatcggcactctgtatctagctcaaggtttgtaaatacaccaatcagcaccctgtgtctagctcagggtttgtgaatgcaccaatcgacactctgtatctagctaatctggtggggacctggagaacctttgtgtctagctcagggattgtaaatgcaccaatcagcgccctgtcaaaacagaccactcggctctaccaatcagcaggatgtgggtggggccagataagagaataaaagcaggctgacagagccagcagtggcaacccgctggggtccccttccacactgtggaggctttattcttttgctctttgcaataaatcttgctactgctcactctttgtgtccacactgcttttatgagctgtaaccctcaccgcgaaggtctgcagcttcactcctgagccagcgagaccacgaacccaccagaaagaagaaactccgagcacataggaacatcagaaggaacaaactccagacggcgccaccttaagaggtgtaacactcaccgcgagg

SEQ ID NO: 950652 - DNA, 698 bp, Homo sapiens
agagaagacaaccataaggtctgactgcctgtggggttgggcaaaaagagccatatttttcttcttgcagagagcctataaatggatgtgcaattagggaagatatcgctaaattcttttcctagcaagggcatattaatattaataccttgggaaaggaatggattccttgggggaggtctataaatggccgctctgggaatgtctgtcttatgtgggtgagataagactgagatacaccctggtctcctgaagtatccttaggcttactagggtggggaaaatctccaccctggtaaatttgtggtaggaccggttctctgctctccaaccctgttttctgttgtttaagatgtttatcaagacagtatgtgcaccgctgaacatagacccttatcagtggttctgcttttgccctttgccttgtgatcttcattggacccttatcagtagttctgtttttgccctttgtcctgttccctcagaagcatgtgatctttgttagacccttattagtagttctgctttttgccctttgaatgtgatccttgtacctactccctgttcttacaccccctccccttttgaaacccttaataaaaacttgctggtctgagactcaggtgggcatcgcagtcctacaaatatgtgatgtcacccccagtggccmagctgtaaaattcctctctttatactgt

SEQ ID NO: 950653 - DNA, 604 bp, Homo sapiens
aattcattgattttagtcctctgtacacttgtgctatcaaaacaaaaatcatttgtcttaagaaaaccataccattattaaaaagtaaaaaaattacagatgctgcccaggttgtgaagaaaagggaatgcttatacactgctggtgggaatgtaaattagttcagccattgtggaaagcactctggcgatttcttaaagaacttaaaacagaactaccattccacccagcaatcccattattgggtgtacacccagaggaatagaaaccattctaccacaaagacacacatacacatatgttcattgcagcactactcataatagcaaagacaaagaatcagcctcaatgctcaatggtagactggatttttaaaacgtggtacacacacgccatggaatactatacagccatgaaaagggatgagatcatgtcctttgcagcaacatggatagaggtggaggccattctcctaagcaaactaacrcaggaacagaaagctaaatattgcatgttatcacttataagtgggagctaaacattgaatacatatggacacaaaaaggggaacacaaacaccagagtctacttgatggtggagggt

SEQ ID NO: 950654 - DNA, 552 bp, Homo sapiens
ggcggggggctgacccccccacctcctagagggaacattttctaactcattctaaagaggccagcattatcctagataccaaagccaggtaaggacattacaagaaaactacagaccagtgtctctgatatacatagatgcataggtcctcaagaaaatactagcaaactgaattcagtagcatattaaaaggattacatataatgactgttcccttcaaaacccaggttgaagtttaatttccaatgtggcagtattgagaagtaaggcctttaagaggtgattagatcatgagggttctgctctaatgaatggatgaatacattcttggaataatagatgtatgggatatcattagagggaaactgatggctttataagaaaaagaagagagaactgagctagcacattaacatattagcaagcttagctctctcaccctgtaatactctgcactgcctccagactctgtagggttcccaccagccagaagactctcaccagatgtgcccrcttgactttggacttctccacctcaataactgtaaaaca

SEQ ID NO: 950655 - DNA, 813 bp, Homo sapiens
ctacagcccctttccaggacatctcaaggacagyggtgaagggaaatcttccaaatggacagaaatttgagcagtgcacctgattgtgcactttgcatggaaggagacatggccagatgtgcgattatataccaattaattggctgtagccaatggtttggctggagggtcagggacttggaagaagcatgactggaaaattggtgacaaaggaatttggggaagaggtatgtggatggacctatctgagtggtcaaaatctatgaaggtatttgtatcctatgtgagtgttcacccatgggtgacctcggcagaggaggattttaataatcaagtggatatgatgacccattctgtgacaccactcagctctttcctgagccacccctgtcatcacctaatgtgctcatgaacaaagtggccatggtggcaggtttggaggttatgcatgggctcagcaacatggacttccactcatcaaggcagacctggctacagccactgctgagtgcccaacttgccagcagcagagaccaacactgagcccttgatatggcaccattccttggggtgatagctagctagctcatggcagtttgataatattggacctcttccatcatggaaagagcagaggtttgtcctcactggaatagacacttactccagatacaggtttgcctaccctgcacacaatgcttctgccaagactatcatccatggactcacggagtgccttatccactgtcatggtattctacacagcattgtctctgaccaaggcattcactttatggctaaagaaatgcggca

SEQ ID NO: 950656 - DNA, 593 bp, Homo sapiens
atcacgaggtcaggagatcgagaccatcttggctaacgcggtgaaaccccgtctctactaaaaatacaaaaaattagctgggygcggtggcgggctcctgtagtcccagctacttgggaggctgaggcaggagaatggcgtgaacccgggaggcggaggttgcagtgagccgagattgcatcactgcactccagcctgggcaatagagcgagactccgtctcaaaaaaaacaaaagaaaaaaaaaaggaaggagaagggttggtcacggtggctcacacctgtaatcccagcactttgggatgccaaggcgggtggatcactcatcaggagttcaagaccagcctgtccaatatggtgagaccccgtctctactaaaaatacacaaaaaattagctgggcatggtggtgagcacctgtaatcccaattcctcgtgaggctgaggcaggagaattgctggaacctgggagatggaggttgcagtgagctgagattgcaccactgcactccagcctgggcaacagagcaagactctatctaaaaaaaaacgaaggagaagaacacacatcaaagcctttccctcacccttgctta

SEQ ID NO: 950657 - DNA, 564 bp, Homo sapiens
gttttgtaatcttctttatgatttcatcagatttttcagagaaagctctcagagcgattacccccttaaataatgcaataatattccacttctattgaacccccttccttcaatctttttgttgtcactgttaatgctgttattcttcaaagggagtgaggaattgtggaaaggaaaggggtgacaatcagagtaagaatgctgcaaaactgtggaggtttgataggagatagaggtttaaaaaaacaaaaaataagtggtcgcataattgatatgcttctatagataatttcaaggtagaatttggaacagtgtagaattatggtgcagttatcttgacaatggtaggctaagttgttcttctactacagacattttaaagtaatgcataccaatgtacccaattatatctgtacagtaaaattgaggggtggaartgtgcagaaaaaatctccaaaacaaaaagaccttcttttcaagatgtcaagtatatatttatcatcaaatcgtaatcatcttactgggtatatatggagtatattttgagatttttaaatgaacatt

SEQ ID NO: 950658 - DNA, 572 bp, Homo sapiens
aggaggagacaaccacagggatgtgaactggtgtacctttcagagtacaggaatgtaagttccctgagagtgagggattaaaaagaaattttctctttaattgtggtaaaaaacatataacataaaatttatttatttatttatttatttattgagatggagtctgtcacccaggctggagtgcagtggcatgatcttggctcactgcaacctccaccctcctgggttcaagtgattctcctgcctcagcctctggattagctgggactacaggtgtgtaccaccacgcccagctagtttttgtattttttgtagagacggggtttccccatgttggccaggctggtctcaaactcctgacctcgggtgatccaccctcctcggcctcccagagtgctgggattgcaggcatgagccacgatgcccagcctataacataaaatataaacttaccatcttaaccacttytaagtacagtgttcactggcgttaaatatattcacattgttgtgcaaccaatctccagaacttttttatcttgtaaaactgaaactctgtacccattaaataac

SEQ ID NO: 950659 - DNA, 727 bp, Homo sapiens
gctacttgtgtatgctttatgaagttctcrtgctgtgtttttcagctccatcaggtcatttatgttcctctctaaactggttgttctagttagtaattcctctaaccttttatcaaggttcttagcttctttgccttggattagaacatgctcctttagctcagcatagttttttttattacccatgttctgaagcctacttctgtcagtttgtccatctgattctccatccagttctgtgctcttgaaggagagacgttgcagtcatttggaggaaaagaggcactctggccttttgggttttcagcattttttgttgattctttctcatcttcatgagtttgtctagttttggtctttgaggctgctgactcttgcatggggttttttttttggcagcttttttgttgttgatgctgttgttgttgctttctgcttgtttgcttttctttcaatagtcaggtcccgcttctgtagggctgctgcagtttgctgggggttcacttcaggccctattcatctgatttactcctgtgcctggagatattactcaaggagactggagaacagtaaaggtgggtgcctgctccttcttctgggaactctgaccttgaggggcaccaatctgataccagtaagatcactccagtgtagggtgtctgacaacccctgttggagggtctcacctagttgggtggcacagggaacaggacccatttaatgaagt

SEQ ID NO: 950660 - DNA, 594 bp, Homo sapiens
ggtgaatccagccaggcatgtatccttctttgcaagctacttgcagctatgggcaggtccagaaatgccatctaggggtcagggcctggagtcaggaaccttaggaatctacttggtgctctattctatggcagcagattgggcacccaagccacaagtcaaagagcttcccattcttccttctcctttcctcaagccgaagcagtctctccctgtgacctgcactaccccaggcctatgaccaatactgcctgggttccactgatgtttactcaaggcccagggactgttcaatcagcttgtggtaagtgttgccaggactgcctaggtctcttccttcaggacaataggttccccgctggcccagtgcaggtccagaaatgacatagaaaagccaaggcctggaatcaggaaccccaggaggccatttggtgctatattccattgtggcttggctggtacctaagtttcaagatgaaktttcctttactcttccctctctttttgtcaagcagaaggaatctcttcctgagccaccacagctaggaaagtgctgggtcacacatgaagccagcacagcaagccttgtggcaa

SEQ ID NO: 950661 - DNA, 638 bp, Homo sapiens
ttgctattgttattactgttattattaccactgtttgaacctttgtggaatgcttcaccaggtaccgtgctaacaatcccatttaatcctcgcaaccaccataggagacagttactatgattccctctattgtggagatgaaaaaacatggagtatttgaggttaagtgcttgcctaagttcacttaggcagagctgggatataaacacccaggtctatccaattctctaagcccgtttttcttgctggggatgggggcacagataggaaggggaaaattaatcttttgttcactttttgaaaggatgatacatttgcatagtccaaaactcagaaggtacagaagggaagtatctcccggccatcttgttgctctctcctgaattttttatgaacccttgcagacatgttttatgtatattatcacagtatgcacacacacacacacacacacacacacacacacacacgcacacacgtttcctctttctacagaaatggtaacatactaaaggtactcttctgtaccttcacagtasaagtacccaataccccacctaggactaggacttgcccaagaccacagacaggtaagggcggggcaggcacttggcctccaagctctgcgtccagtgctc

SEQ ID NO: 950662 - DNA, 638 bp, Homo sapiens
ttgctattgttattactgttattattaccactgtttgaacctttgtggaatgcttcaccaggtaccgtgctaacaatcccatttaatcctcgcaaccaccataggagacagttactatgattccctctattgtggagatgaaaaaacatggagtatttgaggttaagtgcttgcctaagttcacttaggcagagctgggatataaacacccaggtctatccaattctctaagcccgtttttcttgctggggatgggggcacagataggaaggggaaaattaatcttttgttcactttttgaaaggatgatacatttgcatagtccaaaactcagaaggtacagaagggaagtatctcccggccatcttgttgctctctcctgaattttttatgaacccttgcagacatgttttatgtatattatcacagtatgcacacacacacacacacacacacacacacacacacacgcacacacgtttcctctttctacagaaatggtaacatactaaaggtactcttctgtaccttcacagtacaagtacccaataccccacctaggactaggacttgcccaagaccacagacaggtaagggcggggcaggcayttggcctccaagctctgcgtccagtgctc

SEQ ID NO: 950663 - DNA, 218 bp, Homo sapiens
agtagccccaaggcccggctgggcaccaattccggacctatgaaaccsagcgagatgcaagcacccgcgtacgtgaaaggtgcctagggttttgagctcttagatgaaatgacaagcatcagatagaacgtttctgttttttatgttttacggtacttttaggcttctcaaacaaaataaaataagctacaacggaagttcttgtaggcagaggatgc

SEQ ID NO: 950664 - DNA, 592 bp, Homo sapiens
ggttccctctggtgcatccaccagaagggaaatgagattcattaatgtataatatcagcatggctcctaggtgcctcacaaattcagacatgggtctgagaaacaaaatgataacaaaaatatgatttaccctattaaattttcagaagttaaaaataaagataatattttattggtgcagtataaatataaacacaacaattttttgaaactttttgaaagcagtctggcaatatctatcaagcaccatgtatcaattagttattgtggcaagaacgttgtgtaacaaatacatcaagagagcctgtaaaatctgcaaggagttacacatgtgtttctctacctgggcaatgcggaaaacagggtaacgccaacccaccaatgggaggcagctcagtcactgggctccttttctgagctcaaagggcaatgcatagagttcaactgaattctcataattgcacattaaaaattcattgaaaggaacttcatagggtcatagaagtgttctatatcttgaatgcggttaagcaggyatgttcacctttcaaaactcattaaaataatcacctaaaatatgttaattttattg

SEQ ID NO: 950665 - DNA, 469 bp, Homo sapiens
aaagctaggcccccagtgccataatatacctggagccatttcctccctgggattcagttgcctcagcagggttcttcccaggtgtcggtaaaactccctctgccctggattcccaaacatatttttccctctttgggccgcagctttctcaggagctgtgcccattgatccctttggaagcagacactgaaatgaagttaggagtgtaagaggtttattgatggggagggaggacacatgtaaagataaagagaaaggaaggaggattgggcaggaaagcgtcagtctgctaggaagagctaagaaagtctccaccaacacagtaaggagcaccagagcaaagaccactcactgcattgggcacaatggccaagccctagtatcccagccttgtggtatcatccttggctggagcttcctagaaaaagtgtaggcktggccccaatgctgcagtgaatcctggaggcac

SEQ ID NO: 950666 - DNA, 414 bp, Homo sapiens
aatacccatttccccttgaatccctttttcctctatcttccgtcccttcaatctttattaaggtataatttacatatgatagggccaggcgcggtggctcacacctgtaatcccagcactttgggaagctgaggtgggcggatcacttgaggtcaggagtttgagaccagcctggcccacatggtgaaactccatctctactaaaaacacaaaaattagccgggcatggtgctgggcacctgtagtcccagctactctggaggctgaggcaggagaatcacttgaacccaggaggatgaggttgcagtgagctgagatcatagcactacattccagcatgggcgacagagtgagactctgtctcaaaaaaaaattacrtatgataaacttcccacattttcagtggtgactttt

SEQ ID NO: 950667 - DNA, 572 bp, Homo sapiens
ccagctccaggacactgtaccacaaaagcagcccaatctagggaggctagcccaagccttctgagttgccgaggggccaaataattagaccctctggacagttcaatgaataattttaacaactagtgtctcaaataaaagatatacgatataaaatgctggaaagacatgccaatcaaggataatcagctaatccttgaatagcatttcactggccacagaagcctttctaaaactctatctccctgatcttcatgacaatcctgtaagatagttacagatgacattctccccttcccattcatttaacaaatgttttgtttttcgagcatttatgtgccaggctttgtgatggggcctaaagacaaaatggtgaacatgatctccattttatcaagggagaaattgaggcctaaaaaggataagttacttgctcaagatacaatgatactcaaaattcaattttttttttttttttttgagacagtcttgytttgtctcccaggctggagtgcagtacactctccgctcactgcaacatctgcctcccgggttccagcaattctcctgcc

SEQ ID NO: 950668 - DNA, 540 bp, Homo sapiens
atggatcttatagtccagagagaagacagatattaaattaaaaatgtatgtgttgttttaaggcaaacaacactaggcaaacagtagatactgagagaggagataytaagcaaactgaccagccagtgcttaggaaaacatgtatgtggcattttagaaaagcagtgagggtagagtgtgcaaaggggagagaaataggagcgagataagagagttaattgagtgggtgtgaacaggcctatatcatatgagggcttgaaggacactgcctagggcttcggacatgtaggtggcttagtgtgtgatttgtcatatttgtccccttgtttcaactactggcaaaaaaacacaaaaagtaatgatatcaacttcctgaaggttcttagtaaaattctctcttttagctttttaactatgtctactcttattttcagtcactctaactggcaaagtagttccagatcttgtaaacatttgttaaaaagaactgcttccctatagcacacattctatgaaataagtggtaaagagctaagcaga

SEQ ID NO: 950669 - DNA, 755 bp, Homo sapiens
acagggcagcaagtcgcaaaactgcaaaaaacagcaaggctctgggcctggcctgtgaaaccatttttktcctcctaggcctctgggcctgtgatgggaggggcagccatgaagacctctgaaatatcctagagacattttccccattgtcttggtgattaacatttggctccttgttacttctgtaaatttctgcaactggctagaatttatcctcagaaaatgggtttttcttttctattgcattgtcaggctgcgcattttctaaacttttatgctctgcttcccttttaaacattaagttccaattccaaaccatatctttgtgaatatgtaaaactgaatgcctttttattttttatttttattttttacttttttgagacagagtcttgctctgtcacccaggctggagtggagtgatgcaatctcagctcattgcaagctccacctcctgggttcatgccattctcccacctcagcctcctgagtagctgggactacaggcacttgccaccactcctggctaattttttttttgtatttttagtagagatggggtttcaccatgttagccaggatggtctcgatctcctgagctcatgatctacccacctcagcctcccaaagtgctgggattacaggcatgagccactgcacccggccaactgaatgcttttaagagcacactgtcacatcttgaatgctttgctgtttagaaatttcttctgccagataccctaaattatctctct

SEQ ID NO: 950670 - DNA, 579 bp, Homo sapiens
gtggccttaaggaataaagaaagctattattataattataggtatacctcagagacattgcaatactgcatttttttccacaaattgaaggtttgtggcaactctgcattgaacaagtatatasgtgccattgtttccaacagcatgtactcacttcatgtttctgtgtctcattttggtaattctcacaatattaaaaacttgtttgttattataatatctgttgtgatgatctgtgatcagtgatttttggtgttgctattgtaattgttttggggtgccactagctgtgctcatataaagcagcaaacgtaattaataatgtgtgtgttctgactgctgcactgtcaggctattcccccatctctctttctctccttgggcttttcttatttcctgagacacaaaaatcataaaattaggccaattaataattctacaattgcctctaaatgttcaagtgaaagaaagagttgcacgtttatttaaatcaaaagctagaaaagattaagcttagtgaggaaggcatgttgaaagccaagataaaccaacagttagacttcttgcaccaaacagata

SEQ ID NO: 950671 - DNA, 657 bp, Homo sapiens
cacacaccagtacacccggctaatttttttttttttttttttagtagagatagggtttcactatgttggccagactggtctcaaactcctgacgtcgtgatccatccgcctcggcctcccaaagtgctgggattacaggcatgagccactgcacctggccatcagtttctttaatgttagaatgtaggtaacaggtaataatggcttaagcacttactgtaggccaggatgacctgtgtggtatgtgcgttgctaggtgctgagaatgtatataaattgcctgtcataagtaggtatttagttaatatatattgttatttcttggattttgataagtttgaagttttgcttactttaaaaaaagacataaggattggggggtggctcacacctgtaattccagcaccttaggaggctaaggcaggaggataacttaagtccaggagtttgagaccagcctgggttggcataacgtagcaagactccatctttaattaaaaaaaaaattttttttttttttttgagagagtctcgctctgtcacccaggctggagcgcagtggcacaatctcggctcattgcaagctctgccatctgggttcacgccattctcctgcctcagcctcccragtagccgggactacaggcacctgccacc

SEQ ID NO: 950672 - DNA, 578 bp, Homo sapiens
ggaaggttgcttgagcccaggagttcaggaccatcttgggcaatatagatagacctcatctctaccaagatttttttttttaattagctgagcatgtggcacacacctgtaatcacagcttctcagaaggctgaggtgggaggattgtttgagcccgggaggttgagactgcagtgaaccagatcatgctactgtactccagcctgggcaacagaggaagagcctatctcaacaaccaacaaaaataatttattttaacaggttggaaggaccaaaagaaaaagaaacacagtcctggctctcaaaaagcttagatcatatgagttctctgctgaaaatttctacaaatggatttctgctacatttataataaaacccaaactcctcatcagggccaagtccccttgagttctgacttcttcttttttttttttttttttttgacatggagttttgctctcttgcccaggctgcagtgcagtggtgcartcttggctcattgcaacctccacctcccaggttcaagcgattctcctgcctcaacctcctgagtagctgggattacaggcacgcatcac

SEQ ID NO: 950673 - DNA, 633 bp, Homo sapiens
gcccaaaaattgaaataatccaagtgtccatcagagagaggatgaatgggtaaacaaaacacggtcaatccccacgatgaaatattatgcagccatgaaaaggaaagtatggatttatctgctgcatgaatgaatgctgacacattctcttaagtgaaagaagtcagtgatgaaggaccccacactgtatgatttacatgagatgatgtccagaatagaaaaatctatagacagaaattagatttgtgtttgcctaggactgaggaggggagtgtgggggccgactgtgaaagccatggttttctttctagggtgctatgaatgatctaagattgatgatggtgatgattgcataattctgtaaacataccaaaagccatgaaattgcacaccttctatggatgaatgtatggtatgtgaattatagctcaggaaagctattaaaaacatcaacctaaacctttgtacatggctggtaggaatgtaaaaatggtcctgttkctgtggaaaacagtttggtggttcttcaaaaagttaaaaatagaattattatgtaaaccagcaattttattcataggtatataccctgaaaattgaaaacagatgttcaaaccaatacgtgtacacatgcca

SEQ ID NO: 950674 - DNA, 586 bp, Homo sapiens
ctaatgtattcataagttgtggagattaggacctggatgtctttaagggtcattattctgcctaatgttatattatatgcaacactatatatacattatattatatataacaccatatataattatatatatgttatatcatatataactatatatatatatatatgattaatattgggtgtcaactttattggactgaaagattcaaagtattgttcctgggtgtgtctgtgaagatgttgccaataaagattaaaatttgagtcagtggactgggagaggcagacccaccctcaatctgggtgggcaccatctaatcagctgctagcagtgctagaataaagcaggcagaagaaagtggaaggacctgacttgctgagtcttctggtcttcatctttctctcatgctgaatgcttcctgccctcgaaaatcagactccaagttattcagtttttggtcttttggacttacaccagtgttttgccaagggctcttgggccttcagccatagactgaaatwtgcaatgtcagctttccttcttttgaggttttgggactcagactggcttccctgctccgtagctt

SEQ ID NO: 950675 - DNA, 655 bp, Homo sapiens
gggccttgctccaaaatcctagaggcctccgctgtggttcacctatgagggcctgccaaagcgtccaaacagcatccctgcttgccactgacacctcaagcaccattggatctgctgtgtcatatggcccatgtggagagcagcttgcacagcagcctggacctgttgcagagccttctcctgttctggaccccactcaaaactggcagcctttcaggtcactcaataaatgggccggagtaacacaccccagtgaggaatgtgttgcctccaaaatccagttaggcccactgggcattgtgcctctttcttggtggtaggaggggccaaatgcagcaacttatccttcaccttagacgaaatattttgacaggccccacaccactggatccctagaaattttactgaggtagaaggtccctgaattttagttggatttatttcccatcctctggcatgcaaatgtctcaccaataagtctagtgtgtttgccagttcttgctcactggatccaatcagcataatgtcatcaatgtaatgtaccagggtgatatcttayggaagcaaaaaggatcaaggtctctctaaataagattatgacacaaaactagagagttgatatacccctgaggcaggacagtaaaggtatattgct

SEQ ID NO: 950676 - DNA, 496 bp, Homo sapiens
taataacatgtatctgtatctatcattatagtatcatatagattagtttcactgccstaaaaatcctctgtgctctattaatctctccatcaccccaaatccctggcaaccacggatctttttactcttcccatagtcattctaccttttccagaatgtcatatagttggaataataaagtatatagcttttttcccagattggctttttcacttagtaatacacatttaagtttcttctatgtcttttcatggcttgatagctcatttctttttagtgccaaatattattccattctctaggtgtaccacagtttacttaaccattcatctactgaaggacatcttggttgcttccaagttttggcaattgtgaataaagctgctagaaacatcagtgtgcaggtctttatgtaaacataagttttcacctccttcgggtaaatctcaaggagtgtgattgctggattgtatcataagaggatgtttagttttga

SEQ ID NO: 950677 - DNA, 496 bp, Homo sapiens
taataacatgtatctgtatctatcattatagtatcatatagattagtttcactgccgtaaaaatcctctgtgctctattaatctctccatcaccccaaatccctggcaaccacggatctttttactcttcccatagtcattctaccttttccagaatgtcatatagttggaataataaagtatatagcttttttcccagattggctttttcacttagtaatacacatttaagtttcttctatgtcttttcatggcttgatagctcatttctttttagtgccaaatattattccattctctaggtgtaccacagtttacttaaccattcatctactgaaggacatcttggttgcttccaagttttggcaattgtgaataaagctgctagaaacatcagtgtgcaggtctttatgtaaacataagttttcacctccttcgggkaaatctcaaggagtgtgattgctggattgtatcataagaggatgtttagttttga

SEQ ID NO: 950678 - DNA, 543 bp, Homo sapiens
cagccttgacctcccaaagtgctgggattacaggcatgagccaccgcgcctggcctcaggccctattctaataaaacttccaggtagatgcttgttctccttctctgtgagtccaaacaaggtctctagttattgattctcatgttattgcagcttctacaaatttcaccctcaagtcagctttttggcttttctgactcaagtcacaagataaccatccttttgtttcatttttgtaaattctcataaccccaactggatggtagatgaatatgaggaagaggggaaatcaaaagaatgagagcaatgagcctattactcttgagatgaacagagggagagattcaacaccaaatgcgtccctcttctgaatcccatctctcgaatcagacagcacttctgtgtacttcccaatatccatacaartaccaggaaacttattttacttgcctctggccttggtttgcaggtttggggaaacacaggagtcaaacagaatttttttgggtgaacccacagatttcactctgaggaacagctccc

SEQ ID NO: 950679 - DNA, 567 bp, Homo sapiens
caacagagcgagactctgtctcaaaagaaaaaaaaagagagagagaagaaaagaaaaaagaatgaaaaacagtgaagatacctttaaaaactaatgaacaccacccagcagatctacatatgcattatgagacactcagacattatgatatcagtaacacagaatgtggaataaggagaggtaaaattgcagagtacttctatagaagtgttatcagtttaacctgttataaatatatgttatgtaagcccctggtaaccacaaagaaactacctatagaaatgacacaaaagaaaaaaagttacaaagcctatcaatgcaaaacagcacaacaaaaacaggcaaacaaaacccaacaataaaacacaaaggaagacagcaagagagaaaaagagggacaaaagaactacaagacaaacagaaaacagttttaaaaaaatggcaatatggtggttcatrcctgtaatcccaacacttaggaaggccgagacgagcagatcacttgaggtcaggagtttgagaccaacctggccaacatagtgaaacctggtctctactagaaataca

SEQ ID NO: 950680 - DNA, 623 bp, Homo sapiens; identical to SEQ ID NO: 948889

SEQ ID NO: 950681 - DNA, 588 bp, Homo sapiens
tactgactaaggcagacagtgcaagggtaagaaagaggttttctatgctgagggagcacatggatcaccatgaattggatctgcttaatgaaatggatgagagtcttctggaagcagagaccctatagttaccaaatgtatcatgagattgtctttgctcactgtcagttaccatttttctcccctgcaagcaataagatatgcttatatgctgatgagtgaccactagattctgctgagttataacaatgtggacgtcgacagccatacataccctagcaatcttgtgagagaggagaaagtctatgatctatacctagaaatagacctgcaagatcagtaccttgatattgttgttgttattaatatttttgtgtggtacttgcaacggtcattctctgagtcacccatcacacattctatatttgtcagtacttaatgcaggaagttttaactcaaggctcttacaaaatgctgctatctcctgctgccctctagtcaaattaaagtgagctggaccccgcccccsgtccccatctccatcagcacaggaatttccaccagaccatgatggtgcctgtctgtggc

SEQ ID NO: 950682 - DNA, 785 bp, Homo sapiens
catgtcatttaaagttttcaaacatggtttcttcaaaagagtcctaaacacctttatcttgcctgattmtggtacaagcatctcttactctagaagaattattgtatatgatcagccttttgcacaagtctcggctccaactgctatcctattgcatctggagcagaatttgtcttagccagtagagaaatgataatgtactgggacattttgctgtactcagagcacttctctgtggtttgaagacttctcatcatcatgttttcatgtcatgaggatggtatcactgatgagcaagtgtaagtggactgacatttatcttgtgagtgtgggagagagagggctgcttctctctaaatgtgtggttctccttggtaagacaaatgtaaacaaatcatatattcataaagtttagaaaagaaagtcagaatatactggaaattgggataataataaggctgtttatatttatctcctgagaaactctaagcatttctttttttttttcttctttttgacagagtctcgctctgtcgccaggctgcagtgcagtggcgtgatcttggctcactgcaacctccacctcccaagttcaggtgattctcctgcctcagcctcctgagtagctgggacttcaggcacaggccaccacacccagctaattttttgtatgcttagtagaaacagggtttcaccatgttggccaggatggtctcaatctcttgacctcatgatcctcctacctcagcctcccaaagtgctgagattacaggcatgagccaccg

SEQ ID NO: 950683 - DNA, 576 bp, Homo sapiens
cccacccagatagaaggagggtctgcctctcccaatccactgacttaaatgttaatctcctttggcaacaccctcacagacatgcccaggaacaatactttgcatccttcaatccaatcaggttgacactcaacatcaactatcacagcatatatgtatatatgtttgtttaaaaacacagcaagatatcggaataagctttgtacactaggactatttgcaaagttattgtgtgaatataaagagctaatatatatcttaaaattttctgtagaggtagttgtatacacaggctgtaaaagtcagcatttttcctcatattattccagaacacataaaaaagcaacaaggaaaatggagaaaaaaagaaccaaatatatccttagtgaaactagaaaaagttagaatccaaagatttcaaaacgtatgtagagatgaccaaatstagttggaatcaggcacaagccacatgggagtaaatgaagtatggaggtagtgaggccaatggctgataatctcagaaaacaccaacaaaatgtactccctgaaaatttgggagttcacttccatgttcaa

SEQ ID NO: 950684 - DNA, 569 bp, Homo sapiens
cccataatgttagccatctcccagacttaaagtttacaaagcgtacattgtcctttttttgtttgtttgttttttgttgttgttgttgttttggtttctttttttgagatgaagtgacgctctgtcgccaggctggagtgcagtggcgtgatcttggctcactgcaacctccgcctcccaggttcaagtgagtctcctgcctcagcctcccaagtagctgggactataggcacccgccaccacacccagctaatttttgtactttcagtagagacagggtttcaccatgttggccagaatggtcacaatctcttagcctcacgatctacctgcctcggcctcccaaagtgctgggattagaggcgtgagccaccatgcccagccaaagcatacattttctcatttatctttacttgtgatgtgctacagtcatagatattaacatgtttccaatttagcaagactaggaaactgaagcccgtagattttagtcacaaactaagtagtatwcacctcggaaaggaattaattcccagatacaaggatgtatcctgcaccaccactgtctc

SEQ ID NO: 950685 - DNA, 633 bp, Homo sapiens
tttttgaaaaatgtctgttcatgtcctttgcccagtttttaatggggttgtttctttttctcttcttgaattctttgaggtccttgtagattcttgatwttagtcctttgtcagagacatattttgcaattctgtttttttttttttcaagcatggcgagaaagattttattcaggaccagagcaatagttacagggaccactgaaatgttgtctgacagtggggaagagagattccatgctggtcatttttaacagttttcttttattattattgttattattattattattattattatactttaagttctagggtacatgtgcacaacgtgcagatttgttacatatgtatacatgtgccatgttgtcgtgctgcacccattaacttgtcatttacattaggtatatctcctaatggtatccctctcccctccccctacccaacgacagctcctggtgtgtgatgttcccctttctgtgtccaagtgttctcattgttcagtacccacctatgagtgagaacatgccgtgtttggttttctgtccttgcgatagtttgctgagaatgatggtttccagcttcatctatgtccctacaaaggccatgaactcatccttttttatggctgca

SEQ ID NO: 950686 - DNA, 569 bp, Homo sapiens
attccacaaggccagaactaccctgataccaaaaccagacaaggacacaacaacaacaaaaatctacaggttaatattcctgatgaacatagatgcaaacatcttcaacgaaatactagcaaaccaaatacaacagcacatcaaaaagattatacaccatgatcaagtaggatttatctcaggaatgcaaggatggttcaatgtgtgcaaatcaataaatgtgatacatcatatgaacagaatgcaagcaaaaaaaaaaaacacatgatctcgatagatgcagaaaaagcatttgataaaatacaacatcccttcaggataaaaattgtctgtaaattaggtatagaaggaaaatacctcaacacaataaaggccaatatgacaaacccacagctaatatcatagtgaatggaaaatgttgaaaacttttcctcaaagaactygaacaagagaaagatgcccattttcgccacccttattcaacatggcactggaagtcctagccagagaaattaggcaacagaaagaaatgaacagcatccaaattggaaagcaagagattaagttat

SEQ ID NO: 950687 - DNA, 569 bp, Homo sapiens
tgtggatggaggcagacaaagagagagcttgtgtagggaaattcccacttttaaaaccatcagacctcatgagacttattcactatcacaagaacagcacaggaaaaacccgcmcccatgattcactttcctcccaccaggtccctcccacaacacatgggaattcaagatgagatttgggtggggacacaaccaaactatatcaagtggttgttagcacagtcattatcttctgcaactagcaccagaatttttttccagaaaattctcatcatctcaagaagaaaccccatacatactagcagtcactaccattcaaccagtcaactctgggcaatcactaatttactttctgtctctataaatttgcctattttggacattttatataaatggaatcattccaaatatggcctttgtgtctagcttcttttatatagcataacatgttcaaggttcgttcatgttgtagtatgtattggtacttcattcctttttatggctgactaatatctgttgtatggatatacagcattgtgtttattccttaattgatcaacatttgtgtt

SEQ ID NO: 950688 - DNA, 634 bp, Homo sapiens
ctacaaacaaccatcagagaatgttataaacacygctatgcacataaactaggaaatctagaagaaatgaataaattcctggacagatagatacactctctcaagacagaactaggaagaaatagaatctctgaacagaccaataacgagttttgaaatagaggcagtaataaatagcctaccaaccaaccaaagcccaggaccagacagattcaaagcttaattctaccagatacacaaaaaatagttggtaccattactactgaaactatttcaaaaaattggagggactcctccctaactcattctatggggccagcatcatcctgataacaaaagctggcacagacacaacaacaaaaaaagaaaacttcagcgtaatatccttgatgaacactgatgcaaaaatcttcagcaaaatactggcaaaccaaatccagcaacacatcaaaaagcttatccaccatgaggcttcatccccaggatgcaaggttggttcaatgtaggcaaatcaataaatgtgattcatcacataaacagaacaaaagacaaaaaccacaagattacctcaatagatgcagaaaaggctttcaacaacatttaacattccttaatgttaaaaactcccaataaa

SEQ ID NO: 950689 - DNA, 582 bp, Homo sapiens
tctattaatatgaatatttctttcttttttttttttgagatggagtcttgctctgttgcccaggctggagtgyggtggcgcagtcttggctcactgcaacctctgtctcccagattcaagcgatcctcctgcctcaacctccctggtagcggggactacaggtgcgcgccaccatgcctggataagttttgtaattttagtagcgacgggatttcaccatgttggccaggccggtctcaaactgacctcaagtgatctgcctgccttggcctcccaaagtgctgggattacaggaatgagccactgttcccagccttaacatgatttttttttttttttttttttttttttttttttgaaaaaaactctcgctctgtcaaccaggctaaagtgcaatagtgggatcttggctcactgtaacctccacctcccagttcaaacaattttcctgacccaacctctcgagtagctgttactacaggcgcctgtcactatgcaccgctaatttttgtattttgagtaaaaatggggttttgccgtgttgaccaagctgatcttgaacatgtaaaatgaagggctaaa

SEQ ID NO: 950690 - DNA, 687 bp, Homo sapiens
tgggtcctctcaggattgctggttttttcttgctgttgatctgaagctaaaattcacagtggaagcctccccatgctgctctgtctggagctgcaatctagtcctgcctcccatctgccatgatcccaaaatcctgatggttggtttcatgtgccaacttgactgggccatgtagtacccagatatttggtcaaaccttattctgggtgtctcagtgagggtgcttttggatgggattaatgtttacattggtaggctgaataaagcaaagcacatggcactcccccatgtgggtgggctcatttaagtctttgaaggcctaaataaaacaaaatgtctggcctcccagaggcttctctaaaaactcttcagatgactgcttttggaaactttcttgcctgaccaccttcaaagtgggacattggttttatttccttctttggacttgaattgaaacattggttcttcctagatcttgggcctgctcgccttcagactggaaccacaccaccagctctcctgggtctctagcctgctgactcaccctgcagctcatgggacttgtcagtctccataatcgggtgagccaattccttataataaatttctttctgtaaagctatatgcaccctgctggttcaatttcrctggagacccctaatatacaatctatttttggttcatttt

SEQ ID NO: 950691 - DNA, 605 bp, Homo sapiens
tttcccatgctgttttcatgatagtgactaagtwtcatgagaagtgatggttttaaaagtggagtttccctgcacaagctcttttctcttgtctgccaccatgtgagacatgcctttcatcttctaccatgattgcgaggcctccccagacacatggacctgtgagtccaacaaacgtctttctttaataaattgcccagtatcaggtatgtctttatcagcagtgtgaaaatggactaatacaggcagggacacagccagaccatatcaaagccttaacctatcattaattttattaaatgtaaatagtctaaatacacacattaaaatagattagcagagtgggttttaaatataacctagccaaatgctgtctccaaaaacctcacttcaaattagttcaactcttgtggaaagcagtgtggcaattcctcaaagaacttaaaacagacctaccattcaacacaacaatcccactactgggtatatacccaaatgaatataaatcattctaccataaagaaacatggacatgaatgttcattgaggtactattcccaataacaaagatatggtatcaacctaaatgcccatcaattgtatac

SEQ ID NO: 950692 - DNA, 624 bp, Homo sapiens
gaatggaaaatagctggaagcattccccttgaaaactagcacaagacaaggatgccctctctcaccactccaggtcaacatagtattggaagttctggccagggcartcaggcaagagaaagaaataaatagtgtccaaataggaagagagaacatcaaattatctttgttcacagacgacatgaacctaagtcttgaatctcatcatcttagcccaaaaacttcttaagctgataaacaacttccgcaaagtctcaggatacaaaatcaatgtgcaaaaatcactagcattcctatatatcaacaacaggcaagccaagagccaaatcatgcatgaactcccattcgcaattgctacaaaaagaaaaaaatacctaggagtaacagctaacaagggaagaaaaggacctcttcatgaagaactacaaaccactgctcaaagaaatcagagaggacacaaacaaatggaaaaacatttcatgctcattgataggaagaatcaatatcatgaaaatggccatactgctcaaagtaatttatagattcagtgctattcccactaaactacctctggcattcttcacagaattacacaaaactattttaaaattcatatggaaccaa

SEQ ID NO: 950693 - DNA, 554 bp, Homo sapiens
acaccccgcctaatttttgtattttttgtagagatgggatttcaccctgttgcccaggctggtctcaaactcctgtgctcaagtgatccgcctgccttggcctccccaagtactgggatyataggtgtgagccgccatgccggcctcaagattttaaaaaagcaaccaaaaacatgcaatttaaaaattcattaaactaaaagactaaaccaaaattctggacccttttggaatgatagcctagtatggccataactagtagttgttattgtgataagagaaataacaataatccaggctaatatttattgagggccagctatgtgccaagcctatggataaaactgaagttagtaaagttgggggatttaacgaggttcacaggagccagtaaataatggaaccatagtcacaaagaccaatgatccaagacaggatttgaatgctcacagtccctcagtctttcggtatgacaacctccagaacacagggatcctctctacatgctgcagacttagagcatcagctccagaatccaagagacacaggttttc

SEQ ID NO: 950694 - DNA, 591 bp, Homo sapiens
gctacaaacatctgtgtaccggtttttgtgtggacataagttttcaactcatttkggtaaatacttaggagttcaattcctggattgtatagtaagcctatattcagcttcctaagaaactgccaaaccgtcttccaaagtggctgcatgattttgcattcttaccagcaatgaatgagagttcctgttgctccacatcctcaccagcatttggtgttgtcagggttctagattttagccattcaaataggtgtgtagtggtgtttcattgttatcttaagttacaatgctctaatcacatatgacactgaacatcttttcatatgcttgtttgccatctgtgtatcttaattttttttttctttttgagacagagccttgctctgttgcccaagctggagtgcagtggcatgatctcagctcactgcactctctgcctcccgggttcaagcaattcttgtgcctcagcctacccgagtagcctcccgagtagacgcgcactactatgcccagctaatttttttgtattttcagtagagatggggtttcgccatgtttcccaggctggtcttgaactcctgagctcaggca

SEQ ID NO: 950695 - DNA, 591 bp, Homo sapiens
gctacaaacatctgtgtaccggtttttgtgtggacataagttttcaactcatttgggtaaatacttaggagttcaattcctggattgtatagtaagcctatattcagcttcctaagaaactgccaaaccgtcttccaaagtggctgcatgattttgcattcttaccagcaatgaatgagagttcctgttgctccacatcctcaccagcatttggtgttgtcagggttctagattttagccattcaaataggtgtgtagtggtgtttcattgttatcttaagttacaatgctctaatcacatatgacactgaacatcttttcatatgcttgtttgccatctgtgtatcttaattttttttttctttttgagacagagccttgctctgttgcccaagctggagtgcagtggcatgatctcagctcactgcactctctgcctcccgggttcaagcaattcttgtgcctcagcctacccgagtagcctcccgagtagrcgcgcactactatgcccagctaatttttttgtattttcagtagagatggggtttcgccatgtttcccaggctggtcttgaactcctgagctcaggca

SEQ ID NO: 950696 - DNA, 585 bp, Homo sapiens
atgcattttgtaaagctatatctgccatagatagtgattcctctggtggatctggacaaaagttaaaataacaaaatcaacaggagttttgaagaagttgatcccaaacctcayggatgacttgaaggggttcaaaacttcagtggaggaaataactgcacaggtggtggaaatggcaagataactcaaattagaaggaggctgaagatacgagtcaattgctataatctattttttgttttgttttgttttgagaccgagtgtcactctgtcacccatgctggagtgcggtggcagcatcttgactcactgaaacctctgcctctcaagttcaagcaattctcgtgccttagcctcccaagtagctgggatcacaggcatgggccaccacacctggctaatttttgtatttttagtagagatggagtttcaccatgctgtccaggctggtccccaactcctgacctcaagtgatctgcccacctcagcctcccgaagttctggaattatggcatgaaccactgcccctgaacaattgctataattttatgataaaacttgaatgaataaagatttgatgtttta

SEQ ID NO: 950697 - DNA, 627 bp, Homo sapiens
gggctagaatgtaagaaggcagaaaaaagtgaaaagagagactggcctagcctcccagcctacatctttctcctgtgctggatgcttcctgccttagaacattggactccatgttcttcagttttggaacttggactggctctccttgctcctcagcctgcagatggcttattgtgtgatgatatggtttggctatgtctccacccaaatctcaacttgaattgtatctcccagaattcccacgtgttgtggttgtgacccagagggaggtcattgaatcatgggggccggtcttttccatgctattctcatgatggtgaataagactcacgagatctgatgggtttatcaggggtttccgcttttgcctcttcctcatttttctcttgccaccgccctgtaagaagtggcttttgcctcctgccatgattatgaggcctccccagtcatgtggaactgtaagtccaactaaacctctttttcttcccagtttccggtatgtctttatcagcagcatgaaacaaactaatwcagaaattggtactaccaagagtggggcattgctgaaaagatacctgaaactgtggaagcgactttggaactgggtaacagacagagcttggaaca

SEQ ID NO: 950698 - DNA, 637 bp, Homo sapiens
aacaaaaaattgacctcccccaagcgagagggaattctgccatggcctttggacgtgaactgcaatatcrgcttttcctgggtctccagcctgatggtccaccttgcagatttcaaacttgccagcttaattacactagccagtttcttaacataaatctctttctatgtgaatttgtaccctattagttttgtttctctgtagaaccctcactaatagagatgtatatagcttaaaacaatggttgtaaaagaattgtactggggctgggcgcggtggctcacgcctgtaatcccagcactttgggaggccgaggcgggcggatcacgaggtcaggagatcgagaacatcctggctaacacagtgaaaccccatctctactaaaaatacaaaaaattagccgagtgttgtggcaggagcctctagtcctagctacccgggaggctgaggcgggagaatggcgtgaacccgggaggcggagtttgcagtgagctgagatcccgccactgcactccagcctgggcgacagagcgacactctgtctcaaaaaaaaaaaaaaaaaaaaagtacttcagtgcagtggttaagaatgtgggctctgaaatcagatgcctgtgttaagatccctgctcttctg

SEQ ID NO: 950699 - DNA, 605 bp, Homo sapiens
aaacaacttcagtaaagtttcaggatacgaaatcaatgtacaaaaatcactagcattcctatacaccaataatgggyaagcaaagagccaatcaggaatgcaatcccattcacaattgccacaaaaagaataaaatacctaggaacgcagataactagggaggtgaaagagctctactatgagaactacaagacactactcaaagaaatcagagatgacacaaacaaacagaaaaaacttttcatgctcatggatcagaagaatcaacatcattaaaatggccatattgaacacttatacactgttggtgggagtgtaaatcagtttgaccattgtggaaagcaaagtagaaattccttaaagagctaaaaacaaatctactatttgacccaggaatcccattactgggtatatacccaaaggagtataatcattctaccttcaaggcatatgcagtgaatgttcactgcagcactatttacaatagcaaagacatgaaatcaacctaaatgctgagggatagcagactgcataaagaaaatgtgatacatatacaccatggaatactatgcagccataaaaaagagagagattgtgtcttttgt

SEQ ID NO: 950700 - DNA, 570 bp, Homo sapiens
gattccctctctatcttttgaaatagtgtcaatgggtttagtaccaattcttctttgaatgtctgatagaattcagctgtgaayccatctggtcctggactttatttttggcagcttttaaattgccatttcaatctcactgcttgttattaatctgttcagagtttcaatttcttcttagtttaatctaggagggttgtatatttccaggaatttatccatctcctctaggttttctaaaggtgttcatagtagccttgaatgatcttttgtatttctgcggtatcggttgtaaatgtttcccatttcatttctaattgtgcttatttggatcttcttcttttcttggttaatcttgctaatagcctacacattttattttcttttcaaagaaccagctttttgtttcatttatctttgtatttggtttgtttcaattttatttagttctgctctgatcttggttatttccttttttctgctgggtttgggtttgttcttgcttctctagctccttgagatgtgatcttagattatctatttgtcacacctttctatctttctattgca

SEQ ID NO: 950701 - DNA, 572 bp, Homo sapiens
agtcccaccaacagtgtaaaagtgatcctatttctccacatcctctccaacacctgttgtttcctgactttttaatgattgccattctaactggtgtgagatggtatctcattgtggttttgtttttcatttctctgatggccagtgatgatgagcattttttcttgtgtctgttggctgcataaatgtcttcttttgagaagtgtctgttcatatcgtttgtccactttttgatggggttgtttgattttttcttgtaaatttgtttgagttttttgtagattctggatatttgtcagatgagtagattgcaaaaattttctcccattctgtaggttgcctgttcactctgatggtagtttcttttgctgtgcagaagctgcttttcacgctactcactgggccttgggctagaggtaggaaatgaggaatatttcaagggagtcatcttgcttttagccaccactgaaarttggaattaatttcagcacttatttaaaagtacagatttgtagaatctgtccaaaccatctgaatcagaatctgcatgggcaggatctggggatcagtat

SEQ ID NO: 950702 - DNA, 633 bp, Homo sapiens
attcatgaaagaaactgaagatacaaataaatggaaaaatatcccctgttcatggattagaagagttaatatggcttttcactttcttgatggtgtctttgaaacacaaaattttgtactttaggtgatgtctgttttatctgtttttttcttctgttgcctgtgttttcagtgtcttatctaagaaactcttgcttactccaaagtcatgaaaattaaaggctatgttttcttctaagtgtgttatagctttggctcttacatttagatatttgatctaattttagttaattatttatatgatgtggggtccaacttcattcttttgtgtgtggatatccagttgtccttgcactatttgttgaaaaaaacagataatggtggaaagctccactgaattgtcttagcaattttgtttttgtttgtttttgaactcctatctgtagcagacttagcaactttgttgaaaatcaagtgactgtaaatgtgagggtttttaccaaactgtcctgattactgtagctttatagtaagttttgaaatcagaaagtgtgattcctctttgttcatcttaagattgttttggctattttgtatcttttacatttccatasgaattgtagaattagttta

SEQ ID NO: 950703 - DNA, 794 bp, Homo sapiens
ttagcattggaataaatgaatggagtaaaaaagatcaccctttccagtgtgggtcaacatcatccaatccattgagggcctgaataggacaaaaaggtggggaggggcaaattggatctgtcttcttaaactgagacgtctgtctcatgttgtcctaaaactgtggagctcctggttgacttggactgaattacactggctttcctggttctgcagcttgcagacagcagatggtgggatctctcagcctctgacacagtttgaatgtgtgtctctgcccaaatctcatgtggaaatgtaatccccaatgctggaggtggagtctggtgggacgtgattggatcatggggggctgatttctcataaatggtttagcaccatctttttggtgctatccttgcaatagtgagtgagttctcacaagatctgattatttagaagcatgtggcacctctccccaactcttgctcctgcttttgccatgtgatgtgcctgctcccccttcaccttccgctatgattttaagtttcctgaggcctcctcaaaagccaagcagatgttagcaccgtgcttcctgtacagcctgcagaactgtgagccaattaaacctcttttcttataaataacccaatctcaggtatgtctttatagcaatttgagaatggcctccagaatcatgtgagccaattcccatattaaatctcatcttatgtatctattatatcccattgtttttgtttctctggagwatgctgactaataacacagactcttcagatagagtctatttcact

SEQ ID NO: 950704 - DNA, 759 bp, Homo sapiens
catcatggatactaaaagttgttgtgtgctactacacacctattagaatggccacaatccagaacactgacaacaccaaatactagcaagaatgtggagcaacaagaactctctctcattgctggtaagagtgcaaagtggtacagtcactttgtaaaacaggttggtggtttcttacaaaactaaacatattttactgtatgatctagcaatcacactctttggtatttacccaaaggagctgaaaacttatgtccacacaacaacctgcacacaggtgtttatagtagatttatttggtgcccaaaacttggaagcaatcaagatgtcctccagtagctgaatggacaaataaacatggtacatccaaacaatggaatattattccacactaaaaagtaatgaactatcgtgccatgaaaacacatggagaaaacataaaatgcacatttctaagtgaaacagtaggctgcgtactgaaaggctatatactgtgtgattttaactatacaacactttggaaaaggcaaaactatggagacaggaaaaagatcagtggtttctagggcttgggggaaagaagggatgaatatgtggaacacaaagaatttttagggcagtgaaaccactctgtatgatactatagtgatgtatacatawcatcataaatttgtccaaactcacagaatgtgtaacacccagagtgaaccctaatgtaaattatggagtttggatgataaagatgtaacaatgtaggtt

SEQ ID NO: 950705 - DNA, 724 bp, Homo sapiens
tgctgcactttaaggctgaagcccattcaggtgaagatccagaggaaaacctatgctgcagttcaagtctaaaagtcatgtgcaggcagaattccatcttgctcagggtagtcattttgtcattgttgttrttctaacaggccttcatctgattggacgaggtccacccatattaagtacaatctactctactccaagtccgccaatgtaaattttagtcctatccaaaaataccctcacagcaacatccagaataattcatggaaacatatctaagcactgtggcccagttaagctgatccctaaaattaagtatctcaacttcaccccttgccaacttgacaccaatacacattgaagtaaatacaataaataacaaggtcatactttcacctaacatgatacggctgtcttgagttcaaccaaaaatgcactaaccctttccccagaagaagataaaaagtctctgggtaagctctactcttcttgatgtcctagaacttaaatactatgttataaagttaacaatatttaaatactgatataaaattaacataactaatgctacatggtaaatagataataaatagaagaaaataaatatattataaaaacacataatcataatacaataaagtagtgtattactccattttcacactgctataaagatatacccgagactgggttacttataaagcgaagatgtttaattgactcacag

SEQ ID NO: 950706 - DNA, 623 bp, Homo sapiens
taaaggaaccttagccccataatgctttgcacaacctccaatatttgttaatatccagtattcttccactgtgccctctgtatctcattttgtccacagaatattttccaagtatccacaatgtatttttttttctttatttttttattttttagagacggggtctcatgttttcacccaggctggcatgtagtgttgtgaaccaagctcatgtcagtctcaacctcctgggctcaagcaatcctctcatctcagcctcccaagtaaccgagtagctggggctattcacctggctaattttttgaaaaaaagaaattgtggatatggggtcttactatgttgcccaggctggtctggaactcttggagtcaagcgatcctcctgcctcagcctcccaaagtgctgggattacagatataagccaccatgcccagcccacaatattttttctacactttcttttttttttctcactgaaacctgaggacagtttttcttgtagcsttctgagttggtcactattcattcttctacagttgtgtaccacaagcagtgaagtgtatagacagcgttgcccttgttgccatatccaaaccattttttcccttctccttctgaaaacc

SEQ ID NO: 950707 - DNA, 644 bp, Homo sapiens
aagatgcctgctggtgaatttgcatgcatatgctgagatctcaatcatattggagatgttgttgtaatttcctgtgcgaaagatggagtgaaattttctgcaactggagaacttgcaaayggaaacattaaattgtcacaaataagtaatgttgataaagagaaggaagctgttgccatagagatgaatgaactagttcagctaacttttgcactgatgtacctgaacttcttcacaaaagccactccacgctcttctacagtgacactcggtatgtctgcagacgtaccacttgtagagtataacattgctaatatgggactttttttttttttttttttttgaaacagagtctcgctctgtccccaggctggcgtgctttggcgcgatctcggctcactgcaacctctgcctcccaggttcaagcgattttcctgcctcagcctcctgaggagctgggactacaggcatgtgccaccatgcctgactaattttgtatttttagtaaagacagggtttcaccatgttggtcaggctggtcttgaactcctgacctcaggtgatccatcctccttgacctcccaaagtgttcggattacaggcataagccaccatgcccgcgccatatgggacatttaaagtaa

SEQ ID NO: 950708 - DNA, 582 bp, Homo sapiens
tctttccatggctcagcaccagggctttgaagagtaagmcccaaaaccaagttctgggtgtgagggtttcctggctggtgatgctgttgaacccacactggggaacacatactgccaggctgctgctatgcagaagggaacaggaagagggagaggcctggcccagggctgtggagaaggaggggtccttttcccctgagtgtggccaagcacctgcaagcctcctgggagtgggcctctctgcaggggctttgccttggcttccagccacctccatttggttctccagcacacaggccatgagcgtggagctcactcaagactagagagctcaggtttccaagtggacagacattctgcaggatgtgctttgggaaactgaaaaaaagcagccctgatatttccatccacacactcaagtgaaactcagtgatttccttggtgttgatgcagaaccagaggtttgctttcacctgcacttcactcctcccataacctttgggtttgctcctgggaaagcagaaaagacacagtcccatctccaaggagcagatccagaggacgaggagacaagcaaggatt

SEQ ID NO: 950709 - DNA, 638 bp, Homo sapiens
ctgtatacaagtcccttatcagatgtacattgtgcaaatattttctcccattctgtaagttgcctttccatattcttgatagtgttctttgagaaaaaactataaatwtttgtaattttgatgaagttcaatttatctgttcttttgttgattgtacttttgttattgtacctacaaaattattgcctaactcaagattacaaagatttactgctatgttttcttctaagtgttgttatgctattgtctcttaggtttaggaggctcatgatcaatcttgtcttaatttttgtgtacagtgtgaagtaaggatagaactttattcattcacttgtggatactaagttgcccgaccattatttgttaaaaaaacaaaaaaacaaaaaaacccaaaaaaacctgttctttccccacaaaattatcttgctgctcttgtaaagaatcaaccagacataaatgcaagggtttatgccaataccatactatcttaattattggggatttatcataaattttaaagtcagaaaatgtgagtcctcctttgtttttcgagattatcctggctattctcaatcccttgaatttccatatgaattttagggtcagcttgtcaatttctgaaaaaaaaccagctggaa

SEQ ID NO: 950710 - DNA, 661 bp, Homo sapiens
cttttatttccatttaatttatggtctacattaaggagcagaatttcttaacattaatattctcaaacatttccttcttttcttttgtggtttatgcttcttgagctgccatgtattagaaatgctttcctatmcaaaggagtaaggatattcttccatattatttttaaaatattttattatgcttttgacatttacaattagatctttaataaagctgaagttgaatttgtgatttaagatagaagttctgttgtttctccatatggatggtgtattaatgtgaaccactttattaaacatccatgctttcctgccttgctaggcaacatcatatcttttcaatggcattttcaaatgggagtggtattttggtgagtccatttttcccttccattactgaatcttccctttctacaccaaataccctctatcctaattaccagagctttatataagtaatcataaataatgagtaaagtagtttcatgtagctgtatttgtttcctggggccgctataaaaatgtaccactctgggtggcttaaacaccagcaatttattttctcacagtctgaaggctaaaagtccaagatcaaggggtccacagggttgttttcttctgaagcctctctcatgttgatgtccatcttctccctgtg

SEQ ID NO: 950711 - DNA, 661 bp, Homo sapiens
cttttatttccatttaatttatggtctacattaaggagcagaatttcttaacattaatattctcaaacatttccttcttttcttttgtggtttatgcttcttgagctgccatgtattagaaatgctttcctatccaaaggagtaaggatattcttccatattatttttaaaatattttattatgcttttgacatttacaattagatctttaataaagctgaagttgaatttgtgatttaagatagaagttctgttgtttctccatatggatggtgtattaatgtgaaccactttattaaacatccatgctttcctgccttgctaggcaacatcatatcttttcaatggcattttcaaatgggagtggtattttggtgagtccatttttcccttccattactgaatcttccctttctacaccaaataccctctatcctaattaccagagctttatataagtaatcataaataatgagtaaagtagtttcatgtagctgtatttgtttcctggggccgctataaaaatgtaccactctgggtggcttaaacaccagcaatttattttctcacagtctgaaggctaaaagtccaagatcaaggggtccacagggttgttttcttctgaagcctctctcatrttgatgtccatcttctccctgtg

SEQ ID NO: 950712 - DNA, 587 bp, Homo sapiens
ccatgtgctgagtaccatggtgtttattcattaatccaaatttgttttctcaattccatgagttaagtattaaactaattttatagacgaaacttctcaagatgcagyagcttgccccaaaagcttcatagctttcatagtttcctgcacagccaagagcaaaaccaaatctggatgataccaaactactctctccaaccatcaaacatcatgccttggctttactcaacattctttgcctttgtagtacattcctatctgccaagtactatccacatacagttgcatgcaccaagtatgtattcttagtgaacacctttgacagcttggtggagcactccactctctgaaagagcccctccttagctgatgagttttctctgggctattctttgcagcctccctccagctcttccttccgtcagatctccatttcctacactttgctccgtattgccttttatctttcccgtcttcccctcttctcaggaagaaccacaatgattgtgcttgagaactttagaatcagactggctctgagtaactgacaaaaaaacatgagatggtaactacctcatagagggtgg

SEQ ID NO: 950713 - DNA, 587 bp, Homo sapiens
ccatgtgctgagtaccatggtgtttattcattaatccaaatttgttttctcaattccatgagttaagtattaaactaattttatagacgaaacttctcaagatgcagcagcttgccccaaaagcttcatagctttcatagtttcctgcacagccaagagcaaaaccaaatctggatgataccaaactactctctccaaccatcaaacatcatgccttggctttactcaacattctttgcctttgtagtacattcctatctgccaagtactatccacatacagttgcatgcaccaagtatgtattcttagtgaacacctttgacagcttggtggagcactccactctctgaaagagcccctccttagctgatgagttttctctgggctattctttgcagcctccctccagctcttccttccgtcagatctccatttcctacactttgctccgtattgccttttatctttcccgtcttcccctctyctcaggaagaaccacaatgattgtgcttgagaactttagaatcagactggctctgagtaactgacaaaaaaacatgagatggtaactacctcatagagggtgg

SEQ ID NO: 950714 - DNA, 692 bp, Homo sapiens
accagtgttggtggctaaggattctagggtttgagttaaattctttagggttaactcatggtaggcaaggttgccccagggtgctgctagtcctttcgctgccctgattcctgccagaattaaycctattgcttgtttacttctggtattcctgtgtcttaaggggttatagacagtgacccctggaggggctagggtaaccaatgtaattcacctctattccaagttttttgacatacaagggaaagctgttcctaaagaagaggtgactccctggggagtcaggagttatgaggtgtgacttcttcccattcatggccacaaacaaaaatgagcccaattggggcacaaacagaggccctctggggtgtgatgtttattctttcctgtcaagttgggtctatagagatattttccccccgatcccatggagatggtcagacaatctttgttttccagaagggggcagtagtcccaccttcacagacaaggcagttgtttttctcttgcgtgatctaggagaaggcatcacatatggtctccttgcttaaaaatggaatcccttttacctcgctgtggccttgggagcttggcaactagagttggatcagagcatagcagggaaacttttactttttagatatccaacttcccaggtccaggtaacagtggtgggcagactcaggtggaat

SEQ ID NO: 950715 - DNA, 614 bp, Homo sapiens
tactgtaaacaaaaacagcatggtactggtacaagaacagacacatagaccaatggaacagaatagagaactcagaaataagactgtacaccaatagccatctgatcatcaacaaacctgacaaaaacaagcaatggggaaaggattccctatttaataaatggtgctgggaaaattggttagccatatgcagaaaatcgaaactggaacccttccttacaatatatataaaaattaactcaagatggattaaagacttaaatgtaaaactcaaaactataaaaaccctaaaagaaaatctaggcaatataattcaggatataggcatgggcaaaggtttcatgacaaagataccaaaagcaattacaacaaaagcaaaattgacaaatgagatctaattaaactaaagagcatcagcacagcaaaagaaataaagagacaacctacagaatgagggaaaatttttgcatctatccatctgacaaaggaccagtatccagaatctataaggaacttgaacaaatgtacaagaaaaaaaaaamaaccccactaaaaagtgggcaaaggacataaacagacacttctcaaaagaagacatacattgcagccaacaa

SEQ ID NO: 950716 - DNA, 688 bp, Homo sapiens
ttcaaaatgtaaatccaatctgtcatrcacctgcacacaactcttccttggcctcccattgcatttggaaagaaagctcaacctctcaccatgggcctcaggggcatgtgtgaccagtccctgtcttttatgcagcctcacgccctcacccgtcctctcacttagcagacgtggactttcctatgactctgtactcaattcatcaaagataaaatctagtcatgtgtgtatgcatgactcgttaccacttactttattttcttaaaaaattttgacttagaaactttttttaaaattattaaatttttttcaaagatggtgccttactctgtcaccgaggctggagtgcagtggcatgataatggctcactgcagccttgaactcccacctcatcctcctgagtagctgggactacaggtgcatgctacgaccaccagctaattttttaaatttttaatctttttgcagagatagggtctcactatgttgcccaggctggtctcaaacttctggcctcaagtgatcctcctgcttccacttcccaaagcactgggattacaggtgtgagacaccaagcccagctctgttacaactgactgtggtatcttgaacaagtcagtttcctcacctctaaaatgggtacaataatggcacgccctcacaaggttgttgcagcctgtgtcccct

SEQ ID NO: 950717 - DNA, 443 bp, Homo sapiens
accaccaagcctggctctttttttgtatttttagtagaaacggggtttctccatgttagccagctggtcttgaactcctgacctcaggtaatctgcccgcctyggcctcccaaagtactgggattacaggcgtgagccaccatgcctgaccgatgagttggtattttaattcaacacgcatactatcaaattagcttatacacatcaaacactgtcttcaaaattatggggtacaggcctcaagcaccttaaaacacaatctgtagaaataatgtaaatacataggaacaattattgaagggttaaagattataacacaatgtataggttaatgtattcatttttatctttatgatttttaaatgtagtagtgtagataatatctattaaataagccaaaaactgatttgtcactatttagatgcctatatggcttgttaata

SEQ ID NO: 950718 - DNA, 372 bp, Homo sapiens
ctgctaaaatttcatctcttcggagaggctgctccagagagctctgagcgtcacaagtgtgtcttctgccaagcgcctaccccagcctgtgtgactgttcacctgactggccccagcgggacactgagggcagggggtgggtctgtctcgtttcctgctgaatccctcatgcccggaacaggaactgacacctcattggtgcccagcacgcttttgatgaacgcacgaaggtgtctcagcccgctctgaacaagcagctttctgcttatagataacacagatgccagcatgaggctgaagccaagcagagcagtgggaagyggagcgatgggaggtcatgttctgctgctcctcttagggcgacagagggtg

SEQ ID NO: 950719 - DNA, 615 bp, Homo sapiens
catggaaactaaacaaccttctcctgaatgactactgggtaaataacgaaatgaaggcagaaataaagatgttctttgaaaccaatgagaacaaagacacaaagtaccagaatctctgggacacatttaaagcagtgtatagagggaaattcatagcactaaatgcccacaagagaaagcaggaaagatccaaaatcgacaccctaacatcacaattaaaagaactagagaagcaagagcaaacaaaaagctagcagaagccaagaaataagtaagatcagagcagaactgaaagagatagagacatgaaaagcccttcgaaaaatcaatgaatccaggagctggttttttgaaaaaatcaacaaaatagacctctagccagactaataaagaagaaaagagagaagagtcaaatagatgcaataaaaaatgataaaggggatatcaccaccgatcccacagaaatacaaactactgtcagagaatastataaacacctctatgcaaataaactagaaaatctagaagaaatggataaattcctggacacatacaccctcccaagtctaaaccaggaagaagttgaatccctgaatagaccaataacttctgaaa

SEQ ID NO: 950720 - DNA, 562 bp, Homo sapiens
cccgtttaatataatccagacaaacttccaggttactggtccaccaagacacatatgtgctgcaaattggggattctaattakttaaaacattttgatttgaatacattaaaatggatttaatgaatacattaaatggattcaaatccatttaaacagtcaaggaaattggggtgcacttggtctctcaagtcacccacttggccctcttcaaagtgtactttccttcctttcttttccttattttccttactgctttaaagctttttaataaactttcactcctggactgaaaaaagaaaaaaggaaagaaattgaaatattgcagttgctcatagaaaagtacagagcagggagacagaccaagatggctgaatagaacccactggagattgtaccccaacagaacgccaaattaaacaactctccacccaagaaagcacgttgagcagaacaaaaaaaccaggtgagggatcatattacctgattttaacataatatcaaggaaagaggcaatgaagagtgtgggaaagacagtctctttgccaacattgcttctctcc

SEQ ID NO: 950721 - DNA, 458 bp, Homo sapiens
cagctgccaacattttctcaaaatgkttgtaaaattcatgaagctataggactgggcaaaaaccatagggtctgaaagaattcagaaacttacatagttcatgtaatgaaaacatcaaagatattccctaaaatggagatgtttcacttagattggcatttctggggagtaaataaatggaggaaacaaaagagtcaggagcagaaggtcactatacaatctctaacacaaagacatgaccagagaaaatggagaataggagaaatgttagtaattaatataaatggttttcatgctgaaagcggtaattttttttacttaaagtaatgtatgagttggaataatatgacctgggaggcttggctaattcacaaattctctgagcctcagttttcttacttgttatatggggatcatagagtttttgtggggctgcttgaccagtgtcttgcataggg

SEQ ID NO: 950722 - DNA, 461 bp, Homo sapiens
ttatctgggagctgtccagatcaactgatgaaaactggctagggtgtcgtctttacggtcaattactggcagcacattaaatgagggctggcaaacctaggcaccaatgagctccatttccaaggcgttttgggttcattgtttttccagcctctcttctcttagcctaccttggctcctttgttttctttcgtggtgaaactcatgggaatatgaaaggacacggaacccctaggtttctgattcacagtgttgtgactcacagatggtagtggtgtggtatgaggacgctctgcactcagaaggtgggctgagcctctttagctttccagggattasatgctcaactttgttgagggccagtgaatggaatcactagagaggctagaatgtgcctagaaacctatttctgcaggcttcctctgggccttcctttggagaagctacttttttctttatag

SEQ ID NO: 950723 - DNA, 547 bp, Homo sapiens
aacagaggttaaaagggtgctttctaaaagtttacctagatataactgaactttggggggtttaaagtagatcrtacttatttcactcatttttaaaccctgaaaattctttctatgcgatattcttggggagaggttggtattgtgttttagtcagcattgggactattcgatatttgtttcatcatgttttaatttgtgaatttgataaaatggcatcttcaagttgatttcatttcggatacaccatgggatttttcaagaaagtatttctagcttcaactatagtaacccctatttaaaattacatatatttgaatgtttagattcttgaaatattggccattatctttttaacagtaatttaatatttcaaactaatttgaaatattatcgatgacctgtggcatctttgaacttacactctaagagtgggatgattactcaaatgagttcccccatagtaatttacaaaggtacatgatttgtggagatacctaaatcacttttggcatggtgcttctaagtacgggggactttaatgcta

SEQ ID NO: 950724 - DNA, 547 bp, Homo sapiens
aacagaggttaaaagggtgctttctaaaagtttacctagatataactgaactttggggggtttaaagtagatcatacttatttcactcatttttaaaccctgaaaattctttctatgcgatattcttggggagaggttggtattgtgttttagtcagcattgggactattcgatatttgtttcatcatgttttaatttgtgaatttgataaaatggcatcttcaagttgatttcatttcggatacaccatgggatttttcaagaaagtatttctagcttcaactatagtaacccctatttaaaattacatatatttgaatgtttagattcttgaaatattggccattatctttttaacagtaatttaatatttcaaactaatttgaaatattatcgatgacctgtggcatctttgaacttacactctaagagtgggatgattactcaaatgagttyccccatagtaatttacaaaggtacatgatttgtggagatacctaaatcacttttggcatggtgcttctaagtacgggggactttaatgcta

SEQ ID NO: 950725 - DNA, 582 bp, Homo sapiens
gaacaggagtgcttcactactgctccccatgtgccctccactgacattgtgggagagtgacctctttgctgctgagtgatggtgaatgtcctgattctccyctaggccttctctgataccactctagtggaaaggagtagaggtgcttcattacaaggttttctttgacatcatggcagggaagaaggaaggtgtcactggcaggagttctggcttcctactcagtcttctctgactttacttctgcaagggtgttgaggtgtcttgttacttcctggtaaacatctagagtccccactcagtctttcctagcaagagtggagttggggtctctgtttttactgtgatgtttggctagagtagaacagttattgtcttaaagtattctgtcttggtaggctggctgtcccttttgtgatatcttggttagaaaatggggcttttgtttagaattttttaattttttgggggctgtgtctattgattattgatgtttccatgctgctggtttcttcagctacaagtccaggctaaatgagacaaagagaaaacccagggaactcactgccttttgagacccaa

SEQ ID NO: 950726 - DNA, 582 bp, Homo sapiens
gaacaggagtgcttcactactgctccccatgtgccctccactgacattgtgggagagtgacctctttgctgctgagtgatggtgaatgtcctgattctcctctaggccttctctgataccactctagtggaaaggagtagaggtgcttcattacaaggttttctttgacatcatggcagggaagaaggaaggtgtcactggcaggagttctggcttcctactcagtcttctctgactttacttctgcaagggtgttgaggtgtcttgttacttcctggtaaacatctagagtccccactcagtctttcctagcaagagtggagttggggtctctgtttttactgtgatgtttggctagagtagaacagttattgtcttaaagtattctgtcttggtaggctggctgtcccttttgtgatatcttggttagaaaatggggcttttgtttagaattttttaatttttkgggggctgtgtctattgattattgatgtttccatgctgctggtttcttcagctacaagtccaggctaaatgagacaaagagaaaacccagggaactcactgccttttgagacccaa

SEQ ID NO: 950727 - DNA, 698 bp, Homo sapiens
catatatgtggaatcataagaaaaaaagagaaaaaagtcaaatgtatagagaataagacagtggttactgaggttgggggcaggagagaggaaatgaggagaggtagatcacagaatacaaagaagcagatatagaggatcagtgagtctagatattgaatgtacaacatgaagactatagttaataaaattatagtgattatggatttttgttaagtagattttagctgctcttttcacaaaaaaagcagccatgtgagatgatatatgtttgtttatttcactgtagtaaccattttactatcaatacatatcccatattatattgtgaacctcaaatatacacaaaaaaatttatttaaaaaaaaataaagaaggctgggtgcagtggctcacgtctgtaatcccagcactttgggaggccgaagcaggtggatcatgaggtcaggagatcgagaccatcctggccaacatggtgaaatcccatctctactaaaaatacaaaaattagctaggcgtggtggtgtgcacctgtaatcccagctactcgggaggctgaagaacgagaaatcacttgaacccaggaggtggaggttgcagtgagccgagatcacgccactgcactccagcctggtgacagagcgagactccgtctcaaaaaaagaaaaaaaaaakaaaaaagaagaataaataccaat

SEQ ID NO: 950728 - DNA, 624 bp, Homo sapiens
aaagccatctgtgaaccaggccctagtcttctcttcctctgtgaactgatcatagggaactccccatgaggccatgggtgcsaagagaaggcaccatggcaggagtggagaccatgggcatttgagccacttcctcatgtaacttacttgtgccctgaggatctgcttgagcctgatcccgtgtgtaccacttccatttgatgatggaatgctgctgtgcaggaccactttatgactagatggatcagacagcacccagttcatgatgggcagttcaggtcacatggtgacttgatgacccatagtcaaacattcagtttccaccaaagcccagaaatgggccaagagctgtttctcaggagcaaagtacttatcttctgaagatggcaaggctttgctccaaaatcctagaggcctctgctgtggttcacctgtgggggcctaccaaaggctcaaaatagcatccctatctgccactaacacctcaagcaccattggatctgttgggtcatatggcccaagtggcagagcagcttgcacagcagttctggaccccactcaaaactggtagccttttgagtcactagataaatgggctggagtgacacacccaaatgaggaatg

SEQ ID NO: 950729 - DNA, 607 bp, Homo sapiens
aaaagaaacaaaagacatccaaattaaaaagaaagtagtaaaaacatcctgtttccagatggcaatgagtttagaaatcatagaaaaccctaaagatttctccccaaaattgttagaactaataaactaytttagtaaagttataagatataaaatcaacatacaacaatcagcagcatttctgtacaataacaacaaactatgcaaaaaagaaatataaaaacaaacccatttataatagcatcaaataaacaaatgaaatactaaagaaaatttaatcaaggaggtaaaatgtctacacactgaaaactataaaacactgatgaaagaaactgaagatgacacaaatggaaagatatcagaatattattaagaaatccatactacccaaagcaatatatagagtcaaagtaatctccaccaaaattcccatagcatttttcacagaaatagaaaaaacattttttaatttgtataaaaccataaaagctcacaaaagatcccaagtagcagaaaaatcgtgagcataaagaataaagctggaatgatgccagcaagttgaaatgggaggcaacctggttatttccccacaacaagaattctgtac

SEQ ID NO: 950730 - DNA, 557 bp, Homo sapiens
  misc_feature 500: n = A,T,C or G
cagatagcgtttaggctctttttcatcaaatataaaaatccagcccagttcatggctcgttcggcagcaaccctgagacactttacagccctagaccctaaaaggtcaaaaggccgtcttattctcaatacacattttattacccaatctgctcccgacattaaataaaactccaaaaactggaatctggccctcaaaccccacaacaggacttaattaacctcaccttcaaggtgtgcaataacagaaaaaagttgcaattccttgcctccactgtgagacaaaccccagccacatttccagcacacaagaacttccaaacgcctgaactgtagcagccaggcgttcctccagcagccagcaagttcctccccaaggagcttgttacacatgccggaaatttggccactgggccaaggaatgcccgcagcctgggattcctcataagccrcgtcccatctgtgtgggaccccactgaaaatcggactgttcaactcacntggcagccactcccagagcccctggaactttggcccaaggctctctgactgactcct

SEQ ID NO: 950731 - DNA, 598 bp, Homo sapiens
agctgatctctgggcagaaactctacaagccagacgagagtgggggccaatattcaacattcttaaagaaagaattttcaacccagaatttcatatccagccaaactaagcttcataagtgaaggagaaaaaacrccaattctttaaaaaatattcaaaacaaattggagaggggggatttctccctaactcattctatgaggccagtattactgataccaaaaccagatgaagctacaacagaaaaagaaaattacagaccattaatcttgataatatacatgtaaaaattcttaagacaatactcgcaaaacaaaaccaatagcacatcataaagatagtgcaccatgatcaagtggggtttatgccaggaatgcaaagatgcttcaacatatgcaattcactaaatgtggtacactgagaacacatggacatgtgggaaagaacatactggggcctgtcaggcgtgattcaggggagggacagcaacaggaagaatacatattggatgctgggcttaatacctgggtagtgggatgatctgtgaagcaaccaccatggcacacgtttgcgtttgtaacaaacctgcacatcctgc

SEQ ID NO: 950732 - DNA, 656 bp, Homo sapiens
gcgcctgtagtcccagctacttgggaggctgaggcaggagaatggcatgaacccagaaggcagagcttgccgtgagccaagatcacaccactgcactccagcctgggcgacagagtgagacgccatctcaaagaaaaaaaaaaaaaaggaaatgtctaaaaaccatctgaaatgatctgaaatgtaacatgtctgaaactgaactccggatctccccaacttaaaaatccacatgtctaggccaagtgaagtggctcacacctaaaatcttagcacttcaggaggccgaggtgggtacttgagcccaggagttggaggccagcctgagcaacatagcgagaccctgcctctaaaaagaattttaaaaaattagccaggcatggtggcgcacacctgtagtcccagctacttgagaggctgaggagggcggatgcttgagcccaagacgctggggctgcagtgagccatgattgcactactgcactccagcctgggcaacagagcaagaccctatctcaaaaaaaaaaaaaatctgcatttccacgacctagrttttcctccactcacctgagggtagctgcatccttcctggtttaggtcaaaaaccctagcatcacccaggtgcagggggatcactggaggtcaagagttcaaga

SEQ ID NO: 950733 - DNA, 606 bp, Homo sapiens
ggcacagtatgaaattaatttaaagatcagagtctgtgattagatctgtttctccaggaaaagtcaaagttgggaataattttaaatgagcacatagaaatatgtattatgtgtagaagcggatgaaaaaccagcgtagggccaggcgcagtggctcacgcctgtaatccctgcactttgagaggctgaggcaggtggatcacgaggtcaagagatcgagaccgttctggccaacatggtgaaaccccgtgtttaataaaaatacaaaaattagctgggtgtggtggcgtgtgcctgtagtcccagctactcgggaggctgaggcaggagaatcacttgaacctgggaggcggaggtggcagtgagccgagatcgcaccactgcactccagcctgttgacaaagcgagactctgtctcaaaaaaaaaaaaacaaaaacaaaacaaaccagcatgggagaaatatgtattaaatgtagaagcagattaaaaaccagcrtggggccagatgcagtcactgacacctgtaaatccagcactttgggaggccgaggcaggagaatcatttgagcctaggagtttgagaccggcctggacaacacagcaag

SEQ ID NO: 950734 - DNA, 602 bp, Homo sapiens
gatcagagtctgtgattagatctgtttctccaggaaaagtcaaagttgggaataattttaaatgagcacatagaaatatgtattatgtgtagaagcggatgaaaaaccagcgtagggccaggcgcagtggctcacgcctgtaatccctgcactttgagaggctgaggcaggtggatcacgaggtcaagagatcgagaccgttctggccaacatggtgaaaccccgtgtttaataaaaatacaaaaattagctgggtgtggtggcgtgtgcctgtagtcccagctactcgggaggctgaggcaggagaatcacttgaacctgggaggcggaggtggcagtgagccgagatcgcaccactgcactccagcctgttgacaaagcgagactctgtctcaaaaaaaaaaaaacaaaaacaaaacaaaccagcatgggagaaatatgtattaaatgtagaagcagattaaaaaccagcgtggggccagaygcagtcactgacacctgtaaatccagcactttgggaggccgaggcaggagaatcatttgagcctaggagtttgagaccggcctggacaacacagcaagaccccgcctctacaaaaact

SEQ ID NO: 950735 - DNA, 628 bp, Homo sapiens
gcagtatgcaccgaacctggatggtagtctttatccctcatcctcttcccaccctttccccctgaatccgcaaagtctgttgtgtcattcttatgcctttgcatcctcatagcttagctcccacttaygagtaagaacatacaatgacagagtctcactctgtcatccaggctggagtgcggtggcacgatcactgctcactgcaacctctgcctacaggattcaagccattctcaagcctcagcctcccgagtagctgggattatgggcacgcaccaccatgcctgggtaatttttgtattttcttacagagacagggtttcactatattagccaggctggcctcaaactcctgacctcaagtgatctgcccaacttggcctcccagagtgctgggattacagatgtgagccatgttgcccagcctcttttttttttttttttttttttttttgagacagagtctctctctgtcacccaggctggagtgcccagcctcattttcaaaataaaagtaaaaagcaaggactctgaagccagaatatgtagatgtgaatttcatctctgcatttacctgttgggctatcttaaccaagataacttagtctccttatacctcagtttcctt

SEQ ID NO: 950736 - DNA, 570 bp, Homo sapiens
aagctatgtctgatgcatagtaggtgccaacacatgttcattttccttccttttycccttccctttatttatttatttatttagagacagggtcttgctctgttgcctaggctggagcacagtggtgcaatctcagctcactgcggccttcacctcccaggttcaagcaattctcccacttcagctccctgagtagctggaactacaggcatgcaccaccacacctgactaattttttgtattttttttggtagagacggggtttcaccatgttggccaggctggtctggaactcctgacctcaagtgatccatcagccttggcttcccaaagtgctgggattacaggcgtgggccaccgtgcccggccccttccttccatttaattcaacaagttcttaggaagtgcccacgtttgaggcagagctggcatcatgcacatgcacagccatttgcacagggccccacactcacaagaatgctgagcttggtttagcgttctgctgtcgctggcttgacattcttaatttttgaacaaggggccctgcattttcattttgtactggacccc

SEQ ID NO: 950737 - DNA, 641 bp, Homo sapiens
tttctaatattctgtatctgtcaagtttcaccagaaaaacagaaaccacactagttattttaataaagagaatatagtaragggaattagctaaacaggtgctattatttttgaaaaagtaacaagggaacacactgatttaacatagagatagtaattgctagaggcagctatcactcctgggaatagggaaactaagagaagagatgggttatcataattcagatgcccagagaagaagtatcccggggcagaagtcagatgtcaaaggagagagccctgcctggttattgctagtacttctaatggggcacaatgaagtaggttttgggaagaagaaaagttagacattggttccaaaatgtcattgcagggcaaagggccatcgttggagcaacactgagaggaagagcgggcaagaagaatggaataagtcccttttctgctcctccttgcagtctactaccgactttaacaggaagtcatctggcagggagactgtagcttgcagaattctagccctagaacatacaacacagagcacggaagactggatttggtgcatttctctacctctagcttatctttctggtaatcagttttctgttagacttctcaattaatagccagcatttattgaa

SEQ ID NO: 950738 - DNA, 528 bp, Homo sapiens
actctccaccccacgtcaacagaatatacattcttctcagcaccacattgcgcttattctaaaattgaccacataattaaaagtaaaacactcttcagcaaaagcaaaagaatggaaataataacagtctctcagaccacagtgcaatcaaattagaactcatgattaaaaaactcactcaaaaccacacaactacatggaaactgaacaacttgctttttaatgactactgggtaaataaagaaattaaggcagaaataaatgagttctttgaaaccaataagaacaaagacacaacataccagaatctctgggacacagctaaagcagtgtttagagggaaatttatagcgctaaatgcccacagaagaaagcaggaaagatctaaaattgacacyctaacatcacaatgaaaagaactagaaaagcaagagcaaacaaattgaaaagctagcagaaggcaagaaataactaagatcagagcaaaactgaaggagatagggaaatgaaaaacccttcaaaaaatca

SEQ ID NO: 950739 - DNA, 470 bp, Homo sapiens
caatagagttttggagttttcttcatatagatcttatacatttttacaagttttatacctaagtactttgtatgttgggtacaaatgtaaatagtattgtgttttaaatgtcaaattcactgttcactgctggcatatgagaaagtaattgatttttgtatatgaaccttgtatcttgcaatactggtataattacttattagttccaacttttaaaattcattctgattttctacataaatgatcatgtcatttgtgaaaatgttttacttcttcctttctaacctgcatactttttatttccttttcttgtcttatattgcattagctaaaactttcagtatgatgttgaaaagcagtggtgaagggggccatccatgtcttgttcctgatcttagagtgcagtggcatgatcatggctcactgcagycatgaccacctgtgctcaagcaatcctcccacctcacccg

SEQ ID NO: 950740 - DNA, 777 bp, Homo sapiens
accccagatcccagggaggagaatgtcagcacaaacccccatgatggtatctggctgataaaagtgagtgaagtcccagcacattagagaggtagagagccaccctctgtaacttamctttccactaggaatctgaccaacccaagctgagagagagcactttgtttcttctaaactctgtatttaacgtggagtgaggtttggagacactgtgagggaaacacaatgggaaaagctgtaaacgttttcccagacacagggctgagggcaggacatcatttttaatcaaggcacttacaaagtcagccattcaagctgagaaccaaataaagaacacaatcacatttacaatagccactccccaaaataaaatagctaagaatacagctaacctaatgagaaggatctcaaggaaaactacaaaacagtgttaaaaggaattatatatgacaaaatcaatggaaaaactttaaatgtttatgaattgaaagaattaatattctttaaatgaccatactgcccaaagcaatctacagacttaatgctatttctatcaaactaccaatgtcattattcacaaaactagaaaaatctattctaaaattcatatggaaccaaaaagacctaaatagccaaagctagcctaagtaaaaataataaagccagaagcatcccagtatctgacttcaaattataacgaggctgcagtaattaaaacaacagggtactgttacaaacagcagacacaaagattaatgtaaaagaatacagaaccca

SEQ ID NO: 950741 - DNA, 570 bp, Homo sapiens
gttgcctcactgggaagatgagagtgccagcctctcaagagctcctttctgttctgatattccaggagcacgtgaattgcctctgcttacrttcaggccctgtcctaaacccagccgtctagcacccagtgatcccatgcctttgggaatcccaggatgctgcccaacgggaaatttgtacattgggtgctatcaatgccacatcacagggaccagccatcacagagcaaagtgacctccacgtctgatgctggggtcatcaggacggacccatcatggctgtctttttgccccaccccctgccgtcagttcttcctttctccgtggctggcttcccgcactagggaacgggttgtaaatggggaacatgacttccttccggagtccttgagcacctcagctaaggaccgcagtgccctgtagagttcctagattacctcactgggaatagcattgtgcgtgtccggaaaagggctccatttggttccagcccactcccctctgcaagtgccgcagcttccctcagagcatactctccagtggatccaagtactctctctcctaaagaca

SEQ ID NO: 950742 - DNA, 527 bp, Homo sapiens
gctggtcgtgtcccaggcttgctgtgtgacctcatgtgagtcacttgccttattttttcttaacaagcatttattgagcacttactrtctacatcaggcactgttctaggtacttgaaatgtatcagtgaacaaaatagagatccttgccctcatggaacttacattctagacagggagagaccatcggtaataagcactataaataagaattttatatactatgatacgaaatgataagtgctcttaaaaaatacaaagtagaccgagtgcagtgactcacatctgtaatcccagcactttgggaggccaaggcaggtggatcacgaggtcaggagttcaagaccatcctggccaacatggggaaaccccatcactactaaaaatacaaaaattagccgggcgtggtggcgggcgcctgtagtcccagctactcaggaggctgaggcaggagaatagcttgaacccgggaggcagaggttgcagtgaggcgagatcgcaccactgcactccagcctggcgacagag

SEQ ID NO: 950743 - DNA, 723 bp, Homo sapiens
actctttctctttatttctcagccggccaacacttatggaaaatagaatctatgttgaaatattggggrcaggttcccccaatacatccctagatattttactttatttttttgttgatattgtaaatggaattgtgtacttgatttggctctcagcttgaacattattggtgtacagaaatgctactgatttttgtgcattgattttgtatcctaaaactttactgaagtgattaatcagttccaggaaccttttggcagagtctttaatgttttctaggcatagaatgatactgtcagcaaagagatataatttaacttcttattttcctatttggatgcctttgatttctttctcttgcctgactgctctggctaggacttccagcactatattgaataggagtggtgagagtggacatcatgtcttgttccagttttcaaggggaatgcttccaacttttacctattcagtatgatgttgcctatagatttgtcatataaggtcttattattttgagatatgttcctttgatgcctagtttcctgtgggtttttatcatgaggggatgttaaattttattgaaagcttttcctgtgtttattgagatggtcatatggtttttgttaattctatttatagagagaatcacatttattgattttcatatgttgaaccaaccttgcctcctaggaaagaagcttacttgatcatagtaaatt

SEQ ID NO: 950744 - DNA, 663 bp, Homo sapiens
gaatggtgctttttccaggcttgcccatggaccaatcagcacacactcccccattctgactccataaaaaccccagaatcagccacacatggggactaccagccttcaggtaggagctacccacttcaggtaccctctcatgtcgagagctgttctaccattcaatgaaactcttctccaccttgctcactcttcagttgtccatataacctcattcttcttggatgcgggacaagaacccggaacccaccaaatagtgggtgcaaaaggaggtgtaacactgtagccctccctccctcttccagtgctgggcaggttctccatgtgatgggaagtggtagcgggtggggggtgggtgggggcggcagcccagaagctgcaggctggagtgaagcagtggaatagaaggagctgtaacacaaatgagctgaaacacattcctggctggcccttgagctggggtggtgacacatttccattcatcagactatgagacaagcgctgcaacccttctggaggcccagactttgagacttcccaagccagagatgtggcatgctgtaatacccccttggggctctgaggttactggcatctccaagtttttgggcaccacccggttccccttgtccagacactgacaygcaaggcagaagccgattg

SEQ ID NO: 950745 - DNA, 619 bp, Homo sapiens
taagaccctcactgcttgggccggggcaccaaccagccactccgagtgcrgggccaacggagcccatgcccacctggagctcaagctggcctgcaagcgcggcacacagcccgggttccctccggcacctctccctccacacctccctgcaagcagagggagctggctccgacctgaccagcccagaaaggggctcccatagtgcagcggcaggctgaagggctcctcaagcatggccagagtgggcgccgaggccgaggaggtgccgagagtaagcaagggctgccagcacgctgtcacttctcaatatgttaggcaacacagcaaatctcactaaacagattttaaaagtatacaaattttcatctccagacactattgaatgaagctagaaatcaaaactagaaactatttcccaaatatgagaaaattgaataaaccattcttaacccattggacaaagaagaaattgtaaagaaatttggaaaatactagggaaaaatgaaaataaaaatacaatacatcgaaacatatgagacagcaaaagcagtgtttagagggaaatttgtagaaataaacacatcttaaaaaaaagaaagatctcaaaccactaccctaa

SEQ ID NO: 950746 - DNA, 598 bp, Homo sapiens
caaaaataggacatgtactttaaamtaatcattcaagcaaagtacacacatgatggaaggctttaaaaaagaattggacggcagcagacttggttcttaagcttccaaatgtcagactacaccccttcaccccggctgagaatgacggagatgaacctaaatccttttagcgagggttgcacgaccttgatcaacgcctgaatgccaaataagggattttcatctccctggactacaatttcttgttgaggattgcacggcacaataaaactgttgctccacacacaggcgacatttaaacagtatacagtgagttctgtagacgagtttacgaggaaattgttaaaactccccggaactgcttagacggggaatgttctggtttgccctgccgagtttaggctggaaaacgtgttcagtttctcctgaagagggaaggggtgaaagagacgaatgcccgacgcgccgggaggcggtcccctctggcagaggtgccgggtgaggagcccgaagccccgcgggtgagaaaccctgctctgaaagcggagccgcggataagggcgggctgagggggagggcatgcggaccacgaaagtac

SEQ ID NO: 950747 - DNA, 586 bp, Homo sapiens
ttgtttttgctgcaattgcttttgatgacttagccaaaaattctttgtcaaggccaatgtcaagaagggtattttctagggtttttttctaaaatgtttayagtttgagattttatagttaaatttttaatccatcttgagttaatttttgtctatagtaaaatgtaaggatacagcttgattcttccccatatgagtagcctgttttctcagcaccaattattgaatagggagtccttttcccattgcttgtttttgtcacccttgtcaaagatcagatggttatagttgtgtggctttatttctaggttttccatcttgttcctttgttctatgtgtctgttttcgtaccagtaccatgctggttttggttacagtaactgtattaaggttctccagagggatggaagtaatagaatacatgtatatatgaaagggagtttattagagagaattggctcacatgattactaggtgaagttccacaataggctgcctgcaagctggggaagagagaagcccgtagtggctcagttggaatctgaaagcctcaaaaccaaggaagttgagggtgcagccttcagtc

SEQ ID NO: 950748 - DNA, 658 bp, Homo sapiens
aacaggggaggcactacgggggctcagcaggcctggccccttccagaggcttcaaagtgggctcagcttcaggtgatgggcacctgtcagcctccgccccatgggactgcagtctgttgggtccaamacaggctccttgggcccaggcagcaggtggctccagatgggtgtggtttgagcatcagaactgttggtagcagtagggtggcccagggttccctggcacgtccaaagggctggaccctcttccttagaactgacatttggggcttctccagcagaagcagcctttgcttggtggggcaggggcctggaggtccagggctgggggtgtgtgcttgggactgtgcccactgtcaatgccaggggactccctaggccagaggctccccctcttgcccaccctagccactgggctcttaccccttatttgtgcaaaactgcaaatcagtgtccagcgtgtgtagctggcccagagggctggccctggggactcccctagggacccctgtccccctgggtctgggaaagcctagtctctggtgtgtaaagtatttcaggaagcatatgatcggggcccaggagggactccatgcccctgaagtccaagaagaggtggcactacttccctgttccacaacacagaggccacggtggg

SEQ ID NO: 950749 - DNA, 701 bp, Homo sapiens
ttctcgaagactttgctcatttttaaaattctttaatctttatttttgtctgactgggttagtttgtaaaactggtcttcaagctgtgaaatcttttcttttgtttttttggcttgagcttgtctatcgataacattttcaattgtattttgatattccttaagtgagtttattttaattccataaactataaattttttaatgatggttatctctttcttcatttcttggattgctttagaagtttctttgtgtcaattttcaaccttgtcttggatcttgttgagcttccttgcagtccgttctttgaattctttatctgtcatttctgagtttcactttggttagtgatcattgttagaaaactaatgtgaaccattggtagtgtcactacattcagatttttcatggtactataattcttgtgctggtttattttcatctgaataaactggcacttctaatttttataattattttcatgtgggtgggatttttttctttcttttctacatatatatattttattttcctttcctttctgccttcctaggaattgtgactatagaggatgttgagtagggtcttttgactttgcctttatagccttaggcacctctgttggcaggttttatattatgctgtgcaattcaacccacaaggcagtagatggaagttaygggaaagagctggctgtggcc

SEQ ID NO: 950750 - DNA, 542 bp, Homo sapiens
gtaaattggtgccaggtagtggggtgctgctgaaatgatacctgaaaatgtgactctggaactgggtaacaggcagaggttggaacagcttggagggctcagaagaagaaaggaakacgtgagaaagcttggaacttcctagagacttgttgaatagctttgactaaaatgctgatagtgatatggacaataaaatccgggctgaggtgaactcagatggagatgaggaacttgttggaaactggagcaaaggtgacttgctatgttttagccaagagactggtggatttttgcccctgcataaagatttgtggaactttggacttgagagagatagtttaaaggcatctggctgaagaaatttttaagcagcaaagcattcaagaggtgatttgggtatagttaaaggcattcagttttatgtattcacatatatatggtttggaattggaacttctttttaaaagggaagcagagaataaactttcagaaaattttctgcctgacaatgcaatagaaaagaaaaatcaattttctgagga

SEQ ID NO: 950751 - DNA, 390 bp, Homo sapiens
gcagccaggagaggggctgtaccttgcaaagtcataggggtggagctgaccaaggtcgtgggagtctacctcttacatcagcctaatctggatgtgagccatggagtcaaaggagatcattttggaactttaaggtttattgactgccccattggatttgtcttgaatggagcctctagccccttttgtttcaaccatttttttcccatttggaatgggtgtctatacccaatgcctgtactcccactgtatctagtaagtaataactgactttcaattttacatgctcayaggcagaagggacttgccttatttcagatgagactttggacttggacttttgggttaatgctggattaagttaagactttgggggactgttggaagcac

SEQ ID NO: 950752 - DNA, 475 bp, Homo sapiens
tttgtgtatgttgaaccagccttgcatcccagtgatgaagccaacttgatcatgrtggataagttttttaatgtgctgctggattcggtttaccagtattttattgaggattttcacatagaagttcatcagggatattggcctaaagttttcattttttgttgtgtctcttcctgattttggcatcaggatgatgctggctccacaaaataatgtgttacgggggagtccctccttttcaattgtttggaatagtttcagaagaaatggtaccagctcttctttgtatctctggcagaatttgtctgtgaatctgtctggtcacaggctttttttggttggtaggctattaattaccacctcaatttcagaacttgttattggtctattcagggatttgacttcttcctggcagggtgtatgtgtccacccatttcttctagattttctggtttatttgcatagatgtgtttat

SEQ ID NO: 950753 - DNA, 475 bp, Homo sapiens
tttgtgtatgttgaaccagccttgcatcccagtgatgaagccaacttgatcatggtggataagttttttaatgtgctgctggattcggtttaccagtattttattgaggattttcacatagaagttcatcagggatattggcctaaagttttcattttttgttgtgtctcttcctgattttggcatcaggatgatgctggctccacaaaataatgtgttacgggggagtccctccttttcaattgtttggaatagtttcagaagaaatggtaccagctcttctttgtatctctggcagaatttgtctgtgaatctgtctggtcacaggctttttttggttggtaggctattaattaccacctcaatttcagaacttgttattggtctattcagggatttgacttcttcctggcarggtgtatgtgtccacccatttcttctagattttctggtttatttgcatagatgtgtttat

SEQ ID NO: 950754 - DNA, 611 bp, Homo sapiens
tcccctttgtcttggcaaattcctgctcattttttagggtttagttttatcttcamtcctccagaatatctcctctgatctcaatgtgtctgctgtctctttgtaacctggtataagtctcttttcgtgtatcatgttatcatttaattttctgtttatgtgtttgttctttcacaggtctattcatctacctccagccgctggcagagaagctaacaagaatagagatccaccagtgtttcttttcttttctttccttttttttttttgaggttctcgatactcgatttttaaaaaataatttttctctttctttttctttttcctttttttaatttcaatagatttgtgggaaacaggtggtgtttggttacatgaataagttctttagtggtgagttctgagatcttggagcacccatcacttgagcggtgtacactgtaccacccttctcccaccctttcccctgagtccccaaagttcactgtaccattgttatgcttttgcgtcctcatttgcgttcccacttatgagtgagaacatacagtgtttggttttccattcctgagttacttcacttagaataatggtctctaattccatccagtttg

SEQ ID NO: 950755 - DNA, 631 bp, Homo sapiens
tctcttcctatttgaataccctttatttctttctcttgcctgattgcccttgccagaacttgcaatatagtgtggartaggagtggtgagagatggcatccttgtcttgtaccagttttcaaagggaatgcttccagcttttgcccattcaatatgatattggctgtgacttgtcataaatggctcttattattttgagatatgttccatcagtacctagtttactgagagtttttaacatgaaggaatgtcgacttttatcaaaggccttttctacatctattgagataatcatgtagtttttctctttggttctatttgtgtgatggattatgtttattgatttgcatatgttgaaccagccttgcatcccaggggtaaagctgacttgatcgtggtggataagctttttgatgtgctgctggattcagtttgccagtgttttattgagtattttcacatcaatgttcatcagggatattgacctgaagttttcattttttgttgtctcttcccagtttttgtatcaggatgaagctggcttcataaaatgagttagggaggagtccctccttttcaattgtttggaataatttcagaaggaatggtaccagcacctttatgtatttct

SEQ ID NO: 950756 - DNA, 644 bp, Homo sapiens
caggctggagtgcagtggtgtgatctgggctcactacaacctccgcctcctgggttcaagtgattctcctgcctcagccttccaagtagctgagattacaggcacctgccaccacacccagctaatttttgtatctttagtagagatggggtttcaccatgttggccaggctggtctcaaactactaacctcaagtgatctgcccacctcagcctcccaaagtgctgggattacagatgtgagccactgtgcctggcctcagtattgagtcttctaataccataaaactaccactcagatcaaagactagaacattgcccgtacttcctgaaggcctcctgtgccacttcccaatcattacttcctctctcctccccaaagataaccactatcctgacttctagaaaaataggttagctttttccttttttatttttgaactttataaaaattgaattctttattcttttttctctcatgtctgatttattttgctcagtattatctttatgagattcatatatgtctttgaatttagatataatgcattctttttcattrcttcatagaatataaacgtatgaatatactagagtttatttatccagttgactattgatggacatgtgggttatttccagttt

SEQ ID NO: 950757 - DNA, 739 bp, Homo sapiens
ccaccacacctggctcattgttgtatttttastagagacagtatttcaccatgttggccagggtggtctcgaactcctgatctcaggagatctgcccgcctcagcatcccaaagtgctgggattacaggcatgagccaccactcctggcctcaattgctatgcattctaatgaaaacttggtattaacagtctaattttagtcctactgttggatgtgtcttattatgcttttattccacatctctgtaattattaaggaagttgaacaacttttcatatgtttattggccatattaaaattctttcttaaagtgcccatttaatctcttgcccatttccctttgaggtttagtctttcttttatggactagtatatgcttttcatatattttggatatgtgccctttggcagatatgttagcaaataccttcacccatctgtagcttgcctttggaatttctcagagatacctactgataaagagaaggtcttaattttgttgtagaccaatttagtctagtcctttttaagcattactggattttatttgctaatattttgttaagagtttggttttccacttatgtttctgagtgaaattggcctgtaattctcttgtataatgcctttttttttttaagaaggcactgcagtggctggtatatagcattcttgtgaatatatctaactgggatacaagttgaggtagaaatatttcaaatgtccttaaaaaaata

SEQ ID NO: 950758 - DNA, 499 bp, Homo sapiens
agattttatgtaatttatgtagctttgattatttgtattttagctttctttaaataactcaccaagaactgttgaaaacaccctctctttctcatagagaaaatatatttcttagtttgtggaaggacttgctagctctctaacatattgtaggtgacattttgtgtgacagcaaaaatatgtgaaaattgtattatgtaaatgatattttataaattaactgcaattaaaaatgatagtctctcagatgttattttacttttataggataacatcagtgactatcatattagcaactaaaaatgcagccaggcatggttaatcccagcactttgggaggccagggtgggcagattgcttgaggccaggagttcragatcagcctgggcaacatggtaaaatcccatctctactaaaaatgcaaaaattagctgggcatggtggcatatgcctgtaatcccagctattcaggaggctgaggcacaagaatcgcttgaac

SEQ ID NO: 950759 - DNA, 482 bp, Homo sapiens
ttagtctggctagtggtctatgtattttttaatcttttttaaaaaacaattcttggattatttgatattttgaagggtttttcatgtctgtctccttcagttctgctctgatcttagtcagccttcttgtcttctgctagcttttgaatgtgttttctcttgcttctctagttcttttaattgtgatgttaggatgtcaattatagatctttcccgctttctcctgtgggcatttagtgctataaatttccctccaaacactgcttccgcagtttcccagagattctggtacgttgtgcctttgttcccattagtttcaaataacttatttatttctgccttaatttcgttatttacccagtagtcattcaggagcaggttgttcagtttccatgtagttgtgcagctctgagtgagtttcttaatcctragttctaatttgattgcactgtggtctgaaagactgtttgttatgatttccg

SEQ ID NO: 950760 - DNA, 680 bp, Homo sapiens
ggagactcagagtggtagctcctatccacaggcagttagacctgatgacttccmaagtctgaatgagtcctgtgttttcatgggatgagaaggaaggaggtgcatattgattggttcatgggtggccatgtatgggcccagaaaaagcaccataagttctcactcctgtcagggaactccaccccagaactgacagccggccctctggcttcaggtcatccctggcttgaaggtagggcttcaccagggacccactccctttctaccccagagactgtctgcctcctgctgccatctatatgtcatccacaactcccagatgttcatgctgaggagtgcctgcaggcccttgctgagctgacctcagcctacccacctcggcttccctcctgtgctcgtcggcgcccaaagtccgaaggagactgaggcagcagggggcttgagtgtcagcatggcacggagtgcacacacacctggcctagtcatgacaatgcctaggctccacaattttgctctgaaatccaagcaggcacctgcagcagggggaggccaggcagcaggaggaggcacttctgagcctgcaggttcaggggggccacctaggtctgactgggtggctgcagctacgtctgggagggtggggttcctgcccccacaacttggaagggggcagggcaact

SEQ ID NO: 950761 - DNA, 680 bp, Homo sapiens
ggagactcagagtggtagctcctatccacaggcagttagacctgatgacttcccaagtctgwatgagtcctgtgttttcatgggatgagaaggaaggaggtgcatattgattggttcatgggtggccatgtatgggcccagaaaaagcaccataagttctcactcctgtcagggaactccaccccagaactgacagccggccctctggcttcaggtcatccctggcttgaaggtagggcttcaccagggacccactccctttctaccccagagactgtctgcctcctgctgccatctatatgtcatccacaactcccagatgttcatgctgaggagtgcctgcaggcccttgctgagctgacctcagcctacccacctcggcttccctcctgtgctcgtcggcgcccaaagtccgaaggagactgaggcagcagggggcttgagtgtcagcatggcacggagtgcacacacacctggcctagtcatgacaatgcctaggctccacaattttgctctgaaatccaagcaggcacctgcagcagggggaggccaggcagcaggaggaggcacttctgagcctgcaggttcaggggggccacctaggtctgactgggtggctgcagctacgtctgggagggtggggttcctgcccccacaacttggaagggggcagggcaact

SEQ ID NO: 950762 - DNA, 680 bp, Homo sapiens
ggagactcagagtggtagctcctatccacaggcagttagacctgatgacttcccaagtctgamtgagtcctgtgttttcatgggatgagaaggaaggaggtgcatattgattggttcatgggtggccatgtatgggcccagaaaaagcaccataagttctcactcctgtcagggaactccaccccagaactgacagccggccctctggcttcaggtcatccctggcttgaaggtagggcttcaccagggacccactccctttctaccccagagactgtctgcctcctgctgccatctatatgtcatccacaactcccagatgttcatgctgaggagtgcctgcaggcccttgctgagctgacctcagcctacccacctcggcttccctcctgtgctcgtcggcgcccaaagtccgaaggagactgaggcagcagggggcttgagtgtcagcatggcacggagtgcacacacacctggcctagtcatgacaatgcctaggctccacaattttgctctgaaatccaagcaggcacctgcagcagggggaggccaggcagcaggaggaggcacttctgagcctgcaggttcaggggggccacctaggtctgactgggtggctgcagctacgtctgggagggtggggttcctgcccccacaacttggaagggggcagggcaact

SEQ ID NO: 950763 - DNA, 198 bp, Homo sapiens
accccagcccctgggactgcctctcgctggccaagaactacagcttcccctaccccttctcagtccgtctcctggccccgctggacaggcgctcaggtccasacacccccaggagggcagaagcatgtggctggggcctcagactaggcaggcacgtgtgggtttctattaacacgactatactgagcactcactcca

SEQ ID NO: 950764 - DNA, 201 bp, Homo sapiens
actcctcaccccagcccctgggactgcctctcgctggccaagaactacagcttcccctaccccttctcagtccgtctcctggccccgctggacaggcgctcaggtccagacacccccaggagggcagaagcatgtggctggggccycagactaggcaggcacgtgtgggtttctattaacacgactatactgagcactcac

SEQ ID NO: 950765 - DNA, 613 bp, Homo sapiens
aaacactcaagctcacagtggaaaatagaagtttttcaatattcaaattttcctgtgaaagctcaaatgttatccttggttgtgtataacatcaataatttgtttttttggagtgatagggtcactttgttcattttccagaaaatgtctgccaaactcccaattctgaataacaattttcagttattcctttgagtaaaaatgatgatcagatcacaactcaattgcacagtgtttttggaataaccactgttttttaatgcccagcctaagtgctttatttgtatttccccttttgtcatacagcatatttttaagttcaataattgagtcaaaatttaataaaatttataatcttaatagcctcattaaagacattcttgaataaaattttcttttttaaaaaaagctgtaagtgcctggctgtgaagactacaataatgatgtatgtatttctgcgccactgtcttgattggtgctgtttaatctaccatggatygcataaaatcagtaccatgtcagcatacagaaaaagccaaataatgtcatagtatattttgaaaatatatttgacttcctggaacccttgaagggatcctaagaaccctcaggg

SEQ ID NO: 950766 - DNA, 613 bp, Homo sapiens
aaacactcaagctcacagtggaaaatagaagtttttcaatattcaaattttcctgtgaaagctcaaatgttatccttggttgtgtataacatcaataatttgtttttttggagtgatagggtcactttgttcattttccagaaaatgtctgccaaactcccaattctgaataacaattttcagttattcctttgagtaaaaatgatgatcagatcacaactcaattgcacagtgtttttggaataaccactgttttttaatgcccagcctaagtgctttatttgtatttccccttttgtcatacagcatatttttaagttcaataattgagtcaaaatttaataaaatttataatcttaatagcctcattaaagacattcttgaataaaattttcttttttaaaaaaagctgtaagtgcctggctgtgaagactacaataatgatgtatgtatttctgcgccactgtcttgattggtgctgtttaatctaccatggattrcataaaatcagtaccatgtcagcatacagaaaaagccaaataatgtcatagtatattttgaaaatatatttgacttcctggaacccttgaagggatcctaagaaccctcaggg

SEQ ID NO: 950767 - DNA, 621 bp, Homo sapiens
gctagggggagtgcttgtgccacccctcccacaaccccagcctgcacagctcatggcttcaamagaggtcccttccttccacgtgaggagagaggagagagaagagtaaagaggactttgtcttgcatattggataccagctcagccacagtagaataggacaatggtcaaagtaatgaggccccctttctaggctcctggattatatttctagcacaccttgggccagaagggaacctgcttccttgaagggaaagacccagtcctggcagtacccattgtctgctaactaaagagcctttgatccttgaataaccaacagtgatgcccaggaaatacactgtgggccgtaggtgaaactgagattttctgacttcaggtgagactcagcacattcttagctgtggtggctatggggagagactccttctgcttgaggaaagtggaggaaaaagaaaagcagactttggcttgctccatatgtaccagctcagccacaggggaatagagcaccaagcaggctcttggggtccccagttcaaggtcttgactcctggatggcatttttgggtctaccctgagtcagaggggagcgcattgccccgaagggtgagtcccagg

SEQ ID NO: 950768 - DNA, 599 bp, Homo sapiens
tgaccaaaagcctgatagtgatatggacaataaggtccaggctgagttggtctcagacgaagatgaggatcttttkgggaactggagcaaaggtgactcttgttatgttttagcaaagagactggtggcatttatatacatgtggaatgttgaccttgagagagacgatttagggtatctggtgcaataaatttctgagcagtaaagcattcaagaggggatttgggtgctatcaaagaaattcagttttaaaaggaaaacagagcataaaagtttggaaaatttgctgcctgaaaatgtgataaaaagaaaatcccattttctgaggagaaatccaagccagctgcagaaatttgcataagtaacaaggatccaaatgtcaatctccaagccaatgggacagatgtctccaaggcatgtcagaggtcttcatggcaagctcccacatcagaggcctggaggtttgggaggaaaaagtggttttgtgggtcgggcccagggtccctatgctatgtgcagcctagggacttgatgtcctgcatcccaggcactccaactgtggctgtaaggggccaacagaactcagactgtggcttcag

SEQ ID NO: 950769 - DNA, 509 bp, Homo sapiens
agggactgtgttactattatttgggtgactgatgtaaaatgtsataaaaatagggtagctaactcatgtagcaactaagatttacataacctttgatctgatgtggtatttcttttatttagggaacaacgcttgctgaaattgctccctgcatcttgaaagaaacaaagaatggcatcacgaccggctctccagagatacaataattatgaaaatcagtgttaatttagaaataatcattagacagtataagtgtgtaagtcttgaattgcaaaataaaaaccacaaaaaaatacatccccactgtctgtttttttagtgtagagatagattgccatagcctgtgttctccactaagcaaagcctgaataaaaaatttattgtcataactttatgaggaatacaattccagaaacaggagtaaagcaaaagggcagtgaggtagaaatgccaacaagcaaacacaaatgcatgttattgagtagctatcccaagcatatgtgactact

SEQ ID NO: 950770 - DNA, 646 bp, Homo sapiens
cggcagcctgtctgttgccacagaagaacttggtcaccacactgagaagccgtgttttctcacctccctgttactgttgtagctgtatctggcttctctagcattttaaaggaatttctgattgaggcgctaacagctaattccacaggagttgtaaggcagcctgtgcataaactgagacagaagtttctcctcagagactctctttttattattattattattattattggcaaagacttctggctctcctcagaggaataccttgttgcttaagatgagtggctgtagaaagcggtgtaaacgtgaaatactgaaatttgcccagtaccttctcagactattaacaggttctcttcatacaggtaatgactttttttttttttttttttttttttagtaaaggctattaaagcatggtaatgaagttgaaatggaataggaaaggctatttctttgttgggattatttttaatgttgccaataaaatgcaactgtatttgctgaaatttatgtttctaaaaatgtgtgcagtgcagctcttttgggggtaraactgacttctatggatgtattttttttatctcttcaaggcagtgttcttggtaaatttcaggaaacagtatctgcaaagtaaaaagatttt

SEQ ID NO: 950771 - DNA, 727 bp, Homo sapiens
cctccggtcctgggttttcctttattgggaaagtttttattactgattcaatctcactactcattttggtctttttagggtttctgtatttttagggttcaatcttggarggttctatgtgttcaggaatttattcatttcctctaggatttctagtttgtcagtgtagagatgttcatagtagtttctgattatcaattgtatttctgtggtttcagttgtaatgtctccttttttaaatttctgattgaattgtctctcttcttggtcaatctagctagtgttctatcacttttgtttacatttacagaaaacaaacttttcatttggttgattcttttttttggtctcaatttcatttaattctgctctgatcattgaattttttccttctgctagttgcagttttggttccctcttattcttctgggtccttgaggtgcaatgttaggttgttaatttgtgatctttctgtcctttggatgtataaatttattgctcaaaacttccctcttagtcttttcctatatcccagaggttttggtgtattgtgtctctttttattcatttccaaaagtttttaaatttacatcttaattttgtccttgacccaaagattattcaggagaagattgttgagttttcatgtgtttgtatatttttgagagttcttcttagaattgatttctagttgtattccactgtggtctgagaagtgacttgatat

SEQ ID NO: 950772 - DNA, 461 bp, Homo sapiens
ctctgtaaaattgaccaatcagcactctgtaaaatggaccaatcagcaggatgtgggaggggccaaataagggaataaaagctggccacccaagccagcagcrgcaacccgctcgagtccccttccacactgtagaagctttgttcttttgctcttcacagtgaatcttgctgctgctcactctttgggtctgcaccacctttaagagctgtaaaacttgccactaaggtctgtggcttcattcttgaagtcagcgagaccacgaacccaccagaagtatatatatcctacataacacaggtacgtgttatataggaagataaagatatgtactcttataatatactttaactatatataattgatatatatgacctatactcaaatattaaatttaaaatacatcttgagttcacttaatatttctatttattttttcagttttcttcttttgttgagat

SEQ ID NO: 950773 - DNA, 598 bp, Homo sapiens
taagtgaccaatggttgaaagtaaaaactaagaatggaasttaataattccttgaaataaatgtaatacaacatgccaaaaactatgggtcagagcaaaagcagtattgaagagccaattttatagcaatagatgcctacctcaaaaaactagaaagacttcatataaaaaagtcaatgctgcatctcaaggaactaggaaaacaaaaacaaaccaaactcaagattagtaaaatgaaataaataataaagatcagggcagaaacaaaactgagaacaaaaaagtacaaaaatcaaggaaaaaagatttttttggaaagataaaccaaaccaataaactactacctagactaataagaataaaagtgagaaaatgtaaatagaaacacaacaggaaatgccacaataaatatgaaagaaatacaaagaatcattagaaaccacaatgaacaactatatgccaataagttggaaaacctagagaaaatggatgaattcttggatatatataatttaccaagattgaaccaataaaaaacaagaaaacacagacagacctataacaagactgagtcggtaataaaaactctccgaaaaaa

SEQ ID NO: 950774 - DNA, 609 bp, Homo sapiens
aatcgtgctgctataaagacacatgcccacgtatgtttattggggcactattcacaatagcaaagacttggaaccaacccaaatgtccatcaatgatagactggattaagaaaatgtggcacatatacaccatggaatactatgcagccataaaaaaggatgagtttatgtcctttgtagggacatggatgaagctggaaaccatcattctgagcaaactatcgcaaggacagaaaaccaaacaccgcatgttctcactcataggtgggaattgaacaatgagaacacctggacacagggtggggaacatcacataccagggcctgtcgtggggtggggggagtggggagggatagcattaggagatatacctaatgtgaatgacaagttagtgggtgcagcacaccaagatggcacatgtatacatatgtaacaaatctgcacgttgtgcacatgtaccctagaacttaaagtataatttaaaaaaagaaatcatatttcaaacaggctttgcaytatgcatgttcacctgcagatcctggggttgcagtgggggcctggggaattttgatgaatttcctctctgctgttttggagaatttggaaaac

SEQ ID NO: 950775 - DNA, 609 bp, Homo sapiens
aatcgtgctgctataaagacacatgcccacgtatgtttattggggcactattcacaatagcaaagacttggaaccaacccaaatgtccatcaatgatagactggattaagaaaatgtggcacatatacaccatggaatactatgcagccataaaaaaggatgagtttatgtcctttgtagggacatggatgaagctggaaaccatcattctgagcaaactatcgcaaggacagaaaaccaaacaccgcatgttctcactcataggtgggaattgaacaatgagaacacctggacacagggtggggaacatcacataccagggcctgtcgtggggtggggggagtggggagggatagcattaggagatatacctaatgtgaatgacaagttagtgggtgcagcacaccaagatggcacatgtatacatatgtaacaaatctgcacgttgtgcacatgtaccctagaacttaaagtataatttaaaaaaagaaatcatatttcaaacaggctttgcactatgcatgttcacctgcagatcctggggttgcagtgggggcctggrgaattttgatgaatttcctctctgctgttttggagaatttggaaaac

SEQ ID NO: 950776 - DNA, 584 bp, Homo sapiens
tctccaaaacagcagagaggaaattcatcaaaattcyccaggcccccactgcaaccccaggatctgcaggtgaacatgcatagtgcaaagcctgtttgaaatatgatttctttttttaaattatactttaagttctagggtacatgtgcacaacgtgcagatttgttacatatgtatacatgtgccatcttggtgtgctgcacccactaacttgtcattcacattaggtatatctcctaatgctatccctccccactccccccaccccacgacaggccctggtatgtgatgttccccaccctgtgtccaggtgttctcattgttcaattcccacctatgagtgagaacatgcggtgtttggttttctgtccttgcgatagtttgctcagaatgatggtttccagcttcatccatgtccctacaaaggacataaactcatccttttttatggctgcatagtattccatggtgtatatgtgccacattttcttaatccagtctatcattgatggacatttgggttggttccaagtctttgctattgtgaatagtgccccaataaacatacgtgggcatgtgtcttt

SEQ ID NO: 950777 - DNA, 584 bp, Homo sapiens
tctccaaaacagcagagaggaaattcatcaaaattccccaggcccccactgcaaccccaggatctgcaggtgaacatgcatartgcaaagcctgtttgaaatatgatttctttttttaaattatactttaagttctagggtacatgtgcacaacgtgcagatttgttacatatgtatacatgtgccatcttggtgtgctgcacccactaacttgtcattcacattaggtatatctcctaatgctatccctccccactccccccaccccacgacaggccctggtatgtgatgttccccaccctgtgtccaggtgttctcattgttcaattcccacctatgagtgagaacatgcggtgtttggttttctgtccttgcgatagtttgctcagaatgatggtttccagcttcatccatgtccctacaaaggacataaactcatccttttttatggctgcatagtattccatggtgtatatgtgccacattttcttaatccagtctatcattgatggacatttgggttggttccaagtctttgctattgtgaatagtgccccaataaacatacgtgggcatgtgtcttt

SEQ ID NO: 950778 - DNA, 560 bp, Homo sapiens
tcagtacagtgttaaattcagtggcagtatcagagattcttcccttcttcctgactaaaggtgaaaacgtttggtctttcaccactgaaagtgagttagtgtcgtttcyccatagatgttctttatcaggatgttcccttttattcctaggttgctgaaagttttttattataattttgtgtttaattttctcaaatgctttctctgtattttgtttttctcttttaattcattagtatggtgaattacattgatttttgaatgttaaaaaaatccctttgattcctaggataaactctgcttgttcgtaatgcatttgcctttccatatattgctgattctgatttgctaaaattttgtttaagattattgttccatatttctaagggttattgatctgtcctttcttttcctgtaatgctcttgcttgtttttttcagaataatggtaggctaataaaatgattgggaagtgtttgctctgcttctattttctggataagtttttgtaggaatgttactatatcctccataaatgtttgataaactatatcagtgaag

SEQ ID NO: 950779 - DNA, 665 bp, Homo sapiens
atcttcatcttaaaatacatgcaaaagaaaaggaaacctattgatctctgcttagggacaaagacttcctgaaggtagaagcagattccaattcaaccccgacccgcaaggcctggccacccccatggccccaaactcacgcctttcggaatcagatacccgccaataaccaggtcttcctgggtgacccggccgttccctggcagcactggaaacagcctggaaaagagccagcggggacgggaatggcgtggtgactttcacagtattttattgaacgttcagaaccctggatatattcccatttccattaaaaattcttaaaaagtaacacatggtacattttcaactgaaacattttgcaaggacctttgctgcttctttgttggcttgctttaccagcgagtattctgaggaatgtggaaaagactcccaaagcaaaacatttgcaaaacacaaagccaagcctttcacatgccattgtgttcccaggagggaaattccaagtttctaatattttatgtgaccacgggaccactttatcaaggaatagttcataggacttaaggccccatgaaatgcatttggagaaaagatacttcggcgatcrgattatctcagaaaaccctgaataaaactttaattgacaaataccaataaacccc

SEQ ID NO: 950780 - DNA, 586 bp, Homo sapiens
ctcacctaggaagctgtttctagcatgtacctgggtgtcaaacttattttttttctttgagattgtggttattttctccaacttgatagttacaattacatacacagaatacaattatgttaccattgtgttgtattctagagttagtttgttttaacttctagctttttagatggagtatttttaatgtttactcaggaaacagtctcttaggcttggggacctagacttggctgagacctagtgccttaggtttttgaagcagtgagggacagagtatttctctgtattgtagtaaataggatatattattgacagatgcaagtagagaaagggacttggcaccttaaacttgcctcataagattcaagtctcactgatagggtatatatatccctgtgcaagtgagagcctgtgcacttacagaatagaatctcatttgctgcacaatagggttctaggggaaaatgtcaatctggtcatcacagctcatagtttactgtcatttcaaataggctttattgatctcatggcaatacttagtttcaaggtgtgggtggawtatcaactcagggaagtggcttgt

SEQ ID NO: 950781 - DNA, 386 bp, Homo sapiens
cctgagaactaagaagcagaatccctgaggataggagaagattgatgtcctagcttaaagaatcatgcagagtttgagtttatgccttatttctggccttttcaggccctccccagattgaatgacatccactcatatcaaagagggcatctcctttactcagtacatcaactcacatgttaatctattctggaaacacacagagacaggaagaaacaatgttcaaccagacatctggtttcccatggccgagtcaaattggcagataagattaaccattataagtccacccttagtcaatttggcacctatatmtatctctttataccctgcctaatcttcaaatgaagccagtaacaagatcacagttcttcctaacaatcaaa

SEQ ID NO: 950782 - DNA, 701 bp, Homo sapiens
tgtgccactaacagagaggaatgaaagcagcgagtgaattcagcaccttagactgaaatatccaggttctcacactgggactgactaggcagacaaytcaacacatggagaacaacaaaaagcaggatgggctgacagcccagctaggagtggcatggagctaaagaactcccacccctagccaagggaagtggtgattgattgtgcgaccctgcccgggaaaccacacttctcccacggatccttgcaacccatggaccaggagatcctcttgtgagcccacgccaccagggccttgggtctgacatgcagagccgtgtggagtctcagcagagcagccacttaggcacacacagagactcaggagttttacacattctggccccaggatccccagcagggccagaggtctgtctgtacatttccctaggaaggtggctgaatccagagagccaagcagcattgttctgtgggacccatttccatagcacctcaaaaggtaagatccactggcttggaactccagccagccaacacaactggctgagtctgtctgagacgggagggcattccccggggggaaggggtggccgccatttctgtggttgggtcaactcagcattccaggtctgctggctctggagagtccaggtggttcggatgagtcggatgaggtggggtgtccccccaatgcagcacac

SEQ ID NO: 950783 - DNA, 516 bp, Homo sapiens
ggaatagagcagtcactatggggaggtcactaaacacaatttgttgtcagaggaaacagagtattaggatattctcaggccagattcaatttatgcctcacaagagggccaagtcacaaggatttccaaggaaccacactagacttcagtttaaggttgtctcctggctcggggtaggtgatcctcttgagccgtattgcctatggttgtgtcttagaagcagaagtagtaacctggccttcttaagctccgtgacctaaactccattctgttcatctctacttcatcccttccgggtaccctggggacctagtacctttctataccatccctgtggccagtgttatctgtgattcatttccatccttggggcccaggctgatggggtactctttttttttctttttttttgagactgagtcttgctctgytgcccaggctggagtgcagtggcacgatctcggctcactacaacctccacctcctgggtccaggcgattttcctgcctcggcctc

SEQ ID NO: 950784 - DNA, 643 bp, Homo sapiens
tggcagcaggcaaagaaagagagcttgtgcaggggaactcatctttttaaaatcatcagatgtcatgagacttagtcactatcgtgaaaacagcaygggaaaaacccgcccccttgattcaattacctcccactgggtccttcccataacacatgggaattcaagataagagttgagtggggacacagagccaaaccatatcattctgcccctggcccctcccaaatctcatgtccttacatttgaaaactaattatgccttccctacagtctaccaaaagtcttaactcatttcaatattaactcaaaaatccacaatccagagtctcatctgagacaaggccagccccttctgcctatgagcctgtagaatcaaaagcatgttagttactacctagatacaatggggtagaggtattgggtaaatacagccattccaaatgagagaaagtggccaaaacaaatttggccaattttggccaaccgatgcagggttgaaatccagtgggacagtcaaatctttaaaactccaaaatgatctgttttgactccatttctcacatccaggtcacagtaatgtaagaggtgggttccatgatcttgggcagctctgcccctgtggctttgcagggtacagcctccc

SEQ ID NO: 950785 - DNA, 563 bp, Homo sapiens
ccatcagatctcatgagacccattcactatcataagaacagcacaggaaagacccaccccataattcaatcatctcccactgggtacctccsacaagacgtggggattatgggagctgcaagatgagattttgggtgggaacacagagccaaaccatatcattctgcccctggcccctcccaaatctcatgtcttcacatttcaaaaccaatcatgcctccccaactgtcccataaactcattaactcaaaagtccacagtccaaagtctcatccaagacaatgcaagttctttctgcctaggagcctataaaatcaaaagcaagttagttacttcctagatacaatggaggtacagccattgggtaaatacagccattccaaatgggagaaattggccaaaacaaaggggctacaggccccatgcaagtcccaaatccagcagggcagtcaaatcttaaagctccaaaatgatctcctttgactccatggctcacattcaggtcacactgatgcaaaacgtaggttcccatagttttgggcagctccacctttgtggcttta

SEQ ID NO: 950786 - DNA, 566 bp, Homo sapiens
tggcagttcctcaaaaggccaaatgcagagttaccatatgatgcagcaattccactcctaggtatatacccaagagaaaatatgtctacacaaaaacttttaygcgaatgtcaatggcagcattattcataagagccataatatccatcaactgataaatggataaataaaatatggtacacacatacacttgaaaatcatttggcaataaaaaaattaaaaatgaaatattgagtggacgaaccatggaaacactatactaagtgaaagaagccagtcacaaagggccactttttatatgattgcatttatgtgaaatatccagaatagacaaatctatagagaccagtatgatctatagagtagattggtggttgcctagggcttggatacgtggagaagtggaggtgatagctaaggggtatagtgtttctttttagtgtaatgaaaatgttctaaattgatttggtgatggttgcaccactctgtgaatatgcctagtcattgaattacacattttaaatgggtgaaatttttttatggtttgtgaattataactcaataga

SEQ ID NO: 950787 - DNA, 592 bp, Homo sapiens
gcagaaaccatccccgttctcagtcaagagcttcataatgcatttccagaagcaggaggccccatgggagcccaggcaaaactttcaatcccgattgagacgtctgggcaggtctggctgaaccgtggggtggactctctagaactccatttgcaccagaaacagaaagcctcctgggagactcctcctaaggttctggaaggccaggaacacaaggttcttcaagtcacagtgcagtgggttcacaagggaatgagcatccccagtacagagtggcctcggcatatcttcaccctccgcagtttcctgagggtccccgggatcacaggagggggtggtgcacccacgaggaaggcttggggctgaaagtgacagaacaacctaaccacagtggcttaaacaaataagggacttattttttagcttagtggccaaagctgaggtctctgagaccatcttggcccctccttcaaggtctccagtagtgggaactgcgccacctatcacatctgcctctctttcataagaagagaggaaacaaaccctgragcagaagttttcaggaactctaagcaaactgtgctttcttata

SEQ ID NO: 950788 - DNA, 587 bp, Homo sapiens
agaattaggctctctgctcaagcagccctgggccttgcgtgtgctctctgtggcccggtttccccacgaggggcagagatgaaagggcccagttatgcttrccccatgctccttccaactcaccaatgagagaagcagggagcaggggtgagacggctcttggcactatctccacaagcaggaagcatcaggcccgagggataagtcgacaagtcgtgcccctcagagagccaagcctatgtccgctatccaggcttatggatgaatatggcctgcaaagatcagaactccctccaggccagaaggagcacataatctcttccagtcacagcaaaggttcccatcagcattccctggccagtgcttcctttgcccaataaggggctggacaaaagggaggatggcctgtgtgatggttaatactgagtgtcaacttgattggattaaaggatacaaagtattggcctggtgcagtggctcacacctgtaatcccagcactttgggaggctgaggtgggtggatcatctgaattcaggagttcgagaccagcctggccaacatggtgaaaccccgtgtctactaaaaa

SEQ ID NO: 950789 - DNA, 557 bp, Homo sapiens
aatcgcattaggaagtgttagcagctcaaagcactcgaattattctttgttttaatctcccaccatgataaaaacaatgtgatttttattaggacacagaacaaatattactgctgatatatgttccaccatttacattttttctctgtaaagttgtggctgtgtcaggggctggagaggaaacttttcctcaattattccagctcacgctcgtactcattattattgtattagtggcaaaaaaaaaaaaaaaaaaccctagatttctaatagaattttggaatgacatagccagtcactatgtcattcctaagacatagtgaatttttcatttgttcattttttatttctttttagtagagatgggtttcaccatgttggccaagctggtcttgaattcctgatctcaagtaatccacccacctcggcctcccaaagtgctgygattacaggtgtgagccactgtgcccggccaacatagtaaaccttttaaaatatttttgggttgccagtgtaaaaactagtatcctcaaagtagaatctgtaaaattggtttg

SEQ ID NO: 950790 - DNA, 645 bp, Homo sapiens
actcagagggcatgacaactctcagcggccaaagccctccagccctccctctttccttgcctttatttccacctgcagcctccctcccatgttcctaacaagattctcaatgctttattatatctaattttyctcctaactccaaaagagaaaagaaactttggagtggatgcagtttaagatgctctttgcaatgcctatgtgtggaagggcctgtgtgccccttatagctactgctgacagggccccgggtctgctcagcagggaaggcaaacacaaccacttttcctgggatctttgagttacttcatatgtttaataagcaaaatactctgtatcttctcatacatgtgaaaatcaacagtctaattttatctcaaatttggtaacaggttttggttgtttcaaattgaagaaaattaatataaagcagagactgagatcttaaaaatcctttttaaaaatccttttttaaaataggtttttccaccttctgtgcggcctatacaatacgacatgcataattacagcagctcagttctcatgttcttcgacagtgtttacaaacaccctgaggcaggcatcattaaatagaggcaaggaaaagttacccaaggggggagcaggctctctgcatgtgtgttt

SEQ ID NO: 950791 - DNA, 562 bp, Homo sapiens
ttctcgtgatgcacaatgtcacagaaccttccaatagctccctgactccctcagatacaaaccagagtcccaacaagttttccagactgtgcatgatcctttccacaccacgccctccctcaccgtctgccatctgctttggcctccggcctcctggctggttctgcaatgtacgaggcctcttccagccttagggcttttgcgctggccgttccttttgcctgagcaaccttccatgaacatcagtgggttgatagctgggtgcagtggctcatgtctataatcccagcactttgggaagccaaggcgggcagatcacctgcctgaggtcaggagatcgagaccagcctggccaaaatggtgaaaccctgtctctactaaacaaaaattagccaggcatggtggcagacgcctgtagtcccagctactcaagaggctgaggcaagagaatcgcttgaacccaggaggcggaggctgcagtgagccaagattgggccactgcactccagcctgggkgacagagcaagactctgtctcaaacaaaaacaaaaacaaaaacaat

SEQ ID NO: 950792 - DNA, 473 bp, Homo sapiens
attcttcctatccatggtcatagaatatttttccatttgtttgtatcatctctgatttctttgagcagtgattcatagttctmcttgaagaggttctttatttcccttgttagctataattctaggtattttattctttttgtgaatgggagttcattcatgattttgctgtctgcttgcctgttgttggtgtataggaatgcttgtgatttttgcacattgatttttgtatcctgagactttgctgaagttgcttattagcttaagaagcttttgggctgagacaatgggtttttttagatataggatcatgtcgtctgcaaacaaagataatttgacttcctcatttcctatttgaatactctttatttctttctcttgcctaactgccctggccagaacttccaaaactgtgttgaataggagtggtgagagagggcatccctgtgccgattttcaaggggaatatttcc

SEQ ID NO: 950793 - DNA, 558 bp, Homo sapiens
ctggtcctgggcttttcttggatggtaggctatttattactgcctcaatttcagaacttgttttattggtctattcagggattcaacttcttcccgattcaktcttgggagggtgtatgtgtccaggaatttatccatttcttctagattttctagtttacttgtgtagaggtgtttagagtattctcttatggttgcttgcatttctgtggtatcagtggtgatatcccctttatcatttcttattgtgtctatttgattcttctcttttcttctttattaacctagctagtggtctatattttataaattttttcaaaaaatgggcttctggatttattgattttttgaagggttttttgtgtctctgttgttgtgtctttgttctcactggtttcaaagaacttgatatctgccttaattttattattgacccaggagaaattcaggagcaggttgttcaatttccatgtagttgtgtggttttgagtgagttttttgatcttgagttctaatttgattgcaatgttgtctgtgagactgtttatgatatcagtg

SEQ ID NO: 950794 - DNA, 750 bp, Homo sapiens
tgatagatttttctttactctgtaaaacacttccaccttgctttcatcaggtatgaaggagagctgtcatagagatttgttttgttgttgtttgtgtttgtttctgttttaractgagcctcactctgtcacccaggctggagtgcagttgtgcaatctcggctcactgcaacctccacctcccaggctcaagcgattgtcctgcctcagcctcctgagtagctgggattacaggcgtgcatcaccatgcccaggtaatttttgtatttttagtaaagatgggggtttcaccatgttggccaggctggtctcgaactcctgacctcaagtgatccacctgtctcagcctcccaaagtgctgggattacaggtgtgagccactgcgcctggcctttttttttttaattaataaaaaaattttaaagatgggctgcccaagctggtcttgaactcctaggctcaagtgatccccctgcctttggcctcccaaagtgttgggattacaggcctgagccactgtgcccagcaagaggttcgctttgagataacttgacaacagagtattattcactatttagtttttgcattaaacaattaataacaacaacaaaataccctttaaggcactgggagttttttagttttaattttatcattaaaattgacaactacaacaatatttttccttgcttacttttattccaaccttgctttgcaaccagaaaagtccaataaatttttttctttttt

SEQ ID NO: 950795 - DNA, 620 bp, Homo sapiens
ataattccaaaatctgcgtcacatctgagtctggttctgacgcttgctttgtatctacaggctgtttttccttgcctgttagcatgctttgttgagacagggtcttacttactctgttgcccaagmtggaatgcaatgatgtgatcacagcttactgcagtcttgacctcctgggctcaagtgatcctcccacctcagcctcctaagtagctgggactacagccatgcaccaccatgccaggctaatcttcttattttttgtatagatggggttttaccatgttgcccaggatgctcttgaacttctagcctcaagtcatctgtccaccttggcttcccaaagtgctagaattataggcatgagccatgtgcccagcctcatctgtgtaattttctgttgaaagctagacatgatgtatcagataacaggaaatgaggcaaaaaggacttcagcttgaggcttatctgtctaagattgggttgtatataatgtttgctataaatgtggttgtcagaggtttcaaagtcctctagtgtcttttttttttttttttttcatctctcctgttgtctttggactttcctgagaccccctctccttggccagccagtgtctgtct

SEQ ID NO: 950796 - DNA, 631 bp, Homo sapiens
ataattccaaaatctgcgtcacatctgagtctggttctgacgcttgctttgtatctacaggctgtttttccttgcctgttagcatgctttgttgagacagggtcttacttactctgttgcccaagctggaatgcaatgatgtgatcacagcttactgcagtcttgacctcctgggctcaagtgatcctcccacctcagcctcctaagtagctgggactacagccatgcaccaccatgccaggctaatcttcttattttttgtatagatggggttttaccatgttgcccaggatgctcttgaacttctagcctcaagtcatctgtccaccttggcttcccaaagtgctagaattataggcatgagccatgtgcccagcctcatctgtgtaattttctgttgaaagctagacatgatgtatcagataacaggaaatgaggcaaaaaggacttcagcttgaggcttatctgtctaagattgggttgtatataatgtttgctataaatgtggttgtcagaggtttcaaagtcctctagtgtcttttttttttttttttttcatctctcctgttgtctttggactttcctgagaccccctctccttggccagccrgtgtctgtctgcatcttgcag

SEQ ID NO: 950797 - DNA, 498 bp, Homo sapiens
tagaacctataagactgattatttttaatgtttcaaaaatttttcagacttacagaaaagttgcaaaaataatgaaaagaagtcctagatacctttaatctggattttcccaatgtttaacataagcattctattatagatatacagatatttttctgaaccttttgagagtaagttacagatgtaatgcctattaactactaaatacttcagtatgtatctcataaaataaggctattctcatataatcactgtatataattataatatcagaaaataaacaatgatatagttctattatctaatctacagatcttatttaaattttgtcaattgtccattgaacatactttaaagtaaaagaaaaaaatgtttgtctagtttaaggtccaattcaggaccgtacattgyttttagttgctatgtctcttttgtctccttcaatctaaaatccttcttcagtctttgtcatttatgaccttgatatttttgaagatt

SEQ ID NO: 950798 - DNA, 664 bp, Homo sapiens
aacctgtgactgtcttattttagttagcataatgtcctcaagatgcatccatgttgttgaatacggcaggatttccttctttgttaaggctgaataaaattatattccattgtaagataaagaatacgtggcacatatacataatggaatactgtttagatgtaagaaagaacaaaattcgactgggcgcggtggctcacgcctgtaatcccagcactttgggaggccgaggcaggcggatcacgagatcaagagatcaagaccatcctggccaacatggtgaaaccctgtctctactaaaaatgcaaaaattagctgggcctgttagtgtgtgactgtagtcccagctactcaggaggctgaggcaggagaatcgcttgaacccgggaggtggaggttgcagtgagccaagatcctgccactgcacttcagcctggcgacagagcaagacaccgtttaaaaaaaaaaaaagaacaaaattctatcatttgtggcaacatggatgagcttggaggacgttatgtgaatgaaataagtcaggcccagaaagagaaatactgcatgttctcaagttgatctcaagacatagagaatagaacagtggttattagagggggggcagtgtrttgggggttaggggatagccagagatttgttaacagat

SEQ ID NO: 950799 - DNA, 640 bp, Homo sapiens
accagcagtgcagccaccccaccctcctggctgaayactcctaatagtagtggctccagttttcctggaggtggagcccgcaggagcaactgaaagcccctctcacactgcctctgtagtggtactgcccttgcttcctttgcactggcaaaggagcaaacaccctgtctcatctacacctccatcaagttgaagtaggcccaaggagaggaggccactctgtttcccatggttcccacccacccccactgctcaccactaggcaaggcccccctggcttgggcacacagcacagacacctgcacccccatcctgagctgattgcactgagcaattgctgctctgcatctcactggagtggagccccaggaggcaagtaaaagacccatggccacaaccactactaaggtcccttcctctgctgcctccaagttggagaaggaatataaactctgagatcgccccaaagttgtggtgggcagcctaggagtgccaagctgtcatctatagccagcactcaagagggagaggagcccacaccttcagagaattgagagggagcatggctaaaaatgagaggaaatataggggaccatgtgactgagtgagaggctacctactgaccactaagtttaagcgc

SEQ ID NO: 950800 - DNA, 640 bp, Homo sapiens
accagcagtgcagccaccccaccctcctggctgaatactcctaatagtagtggctccagttttcctggaggtggagcccgcaggagcaactgaaagcccctctsacactgcctctgtagtggtactgcccttgcttcctttgcactggcaaaggagcaaacaccctgtctcatctacacctccatcaagttgaagtaggcccaaggagaggaggccactctgtttcccatggttcccacccacccccactgctcaccactaggcaaggcccccctggcttgggcacacagcacagacacctgcacccccatcctgagctgattgcactgagcaattgctgctctgcatctcactggagtggagccccaggaggcaagtaaaagacccatggccacaaccactactaaggtcccttcctctgctgcctccaagttggagaaggaatataaactctgagatcgccccaaagttgtggtgggcagcctaggagtgccaagctgtcatctatagccagcactcaagagggagaggagcccacaccttcagagaattgagagggagcatggctaaaaatgagaggaaatataggggaccatgtgactgagtgagaggctacctactgaccactaagtttaagcgc

SEQ ID NO: 950801 - DNA, 626 bp, Homo sapiens
agtctctccgtgggaggagacattatggggcgtccaccaccacccctccctggccatcctcctggaatgtggtctgccctccaccagagctcctgcctgccaggactggaccagagcagccaggctggggcccctctgtctcaacccgcagacccttgactgaatgagagaggccagaggatgctccccatgctgccactatttattgtgagccctggaggctcccatgtgcttgaggaaggctggtgagcccggctcaggaccctcttccctcaggggctgcaccctcctctcactcccttccatgccggaacccaggccagggacccaccggcctgtggtttgtgggaaagcagggtggacgctgaggagtgaaagaaccctgcacccagagggcctgcctggtgccaaggtatcccagcctggacaggcatggacctgtctccagagagaggagcctgaagttcgtggggcgggacagcgtcggcctgatttcccgtaaaggtgtgcagcctgagagacgggaagaggaggcctctggacctgctggtctgcactgacagcctgaagkgtctacaccctcggctcacctaagtgccctgtgctggttgccaggcgcagagggg

SEQ ID NO: 950802 - DNA, 602 bp, Homo sapiens
cagctaatttttctatttttagtggagacggggtttcaccaagttaggctgtctcaaaatcctgacttcaggtgattcatctgcctcggcctcccaaagtgctgggattacaggggtgagcctctgtgcccggccaaggcataattttaactagatataaaataaatcttaacttttccaagtataatgctataagtgtggaacatttaaaggcagaagagattttacatttgttttttctagcatatgggaaaattgatagcttctttccgtatgttttaatgatgagtgaagaactagactgcttctatggttttccctggaatttttaaaaatcacctacccataaacttacattcttcctaaatacatgaatgtgataagagtctcaataagcaaaagcaaaatatactgctattctagaaaacatctggcaaagagactccaggacaactctttgtacaaaagggaaatgaggaccggctggctgtgtagtaagtggatatatggcctctggtkggaggcaatgtggcagtgttagggccacatgaatgaggcatgaattgtaggtctgatttttagtagttacatgcctacggtca

SEQ ID NO: 950803 - DNA, 385 bp, Homo sapiens
ctatccttgagaataatccatgtgctgaggaaaaaaatttgtattctgcagccattggataaaatattttgtaaatatgtgttatatccatttggtctgtagtgcagattaagtctgatgtttctttgttgatttttctgtctgaaagatctgtctaatggtgaaagtggggtgttgcagtctccatctattattgcactgtggtctgtctctttctttagctctaataatgtttgatttatatatctgggtgctccagtgttgggtgcatatatatttataatygttaactcctctgactgaattgacccctttataattacgtaatggccttctttgtctcttcttgtagtttttgtcatgaagtacattttggctgatataa

SEQ ID NO: 950804 - DNA, 584 bp, Homo sapiens
ggttagaatataaagcaggtagaaaaatgcgaaaagagagtggcttagcctcccagcttacatctttctcctgtgctggatgcttcctgcccttgaacatcagactacaagttttttatataagtttatgtatataatatatacatatatatttcattagttctgtctctctagagaaccctaacataacatacaaaggatatgaatattcagtacatcaaagagatatctgcacctccacattcattgcagcttattcacaatagcaacaataaggaatcaatctaagtgtccatcaatgaatggagaaaatgtgatatatattgatatatatatatgactattcttcagctttaaacgagaaggaaattctgtcattcgtgacatcatagatgaacctaggaagacattatgttaagtgaaataagccatgcacagtaagacaaatactgcaggatttcacttacatgtagaatctaaaaaagtcaaacycacagaaatcaggagaaaaaatgtggcttaccagaggctgggatggaagatatgtagggggaaatgttggtcaaaggatacaaaattttagt

SEQ ID NO: 950805 - DNA, 473 bp, Homo sapiens
cggttccaagatggccaaataggaacagctccagtctacagctcccagcttgagcgacgcagaaaacgggtgayttctgcatttccaactgaggtactgggttcatctcactggggattgtcagacagtgggtgcaggacagtgggtgcagcgcaccgagcatgagccaaagcagggcgaggcatcgcctcacccaggaagcacaaggggtcagggaattccctttcctagccaaggaaaggggtgacagacagcacctggaaaattgggtcactcccaccctaatactgcgcttttccgatggtcttagcaaacagcacaccaggagactatatcccgcgcctggctcagcgggtcctatgcccatggagcctcgctcattgctagcacagcagtctgagatcaaactgcaaggtggcagcgaggctgggggaggggtgcccgccattgcggaggcttgagcaggtaaaaaa

SEQ ID NO: 950806 - DNA, 617 bp, Homo sapiens
ctaatacagttaaagaaattcgagttgagtctaccacatcgttctagtgggctctcaggaacctttactttgcttcgcaagtctgaaagcagtcagacaatgcttatctaaagctctttctggcactacttagaaaagctattttcttatagttggtgataaaattattactttaaggacctattttgtgcaatgtaatgagtgggtaacattctagtacaaaattaccctatcacagccaggcacggtggctcacgcctgtaatcccaacactttgggaggccgaagtgggcggatcacaaggtcaggagatcgagaccatcctggctaacacagtgaaaccccttctctactaaaaatacaaaaaattagctgggcgtggtggcaggcgcctgtagtcccagctactcaggaggctgaggcaggagaatggtgtgaacccaggaggcggagcttgcagtgagcccagatggcgccactgcactccagcctgggcgacagagcaagactccatctcaaaaagaaaaaaaagttaccctatyactcaatcatcagtttttctatataggtgacactgacatgcattaattaacttattttttaaagttcaaagagtt

SEQ ID NO: 950807 - DNA, 641 bp, Homo sapiens
gtggctcttaccaaaaaaaatgaaaatcacaagttaattctgcaccttcaactgaggtattcaggttctctcatcatgactaggcagttgttgtgacccacggagagcaagraaaagcagggtggggcaacagcccacctaggagctacacggggtaaggggagctcccttcctccgccagccaagagaggcggtaagtgattgtgctatgccccctgggaaaccatgcttttgccatggacctttgcaactcagaaaataggagattccccttgtgagcccacgtcaccagggcctttggccccaaccacagagctgtacagactccccagactctgttcggcagtcgctctggcaggcactgagacgcaggagttcttttgcatactttgtcctcaggaattccagtgaggcaggagattgttcacttctttaggaagagggctgaagccagggagccaagtggcatcattcagcgggccccaatcccacgaaaccttaccaactaagacccgctggcttggaaagcttgccagacagtggcagcaggctggagaattccgaaaacgactgagttcccagggagagggacagccaccactgtctctgaggctccagtcggctgttttcccctgtcggtg

SEQ ID NO: 950808 - DNA, 595 bp, Homo sapiens
atgccccctgggaaaccatgcttttgccatggacctttgcaactcagaaaataggagattccccttgtgagcccacgtcaccagggcctttggccccaaccacagagctgtacagactccccagactctgttcggcagtcgctctggcaggcactgagacgcaggagttcttttgcatactttgtcctcaggaattccagtgaggcaggagattgttcacttctttaggaagagggctgaagccagggagccaagtggcatcattcagcgggccccaatcccacgaaaccttaccaactaagacccgctggcttggaaagcttgccagacagtggcagcaggctggagaattccgaaaacgactgagttcccagggagagggacagccaccactgtctctgaggctccagtcggctgttttcccctgtcggtgctggggagactgggtggttaggaccaggaggaattccccacagtgcaccacagcagttgtggcagatcatggccagactgcttctttaagtggaascccaatccatccctcaacatcaggcaaagcctccccatgggaatttcagcaactccagccaagggt

SEQ ID NO: 950809 - DNA, 590 bp, Homo sapiens
agaaatcacaactattaatttcatggatctaatgatcaaaagctagtcaaatttcaaacaataaaattttttgacaaaacaatgaagacaaccaagaattacggtgcacattttgtaattcttttgcyagggagtatgacttgttccttaaataattgattagcaatgtcagcaagtgatgagatgagatatttgccgttttataaattttgtgagttgaaattatatgcaaagtcctgagaatttaaagatatatttgaaatttaaaaaatcataatcagttcaacacacagattcttgttgaagtcagaactctgcatgttgtacaacattatcaccaaagaaagtcagaagcccatatgtaaaatttacatttgtgaatatccaagtacatataatacacagattttgatggttcttttttctagtcatatttcaagtattatttctgaaactgtatttctctatttaacctaaaaattgatttaaatcatagaagatgggaaaaatgttctgtccctcatttctgctcctctattggagctaatcgctctcttatatttgaaagtataagttacatatatatgcag

SEQ ID NO: 950810 - DNA, 583 bp, Homo sapiens
gatgacactttgataaccactaccttaatgcttcatttttgcctctttaaaactttacrcttttttaaattcaatttctggttatgatttttgatatcaaattttctcagataaaataactgacaaaattctgcctgattcacaccaatttagtgattgcctcagaagagcactaggaagggcggggttttttatgtcatactttctcaaaatgaaagcattgcctggccggctgtggtggctcactcctgtaatcccagcactttgggaggctgaggtgggcagatcacgaggtgagaagatcgagatcattctggctaacacggtgaaaccctgtttctactgaaaatacaaaataattagccgggcgtggtggcgggcacctgtattcccagctactcgggaggctgaggcaggaggagaatggcatgaacccgggaggcgtagcttgcagtgagctgagatcacgcctctgcactccagcctgggacactgaacaagactctgactcaaaaaaaaaaaaaaaaaaaaaaaaaaaagctttgcctttggctctcatctaaacatgttatatgacagggtt

SEQ ID NO: 950811 - DNA, 646 bp, Homo sapiens
gtctacatggtcagaatcatcatcattactgtcctccacctccacatcttgtcccactagaaggtcttcaggggcaataacatgcataaagctgtcatctgatctgataacaatacgtcgtctggaatacctactgaaggacttgcctgaggatgttttacagttaacatatataatggtacatatacatattgtatacaaatacataaatacatcatatacattacattataatatatttatatattatatatataacatatgtgtgtgtattttcatttatgtatttattatgctatactttctgtcattttacagttaacatatatatgtgttatgtatatatataatacagttaacatatatatttgttgtgtctgtgtgtgtataaagtagaaagaggataatctgaaataatgatagaaattattgtatggtaaatatgtaaaccagtattaagttagttatttattaccattaccattaccaaatactatgcactgtgcataattgtgtgtattatacttttaaacaactggcagcataataggtttgtttatatcagcatcaccagaaagaygtaagtaatctgttgtgctaggacgttagaatggccacaacatcactaggtgatgggaatttttca

SEQ ID NO: 950812 - DNA, 551 bp, Homo sapiens
agaataaaattatgttctttgaagcaacatagttggactagaggccataatcttaagataattaatgcaagaacagaaaaccaaatactgcatgttttcacttataagtgggagctaaacattaaacacacatagacataaacacaagaacaacaaacactgtggactactagagggggaagggaagggggaagacatgggttgaaaaactacctgttgggcactatgctgactacctgagtgcaatatacccatgaaacaaacctgcacatgcaccccctgtgtctaaaataaaagatgaagtttaaaaaaataacatgaaacctcagaagtaatgataaacaagaacagaaacaaaattccatcctttatgttttgtgttttgctttgctattatgaataagtaatagatgtttatatatatatttaagttaaattcatctaaatttaagcttatttatatttaaattaaattcagctaaattcatctgtattttatttcatttwattcaaatttatctaaaattaaaattgttttattttattgataa

SEQ ID NO: 950813 - DNA, 622 bp, Homo sapiens
agaaaaataatcatatagttgatccctgggccaacgtaaacattcacagttgggagaaacaaagaggaaacagaaaagtcaccaaaaaaagaaatcatagttagaagatgagctctccatgaagtcaaggaaatgcattattcacaaaggaaaagcaattagcaaatctgagtgcttacagatagttcaagaaggataacaacagagcaattacaattgcatttagtaaagtggaggtaattgatgaccttgatcacagcagtttgggtaggatgttgaggatgaaatgtaattttaatgaagacaagtttagacaatcctttcaagtaaaaatgacagaaatgagggggtagttagaagaagaggcagatacaaaacaaattttcatcttaatgcactaatgggaataattcagtctagaaagaaataaataacagaggataaatgggaaaattctggggtaagaaagcaagaggggatggaatctaggatacttttgcagaggctgwtattatctaggctcttagtgctacaattcatggtggcaagaagaaaggaaggacagatatataaccacaggtgcaggtagatggctcggtgaaattaatttttctgtctatta

SEQ ID NO: 950814 - DNA, 622 bp, Homo sapiens
agaaaaataatcatatagttgatccctgggccaacgtaaacattcacagttgggagaaacaaagaggaaacagaaaagtcaccaaaaaaagaaatcatagttagaagatgagctctccatgaagtcaaggaaatgcattattcacaaaggaaaagcaattagcaaatctgagtgcttacagatagttcaagaaggataacaacagagcaattacaattgcatttagtaaagtggaggtaattgatgaccttgatcacagcagtttgggtaggatgttgaggatgaaatgtaattttaatgaagacaagtttagacaatcctttcaagtaaaaatgacagaaatgagggggtagttagaagaagaggcagatacaaaacaaattttcatcttaatgcactaatgggaataattcagtctagaaagaaataaataacagaggataaatgggaaaattctggggtaagaaagcaagaggggatggaatctaggatacttttgcagaggctgatattatctaggctcttagtgctacaattcatggtggcaagaagaaaggaaggacagatatataaccacaggtgcaggtagatggctcgrtgaaattaatttttctgtctatta

SEQ ID NO: 950815 - DNA, 632 bp, Homo sapiens
aggtcaagtcatcatttgtagacagaatcaattgagactctttggcacttacgactaatccattgtaaacaattatcaatcttaaaaacacagctccagtaaacgtgtaattatactgggtacagataaggaagtacaaggccggtatgatcgcttatgcctgtaatcatagcactttggggaggccgaggcaggtggatcatatgaggccaggagttcaagaccagcctaacccacatggcaaaaccctgtctctactaaaaatacaaaaagaaattagccagccatggtgggtgcttgcctgtaatcccagcttctcaggaggctgaggcatgagaatcagagaatcacctgaacccaggagacagtggttgcagtgagccaagaccatgctactgcactctagcctaggtgacacagtgagtgagaatctgtctcaaaaagaaaggaagtacaagaagctcactggctatgctaaaccaaataaatgaaaagcagcaaaactgatttttttttttttttttttgagacagagtctttgtcacccaggctggagtgcaatggtgcgatctcagcttattgcaacctccrcctcccgggttcaagccattctcctgcctcagcttccctgg

SEQ ID NO: 950816 - DNA, 746 bp, Homo sapiens
agattgggattcagccctgatgtggattctccagccatcatcctgcccttccctctcggctaggtcccacgaccttccctgctctccactcggactgaaggaaccctgggggcttgagaggtcagcttgccagggcaacacccatgaagatcagcgtcatctcctcggaagggctgtgtacagagggttgggagttgggactctggagcctgtctacctgggtttgaatattcaccattcactactgtgagatctcagattccagtttcttcgtctgtaaattccagtgtgatcttagattccagtttcctcatctgtgaaatagagatatgagggttaaatgacaatctatgtaaaacccttaaacagggcctgcccagggcaagcactgcttgattagatcataattagacactacttatcgggcccctactaggtagcaggcattgtgctaagcctttagcataagatgcttccttaatcctctcagcctgatctgtgaagctggctgagccccattctggagatgaggaggttgaagctcagagaagctaagtctcatgtctaaggtcatacagccattaagtgacagagcctggacttgaacctggttctagcattaatgctcctgcrctcagcctctacacagcccagcatcaccctgggacccacgggcagctctgatttgagagaaggaaagacaatgggagtttatccagacacagagcttgaacttggagcttctt

SEQ ID NO: 950817 - DNA, 644 bp, Homo sapiens
cagctgcagtcccagctactcgggaggctgaggcaggagaatcgcttgaacccaggagcgggaggttgcagtgagccgagattgcgccactgcagtccagcytgggtgacagagtgagactctgtctcaaaaaaaaaaaagaaaaaaaaaaggcctagaaaaagctgggtgttggccaggcatggtggcacacgcctgtaatctcaacactttgggatgccgaggcaggcgaatcacctgaggtcaggagttcaagaccagcctggccaacatggtgaaagcccatctctactaaaaaatacaaaaattagctgggtgtggttgcagccgcctataatcccagctacttgggaggctgaggcaggagaatcgcttgaacccgggaggcgaaggttgcagtgaggtgagatcaaaccattgcactccggcatgggcaagagagcaagactttgtcaaaaaaaaaagaaaaaaaggaagaagggaaggaaggaaggaaggaaggaaggaaggcaggcaggcgggaaggaaggaaaagctggatgcagtggtgaatgcctgtagtctgagaccaggctgggcaacatagcaagacctcatctctaaaaataataataaataaaataaaaattaatgatggacccaga

SEQ ID NO: 950818 - DNA, 612 bp, Homo sapiens
cccgcaacgattcttgctaagttttaaagttgaaataaatctttatgttttagcttaataaatctttacttattttcaaagcactttcctataaattatctcatttgatcatcaataacgttctgaatagtataactcagttgggatgctatcaggaagaagtggttgtattgaacggtctgcatataagatagaaagatatccattggagagagggaagaaaaataagaaaaaaataaatatgagtggagtataaaaataacagcttgatggaaagtgaaagaaataaaaagatatataggaggttcaacataaaatgagagaaatcatgaggaggagacatatagattgagatcatctactgaaagagaaaacagaaaaaaagatatatgaaaagagaaaataaagatcaaggaggaaggaatgggatggaacagaaaaatgatagatttaatgagttctgaagtgtgttaatcaagttaaactgcttatgcctcattgtgccgtccacttaagctgtgactattaaaataagttacratccataatttattacctctgtcctttgagaggctaattagctttcctacaattaagcactattcacaactc

SEQ ID NO: 950819 - DNA, 625 bp, Homo sapiens
tttttttttttgagacgaagtcttgcattgttgcccaggctggagttcagtggtgaaatctcggctcactgcaagctccgcctcctgggttcacgccattctcctgcctcagcctcccgagtagctggggctacaggcgcctgccaccacgcccgggtaattttttgtacttttagtagagacggggtttcaccgtgttagccaggatgatctcccatctcctgacctcgtgatccgcccgcctcagcctcccgaagtgctgggattacaggcgtgagccaccgccccggccttatctttttttgagacagggtttcattctgtctcccaggttggagtgcagtggcacaatcatagctcactgtaatcttgaatttctgggctcaagtgatcctcctgcctctgtctcacggtagctggtactacaggcatgcaccactatgtctggctaactctttaagtttttgtagagacagggtctcaccatgttgcccaggctagtctcaaactcctagcatcaagcgatcctgcrgctttggcttcccaaagtgctgggattacaagcttgagctaccaactgtgcctggcccagtcgaatattatatgtcctgtaaaaccaaactca

SEQ ID NO: 950820 - DNA, 565 bp, Homo sapiens
ccagatggatgttaggtatgaggcttatttctgggctctctattctgttttattggtccatgtgtctgtttttgtaccagtactgtgctattttggttactgtagccctgtggtatagrttgaagttgggtagcatgatgcctccagctttcaacagtcaagctgagagccaaatcaggaatgcaatcccattcacaattgctataaaaagaataaaatacctaggaatacccctaaccaagtgtattagtccattttcacattgctataaagagctaccttgactgggtagtttataatgaaaagaggtttaattgactcacagtttttcaggctatagaggaggcaagactgggtgaggccttgggaaacttacagtcacgacagaaggcaaagggggaagcacacacgtattcatgtgacaggagagagagagagagaagggggggatgccacacatttttaaaccatgagatctcatgagaactcactcactatcacaagaacagcaagggggaaatccgcccccatgatccagtcacctctgaccaagtccttcctccaa

SEQ ID NO: 950821 - DNA, 576 bp, Homo sapiens
accactgatgggtttagagtaggtatttccaaggtcttgtatytagtgggtaagatatttttaaaattgtcgtggatacataataggtgtatgtatttatgaggtacatgagattttgatgcaggtatataatgcataataatcacatcaaggtaaatagggtatccatcacctcaaacatttatcctttctttgtgttataaacaatccagttatactcttttagttgttttaaattatacaataaattattattgactgtactcaccctgttgagctatgaaatagtagatcttattcactgtatctaactatatttttgtacccattagccatccccacgaccccagccacccctgccctcccctactacccttcccagtttctggtaaccatcattctactctctatctccatgtgttcaattgttatcattttttttttagctccccaaaataagtgagaatatatgaagtttgtctttctgttcctggcttatttcacttagcataatgatctccagttctatgcatgttgttgtaaatgacaggatctcattctttttaatggctgaat

SEQ ID NO: 950822 - DNA, 571 bp, Homo sapiens
ttctcagtcatgcagagtcctcagggtctttgcactggccattccctctgcctggaacactcttccccagacacccacagcccatttcctcacctccttcaaatctttgttcaagtgccaccttctcagtaaggcccaccttgatcaccatatgcaaaattacaagatgtcctcctcctgacactcctgatcccattttccttgcttttttccttctcccatagcacttattctctttaatctactgcatcatttacttatctgctctatcagttgcttattggctatatcccctctccccactaaaacataaacacctaagagcagggatctttgtgactttttgctcactgatgtatcccaagaacattgagcaatacatggcacatagtagacactcaataaaaatttgctaagggccagatgcagtggctcatgcctgtaatctcagcattttgggaggctgagggaggcaratcccttgagcccagtagttcaagaccaacctgggcaatgtggtaaaaccccatctctacaaaaaacaaaaaaaatacaaaaagttagccagatg

SEQ ID NO: 950823 - DNA, 594 bp, Homo sapiens
gcatttccaggagaccagaaacatgccaccccaaaatacgcctcttctggtgtaaggattatgatctgagaccattcgaagcaacaaatacaggaaagctctctgttctccctctatttgcgtaaaagcaggacacagatttacaaagacaaaagatgtcctggcccccgtttctaccaggaagaacaaacgttggccactgaagaactttagacccttatcagcctagagatggtaccagaggaatatctattaaccagctttactaacaagcctttatctgccagttatttgccttccccaagttgctgccccccagaaactcaaaatcctttcctttgtgttgttccttctctaaaaaggtaactgttctttgttgaagatgttacctaagctggaattcaaagccacctctttgagaactactcatttcctgggtgtctcccatctacataaaatatgtatgttaataaactgtttttctcttatctgttacaggggtctattccaaccaagaaattatgacggttgaagawacaatcatttttctttcctacacatttgaactcttatatcagaatctgcttcagagag

SEQ ID NO: 950824 - DNA, 598 bp, Homo sapiens
ctcctctcatggcaccctgttcttttctttcttagcagttattcacaattagttattacatatttattggcatgtttatttatttgatagtcttggctttagattccatgaggtgtaccctgtggtccactccgatttgttccccattatattcccagcacaaagctcagtatctgatacatcgtatgtagtcaataaaaatctgctgaatgaacaaatgaatggtcagatgagtgacggattgcaatagatcccattactaaatgtcttctaggtaacaagactgcagtaagcacatagatcatcaaatttaatatattcaacaacgataccaggcacatttattatcagttttacagaggaagaagtggagccctagaaaagataaataacttgttcagtgtcatataatgaatacatggctgaagctataccaggtaggtctaactccaaagtttgtgtagtgagtcactgcacaatattgcctcccattaatttggtacttaccatgtactcatcatttgacatacattatctcatttcattcacaaccctgtaaatgaggtattawtaactcattcaatagataagaaaatgg

SEQ ID NO: 950825 - DNA, 478 bp, Homo sapiens
gtccttccgaggaagctaaggctgcgttggggggaggccctcacttcatccggcgactagcaccgcgtccggcagckccagccctacactcgcccgcgccatggcctctgtctccgagctcgcctgcatctactcggccctcattctgcacgacgatgaggtgacagtcacggtgagtgcgggcgcgggccggcggccgggctgcctgtgggcggtgactttcggctctccatgcggttcccggctccaggccgttcgactgagcacttccggccggggccaggccgcgaacacaggccgcatagggcgggcgctcctcggggctggggcctctctccgggcaggtcctgggcccccgggaccacgtgcgggcccagcgggcatggagtgcgcttgaggctgggcgctccggctccaagagccttcgtgtagaaaagctcttccgcagtgcttgggcaccctgacccgtgcctcgtct

SEQ ID NO: 950826 - DNA, 559 bp, Homo sapiens
agcctgcatatcacgcagatccatctggacggcaggccccrgttttctcttcctttgtcaactgatcatagggcatttcccatgaggccataggtgcaggctggaagagagaaggcagagtagcaggagtagaaaccatgggcatttgtgtcacttcttcatataacttacttgtgtcttcaggatctgttcaggcctgatcacgtataaaccacttccatttgatgatggaatgctgctgtgcatgcccaactttatggcttggtggatcagataacattcagttcatgatacgcagctcaggtcatgtggtaaattggtggtccatggtcaagcattcagtttctactaaggcccagtcctactaaggccaagagctgcctcccaaaaggagggtatttatctgtggatgacggcaaggccttgctccaaaaggccctctaagggcatctgctgcagttcacctataggggcctgccaaagactccagatagcatccttatctgccactgacacatcaagcaccaatggatctgctgggtcatatgacccaagtggc

SEQ ID NO: 950827 - DNA, 559 bp, Homo sapiens
agcctgcatatcacgcagatccatctggacggcaggccccggttttctcttcctytgtcaactgatcatagggcatttcccatgaggccataggtgcaggctggaagagagaaggcagagtagcaggagtagaaaccatgggcatttgtgtcacttcttcatataacttacttgtgtcttcaggatctgttcaggcctgatcacgtataaaccacttccatttgatgatggaatgctgctgtgcatgcccaactttatggcttggtggatcagataacattcagttcatgatacgcagctcaggtcatgtggtaaattggtggtccatggtcaagcattcagtttctactaaggcccagtcctactaaggccaagagctgcctcccaaaaggagggtatttatctgtggatgacggcaaggccttgctccaaaaggccctctaagggcatctgctgcagttcacctataggggcctgccaaagactccagatagcatccttatctgccactgacacatcaagcaccaatggatctgctgggtcatatgacccaagtggc

SEQ ID NO: 950828 - DNA, 584 bp, Homo sapiens
caccacttggttaagcttgtgataatccactgtcttctggattcttcaggatccatctgtctttggcacaggccaaatacataagccgaatggggatgtggtaggaatctccacccctgtgtcttcaagtccttgatagcagcactaatctctgcaatcccttcagggatgggatattgtttttgatttattatgtttctaggtagagacagctctaatggctttcatttggccatttccaccataatagccctcccttcacaggttagggaagcaatgtggggattctcccagcctctaagtatgtctattcccttggacccaccatgagtcagacccgagctaaaactccactgatcagctcacctctatgagcctcgcctctgactagagggccacagtaacatttcgggcctcctggaatcaatgtcagcacagagccggtgtctagcagtccatgaaacctctgattacttccttttcctaaagcacagttaccctgggtcacagatccctttggcgaagcctgggagaaagagtaatastataaattttcagtagtgtccccctccctgagggaaccc

SEQ ID NO: 950829 - DNA, 590 bp, Homo sapiens
cacagactcacagcacttactgtgtgccagaacaagtcctgacccgtgtaaccctcacaacagccttctgaggtagcttctattatgatgcccattctactttgcaaaccaaaagyaaaatgcaaaggtcgcccttcagccatctaaatggactccctcctctcaaccaggacactccaaatttaacctgaaagactggttcagattgtggagggcagtgggaggtcggatgtgccttattataccctccttccttttggaattcaggaaaagccgcaaagcctttcacatcaacacagaccttaattctgttaagaaacatttacaatctattctctctaaggcctgctacctggaggcttcatctgcatgataaaatttggtctctacaaccccttatcacaacccagacattcctttctattgataatagttctttcaaccaattgccaatcagaagattttaaaatctacctacccacaacccaaacacctcccatgaggccccacctttcaacactgcagcattggagattaaatttcagcatgaactttgatggggacaaactagccatatgcaaaccatagca

SEQ ID NO: 950830 - DNA, 592 bp, Homo sapiens
aaactcctttagaaaataacacctctatgctgccattgagtaaggtrcttctgcaaaggtacctccttctacccccaaaacataatatcccaaccattctggataatgttatatttcaatgtcagtttatcttccagtccacattattataattcctttgaaatgatctgtaatccaaaggatacattgtaaaatcaatgacctaaaacacttaatataaaataataagaaaaaagagagggaggaggagccaagatggccgaataggaacagctccagtctacagctcccagcgtgagtgacgcagaagacgggtgatttctgcatttccatctgaggtaccgggttcatctcactagggagtgccagacagtgggcgcaggccagtgggtgcatgcaccgtgcgcgagccgaagcagggtgaggcattacctcacctgggaagctcaaggggtcagggagttccctttccaagtcaaagaaaggggtgacggacgcacctggaaaatcgggtcactcccacgcgaatattgcgcttttcagaccggcttaaaaaacggcgcaccacgagactatatcccacacctggctc

SEQ ID NO: 950831 - DNA, 609 bp, Homo sapiens
aattcattgggagttttttttattgttagtgcgttttgtgtcctatctaagagaattctgccttctctaaactcatgaaaatttctggatttttgtgtctagagtgttagggctctcacttttatacttaggtctatctatcatccattttcaattaattttttatatggagtgagacagagattgagattcatctttgtttaccatatccagttgttccagcaccacttcttaagatgaacttcctttccccactgaattgccttcgtatctttatcaaaaataatttggccatacatacatggttctttttctgaaatttccattttgttacactaacctgttccttatgccaataccacactgttttgattactatagctttatcattagttttgagatcaggtaatgtaaatcctccaattttgttctttttcagtcttgttttgtctaatgtagatcttttgtatttctgtaaaattttgtaactactatttccttcttaacatagcctgtaatygcagcactttgggagaccaaggcgggcagatcatgaggtcaggagatcgagaccatcctggctaacacagtgaaaccttgtctctacta

SEQ ID NO: 950832 - DNA, 559 bp, Homo sapiens
tcctgggctttatttgaatggtgggctatttattacttcctcaattttagaacttgttattggtctattcaggaattcaacttcttcctggttgagtmttgggagagtgtaagtgtccaggaatttatccatttcttcccgattttctagtttatatgccagaggtgtttatagtataatcttatggttttttgtatttctgaggggtcagtggtgatatgccctttatcattttttattgtgtctatttgattcttctctcttttattccttttagtctagctagcagtctatctattttattaattttttcaaaacactagcttctgaatttgttgattttttgaagggtttttcatgtctctatctcattcagttctgttctcatcgtgattatttcttgttttctgctagctttgggatttgtttactactggttctgtagttcttttagttgtgattttcggatgtcgatttgaaacctttctagctttgagatctttctagctttaagagtgctaaaaatttcccccataacactgcattagctgtatcccag

SEQ ID NO: 950833 - DNA, 582 bp, Homo sapiens
ggaaatcaagtgccacgaatacmctggaggcttcttctcccaaacactgtaggagaatgagtagggaaacaaagacccacaggcactactcttttattatcttttgccattatctaaatttcataatattctagtcttctccaaagttcagaaactcatttcagctttaccacgagagtcttttacaaactggacctgaccaaatataaccaccaattattatgtgtaaattgtgacagagagtagcaacaatatccttcaccctcactcatgcctggctctagagggtatctattccatttctgtaattttatgccaactctctgatccaaatgataattagatgtgacaattagtaaatgtgattacatttaaacaaagacaaagaacttcaaagatattgtaactttttatgacatttctataatatagcacgaacacttgaattgctcaacagcagcaaatctttatcttttgaaggtacgtgttcaatactttggaatttgggaagtgttcaatacttcttaagagtcaagcatagcaattacagtatgtgaataatttcagcaatttagtcaattg

SEQ ID NO: 950834 - DNA, 446 bp, Homo sapiens
tttcttaaaaaagttattaaaagaaaaataatttttgtttaattcaaaggttgtttataaaacaaggtaaaaggaagtagtaaataaggcagttgtaaagaaagttataaagaggtaattttggtaagttaaaaggaaaataattttttatgagaacaaattttgtacagtaaattattggcctgaaataaaatgactgtttatttaagaaagaggaataattaggctaaaagaggaagtttaagcatctcacaaatttttataagtcttaataaggtttgtaaaaagaaaatgtatggaaaagttttacgtgattaagttggctaaaattaaaaggaaattattaataatagtctttttagagattgggtttgatattaaaaataccctgatacccaaaataattgtytaaaaaaccaaaatttccttaaagtattcatttgttc

SEQ ID NO: 950835 - DNA, 612 bp, Homo sapiens
gggtgacccaaaaggctgccggttttgagtggggtcaggagaatggtttgcaacaggtccaggatgctgtgcaagctgctctgccacttgggccatatgacccagtagatccgatggtgcttgagatgtcrgtggcagagaggaatgctgtttggagcctttggcaggccaccataggtgaatcacagtggaggcctctaggattttagagcaaggctctgctatcttctgcagataactactctccttttggcctgctgctgagctttggtggaaactgaacatttgactatgggtcatcaagtcaccatgcgacctgaactgcctatcataaactgggtgctttctggcccatctagccataaagtgggttatgcacagcagcattccatcatcaaatggaagtggtacatacatgatcagtttcgagcaggtcctgaaggcacaagtaagttacatgtggaagtggctcaaatgctcctgccaccctgccttctcttctccagcctgcaccaatggccttatggggagttccctatgatcagttgacagaggaagagaagactagggcctggtttacagatggtttttcatgatatgcaggcactaccc

SEQ ID NO: 950836 - DNA, 605 bp, Homo sapiens
tcaggaaacttacggccatggcagaagaagaagcaaatacatccttcttcacaaggtagcagcagagagaagaatgagagttcagtgaagggggaagccccttataaaaccatcagatctcatgagaacttactgtcatgagaacagcatgggggaaaccatcccatgattcaattacctcccactgtgtccctcccacaacacatggagattatgagaactacacctcaagatgagatttgggtggggacatagccaaaccatatgtattagtccattttcatactgctataaagaaatacccaagactgggtgatttataaagaaaaagaggtttaatggactcaccattccacatggctgggcaggcctcacaatcatggcaaaagacaaaggaggagcacaggcacatcttacatggtggcaggcaagatggcacgtgcaggggaactgccctttataaaaccatcagaccttgtgaaactattcactatcatgagaacagcacgggaaaaacccacscccatgattcaattacctccgaccaggtcgctcccacgacatgtggggattatgggagctacaattcaagataagatttgggt

SEQ ID NO: 950837 - DNA, 569 bp, Homo sapiens
atttttttcttcaataatttatttgtaccatgaatttgtactcatggatatatattttatcctttgaacgtaatctaatacgaatttattttgtagttctagttgttccagctttgttaggagcttgttagttggcctctatgttcctttgacatatactccagtcaatgtaggtttttgttttattttattttatttagcatttctgtatttcctggctctataaaatacctccactcatcttctatattccctgtcctgtcacagaatcagccatttcaccaagaagttctggttccttttattggcaaatagtattagaaaacaagagctaggtgtgcttgttgctactggtgtgtcatcgcttcaagacccttttagctgacaaaatgtggaaatatatgtgtgtacactaacctgtgtgtatacacatatctacatatttttccatatgtgactattgtgtctatrttaagctaaacatgagttcatgctgacgtccccaactctaatctgttatcatgtggattgctctagactcttcctctcgcttatttgtaaactcctgt

SEQ ID NO: 950838 - DNA, 772 bp, Homo sapiens
aagcagggcaaggcattgccttacccgagaagcgcaaggggtcagggaattccctttcctagtcaaagaaaggggtgacagacggcacctggaaaattgggtcactcccaccctaatactgcgctttcccaacgggcttaaaaaatggcacacaaggagattatatcccgcacctgactcagagggtcctacacccacggagtctcgctcattgctagcacagcagtctgagatcaaactgcaaggtggcagcgaggctgggggaggggtgcccaacattgcccaggcttgattaggtaaacaaagcagccaggaagctcgaactgggtggaggccaccatagctcaaggaggcctgcctgcctctggaggctccacctctgggggcatggcacagacaaacaaaatgacagcagtaacctctgcagacttaaatgtccctgtctgacagctttgaagagagtagtggttctcccagcatgcagattgagatctgagaacaggcagaccgcctcctcaagtgggtccctgacccccgagtagcctaactgggaggcaccccccagtaggggcggactgacacctcacacggccgggtactcccctgagacaaaacttccagaggaacgatcaggcagcagcattggcagttcaccaatatccgctgttctgcagccaccgctgctgacacccacgcaaacagggtctggagtggacttctaccaaacyccaacagtttggtagaactgggtctggagtggactctaccaaac

SEQ ID NO: 950839 - DNA, 568 bp, Homo sapiens
gaggcaggagaatggcgtgaacctggggggcagagcttgattgcrccactgcactccagcctgggcaacagagcgagactccatctcaaaaaaaaaaaaaaaaatgggcaggccaggtgcagtagcccacacacgtaatcccagcactttgggaggctgaagtggatggattgcttgaggccaagagtttgagaccagcctggctaacatagcaaaaccccatttttattaaaaaaaaaaaaaaagaatgaaagaaaaaatgggtaaagggagggggaggcagagcaagatagctgaaaaaactctcctgcaataccttatctccccaacccctgcactggaatacccagtggaacaacgatatatgcaaaaatcaccttcataagaacaaaaaatcaagttaatgatcacaataattggttttaacatcacagcaaggaaagaggcaccgaagagtataggaaaggcagtcttgaattggcaacaccacccgtcccccattttctggcagtggctgcatggcattaagagagaatctgtgcacttaggggagggagagcccagcgat

SEQ ID NO: 950840 - DNA, 630 bp, Homo sapiens
gctcttcttgaggagtatctttgtggcattgtctttatttcctgaatttgaatgttgkcctgccttgctaggctggggcagttctcctggataatatcctgcagagtgttttccaccagttgattgaatcagctactgaagcttgtgcattctttgcgtagttctcgttccatggttttcagctccatcaggtcatttaaggacttctctacactggttattctagttagccattcatctaatcttttttcaaggtttttagcttctttgagatgggtttgaacttctgcctttagctcagagaagtttgatcatctgaagccttcttctctcaagttgtcaaagtcattctccatccagctttgttccattgctggcgaggagctgccttcctttggagggggagaggtgttctgatttttagaatttcagctttttttggtgtagatgtcctttctgtttgtcagtcttccttttaacagtcaggaccctcagctgcaggtctgttggattttgctagatgtccactccagaccctgtttacctgggtatcagcagtggaggctgcataacagcgaatattgctgaacagcaaatgttgctgcctgatcgttcctctggaggggcacc

SEQ ID NO: 950841 - DNA, 630 bp, Homo sapiens
gctcttcttgaggagtatctttgtggcattgtctttatttcctgaatttgaatgttgtcctgccttgctaggctggggcagttctcctggataatatcctgcagagtgttttccaccagttgattgaatcagctactgaagcttgtgcattctttgcgtagttctcgttccatggttttcagctccatcaggtcatttaaggacttctctacactggttattctagttagccattcatctaatcttttttcaaggtttttagcttctttgagatgggtttgaacttctgcctttagctcagagaagtttgatcatctgaagccttcttctctcaagttgtcaaagtcattctccatccagctttgttccattgctggcgaggagctgccttcctttggagggggagaggtgttctgatttttagaatttcagctttttttggtgtagatgtcctttctgtttgtcagtcttccttttaacagtcaggaccctcagctgcaggtctgttggattttgctrgatgtccactccagaccctgtttacctgggtatcagcagtggaggctgcataacagcgaatattgctgaacagcaaatgttgctgcctgatcgttcctctggaggggcacc

SEQ ID NO: 950842 - DNA, 625 bp, Homo sapiens
gcagctgtgtactgctgaccccaaatctcactctgtgcatgaccatacacgtctaccgtgtgtgtgtgtgtgtgtgtgtgtgtgtgtgtrtgtgtgtgatgtttaaaatggtcttgtaactgtaattttgttacgtaggtagtaggtgaacacatttttctttctttttttttttttcctgaggcggagtctcgctctgttgcccaggcgggggtgcagtggcaccatctcggctcactgcaagctccgcctcccgggttcacgccattctcctgcctcagcctcctgagtagctgggactacaggtgcccgccaccacactcggctaattttttgtatttttagtagagacggggtttcactactggtgttagccaggatggtctcgatctcctgacctcgtgatccgcccgcctcggcctcccaaagtgctgggattacaggcttgagccactgcacccggcaaacacatttttcttataaaaaattcaaatgaggataaataacctggacgccgcatcacttccaccattcccccctcaagtgtgacttatattgttccagatctttcttcatctctctctttctttctttcaggcaggggtcgcccagactgcagcatagt

SEQ ID NO: 950843 - DNA, 492 bp, Homo sapiens
ggcctttaaatatacctataacttgaatatccatttttaattaacctaaatactctttaagaaaatttctttaagtcccttgttaaatgactttagccatgccaagcagttaagattttcagctttgaattttacaaaaagtaacctcacaagtgaaatgcacaagccaaaattaggtcatgactaaaccacgagtgtgcaaggtattttcaaaggggcaataggcagcttgagaaagactgcaaaattgtgactgagatagtgaaagggatacgacccaatcaactccattttgtttccagcccctaagctgtccttgcccttccctgggcataggcaaaaccaactttgggagaagactgatctacagtttattgtctaaaacaaatatgataatagctcttcttaagaatattttcctcttgcctgggaaccagaccaagaatctrgccacaagtttagaaaaagaaaccatggcctaggaatcacaca

SEQ ID NO: 950844 - DNA, 638 bp, Homo sapiens
agaaaattgagggccagagtacaaggcccaggcagtgtgtacaccttggagaaaacaccttttgcattctgatgctttgcatacaatttcattatttatgtaatcctatcaaaacatatacaatgcccaaatggatgtcaggaaagttattgacattactaataatggtgcttttcatttatagagagtgcctttttctgagacagtgaactatttttacattgggcatgaggctttttaggagaattaatgcttaaaatatcccttcagtgtagcatgtgggaaatgttatagatggagaagaaaacagattaatataaaaaatgtcaagagtgcataataaaaggcatcccattcagttccctggcccattaccaccagcccacacagaccacgtgggcacagccacagccgtgagccatagcctgtgcttcctgacataactactttccccaggaatgaatcaggagtcccctgcgtgaccccttggctgggccagtcagtgccacccagttccaacatccctgtgacatggtctagccagccagctatgcctgtttgatggtgcgacagacagtcctaactcccatgatgctgagaatccagtatcataaakaagtcagccacaaaagaacaca

SEQ ID NO: 950845 - DNA, 604 bp, Homo sapiens
tcaacgggcagcactcccaggagaaattcaccaggtgggccttccagcaacccagggaggggaatctgggccaaagcccacactgaggktgtgactgtcacagcactggaggggaacagagctgtcctgtctgtggggctccaggggccaccatgcccaccccaacaggacaggacttccaggcagctctcctgtcttctcttggccagaggggagcactctcactttataaacctgtgtggtcatttgcagactgaatcacttccggtggatcgtgccagccaatggcgaggtaacgttgcaggtgcacttctcttctgatgagttcgggaactttgaccaaacctttaactttgagatcctaggaacttgctgccagtaccagctctactgccgaggcatctgcacttacccatacatttgccaagacccaaagtaagtgtgtttcattttaaaagaaaaggttgacagatgtgttttcattttcctccatggcactttgaacaaggtggctcttaccataacgtggagctggggcagcaccccagcccctcttgtcatatcagcttccatgtcttgaatattgaccaagagccacagggag

SEQ ID NO: 950846 - DNA, 426 bp, Homo sapiens
ttcactacctagtttgttgagggtttttaacacgaaagaagttgaattttattgaaagtcctttctgcatctacttagatgttcatgtggtttttgttttaagttctgtttatgtggtgaatcamatttattgattttcatatgttgaaccaaccttgcatcccagggataaagcctacaagattgcaggaattaactttttgatgtgctgctggattcagtttgctagtatttaattaaggatttttgcatgtatattcatcagggatattagcctgtttgttgttgttgttgttcctctgcaggtctgggtatcaggatgatgctgtcctcacagaatgagttagggaggagtccttcttcctccatttttgtaatagtttcaggagaaatgatatcagcaattctttatatacctcatagaat

SEQ ID NO: 950847 - DNA, 465 bp, Homo sapiens
  misc_feature 56: n = A,T,C or G
tctgtctggtcctgggcttttctggttggtaggcttttttattactggtttaattntgggagtcattattggtctgtcagtgatacaatttctttctggttcaatcttcagaggttgtatgtttccaaaaatttatccatttcttctaggttttctagtttgtatgcatagaagtgttcacagtagtctctgagggttttttaaatttttgagggggtggtgggaatgtcccctttttcatttctaattgtgtttatttggatcatctctttttttctttgttagtctagctagtggtctatcaatcttacttatcctttcaagaaacaaattattggayttgttgaacttttgtagagttttcacatctcaatttccttcagttcagctctggttttggttatctattgcttcctgttagctttgggattggtttgctcctgttttttctaatttctccatgtg

SEQ ID NO: 950848 - DNA, 478 bp, Homo sapiens
ggcaaagatggtggcctgctcctccctctgggagctctgtcccagggaagtatgggcctgttgccagcctgaatgcacttgtaaraggtggctggagaccccattcgggaggtgtcaccagtaaggaagaatgttattggtgacctgctttaaaaagcagtttggggccgggtgcagtggctcacatctgtaatcccagcacattgggagaccaaggagggcagatcacgaggtcaggagttcgaggccagcctggccaacatggtgaaaccccatctctactaacaatacaaaaattaactgggcgtggtggtggtgcacacctgtagtcctagctactcaggcggctgaggcaggagaattgcttgaacctggggggcggagcttgtagtgagctgagatcgtgccactgcactccagcctgggcaacagagcgactgtctcaaaaaaaaaaaaaaaagcagtttggccacattct

SEQ ID NO: 950849 - DNA, 825 bp, Homo sapiens
gctttgtgctgggagtccgtatcagtctctggtgcctgcagactctcccaagcctggagacagcaagggcaagggctgcaagacagtgaagatggcaacccacgcctcccatcctggagttgtgtccaggaagttgcagagctgctactggattgttagtttcggcagggggtggctggaggcccaggcctggaggaccttcttggtgagaagatatgggaatgggcttccacttaacagtctggccacttctccgtagggctgctgtggcatgctgggggtctgctccagtctctagttaccttggattttccagtacctgagatatcaacagtaaaggctgtgaagtggcaaagatggtggcctgctcctccctctgggagctctgtcccagggaagtatgggcctgttgccagcctgaatgcacttgtaagaggtggctggagaccccattcgggaggtgtcaccagtaaggaagaatgttattggtgacctgctttaaaaagcagtttggggccgggtgcagtggctcacatctgtaatcccagcacattgggagaccaaggagggcagatcacgaggtcaggagttcgaggccagcctggccaacatggtgaaaccccatctctactaacaatacaaaaattaactgggcgtggtggtggtgcacacctgtagtcctagctactcaggcggctgaggcaggagaattgcttgaacctggggggcggagsttgtagtgagctgagatcgtgccactgcactccagcctgggcaacagagcgactgtctcaaaaaaaaaaaaaaaagcagtttggccacatt

SEQ ID NO: 950850 - DNA, 731 bp, Homo sapiens
gagcatgagccgaagcagggcgaagcatcgccttacctgggaagtgcaaggggtcagggaattccctttcctagccaagcaaagctgtgacagatggcacccagaaaatcgggtcactcccaacctaatactgtgcttttccaatggtcttagcaaacggcacgccaggagattatatcctgtgcctggctcagagggtcccacacccatggagccttgctcattgctagcatagcagtctgagatcaaactgcaaggcagcagcgaggtggggggaggggcgccccccattgctgaggcttcagtaggtaaacaaagcagccaggaagcttgaactgggtggagcccaccacagctcaaatgggcctgcctgcctctgtagactccacctctgcagggcatagctgaacagaaggcagcagaaacctctgcagacttaaatgtccctctctgacagctttgaaaagagtagtggtactcctagcatggagtctgagatctgagaacggacagactgcctcctcaagtgggtccctgacccccgagtagcctaactgggaggcaccctccagtaggggcagactgacacctcacatggcagggtacccctctgagacgaaacctccagaggaacgatcaggcagcaacatttgctgttcagcaatattcaytgttctgcagtctctgctgctgatacccaggcaaacagggtctggagtggccctccagca

SEQ ID NO: 950851 - DNA, 570 bp, Homo sapiens
ccgcaaaaagcccctttactgtggtctttattagagcacagctatcaactaagttgactaagttacatatgaagggtttagcccagtgcctgccaaataataagcattcagtacatatcagctattgtgattctaccgttattctgataaagaagctttttagtgattggaattagagaaaacaggattaatttctccttttggtgcagtgacaggagagtcttggcaaatgttatcttttggggtcagctctagctcttgggctggagggtgaggaatcagttaaagaaaagggtccctggcggggtgtggtggctcacgcctgtaatcccaacactttgggaggccgaggcgggcggatcacctgaggtcgggagttcgagaccagcctgaccaacacggagaaactctgtctctactaaaaatacaaaattagccagscgtggtggcacatgcctgtaattccagctatttgggaggctgaggcaggagaattgcttgaacccaggaggcggaggttgcggtgaggtgagattgtgccattgcactccagcctaggcaacaagagtg

SEQ ID NO: 950852 - DNA, 812 bp, Homo sapiens
gttctgaaatgggaggattttccagcagcttgtccttgtatatcttagtgtagggtgacatactgctggcttggttttgtagatctgcagttcatgttttgtttttcagagaaacactcatctttatggctcaccatttaatttccctgctgtcaagaggcagaattaagttattcctctttttaaaagaatgatataagtagggaataatgaatgcaaaatgctgtagttaaacatcagcagataggctgatggataggctgtcacttagatgatgctataaatggaaagaaagtgatatttaatcatttgcaaaaaataaaaacagtgatgatggatttggtgtactttgagtgactcactacggcaaattgttatgttccagttaataaagaaaataaaaagggcaaagcagagaaagtctttgctttccagagcaggccaggtctcctgtgctgtttaaacacataaatagttgctgattcactgttatgggccaaattgtgtcttcctaaaattcctaagctgaagtcctaacaccaagtacctcggcatgggactatatttgcaaacagggcctataatcaggtaattgaggtaaaactagtataggattagtctacttataagaagaggagagtagggtgcagactcacacagacagagggacagtcaggcaatgacatagggagaagacagcatctgcaagctgcagaacaatcaatcccgctgacacctcaattttggaactgtagcctcaaaaactggaaaaaacaactttccgttgtatmagccagttggtctgtggaact

SEQ ID NO: 950853 - DNA, 677 bp, Homo sapiens
aaaggacatgatttcatcctttgttatggctgtgtaatattccaaggtgtatacgtagcacactgtctttatctaatctgctgttsttgggcaccaaggttgtttccacacctttgctattgtgaatagtgcggcaataaatgtacaagtgcaggtctctttatggtagaatactttattttcctttgtgtatgcatccagcagtgggattgctgggtcaaatgatggttctatttttagttatttaagaaatctccaaagtgctttccacaggggctaaattaatttatatttccaccaacagtgtaaaagcattcccttttctctgcagccttgccagcatctgttatttttttactttttagtaatagctattctgactggtacgaggtgacatctcattgtggtttaatttgcatttctctgatgattagtgatgctgagcatttcaaaaacatttttctagaaaggctatacagttttctaggttatggctaagtcgggatagatttcatcaaagccatgttgtcagatatttaagaagggtacttgcttccctgcatgcttgtttgtgtttagcggaaggcagagtccgcctctgctatgggcagacctgttttattctctacccctgaaccacacccatgcccagatgtcatttttcatgaatggacagg

SEQ ID NO: 950854 - DNA, 590 bp, Homo sapiens
tttgcttaagtaatgaggagccaaatgttaatccccaagacaatggggaaaatatctccagggcatgtcagaggtcttcaaggcattccctcccatcacaggtcaggaggcctaggaggaaaaagtagtttcatgggctgggaccagggtgtctgtgctgtgtgcagcttagggacttggtgtcctgcatcccagtcactccagccatggctgaaaggggccaacatagagcttgggccatgctttcagagggtgcaagtctcaagcctggcagctttcatgtgaggttgggcctgcaggtgcacagaagtcaataattgaggtttgggaacctctacctagatttcagaggatgtatggaaatgcctggatacagagacacaagtgtgctgcaggagtggggccctcatggagaacctctgttagggcagtgcagaagggaaatgtggggtcagagcccccacacagaggccctactgaggcaccacctattggagctgtgagaagagcaccrtcatcctccagaccccagaatggtagatccaccaacagcttgcaccatggaaaagcacatggaaaagatgcacact

SEQ ID NO: 950855 - DNA, 713 bp, Homo sapiens
tgaacaacttcctacaagtgttgatatgtcatattctcattatcatttagttcaaaattaccatgatttaattaccatgaggttgcttttttgatacatgagttacttagaaattgaattaggctaggcatggtggctcccacctataatcctagcactttggaaggccaaggcaggaggattgcttgagtttgaggccagtctaggcaatatagtgagacctcatctccacaaaaaagtacaaaaaaactagccaggcatggtgacacatgcctatagttccagctactcaagaggctgaggtgggaggattgcttgagcctgggaggcagaggttgcagtgagtggagatcacaccagtgcacttcatcctggatgacatagcgagaccctgtctcaaaaaaagaaaaaaagaaattgaactatattgcttgatttccaaatgtttttgaggattttctaattttcttttggctattgatatgttgcttaattcaactctggacaaaaacagtctataacttcaattctttaaagttttttgagattgactttatggcccaggaaatggtcacttttggtaaatattctatgtgcacttgaaaaaatttatagtaytttatgattgctgagtacagagctccatacgtctcaatgagacaagtttcttaattatgttgctcagatcttctatacccctattgatttttttg

SEQ ID NO: 950856 - DNA, 693 bp, Homo sapiens
ctacaagtgttgatatgtcatattctcattatcatttagttcaaaattaccatgatttaattaccatgaggttgcttttttgatacatgagttacttagaaattgaattaggctaggcatggtggctcccacctataatcctagcactttggaaggccaaggcaggaggattgcttgagtttgaggccagtctaggcaatatagtgagacctcatctccacaaaaaagtacaaaaaaactagccaggcatggtgacacatgcctatagttccagctactcaagaggctgaggtgggaggattgcttgagcctgggaggcagaggttgcagtgagtggagatcacaccagtgcacttcatcctggatgacatagcgagaccctgtctcaaaaaaagaaaaaaagaaattgaactatattgcttgatttccaaatgtttttgaggattttctaattttcttttggctattgatatgttgcttaattcaactctggacaaaaacagtctataacttcaattctttaaagttttttgagattgactttatggcccaggaaatggtcacttttggtaaatattctatgtgcacttgaaaaaatttatagtattttatgattgctgagtacagagctccatacgtctcaatgagacaagtttsttaattatgttgctcagatcttctatacccctattg

SEQ ID NO: 950857 - DNA, 549 bp, Homo sapiens
cccccgcttttgaggcccctcacatcgttgaacagaaagaaaccatccttgcttgtagttgtgccctaaatgaactactgactttcagaatccatgtggaggataaaataattgattttttargctactaagttttgggataggttattaatgattcaatagaatgtggaatatgtctgttactatcctttgactcaatatattctgcatactttctttgtttctattgccaaagataccagttacttcttcagcctttccctagttggcattaaatagactaattgaagtttgattattagtgattatatttttcatctttaaatgctttatttagtgattttccaaatcttccttgccagttctgatagtatattgctgcttaatatgtgattccttcttttgtttagatatttcatacacagcattttccgttataattttagtatctgaagcctttgaggttttatttatattggattgtttctactgactaccaaccattggtgacttgttttcttttgccattggtggtatgtttttcctcat

SEQ ID NO: 950858 - DNA, 549 bp, Homo sapiens
cccccgcttttgaggcccctcacatcgttgaacagaaagaaaccatccttgcttgtagttgtgccctaaatgaactactgactttcagaatccatgtggaggataaaataattgattttttaggctactaagttttgggataggttattaatgattcaatagaatgtggaatatgtctgttactatcctttgactcaatatattctgcatactttctttgtttctattgccaaagataccagttacttcttcagcctttccctagttggcattaaatagactaattgaagtttgattattagtgattatatttttcatctttaaatgctttatttagtgattttccaaatcttccttgccagttctgatagtatattgctgcttaatatgtgattccttcttttgtttagatatttcatacacagcattttccgttataattttagtatctgaagcctttgargttttatttatattggattgtttctactgactaccaaccattggtgacttgttttcttttgccattggtggtatgtttttcctcat

SEQ ID NO: 950859 - DNA, 718 bp, Homo sapiens
aatataaagcaggcagaaaaatgtgaaaatactaggctggcctagcctctcaagctacatctatttcccrtgctgcatgttttctgtcctcaaacatcagactccaagttcttcaatttggggtcttggatgggctctccttgctcctcagcttgcagatggtctattttgggaccttgtgattgtgtgagttaatatttctatccctctagagaacgctgactaatacagattttggtaccagtagttgttctagaggaagagaatattaaggatagagttctttcattgttttgggggtttctggaggtggctgcttcatatgattagaccccaaaatgctaacaactctacttctaatagtatggagaacactgataatccttggcatgaaccgtttagagatttatgcaaaataaatgcatttgacactcccaattcaccgctcatgagaggcaaggagtttaggtgctctttacctaatacctttcaccatatgtggagaaccacagaacataatgaaactagttcgtggctcctaagtttactgaacaaagtgatgaaaaaaaatgatgaactcagggcttctatctcccagcttcagaagaagatactgagcctcaaatctgctaagattgccctgagtgagaaatctcatctcctgtagagaatagctgagattgtggaaaagcagaaacaaggtcttatcatgaaagtg

SEQ ID NO: 950860 - DNA, 772 bp, Homo sapiens
taatagtatggagaacactgataatccttggcatgaaccgtttagagatttatgcaaaataaatgcatttgacactcccaattcaccgctcatgagaggcaaggagtttaggtgctctttacctaatacctttcaccatatgtggagaaccacagaacataatgaaactagttcgtggctcctaagtttactgaacaaagtgatgaaaaaaaatgatgaactcagggcttctatctcccagcttcagaagaagatactgagcctcaaatctgctaagattgccctgagtgagaaatctcatctcctgtagagaatagctgagattgtggaaaagcagaaacaaggtcttatcatgaaagtggctgacctgcaacaaaaggttcatgctcggccttgccaggtgtctgctgtccaagtgagggcattgattggaaaagaatgggaacctgcaacttggaatggggatgtgtgggaggacgcttaagaagctgaaaacactgggtttgtaaactctgataaaccttgtttgccagaagaaatagcttccccatccccagtagtgacaacatcccctctctgacccatgctgccatcaggctttccacccttgtctgagaagataaaccttgcaccgcctgaggcaacagtaatgcctgaggcagttaccaggcaagataatgttgattctcctcaggacccatccctaacaccactttttkcttctagaccaataactagactgaagtcctagtgggcccctggatgtgacatt

SEQ ID NO: 950861 - DNA, 658 bp, Homo sapiens
tggcctcacccccaggcttgctttggtatcagcagccccaagtcaaacaccaaagatgttaaactttaaaaaaagaaaaagcacgtgttaaaaaaaaaaaaaaagaaacaaaagctgacatttatggtttcagggtttttatttccaacagaggtggatttctgccacggcccagcaacccccagagagctcagcatgccacacctccaaatcaccagcctctgcaaagacaggttcataaggcaatgaggaaaataaatgtccttccattggctttgccctttttggtgtattttggccaatctcttcatgctttcatttcaaggtactaacctgccaagacccataagccagggggtataatagtcactcttgtttcccagcgtgggacgaagccatcacatggacaaactagaaagctgtatttacagccccactgacttcctgggagagagttgtgaattcaatgtcacagtctcatttctaatcttgtttccaatttttcttgacatgtttatattctcatttcctgatgtgtgccaaacagcttcagagacccttcccgctctgggcccagtyttcatggtgtttgtcatggtgaactttaattatttgcttgaccccattaatgtttcttcactagaccgtctgctcccag

SEQ ID NO: 950862 - DNA, 563 bp, Homo sapiens
gagaaaatagtagtcttcaacaagtggtactggaaaaatggtatatctctctgcaaaaagtaaactctaaatattgcttcacacaatatacaacaattacctgatagggatgacagacctaaggttaagagcaaaaatttaaaaacctctggaagaaaacatataagaaatatttccaaaactttgaattaggaaagattttttagctagaatatgaaaagcacataccagaaaatttgataaattggaccacattcaaatgaaaagcattttctcttcgaagacaccattaagaaaatggataagcaagccatacactgtgtgggaatatttgcaaaatatttgacatacatacacacacacacagagatacacatatttaccatatatatatgtggtcttgtgtccagcatatataaagtcttacaacttaagaaaacaatctaatttttaaaaatggactagcaatttagayataactgcatagtgagatacctccacacacactgcagactgactaaaattagaaaggctgacaataccaagtgttggcaaggatatgg

SEQ ID NO: 950863 - DNA, 703 bp, Homo sapiens
cctgggccatgggggcaggtggtcaggtgcacttgggaaatagtcacacttgtcgtgatttccacccctctccacccctctgctaacggccctggggggtggatgagccacaggttttgggagtacttcactgcttgccagagtgtgtagccagcatgtcccccgcccctcccactgtcctctgcccagcactgcccttggcatgcaacactcagcccttgctgaactccagtgggctgagtgggttcccggagatccatttaggacaactgacatgcacctctttatcagaggtgcccagcacttctcatgcccactgtccccaaaatgggacattgcaccggaggcttgtgggattcaggtggctgataggtgaatggttctcttttcttcatacttatatatatttattccttcatctgttaggaacatgttacttcttatgtttattttattgtctattagaaaaattgggcctggcataatggctcacatctgtaatcccagtgcttccaggggccaaggcaggagaattgcttgaggccaggagttcaagaccagcctagacaacatggtaaaaccctgtctctacaaaaaattaaaaaattaggtaggygtggtagtgcacatctgtagtcccagctactcaggaggctatggtgggaggatggtttgagcccaggagctcgaagctgcacttagc

SEQ ID NO: 950864 - DNA, 485 bp, Homo sapiens
ttgaaaccttcgttggaaacgaaaataacttcacataaaaactagacaaacattctgagaaacttcttwgtgatgtgtgctcaacgcactgaattgaaccttcctttagatagatcagtgttgaaacactctttttctatagtatgcaggtgcatatttggggcactttgaggcctatggttgaaactaaaatatcttcacataaaatctagaaagaagcattctcagaaactactttgtcatgtgggcattcaattcaaacagttgaactttccttttgatagatcagtttttaaacactctttttgtaggatatgcaggtggatatttggggcactttgaggcctacggttgaaacgaaaatatcttcacataaaatctagacacaagcattctcagaaactagtttgttatgtgggcattcaactcaaagggttgaaccttccttttgatagatcggttttgaaacactctttttggagaat

SEQ ID NO: 950865 - DNA, 641 bp, Homo sapiens
aacgggaatatcttcacataaaaattagacagaagcattctcagaaagttctttgtgatgcatgcattcatgtcacagagttgaaccttacttttgatagagcagttttgamacactctttttgtagaatctccaagtggatatttggaccgctttgaggcctatggttgaaaggggaatatcttcacataaaaaccagaaaaaagcattctcagaaacttctttgtgatgattgcattcaattcagattgtttaacatgccttttcatagagtggtttttaaacactctttttgtagaatctgccaaaggatattaggactgctttgaggccttcattggaaatcaggatatcttcacataaaaactagacagacgcattctcagaaactactttgtgatgtgtgcattcaactcacagagttgaacgttgcttttgatagagcagttttgaaacactctttttgtagaatctgcatgtggatatttggtgcattttgaggcctacggatgaaacgggaatatcttcacataaaatctagacagaagcattctcagaaacttctttgtgatgataaaattcaactaacagagttgaacatacctttccagagagcagtttttaaacactctttttgtagg

SEQ ID NO: 950866 - DNA, 775 bp, Homo sapiens
tgctgcatgtgaggctgcagctggatcaggcgtatcatatcgcaagcgcttctactgcaggcactgggcaacgtggtggcaccsagaagcttggagacaacaggaactgcagagccccaaagagggtgtcacagacctggctcggggagctcctaggtctgggctccctaaagggtagcagttctctcctagtcacctgcaacatggtgagtggggtggggggcgtgtttcagccctgtttgtgttacagctctttcagtcccgccattcagcgggtccgagttcttgtcgcaagtccaggaagaatgaggtatatggaaaactggagggtgagcaaggcagagaggagcttcattgagtgacagaacagctctcaggagacctgaagtgggtagttcctttctgcaggcacgtggtcctgaggagtgtccagctctcaggggagaggagacccggagtgagaagctcttatccgcaggcaggtcatcctgacatctctctgcgagtctagctgagtctgggacttctacgggttttgaagggaggaagtgtgtgctgattggtccatgggtggccatcggcggggctggaaaaaacaccaaaagttctcactcccgcggtggactccactgggaaccgacaggccccaggcctcaggtcgtccctgtcttcaaagtggggcttcaccgggaccgcccctttccacccgggaacctatctgcctcctgctgccattgacaggtttgtccaccgcaatgccctggctatccgtgcc

SEQ ID NO: 950867 - DNA, 743 bp, Homo sapiens
aaactggagggtgagcaaggcagagaggagcttcattgagtgacagaacagctctcaggagacctgaagtgggtagttcctttctgcaggcacgtggtcctgaggagtgtccagctctcaggggagaggagacccggagtgagaagctcttatccgcaggcaggtcatcctgacatctctctgcgagtctagctgagtctgggacttctacgggttttgaagggaggaagtgtgtgctgattggtccatgggtggccatcggcggggctggaaaaaacaccaaaagttctcactcccgcggtggactccactgggaaccgacaggccccaggcctcaggtcgtccctgtcttcaaagtggggcttcaccgggaccgcccctttccacccgggaacctatctgcctcctgctgccattgacaggtttgtccaccgcaatgccctggctatccgtgccatgggggacctgcaggcccctttcagccttcctccccgtgctcgttggcacccaaagtctggagggggcagaggcggcagggggctggcatggcagggctgccccgagtgtacgcacacccggccgggttgcaaagcgcccggacttgaccaaaactttgctcagtcccggagcagacactgggagtckggagaagccacgcatctggagcaggcacttctgagcctgcagaggaaaggggacttcccggggcccccgagagcacagggatgcccggtttgggagcc

SEQ ID NO: 950868 - DNA, 633 bp, Homo sapiens
ataataaaattatggcagtaattaagaagttctttgaacctaataagaacaaagatatatcagaatctctgggacacagctaaggtagtgttaagaatgaaatttatagcactaaatgcccacatcagtaagttagaaaaatctcaagttaaacctaacatcacaactaaaagaaatagagagccaagagcaaacaaatctcaaagctaccagaagacaagaaatgaccaaaatcagagctgaactgaaggagatcgagatacgaaaaactattcaaaagatcaacaaacccagaagctgtttttttaaaaaaaaatactaaaatatatagactaccagctagacaataaagaagaaaagagagatgatccaaacaaatgcaatccaaaatgacaaaggggatactgccactgaccccagagaaataaaaacaaacatcagataatattatgaacatctctctgcacatgacctagaaaatctaggagaaatggataaaatcctggacacacataacctcccaagtctgagccaggaagaaatataatccctaaacagaccaataaccagctctgaaatggactcagaaaggaatagcctaccaaccaaaaartgcccaagaccggacaaatt

SEQ ID NO: 950869 - DNA, 575 bp, Homo sapiens
aacagtgattacttgataggtacgaagtttcctttggcggtgatggcagggttctggaactagatagcagtgatggtggcataacactgtggatgtagtcaatgcgcctgaattgttcacttaaaaatggtaaaaacgggccgggcgcggcggctcacgcctgtaatcccagcactttgggaggccgaggcaggcggatcatgaggtcaggagttcgagaccagtctggccaacatggtgaaaccccgtctctactaaaaatacaaaaattagttggctctggtggcgcatgcctgtattgctagctactcaggaggctgaggcagaagaatcgcttgaacccgggaggcgaaggttgcagtgagctgagattgcgccactgcactccagcctgggcgacagaatgagactccgtttcaaaaagaaaaaaaaaaaaaaaaaagatgaaaacaggctgggtgcagtggctcayaccttttaatctcaactctttgcgaggccaaggtgggaggattgcttgagcctaggagttgaagaccagagtgggcaacacagatccagtctctaccaaaaaa

SEQ ID NO: 950870 - DNA, 651 bp, Homo sapiens
gagacatcagaggggtagggcttggggaggacaggaaagggacgtcccagctccatgggagggctgctgcctggtagcttcagaggatgcctccgcccgaatgtggtcccgatgttgacagatacttccttttccaagagaaactgtgaaactggatttttattggaaatctttttatttgacatagtaaaatctaactgaacgacaatgaggtaccacatcacacgcactaggatagctataataaaatagaatggaaaatacgaaattttgatgaggaagtggagcagttggaacccttgtacattgctggtaggaaagtaaggtgacccactcactgtggaaaagtttggaggttcctcaggaagttaaacatagccttatcatataacccagcaattccactcctaggtatatgcccaaaagaattgaaagcaggtactctacatgaagacaagtacatctacatgcatgttcctagcagcgcagttcatgatcaccaggaggtggaaacaacccaaatgtctgtcatcatgtatgctrcaatgtaactgaatcttgaaaaggttatgccaagtgaatgaagccagacactaaaagtcatacattgtatgattccatttatatgaaatgtccagaataggcaaatcc

SEQ ID NO: 950871 - DNA, 528 bp, Homo sapiens
ggttgccaggagttggagggatgagggtatgggagtgaataagtgctgggtaatgggtttccttttggagtagtgaaagtgttttggaaccagatagaggcgatggttacacaagattgtgaatattctaaatgccactgaattgttcactttaaaatgctgaatttttgccaggcacagtggctcatgcctgttatcccagaactttgggaggccgaggcagaaggatcacttgaggtcaggagtttgagaccagcctggccaacatggtgaaaccccatctctactaaaaatacaaaaattagccaggcatggtggtacatgcctgtaatcccagctactcaggaggctgaggcaggaaaatctcttgaacccaggaggtggaggttgcagtgagccaagatcgcgtcactacactccagcctgggtgacagagtgaaagttggtyttaaaaaaaaaaaaaaagaaaaacaaaacaaaaacaaacaaacaatgcttaatttttgccaggtgcagtggcttatgcct

SEQ ID NO: 950872 - DNA, 594 bp, Homo sapiens
gagtttcgccgtgttggtgaggctggtctccaactcctgacctcaggtgatctgcccgcctgggcttcccaaagtgctgggattacaggcatgagccactgtgcccagccakaatttgcttttttaaattccatgaaatagtctatgtggtaaatattccttggttgcttatttagagcctttctccatggagctgcaactcctgcacttctttggcttctaacttctagttaggtgtggctaatgtgagacactaccaggagactggtgagagagtatggtaagggaattaattcctctggtccctctctgcctcttagcaggtgtagaagtgaatgcatacaatgatggccaccgctcctctatttcaaggttccagttctatttggatttctataatactgtttcttccctttcccccagcaggcctgagaggttgtggtggttgtagtaggggtggtagagataactactttcttcttttcaccctcaccatatttctgtcttagtccttttggatgtgatatctttcttccagggcttctgacatacactctgttgagattggaaggcattaggtttataattcaattt

SEQ ID NO: 950873 - DNA, 526 bp, Homo sapiens
ctgccaaggcctagacctcctcactgctgagaaagaaggactctgcaccttcttaggagaagagtgttgtttttacactaaccagtcagggagagtacaagatgccacccggcatttacaggaaaaggcttctgaaatcagacaatgcctttcaaactcttataccaacctctagagttgggcaacatgacctcttccctttctaggtcccatggcagccatcttgctattactcgcctttgggccctgtatttttaacctctttgtcaaatttgtttcctctaagatcgaggccattgagctacagatggtcttacaaatggaaccccaaatgagctcaactaacaacttctaccaaggacccctggaccaacctgctggccctttcactggcctaaagwgttcccctctggaggacattaaaactgcatggccccttcttcacccctgtccagcaggaagctgctaaaatggtcattgcccaattcccaacagcagttgggttgtcctgtttataggggggatt

SEQ ID NO: 950874 - DNA, 611 bp, Homo sapiens
atccagaacaggagaaggctctgcaacaggtccaggctactgtgcaagctgctctgccacttgggtcatataacccaacagatccaatggtgtttgaggtgtcagtggcagatgggaatgctatttggagcctttggcaggacccaacaggtaaatcacagtagaggcctctaggatttttgagaaagtccctgccatattctgcagataactactctccttttgagagacaacacttggcctgttactggactttggtggaaactgaatgcttgactatgggtcctcaagtcaccatgtgacttgaactgcctatcatgaactgggtgctttctgacccatctagccataaagtgggtggtgcacagcagcatttcatcatcaaatggaagtggtatatatgtgatcgggctctagcagatcctgaagtcacaaataagttacatgaagaagtggctcaaatgcctatggtctccactcccaccaccctgccttctcttycccagcctgcactgatggcctcatgggtagttccctatgatcagttgacagaggaagggaagactagggtgtggttcacagatggttctgcatgatatgcaggcaccacc

SEQ ID NO: 950875 - DNA, 592 bp, Homo sapiens
acatctgcagtgacatcctttactgaagtcttgaactcctcaaagtcacccatgagagttggaatcatcgtcttccaaactcctgttattgctgatgttttgatctcccatgaatcacagatgttcttaatggcatctggaatggtgaatcctttttagaaggtttgcagtttactttgcccagatccattagaggaatcgctatctatggcagtgaatagccctacaaaatatatttgaaatatattttgaaataataagaggctgaaataataagacttgaaagttgatccacaggctgcagaatggatgttgtgttagcaggcatgaaaacaacagtaatctccctgtacctgtccttcagagctcttgggtgactaggtgctttgttagtgagcagtaatattttgaaatgagtcttttctgagcagtaggtctcaacagtgggtttaaaatattcagtaaaccatgctgttaagagatgtgctgtcatcccagttttgttccatttatagagcatgggcacagtagatttagaataattcttaagcgccctaggacttttacartggtcagtcttggcttcaaaaac

SEQ ID NO: 950876 - DNA, 558 bp, Homo sapiens
ataaacctactggaatgttgagatttmatgtgagcctaaatgaagcccagtaataatgtattttatactccccggttcccaaaggctgaaaactgggatctaccttaggaaatgtgaaattttacattttcttgaatgaaagagttaaatatatatagcatgaaatagccaatcaaattgaaatacgttgttttctagggggaaatttgcaaagaaatgtatttagggcatgagggtctgtttagagagcctcagtattaggaatcagaggtggcagaggtagcctttttaattggctgttataagcatacaagataatggtaagttttaagataagtcttaaacctgagctcaaaagttagagaacagaaataggagaacaagaaaaataaagttgccctttcagttcaaccttttaacagtagcagtgtttgtcagttttcttttggaagtttgtatctacctgcagtgcttggtaagaaaaataacctgggcgacagagtgagactccgtctcaaaaaaaaaagaaaaaaagaaagaaaaagaaccattcctacc

SEQ ID NO: 950877 - DNA, 558 bp, Homo sapiens
ataaacctactggaatgttgagatttaatgtgagcctaaatgaagcccagtaataatgtattttatactccccggttcccaaaggctgaaaactgggatctaccttaggaaatgtgaaattttacattttcttgaatgaaagagttaaatatatatagcatgaaatagccaatcaaattgaaatacgttgttttctagggggaaatttgcaaagaaatgtatttagggcatgagggtctgtttagagagcctcagtattaggaatcagaggtggcagaggtagcctttttaattggctgttataagcatacaagataatggtaagttttaagataagtcttaaacctgagctcaaaagttagagaacagaaataggagaacaagaaaaataaagttgccctttcagttcaaccttttaacagtagcagtgtttgtcagttttcttttggaagtttgtatctacctgcagtgcttggtaagaaaaataacctgggcgacagagygagactccgtctcaaaaaaaaaagaaaaaaagaaagaaaaagaaccattcctacc

SEQ ID NO: 950878 - DNA, 640 bp, Homo sapiens
cattgtcatcaaactaacacaggaacagaaaatcaaacaccgcatgttctcactcataagtaggagttgaacaatgcgaacacatggacacaaggaggggaacgtcacacaccaaggcctgttgtggggtggggggctagaggagggagagcattaggagaaatacctaatgtagatgacagggtgatgggtgcagcaaaccaccatggcacgtgtagacctatgtaacaaacctgcacattctgcacatgtatcccagaactgaaagtataatttaaaaaaaatgtaaataattacaaatactggccaagctgcaaagaaaggggaacacttataaatggttggtgggaatgtaacctagttcagttactgtgaaaaacagtttggaggcttaaaacaggtctactatttgacccagaaataccattaactgggtatatacccaagggaaaataaattattctaccaaaaagccaggtacatttgcatgttaattgagtcactatttatagcaaagacatggaatcaacctaggtgccaatcaacagtggattgaataaagaaaatgtggcacatatacaccayggaatactacacagccatacaaaataatggaattgtgaactttgcagcaacatgg

SEQ ID NO: 950879 - DNA, 665 bp, Homo sapiens
ctctttcatccctttatttaagcagggaacaaccagcaggagtggggcagagaggaacggccactgtgcaccccactgtgctgggcacctggcttccctgacctcctcagtcctcaggataccacacacagtagagtcaggattcaaactccagtctgtctgatgccaaatgcaggcatattgtctccatttggaaggtttgcctccatttgttttataatgaacagaatctcactaatttgcaaaacaggaatggagacggtgtttttaccctcattttaccagaggaggcagctaaagtccagagaggggaaatgatttgccagagacacaatgctaatgagtggtagagcagaaaactcaaggaggtgggtgacttcacgcccttttgcactcattccacagggcccttgtcgagctccgagcccccagttctaatggtgagaagcactgataacctccagcaagaggcagatgatccagatgtgctaggttgaggttggggagagggagaaggaaatctagaggggcaaatcctgtttccttgagttccacccttacagcaggcccagacccatccacaacctcccacacatttcttcctacttcyactggggccccagggaagcgggaggggccagaaatgaaagctggctgtggctgct

SEQ ID NO: 950880 - DNA, 605 bp, Homo sapiens
tgaacttccaatagtatgttgaataggagtggtgagtgagagcatccttgtcttgtcctggttttcaaggggaatgcttctagcttttgccyattgagtatgatattggttgtgggtttgccataaatggttcttattattttgagatatgttccctcaaaacctagtttattgagcgtttttcacatgaagtgatgctgaattttatcaaagacattttctgcatctattgagataatcacatgtttttgtctttagttctgtttatatgatgaattatgtttattgatttgcatatgttgaaccagccttgcatcccagggatgaaaccaacttgatcatggtggataagatttttgatgtgctgctggatttgatttgccagtactgtattgagaatttttgcatcaatgttcatcagtgatattggcctgaagtgttttttttgttgttgttgttgtcgttgttatatctctgccaggttttagtatcaggatgatgctggcctcagaaaatgagttagggaagagtccctcctttgcaattgtttagaatagtttcagaagaaagggtatcagctcctgtttgtaactctggtagagttc

SEQ ID NO: 950881 - DNA, 605 bp, Homo sapiens
tgaacttccaatagtatgttgaataggagtggtgagtgagagcatccttgtcttgtcctggttttcaaggggaatgcttctagcttttgcctattgagtatgatattggttgtgggtttgccataaatggttcttattattttgagatatgttccctcaaaacctagtttattgagcgtttttcacatgaagtgatgctgaattttatcaaagacattttctgcatctattgagataatcacatgtttttgtctttagttctgtttatatgatgaattatgtttattgatttgcatatgttgaaccagccttgcatcccagggatgaaaccaacttgatcatggtggataagatttttgatgtgctgctggatttgatttgccagtactgtattgagaatttttgcatcaatgttcatcagtgatattggcctgaagtgttttttttgttgttgttgttgtcgttgttatatctctgccaggttttrgtatcaggatgatgctggcctcagaaaatgagttagggaagagtccctcctttgcaattgtttagaatagtttcagaagaaagggtatcagctcctgtttgtaactctggtagagttc

SEQ ID NO: 950882 - DNA, 582 bp, Homo sapiens
cgtgttctcatagcgtagggaaaaggtttgtagagcagtatttttaggcatgttcacaaagtatatatgctggcaaggaatagccaaagaaaatgaaaacactatttcagaaagatatctgtactcccatgttcatttcagcattattcacagtagccaagataaagaaacaaccgaagtgtctgtcaacagatgaatagattaagaaactatgatatatgtatatacacacacacatatgtatctcacactatatatatttatatctatatatagagagagatatatgtacacacacacaatggaatattattcagccttaagaaaaaaacaaaatcctgctacttaggacagcacggatgaaaccgtacaacattatactaagtgaaataagccagacacagaaagacaaatgctgtatcatctcacttaaatgtgaaatctaaaatataaaattcataagaatggcaagtgaaatggtggttaccaggggcstgaggtggcagaaatggggagatggtagtcaaagggtacaagctttccatcatgagatgaatgtgttctggacagcaatatacggcg

SEQ ID NO: 950883 - DNA, 666 bp, Homo sapiens
ccacccagactgagggtaagtctgcctctcccagtccactgactcaattgtttatstcctttggcaacatcctcacagacacacccaggcacaatactttgcatccttcgatccaatcaagttgacacacaatattaaccatcacaagcctatatgtggaagagtggcaataacgaggaacagaaaaggtatatggatggccagtaagcacatcaaaagatgctcaacaccattagtcatcagaaaaatgcaaattaaaaccacaatgagggctggcgcggtggctcatgcctgtaatcccagcagtttgggaggccgaggcaggtggatcacatgaggttaggagtttgaaaccagcctgaccaacatggtgaaaccccgtctctactaaaaatagaaaaattggccaggcacagtggctcacgcctgtaattccagcactttgggaggccgaggggggcagatcacgaggtcaggagatcgagaccaccctggctaacacggtgaaaccccgtctctattaaaaatacaaaaaattagccgagtgtggcggcacgtgcctgtagtcccagctactcgggaggctaaggcgggagaatggcgtgaacccgggaggcagagctttcagtgagccgagatggcgcccttgcattccagcctgggcaa

SEQ ID NO: 950884 - DNA, 574 bp, Homo sapiens
cagacaaccattcaaaagatcaataaatccaggagttggttttttttgaaaaaaattaataagatataaggctagctagactaataaaaaagagagaagatccaaaaataacacaattagaaatgacaaagaggatgttaccactgacttcaaaaaatacataaataactatcagagactactataaacacttctatgcaaacaaactagaaaatctaacagaaatggacaaactcctggaaacatacaccttcccaagactgaaccaggaagaaactgaatccctgaacagacaataacaagctccaaacttgaatcagtaatagcctaccaaccaaaataagcccatgaccagattctagcagattctagcacatgtacaaagaagagctggtaccactcctactgaaactattccaaaaaattgaagaggagggatgctctcccaattcattcaatgaggctttcattatcctaataccaaaacctttcagataaacaacaaaaaaagaaaacttcaggtcaacayctttgatgagcattgatgcaaaaatcctcaacaaaatactagcaa

SEQ ID NO: 950885 - DNA, 593 bp, Homo sapiens
tatcccaatctttttttttttttttttttkttggagtctcactccgttgcccaggctggagtgcagtggtgcgatcccagctcactgcaagctctgcctcctgggttcacaccattatcctgcctcagcctcccaagtagttgggactacaggcacctgccaccatgcctggctaattttttggtatttttagtaaagacagggtttcaacattttagccaggatggtctcgatctcctgacctcatgatccacctgccttggcctcccaaagtgctgggattacaggtgtgagccaccgtgcctggccggtccttaccccaatcttattataacattagacatccttcctccctggggaaaagtgaatatggagtggagagaggccatgagtgttccactaattgatgccccttcttgaagaaacctgaagcctgatgaagcaaggttcctccggcctcacaaaaaatgttccccctcatatttcagttattttcctataactgatacataccagtgttagaggatatagaagtataccatagaagttaggagtgaagtgcatgattgctctccatgataaagcgagggaga

SEQ ID NO: 950886 - DNA, 564 bp, Homo sapiens
aaagccaaagttccttcaatgcaaccagggggtgtcctgcatggtcctcctgccccccgcccccttgcctctcttattccacttcccatcaggctccaccctgctctctttgcttcagccatgccggctgttcctcagacatgccagcatactcttgccttggaaccttcacatttatcattctgtctgccccgaacactcaacctcaaatagctgtgcagccctctcctttacacaaatggtaactcttccatgaaacctttctccaccactcaatgtccatttccaagcccagcccatgctccccagccccatccctgctctgcttttttgccttcatcctcatcactatctgacccagtggatagttttaattgtatctgtcactagaatgcaagctccatgagacacacatttttgtctgtgttattcattgctctacttccagttcccagaacarttttggcacatagcatgtgttcattaattatgtgttggttaaatgaaggaagctttatgagggaaagagcatgccactcctcttccagcgtcccccttggtggc

SEQ ID NO: 950887 - DNA, 695 bp, Homo sapiens
taggcaagtctgtaaagacagaaagtaggttagtggttgccacgggctgtggtagttgtgggagcagtgggaagtgactgccaatgggtagtaggtttttgggggtggggtgttgaaaacgttctcaaattagacagtggtgatggctgcacacctttatacttgaatccatggaattgtacactttataaaggtggacattatggtatgtgaattatatctcaataaaaatattattaaaacattagtgatttcaggccgggcgtggtggctcactcctgtaatcccagcactttgggaggccgaggcgggtggatcatgaggtcaggagttcaagaccagcctgaccaacatggtgaaaccccgtctctacaaaaaatacaaaaattagcgaggcatggtggtgcatgcctgtaatcccagctactcaggaggctgaggtgggagaatcgcctgacctgggaggtggaggttgcagtgaggctaagataatgccactgcactccagccctgggtgacagaacaagactccatctcaaaaaaaaaattagtgatttcaaacaayaaccatttctatgttatggttctataatttggaccggactcagccaggcagttcttctgctgatctcccctgggttcacccctgtggctgccatcagagggcggctgactgcactgaatattaagatggc

SEQ ID NO: 950888 - DNA, 501 bp, Homo sapiens
gtgagctgatatcgccccactgcactttagcctgcgagccagagcaagactctgtctcgggaaaaaaaaaaaaagtttagggcagaaatgaaagtaagtaaagtacatttggaacagggccaagtgggggacttgagcgatcaattaagtgcgcagtttgatttttcacttggggtcttatacattggcatgcttctgggggcttgtgtccctttttccctgattcttcccctggcgggggctgttcacacgtgcagtggcctgttagcccttgggaggggagcatgcgcagtgtgtttactgaaatttttcgcatgctcacgtgaggcgttaccagttgcgcattcccggaggaaggtcatgtaccagttaaacgccaccrttttgcctcttagtgcacatgcttgagcccacttgcccaactcctgagatcatatcgggaagctgatcaccaatttcaggtttttctatctgttgggagactgccgttccctggtgcca

SEQ ID NO: 950889 - DNA, 613 bp, Homo sapiens
atgtctttactgatcatgtgtaaatctcctggcatgcacacagcytacatctgtatgtggacttatagattcccaggaatatatcagaggatttcaaagcccctatggatatctcactctctagcctattgtttgccccaactgctatctccacctcaggcagtgtcaaagtagaacaactgcctctaaatagttttgataaatgcccttggagaaagattttttttcactggatgagctctgagttaaaacaaataaaagacgccttgcaagtaggtccagggacccaccagacaagtcaaataacaacaattccccaggaatgaggctttggaggaagtccagtcccattctgtctcttctggtggttgtcaggctgctggttttaatcttgattgtgggatactctctttcaatgccaccacagagctgaaaagacgtgaataggaataagggaagttaagatgccatgaagatcactgttcttactgagattcacccaattgtcttgaataaatgctctctaggttgctgtaagcttttggttaatttccagagttctgaaagctaaatatggcaattttttctaggtttctcattgcttatatggagg

SEQ ID NO: 950890 - DNA, 433 bp, Homo sapiens
attaggaggcggggactttgggaggtgatgaggtcatgagggtggaatcctcaggaatgcagttagcacccttattatagaggccccagaaagctagctcatctcttccaccctgtgagcacatagcaaraaggagacatctatgacccaatcaatggctcctcaccagacaccacatctgctggcaccttgatcagacacttctagcttccagaactatgagaaattaattcctcctatttacaagccacccaggccatgatattttgcggtgatacctgaatgaactaaggcacccaactcctgccttattgttagaaaactcaagaaaaaatataattgtgaaatactaacaacaggaatatagttttaaaatttgtttgagatacttaaatataactactagtagcatttcagatagtatttaaatctt

SEQ ID NO: 950891 - DNA, 639 bp, Homo sapiens
cctgttggaatttgctcatccatttcatcgtgggccartgtgaaatggtgagggaattgaacagcgtcacgagaatccgtggatgagtacctattctttcccatctggagtatattcttttatttatttatttatttatttatttatttatttatttatttatttattgagtctcactctgtcccccaggctggagtgcagtggcacgatctccgcttacggcaacctctgcctcctgggttcaagcaatcctcgtgcctctgccgcccgagtagctgtggttacaggctcgcgccaacacacctagctgatttttttttttttttttttttttttgaaacggagtctcactctgtcccccaggctggagtgtagtggcgcgatctccgctcactgcaagctctgccccccgggttcacgccattctcctgcctcaacctcctgagtagctgggactacaggcgcccgccaccacgcccggctaattttttgtaattttaataaaaacggggtttcaccgtgttagccaggatgggctcgatctcctgacctcgtgatccgccctcctcggcctcctaaagtgctgggattacaggcgtgaaccaccaccccctgcctggagtatattctatacagcat

SEQ ID NO: 950892 - DNA, 639 bp, Homo sapiens
cctgttggaatttgctcatccatttcatcgtgggccagtgtgaaatggtgagggaattgaacagcgtcacgagaatccgtggatgagtacctattctttcccatctggagtatattcttttatttatttatttatttatttatttatttatttatttatttatttattgagtctcactctgtcccccaggctggagtgcagtggcacgatctccgcttacggcaacctctgcctcctgggttcaagcaatcctcgtgcctctgccgcccgagtagctgtggttacaggctcgcgccaacacacctagctgatttttttttttttttttttttttttgaaacggagtctcactctgtcccccaggctggagtgtagtggcgcgatctccgctcactgcaagctctgccccccgggttcacgccattctcctgcctcaacctcctgagtagctgggactacaggcgcccgccaccacgcccggctaattttttgtaattttaataaaaacggggtttcaccgtgttagccaggatgggcycgatctcctgacctcgtgatccgccctcctcggcctcctaaagtgctgggattacaggcgtgaaccaccaccccctgcctggagtatattctatacagcat

SEQ ID NO: 950893 - DNA, 559 bp, Homo sapiens
gttgtttgtatctctgtggggtcagtggtgatagctcccttatcattgttgattgtgtctgtttgattcttctctcttttgatctttgtctagctggtagtaatctattttatttrtttttatttttctctcaaaaacacagttcctggatttgttggttttctaaagggctttttgtgtctccctttcctttagttctgctttgatcttggttatttcttgtcttgtgcaagctttgggatttgtttactcttggttctctagttcttatggttttgatgttaggttgttgatttgagatctttccagttttttgatgagggcataaatttccctcttaacattgccttagctgcatcccagagattcaggtatgttgtctctttgttctctttaatttcaaataacttcttgatttgtgccttaatttcattatttacccacaagtcattcaggggcaggttgtttaatttccttgtagttgtgtggttttgagtgagtttcttaacattgaattctaatttaattatgctctggtctgagagactgttatgatttc

SEQ ID NO: 950894 - DNA, 645 bp, Homo sapiens
gggccttccagtgattgccttggcataatggacatgagcaagggggcggcttgtttctcgttggacaatcttttttaagatgtccttgcagaccacactgataacaagccctactgggtgattggcctgctccattttctatcctctccaaaccaccaaggtttgtttgtctgagggctatgactaaggctgtggcctttctcttttctcgcttttcctttttggcctgttcctcttggtaggctcatctaacaatagcataacatctctccaagtgaggttgaaggtttgccctagaccctgtagaacatctatatacctattaggatcatctgaaaacttccccaggtctaccttgatctgctttaaattagacagagagaagaggacatgtacacagattggaccaaattctcctccccccacagcttgagggggacataactgatggcccggtgggatttttggtcccttggagatttctttgctcatttctttcatatcagagtgcccttttttcagtcctcccgtgattggctactttagaatcctgctgattggtgtgttttacagagcgctgattggtacgttttacaatcctattccaagacaggaaagttccccasgtccccacttgacccagga

SEQ ID NO: 950895 - DNA, 621 bp, Homo sapiens
actgtacacttaacattttctaagagagaaagtttaygttatatatatttaccacaataagatagaatgtatatgttatgtatttttaccactataaaatagtatgtatgtttgagcatacacacacatgcacgcacacacacacacatatatatgaatacatttatgtgtgtataatatataatgcacttctatatgaatatatatgctatatcaggtatatgaatatatgatatatcatagatatacatatattgatgtatattcatatgtatgacatataaatatgtgacatatatgatgtaacaatatatcatgatgtattatatatatcatatgtaatatatatgtcacatatatgaatgtataataactataattatgaagttctagtctgtgaacattggatacttcctcacaatttcaatcctgggctttggtttcattccataatggaggaaaataacctgctctgaaaaatttcctcttacccaagctcaaaccagctttgcatttttgtcacaactgaacatttaataaaatcagaaatagaactatttacttttcttattcatactatacttatatatgcattctcctgttttttgttatttatttaaa

SEQ ID NO: 950896 - DNA, 443 bp, Homo sapiens
tgcaaggtagattaatgcaaacaaaatggcagttaacatcccatagtgccaaatccacccttagacargacagactttactgagagggacctctaacccactaaatcttaggaagattctaacctttgtaagttgggcctcgaaaccatatttggtcaagcatccttgtcttttattaagagggacttttaacccactctgtcttaggagagactctaactcccctaagttgggcctctaactcaatcccatcctttacctgggtatcctaccacttacccaaagttggccaattggtgctgcagtctatttcctttgggtcagggtctcttcagtatcacccctttgtggttccccaggatggtgttaccagaaaggggtcctgattcagacctcaagagagggttcttgaatctcacacaagaaagaattcagggcaagtc

SEQ ID NO: 950897 - DNA, 604 bp, Homo sapiens
gcacataatttatctatataacaaacctgcacatgtacccctgaacctgaaataaaagttttaaaaaataaagaaaacaatatatcagcaaaatcaraagttgaactaaaagattgaaaacattaaaaaacagaaattttagagatgaagaatacaacgactgaactgtaaaatagaaacatttccatagaaagcttgaagagtaaactcaatcaagtagaaaaaagaatcaatgaatgtgacgagagtttcatttgaaattatctagtcagaggagtgaaaaagtgaaaagaatgaagaaagcctatgggacttataggctgccatcaaatgaaccagtgtacatattatggaatacaaaaaggtgaagataaagaggaaagaaacagaaagcttatttaaagaaataatagctgaaagtttaccaaatctggggagagatatggacatctagatttatgatttacccaaaacacaccaaatacgttgaatctaaagaggtctacactgagacacattacatttaaattttcaaaagtcaaaaacaaacagaattttgaaggcagtaggataaattaacttattatacacaagggaactttca

SEQ ID NO: 950898 - DNA, 562 bp, Homo sapiens
cctgggacacagctaaagcagtgttaagagggaaatttaaagcactaaatgcccacattagaaagctagaaagatctcaaatcaacaccttaaaatcacaattaaaagagctagagaggcaagagcaagctaakccaaaagctagcagaagacaagaaataactaagatcagagcagaactgaaagagatagagacatgaaaaaccctccaaaaaatcaacaaacccaggagatggtttttttgaaaaaaataaatcaatagatagaccactagatagaccaataaggaagaagagagagaagactctctcaataaaaaatgataaaggggatatcaccactgaccccacagaaatacgaactacaatcatagaatactataaacactctgcaaataaactagaaaatctagaagaaatggataagcttctggatgcatacactgtaccaatactaaagtaggaagaagttgaatccctgaatagcccaataacaagttctggaattgaggcaggaattaatagcctaccagccaaaaaaagcccaggaccagaaggattca

SEQ ID NO: 950899 - DNA, 562 bp, Homo sapiens
cctgggacacagctaaagcagtgttaagagggaaatttaaagcactaaatgcccacattagaaagctagaaagatctcaaatcaacaccttaaaatcacaattaaaagagctagagaggcaagagcaagctaatccaaaagctagcagaagacaagaaataactaagatcagagcagaactgaaagagatagagacatgaaaaaccctccaaaaaatcaacaaacccaggagatggtttttttgaaaaaaataaatcaatagatagaccactagatagaccaataaggaagaagagagagaagactctctcaataaaaaatgataaaggggatatcaccactgaccccacagaaatacgaactacaatcatagaatactataaacactctgcaaataaactagaaaatctagaagaaatggataagcttctggaygcatacactgtaccaatactaaagtaggaagaagttgaatccctgaatagcccaataacaagttctggaattgaggcaggaattaatagcctaccagccaaaaaaagcccaggaccagaaggattca

SEQ ID NO: 950900 - DNA, 757 bp, Homo sapiens
aaataaatttgcttgaaacttcgcaacaggctcaatacacagtcttgcccatggaaacatacataacggtaatcggkattcctctccgggcccagacctggtggataattacaattaagcttcaatggattagctgccagcgggacagtagatagtgagtagtattttacatctctactttttcagcaaatttgggcatgtggagtttttttttccttctccatggaaaacaaagaagttatttccaattaattcaggagaacattaaaattactgagaattgtactgtttcccatggcaggatgaatgaggtacagagtgactctccttattgtgttagaaatgcaagggtcactcacattacttacagagccccttgtttacatttttcaattaggagataatcagtatgccattatgagtaaaaattgttggaacgatcttttggctgtatattttaaccagcaaatctttggggaaggtttgattgaaagtatgacaggagaacaaggcaagttatactgatgataaataagaacaattatcacacttattatctgataaataatttattgtgatttgccatgaatccatctcaagccacctcctagatgaaaacacaccccaaagactgacttcttcagcttttcccatgtcatgtcagaaattcttgcctgaaaaacacaaaggaagcattgcctggaatataaaggcctgtcactacatacttgatcattttaatcagttgcagataaat

SEQ ID NO: 950901 - DNA, 567 bp, Homo sapiens
cagataaaagagtatccaaacagttacaaattaacacccatggggatggttcccagatatgtgctcacagaaactttacaaaatgcatgtgtgaggccgggcgcggtggctcacgcctgtaatcccagcactttgggaggccgaggcgggtggattacgaggtcaggagatcgagaccatcctggctaacacggtgaaaccccgtctctaataaaaacacaaaaaattagctgggcgtggtggcgggcgcctgtagtcccagctactcaggaggctgaggcaggagaatggcgtgaacccgggaggcggagcttgcagtgagccgagatcatgccactgcactccagcctgggctaaagagcgagactccgtctcaaaaaaagaaaaaacaaaatgcatgtgtgtgtgcttgtgtgtatatgggtattttatatatatatatatatatatatatatataaaatcaccagtcatgtcgtcttgtrctctagctgcaatgcaaaagagacagattttaatgagttgagagtgttattttaaacattttttcatactttgtttttacctt

SEQ ID NO: 950902 - DNA, 623 bp, Homo sapiens
aacaggcaaggacttaggaaatattccttatttgaaggggcctgaaagtgtggtctggggttcaggagtgacctgtcatacttgagaggattaaaatactctccaaacacagtcccattccttcaatyttagctcgttttttcgcgtctgagcatatattaaacctagtccatcaccaaatttagcattagattgcgaagttctattgattgtatttgatttgtaatttaagattttctccccctacataattttgttgaaaacacagaagtgaattctgttcacttaggtgtaacagttaatacttgctgtttaaggaactaattaaaccttactggcttataaaaaacaaccaccattttatttgtttgaagttctgtggatctgcattttggtgtggtggattcacctgggtagttgatatatttgtgttgcctggatcacaaaaaggccttagtcacctggtgcgttgactgagcctggttggtttaagatagtttctttcacaatctggtggtttgtggtgactcttggctaggccctgtgtctccaacagggtagctccagacctcttcacaatttctcccaaaaagggaagaaccaatggatatttgcatcacatt

SEQ ID NO: 950903 - DNA, 738 bp, Homo sapiens
atatgcacacacaaagatccactggcttttaccttggaactctagctataagatagcaatacaaactcaccggtctacaaacatgttcacatggctaaactttgtttgcccaagtaggtcatccagtgaagggcatgaaccaacattttgggtaaagtattctccatgaaagtttgagtttttaaaggcaaaacctcttcagattccaaaggacagcagggccaaacagcaccacagaagaacatcatgtattgaccaggcctactcctgtttacataaaagactggatacatgacattccgtcccactttcattcaacagcaaaatgagacctatggagaggccaaacttctccagattccaaaaataatgaggccaaacagtatttcaaaagaataccagtttatcaaattctggttttccatgactatactaaaacacatacctaaacaatcaccaaaacacaatcccactgctgcagcagcaaacaaatcccaagagtgtccaagcagaaacagggtgctttgctctcttcattagttaggcttgttcaatctgcaaatggaaattctttcagaattccccaaattgagaagagaagataccattgtctggtgcccacaaaagataytcacccatctggacacagacgacaaatttcaaaggctgtttttcctaagcaatcaggaacacagttggggccagcagcggcaggaccagagagagatcaaaacccac

SEQ ID NO: 950904 - DNA, 634 bp, Homo sapiens
gccaatgagaaataagtttgtttattcctgtagcataaaaatctgtgcttcgggatttgacaaactcttagaaagcattttctgcatcctgctggttgtagaaggttttccctgcaaaacaaacaaacaaaaattgtcgagatacttgaagaagtggtagtcagttggcaagagatcatgtgaatatggtggatgaggcaaaattttgtagcccaagtcgttcaacttttgaagcattggttgtgcgacgtgtggtcctgagttgtcgtggagaagaattgagcccgttctgttggccagtgctggttgcaggcattgcggtatttggtgcacctcatagatttgctgagcatatttctcagatgtaattatttcaccaggattcagaaagatgtagtggatcagaccggcagcagaccaccaaacagtcaccaagtttgagtttgggaagtgctttggatcttctcggtccaaccactgagctggtcatcgccagttgtcatataaaatccactttttgtcgcacatcacaatccgatcaaraaatggttcgtttgttgttgtgtagagtaagagaagatgacactttaaaacgacgattttttttattttcgctcaactcatgaggcaccca

SEQ ID NO: 950905 - DNA, 219 bp, Homo sapiens
aagttataagcatggtttttgaaagttcatgttcmattatttcatgaaaaactaaaaattttatttatttatgctgggggctatatctgaattgagactcctcaaagttaagattctatcgcacttttaatccagattgtttgtttggttagttagttggttagtttccatttgtttattttgggttttggttttgcattttacttcagactgaccagt

SEQ ID NO: 950906 - DNA, 602 bp, Homo sapiens
  misc_feature 1, 2, 3, 4, 5, 6, 7, 8, 9, 10, 11, 12, 13, 14, 15, 16, 17,18, 19, 20, 21, 22, 23, 24: n = A,T,C or G
nnnnnnnnnnnnnnnnnnnnnnnnatacacatcactctcctctgtccatggtagctgatttytgcatagccacacatcaatagttcattgattgactgagtgtaaaaggaaaggttccacaaaagtaaatttttcggctaaatggagcttatccttgtaagcaacacatttaaaatttttaattatatttgaaagaaatgttgctaggaggtatgtgcccaagtcagaaataatttggttatgagtgacaaaaaacctactcagactagcataggtaaaatggggtttatggagcagacagaggggtgtctcatggaatccaagaacaaaaagtgaccaaggcttctaagaagcaggaaaatcatcacacactcgctggtccaacagtactcttggggactgcactgtcaccctggctggagtgcagtggcacaatcacagctcattgcagccttgacctctcaggctcaagtgttcctcccaactcagcctcccaaggacctgtgtgtgccaccatgccggctaatttttgtatattttgcagacacagggttttgccatgttgcccaggctggtctcaaacacctgggctcaagcgatcc

SEQ ID NO: 950907 - DNA, 602 bp, Homo sapiens
  misc_feature 1, 2, 3, 4, 5, 6, 7, 8, 9, 10, 11, 12, 13, 14, 15, 16, 17,18, 19, 20, 21, 22, 23, 24: n = A,T,C or G
nnnnnnnnnnnnnnnnnnnnnnnnatacacatcactctcctctgtccatggtagctgatttttgcatagccacacatcaatagttcattgattgactgagtgtaaaaggaaaggttccacaaaagtaaatttttcggctaaatggagcttatccttgtaagcaacacatttaaaatttttaattatatttgaaagaaatgttgctaggaggtatgtgcccaagtcagaaataatttggttatgagtgacaaaaaacctactcagactagcataggtaaaatggggtttatggagcagacagaggggtgtctcatggaatccaagaacaaaaagtgaccaaggcttctaagaagcaggaaaatcatcacacactcgctggtccaacagtactcttggggactgcactgtcaccctggctggagtgcagtggcacaatcacagctcattgcagccttgacctctcaggctcaagtgttcctcccaactcagcctcccaagkacctgtgtgtgccaccatgccggctaatttttgtatattttgcagacacagggttttgccatgttgcccaggctggtctcaaacacctgggctcaagcgatcc

SEQ ID NO: 950908 - DNA, 612 bp, Homo sapiens
tcaaaacaatacaatttgaatgcatttttggtggtataacttatagatgataccataatygctccttatagatgatttaaaaactgcctaaattaacccttgtaattgccccaacataaccataatgctctatgtagaaaataagttcaagatacaataattgagcctcaatatccgtaacaaccttgtgaagcaaatgacattaaataaataaatcaatagcagcatttaaaagaaggagtataggaggaaattgacattctgatgtgactgcataatagtaaaaatgctatctgactacacacaggagtgtagatacaggcttaatctaactttaaaacataaattagagcacaacagtacccacatatatgacgaatatcacatatttttcattagcctaaaaagttatgagggatatgaaacattctgaaaagggcaacattttttgtgtcaataaggactaggataccatctaagaaagactcttccacattattcagtctatctttttttattttctcagaaaccacttttattcccatgaaaaagaagatacagcctagattacaacacacaagtccttttaaatatctggaaagccttctcaag

SEQ ID NO: 950909 - DNA, 539 bp, Homo sapiens; identical to SEQ ID NO: 950561

SEQ ID NO: 950910 - DNA, 456 bp, Homo sapiens
gtggctagccagttttcccagcaccatttattaaatagggaatcctttccccagtgcttgtttttgtcaggtttgtcaaagatcagatggctgtagatgtgtggtggtatttctgaggcctctgttctgttccattggtctatatctctgttttggtgccagtaccatgctgtttttgttactgtagccttgtagtatagtttgaagtcagatagtgtgatgccctggctttgttctttttgcataggattgtcttggctatgtgggctcttttttggttccatatgaactttaaaatagatttttccaattctgtgaacaaagtcattggtagcttgatagggatgacattgaatstataaattaccttgggcagtatggccattttcatgatactgattcttcccatccaggagcatggaatgttcttcaatttgtttgtgtccccttttactt

SEQ ID NO: 950911 - DNA, 579 bp, Homo sapiens
aggatacaaaataaatgtaaaaaatcactagcattyctatacacaaacaacaaccaaactgagagctaaatcagaaaagcaatcccactcacaattaccacaaaaaaaataaaatccctaggtatacaactaaccggggggatgaaagagctctacaatgagaattacactgcttaaagaaatcagggaagacacaaacaaatggaaaaacatcccatgctcatttttagaatcaatatcattaaaatgaccatactgcccaaagcaatttacagtttcaatgctattcctatcaaactatcaaggacattcttcccaaaactagaaaaatctattttataatttatatggaatcacaaaagggcccaataaccaaggcaaccctaagcaaaaagaacaaagctgagacatcacaatacctgacttcaaactacactacaaggctacagtaaccaaaacagcatggtactggtacaaaaacaggcacatagaccaatgaaacagaagaaggatcccagaaataagactgcatacctatgaccatctgatctttgaaaaagctgacaaaaacaagcaatg

SEQ ID NO: 950912 - DNA, 603 bp, Homo sapiens
ctggaaaagccacagcccatgaaagcagcttggatgggggctgtaccctgcaaagccacaggggtggagctgscaaaagctgtgggagcctgcctcttccatcagtatgacctggatgtgagacacggaatcaaaggagatcattttggaactttaaggtataatgactatgcttttggatttcagacttgcatggggcctgtaacccctttgttttggccaatttctcccatttggaatgggtatatttacccaatgcctgtactcccattgtatctaggaagtaactaacttgtttttgactttgcaggctcacaggcggaagggacttgccttgtctcagataagactttggacttggacttttgggttaatgctagaacaagttaagactttgggggactgttggaagggcatgattgtgttttgaaatgtgaagacaagagatttgagaggggcagaattatatggtttggctgtgtccccacccaaatctcaccttgatgtaatccccataatccccatgagtcaagggcaggacaaggtagaggtaattggatcatgggggtggtttccccaatgctgttctcatgataatgactg

SEQ ID NO: 950913 - DNA, 603 bp, Homo sapiens
ctggaaaagccacagcccatgaaagcagcttggatgggggctgtaccctgcaaagccacaggggtggagctggcaaaagctgtgggagcctgcctcttccatcagtatgacctsgatgtgagacacggaatcaaaggagatcattttggaactttaaggtataatgactatgcttttggatttcagacttgcatggggcctgtaacccctttgttttggccaatttctcccatttggaatgggtatatttacccaatgcctgtactcccattgtatctaggaagtaactaacttgtttttgactttgcaggctcacaggcggaagggacttgccttgtctcagataagactttggacttggacttttgggttaatgctagaacaagttaagactttgggggactgttggaagggcatgattgtgttttgaaatgtgaagacaagagatttgagaggggcagaattatatggtttggctgtgtccccacccaaatctcaccttgatgtaatccccataatccccatgagtcaagggcaggacaaggtagaggtaattggatcatgggggtggtttccccaatgctgttctcatgataatgactg

SEQ ID NO: 950914 - DNA, 598 bp, Homo sapiens
tttttttgtggcttgatagttcatttgtcactgaataatattccattgtaaactgtaatatcacagtttatccattcatctattgagggatatcttggttgcctctgrtttttcacaattatgaataaagctgctgtaaacattcaagcgcagatttctgtgtgcacctaagttttcatttcatttgagtaaacacctagaagtatgatcactagattgtacagtaagactgtgtttagccttgctaagacactaccaagttgatttcccaagtggctgtgccattttgcattcttaacatcaatgaatgacagtttctgttgttccacctctttgccagcattcagtattgccagtgttttggatttagtaattctaataggtttgtactgtaaaacaacatcttgttttaatttgtgatttcctaatgagatgtaatgtccagcatctcttcatatgcatcttttgccatctgtatatcttctttgataaggtatctgttcagatcacttacacatgtgtaaactggattgcttgttttcttgttgttgagtttgaagatttctttgtatataatggctacaatttatcagatatg

SEQ ID NO: 950915 - DNA, 579 bp, Homo sapiens
gattttttttcttgtagcctgtggcttgtctttctattcttttaactgtgtctttcataaaacagaagttttaaattttaaagaagcccaacttatcaatttttgttttcctgaatcatccttttggtactgtatctaaaaactcatcatcaaacccaaggtcacctagattttctgctatgttatcttctagaagtttcatcgttttacattttacatttaactcttgatccattttgcatcactttttgcgaaaagtataatatctgccactagattcactttttgtcgcatgtgggtatgcagttattccagcaccatttgttgaaaacactctcatttctgcattgaattgccttttatcttggtcaaaaatcagttcactgtatttgtgtgtatctattctgggctttctattcttttccattgatctatgtgttaattctttcaccagtaccacactgtcttgattactatagctttataytgtcttaagttgggtagtgtcagtcctctgttatttttcttccatattgtgtttattattctgagtcttttgcctttccatataaactttag

SEQ ID NO: 950916 - DNA, 563 bp, Homo sapiens
ttgaatgttctcaccaaaaacagaataaaacaaaaagggaagcaatgaccttgggtaataaatatgttaactcatttgattgtggtgaatcatttcacagtatacatgtgtatccaatcattacattgtatacaytgaacccttataattttcataagtatatcacaataaagctggaaatttcaaataaatacagtgcaaaaaatattttggaacggtgaaaaatatgtttgctatcttaaggataatgatgatttcacagatgtatacgtatgtcaaaacatcaatttgtatactttattttgtgcagtttattgtttgtcagttatatctcaacaaagctttaaaaaataactatatattcggtgtttggcattcaaaacacatctcatggacagtctcatgtacctggaaatagcacaaagttgatttgttgcataactgccccattttttttatcatggggggaggaaatgagatgacacttcacatatgtccctgagtaaaaaactgaggctggagctccagacttctctctgcctgaatgcaaagaaagagttttg

SEQ ID NO: 950917 - DNA, 785 bp, Homo sapiens
agaagaaatggtgagagaagacctccaggatcttcagaaatgttgagacacagggatgtggtgaaaagaacatgggggaagagcatgggcatggtggtgggggtcagagcaggacttggtgaatacaactcatggagtgcttgatctgttgatctgtgccaggcagtgggctagattgtaaaaataagaccaatgataaaaattgatatatacatatatatatatataaaatatataygtatatatatagagagagagacaatgactgatatataatcaatagatgatggatagataaatagacataagtagatagatagctttaattcttactgtgccacttaatatctatagaaacttgcatgagttataataacaatttaagcctccatttctagataaaattaagttacttaaatgcttaactcataggggtttctgtgataactaaataataaatcttgcatatatatgcatgtgtatgtcggtgtgagtacgaatatatatacagagagagaaacagacagacagagacaaggacaaagagacagagaagagagagccagagagattggagggcacacaggtgagcttggtaccaaatagatcattttgccttccttttcttctcaactcctgaaatactctgtttctgaaatacaatgcagtgataactactgtttatccttttttattttttttgtcatgtaagtccaagattcctttatagaaaactctcaacctatggcatcaattttggaccaagacgtggccatctgccttcc

SEQ ID NO: 950918 - DNA, 582 bp, Homo sapiens
ttttttcatatgtttgtgggcctcataaatgtcttcttatgaaaagtgtctattcatatccttcacccactttttgatggcgttctttgtttttttttcttgtaaatttgtttaagttctttatagattctgcrtatcagccctttgtcagatggatagcttgtaaaaatttcctcccattctgtatgttgcttgttcactctaatgacagtttcttttgctgtgcagaagctctttagtttaattagatttcatttgtcaattttggcttctcttgccattgcttttggtgttttagtcatgaagtctttgcccatgcctatgatctgaatggcattgcctagattttcttctagggttttaatggttttagttcttatgtttaagtctttaattcattaatccatcttgagttaatttttgtataaggtgtaaggaaggggtccagtttcagttttctgcatatggctagccagttttcccaacaccatttattaaatatggaatcctttccccattgcatgtttttgtcaggtttgtcaaagatcagacggttgtagatgtgtagcattatttctgagg

SEQ ID NO: 950919 - DNA, 655 bp, Homo sapiens
taaataaacaagcaaaagtagccaaaaatttttttgaaaaagactaatgagcatatgaccagaaaacttaccagaagatgtgggtagamcagcactggtctttaagaaatcacctactgagtgctgggaaactctttttctttttaaatttttttttttatactttaagttttagggtacatgtgcaaaatgtgcaagttagttacatatgtatacatgtgccatgctggtgtgctgcacctactaactcgtcatctatcattaggtatatctcccaatgctatcgctccccgccccccaccccagaacagtccccagagtgtgatgttccccttcctgtgtccatgtgttctcattgttcaattcccacctatgagtgagaatatgcggtgtttggttttttgttcttgcgatagtttactgagaatgatggtttccaatttcatccatgtccctacaaaggacatgaactcatccttttttatggctgcatagtattccatggtgtatatgtgccacattttctgaatccagtctgtcattgttggacatttgggttggttccaagtctttgctattgtgaataatgctgcaataaacatacgtgtgcatgtgtccttatagcagcatgatttatagtcctttgggtatatag

SEQ ID NO: 950920 - DNA, 604 bp, Homo sapiens
ctaagtatgtctatgccatttatgcattctggcactggggaaatgaccacaggatgaatccagggatccactggacccactgtcagtcagacctgaactaaaactccattaattacctgacctccataagcccctacttcaaccggagggccacaatgatgttttgggtcccctagaatcaacgtcagctcagagccaatgtccagtagtctccaatatgtctaatcatccctgtccccagtgcacagttaccctggtaaaaggccagaggtctccttggagacatatatgtatatatacttcatatatacatataaagtatatatgaagtatatatatatgtatatatactttatatataacataatatatgtatttatatattatatataatataatatagtatatataatatataatatgtaatatatataatataatatagtatatataatatataatatgtaatatatatgtattatatataatattatatattatataataatrtaatatattatattattatattatatacattataatattatatattatattatatattatataataatataatatatattatatatgtatatat

SEQ ID NO: 950921 - DNA, 480 bp, Homo sapiens
gatgataaaaagaaatgaaatataattaccatcttcaaagtggttcaccygtaatgggtgagagttaactacgtaattctaatacagtgtcgtaggtgctgtaatggagggctgcagaggatactgtgggctcatggaggaggtacttaaaccagactgagagtagcaaaggtctcccctaatggcttgatagtatttatggggtgtgaactctgtgctagacccttggaatataaaattggaagagtttctgcccttacgtagtttatagcctaataggacagtcagacaaataaatagagaattgaaatacattatgggaaattaaaaaaaaatacattatgatttaatgtataagcctaaggtattttgagtgtaggtagaagaggcacctaatttactatatcaggaaagggttcttgaaaaaagcagtttttattttagagacctaagctgagtcttaaaggcagagaagagaaa

SEQ ID NO: 950922 - DNA, 379 bp, Homo sapiens
gtactcccaaatatccctttgcagattctagaaaaatagagttttcagactgctgaatgagaggatggtttatctctgtgagatgaagcacacatcacaaagccgtttgtcagatagtttctttcttgtttttgtcctgggatactcgcctttttgccattggcctcaatcagctccccagcgtcccttcacggaatggactgaaagagtgtttccaaactggtgaatcaaggaaaagtttaactctgtgagattaatgcacacaacacaragcagaatgcttctttctagtttttatctgaagatattttctttttcaccataggcctcattgccctcccaaatatccctttgcagattctaaaaacacagtgtttcc

SEQ ID NO: 950923 - DNA, 586 bp, Homo sapiens
ggctgggatgcagggcaccaacaccctacactgcacacagcatggggaccctgggcccagcaaaaccrttttattctaggcctctgagactgtgatgggaagggctgctgtgaagacttctgacatgcccaggagacattttcaccattgtcttggggattgacattcagttcctcgttacttatgcaaatttctgcagccagcttaactttctcctcagaaaatgggtttttctcttctatcacattgtcaggctgcaaattttctgaacttttatgctctgcttgccttataaaatgaatgcctttaaaagcacccaagtcacttcttcaatgctttgctgtttagaaatttcttctgtcagataccctaattcttctgtcaagttctaagtttcactaatctttagggcacgggcaaaatgctgccagtctctttgctaaaacataacaagagtcaactttgctctagtttctaacaagttcctcaactccatctgagaccacatcagcctggatctcattgttcacatcattatcagcgttttggtcaaagccattcaaaacgtctctaggaagttccaaac

SEQ ID NO: 950924 - DNA, 485 bp, Homo sapiens
atgaccaactggggtttaaggatctacctagagactggtgtcaacctggaacctgatgtccacttggggtctggtgtacaccttgggcctgatgcccaccttggcacaggtgtacactttgggcctagtgtgcacctgaagcctggctgtcaacctgggtcttgatgcacacctttagtcaagtgttaaactggggcctgatgaaatactggagcctgatttacacctgtgtactgggtctccacctggggcctgatgtccacctgcagccagatatccacctggcaccagatgtctttgaggaatctgggtgtccaccttgaaaatgatgtattccaagagactaggcatgccacattgggcctggggtgcacctrgggcctgatgtctacctgaggctggtattgaactggggcctgtgtgttcacttggagcctgatgttcatttggaacctggtgttcacctaggacgtgggtatccacct

SEQ ID NO: 950925 - DNA, 485 bp, Homo sapiens
atgaccaactggggtttaaggatctacctagagactggtgtcaacctggaacctgatgtccacttggggtctggtgtacaccttgggcctgatgcccaccttggcacaggtgtacactttgggcctagtgtgcacctgaagcctggctgtcaacctgggtcttgatgcacacctttagtcaagtgttaaactggggcctgatgaaatactggagcctgatttacacctgtgtactgggtctccacctggggcctgatgtccacctgcagccagatatccacctggcaccagatgtctttgaggaatctgggtgtccaccttgaaaatgatgtattccaagagactaggcatgccacattgggcctggggtgcacctgggkcctgatgtctacctgaggctggtattgaactggggcctgtgtgttcacttggagcctgatgttcatttggaacctggtgttcacctaggacgtgggtatccacct

SEQ ID NO: 950926 - DNA, 485 bp, Homo sapiens
atgaccaactggggtttaaggatctacctagagactggtgtcaacctggaacctgatgtccacttggggtctggtgtacaccttgggcctgatgcccaccttggcacaggtgtacactttgggcctagtgtgcacctgaagcctggctgtcaacctgggtcttgatgcacacctttagtcaagtgttaaactggggcctgatgaaatactggagcctgatttacacctgtgtactgggtctccacctggggcctgatgtccacctgcagccagatatccacctggcaccagatgtctttgaggaatctgggtgtccaccttgaaaatgatgtattccaagagactaggcatgccacattgggcctggggtgcacctggggcctgatgtctacctgaggctggtattgarctggggcctgtgtgttcacttggagcctgatgttcatttggaacctggtgttcacctaggacgtgggtatccacct

SEQ ID NO: 950927 - DNA, 657 bp, Homo sapiens
tgtcttccttctctacttcccattcatttttttgtcctcatccagaagcttaactagatggggttcttatcctagtaggctgacccaaaccatcatttctgaagagtatgactccccaagagtcttgactttttcttttttttgctgtagttttcaactaaactttactattgggcatgaaaagtatgcaggcttctagatatagctctccttgtcccccactgtgtagcagcaaccaaatttctcattggcaattgtgatcaatcacttcagccagtagagtaaccctttcttcttattggttcagtggtgtaagctaccccaaatggtcaagcggcagtctatcttccaaatcaatggaaccattgttatatcctttaattccctcttgggaaccaagacctccaaaccagaagaactctaggttgctgaatgggaagcaaaaaattctgctagtgttttactacgtataatagtgtgtttctctcactttcacctttgattgccagacacgtatgttttggtkgtatgggagatggcaccatatagggatctctggttcaaagcatatactgcagcttgtaagacagacaacattctttcagggtgttatctcacaattgacagcatagctgacttttcagtgagccagtctag

SEQ ID NO: 950928 - DNA, 571 bp, Homo sapiens
aatatgtgtgttaaagaagcatccttcaagcctgacttacagtgctattggccatgagttcaatgttagggaattggcagtgtacattaaataatatgtctttaaacataaacatgcataaaacaaggttatatattggtcatttgttgaaaaagttgcgaccagcaatgtaaccgtaataggttattgcctgatgcacacagcaagtcaatacaccaagacactggattgcagcagagaggtttaatcagagtcacaccaaaagaggagatgggaggaaacctcaaatccatctccccaggagtttggggcaggggtttttaagggcttgggagtgggcggaagtgtggaggtcattgattggtcgaagagtacagggggaagtcgctgaacagggagatgaagaagccatattctcatgctgatcctgttcctctgtgggagtcttcaaaccggttgcaggaattcagggtctgaaaaacatcttaagccaggggtstccagtcttttggcttccctgggccacattggaagaagaattgtcttgggctgcacataaaatacactaaca

SEQ ID NO: 950929 - DNA, 611 bp, Homo sapiens
ggtgcacctgtagtcccagctacttgggagcctgaggtgggaggatcactagagcccaggggatagaggctgcagtgagccaagatagcaccactgyactccagcctgggcaacagagagacaccctgtctcaaaaaaaaaaaagaaaagaaaaagaaaaaagagccttcccacttcagccccaagaccagaatgatttgcccactttttggagtctttgggaaatggaatacatatttgagagacagacttatgtctaatctgcaggaacaatctttcatggtagaggtgggaggaaatggggctgtgcagttgtgtcttgcgggggcctttcaagctgagacattgatctgctcaaagcaatttctctccttcatgctcaatgggacctgacactttggtgtcctggatctgttactcatatttctgttctactggaaacctgcagactctcagctcttcccacggaggcagggccaggttgttcaccacaaagcactggttgctggttgaatcaagagtaggtggaccggaaaccagtgggtggctttattcaaagggtctcacccaacaatggcagtagaatgagctaagctagccaagctaagttc

SEQ ID NO: 950930 - DNA, 683 bp, Homo sapiens
caaaaatctatagaaaagtaaaattaaaaaaaaatccttaacggaaaaaaagaaagataattttgcrgtagagaaacctgacaaacactacctgagccaggcgactaagattaacatcaacaataagtcatatggatagtatgtaccttagatatgatgtcatgagaatagcactttacatctgagatttgcctccccaaaacacaatatcccgatctaatcatgaaaaaaatagagacaaatcccaactgagggacattctacaaaatatctgaccaccactgctcaaactgtcaaggtcatcaaaaacaaggaaagcctgagaaaccatcacagcccagagatgcctaaggagacatggtgactaaacgtaatatggtatcctggatggaattttggagccataaaaggagattaagtaaaactaaggaaagcaaaataatgactttaatgataatgtattagcattctttcattaattataacaaatgcaccatactaaagtaagacttgaaaaataggggcaactgagtgtgaatatatggaactctgcactatcatctcaatttttctataaatctaaaagtgttctgaataaaatatttgcttcaaaaaatgcaatgtagcatctttatctatgcaaattttggtgaactaatccaacacccctggaaattacaatt

SEQ ID NO: 950931 - DNA, 561 bp, Homo sapiens
ttcagtacagtgttaaattcagtggcagtatcagagattcttcccttcttcctgactaaaggtgaaaacgtttggtctttcaccactgaaagtgagttagtgtcgtttcyccatagatgttctttatcaggatgttcccttttattcctaggttgctgaaagttttttattataattttgtgtttaattttctcaaatgctttctctgtattttgtttttctcttttaattcattagtatggtgaattacattgatttttgaatgttaaaaaaatccctttgattcctaggataaactctgcttgttcgtaatgcatttgcctttccatatattgctgattctgatttgctaaaattttgtttaagattattgttccatatttctaagggttattgatctgtcctttcttttcctgtaatgctcttgcttgtttttttcagaataatggtaggctaataaaatgattgggaagtgtttgctctgcttctattttctggataagtttttgtaggaatgttactatatcctccataaatgtttgataaactatatcagtgaag

SEQ ID NO: 950932 - DNA, 617 bp, Homo sapiens
atctctctgaagtctctttctctccttataaagataccagtcctgcagcattasagtcccacccttgtgacttcatttaaccttaattacccccctatgctccctatctccaaatacagtcacattggagagtaaggctacaacatatgaattttaggagggcacaattcagtccataacaatcccctagcatgcctatttttctgtgctttttggtcttccttccacagcctgccatggcagttctcccatttctacctcattcagtggtgcccattggtttctccaagcttccaacaatgtgtgtaacaccatctcccaagggtcctgccaaggtttaaaatctcatatcatagatgagtgggcatctatcaataaactctcccttagccaactttatggcttacctcctgaattagtttactcgggctaccagaacaaaataccgcaaactgagtggcttccaacaacagaaatttattgtctcatggttctagaagcgggaagtctgaagtcaagatgttggcagggccatgctccctctgagactctgggtagaatccttccttgcctctttctagtttctggtggtgctgccaatgcttggtgctccttgg

SEQ ID NO: 950933 - DNA, 607 bp, Homo sapiens
gccatctgttaaaaaaaaaaagaataaaatcatccttaaaaagaatacagaataccaggcagttatttttaatcttggagagaaaaaaaaaggctactaggagtcctcaccaggactgtcacttcaagctctcagtccactaatttaaaactcttcaatcttgtacaaccccttcaacacacaagcaccaactccattacttatctgaggaaaagcagcttccccaaaatagaacattttccattaaagaaacacgtattccgttgacattaaaaaaaaaaaaaaggaagttagagaacggctatccagaccataaatagtcacgggaaattatagtcgtgtgtgctacagagaaggaaataaaggtcactcctgcagtttctgaaatggttttgaagtaggaaggaaacaagtttcagcaacatagttgtttaccatcgctgtttagagtatttttatgagtctgtttctttagatcccatttagaccacctwatttcctgttaagaatttctttagtgtagcattagaataaattacaatgtaagaaataaattttattgccctaaaatatcatggactagtgttggctgggaaactatataaaa

SEQ ID NO: 950934 - DNA, 630 bp, Homo sapiens
tgcttttccaagtttcatatgagtagaatcatacaacatgtagtttttttgtgtgtctttcttctttttttttgagataaaatctcattctgtcatccaggatagagtgcagtggcacgatcatggctyattgcagcctcgacctccctgggctcaggtgatcctcctatcttagcctcctgagtagctgggactacaggtgtgtgccaccatgcccaggtacctttttttgcatttttttgtagagatggagtttcaccatgttgctcaggctgatttcgaattcctgggctcaaggtatctgcctgcctcagcctcccaaagtgctggaattacaggcgtgagccaccatgcctggcccatatctttccttttcactcagtatactgtgtttgaggttcatccaggctgtaatgtgtgtcagtagttcttttcttttaattgctcagtagtatttcattgtattgatatgccacaatttgttcattcatcagttgatggacatttgagttgttttaagtttttggatgttacagattaagctgctgtgaacatatgtgtacaagtctttgtatttattgtgggtgagtacccaggaatggaatggctggtggcatatgtttgattttt

SEQ ID NO: 950935 - DNA, 542 bp, Homo sapiens; identical to SEQ ID NO: 945863

SEQ ID NO: 950936 - DNA, 463 bp, Homo sapiens
gcctttttcttctcatgggaacactggccatactgaattagggtcccaccttaagggcctcattgaatttaattacmtcctaagaggccccatctccaaatatagtcacattaggggttagagcttcaacatatgaattttggtgggaggcagggttcacacttcagtccataacacatctcattattgtaaatccacaaaggtggagtactttgaacaaaacacatagaattaggggagccccagacgaattaatctctaagaataaaagtaggaagagttggcatattatatatacatcccatatctactcctacatggggacaatacctgtgagcaagaatatttgttgtattgtttgtagaaaaaaaatgtttgaaacaacgtaatgacccaacaaaggaagacttagttaagtttggcacacgtgtgaaaagaaataaattatagtaacaaatgagaa

SEQ ID NO: 950937 - DNA, 613 bp, Homo sapiens
ttggattgtttccagtttggggtattatgaacaaagctgctatcaatattcacgtacaagcctgtgaaaataggtgtccagctttgagtaaataaatacctakgattggaattgctgggtcacattgtaagtagaagtttaactttataaagtgccagaatgttattcatatcaccataacatgttctgttcccacaagcagtgtatgaaagttccagttgtttcacatctttgtcaacacttggtcttgttagtcttttacttacagccattctaattgaggtattaagtgatatctcactgtggttgtaatttgcatttctctcatgctgaacacgttgaaccttttttgtgtgttcgttggtgatatcgtcttttgtgaaatatgttcaaatcttttctgtatttttagtgggtcatttgatttattatagagttataaaaattcattgtatactctggacacaagttctttgtcagacatgtatattatgtatattttctgcctttctgtggcttgcctttccattttcttgctagtattttcaaggtttttttgttctgtttttgattttcagagtccaatttatcaagttcccttaagtttctttgg

SEQ ID NO: 950938 - DNA, 612 bp, Homo sapiens
aaatccctagagtctaaaatatctaacatctaaaattccaaaaatcgtaatcctgaaagatcaaaatcctgaaattggaaatcttagaaagctgaattctagggaaggaattaatgcgttttgggttgtatttaggacagctgagtcatgttagttgcatcatgttatgcagaactattaccttctcattgtctttatttgcatttggtggaaaattcaggtgagtggattggccacattataatgcagtgatgaaaacttcagtttaaaaatgcatcattggctgggcacagcggttcatgcctgtaatcccaacactttgggaggccaaggcgggaggattgcttgagcccaggagttcgagtcctgggcaacatggcgagacctcaactctacaaaaaataaaggaaattagccaggtgtggtggcatatgcctgtagtcctacactcaggaggatgaggtgggaggatcacttgagactgggaagttgaggttgcactgaactgtgatcasatcactgcactccagcgtgtgtgacagagtgagaccctgtctcaaaaaaaatgaaaaataaaaataaaaatgcatcctttgtctgcattggcagccc

SEQ ID NO: 950939 - DNA, 612 bp, Homo sapiens
aaatccctagagtctaaaatatctaacatctaaaattccaaaaatcgtaatcctgaaagatcaaaatcctgaaattggaaatcttagaaagctgaattctagggaaggaattaatgcgttttgggttgtatttaggacagctgagtcatgttagttgcatcatgttatgcagaactattaccttctcattgtctttatttgcatttggtggaaaattcaggtgagtggattggccacattataatgcagtgatgaaaacttcagtttaaaaatgcatcattggctgggcacagcggttcatgcctgtaatcccaacactttgggaggccaaggcgggaggattgcttgagcccaggagttcgagtcctgggcaacatggcgagacctcaactctacaaaaaataaaggaaattagccaggtgtggtggcatatgcctgtagtcctacactcaggaggatgaggtgggaggatcacttgagactgggaagttgaggttgcactgaactgtgatcacatcactgcactccagcstgtgtgacagagtgagaccctgtctcaaaaaaaatgaaaaataaaaataaaaatgcatcctttgtctgcattggcagccc

SEQ ID NO: 950940 - DNA, 603 bp, Homo sapiens
ggagaacagtgtgaacctgggaggtggagcttgcagtgagccgagatggcgccactgcactccarcctgggtgacagagtgagaatccgtttcaaaaaaaaaaaaagagtcaagacccatcagtgtgctctattcaggagacccacctcacatgcaaagacacacaaagtctcaaaataaagggatggtgggagatctactaaggaaatggaaagcaaaaaaaaaaaaaagcaggggctgcaatcttagtctctgataaaacagactttaaaccacaaacagcaaaagggacaaagaattgcattacataatggtaaagggatcaatgcaacaagaagagctaactatcataaataaatatgcacccaatacaggagcacccagattcataaagcaagttcttagagacctacaaagagacagactcccacacaataatagtaggagactttaacatcccactgtcaatattaaacagatgaatgagacagaaaattaacaaggatattcaggacttgaactcagctctggaccaaataaacctaacagatatctacagaactcttcaccacaaattaacagaatatacaatcttctcagcag

SEQ ID NO: 950941 - DNA, 603 bp, Homo sapiens
ggagaacagtgtgaacctgggaggtggagcttgcagtgagccgagatggcgccactgcactccagcctgggtgacagagtgagaatccgtttcaaaaaaaaaaaaagagtcaagacccatcagtgtgctctattcaggagacccacctcacatgcaaagacacacaaagtctcaaaataaagggatggtgggagatctactaaggaaatggaaagcaaaaaaaaaaaaaagcaggggctgcaatcttagtctctgataaaacagactttaaaccacaaacagcaaaagggacaaagaattgcattacataatggtaaagggatcaatgcaacaagaagagctaactatcataaataaatatgcacccaatacaggagcacccagattcataaagcaagttcttagagacctacaaagagacagactcccacacaataatagtaggagactttaacatcccactgtcaatattaracagatgaatgagacagaaaattaacaaggatattcaggacttgaactcagctctggaccaaataaacctaacagatatctacagaactcttcaccacaaattaacagaatatacaatcttctcagcag

SEQ ID NO: 950942 - DNA, 605 bp, Homo sapiens
aacccacttgatcatggtggagtatcctttttttttttttttttttttgagacagagtctcgctctgttgcccaggctggagtgcagtggcacartctcggctcactgcaagctctgccttccatgttcacgccattctcctgtgtcagcctcctaagtagctgggactacaggcacctgccaccatgcccagctaatttttttgtatttttagtagagacagtgtttcaccatgttagccaggatggtctggatctcctgacctcgtgatctgcccgccttggcctcccaaagtgctgggattacagacatgagccaccgcacccggccatggattatctttttgatatgctgttgtattccgttagctactattttgttgaggatttttgcatctatgttcatgagggatattgggctgtagttttctttttttatgtcctttcctggttttggtcttaggatgatactggcttcatagaatgatttaaggaggattccctccttctctatcttttggaataatgtcaataggattgttaccagttctttgaatgtctgatagaattcagctgtgaatccatctagtcctggattcttttttt

SEQ ID NO: 950943 - DNA, 605 bp, Homo sapiens
aacccacttgatcatggtggagtatcctttttttttttttttttttttgagacagagtctcgctctgttgcccaggctggagtgcagtggcacaatctcggctcactgcaagctctgccttccatgttcacgccattctcctgtgtcagcctcctaagtagctgggactacaggcacctgccaccatgcccagctaatttttttgtatttttagtagagacagtgtttcaccatgttagccaggatggtctggatctcctgacctcgtgatctgcccgccttggcctcccaaagtgctgggattacagacatgagccaccgcacccggccatggattatctttttgatatgctgttgtattccgttagctactattttgttgaggatttttgcatctatgttcatgagggatattgggctgtagttttctttttttatgtcctttcctggttttggtcttaggatgatactggcttcatagaatgatttarggaggattccctccttctctatcttttggaataatgtcaataggattgttaccagttctttgaatgtctgatagaattcagctgtgaatccatctagtcctggattcttttttt

SEQ ID NO: 950944 - DNA, 669 bp, Homo sapiens
agtcttttattaacatatgcatttatttatcctcagtatacacctaggatggaacatatgtaatagtttaactgcattaggaaatgccacacaattttccaaagtggtggtaccattttacactctcatcaaggataagcacaccagaactttgtgcttttactttttactttttggcattatactacgtgtgtagtagcatctcattgtggttttaattcgctagtttaatttgctgattactagtgctttggagtgtcttttcatgtctttatggaccatttagatgtcttctttggtgaagtgcctattcatgtattttgttcactttaaaaatttgttttttatatttttattactgattatcctcttagtatcaatttatgggagttatttatgtattctggacataaattccttatcaaagatatatatcttttctcccagactgtggcttgctttttttatgtttttactagtgtttctcagtttaaaaaatagtttgtaacttaaaaaatggttgtagtgtttaacctactaggtaatccataartagatgtatttttccattacctagtaaaacacatgataaataagatcaacagtgattatttctggtaggcgttacttctgtaggttttattccccctaaaggctaattatgaaact

SEQ ID NO: 950945 - DNA, 616 bp, Homo sapiens
tctgtaaaacagaccaatcagctctctgtataatggaccaatcagcaggatgtgggtggaccagataagggaataaaagcaggctgctggaaccagcrgtggtaacccactgggtcacctaccacagggtggaagctttgttcttttgctctttgcaataagtcttgctgctgctcactttttgggtccacagtgcctttatgagctgtaatactcactgcgaaggtctacagcttcactcctgaggccagcgagaccatgagcccaccagcaggaatgaacaactccggacgggaggaagaaacaactccagatgcgctgccttaagagctgtaacactcaccttgaaggtttgcagcttcactcttgaagccaacgagaccacgaacccaccagaaggaagaaactccgaacatgatcagaaggaacaaactccagacacatcacctttaagaactgtaacgctcaccacgagggtctgcagcttcattcttgaagtaagtgaggccaagaacccaccaatttcggacacaatatgatccgtgatatagaaagattacgctatggcagtgaactaggagggggaggaatgggagttaggaggttggtgcagcat

SEQ ID NO: 950946 - DNA, 613 bp, Homo sapiens
ctctctttctttctctctctcwctctttcctatcaaaaactcatgctgatatgagttggctgtgtccccacccaaatctcatcttgaattcccacatgttgtgggaaggacccagtgggaggtaatcaaatcatggggcaaatccttcccgtgctgttctcatgatagtgaataagtctcacaagatctgatggttttaaaaagaggagttcccctgcacaagctctctctcactttgcctgctgccatccatgtaagacctgacgttctcctccttgccttccaccatgattgtgaggcttccccagcagtgtggaactgtaagtccagttaaacctctttttttgtaaattgcccagtttcgtgtatgtcttcatcagcagtgtgaaataaactaatacacatgcttagcactttttctttttttgtttgtttttttgagacagagtcttgctctgtcatccaggctggagtgcagtggcatgatcatggttcactgcagtctcagactcctatgctcaagcaaacctcctgcctcaacctctagagtagctgggactacaagtatgcatcacaatgcccaactaatttacatttttttttgagacaggtc

SEQ ID NO: 950947 - DNA, 571 bp, Homo sapiens
ctactttctgcctctatgaatttgamtactctaggtatttcacataagtggaatcatacagtatttgtctttttgtttctagcctagttcacttagcaaaatgccctcaagttttatccatgttgtagcatgtgtcacatttccttcctttttaaggctgaataatacattgttgtctttcaatgcttattaattccattgtgtgcgcatgtgtgtgtgcaaatgtgtgtgtgcttctgtgtgtatttacatatatttatatatacataccacatttttgtttatccgttcaatcattgatgaacacttggattgcttccaccctttggctattgtgaataatactgcaatgaacaaagatatacaaatatatcttcaagaccctgctttcaatttttggggggtggtatatgtccagtgtggaattgttggattatacagtggttctatttttaactttttttctttttttattatactttaagtcctggaatacatgtgcagaatgtacaggtttgttacataggtatacacatgacatggtggtttgctgcacccgtcaacccatcat

SEQ ID NO: 950948 - DNA, 573 bp, Homo sapiens
tccatgttgtagcatgtgtcacatttccttcctttttaaggctgaataatacattgttgtctttcaatgcttattaattccattgtgtgcgcatgtgtgtgtgcaaatgtgtgtgtgcttctgtgtgtatttacatatatttatatatacataccacatttttgtttatccgttcaatcattgatgaacacttggattgcttccaccctttggctattgtgaataatactgcaatgaacaaagatatacaaatatatcttcaagaccctgctttcaatttttggggggtggtatatgtccagtgtggaattgttggattatacagtggttctatttttaactttttttctttttttattatactttaagtcctggaatacatgtgcagaatgtacaggtttgttacataggtatacacatgacatggtggtttgctgcaccygtcaacccatcatctacattagatctttctcctaatgttatccgtcccctagccccccatcccctggcaggccccagtgtgtaatgttcccctccctgtgtccatgtgtcctcattgttcagctcccacct

SEQ ID NO: 950949 - DNA, 720 bp, Homo sapiens
gcctgtgccgttccttagatttccattcataaggtgtgtgtgtgtgtgtgtgtgtgtgtgtgtgtgtgtgtgtataaaaaaatatatggagtcttgctttgtctcactgcaacctccacctccctgttaaagagattcacgtgcctcagcctcccgagtagctgggattagaggtgcacaccaacacacctggctactttttgtatttttagtagagacagggttttgccatgttggccaggctggtctcaaactcctggcctcaagtgatcctcccgtctcagtttcccaaagtgctgagattacaggtgtgagccaccacacccagcctcatgagataaatattaagaaacaaaggcctaagaaggtgacttgtccaaagtcacctgcctcagtggccctggactccccgaaccttctacagctagtactagaatccagtgttagttctacgccatcaagctacttggtatccaaaatgtcatggaagtagtcacagctctccttcacacagtcatgggcacctctccctgccttccagtaaccctccaggcttcttctactgctggggaaaatgttcacacattcaaaagtccttagcaaacacagtatagkaggtgcctctaaaaaccacattatctgtctgaggtccaaactcttctccacttacaaagctctgtggtgcccggtgggaggcgtagccctttctgccctttctgc

SEQ ID NO: 950950 - DNA, 705 bp, Homo sapiens
cacgtaccaggctctgggtgtcgctcccgcgtggctctgaccgtggctgtaaccccagagtgacccccgggaggaccccagcccrccccagccccacccaaggccgcagccccctgaccccaggccccggtccctgcggagggaggctggagacccggcgaggacgccgcctcccgtgacagttctcagaggtgcctgggaactggctccggccccgtccgctgccctcatttcctctgccggcttcctctgcgggggggcggggaggccaaggccgccggtcccgcgggcgcttgttcctctgtgaaaggcagggcaaggcccaggggggcccagacgccaaagccctcctgtcactgtggcctgcggaggggacgggagtctccccaccacggacacgggctcctgggcccctggatctgtgccaccagggacaggaccgcaggccgaggccccacggcaggtgctttgcatcaggctcccacccaggagtggtcgagtgggcctcccgtcagccttgccctggcgtgcacagaggggtcaggtggccctcgagaaaagcctaccccggaagaaccccgtgagctggagacaggaggccggtgacagcagaacagcgtggtcccaggctcaccgccgacaccacatccgaggagacaccgaggtgctccgtggaccctctgcctcccccgtggaccgaggagg

SEQ ID NO: 950951 - DNA, 597 bp, Homo sapiens
tgattagacggaggttttgcataagggaagggacaccatacaggtgatgtgcccttcccattgaatcatgtcaggaacgtgatggtacatattacccgtgatgtcaatcttcatcattgcccaaggtggtgtctgccaggtttcattttggtaaagttactattttccctttgtaattaatgaatattagatgggagatacttagagattaggccaatatcttatttctgcttaaactttcacacattaattttaccatctgtatgagttttctagggctaccataacaaattaccaaaacctgggtgccccagaacacagaagtgtattctttcacagtctaaaaagccagaccctgaagtcaaggtgtctgcagggttgattccttctgatatctctggggtataatctggcccatgcctccctcccagcttctgatggttgctggcaattctggcattctgtgtcttcttycctgtgtgagggagtcctctgctcttacaaggacaccaggcattgggtttagggtccaccctaatccagtatgactttatcttaacttgattacatttgcagagaacccatttcctgataagg

SEQ ID NO: 950952 - DNA, 513 bp, Homo sapiens
  misc_feature 79: n = A,T,C or G
gccctgtacacgtttgtatttttaaagaccacaggtgatcaaggtgcacagccaagatggagaaccactggctgagccnggtgatccctaaacttgagtgttatattgaaatcacccagaaggcttgttaatatagattgctgggccccatccctgagtttctgaaccatcaggtctggggtgggccttagaatttgcatttctaacaagcttctaacaaggtgcttatgttgctgatgtggggacatgctgcaaccattgtcttaacacataggtaggacatattttttggatgtgtaagtggaagagacgattagaaagaaaatttagattcaaaaaagtctagtgttttagttatcaatcgctgcataatgaaccattccaaaacacrggggcttaaaacaattcatgtgttgtttctcccaatcctgtgggttgcctgggcttagctggtatggttcttttgtttcataaggggtagctgagggcactaatggagctgccttccactag

SEQ ID NO: 950953 - DNA, 652 bp, Homo sapiens
tgctttctagtaggtgctttatatactggtacataaaggattgattattataccccagagatgttctctgctatcctatcaccatgcctttcctcataatgatctattttctagaaatgcccttttccctcatctcttaaagacctatatcaaatgtttcttgggtcttcatagttattggcctatagccctcttaaaacatttatgatgtttaatcttgtgttagagcgacttttatacttttatcccaatatttactggataaaagcagtatgtctgtattacccttgtattcgtgcagcactgagttcaatgcttggagaagagtaggcattcaaagccattttaccaaccacctattatatgctttcaatatagcaggtattaatctagaccctagaaccccgatctgatttaaggaacgagaaaccttaaaatagggatctgtggagaaatcctagtttcagatgttagtggaagttaactattaacccaagatatttggaacaagttgatgactacattaagcagatagcttccacccagacccattggaataattagtctattaatggttagcaacatttttctataaagaaacaggtaataaatattttaggctttcagtcytttaagtctctaccaaaactat

SEQ ID NO: 950954 - DNA, 718 bp, Homo sapiens
aacaagtggcagtcaacctaatcagaggaggccagtccacctcccgctggtcccacacccccatcacttctcatcaccagagagggcccctggcttgggcccacagcacagacctttcatcctgtgctgattctgctgagcaattactgacctgcatctctctgggatggagcctcccaggagacaatcaaatgacccttgaccaaaaccactactaagatcccttcctctgctgcctccaagttggggaaggaacataaacaataagattgccccagagctgcagcaggcagctcaggagtgccaagtcacaatctacagccagcattcaaggggaagaggaacccatgctttcagagcattgagaggaaacatggctgcaactgtgaggaaatagggaagccacacaacaagcaagagtttaccaactgactaataagcctacgtgccacctgctggatcatactgtaaaggtttatcaccaaaaacacctcactaacatacctctgccgaaaccagagacaagaaggtagcttcaaataaagaccctgcacaaagcctaggcctggcaaaaaacatccagaaragaagtctattgactacccaatctacactgcagctaaaacaacagccacatgtagagataagaaagaatcaatgcaaaaacacaaagaaatccctgtttgagggtctggagtgaatctccaggaaactccaa

SEQ ID NO: 950955 - DNA, 628 bp, Homo sapiens
ctagagatagagcccctcggggaagccttcctgtttcttataaagaatattttctttagatttttttgaagtcttcatttgttactttcaatctacattctcttaaggccacagaccagcttctctacatgttaccttgatgtcagcaccagagaggtcatctttagccataatcaaatcgtccagggttgtatcatcagccagcgtcatcctgcttgtgtgaatctgaaagatgtgcttcctagtcttttcatcaggaagggggaactcgatatttctgttaatgtggcctggtctgataagtgctggatccaaagtttctattcagtttgtggccatgataactttcacatctctcctacgatcaaattcacccaactggttcaacagtttcaacattgttcactgaatgaatttctttctcaccaccagaatttgagtcatatattttgttccaatggcatcaatttcatcaataaacacaatggatggtgcatgctcttcagcaactcaaaacaatttccatacaaattcrggcccatcacctaggtacttctgaataagttcagagccaaccactcttcaagaaagtggtggaggtttggtttcctgctgctatggctaacaa

SEQ ID NO: 950956 - DNA, 657 bp, Homo sapiens
gatctgggccatcctttacccactcagactttcttcctgcccacctgctgctgtgaatcctgtatgtcatatayatatatatataaaatatattatataattattatatttatgtaatttacataatataatatataaatgtattatatatagtattatatataaaattatactttaagttctagggtacatgtgcacaacgtacaggtttgttacatatgtatacatgtgccatgttggtgtgctgcacccattaacttgtcatttacattaggtgtatctcttaatgctatccctcccccctcccctcaccccacgacaggccccagtgtgtgatattccccttcctgtgtccaagtgttctcattgttcaattccaacctatgagtgagaacatgcatgtcttatatgctctcaggcagagaggaaactgctgagcagggcaggggacagagccctgtggctctccactttagacccctcccggctgactgccatggaatgcagccacttagcagggccaaatcccctgatgttcctgttggctgtctagccttcagggacaggtcatggggccttggttcctgccctgtcatcttcccagtcaccctgatcttcagggggaggaatagcctgagaaaggacttggtcatagca

SEQ ID NO: 950957 - DNA, 589 bp, Homo sapiens
attacaggggtgagccgatgtgcccagcccraaagtagtatttttaattctcaaaaggaagcccaaagttacattgttagcctgaggcaggagttagtctagcctcgcactccatcatctagaaagccaggggggtgaaggcaggcagagctagggtgtctaggccaggagaagctctgggacaggaaaggcagtgagaaaatctgatggcagtgccgtcagccccgtggctggatgccgcctcaccctgaggctgttagcccacaagccccagtctccctccttccctccatagttcttgggaaactggacccctggctggctcctttcctggttggtatgtgtagaacattagagagacactcccaactgggaaacctctcttactgattgcaattacacaaaactaatctattttttgacgtctctcttttttctccccaaccatgggtatctttacttttagctgcccacgggtctcccctccttcttcactgtgtcttcacgacaccttcagagctgctgggagagaggcccaaaggcccagtgtcctgagtcaggagcagtagctgtgtcctggtgccccgtc

SEQ ID NO: 950958 - DNA, 744 bp, Homo sapiens
tcttggctgtgacagtttctcagacttgctgtagatgatctcaacagctttaagtactaatcacgtattctatagactattcatcagttgggatttgtctgatgtttttcttatgattagactagggtttgggttttgggagaaagagcccagaggtaaggtgctggtcttatcacctcatatcacggatctgtactgtcaacatgacttcaccctgctgaagttgaccttcatcacatgcctgaggacaacgtgtcaggtttcttcactgtcatgttacccttttctcattttccatactgaactgtctggaaagaatcactgtgtatactgtgctccacctctttgagggtggagtatctgtgttcattcttctgcatgggagattggtcctttctccctcacttatatatttatacaattatttgttaacatcagtatgggctaatggaaatgtagactttgggttataatccaatcatactttatcttgcccaattttttctttctttcttttttttaacactcctatcaatgttttctagctttggttattaggaactttttcactttcagttggctcctgtgttcctttgacacatccgtatcatttggtttttgttttgttgattasttccttcctttctggcactacaagatgcgccaggaccatcttgtatagacctggttctttgatctgggcactaggtgtgcttgttgctactgggtgtcattacttctagt

SEQ ID NO: 950959 - DNA, 677 bp, Homo sapiens
ctcggagtctgtttctgaggaagctaatctaagtcaggcatcaccgctgcatgcatgtgagataaatgtagggaactggagagagagcctggggaccgtgcacacagtgagatgagaaaggaagggaaggagaaaggaggagagggaggcagggagaggaccaagatgaggaacaagggcacatgagcttcagaccaaaggactgccctgagatacggagggaaaaccaaaagatcctactatcaggaagtcagaagagcagaatattcaaggagggagtggcagtagcaccaaactccgcagagaggtccaatcacattaaaaaactaaaaaaaaaaaaaaaaaaatctgtatcagtcagggttctctagaggaacagaactaacaggatagatgtatatataaatcggagtttattaaagagtattgactcacatgatcacaaggtgacatcccacaataggccacctgcaagctgaagagtaagaaagccggtccaagtcccaaaacctcaaaagtagggaagccgagagtgcagccttcggtctgtggtcgaaggtacaagagccccaaggctgaagaacttggagtccgatgttcgagggcaggaagtatccagcacgggagaaagatggaggccagargactcagtcagtctagtctttccacattcttct

SEQ ID NO: 950960 - DNA, 635 bp, Homo sapiens
ccagggaaaggcaggctccgaacagatagaaaacacctgaagctggtgatcagcttcctggtaagatcccaggagttgggcgagtgggctcaagcatgagcactaacaggcaaagtggtggygtttacctggtttatgaccttcctctaggaacactcaattggtaagggaagaacgcaccaattaggcatgcacaacttcactaaacacactgcgcatgcggtcccgcccaagtgctggcaggccactgagcatgcagacagcccatcccaacgggagaatcaggggagaagggatgcaaccccctggaagcatgccaatgtataaaaccccaagtcaaaggtcaaacagcgcacttggccctcttccaagtgtactttccttccttttgttcctactctaaaacttcttaataaatttacactcctgctgtaaaacttgccttggtttctcactgtgccttatgccccttggatgaagtctgtcctctgaggaggaaagaattgacttgctgcagacctgtgcagattggctgctgctaacaatataaaaattttagtttctaataggaaatttaaaacacaagtcaacatagataattgtctttataactcctatgtatccatcacccagct

SEQ ID NO: 950961 - DNA, 565 bp, Homo sapiens
gaagttcaagaacagcctggccaatatggtgaaaccccatctctactaaaacgcagaaattagctgggcgtggtggtgcatgcctgtaattccagctacttgggaggctgaggmaggtgaatcgttgaacccaggaggtggaggttgcagtgagccgagatcttgctattgtattccagcctgggcaacagagtgagattctgttaagggaggagaccacccctcatattgtcttatgcccaatttctgcctccaaagaaagaagaagtaaaaactaaaaggcagaaatgaaatccacaggcaaacagcctgctgccgcgccctgggcctggtagttacaacctaaccagttatgttatctatagattccagatattgtattgaaaagcattgtaaaaatccctgtactgttctgttccgatctgattactggtgcatgcagcccccagtcacgtaccccctacttgctcaatcaatcatgaccctctcacgcagacccccttagagttgtgagcccttaaaagggacaggaattgctcactcgaggagctcggctcttgagaca

SEQ ID NO: 950962 - DNA, 565 bp, Homo sapiens
gaagttcaagaacagcctggccaatatggtgaaaccccatctctactaaaacgcagaaattagctgggcgtggtggtgcatgcctgtaattccagctacttgggaggctgaggaaggtgaatcgttgaacccaggaggtggaggttgcagtgagccgagatcttgctattgtattccagcctgggcaacagagtgagattctgttaagggaggagaccacccctcatattgtcttatgcccaatttctgcctccaaagaaagaagaagtaaaaactaaaaggcagaaatgaaatccacaggcaaacagcctgctgccgcgccctgggcctggtagttacaacctaaccagttatgttatctatagattccagatattgtattgaaaagcattgtaaaaatccctgtactgttctgttccgatctgattacyggtgcatgcagcccccagtcacgtaccccctacttgctcaatcaatcatgaccctctcacgcagacccccttagagttgtgagcccttaaaagggacaggaattgctcactcgaggagctcggctcttgagaca

SEQ ID NO: 950963 - DNA, 565 bp, Homo sapiens
gaagttcaagaacagcctggccaatatggtgaaaccccatctctactaaaacgcagaaattagctgggcgtggtggtgcatgcctgtaattccagctacttgggaggctgaggaaggtgaatcgttgaacccaggaggtggaggttgcagtgagccgagatcttgctattgtattccagcctgggcaacagagtgagattctgttaagggaggagaccacccctcatattgtcttatgcccaatttctgcctccaaagaaagaagaagtaaaaactaaaaggcagaaatgaaatccacaggcaaacagcctgctgccgcgccctgggcctggtagttacaacctaaccagttatgttatctatagattccagatattgtattgaaaagcattgtaaaaatccctgtactgttctgttccgatctgattactggtgcatgcagcccccagtcacrtaccccctacttgctcaatcaatcatgaccctctcacgcagacccccttagagttgtgagcccttaaaagggacaggaattgctcactcgaggagctcggctcttgagaca

SEQ ID NO: 950964 - DNA, 573 bp, Homo sapiens
gcagtggcacaatctcagcttcctgcagcctcaacctcttggctcaagcgattctcctatctcagcctcttgagtagctgggaccacaggcatgtgccaccacacctggctcgtttttgtattttttgttgagatagggtttcactatgttgcccaggctagacttgaactcctgactcaaaaaatcctcccacgtcccaatgtgctgggattataagcatgagccatcacacctggccgtatcaattctcaaaattctgagtcctacccttgctaatattgcctctcacacacattctctgctactgctttcctgactcaatgcatgctgggccttctctgctatgtgtcttaacctctttattactttcattttttatttttatttttggcactgtagggtacattttgagtaatttattcaaaagtatcctccatcccactaatttggtctttaattgtatctaatctggtgtttgcgtttcgatttktaattgtagtcattatctttttatatgttagttgtgttagttgaagtttggatttagttctattgttttttctttctgtgca

SEQ ID NO: 950965 - DNA, 802 bp, Homo sapiens
tgatgtcttttgatggcccttgcagtgaatgactccagcttcctttggaagtaaagcagccttgagaagagtttttattaaagaggcattaatgatagaggatccttgcgtagtgaggaaacctctttcagcccatataacagcatggtggtgtaggatataggaggcatatttagagtcagtatgaatattgacgtgtagtccttttgcaagagtgagggcctgagttaaggcaatgagtttggcttgctgagaggtagtggatggggacagaatggtagcctcaatgatagatgtgaaagatactatagcataacctgcctatgctggtgagtggagattaggcctggtggaactgccattagtaaaccaagtgtgatcagggtgaggaacaggaaagaaggaaatatggggaaatggagtgaatgtcaggtggatcagagagatacagccgtgggggtcaggtgtggtattaggaataatgtgggggccagcctaaaacagtaatgtcaagttgtttggacagaaaggctacagggtgcggtcccagctcttgtgtaggaattttgaccgcacagccctgcactttgtctgtgtgtaatgaaaagcgttgggatgagttagggagatctagggtgggagcagattttagggctgtttttaaggaatggaaagaagaatggtgaaaggatttaggatctatggggtcagctaggtttactttgtgagtttatrtaatggtttagtcaggttggcaaaaccaggtatccaaaggtgaaagtacctgaccatgcctaggaag

SEQ ID NO: 950966 - DNA, 623 bp, Homo sapiens
ttgtaatctaagagcaataggctgtactacacagcctaggtatgtagtaggctgtatcatctaggtttctgtagttacactttatgatgtgcacacaatgagattgcctaacaatgcatttctcagtacatatcctcatggttaagcaacacgtgacctactttcactaatgatgaactaggatggtgtgctagtggattgaaatccattggtgtagtgtgattattcaggaatttgaaatgaataaggggaatgataaatataaagataattgaattgttgttataagttgcattgataatctgtagataaagaaaagctgaggtcaattagcaaacaattgaaaactaaataacagagctggtctctttggtaacttacaatgaatttattgacttgatggtactctgttgggatatgcaatgtaacattctgataagggcttcaggggatgatgcaaacttgctacaagggcaaaaaatgatggcccacatgaatgaggcygaaattcccgaattgctatgacatacattagtaaaagatattacagtaaaggattgagaacagtggacaggctgaacatataatattgtatatataaggccagaagacacatcagaagg

SEQ ID NO: 950967 - DNA, 624 bp, Homo sapiens
cagggtggactagtctttcaggtagcttgactgaggagctatatgacagtagcaacagagaatgagagagacaagggaaaactttatgaccatggaagacattcaagtgtttataggcaaagggaaagaaaccatttgaaaagaagttagaaatagaagaaagggagtaaataattgatgatggagtgtgatccttgagaaaatagtcatgagaatactagcagactgattagctttaggtaggaataaagaccttctgagaccataaggaaagaaaaagtatgaagatagaaagggtgacgtgacataggaagtagagaaccagaaaacagagaatgtggatcccagcccactttctctcttacttgtgtggtagaaattaaactatgtgctgaaagtgaaggctaaggagaaacctggagatggtatagaaacctcctgaaagggtggctgggaaagagaactgaccagagacatggcaaaaagtagagtgagatcarcacagggattaaggtatatagccaaagaggccttgcacagtccagttccagaaaatgccactcctcacttgagtattgttgcctccctgatcattaaatattagcaaaaatactgtaaaatgat

SEQ ID NO: 950968 - DNA, 617 bp, Homo sapiens
tcaccacatccacaccaacatctattacttttgactttcygataatgaccaatctggctggggtaagatggtatctcgttcaggttttaatttgcatttccctgatgattagtgatattgagcactttttcatgatttttggccatttgtagatcttttgagaaatgactaatcatgtcatctgcccactttttaatggaataatttgcttttttcttgctgattgggttgagttccttctagagtctgaatattagtcctttatggcataaatactttgcaaatattttttcccattctgtgggttgtctgtttactctgataattatttcttttactttacagaagtttttagtttaatcaagtcccatttatttagttttatttttgttgcatttgcatttggagtcttagtcataaattatttgcctaggccaatgtccagaaaagcttttcttttagaatttttacgttttcaggtcatatatttaagtctttagcaaaatggattaaaaaaaatcacaaagtaaatatctgctgtcttcaagagactcacctaacacataaggattcttttagactcaaggcaaaagggcggaaaaagatattttatgcaa

SEQ ID NO: 950969 - DNA, 690 bp, Homo sapiens
agaacttacctagtaaagcgtcacagaaaaaaaaccaacatgcctctggtcaaagcacctgttattctgtctcccctgagggttatacaaactrattggtggaccccagaacccaggcgcactggaaatgaagcagcatctctggggattgcagagccacactctcttagaaattagcttctaggggcaaagtgtagtgttcacacctgtaatcccaggatttagggagccaaggcaggtggatcacttgaggtcaggagcgcgagaccatcttggccaacatggtgaaaccgcgtctctactaaaaatacaaaaattggccaggcatgatggtgcatgcctgtagtccgagctactcaggaggctgaggcacgagaatcacttttaaccccagaggcaaaggtttcagtaagccgagattgggccactgcactccagcttgggtggcggaattagcttctaggacccctgcctgacttggtgtgccagaggttgtatggacaactgatggccctgactctacaattaaattagttcaactaagtattcttagttgagacatgaaagcagtacttggcacaatttaatccatgggatagggttaggatgtaacagcatttaaaatacacatcatgcattcagtgtatgttaggtataattaatggaggcagaatttttcattgctgtggt

SEQ ID NO: 950970 - DNA, 711 bp, Homo sapiens
agccttgcagagggccagcacctgtgacagcacctggagctgcccaccccaytgcagcaaccagcatgtctgactatgcagtggccagaccccatgctcactcacacacccctggccattccatgtctgattcacccttggcaggcatgggacccaggccagtaggtcaagtgcagcctgccaaggtgagttggtgaaacagcctagccacagaggtttctagccagaaaaacaacaccctgaagatcctgtaactgcatattatctgagcacttgggacaaagatcctgtctctaaaaacaaaatttttttttaattagccagtcatggtggtacatgcctttagatccagctactcaggaggctgaggtgggaggattgcttgagccaaggagttcaaggctacagtgagctaggataacaccactgcactccagcctgggtgacagagtgagaccctgtatctttacaattaattaaataaaaataaatgagaaagaaaaaagaacaaaagaccaccatctcttatgaacattgatgcaaaaatcttcaacaaaatactagcgaaccaaatcttgcagcacattaaaagcattttacacaatcatcaagtgggatttattcctggaatgcaaggatggttcaacgtattagaatccaccactctaataaacaacattaacagaatgaaggggagggaaccacatgatc

SEQ ID NO: 950971 - DNA, 561 bp, Homo sapiens
actctctatgtccatgagttcaattgatttgatttttagatcccacaaataagtgagaacakacaatgtttgtctttctgtgcctgacttatttcacttaacataatgatctccagttccatccatgttgttgcaaatgactggatcctattctttttcatggctgagtagtactccattgtgtatacataccacgttttctttatccattcatctgtcgatggtcacttaggttgcttccaaatcttagctattgttaacagtgttgcaacaaatataggagtgcagacatctcttctatataccgatttcctttcttttgggtatatacccagcagtggggttgctggatcatatggaagctcaatttttagttttttgaggaaactccaaactgctctccatagtggctgtactaatttacattcccacttacagtgtacaaggttcccttttttccacattcttgtcagcatttcttattgcctgtcttttatagtaagccattttaactgggatgagatgatatctcactgtagttttgatttgcatttctctgat

SEQ ID NO: 950972 - DNA, 569 bp, Homo sapiens
ggcggtgcctgcatattgtgcagaaccatctgtgaacgaggccctagtcttctcttcctctgtcaaatgatcatagggagctccccatgaggccatcaatgcaggytgggggagagaaggcagagaggcaggagtggagaccatggacatttgatccacttcctcatgtaacttatatgtatcttcaggacctgctggagcctgatcatgtaatagcacttccatttgatgatggaatgttgctgtgcacagcccacttctggcaccaaaatctgtattagtcagggttttctagagggacagggctaattggatagatgtatatatgaaagggagtgtattaaggagtatagactcacacaatcacaaggtgaagtccctcagcaggccatctgcaagctcaggagcaggaaagccagtctaagtccccaaacctcaaaagtagggaagctgacagtgcagtcctcagcctgtggcagaagacccaaaagtccctggcaaaccactcatataagttcaagagtccaaaagctgaaagaacttggagtcctatgttcgaggggaggaag

SEQ ID NO: 950973 - DNA, 733 bp, Homo sapiens
tgcccggagtctctcaggccyttccttgccatttactctcagccaacctgtatgacccgtgagaaacattaggaaacagaggtctgaaagactcacaaccatgtttaaaagaatgggagttagtatttggctaaacagaatccaaatatgatacaatgtgtctgggggcaatttacccatctagacgaacagcctttagaatgtgtccttggcccagtgattctcttctggagatgtatcccaaggaaataaccaagtctgtgggcaaatatacccaaggatgtttaccacagcattctttacaagacagaaacagaggaaacaagctaaatgtaggagattggttaaataaatgatagtccatctgttcaaaagaactatacaaccctttaaagtgacttgacggaggctgcttaacctgatggaaattttaatcacatgttgtaaagtaaaagcaaaaaaaaaaaaaaaaaaaaaagaaagaaaaagtaataagatggtacaaacagtatgatctcatcttttgaaattgaaaaatattctgggggggctatacaatatactaaaatattaataattataggtggtttttatcttttttgcctacttatagtccctaaattttctgcaataatcatcaacctctttgtagcaagaaaaaaaaatcaataaaagctattttctaaaaaacaaaaggaagagatacaagatccaagagactgttcattccttg

SEQ ID NO: 950974 - DNA, 604 bp, Homo sapiens
tcaccttgaggcctatcgtgaaaaaggaaatatmttcacataaaaactagacagaagcttcctcagaaacttctttatgatgtgtgtattcatctgacacacttgaacctttctttgattgaggagtttggaaatagtatttttctagaatctgcaaggggatatttctaagccttttgaggcctgtggtgaaaaaggaaatatcttcacataaaaactagaaagaagctttctgagaaacttcttgtgatgtgtgcattcatctcacagtgttgaaactttcttttgattgagaagtttggaaacagtgttttgtagaatcttcaaatggatatttgggagcccttcaattcctatcatggaaaaggaaatatcttcatacaaaaagtagacagaagttttccgaggaacttctttttgatgtgtgcatccatttcacagagttgaacccttcttttgattcagcagtttggaaacagtctttttgtaaaatctgcaaagggatatttgggatccctttgaggcccatggtaaaaaagaaaatatcttcaaatgaaaattagacagaagctttctgagaaacgtctttgtgatgtgtgcattc

SEQ ID NO: 950975 - DNA, 604 bp, Homo sapiens
gacggacctatgcccacggagtctcactgattgctagcacagtagtctgagatcaaactacaaggcgtcagcgagggtgggtgaggggcactcaccacttcccaggcttgcttaggcaaacaaagcagccaggaagctcgaaattggtgaagccaattcaagtgaagcagctcaattggtgaagcagctcaaggaggcctgcctgcctctgtaggctccacctctaggggcagaacacagacaaacaaaaagacagcagtaacctctgcagacttaaatgtccctgtctgacagctttgaagagagcagtggttctcccagcacacagctggaaatcttataatgggcagactgcctcctcaaaagggtccctgacacctgacacccgagcagcctaactgtgaggcaccccccagtaggggcagactgacacctcacacggccgggtacttctctgagacaaaacttccagaggaatgatcagacagcagcattcactgttcacgaaaatccggtattctgtagccactgctgctgatacccaggcaaasagggtctggagtggacctgtagcaaactccaacagacctgcagctgagggtcc

SEQ ID NO: 950976 - DNA, 822 bp, Homo sapiens
aactttctcagaatgcttctgtgtagtttttatgtgaagatatttccttttccaacatatgcctcaaagcgctccaaatatccatttgcagatactacaaaaagagtgcttccaaacttctcaatcaaaagaaaggttcaactctgtgaggtgaatgcactcatcacaaagaggtttctgagaatgtttctgtctagttttttgtgaagatatttcgttttcagctacaggcctcaaagcgctccaaatatacttttgcagatattgcaagaagaatgtttgcaaagggctcaatcaaaagcaaggttcaactctgtgagttcaatgcacacatcacaaaaaattttctgagaatgtttctgtctagtttttatgtgaaggtatctccttttccaccataggcctcaaagagctccaaatatccacttgcagattctacagaaagagtgtttcaaaacagctcaagcaaaagaaaggttcaacactgtgagatgaatgcacacatcaacaagtagtttctcagaatgcttctgtctagtttttatgtaaaaatatttccttttcagcataggactcaaagtgctccaaatatccacttgcagattctataaaaagagtgtctctaaactgctgaatcaaaagaaagtttcaactctgtgaggtgaatgcacacatcacaaggaagtttctgagaatgctwctatctagtttttatgtaaaatatttcctttaccagcatatgcctcaaaacgctccaaatatacatttgcagatactacaaaaagagtgtttccaaactgctcagtcaaaacaaaggttcaa

SEQ ID NO: 950977 - DNA, 641 bp, Homo sapiens
agggccgcaggtcttcctgcagggtctgagtgaacgcctcacagcggctgggggctgcccccactccccaccccactccgtcttgttggcttcctggggctgatattggtggaccagacrgtcagacccaggcttggggcagtcagcctgctgagcaggaggggccaggctctctcctcctttctgactccagtccagggcaggtccctattagcaggcaggtcctacgacagcagctaatgacaaaaagcttagcgctggggttgtgataaatcacgggtaagtgcaaggctttagaacaaatacctcccatcggttagtaggagtctgtcttggcatagcaccaactgtcacgaggaaaccggggaaagacgcttcttaccagaaaggaatgaaatgccactgaaggccaaatctttccttcttagagtcactcctggggctttgtgcctcagaaccagctctcagccagggctggcacagagcagggttgccagtaggtggatgggccctgcgggagcctctgttattttaaaataccgaccttttcccctctcagcacatagctgtccccatccaagaagcagcaccccaaagacctggcttcctggttcctggactccgcatctcctggctctact

SEQ ID NO: 950978 - DNA, 575 bp, Homo sapiens
tgggtgatttctgcatttccatctgaggtactgggttcatctcactagggagtgccagacagtgggtgcaggacagtgggtgcagtgcaccatgcacgagccaaagcagggygaggcactgcctcactcgggaagcgcaaggggtcagggggttccctttcctagtcaaagaaaggggtgacagacgtcacgtggaaaatcaggtcactcccaccctaatactgcacttttccaatgggcttaaaaaacagcacaccaggagattatatcccgcatatggctcagagggtcctatgcccacagagtctcactgattgctagcacggcagtctgagatcaaactgcaaggccacagggaggctgggggaggggcgcctgtcattgcccaggcttgattaggtaaacaaagcagcggggaagctcgaactgggtggagcccaccacagctcaaggaggcctgcctgcctctgtaggctccacctctgggggcagggcatagacaaacaaaaagacagcagtaacctctgcagacttaaatgtccctgtctgacagctttgaagagagtaatggttct

SEQ ID NO: 950979 - DNA, 598 bp, Homo sapiens
cattctacacttacatagtagaaacagagagctctggtttcttcattccccataagggcactgaatgccattcatgaggactccactctcatagcctaagtatctctaactaccaaatgtcctacttctaaataccatcacgttggggattttggcttcaatatgtgaattttgggggaacacaaacattcagtccatagcagatgtcaaaaagtcttttcaaatacagtatggccaatattgaattactctttctctaacagtcttttaattttggctaatgacaaatcaatgtttccagttactcaagctgtatcttaatacctattcttaacttctatctccccttctatatccaattcattaacaaatcatgtagtttttaaccaccaaaatataaccagattgaaatgacttctcattatttctggaaagatcactccaggcctagaatgtgctgacagagcatatcaacaactctccataatttttcccaggcttcttccacagaccattttcartgcagcatccaggattatcctttgttaaatttggttgattatgtcactgctatactcaaatttttaactgtacctaa

SEQ ID NO: 950980 - DNA, 626 bp, Homo sapiens
aagaactttgcgggcctttcrcttttcatctaccctccttagtctttggttcttatccaggcacttaggagtttctcaatcagtattctttgaatgaatgaattcacaaatccccattttaaggctgtgggaagaaaggcctttagggatgaagtaacatgtccaaggtcaaatagttgtctttggtcagctgttggtcaaatgctacacaattacaggattgcctccctaaggtatagacagtggctgttaaaagaatggatcctatttgtcacctgtgaaggttattttaaaagatttatcttgagtgcataggagtatgaatgggtcactctgggatggggcccagaaatctgggtgttccacacccttacccaggtgacttagagacattcagcaggctgtacctggagaaagaccagtgcgattcatgtaaatctctctacatctccaaccagaggcaaacctgtcaacttttctggctgcaaaatctgcaccttgctaaaggctgtcaagaaccccctatggggggtggacttcttggcttacccaccctccctacatctctgatccttgcatttttagacgtgacaggtgcctgcaaggccaccaaatttcatgtcttc

SEQ ID NO: 950981 - DNA, 589 bp, Homo sapiens
aaagggcatctggaaaccacctcctcccatacccaacgcctcccctgaccctctgcctcacagtcaaatccaaggaawctagtctagtgtttactagcctgggcctgggagttagagcgtcatgtgttcgaattccaactctgtcatttgttatctgagtaatgaagacaaattctctcaactgctctgaactttggtttcttcatctgtaaatgaggaagataatcttaactcccagagtcatgacaagaattaaacatgaaaacatatgtaatgccttaacacacagcttagcaggtggtgagccattcacggactgcctttattttatcagtagccatgtgctgggtgccaggaactgtgttaagagaagaggaggccgggcgcggtggctcacgcctgtaatcccagcactttgggaggccgaggcgggcggatcacgaggtcaggagatcaagaccatcctggctaacacggtgaaaccccgtctctactaaaaatacaaaaaattagccgggcgaggtggcgggcgcctgtagtcccagctacttgggaggctgaggcaggagaatggcgtgaaccccagggg

SEQ ID NO: 950982 - DNA, 683 bp, Homo sapiens
gccaccagcctcctttttcattggctcccacagccagagaaggagcagactgaacccctttctgagcagtgtggatggagcacctactgtatataaggcaccacgtatgggaaggtgggcagggagrccatgggactgcatatgatgtggattctttcctccaggggctttcaggcaaaagggggaggcagacacgtgaacaacagtgtcccctgcacaggagacagtggttagcgctaacataaccagcaacccaggcaagggtctggggagccctggaggcccaggctggggcccagagcatggaccacccgctcactgttggctctaccactgtgattctgggaccagcatcattcagctcctgatgtctgcatgcagaatggttcctagcctgggctttggggtcagacagactgggcctcccacttactagctgtgtggccttagaaaagtcacttagcctatctaagcctcagttttaacatctgtaaaagagcataatagtaatgcccacattcctgggatgtagttccacttaggaaagcttcctggaggtggggaaaggtgagccaagagacagggagagctgaagtggacaatgatgaaggaaaggtatcgctggacagtggcagcaggtggagctgggtggcagcaggtatggagtggagaccactagcgac

SEQ ID NO: 950983 - DNA, 593 bp, Homo sapiens
accacctggtcctcaatctgacagacttcagttccctgccagccgcaaaycattaaaacaaggcagtatcgtcctcacatagtaaccaggggcaccctgtgctgttgatattcaaagcctgcctctctcttgctgcccctgcttgttcatctgttcccaagtgcaccccggtgtggccctgtgtggtgtgcagtgtcctcccgcaggaccatgagtagatgtgggtaataaaatgctgcccatctatctgcccagtgttgcgatgtgttcaaccatctcattctgtttagggcagtggatgccttcctcactaatgaggtgaatacgaggtcatcatagcactataaaaccacagtaatcaagccagtttgctattggtgaaggaaaaaaagagtacagaaatagacccacatgtatgtgcacggccacttgattttccatagagatacaaatgcaattttgtgaagaaagaatacacttttcaacaatagtgtttttttatattaaaaaaagaacttaaattcttaatttgctccatatacaaaaattaattaactcaaaacaaatcataaacctaaatgcaaagattgaaa

SEQ ID NO: 950984 - DNA, 702 bp, Homo sapiens
catccaggggagacatcacatgtcrgtagattctgtgatgccccacaagccgcaaaaccagcaagtttttattaggggttttcaaaaggggagggagtgtgtgaacaggtgtgggtcacagacatcacgtacttcacaaggtgataggatatcacaaggcaaacggaggcagggcgagatcacaggaccacaggaccggggcaaaattaaaattgctaatgaagttttgggcaccattgtcattgataacatcttatcaggagacagggtttgagagcaactggtctgaccaaaatttattaggcaagaatttcctcttcctaataagcctgggagcgctatgggagactggggtttatttcatccctacagtctcgaccatagaagacggccacactcaagggggccagttcagagacccaccctcaggcgagtattctctttctcagggatgttccttgctgagaaaaagaattcagtgatatttctcccatttgcttttgaaagaagataaatatggctcttttccgcccggctcaccagcggtcagagtttaaggtgatctctctcattccctgaacaattgctgttatcctgctcttttttcaaggtgcccagatttcatattgttcaaacacacatgctctacaatttgtgcagttagtgcaattatcacagggtcctgaggcgacatacatcctc

SEQ ID NO: 950985 - DNA, 654 bp, Homo sapiens
tcctcatagcagccctcctcctgagactgtggggacgagggctagatctcagatccagggtctgtcctctgagaagtcatctttacaggcggatttcttagtgtttttcattggcagaggcaggcttttccttgtgtgacctcaatgaaagtatatttgatcatccttagaggagatgactagaaggtactccatattgtctctccccagaacactgctgagaggcagcatttttaccagagagatgatttggccttcagcaagtaatctgaaatagaaatgatggatagaagacgctagccaaccaggagctcagagaagatggtcatctagacagagatacctggggcatggcagtcatggagaagagtcactgtcactctttctgctcagtcctagagatagttttcaatgccactgcattttgccctaagtggtaatatagatactgaatgaatggatgttactctgctggagatttcaataaagaggtagtaagtaggttccttgttgggttttactcaattttccaaatttgtatagcatttacmttcatttacatttttataagttgtcgttaagcagcaatagtttgtattttttttacattaagaagaaccatacaaattgacatcgtagaaaaatgatgaaaaa

SEQ ID NO: 950986 - DNA, 603 bp, Homo sapiens
aagttggagtgcctgttaaatgggtattctctgtctctgttttgactgaggcccaaagatagtaactgtcaatgctactcatattgcagaacaatctgtgaatccatcaaagcagaccttgccaaggaggcggctgggaataatttggggaccctcggaagaccacttgcctccattcttttagaaatattggacacgaaattagaaaggttttttgtgggaaagatattggtatgctgctgttccactacttggcctccaggacttttctgagggacaaagatgcctgctagggattcactttatatctgtgtcaggagatgatgggtctgtgttagtctgttttatgctgctgtaacagagtaccacagactgggtaatttatgatgaacagaagtttatgtggttcatggttctggaggctggaagtccaagagcatgatgccgacatctgacaagggccttcatgctgcattatgtcatgacagaaagtggaacggcaaaagaggtcaagagcaagagcaagaggrggctgaacttgcttttataacaagcctactctcttaataatgaacccacttccacgataatggtgttagtcca

SEQ ID NO: 950987 - DNA, 632 bp, Homo sapiens
ctgaattctaccagacatacaaggaagagctggtaccaaccctactgaaactattccaaaaaattgaggaggaggaactcttctctaactcattctgtgaggccagcattattctcataccaaaaccttgcaaagacacaacagaaaaggaaaacttcaggccaatatccctgatgaacatagatgcaaaaatcctcaacaaaataccagcaaacttaattcaacagcgcatcaaaaagctaatctaccatgatcaagttgactttattcctgggatgcaaggttggttcaacatagaaaatcaataagtgtaactcatcacacagaactaaaaacaaacaccacaggatcatctcaatagacacataaaaggctttcaataaaattcaacatcttttcatgctaaaaacttcaacggaataggcattgaagaaatatacctcaaaatcataagagccatgcatgacaaacccatagtcaacatcacacggaacggacaaaagccagaagcattccttttgagaascagaacaagataagtatgccctctctcaccactcctatttactggatgtcctaaccagagcagtcaggcaagagaaataaaaggcaaccaaataggaagagaggaa

SEQ ID NO: 950988 - DNA, 837 bp, Homo sapiens
cctcaagccccaagagtttcttcttctaacagtaacatactttgcrcatgacccagcaatcccactcctgggtatttacctgataaatgaaaacccatgtttgccgggcatggtggctcatgcatgtaatcccagcactttgggaggccaaggtgggcggatcacttgaagtcaaaagttcaagaccagcctggaaaacatggtgaaaccccatctctactaaaactacaaaaattggtggggtgtggaggcacatgcctgtagttccagctactcgggaaactgaggcagaaggattgcttgaacccaggaattggaggttacaagtgagccaagattgcgccattgcactccagtgcagagcaaaagtctgtcaaaaaaaaaaaaaaaagaagaagaaaaagaaaaaaggaatgaaaggaaagaaaaggaaggaaggaaggaaggaccattaagaaggtacctgtacccaaatttgcagagcagctttatttttatttatcaccgccccagactggagtcaacccacacgtcctcagcgtgtgaatgaatagaccaaccgcagcacctcgtacagtggagtgctactaaggagcgaatatggattcacacagcaacacgggtgcatcccaaaagcatgctgctacacggatgcaaggccttcggactatatgatcccatttaggagacaattgggaaaagggaaaatccaggggtgaagaatagatctgtggtggcaggggtgggaaaagcggggaggatttgcctactgaggggcagcacaagagaattttgcggggcgatggatctgtctgtatcttgaccatagtgatgata

SEQ ID NO: 950989 - DNA, 570 bp, Homo sapiens
gttttttattaattcccaacattaaagagatttgtaaacataaacatgacgtgattttccctatttttgaaaataggtattttacgtaaaaatatyttatgttaacatgtcatgggtttattattgttatgtttatatgaatccatgagtatatatatatatatatatatatatattttttttttttttttttttttttttttctattctcagttggtgcggtggctcacacctgtaatcccagcactttgggaggccgaggtgggcggatcatgtggtcaagagatcgagaccattctggccaacatggtgaaaccccatctctaccaaaaatacaaaaattagctgggcatggtggcgcacctgtagtcccagctactcaggaggctgaggcaggagagtcactcaaactcaggaggcggaggttgcagtgagctgagattgcaccactccactccagcctgggtgacagagtgagattccatctaaaaaaaataattctcatattattaaatgtttagtatagtgaatactggtcaggtgcagaggctcatgcctgtaatcccagca

SEQ ID NO: 950990 - DNA, 461 bp, Homo sapiens
tcttaacacgttgtatgcaccctcagtccactgtctcggcccagttcaccactaggtcttgcctaagagktgcagtccttatggactcgattgcctttcaactttatgtggagacacaggctgctgtagccgtcagtggcaagatttgcaggcactcaagtttggacaagtgggatcagtgatccccttctggctagagctggtttaaattctccctccatgagtggctgacagcagagtttggtccattttttctttctattctaacaggacagaactgggtttaatgcctcacaattgctgtgttttccctcccccagtgccctgagatactctgcacaccaacctgctgctactggggatgcaagaagggtggggtcagtaattcaatactgtttttttctatctcttcagtgccccttttagcaatatgaggctaaaaccaggcactgtcagtgctc

SEQ ID NO: 950991 - DNA, 553 bp, Homo sapiens
tccctgggctgggtttaccctcttcccaggccccagagatggaggagtccsaccctggcccaggaagttcctggctcctgctcacagccaggcttgtgtggccaatggcaggctggggatatatccaactcaggacagggactggccccttctttcagctcctcctgcacatccctgctccctggcatttcaccccactctccttgctggcccgattcctctgcacggctgagatcctgatgccctggagggccatagacaacaggactctcaaggtgcctcatggcaggcaccccctcccctgttagcctgcctgacccttagcgttactcagaagccagtggccaagaccctagtaaggtcaaggacactcaagaggagggggtggggtcagagtcctgaaccccaagcatcccaagctgacaccccaaggcctcctgtaggttttcctggagtatcacacccaggacaggaaagtgattaggggcaaaaatcaggcagagagaattgacagactgcttgcaccatgccggccaaggcctcctaaacccat

SEQ ID NO: 950992 - DNA, 462 bp, Homo sapiens
acctccgtggctgtaataaggacgaaattagatacagtgtgtaggttgcctagctggtgtctgacacaaaaaggtcctcagtaaacagtatgaatggattcaaagccatttaacctctaaacttccctccactctatgcagaaaggccttctctccagcccatgaaaccctaattgccttcttttctccccacacttgctattgtgggctccctactggaaggctctcctttcactcagcctaaccaaatcccccacaaaagcctgactcaggtccccactcagcagcctcaggcctggcatcacatggcctctcgatggtggacccagcattgcgggttgctctctcggcaggcatgtctggccatccacacctgggggcagagaacactccatcttccsctgtgccctccacaacacccaagacaaagctgggcacatgcagcatgctcgataggggctg

SEQ ID NO: 950993 - DNA, 630 bp, Homo sapiens
caccagcacttgctgcttcaccttgcactgttatgttctggaaatagctccgtttgttaaacgacaagaaccaastctctactagcctcaatttctcttcagcagcttcctcatctcactcagccttcagagacttgaagtcaggaattgccctggattaggtggctgatttgatctcttcagaccgctaaaatttctccatatgatcaacaaggctgttttggcttctcatcgttcatatgttcactgaagtagcacttgtaatttccttcaaaacttttattttgaattcagaactttgctaactggcacaagaggtccagctttcaggcctgtctcagctttcaacatgcctttctcactaagcttaattatttctagttttttatttaaagtgagagacatgtgactcttttatatgaacacttagaggccagcgaagagttcttaattggcctgctttcaattgttgtgtcttagggaaaagggaggcctgaggagagggagagagacggggaaatggcccgttgagggagcagtcagaacacacacagcatttatgcatcaagtttgctggccatttatatgagcatgatttgtggcaccccaaaactattacaaaagtaacag

SEQ ID NO: 950994 - DNA, 625 bp, Homo sapiens
gtttacctaaattcattgctgtagaattatcttagtgctaggaaatcaattttaatattgtctctataatttttctttagtacttcctgaggtttttgaatttatatgttttgagtattttctacgtgcatttttaaatgatatttaaatgacagcctaaaattcttgatgctattcttttagtttaatcagtcaagttgaaataatgcagattaattcactaaagtgacagggactctgatatactggattatgtagattagtaagcaagcaattacacacataataaaaaattaaggaaaatgagacataaatgtattttttttacttatttagacaactacggtttaaatgatatatgagatacttcacattatgttaatgactagctgctagtatactatgaaatagaattttgagatttaaatatgtaactaaaatcctgtgttaatatatattttctgagagtacattgagatgctagagttttgtgagaaattagcaaataacaaatggtatatagkttactttccataaatagaatttgttttaaagtgtgatgtgtccctttggcatatctgatttctttaacatttctgtgtcccagaaaagtctagtaagtctt

SEQ ID NO: 950995 - DNA, 615 bp, Homo sapiens
ccctttatttccttctcctgtctgattgctctggccaaaacttgcaacactatgttgaataggagtgatgagaaagggcatccctgtcttgtgccagttttcaaagggaatgcttccagtttttgcccattcagtatgatattggctgtgggtttgtcatagatagctcttattattttgagatacttcccatcaatacctaacttattgagagtttttagcatgaagggttgttgaattttgtcaaaggccttttcttcatctactgagataatcatgtggtttttgtcattggttctatttatatgctggattacatttattgatttgtgtatgttgaaccagacttgcatcccaggaatgaagcccacttgatcacggtggataagtttttgatgtgctgctggattcagtttgccagtattatactgaggatttttgcaatgatgttcatcagggatattggtctaaaattctctttttttgttgtgtctctgccaggctttggtatcagaatgatkctggcctcgtaaaatgagttagggagcattccctttttttctatagattggaatagtttcagaaggaatggtaccagctcctccttgtacctct

SEQ ID NO: 950996 - DNA, 729 bp, Homo sapiens
aagagagaagagcacgttcacgtgagcccagataggagcacggggcacacgcaggaaacttcctgatgctggagttcacgcgcacggtggacgcaggcttggcagccygcaaggcagaaggggaggtggtgcgggaaccgtggctgctctagcaaacttgagctccattctgcaggctcaaggagacatggagtaagaggaaggactccttgggtgcattgttcatgggaggacaaattagaaaggggattatctcatggcaggcagccacttccaagtagggaagttggagaacttgttgtcaggtggaagaaaagagaagacccttgaaaagtcatccaggaatgggtgtgcacaaacatggagtgtgttcctcatgccgtaattctgatccaggtccttgacttaactgcattgccattaagcttgtgaaaggaggggaaagccggtaccagacattggttatatgtccaatatctgtttgactctttgttagaggtattacctaagttatcttacaatactctaaaagcaattctacaaagcccattgctattttacagaaatgaaatctgaaaatgaaaagggtcaagtaaactaagaagtctacgcataactaagaagtggggctgcctgaccccaatcctgcactcttggctctttatgacttcacttgtgagcatactgaactcaaagtgttctggacgtctccaggtagagggctctagg

SEQ ID NO: 950997 - DNA, 631 bp, Homo sapiens
gttagcaaagacaagacttaggcacccaacaagaccttttattttcacatgactgagcctctgacttcaatatgcgttccgtgtttttcccagaagttcttttgtgttatgtacaattactctgctgaacagattgtatttgtttttttctttgtttttttgtttgtttgttttgttttgttttactgtgagacagtgatgccaatgcttgtgtatttaggatgggggtcgcagactctgtacttccaggagaagcccccggaaggtcttagctggctcctgagggggcacatttgctgtgctcattgcactttacctggtgtcatgaagcataaagagcacaaacttggacaccaagagtctacattaaagtcccactcctttatgtttgtaaatatgggatattgggaagttgctgcacctttttttgctcattttcttcactgaacagcagaaatagaaaaatttcttcttaatagggcttaagggagactcaaatacaacactgtatatgatgttcttttgcaaattgtaaagcaaagtacaaagtttcaaatatattcattatacrtatatatctagctttttattccatttggttcaaaaaatttatgtgctccaaaaaattatg

SEQ ID NO: 950998 - DNA, 598 bp, Homo sapiens
cgatcagacaagagaaagataaaaaaaagcatccaaaatggaatggaagaagtcaaattatttttgtttgctgttgttatgaatttatacttggaaaaacctaaagactacaggaaagctattagaattgataaattaagtacagttgcatgataaaaaatcatcagtagatatagaaatcagtagtatttacatatgccaacagtgactattgtgaaaaagaaatcaaaatgagtaatcccatttacagtagccacacatgaaattaaatacctaggaactgaccaaagaagcaaaagatctctgtaataaaaagtataaaacattgatgaaataatttgaagaggacacaaatattggaagaatactccatgtttatgcattggaaaaatcaatattgttaaaatgttcttattacccaaagcaatctacagattcaatgcaatccctatcaaaatagcaataacattcttcatgaggaaaaaaaaatkctaaagtttatatgaaataacaaaagaccaagaatagccagagctatcctaagcaaaaaaaaaaaacaaaactggaggaatcacattacctgacttcaaattatact

SEQ ID NO: 950999 - DNA, 603 bp, Homo sapiens
tgttctttaatattgtcttgtcaattctgtgtcttttgcctttccatatcaattttatagtttattgatattgaaaaaaataacttgttaggattttgaatggaattgcattgaatctacagaakctacagatcacgttgggaagaactgatatcttgacaatatttattcttctttttgataaacacgaaatatctctccatttatttagttttcctttggctttattcaatacagttttgtggttttctgcctatagatcctgtacacattttattagatttataaccaagtatttcatttttttgggttctcatgtaagtaatattgtgtttctaatttcaaattgtccattttcattgctgctgtacaggaaagcaattgacttctgcatacaatcttgtatcctgcagccttactgtaattccttaatagctccaggaggttttctgtcagctctttcagattttctacaaagatgatcatgatgatgtcatctgtaaacaatgaggttttatttcttccttcccaatatgaatatattttatttcctttacttttttattgcattagcatgaactttagtatgatgaagaagagcaa

SEQ ID NO: 951000 - DNA, 572 bp, Homo sapiens
aagatacaatatataagaatctctgggrcacagctaaagcgtgttaaaagggaagttgatagcactaaatgcccacatagaaaattagaaagatcccaaattaacaacctaacatcacactgacagaatctagagaaagaagagtaaaccaaccacaaagcaatcaggaggcaacagataacaaaaccagagctgacatgaaggaaattgattaaaaaaaatacaaaatataattgagtgcaggaatttgttttttgaaagaataaataagattgcctgattgctacctaaactaataaagaaaaaaagaagattcaaataaacacaatcagaaataaaacaggagacattaccactgagcccgctgaaatacaagaaaaccctcagagatgactatgaggaactctatgcacacaaactagaaaagctagaagaaattaataaattcctggaaatgtagaacttcataatattgaacaaagaagaaatcgaatccctaaacagaatgataacaggtttcaagtttgaatccataataaaaagcctaccaaccagaaaaaaagcccaggaca

SEQ ID NO: 951001 - DNA, 600 bp, Homo sapiens
cttttctgggttgtttccattgaagctttgtccccgaagtcaggaagtacyttgccaggaaaggactgccttttactattggacaattatttttgcattggacatgcccctggccacccagaaccccatggtgtcaaagtgatctgcttatctccaagcacagcatctttaactcagcgtctagatcaggagttcataaggacccctcagactcattacacacagcaccctatggaaaagattgtcaatgaaagtctagaaggattgcaggactgaaaatatcaccattgctatagaaaaagctgggaaagccatcaacccgaaacaataaattcctgctggagaaaactgtgtccagatgtgtgcgtgaatgccgaagatacacaacagagcaaatcaaggaaatcatgaaagagatttggatatggcataaaatgtagtgggagaagagtttcaagatatggatcttagaaaaattcaagagttaatagacaccacgctagaggaactaataggagatgacttgatggagatgagtgcttctgaaccagtgccagacaatgaggatgaagacatagaagaagcagtgccagaaagcaa

SEQ ID NO: 951002 - DNA, 680 bp, Homo sapiens
gcacaggtctggatgccttttctgtgccccacaaacagtagtaattgctcagggcaggggaggatccactgttctctgcacagtgttagcacaagtgtagggcactggtgggggcaagggttgtctggctctgtgcccaccaaggctccatctgcaatgatggttagcacaggggtggaggggagacagactgcattcccacactcaggagggggaggaaagcaaaaaccatccatgcagacatacagcagaaaagtgatatgtggagttgccatgggcccttgggaagctacaatatgaagaaggggcgagcaaaatggtgtgtggccataggggttgccccactggagctctctgctgctcaagcatggtggtgcaccagtgcagaagctatgatctcaggacacccaagactgccctgccaccaggagtgaccagggtagggctctgggagagcccagcagtccaaggggtgctcaggttggaccagctccatccgatgggcaagaccaccctacagaggtcagaaccaaaatctcctatgggagcaagttgagcctagggaaatggctatccctggctgtgctccactacagatgctcctgcaccaaaccctctaccactacagatgctcccgcaccaaaccctctagkctccatatcatcttgcttactgccact

SEQ ID NO: 951003 - DNA, 547 bp, Homo sapiens
tggtgtccacccagattaaggatgggtctggctttcccagcccactaacacaaatgttaatctcctttagcaacaccctcacaaacacacccaggatcaataatttgtatttttcaatccagtcaagttgacactcagtattgaccgtcacagattctcttaagaattcctggggggtggagccaagatggtcaaataggaaaagctccagtctacagctcccagagtgagcgacccagaagatgggtgatttctgcatttccaactgaggtaccaggttcatctcactagggagtgctggacagtgggtgcaggatagtgggtgcagtgcactgtgcatgacccaaagcagggtgaggcatcacctcacccgggaagtgcaaggggtcaaggaattctctttcctagtcaaagaaaagggtgacagatggcacctggaaaatcgggtcactcccaccctattactgtgcttttccaatggrtttaacaaatgcataccaggagattatataccgcccctggcttggagggtgctacacccacagag

SEQ ID NO: 951004 - DNA, 596 bp, Homo sapiens
cagaaatagaaaaaagcaatcccaaaatgtgtatggaaccacaatagacccakaacagacaaagctatcctgagcaaaaagaacaaaaccgaaggaatcacattacctgacttcaaattacactacggagctatagtaaccaaaacagcaagatactggcataaaaacagacatgtagaccagtggaacagaatagagaactcagaaacaaatccatacacctacagtgaatttattttcaacaaagataccaataacatacattgggaaaaggacagtctcttcaaaaaatggtgctgggaaaattgggtatccatatgcagaagaacgaaaccatatatgaaaagcaaatcaaaacggattaagaacttaaatataagacctcaaactatgaatgtgatcaaagaaaactttgggaaaacttcccaggacattggaacgggtaaagatttcttgagtaatgtaccataagcacaggcaaccaaagcaaaaatggacaaatgggatcacatcaagttaaaaagcttctgcatagcaaaggaaacaatcaataaagtgaagagacaacccataaaatgggagaaaatatttgcaaa

SEQ ID NO: 951005 - DNA, 764 bp, Homo sapiens
aaaatatttcctgtacctcgtgtcctatattttrcaacacaatactggaagtggactattgatatggtttgggctgtgtccccacccaaatctcatcctgaattgtaactcccacaattcccatgtgttgtaggaggaatctggtgggaggtgattgaattaagggggtgggtctttccagtgcctttctggtgatagttaatcagtctcacaagatcttatgattttaaaaatgggagtttccttgcacaagctctctctttgcctacttccttccatgtaagacatgacttgctcctccttgctttctgccaagattatgaggtctcaccagccatgtgtaagtccactaaacctctttcttttggaaatttcccagtctcaggtatgtccttatcagcagcatgaaaatggactaatacagtaaattggtaccagtggagtgaggcattgctgaaaagatactaaaaaatgtggaagtgactttggaactgggtaacaggcagaggttggaacaatttggagggcttggaagaagacaggaaaatgtaggaaagtgtggaacttcccagagacttgttaaatggctttgacaaaaatgttgatagtgatatggacaataatgtccaggctgaggtggtctcagatggaaatgagaaactttctgggaactagagcaaaggtgacttcttatgttttagaaagacactggcagcattttgcccctgccttagtgatttgtggaactttcaacatgagagaga

SEQ ID NO: 951006 - DNA, 580 bp, Homo sapiens
ttaggacttccagtatgatgttgaataggagtggtgaaagtgggtattcttgtcttgttccagttcttagggagaatgcttccaacttttacccattcagtatattagctgtgggtttgtcatagacgactcttaccattttgagataagttcctttgatgactatttttttgagggtttttatcatgaagcaatgttgaattttatcagtgctttttttatgtctactgagatgatcatatcgttttcatttttaattctgtttatgtggtgaatcacatttattgatttgcatatattaaaccatccttgcatcctagaaataaagtgcccttggcatgatgaattatttttttgatgtgttattggattcagtttgctagtattttgttgaagatttctgtgtctatgttcatcaggaatattggcctgtagttttccttttttgttgtgtccttgccagattttggtatcaggatgatgctgctttcaaagaatgagttrgagaggaatgcccccctcctctcttagaatagtttcattaggattggtagtagttgttctttgtatgtctggtaga

SEQ ID NO: 951007 - DNA, 600 bp, Homo sapiens
tgtcaattcgtcaaactcattctccatccagttttgttcccttgctggtgaggagttgtgatcctttggaggagaagaggcattctggtttttggaattttcagtctttttgcgctggtttttccttatcttcatggagttatctacctttggtctttgatgttggtgaccttctaatggggttttggtgtggatgtcctttttgttgatgttgatgctattcctttctgtttgttagttttccttctaacagtcaggcctctctgctgcaggtctgttggggtctgctggaggtccactccagaccctgtttgcctgggtatcaccagtggaggctgcagaacagcaaagattgctgcctgttccttcctctagaattttcatcccagagggacacatgcctgatgccagccagagctctcctgtatgaagtgtctgttgaaccctgctgggaggtgtctccccatcaggaggcatggggaccagggactcacttgaggaggcagtctgtcccttagcagagcttgagtgctgtgcygagagatccacttctctcttccaagccagcaggcaggaacgtttaagtctgctgaagctgca

SEQ ID NO: 951008 - DNA, 677 bp, Homo sapiens
tacctgtccattcatgaaaaatgacatctgggcatgggtgtggttcaggggtagagaataaaacaggtctgcccatagcagaggcggactctgccttccgctaaacacaaacaagcatgcagggaagcaagtacccttcttaaatatctgacaacatggctttgatgaaatctatcccgacttagccataacctagaaaactgtatagcctttctagaaaaatgtttttgaaatgctcagcatcactaatcatcagagaaatgcaaattaaaccacaatgagatgtcacctcgtaccagtcagaatagctattactaaaaagtaaaaaaataacagatgctggcaaggctgcagagaaaagggaatgcttttacactgttggtggaaatataaattaatttagcccctgtggaaagcactttggagatttcttaaataactaaaaatagaaccatcatttgacccagcaatcccactgctggatgcatacacaaaggaaaataaagtattctaccataaagagacctgcacttgtacatttattgccgcactattcacaatagcaaaggtgtggaaacaaccttggtgcccaasaacagcagattagataaagacagtgtgctacgtatacaccttggaatattacacagccataacaaaggatgaaatcatgtcct

SEQ ID NO: 951009 - DNA, 549 bp, Homo sapiens
ttaaaatataataatgcattgttagatttttgtgtacttgtcataattctgggtgttctttcctgcatacttattaagaaatctgggaagtataaataatattgacktattgatgccatctgatcattaactgattggaatgaatgataaataggatttttattagcatgtgatattgaatttgttttgaaatttagtctcttctaatgatatgctaagttcaaatccttaataacctggttgttggcattattaggccaggcatagtggctcatgcctgtaatcctagcactttgggaggcctaggtgggaagaccactcgaggtcaggagtttgagactagcctggctgacatggcgaaactccatatctaccaaaaatacacaaattagccaggtgtggtggtgggcacctgtaattccagctactcaggaggctgaggcaggagaattgaatgaacccggaaggcggagggtgcagtgagccaagatgacatcgctgcactctagcctgggcaacagagtaagactctgtctcaaaaaacaaaac

SEQ ID NO: 951010 - DNA, 549 bp, Homo sapiens
ttaaaatataataatgcattgttagatttttgtgtacttgtcataattctgggtgttctttcctgcatacttattaagaaatctgggaagtataaataatattgacttattgatgccatctgatcattaactgattggaatgaatgataaataggatttttattagcatgtgatattgaatttgttttgaaatttagtctcttctaatgatatgctaagttcaaatccttaataacctggttgttggcattattaggccaggcatagtggctcatgcctgtaatcctagcactttgggaggcctaggtgggaagaccactcgaggtcaggagtttgagactagcctggctgacatggcgaaactccatatctaccaaaaatacacaaattagccaggtgtggtggtgggcacctgtaattccagctactcaggaggctgaggcaggagaattgaatgaacccggaaggcggaggktgcagtgagccaagatgacatcgctgcactctagcctgggcaacagagtaagactctgtctcaaaaaacaaaac

SEQ ID NO: 951011 - DNA, 761 bp, Homo sapiens
tggtgaggtggtttttaaaaaataaattcttattatcattgttattttttagtggtaaaatattataactttaaaatttaccatttttaagtgtacakttgagtggcattaagtacattcacattgctgtggagctattaccaccctccagctctggaactttttacatcttgcaaagctgaaactctgcacctattaaacactaaatttccattctcccataccctcagcccctggcaaccaccattctactttctgtctctatgtattgattattctaggtacgtcatataagtgaatcacagaatttgtccttttgtgactggctaatttcttttctttctttctttcttcttttttttttttttttttttttgagatggagtttcactcttgttacccaggctggagtgcaatggcatgatctcggctcactgtgacctccacctcccaggttcaagcgattctcctgcctcagcctccctaatagctgggattacaggtgcctgccaccacacccagctaattttttttgtattttttttagtaaagacggggtttcactgtgttggccaggctggtctcaaacttctgacctcaggtgatccacccgtctcaacctcccaaagtgctgggattacagacatgagccactgcgcccagcttgtgactggctaatttcatttagcctaatgtcttcaaggttcatccatgttgtagcatgtgtcagaatttccttcctttttaagattgaatagtat

SEQ ID NO: 951012 - DNA, 616 bp, Homo sapiens
aggctagacaatattctaggccataaaatatgcctcaataagtrtaaaagaattgaaggcacataaaatatgctgtctaaccacaatgtggctaagtaaaaaaaaaatcaataacagacaagtatttgagaaattttaaatatctcaaaattaaacacactcaaaataaccaatgtgtccaagatgaattcaaaagggtcttcagaaaaagcactgagatgatggctgggcatggtggctcacgcctgtaatcccagcactttgggaggccgaggtgggcagatgacctgaggtcaggagcttgagaccagcctggcaaacatggcaaaaccccatctttactaaaaatacaaaaattagccgggcatggtggcagaggccagtaatcccagctactcaggaggctgaggcaggagaatcgcttgaacctgggaggcagaggttgcagtgagccaagatcatgccactgcactccagcctgggtgacagagtgagactctgtctcaaaaaaaaaaataaaaataaagaaaaaagaaaatgcactgagatgaataaaaatctatacaacacatcaaaatttatgaaacatggataacacagtgcttagagaggaaaa

SEQ ID NO: 951013 - DNA, 666 bp, Homo sapiens
gctcattttacttagtaacattgccacagcctgtagcaaaactcttaacattatgaaggaagagataagagccattttgaactgtgtgtgagagagaaaagagacagtctgggggtttttactggcaggttaagacagagcttttgaagggaaacagaagctcttacccgcaggaaagagaaagaggtggcagggtttcagaagagagacagacccgacagtttcacatttgttcacattcaccttccaggatccctgatgagcccccagttgaaatgggttaagttcccttgtcccccttgcagggcatgctatgggggtgtgacttgcatcttcagtgccctgatgcttaaacctctaggggagcataaagacaggcaggctgtggggctccaactccacagcagtgtctagggggaatgtttacagctcctgaagccccagtggacatgtgctacagggtgctctcttagtttgctgtctataggcagcttgtgttaaccagctcaattagaccctctaccttgtcacaaggacaaagggctttctgtatctcaggttcttgccttgttgtaccagaaggatcagwtcacacgtgggcttggagaatgagtgcaaagttttattgagtggcagtagctctcagcagatggggagtcagaaggg

SEQ ID NO: 951014 - DNA, 738 bp, Homo sapiens
catcagtgccttaaaatatccatcagacaagcacatcttatatttgtgtgaaatctgaccccgctatgagagaagagggtggtggaggcagtgagtggctggtgtagcattaaagcctctggagacaggtgtgcactgcagatggtgtatagctgttcacagtatttgaggcctctttcttcgtgaagggagatgatccttccctgtgctattatgctggggtgtggccatgtgttttgctgtggccgatgacacgtgagtggaaatgtcacttccagcagcagctttgagcatcagcttgtgcttgttcatgcactctgcattagtccattttcacactgctataaagaaatacccaagactgggtaatttgtgaaggaaagaggtttaattggctcacagttccacatggctggggaagcctcaggaaacttgcaatcatggcggaaggcaaaggagaagcaagtagcttcttcactgggcagcaggagagagaagagcaagcggggtaatgccagatgcttcggatctcatgagaactctctttctatcacaagaatagcatgggagaaactgccctcatgatccaatcacctccctccctcgacgtggggattacaggtccctccttcaacacgtgaagattacaatttgagatgagatttgggtggggayacaaagccaaaccatatcacactccttctgtctgcctttgtcattctactgttccaggggatg

SEQ ID NO: 951015 - DNA, 599 bp, Homo sapiens
acctatattcccttccctggcacttccacctgtgcttggctggctcagtctaggacctaccttctccatggcttttaaacaaggactcagagagttgagtcattttcactctcttgtggcagaagatgagagttttcagtaactgatcaagttaggagttgccagcaatcatgttttctgtctggtcaatgcatttgcagaaaaggagagtcacacggattgtcagagaggagcagagttgcgagatcatgttggtggcatgagttcctgattgaaagcctatctgatattcagccagattccaaccctcggaatctacctccaccttccagccctgaatccttgcagttaattttcatttttgcttactctagtgcatgtgggatatgttccttccaacacaaacagccctaattcggctaatataaatttttacctaatagaaaaaattcctagttcttattttagtttatttggcttctaagaataaaatgttcaatatatcccatattaattctgctcttactgactagcaattagaaaccatattctagctcagtcatgccaccttctgaaygccttccagatgaagttccaca

SEQ ID NO: 951016 - DNA, 571 bp, Homo sapiens
tctctcagcacctcttagaccatgagctttctttcatttttttgaacatgccaagctcctgctatggcacatctgcatatgctaccccatgctttgaagcctctctcctccccttttcagaagggtgtgtctttgttctttggatttcaaataccacttctcttgaacactatctaatgtggattctcccattatctcgatttcctctttgtttactttgttgcattgaacaaaagttgtaatgttgatttacttcttttttttctatttcccatatttgaatctgagctcttggagatctgagcacctagtggagatttggcatataaaaagaaatcaataaaaaccatggaatgattggatgaataaaaacaaaaaattgtctgggcgaagtggctcatgcctggaatcccagcactttgggaggtcgaggcaggtggatcacctgaggccaggagttcaagaacagcctggccaagatggtgaaaccccgtctctactaaaaatayaaaaattagctgggtgtggtggtgggcacctgtaatcccagctactcaggaggctgaggcag

SEQ ID NO: 951017 - DNA, 767 bp, Homo sapiens
gggtttccctccagcgaaacacaccctctccaccaaggaacaaagtgcttcattaaacgagtcctgccacccaattgggtaagaacctccaacgggggctgtcagacaccctatacaggagcgatcctagtggcatcaggttggtgccttcaaggtcagaggtctctgaagaaggatcaggcacccatctttgctgatctccagcctccttgaatgacatctccaggcatggaaatgaatcagatgaataaggcctgaagtgaacccccaggaaacagcaaaagccctacagaagagggactggactattgaaagaaaaaaaaaacaagtggaaagtgacaacagcatcaacaaaaacaacaaaaaggcccccacaaaaaccccatctaaggatcagcagcctcaaagaccaaactagacaaactcataagatgagaaagaatcaacaacaacaacaaaaaatgctgaaaacccaaaaggccagagtgcctcttctccttcaaatgatcgcaacatctctccatcaagggcacagaactcgatggacagaggatcagatggatgaattgacagaagtaggtgtcagagggtgggtaataaaaaactatcatgagctaaaggagcatgttctaacccaatgcaaagaagctaagaaccttgataagaggttagaacaattgctaatagaataacaagtttagagaggaacataaatgacccaatggagctgaaaaacacagtaygagaacttcgtgaagcatacacag

SEQ ID NO: 951018 - DNA, 561 bp, Homo sapiens
agagatttgtggaactttgaacttgagagagatgatttagagtatctggcagaagcaatttataaacagcaaagcattcaagaggtgacttgggtcaccccagctttaaaagggaaagagagcatgaaagttagataaatttgcagcctgacaatgtgatggaaaagaaaatcccattttctgggcagaaattcaagccaactgcagaaatttgtataactaatgagaagccaaatgttagtccccaagacaatggggaaaatgtctccagggcatgtcggaggtcttcacagcagcctctcccgtcacaggcctagaagcccaggaagaataaatggttttgtgggatgggcccagtgtcccggtgctgtgtgccctgtgccccagctgctccaaccatgactaaatggggccaagatacagctcagsccatggcctcagagggtacaagccccaagcctcggcagcttccatgtggtgttgagcttgcagatacacaaaagtcaagaattgaagtttgggaacctccacctagatttcagaggatgtatggaaatgcct

SEQ ID NO: 951019 - DNA, 585 bp, Homo sapiens
cattactatccttccaaagaattatctctatgctcttttcctagataaactctggctttgtcccatagatcccacagatctccctgtaatccttttttagccaccacctcctcctctttcttttctwtgcattcttcaggttcctcactgaatacagtgcttgttttagggttgagaacaattagaatgaactctaggtgtttcatatgaggtgcttttcctgcaagacctgcacatgatatgataacgaggtttgggatgctacagactttttgctaccaggtggaatctaatgtcaacctgcaaaggctagcaaaagagaacttaagagaaatccaacttttttttttgaatttattatttttttttagatggagtcttgctctgtcgcccaggctggagtgcaatggcgtgatcttggctcattggaacctccatctcctgggttcaagcgattctcctgcctcagcctcccgagtagctgggattacaggcatgcatcaccatgcccagctaatttttgtatttttagtagagacggggttttgccatgttggccaggctggtcttgaactcctgacccca

SEQ ID NO: 951020 - DNA, 430 bp, Homo sapiens
tcctccaagccttcttacaatarattcacagtctctgccacatggatttttattctctgagcatgacttcttataaataaggcatcttgcctctctacccttttgtcaggtgtcagaaactttactgatttatgttttagaagtatatagagctgattctctctcacaaggtgcaagaaaaacaaaaaaagaaataatttctaagacagtgtctctggccttggttctatcttttaatatcctgcatatcccttgaactctgtctcaggtgcattaataaaagttaggtattactattttaatctgcctgtggttgtctcagccttcatactatgaagtctgtgcaagttacttcttcattaagaaaatttataaattcaacagattttcattatggttccacactcttccaagaactagaaatacagct

SEQ ID NO: 951021 - DNA, 595 bp, Homo sapiens
tggataaaatggtacaaacatctttctggctcttgttatatttttccacactgctttccaaaaatgttgtgcttttccttccctatcattactacaaagtttaaaaaaaaaaaatagctctcctactacctggcaccaacctgcttttctgttgccatctcctggttctcaggaatgtgtacttttcatttcagttttcaacctgtgttagaactggaatctcctagaggaccttcacttcatagtctttctcttatgcctagtgtatgtatatccctggaagatagatatgattaacatttccatttttacagaggaaagcactgaggctcacagaggtcaggtaacttgcccagggtgccatagctaaggagtagcagagcctatacttttgattgtgtctctactctctccatatctggtatggttctccaacaatttggtatgaacagagttgatttgaacctaaatacctcttgattacttacagagtctctatctgtcatggctttcctaccccatctggtcgcttggyaccagcccatgtctgtgtccttactacctttctgcctgtgctcctcttcttggcctagtt

SEQ ID NO: 951022 - DNA, 586 bp, Homo sapiens
tacctccctgggacagagcttccagagggagggttaggctgccatctttgctgtttcatagccttcactggtgataactccaggtactggaaagtctgaggcaactacgaactggaatggaaccccagaatactacatcagccctgtggaaaagtggccagactgttacatgtgcccattcccatatatcctcacctggcagttctaggcctctagacacccctaaccagagctattggggcagtagcaactcagtgactccctggacagagcctcaaggggcaactgaaagtctctctgctactgccttttcagtgaaactgtccttgctgccctcaaactaataaaggagtaaagaccctaagtgccttatgaacaccttcaacaagttgctgctgacccaaggagaggaggccagtctgtctcccatgcaaccacgcaagcccaactgcttgtagccaaacagggaatccctggcttsagtccacagcacagaccctccatcctggcctgagtgcactgagcaattgctgacctgcatctctctggggtagagcccccaggagacaagcaaagtggtggggca

SEQ ID NO: 951023 - DNA, 406 bp, Homo sapiens
cacctcagcaccaccagcacagtggactccaaaccccaaggagatagagaacaaaattggggcccaatacaattcccccccagggagagtatacagtttaggagttgggagctgagcgctggcctcctaaaacctcccagaaacaaagccagtcatctgagtccaccttataccacaatcaaatccttaatgtcatccaatcagataaaaggaaacaatccaaagatcagcaacctcaaaaagtaaaggtagataaacccacaataatcagaaagaattagcatgagaacactgaaaactcaaaaagccaaagygccttttttcttccaaatgactgcatcatctctccagcaagggtttagaaccaagctgaggctgagatagctgaaatgacaaagtagaattc

SEQ ID NO: 951024 - DNA, 649 bp, Homo sapiens
gctgaattttaccagaggtacaaagaggagctagtaccrttccttctgaaaatattccaatcaatagaaaaagagggaatcctccctaattttatgaggccagacttaccctgatacctaaatcaggcagagacacaacaaaaaaagaaaatttcaggccaatatccatgatgaacatcaatgcgaaaatcctcaataaaatactggcaaaccgaatccagcaacacatcaaaaagattatctaccataatcaaatttgattcatccctgggatgcaaggctggttcaacatatacaaatcaataaacataatccatcacaaacagaaccaatgacaaaaaccacatgattatctcgatagatggcagaaaaggccttcaaaaaaattcaacagcgcttcatgctaaaaaactctcaataagctaggtattgatggaacatatctaaaaatagtaagagctatttatgacaaacccacagccaatatcatactgaatgggcaaaaactggaagcattcccatgaaaaccggcacaagagaaggatgccgtctctcaccattcattttcaacatagtattggatgttctgtccagggcaatcaggaaagagaaagaaataaagaatattcaaataggaagagaggaagcc

SEQ ID NO: 951025 - DNA, 601 bp, Homo sapiens
tttgctcctaccagagaagagctcttggcagttccaactctggggagtgtcaaaaaagaggctggcacaccccagcactcttccacacagcagcattmgccatctgccgtcactctgagccccagtttcctcatccacaaatcaatggggttcaatgtaggtttctaaggatccctcccacagcaaaaatcttaatatccttcatagaaactggtggcctcactagaacatcagtctgtttgcttcttaactaatagtcttccattcattccacaaactattactatatgccctcctctgtacaaggtgctggggcatatagtaaggaaggatggttcccacccacgtgagactcaaatgtggggaatgtggggatttgtactgtgttcagaagtctttctttttcttctttcttttatctctctctctctctctctgtctttcccctttctttttcctctttctctttctttcctctttctctttctttcctctttctctttcagacagggtctcactctgttgcttgggctggagtgcagtggtgcagtcatggctccctgcagcctcaacctcccaggctcaagcaattctcccacct

SEQ ID NO: 951026 - DNA, 725 bp, Homo sapiens
tagttctttaaggcatctccacactgttttccatagtggttgtacyagtttacattcccatcagcaatgtagaattgttccttgttcactgcatccacaccaacatctactgttttttgattttttgattatggtcattcttgcaggagtaaggtggtatcgcattgtgcttttgatttcaatttccctgttcattagtatgttgaccattttttcatgtttgttggccatttgtatatcttcttttgagaattgtctatccatgtccttatcccactttttgatgggattgtttgtttttttcgtgttgatttgtttgagttcgttgtagattctggatattagtcctttgtcagatgtatagattgtgaagatttttctcccactctgtgagttgtctgtttactctgctgttttttttttcctgtgcaaaagctctttagtttaattaagtcccagaaatgtatctatctttgtttttattgcatttgtttttgggttcttggtcacgaaatccttgcctaagccaatgtctagaagagtttttacaatgttatcttccagaatttttatagtttcagctcttagatttaagtccttaatccatcttgagttgatttttgtataaggtgagagatgaggatccagtttcattctcctacatgtggctagccaattattgcagcaccatttgttgaaaagggtgtcctttccaaataaaatac

SEQ ID NO: 951027 - DNA, 359 bp, Homo sapiens
atgcatttcttaaataataagacttgaaagacaaaattacatggatttatgagctgcagaatggatattttgttagtaggcatgaaaacaacattaatcttacacatctccatcagagctcttgagaaatcaagtgcattgtcaatgagcagtaatattttgaaagcatttttttttctctttctgagaataaggtctcaacagtgggcttaaaatatttagtaaaccatactataaaccaacgtgctgtcatccaggctttgttcttttatyaattaaacacaggcagagtagatttaacataactcttgagggcttagaatttttagaaagataaatgaatactggtttcaacttga

SEQ ID NO: 951028 - DNA, 583 bp, Homo sapiens
aagctacactccaggccaaaaatactgggcattccttgcctctgctccaaccggcttggaagtgagaggttctacaatgaaaggggcaagccatgaagatcatgggctattatccccatctaatacctcattcatagagtatatgtatataaacatcttggagaagcaggccactgtctccaaccccaggcccagtgcaatggcagagatattcttcccaggggacaaggaatactttaagaaaggagatctctgctccataaaggaactgactttatttgaaacacactgtgaaaagtttatgcctgaagaatacctagtggtaagtaaataagagaaggttatagccccgtgacagtgatagcaacaagcaaaatattaacgtggctagagggtaagcagaaagaactagagaaagagacagctaagaagagccttcctggaattgaagcaagcttctgagacaggcaacacctttcttatgcacagttgcccactttaattggattatattgtgaagcaatttatacccccagagcattgtcataaaataaataaataaataaayaaacaaacaaacaaa

SEQ ID NO: 951029 - DNA, 575 bp, Homo sapiens
atggatgaaatgcttgaaaacctgccctttttgtgatggcccctttcctttccttactcagtagagtttttcctggggtagctgattcaagagtggttcaaaggtgctctgtgccctgaattccttctagttttagaaaggccacctgtggcctttgtaactgaatgacaaattagcagtgtatcatttccctgggtccacactgtctctcccagagttccctgaggacagtattccagggtcttatcccagtaaatgtcaagaaatagtttggggtcacatgatttctccctctgacaggttacttgcttttttgtctttgttgtttgtttgtttgatgaaacttcaatgttgtttgtttatttttcccagaagcccaggaatatcaccagaatctgtctgtgttaatcattttgctttattttttcctgaaacgcaaggtacctttttaaactgaggatttaggtcttccttgacttttattaaggctttctttttttacgtctttgaaattgtwctgttttcttcttcaggaacaccaattacctgcatgatggatatccttgttgtacaaa

SEQ ID NO: 951030 - DNA, 767 bp, Homo sapiens
tagtgctgctttgagcatgtatgttgagttatgttattatttctcttgkgtacgtacctaggaatggaattactgggtcatatggtaactgccttttgagaaactgccaaactgttttcaaaagtgactgtattattttacattcctgccagcaatgtatcaaggttctattttttccacatcatcctaatgggtgtgaagtggtatctcattgtaaggcaattcgtatttccccaatgactagtatgttgagcgtactttcatgtgcttactggccatttgtatatgttttgtggagaaattatgtgattgtgatttgcatatccactgatatttctgacccttgttaactcctttaagaatatggtagccagcaggtgcggtggctcacacttgtaatccagcacttcgggaagccgaggcaggaggatcatgaggtcaggagttcaagaccagcatggccaacatggtgaaaccttgtctctagtaaaaatacaaaaattagccaggtgtggtggtgggcgcctgtaatctcagctacttgggaggctgaggcagaagaattgcttgaacctgggaggtggtggttatagtgagctgagattgtgccactgcactccagcctgggtgacagagcgagactccatctggggaaaaaagaaaaaaaaaagaatatggtagccaatgaacatgagtaggtggtggctcccttttattgattaaccagaaaggcagctctcactgagggctccacgatgaccctgctt

SEQ ID NO: 951031 - DNA, 591 bp, Homo sapiens
caaaaaacaccacatttcaaactttactgtctcatgctagtccctggaaaattagaagttaacacactcccctcacagcccaatcacagctaatgaataaccaagatctcctgcaggtgcctttgccttgggyttgtgagcctggagttgctggttggcactgggcagcaggcagcagagctagtcccatttctccatgctttccccactctgtgcgggacaaaggcacattgaacaacctgggtcctggcctggcgctggctgggaagctatttgatgtcaggcttgatgtggacttctgagttgaaaagagagtatgggtcacccagccccacttactcattttaccaagaatgaaaatggggatctattccagacatgagagtacacattgtaaagctgtgcaagcttgctgcgcttgcatccgctcagcacacactttctgagtgccgagtgtctccagcatgagaagggctgtagttcccagggtcccaccctccacaaaggacagcagcacctcgagggacagaggtgcaaagagcaaggtgggggcccttctgctggagaggcggctggggaggtccttagagg

SEQ ID NO: 951032 - DNA, 578 bp, Homo sapiens
cttttgttttgttttgtggcaggagagggagaaaaattttcaggtagaggaaatagtatgtgcaaagaccttattatggaagcaattatgttggattttgaggatggagagcatgacagtgtagctcagatagtgaggaaaagatcagggacagatgtgataagagaagttaatagaaaccagaacattgaggcacttttacactgtattaaagatttttttaatattgtgagaacaattggaagatattgaaatgttttagggagacaggtatcgccatgtttttattttttaaaatttactttatggagaaatcaactacacttatctacctttgcaataaataatctaaaagtgaaattaacatagttctgtttacaataatataaaaaatacttaagaacaaatttagcaaatacagtggaacacttatactctgcaaacttcaaaacatagttgtaagtaattaaagaagacctaaataaacggaaagccatcccatgttcatggatcrgaagatgtaatactgttattatagcaatagttcccaaatgacataaagataaagattcaacaca

SEQ ID NO: 951033 - DNA, 577 bp, Homo sapiens
gagttcgctggaggtccactgcagaccctgtttgcctgggtatcaccagcggaggctgcagcaaatattgcagaacagcaaatgttgccgcctgatccttcctctggaagcttcatctcagaagagcacctggctgtatgaggtgttagtcggcccctactgggaggtatctcccagttaggctactcgggggtgagggactcacttgagaaagcagtctgtccattctcagatctcaaactccgtgctgggagaacctctactctcttcaaagctgtcagatagggacatttaatctgcagaggtttctgctgccttttgttcagctatgccctgccaccagaggtggaatctacagaagcaggcaggcctccttgagctgcagtgggctccacccagttcaagattcctggctgttttgtttacctactcaagcctcagcaatggcaggcgcccctcccccagcctcgctgccgccttgcagttcgatctmggactgctgtgctagcagtgagccaggctctgtgggcatggaaccctccaagccaggtgtggggtataatctcctggtgtgccg

SEQ ID NO: 951034 - DNA, 892 bp, Homo sapiens
gcagctgtgtggtatggagagagaatctgtgagatagggtaaggaagagtgaagtgatcatgggacttagcattggaattcagcgctgcctgattgattcaatgttrccacagtggaaaacaacacaggacagaattcagcgggcacccacaaagagagcatttagaccagtcctagacagaggcaaataatctatcccagtggtcagaatccgatttccagcaagcccttccaatgcatgctaaagtgctctggtgtcctaaataaatttgaaaggcagtctaggtcacaaaggctgcaattcctgggcacgtcttagtgctgtgcagggttcaaagccagtggacttggtgtgcttggaacctagttagacatcagccaggataagcaaaggactgcttaagtcaagcctttcccaaccctaggcagcacagctctgggggcaattctttccctctacttgaggaaagtagaggggagagtaaaaaggactttgtcttgcaacttggatacaagcttagccacagtggaatggggttccaggcagggtgctgaggctcccccattctagggcctaactcttggacatttctagacacctggggccagaaaggaacccattctcttgaaagaaaggaacaaatactgacatgattcatcacctgctgcttaaagagcccttgggcactgaataatcagcaaatggtagtgaggcagtactcatcatgggccttgggtgagactcagagctgtgctagccccaggtgtaacccagcacattcccagctaggtggctatggggagagactcttattgcttgaggaaaggacagggaagagtaaaggagactttaccttggagtttgggtaccagctcagccacagtggggtag

SEQ ID NO: 951035 - DNA, 829 bp, Homo sapiens
cctgggcacgtcttagtgctgtgcagggttcaaagccagtggacttggtgtgcttggaacctagttagacatcagccaggataagcaaaggactgcttaagtcaagcctttcccaaccctaggcagcacagctctgggggcaattctttccctctacttgaggaaagtagaggggagagtaaaaaggactttgtcttgcaacttggatacaagcttagccacagtggaatggggttccaggcagggtgctgaggctcccccattctagggcctaactcttggacatttctagacacctggggccagaaaggaacccattctcttgaaagaaaggaacaaatactgacatgattcatcacctgctgcttaaagagcccttgggcactgaataatcagcaaatggtagtgaggcagtactcatcatgggccttgggtgagactcagagctgtgctagccccaggtgtaacccagcacattcccagctaggtggctatggggagagactcttattgcttgaggaaaggacagggaagagtaaaggagactttaccttggagtttgggtaccagctcagccacagtggggtagagaaccaagctgtctcctgcagtccctgattctaggcctttgcactctcgacctgcccagggacagaggagagcctgctgtcctgaagtgagagacacaggcttggcagcatttaacataaactgattgcagagcccttgagcctttaktgaatattggcagtagccaggcagtatttgctgtggtcctggggctgtggtggccacagagagagactcctctgccgtcaagagggaggga

SEQ ID NO: 951036 - DNA, 632 bp, Homo sapiens
tgttcagggaacaagggagacaaccttaaactctgactgccggtgagccgggtggaacagagacatatttctcttctttcaaaagcaaatgggagaaatatcgctgaattctttttctcagctaggaacatccctgagaaagagaatgtgtccctgaggggaggcctctgaaatggccgctttggggacggctgtcttttatgatcgtagttgagggatgcaataagccccagtctcccgtagcgctcccaggcttattaggatgaggaaattcctgcctaataaattttggtcggaccagttgtctgctctcaaaccctgtctcctgataagatgttatcaatgacaatgcgtgcccgaaacttcattagcaattttaatttcaccccggtcctgtggtcctgtggtcctgtgatcttgccctgcctccatttgcctcgtgatattttattgctttgtgaagcatgtgatctctgtgacccacaccctattcatacactccttccccttttgaaaatcactaataaaaacttgctggttttacagctcaggggcattayggaacctgctgacaagtgatgtctcccctggacaccaagctttaagatttctctcttttgtactctgtccct

SEQ ID NO: 951037 - DNA, 749 bp, Homo sapiens
tgtgcctaagtcaggaaaagaacctgtgacttgtctccactcaaggtccttggggagatggtaggaagaaggtcaaagtgaactctgtgatgtatatggcaaaacacaggctgggaacyggaaagccggtctctaccataaaacagggctctatctgagaggctgctgaggaacaaggaaggaatcactgtggcaaatgggggtgggaggaacaccaggaggctgacaaaggctgtgatgctgggagcagcagctaatgaatgcaggcagaaaccctctcatttttgtgtcaaggaagcaaaggcactgaggcgcctttcccaaacatcatggtaccaccattcacactgagactaccatatccaggtgctcttgaaggcagctctctgtattagaatcaccttaggggagatttttttttttgggggggggggaaatggagtctcacttctttgcccaggctggagtgcaatggtgcgatctcagttcactgcaacctccgcctctcgggttcaagcagttctcctgcctcagcctcccaagtacctgggattacaggcacacgacaacatgcccaagtaatttttgtatttttaatagagacagggtttcaccgtgttggccaggctggtctcaaactcctgacctcaagtgatctgcccgctttggcctcccaaagtgctgggattacaggcagagcaaccacacccagcctgggagagatttttaaaaactgttagtgatttccc

SEQ ID NO: 951038 - DNA, 584 bp, Homo sapiens
ggtgtcaggctttctgggaaagggtgctctaacaaccccractcttcggaattgggagcattggtttgcttggaatcagcttccgcttttcctgtacttctgggctgagccgagggtcggcagagaggaaagccattcagctccagggtcctgacaagttgttggttgaccctgcagccatgagcggaactctcaaagttacgtcgcccaagcgagactcacccatgtgtcctatctatcctgacccttgcctcttgggtcctaatgcttgtcagacaaacttcctctggcctctcttctctgaggctagtcccacttctaaaaaccactccctgtctctggtgcttttctagtttctcctataagaatgatttctagtataaactccaggactctattcccttctttaggcacccgggctcaccaatcagaaagacataatttttctccaaagccctgttgtagggggactatctggaattttaggatccctcctcatacaagcaggcctaacaaaagctattcctgaagctaggatatggggagcctcagaaattttatccttcctattcatataagtgatg

SEQ ID NO: 951039 - DNA, 728 bp, Homo sapiens
ggagacactcaggcatcaacatgttcacacttgaaatgcatcctaagccattgggaccaatttgacctgcaaaccctgaaaaaaaggcccctgcactatagcttggccccactrttatctctctgatggggaaaaatggccacctgaaggaagtataaattacaatactatcctgcaggttgaccttttctgtaagaggaaaggcaaatggagtgaaataccttatgttgaagctttcttttcattgaaggggaatccacaactatgcaaagcttgcaatttacatcccacaagaggacctctcagcttacccccatatcctagcttccctgtagctccccttcctattaatgacaagcctcctctaatctcccccgcccagaaggaaacaagcaaagaaatatccaaaggaccacaacccccccccccgggctatcggttatgtccccttcaagctgtagggggaggggaatttggcccaacctgggtacatgtccctttctccctctctgatttaaagcagatcaaggcagacctgtggaagttttcagatgatcctgataggtacatagatgttctacagtgtctagagcaaaccttctatctcgcttggagatatgtcatgctattgttagatcaaaccctggcctttaatgaaaagaatgaggctttacctgcagcctgagagtttggagatacctggtatgttagtcaagtaaatgatagaa

SEQ ID NO: 951040 - DNA, 639 bp, Homo sapiens
agtcttcaggccctagagatagcactggtaggtttagcatgcctgtcgttgagtggtgtatgctggcactggtgttaccaagtctaggcaggctgattattaggcctctaggtgrcttgctcatgttctaggaatgacagtcgtggtttgggtagatgggtgggttcttgaacacttaagaattgaatgtggcatgggtgatgacagtagcagtggtgggacaatgcctaggaccaaagcggtgcatgtgagtatgtgtagtggttgcaacaggttggacaggctggtgcccagacctaaagtagtttatgcaggttgttgccagtagtggtggtagcagcagattgagtggtcctgatctcagaccccaggagaattcaggtgccactggtggattggactgggcttcatgtctctggacagtatgcttaggtactatgggggagaagcttggtgaacctggacctaccttcaggccccttggtggtgaattgttcattaaagtgttagctgtggtaagcagagacatggttatccccaggtagctgatagaatgctcaaggggtactccagaggctgtaccgagaccctgttactggaaagggtaagcttgctttccctgggagcagccgcaaacaa

SEQ ID NO: 951041 - DNA, 602 bp, Homo sapiens
ctttggaacagggtaacagccaggagttggaacagtttggagagttcagaagaagacaggaaaatgtgggaaactggaaattcctacatacttgttgaatggctttgcacaaaatgctgatagcaatayggacaataaaattcagtctgaggtggtctcagatggaaaggagaaacttactgaaacctggaacaaaggtgactcctgttatgttttagcaaagagactctcagcattttgcccctgccttagagatttgtggaactttgaacttgagagagatgatttagggttatctgacagaagaaatttctaagcagcaaagtatttaagaagtgacaggtgctgttaaagacattcatttttataagggaagcagagcataaaaattcagaacacttgcagcatgacaatgcagtagaaaagaaaatcccattttctgagaagaaatccaagctagctgcagaaatttgcataaataatgaggagccaaatactaatccccaagacaattgggaaaatgtctccagggaatgtcagaggccttcctggcagcccctcccagaggctaggaggaaacagtggttttatgtgccaggccc

SEQ ID NO: 951042 - DNA, 597 bp, Homo sapiens
aaattatctctatttgcaaacaacattatcctatatctaggaaaccccatcatctcagcccaaaagctcctttagctgataagcaacttcagcaaagtctcagaatamaaaatcaatgtgacaaaatcacaagcatttctatacaccaacaatagacaagcagagagataagtcatgaatgaactcccattcacaactgctacaaagagaataaaatgcctaggaatacagctaacaagggatatgaaggacctcttcaaggagaaatataaaccactgactgctcaaggaaataagagaggacacaaacaaatggaaaaatattgcatgctcatggataggaagaatcaatataaaaatggccatcctgcccaaagtaatttatagattcagtgttattcccattgaactaccattgacatttttcacagaattttttttttaaactattttaaaatttacatgaaactggccaggcatggtggttcatgcctgtaatcccaacactttgggaggctaaggtgcgtggatcatctgaggtcagaagtttgagaccagcctggccaacatagtaaaccccatctctactaaaagtac

SEQ ID NO: 951043 - DNA, 570 bp, Homo sapiens
agcagcagcagcagaagcagaagcagcagcagcagcggttttgccgttctgtctctccaagccgctgtcccttctcttctcacaggcagcagagttttggcccacagtgccttggcttcattaccatgcagtcttgcagtgacgcacaactatagtggaaatgccgctgaatgcagatgaactatccagttgaataaaagcttacaagtttattataagtgcccagaaggacaccctcacctttctttatgcagatatacacatggccaagattatcttctttgtttatgttactgttaccagttttgaggagcagtgtctctagctatgtaatcacgactgctagtaaacagacaagggtaagaagctctgcccttgggtaccaacttttctcactaagagccttagaaattttttaaaaaataaataaattaggatttagtataaaatctttaaatcttttcccttaatagctgatcaaaaaaaaaamaaaaacaaaaacaaaaacaaaaaaaactggaggtatttggctgacttcaacatcagtttcctctaggttattttagtagt

SEQ ID NO: 951044 - DNA, 618 bp, Homo sapiens
gctaaggtttatccttataaagcctctgaaggcaacagtctgtgttgaaacatttgtgtctgatgctttcaaaaggcttagatgcagcagttgggctgttagagggaactgtgtcagtttctgcccaggaggttggcttctcagcagagaagcagttctgctttagtgccaccactgtcaatctggtttaatctgagtgctgaccatatgtgggcaaccttatgcctgtcatctcattacaatctttacagctatcctgggaggacgggctagtgggggccatgcagattcccacagcagtgaggactgcttggtgctccaccagcagagatgtgttgtactcagggtgggtattagggccactgctgaagctttgtgggtccgattggatgcctggcttcatcagggtgttggtaccatgccttctcttcttttgaattaggggaaaaccaaacccagtctgaattcccaaaaagaagaaaagttttcactttaatgtgctttacccaaacatcactcttcttcgtttggaatcttaatacacttcggggagtttttttttttttttttttttttwgatcatcccgtctacagggatatcagggaaaagctcatctg

SEQ ID NO: 951045 - DNA, 618 bp, Homo sapiens
gctaaggtttatccttataaagcctctgaaggcaacagtctgtgttgaaacatttgtgtctgatgctttcaaaaggcttagatgcagcagttgggctgttagagggaactgtgtcagtttctgcccaggaggttggcttctcagcagagaagcagttctgctttagtgccaccactgtcaatctggtttaatctgagtgctgaccatatgtgggcaaccttatgcctgtcatctcattacaatctttacagctatcctgggaggacgggctagtgggggccatgcagattcccacagcagtgaggactgcttggtgctccaccagcagagatgtgttgtactcagggtgggtattagggccactgctgaagctttgtgggtccgattggatgcctggcttcatcagggtgttggtaccatgccttctcttcttttgaattaggggaaaaccaaacccagtctgaattcccaaaaagaagaaaagttttcactttaatgtgctttacccaaacatcactcttcttcgtttggaatcttaatacacttcggggagtttttttttttttttttttttttakatcatcccgtctacagggatatcagggaaaagctcatctg

SEQ ID NO: 951046 - DNA, 647 bp, Homo sapiens
tccccactcaaatattccacctgcatcctgggatcaccctgcccctgactaccatagccagtgcctgcacacaccaccagtgaccctgaagccaggtctgcccagtccagctctgtccctyccagtgcccaagcatgccatcagagacatgggtatcacccagccccatccactgccattggcacctaggaattcctcctgggtacctgaggtcaggcccacccaacctgccactaccaccacaactagcactaagcagcacacaccatctgctggcctagtgactggcctgaccagcccactgcaaccactaacaacaccaatgcataccacttgggagccagaaggttgccctgccactgccattgccattgcccaagccacacctgcttgccagggactcaagaacacactctcttaactggctcactgctaccactaatggcacctgagcaagaatcctagaagcccaagaataggcttgcctggactcactaacactgatgccagtatacaacactctggggcccaaggacagtcatgctcagcttacactaacaccactggggcttgaggactgggccacctggcatcttcatcgccagcaagatctcaccacaacctccactaaccgacatagcctaagc

SEQ ID NO: 951047 - DNA, 588 bp, Homo sapiens
ggactgagttctaatttttcttggctacaagccttcaaaatattgctttcagtttcttttccttctttacccccacccccactcccycatttatcctaatttggagtcactgaaaactaagctgtgcattcataaagccctgtgaacagaagctagacaacttaaacttcagaagaaaataacaacaacctatttacatacataagccacttactgcctgtctattgatatgtggacttcagagtagtgtggcctatatgcattttccaggattgttcctttgtttgttcttgtttttctcccttcctcctcctattttctctttataggacatgagactttacagcctgctaaaagtgagccttcctaaataacttgggacctacccatctaggaataaaccatcctagccatgagagatcggacaaaacctcagactagagacgcattttcttctaaaatgctttctccaaaggattttttaaaagaaaagtgtagggtccagccccacagggtcggtgggttttctcctcgtgtgcagagatgagagagtgtagaaataaaggcacaagacaaagagattaaaaa

SEQ ID NO: 951048 - DNA, 626 bp, Homo sapiens
cctacagtgagaggcagatgtaggggagtgagtagctaaatggcagcctggggaccaaatcctggctctgctacttactagctgcatgacctggtgcaaattacccagccagtctttctgttctcatttccttacctgtgaaataatgtgggaataacaatagtacctatgtaataggactgttttgatgattaaataaattaatatgctagaacattagaacagaataaattttcgataaataagtgggttgctgttagactgtatttatttatttatttatttatttatttatttatttatgatagtatctctctctgtctcccaggctggagtgcagtggtatgatctcagcttactgcaacctccacctccaggattcaagtgattctcttgcctcagcctcctgagtagctgagattacaggcgcgcaccaccacgcctggctaatttttagtaaagatggggtatttttagtagaggtggggttctgccatgttggccaggctagtcttaaactcacgacctcaactgatctgcctgcctcggcctcccaaggtgctgggattacaggygtgagccgctgtgtccggcctctgttatactttttactgaccagttacaat

SEQ ID NO: 951049 - DNA, 626 bp, Homo sapiens
cctacagtgagaggcagatgtaggggagtgagtagctaaatggcagcctggggaccaaatcctggctctgctacttactagctgcatgacctggtgcaaattacccagccagtctttctgttctcatttccttacctgtgaaataatgtgggaataacaatagtacctatgtaataggactgttttgatgattaaataaattaatatgctagaacattagaacagaataaattttcgataaataagtgggttgctgttagactgtatttatttatttatttatttatttatttatttatttatgatagtatctctctctgtctcccaggctggagtgcagtggtatgatctcagcttactgcaacctccacctccaggattcaagtgattctcttgcctcagcctcctgagtagctgagattacaggcgcgcaccaccacgcctggctaatttttagtaaagatggggtatttttagtagaggtggggttctgccatgttggccaggctagtcttaaactcacgacctcaactgatctgcctgcctcggcctcccaaggtgctgggattacaggcrtgagccgctgtgtccggcctctgttatactttttactgaccagttacaat

SEQ ID NO: 951050 - DNA, 542 bp, Homo sapiens
agaaataattttaaattctagcagaaataattaattataaaataattatcatatataatatctattcatatgtataaaatatctattcttactttgtgggttagtttgatctatctttrcctcttcaggcattattccagtgccctgtcatgatttgcttacattttattgtcttctttttttaaacatagtatagtctcttttttaaaaaggcagtataatcttttaaaagttctgtattttgtgtacttaaattcttcgaagagtctctttaaatgcaagacagaataattttatttagtatttaattgattgataccaaactgaatttaggttacttgagagttttttttttccctcttagatccctgcccaaaatgtttactattacatatttacaaatcaagggtacattactaccatttttctagtgactttcagagtaaatatttcttcttactcatttaacttggaatctgggaataattgaggcaaaagaaaataaaaaactcatatcaaaatatcacatttttgtgttgcaa

SEQ ID NO: 951051 - DNA, 470 bp, Homo sapiens
ctcctactttgaatcacaaatgttcttaatagcacctagaatgatgaattctctccaggttttcaacttactttgcccagattcatcagaggaatcactatctatagccttataaaatgtgtttcttaagtartaaggcaaacgttgaaattactctgatccatgagccacagaatggatgctgtgttagcagacatgaaaacattaatttccttggtacatctccatcaaaattcatgggtgaccaagtgcattgtcagtgggcagtgatattttgaaaggaatctttttgagcagtaggtctcaaaagtgggcttaaaatattcagtaaaccatgctgtaaacagatgtaaacagtgctgtcacccaggctttgttgttttatttatagaggacaagcagagtagatttggcacaaaggccctagaatttttgtaatgagaaattagcattggcttcaacttaaagtc

SEQ ID NO: 951052 - DNA, 628 bp, Homo sapiens
gcggtcgcctgcagttccaactactcgggaggttgaggcaggagaattgtstgaacccgggaggcggaggttgcagtgagccgagatcgtgccactgcataccagcctgggtgacaggcaagactatatctcaaaataaataaatacatacatacatacaaacacatatatgtaatgtataaatattacctttttgtcatctatttaacaaaatatttgctcaaatatatccttccatctgacaactatttaacattacttttctaatatttttactttattgctgctgacttgatacattttttattcattccactacatccttgttattttggaagatctatcctttatttctttattaaggggtatcttcaattttttgacctcacaattagatgcataattttcaagtactatttgaaataaaaataccttctattgtcttagcaaattagtccatttctctacttacccctcctcaataagttgacaaattcaaaaaacataaatttccccatttctttttcaccactcccctccaagaaaacttggaaccagtttgttccaaggtttgttcccaccaaaatctagattatacaaaaacattttagaatgttaatgatatatt

SEQ ID NO: 951053 - DNA, 763 bp, Homo sapiens
gtagattgggttatttatagttaaggaggttggctgatactgcagtagtagtaataataataataatatttataatataactacaagcccctccacatcagctttggcagaagtgattggggatcccagaactcctggtgctcctggaaagaatgccactgccccacccaccctgctatgctcccccagcagtggaacttatgtcatcaggtgatgtagttacctaatgacccctggtgacttctgattctttcaagattttagcccctggcttactgtctctttgctctgacctctctcatatttcttggtgatttcagtatcgatgatgctgccaggaccctgacgtctcagttctttgaccttcttctccaatgtgcctgttctccatcctgccccagccactcacctcatggtcataccctggaccttgtcattgtcagtaacttccctcttccaagagatgcatattaaggggcccactctctgacccctacttttatccttctggctcacaagctctggtaccctgactctaacaatccttcccccattgacacgtacaatccttccatccaaataccctttggtgctttccgcccttctccagtcccaccttttatccttatccagcttaaagtccatcgttgtaaccactcttttgcatacccctcagttcctttgctcctcatgtctttatattcayggaacaaaaccccaattctgataaagcccgactgtctgttgacttggagcttacatt

SEQ ID NO: 951054 - DNA, 763 bp, Homo sapiens
gtagattgggttatttatagttaaggaggttggctgatactgcagtagtagtaataataataataatatttataatataactacaagcccctccacatcagctttggcagaagtgattggggatcccagaactcctggtgctcctggaaagaatgccactgccccacccaccctgctatgctcccccagcagtggaacttatgtcatcaggtgatgtagttacctaatgacccctggtgacttctgattctttcaagattttagcccctggcttactgtctctttgctctgacctctctcatatttcttggtgatttcagtatcgatgatgctgccaggaccctgacgtctcagttctttgaccttcttctccaatgtgcctgttctccatcctgccccagccactcacctcatggtcataccctggaccttgtcattgtcagtaacttccctcttccaagagatgcatattaaggggcccactctctgacccctacttttatccttctggctcacaagctctggtaccctgactctaacaatccttcccccattgacacgtacaatccttccatccaaataccctttggtgctttccgcccttctccagtcccaccttttatccttatccagcttaaagtccatcgttgtaaccactcttttgcatacccctcagttcctttgctcctcatgtctttatattcatggaacaaaaccccaatyctgataaagcccgactgtctgttgacttggagcttacatt

SEQ ID NO: 951055 - DNA, 638 bp, Homo sapiens
agattattcccttcccccccccccactgacaaatgtgcaaaacaaattcagtggagtagtcttcaacaaatggtactggaacaattggatagccatagccaaaaatgtaacttcaatycacacatcccaccatatacaaaaattaattcagaatgactcacagtcctaaatgtaaaatctaaaacaataaaacttctaaaagaaaacataaaagaagatctttgtgacctggggttaggcaaagacttctcagatatgacatcaaaaaacacaacccataaaagaacaagttaattaattggccttcatcaaaattaaaaactcctgctctttgaaagacacgattgaaggaaaagacatgccctggatggggagaaaatcttagaatatatgtgtaaaagacttatccaggataaacacagagcttaaaaactcaataataaaacaaataacacaatttttttaatgagtaaaagatttgaagacatttaccaaaggagatatatggatggaaaacaagcaataaaaattaatgatcaacataattaatcattacaaaaacgtaaatcaaaaccacagtgagataccacttcatatctattagaatgactaacatgagaaaagttgaccatgtgaag

SEQ ID NO: 951056 - DNA, 595 bp, Homo sapiens
tttgttaaaaaactactcaaggccagagaaaaaaccaccacataggaacagacagaacaaaaccaggaaaagtaattcaaactgtgttataggtccaaatgtaagggttaaaacaataaaattataaaactactaaaagaaaaatttagtagaggatctaagtgatattgggttaagtaaaaatttcttcaataaaatagaaattacaaactataagaaaaaagatcaagttgtacttcaaatttataaactttacacttcaaaacacactactacaaaataaaaaggcaagacacaatctgaaagtagagttggaaaacatatatttgatgaaacaattctatccaaaatacataaagaattcttcaactcaagaataagaagaaaaacaagcaactttatttaaaatggcaaaaagatttgaagacactctactaaaggagatatgaatgggaaattagcacatgaagaagttctcacaaatttgtgattaaggagatgctaattaaaaccacaacgaaatactattacacacgaactaaaatgactaaaattgagaagaccgacyataccaactccaactctaatacaatgc

SEQ ID NO: 951057 - DNA, 644 bp, Homo sapiens
gtgtggtggctcacgcacacctgtagtcaatcccagcactttggaacgccggggcaggtggactgcttgagcccagaagtttgagaccagcctggccaacatggtgcaactccgtctctacaaacacaaaaagtagccaggtggctggatgtggtggctcacgtctgtaatcccagcactttaggaggccgaggcatggggtatcgcctgaggtcagaagttggagatcagcctggccaacatggtaaaaccccatctctactaaaaatacaaaaatcagccaggcacggtagcacgcatctgtaatcccagctacttgggaggctgaggcaggagaatcgcttgaactcgggaggcagaggttgcagtgagccaagatcgcaccactgcactccagactgggcgacagagcaaaaactctgtctcaaaaaaaaccaaaaccaaacaaacaaaaaaagtaaccaggcctggtgactcacacctgtggtcccagctactcgagaggctgaggtgggaggatcacttgagcccagaagggccatgcctcagtgagccgagayggagccactgctctccagcctaggtgacagagtgagaccctgtctcaaaaaaaaagcgggggagaggcggaatttgggagtggc

SEQ ID NO: 951058 - DNA, 429 bp, Homo sapiens
gtaactcgactctgtctgttatacgttgaactatttctccaccttctacttacttatcaaatttagtactttggcaaatattttaaaagctcagatagtaaaatcacattgatatatgaatgaaggttaaacatatacacacacatgcacacacacataaccctttgtagaggattccattttaattttgtattttgatataattttaaacttacaaaagatttgcaaaaataatacaaagaactcctatatattttagtccagtgcactaattactaacattttgacacatttactttatttttttctctatgtctgtagagtttattttaaaccattgatagtatgttgaagtcatcatgccyctttgcctcctaatacttgagtatttcccaaggacaagaataatctcttgcacaattatagcct

SEQ ID NO: 951059 - DNA, 655 bp, Homo sapiens
ggcctccccagccatgtggaactgtgaatccattaaacttcttacctttataaattacccagtcttgggtatgtccttattggcagtgtgagaacagattaatacaatgcccaagaaaaaatgataayttatgtccacacagaaacttggacatacagtttataggaacattataagtaatcacccaagattggaaacaatctaaatatccatcagcaaatacatggataaatataatttggtatgtccatatgatggaatattatgcagcaagaaaaagaatgaaatattatatatgttatagcatggataaatcttgaaaacattatgctaagggaaagaagccagttgtaaagactacacattgtataattccatttatataaaatatccagaataggaaaacatatagagatagaaagtagatttattcttgcctagggctaggaaaagtagggagtgactgtgaatgaatatgggatttctttttagggggacaactgttctaaaattgatagtggtgatggttatatatccctgtgaatatactataaaacactgaattgtacattttatatggatgaattgtgtagtatatgaattatatctcagtaaatctcttttatgttttttgaaggaaatagtgggagtaact

SEQ ID NO: 951060 - DNA, 598 bp, Homo sapiens
ggagtttgccagaggtccactccagaccctgtttgcctgggtatcagcagcagaggctgcagaacagtgaacattcgtgaacagcaaatgttgctgcctgatcgttcccctgratgttttgtctcagaggggtacctggctgtgtgaggtgtcaatctgcccctaatggggggtgcctcccagttaggctactcaggggtcagggacccacttgaggaggcagtctgtccattctcagatctcaagctgcatgctgggagaaccagtactgtcttccgtgctgtcagacagggacatttaagtctgcagaggattctgctgccttttgtttggctatgccctgcccccagaggtggagtctacagaggcaggcaggctccctatgctatggggggctccacccagtttgagtttcctggccactttgtttacctactcaagcctcagcaatggtgggtaccccttccccagcctcactgccaccttgcagtttgatctcagactgttgtgctaggaatgagcaaggcgccttgggcgttggaccctccgagccaggtgcaggacataatctcctggtgtgccgtttgctaagactgtt

SEQ ID NO: 951061 - DNA, 598 bp, Homo sapiens
ggagtttgccagaggtccactccagaccctgtttgcctgggtatcagcagcagaggctgcagaacagtgaacattcgtgaacagcaaatgttgctgcctgatcgttcccctggmtgttttgtctcagaggggtacctggctgtgtgaggtgtcaatctgcccctaatggggggtgcctcccagttaggctactcaggggtcagggacccacttgaggaggcagtctgtccattctcagatctcaagctgcatgctgggagaaccagtactgtcttccgtgctgtcagacagggacatttaagtctgcagaggattctgctgccttttgtttggctatgccctgcccccagaggtggagtctacagaggcaggcaggctccctatgctatggggggctccacccagtttgagtttcctggccactttgtttacctactcaagcctcagcaatggtgggtaccccttccccagcctcactgccaccttgcagtttgatctcagactgttgtgctaggaatgagcaaggcgccttgggcgttggaccctccgagccaggtgcaggacataatctcctggtgtgccgtttgctaagactgtt

SEQ ID NO: 951062 - DNA, 574 bp, Homo sapiens
tggtctcaaactcttttttttttttttgagacggagtcttgctgtctcccaggctagggtgcagtggcacaatcttggctcactgcaacctccacctcctgggttcaagcgattctcctgcgtcagcctcctgagtagctgggattataggggtgcaccaccacgcccagctaatttttgtatttttagtagagatggggtttcaccatgttggtcaggctggtcgcaaactcctggcctcatgatctgcccgcctcagcctctccaagtgctgggattacaggcatgagccgctgcgcccggctgacaatgtctctttttatggaggcaggggtggggggtgcttacagaggagaggaggccagcgtgtcaggctgtaggaagagcccaggggctgtcttgggatcccaaagccgctgcagaattgaggcttgcgctggggtccgggggcrcctggcctgtctgttcttgccagttggcctggacctggtccaccttctcaggccctcggtctctagcctgccaccgccacctcctccaccgccctgagaagaagtgccaggctttgctgggt

SEQ ID NO: 951063 - DNA, 708 bp, Homo sapiens
ccagctgaatcggatactattaggctataagaaagtcactaaattactcgagtttcgtttttttatctgcacaatgggctgtagcaactttgcgaacttgtagagacaacatcaaataaaggatcaccagggtacaaaattcctcagaatgttctcaagaaataatgtgggggcccgggcagttttccactagactgccagtccccggagagctggggggcatgtgctgttcatctctgtatcatgtgcatgaactttatgcagaaactgtcatgtcactcctgaattaggctcaacccatctcggagcccctatcctactgggctaccaaaagtgaaatcaatcttagtcatactgagtctccttccctttgcctcttgcgttatgcagagttcccaagagtctttcaccgtccgggcatttgaggaaaacactcaaatccacactggacccccctgagatgctgccaactgagccacgtaatcccttgaagctgccagtgtctgagagaggtctctgctaaggatgccctgggtttttggtgggccgcatcccaccggtcaaggggctggcactcccaggggaactgtgagggaggggacayaggcgggagcagtcacaggttggcaccagtggcctgtcctccccaccactccctagtctccggggaagctctatggagttccctctgcctcccaacgtcctgcc

SEQ ID NO: 951064 - DNA, 696 bp, Homo sapiens
gataaatgagtgagttgatagtgaatgtctagtgggtgagtgggtaaataaatggatacatggataggtgggtagatgattgaatgggcagatgggtagatatatagatgggaaggtgaatagatgaattgatggatggataattaaaatcaccagtttatcccgaagtatcagaggatctaaaattagggaaaatgggaaaaccaatgagtacatttttaaggggataatgcaaaacaacaaagagattaagttggctgcactgcaactgtgtttgtccccccagacacgagtgtgggcagtcaaggacccttgacagccccagtgaaccccgtcttttctcctccccctgcaggtgggctgtaaggcagccatggtctttttccaatattgtgtcatggctaacttcttctggctgctggtggagggcctctacctgtacaccctgcttgccgtctccttcttctctgagcggaagtacttctgggggtacatactcatcggctggggtatggtaccagggagggcttccaggctggggacagagggggcaaggcctggagaactccctaggggkagggtgccaacccagcttgcagtcctacgtcttgcttagctgcaggtcctgcctgcaaggatatcagccaagggtcaagaaagtcctcaaaatgtctgatcccaggacaagtccctcag

SEQ ID NO: 951065 - DNA, 608 bp, Homo sapiens
cctacagactcaatgcaattcctatcaaactaccaatgtcatttttcacagaattagaagaaacaatactaaaactcatatgaaaccaaaaagwgtcaaagtaatcaaagcaatcctaagcaaaaagaacaaagctgggcacatcacattgcctgacttcaaattataccataaggctaaggtaaccaaaacagcatggtactggtatgaaaataaacacacagatcaatggaacagaatagagagctcagaaataaaaccacatgttataaccaactgatctttgacaaagttggcaagaaaatacactgaggaaaggacaccctattcaataaatggtgctgggaaaatagattgccatatacacaaaaatgaaactggacccctacttatctatctatctatcaatcactatatgcaaaaatcaactcaagatggattaaagacttaatgtaagaattaaaactattcactcagtgctcaatggcgcccaggctggagtgcagtggtgtgatctcagctcgctacaacctccacctcccagccgcctgccttggcctcccaaagtgccgagattgcagcctctgcccggccgccaccccgtctgg

SEQ ID NO: 951066 - DNA, 608 bp, Homo sapiens
cctacagactcaatgcaattcctatcaaactaccaatgtcatttttcacagaattagaagaaacaatactaaaactcatatgaaaccaaaaagagtcaaagtaatcaaagcaatcctaagcaaaaagaacaaagctgggcacatcacattgcctgacttcaaattataccataaggctaaggtaaccaaaacagcatggtactggtatgaaaataaacacacagatcaatggaacagaatagagagctcagaaataaaaccacatgttataaccaactgatctttgacaaagttggcaagaaaatacactgaggaaaggacaccctattcaataaatggtgctgggaaaatagattgccatatacacaaaaatgaaactggacccctacttatctatctatctatcaatcactatatgcaaaaatcaactcaagatggattaaagacttaatgtaagaattaaaactattcactcagtgctcaatggygcccaggctggagtgcagtggtgtgatctcagctcgctacaacctccacctcccagccgcctgccttggcctcccaaagtgccgagattgcagcctctgcccggccgccaccccgtctgg

SEQ ID NO: 951067 - DNA, 697 bp, Homo sapiens
gggtgtaaacggcttgggaggaacagcatttcttcctggggcgaaaaggaagggagtgctgagagcagggtcgcaggtcsccacaccaggtctgaatccctgctggctgcatctgcaggctggaggggaagtgggccctgggtgcaggacccctgcaggaggccatcacagggtccctcctggggctccaggcaggaggagccacaggctctcaaggtcgctgggaccccgtacctgtggacctgagcctctcacagcacgtgtgtcccccactggtctctgttttccctaatgaggttgctcctggtcctgtcttaggatctttgaccctgagtgtcactgtctggaactctttcccatgagaactgctcagggctgtcttcatctcctcctgcttcaggtctcagcttcaacgttctccctcatgagcccccaaccactctgtctaaaggccctcccttcctcactccccagccttgtctgcttcctttcctggatgtctttccttcctgggaagtctacacagcttccctgttggtttcttgcctaataaaagcagagcctcgtgggattccccacagtgtccccagagcctggaaaggtgcctgaatgcaggagggctcagggcacgcagagatggcctcagacaggagccggcagaacagcccacacagcaaggacttctgctccatcatcc

SEQ ID NO: 951068 - DNA, 607 bp, Homo sapiens
tgtattgagttggtgtgggcagtcctcagtttacctgcctaggaacttagacccacagataatagagacatgttatcatcaakagattcacccatcttccatcagaaatgcaaacaagaacctaaatcacctcacgtttcccctcctatttttcaaacattatgagagtggatattaaatttttggccaggcacggtggctcacgcttgtaatcccagcactttgggaggctgaggcgggcagatcacaaggtcaggagatcgagaccatcctggctaacacggtgaaaccccatctctactaaaaatacaaaaaagtagccaggcatggtggcgggtgcctgtagtcccagctactcgggaggctgaggcaggcgaatggtgtgaacctgggaggcagagcttgcagtgagccgaggtcgtgccactgcaccccagccagggtgacagtgtgagattctgtctcaaaaataaataaataaataaataaataaataaaataaattatcagtcagtctctgtccaaaaaggagcgggcagagaatgtgctttaaaagagtatttttttttattttattattattatactttaagctttagggtacatg

SEQ ID NO: 951069 - DNA, 535 bp, Homo sapiens
cccatctctactgaaaatacaaaaattagccaggtgtgctggtccatatctgtaatcccagctactcagaaggctgaggcaagagaattgcttgaacccaggagacagaggttgcggtgagccragattgcgccactgcagtccgcagtccggcctgggcgacagagcgagactccgtctcaaaaaaaaaaaaaaaaaaaaaattgtgtcagtagtgagaagagtcagaaatatttggaactggttagtattgatattctgcatagcagccatttttttaagagttcagaaaatctttaaaattatcttttttttccttaaccctcacagcattttgaataagtaataaaaatttttggcattatttctagacctagctataggtaagaatgtggagggctaaaaagaaaaatgacttgtcaaacaaagtgctccaggggaaatctaaacatctaaaacaacaacaacaacaaactcaagataatatttgtccgcatggtagaaaagaaccaaatatgtggacaatggcaaatga

SEQ ID NO: 951070 - DNA, 561 bp, Homo sapiens
aggaaaggccttttggatgaagtgacttttgatcagagacctaagttgagcgtgagaggagtgagccttgtgactgtctgggggaagaatcttccaggcaggaaaaatgcaaaagccccaggttggtgggagtgtgccagtgtggctggagcagagtgagcaagggaggggggcaggtgggatatgaggtcagaagggtagcaggagggcaggtcttgttcagccatggtaaagggtttggcttgactcctggtgaaatggaaagtcttgggtgtgggggcggtttaagcagagaaatgataggatctgatgtatatttttaaaggatcattaagtctggtgtggtgaatagactcttgggggaagagggaacaaaggtgggcatagagagaccagttaggaggcactgagaggaggggagggatggtagagttttagaatagaggaggaggttgaaatggttgttttggagaatggaagygagaatagagaaatgtaataggattgccatgcagcaggaagggctcagttgaggttagtgatacattatagcaagatgtt

SEQ ID NO: 951071 - DNA, 575 bp, Homo sapiens
agtagccaggtagccgggtgtggtggcttgcgcctgtaatcccagcactttgagaggctgaggcgggtggatcacctgaggtcgggagtttgagaccagcctgaccaacatggagaaactctgtctctactaaaaatacaagaacactgaactgaacgcttgttgggatgacctgcctgcagagaggagctactgtctctgctaggagctgaactcttgtcaggacaccctgactacagagaggagctgcccagtgtgggtcttctctgagctgttctattgctcaataaagcttctcttcatcttgctcaccttccacatgtttgcatacctcattcttcctggttgcaggacaagaactcaggacccaccaaatggcgaggctaaaagagctgtaacacaaacgtggctgaaacatgccccttgctcaccacgttgtgggtgaagagaaggagagaaaagctgcagcccttcagggagcccagacctgggagctccctgagtcagggctatgactccctctttggggccctgcagttcctggcatctccaagyttccaggcaccactgcattc

SEQ ID NO: 951072 - DNA, 216 bp, Homo sapiens
aatcaattatttcacacccttatgattcttagagacatcatttagaaaatktattcattaagtttgtttttaacaacaagtaacaaaaaaatccagcctcatagtcttaacatgtttttgctcatataacaaaatcagaagataagtggaccaataatgttaaactgatacctccagattctcctgtcctctgcctactgctgactgagtcaaaaa

SEQ ID NO: 951073 - DNA, 607 bp, Homo sapiens
catgaagctactcagggaggtccatggagaggtccacatggcaaggaactgaggcctcctgccagtagccagcaccatcttgctggccatgtgagcgtgccatcttagawgcagatcatacggccccagtcaagccttcaaatgactgcatccctacttgacattttgactgtaacctcatgacaaaccctaagccagaacaccagctaagccactccccaattcctcatcaagagaaactgagataataaatgtttattattgttttaagctactaaattttgaggtaatctgttatgtagcaatagataactaatactgatatctgtcatattggggcctcagtgtaacttggaacagaaagagttccatattataattcttaaacattacttggaatggttaggggccccagtgctattctctctggggatatttccagcaatgggccccacagccatttatagtgagttgtcccacttactctttcaccagtgagcactttccatgtgtcagatgccatattagagactggggctatagaaatgaacagtcttttgggaggccgaggcaggtggatcacctgaggtcaagaatttgagaccag

SEQ ID NO: 951074 - DNA, 635 bp, Homo sapiens
tgctctgggtccatcattaatttttattttatttattattatttttagagatgaggtcttgctatgttgcccagcctggtctcagactacaggcattcaccactgcatccagcttttccttccttcccgccttccttccttccttccttccttccttccttccttcccttcttcctttttttcttttttttttgacaaagtcttgctctcttgcccatgccggagtgcaatggtttgatctcacctcactgcaaccttcgcctcccgggttcaagcgattctcctgcctcagcctcccaagtagctgggattataggcggctgcaaccatacccagctaatttttgtattttttagtagagatgggctttcaccatgttggccaggctggtcttgaactcctgacctcaggtgattcgcctgcctcggcatcccaaagtgttgagattacaggcgtgtgccaccatgcctggccaacacccagctttttctaggcctttttttttcttytttttttttgagacagagtctcactctgtcacccaggctggactgcagtggcgcaatctcggctcactgcaacctcccgctcctgggttcaagcgattctcctgcctcagcctcccgagtagctgg

SEQ ID NO: 951075 - DNA, 614 bp, Homo sapiens
gtctctactgaaaaaataaaaaaatacaaaaaattagtcaggcatggtggcgggcgcctgtagtcccagctactcgggaggctgaagcaggagaatggcgtgaacccgggaggcggagcatgcagtgagccgagatcacaccactgcactccaacctgggtggcagagcgagacactgtctcaaaaataaaataaaataaaataaaataaaataatctcccattcagcattctcactttgtttaaaaacttttattgaagtttttaagactgtttcatggattccattacaaaggcttgaagtaaatataaaaacagcagaagaatgtaaatgtatataatgagttactttctctccaaatcatctaccctagatgtgttacagtgctattatagctaatagcctaataaggaaacctgtaggttagctatgactgtgtaaaaaatcactccaaaaacttagtaacttaagaacaatttcytattttccattgggtaagcaggcctgatgggcagttctgctagcctggtctgcaatcagttgaactcactcaagagtctatggttggcagcagctctacaaggcagcactgcaaatcttggctgaattctctc

SEQ ID NO: 951076 - DNA, 566 bp, Homo sapiens
ataaatgtggccaagctacttttttaagcgagttcctgatctcattcctactgactggagaagacctcccatgcagggtcaccagccacctcctacaggtgagttcaggctggcaacaggtctgtgtctccttgggatggaggtcccagaggaagtggcaggcagctatctttgctgtttcttagccttcactggtgatatctccaggtactggtaaatctgagatgactagggaatggaggagcagattcccagcaaagagctaaatgatgacaaatgggatcaaattaaactgaaaagcttctgcacaatagtagaaactatcaacagagtaaacagacaacctacagaatgggagaaaatttttgcaaagtatgcatccaacaaaggtctaatattcagtatctataaggaacttaaatttataagaataaaacaaccctataaaaaagtgggcaaaggacttaaatagacttctcaaaagaagacattcatatggccaacaatcatrtgaaaaaaatctcaacatcaccgatcgtaagagaaatgcaaatcaaaaccacaat

SEQ ID NO: 951077 - DNA, 470 bp, Homo sapiens
gctaatggtatctgtgtccagagcaggattcactcagtcctctgagttttctttttcagcataatgttcaggacctgtgttgtcygaggaagctgcattgtctggggccatgggtcctgcagggttatttccttcatttctggtaccaggttgggtcctagccacaccatggtgtggtttgatgcatcatgctggaatccaaagagggcctgagggggtgtaaacacaagcatattctcttccccatgttagcagatcatttgaaccacacctaacattactatttacatctttccataaaatcgcaggttttatgttttgaggggctttagtaaaatgcctttgtatgactgattgaaatttgtcactaaattttaaaaattaagggcaaataagtcttgtgccaatagtatttcagggtccttacttgtatttcctcttttttgttttttgagcatatttttaagggt

SEQ ID NO: 951078 - DNA, 574 bp, Homo sapiens
acaataagaagcaatcatgttaagccactgtttaatgcagaccattgttacctcctgactacactactgcaatatggcccttgcktgtatttcactttctatgttgttcccatttattcatcaagtgaaaacccaagtctggccgggcgcagtggctcatgcctgtaatcccagcactttgggaggctgaggcgggcggatcacgaggtcaggagatcgagaccatcctggctaacacggtgaaaccccgtctctactaaaaatacaaaaaattagccaggcatggtggcaggcgcctggagtcccaggtactagggaggctgagacaggagaatggcatgaacccgggaggcggagcttgcagtgagcccagatagcgccactgcactccagcctgggtacagagcaaaactccgtctcaaaaaaacaaaaacaaaaacaaaaacaaaacaaaacccaagtctgatcatgttacttcttggcttaaaatctcttagtgggccaagtgggcgctgtggctcacgcctataatcccagcactttaggaggctgagggaggtggatcatctgaggt

SEQ ID NO: 951079 - DNA, 737 bp, Homo sapiens
cagcaagaattttgagcacctacagaaggtgagcaatgtgaacagggtaaaactaggcttcttcaaggagcagtggttcacaggcctgggtaccaaatcctaagcctccccagcccatatcactgaccttctacctgaaaggaagttcttccttagatctaactgcagttcctcctgctgtagaaagtttccactggactataggcttctctgttttttgttgttgtcgttgttgttttgttttgagccagagtcttgctctgtcgcccaggctggagtgcagtggcacgatcccagctcactgcaacctccgcctcccaggttcaagtgattctcctacctcagcctcccgagtagctgcgactacaggcgcccaccaccacgcctggctaattttttgtattttagtagagacggagtttcaccgtgttgcccaggctggtgtcaaactgctgagctcaggcaatccgtccgcctcggcctcccaaagtgctgggattataggtgtgtgccacgacacccgacccaactttaggcttcttaaggtgcctctgtattcccagtgcctctctgtttctggtacacagtagactttataaatgtttgctgaattagtggtccttgttccatccccagcctgccctaacccctgccccacccacacatgaattcaatgarctaatacctttaagcccttaaacagagttacatattcgcttgctaaataatacagaaat

SEQ ID NO: 951080 - DNA, 780 bp, Homo sapiens
ggaggctgaggcatgagaatcgcttgaacacgggaggtggaggttgtagtgagccgagattgtgccactgcactccaggctgggtgacagaatgaggctccatctcaaaaaaaaaaaaaaaaaaaaaaaaaagcgagagacagaaaagaaaatggtaagcaggatttgcaagaatactctaggcataaagtaacagttcattttatgaataagaacaatatgtcaaccaagaatgtattttacaagcttccccaagttaggaacaaccccaccagattgcatatattatttaactatgatttcttatctatgattacgttatctaacttaactatgatttccaatggaagttgtggtttggccatctttccttcagcctaggagaaccttcagggcattatgttcttggcccagggcttgtctctgtggctgttgttggctgtagatggtccttgggaaagttttaagtctgtgcttctcatgtaggcttacccacactataatagttatgtgaagccagaggctgaaaacatcagttttggccaataaaaggtaaataaaagaatcatttttatgttataatatgcattaatatatgatgaaatagacagcaaaagtggtaccaattttgaaatataaatattagtgcaaaagtaattaygtttttgccattacttttaatggcaaatataacaacatgatacaacgaagggtttccaacaaaagtcacatttagaatgcctagggtcaggtttcaattacctctgccatttatgaagc

SEQ ID NO: 951081 - DNA, 587 bp, Homo sapiens
tttcaaaaatgaagataacacaaagacttacccagataaacagaaatattarctgaagttgttgctggcagacctaccacattaaaaaaaaaaaaactctaaaataaattcctaaggctaaaagcaagttacagaagacagtcacttgaatccacatttttaaaaaagcactggtataggtaatattgacattataaaagacagtaaaaatgcattttttctctttatcataaattgtttattaaataacatgtgtataatggccgggcacgatggctcacacctgtaatctcagcactttgggaggccaaggcgggcgtattacgaggccaggagatcgagaccatcctggctaacacagtgaaaccccgtttctactaaaaatacaaaaaaggagccgggcgtgatggcgggcgcctgtagtcccagctactcgggaggctgaagcagaaaaatggcatgaagctgggaaatggaacttgcagtgagcggagattgtgccactgcactccagcctgggtgacagagggagactccgtctcaatgataataataataatatgtgcataatgtattgctgagttttt

SEQ ID NO: 951082 - DNA, 628 bp, Homo sapiens
atctttgaatgttgacccagccttatatatgtgacataattcttccttgtttgtggtatataattatttttatacattgttcaattaaatttgctaatattttgttgagaatgtatgcttctgtgttcataaaagatatttattcctaattttattttctttttaatgtcttgttttggtattagggttatgctgccttcataggaagaattaggagctatttctcccacttctatcttctggaagacattgtagaggatgagtataatttgtatattaaatgtgtggtagaattcaccagtgaactcatctaggccttgtgtctcctgttctaaaatattaattattgattaaatttcttcaatagcaaaaaaatctgttcagattgtttatttcctctagtgtgagttttggcaaattgtgcctttcaaggaattggtacatttcatctaggctatcatatttgtgggcatagacttgtccatattattgcttaattatttttttaatgytcatgggatctgtagtgatgtatactctttcatttctgatattagtaatttgtgtcgtctctctttttcccctaattaacctggtaaggagcttatcaattttattgatcctttca

SEQ ID NO: 951083 - DNA, 591 bp, Homo sapiens
atcatactcataattttatctttctgattatgtttttgtcaacatcaataaatctatttctctgacaaatatgaaatatgatttctcagaaagagtatttttgagaaatgggaaagaaaaagcytaaatcagaacacagtccacataactgagcaaaagatataggctagaatgataagtaaatttgtggcacaattataagttcaactgctgtatttactgaatgcaaacaaatgccagtagtaatcctaaaagctatcgaaatataaattttaggttaactgactcactagcaagctctatattatttacactgcagagtggagataaatgaggtcagtgctatgtgaaatgctatcataagctgggaggaaaaaaggtctgcaaactgccaaatattaccaagaatgtgacaatttcctgatctttttgaacactgtagtttgcttatcggtaaaacattctgggaaatgtatttttttgcagaaacataaaattcttgacattactgatgaaaatgcctttacattattactgtgattctacttgttaagtctcatcatttgtcaacttgtaagcaaatgtagattt

SEQ ID NO: 951084 - DNA, 570 bp, Homo sapiens
ctgaatttttataggctttgtattctacactacaaagtttaacacttaattatatacaaccatattttatactcaaattaacttatactttcagtctttttttaaatattagactacaagttcaaaggttttctagtttcagctctggttactagttgtacaaatctcaatttttaacaatgtaaagtggaaataatcctttcacttatcagatcattgtgaacatcaaattattcataaacaataaagtgttctaaagttaaaaatcttgttaaagacttcttgggagagcactttcttggaattgggtttaaatccagattttactaattactagtttatcggctatgtattttagataagtcatttagcctctctgagcctcagttacttcattggtttaaaaataaccctcaaaaaaagaacccagttctctcttgaatttctcccaactacttctaggggtgcttacagaggtgtmaagggaaccccatgaaatttgctgttgcttatccagggctcctctcatttccctcctgtacctctctacctccatgtggtgatgtctcc

SEQ ID NO: 951085 - DNA, 651 bp, Homo sapiens
tcctggcagaattcatcacctgctaactgaagaacccttcagtcctgaataaccagcagtgatacccaggtactacatcgtcggccttgggtgagattctgagacttgctagctacaggtgagactcagcacattccaagatgtggtggctatgggctgagactccttctgctggagaaaagcagagggaaagtaaaggggaattagtcttgcattttaggcagcagcttggccacagggcggtagagcaccaagcaggctcttgaggtccctgattccatgacttgattcttggatggcatttctgggccctgggccagaagggaaccctgaatggagagattcaggactggtagcattcacaacaagctgactgagagcccttggaccttaaggaaatatgggtagtagtctgacagggttcctcatgggcatgaggtggcaatggtcatggagttaggctcctctgcctttggaaaagggaggaaagagtgggaaagactgcatcttctggttcgagtgcmagctcagccacagtaaaatagaaaaccaggtgaacttctaaggtttttgactctagtccttggtgcccagatggcacctttggacccacctggggcctggggaaactttctgccctgaagggaaggt

SEQ ID NO: 951086 - DNA, 754 bp, Homo sapiens
agagtcatgaagtcccctttccaggccctagtccctggacatttctagacacaccctgggccagaagagaactctgccttgaagggaatgacccagtcctggcagaattcatcacctgctaactgaagaacccttcagtcctgaataaccagcagtgatacccaggtactacatcgtcggccttgggtgagattctgagacttgctagctacaggtgagactcagcacattccaagatgtggtggctatgggctgagactccttctgctggagaaaagcagagggaaagtaaaggggaattagtcttgcattttaggcagcagcttggccacagggcggtagagcaccaagcaggctcttgaggtccctgattccatgacttgattcttggatggcatttctgggccctgggccagaagggaaccctgaatggagagattcaggactggtagcattcacaacaagctgactgagagcccttggaccttaaggaaatatgggtagtagtctgacagggttcctcatgggcatgaggtggcaatggtcatggagttaggctcctctgcctttggaaaagggaggaaagagtgggaaagactgcatcttctggttcgagtgccagctcagccacagtaaaatagaaaaccaggtgaacttctaaggtttttgactctagtccttggtgcccagatggcacctttggacmcacctggggcctggggaaactttctgccctgaagggaaggttataggc

SEQ ID NO: 951087 - DNA, 576 bp, Homo sapiens
tatccatggctgagagacctgaagacagatcacatcacaggtctctttgcagacactacccattaccagcctggagcccagtagctctgctgggtggctagatccagaagagaaataacaatcactgcagttcagatctcaggaagccctatccctaggagaaagggtagagcaccacatcaagggagtaccccatgtaacaaaagaatctgaacagcagtccttgagtcccagaccttccttctgacacagtctaccaaatgagaaggaaccagaaaaacaagtttggtaatatgacaaaacaaggttctgaaacacccctagaagatcacactagcttacaagcaatggatccaaaccaagacaaaatctctgaattcccagaaaaataatttggaaggtcaactattaagccaatcaagggggcaccagagaaaggtgaagtccaacttaaatraatcaaaacaattatacaaggtatgaataggaaaatctctagtgaaattgatagcataaataaaaaacaatcacaatgtctgggaatacgcaacacacttagagaattgcaaaatgcac

SEQ ID NO: 951088 - DNA, 629 bp, Homo sapiens
cattatttggtaattagcgtatgtaattgctttctgacatcacatcttagcttgcctgtttcatctgcttttctaccgagtgccactaccaaatatttagctagagttctgtagtctttatagagctatgcctatggtctgcatctgccttaactgctaaagacttcattatataacagagatgatttcaagatttcagaataatctctgatttgtgaactcctgataggagttccattttgctactatctggagagattataaatcatagtgattataatgcatggtaatagaagataattagatttgacagttaattagtatactgtgttggtgctacacagccctaaaaatcattttacatggcagcacatcaccatcatgaatgtttttgctggtgtgtatcagcagtgctctagcctaaaacactgatgctccacaaaaaaggtggtgtgcctatgggttagggtcattcacaaaaaactccatgcgagtgatgccttttttttttttttttttttttgagacagaatctcactctgtygcccaggctggagtgcactggtgtgatttcggctcactgcaacctctgcagcctgggttcaagtgattctcctgcctcagcctcc

SEQ ID NO: 951089 - DNA, 559 bp, Homo sapiens
agctcttggttttaaaaattttctttgttttctcctaaagtttttatagtttttcaatttacaattctattcrtgatccattttcaggtaatttttgtgtaaagagtgtggtttaggttgaggttcatttttccccgatgctgtttattggtcaagcatcactggctggaaagaccctcctccctccagtagctgcttttgcaacttagtaaaaactcaaatgagcatatctgcatggttccatttctgtttcattgatctgtcttttgtccagtatcaccctttcttgattactacagacgaagatgctcctcagttgttgatgcggttttctcccaataactctaatataaattaaaaatatcgtaagttgacacctaacctatcaaacatcagagcttagcctcgcctaccttaaacatactctgaagacttatgtttgggcaatattatctaacacaaagcctatttcataataaagtattgaatatgttatgcaatttattgaaaaccgtactgaaaggaaaagcaagatggttgcatgggttctcaccatcaa

SEQ ID NO: 951090 - DNA, 590 bp, Homo sapiens
atctcaattgatgcagacaaaatccaacatctattcctagtaaaatctctcagctatcaacctgataatrggaatctattaaaaacctataattaatatcatacttaatgctgaaatattctatattttcccctaaaattagtaacaggagagactgtatggttcttatctctaaaattattattgttttgggagttctaaacagctaaattagaaaaaaaaagaagaagaagacaatcagattgagtagaaataaataaatgagtaaactgcctattttcacagattacaagcttatttaaatttaaaaaaaataaaaactacaaaacacacacacataataatgaatgcaagtttgcaggatacacattcattatacaaaagtcaaatgtacctagcacccagatcttggtttctaatgtcattctccacaaaagaaatcagggcttactgcagaaatggttgactctaagactggggcaagaaatagaaaaggtaagcctgaaacatcttatagtcccagaaatttaaaacgcgctgaaaaaaaaaaaggaaaaaccaacccatttttaaaaccatgtggataatgg

SEQ ID NO: 951091 - DNA, 641 bp, Homo sapiens
ctgagatgctgaaatggccatctatatggcctggtgtccagcatccccacctgcaccaaaagtgacctgctcaatacttaactatggtgacgctgaccacgttattaaacattattcaatggcttctcattagtttgaggataaagctaaacatttttcatgttgtctgtgaagcaagtaaaggctgacatgaaccctcatgtagattccaccgcaatgaatcctgcacaccccagatgacaacttcagcaccaaggccacatgaaaatatttggggcatagaacatttatcttaattggctatgttaaagggataaaggaagtcttggatctttgggcttctggcccttccaatcaatagcacataaaatacgtaaagcattgcttttggttgacagtaagaacaataaatcctcaataaatcacattaatgagaagtcctcaattatagaaatcaataagactctcagaggtaatgcaaacataactcaggaacctggaataaactgggacatgaccatgtatttctatgcatacagaagttataaatatgcatgtgaacactgggtgggggttatccaaagatggtaggaaactcctrtgaatttcaaatcccctaaaaataattttgctgtgaagtc

SEQ ID NO: 951092 - DNA, 566 bp, Homo sapiens
aagtgaaggtgatgtatgcaggcatggatgtgagggcaggtaacggggctttatttctcagcaaatttggaaacaagwtcattaactaaaagtgagtatggggaagagatgctgcacatttcaaaaaacagaaaagttacagaatagacatccgggagagtatgaaagagaagggaataaagacacgaattaccttaaagattaaagaggatttaaaatgagatcatgtagcatggttgtgtgtttttctccattcatgtcactgctcagcttcaagacttgattagtaaaaagtccaatttagagttatggctttgtcaagttgggtgagaaaattaaagaagagtggtgtagttgaggatgtatatacgggagtcattaaaacaccttaccatggaatgtatgcttgattttgatggaagagaaaaatataaggttgttgagggaaagtgaaaatattgtgagatcaatacatgcacttcccagtggcatgagggcttatcacagtagggctgcccgagacagtgaactacaagcaagaagtcaggaagttgagctgccagagt

SEQ ID NO: 951093 - DNA, 590 bp, Homo sapiens
tagatactacacaggatgaaaattcccagggcacatagtcatcagattcaccaagttcatcacaaaagaaaaagttcttaaaggaagctagagagaagggtcaaatcatgtacaaagtcatgtacaraaacccatgaggctagtagtagacatttcaccaaaaactttataagccagaagagactgacacctatttttagcattagttttttgttttttgtttttctgagatggagtttagctctgtcgcccaggctagagtgcagtggtgcgatcttggctcactgcaacctctgcttctcaggttcaagtgattcttctgcctcagcctcctgagcagctgggattacaggcacgtgccaccacacctagctaatttttgtattttgagtagagacagggtttcacacattggccaggctggtcttgaactcctgacctcaggtgatcagcctgcctcatcctcctaaagttgggattacaggcatgagccactgcacccagcctatttccagcattcttaaagaaaagaaaatacaaccaagaattttatttcccaccaaactaacttcataggtgcagaagaaata

SEQ ID NO: 951094 - DNA, 575 bp, Homo sapiens
aatgtgtaattcactaataactgtagaatgaagcctaaaagagaaacctattaaaaataagagtagctacagtaacctgttaagaggtaggcaatatgcaaatatgtaaattgcgaaacaaaaaatcaaaattgtatgggggagctgaagtgtaaagggtttttttttctttctttttgttcttctctttgttcctattcttttctttgtgatctaggtcatcatttctctaaaataacttgtttaagttgtttttataagttcattgtaccaacaatgcacaaattataatagactcactaacaaaaagcaataagttaaaaaaaattttaccagaaaaaaacttaaccacaaagaaaaacagtaagaaagggagaaaggaagaacagagctgcaaaacaaccagaaaacaagcaacagaatggcaataacatgccatttatcaataacactgaatattgatggactcagttattcagttaaaacacatagagtggctaaatgaatataggaacaagaacccacttaaccyataaatgcgtacatatactgaaggtaagagtgttaaaaccgat

SEQ ID NO: 951095 - DNA, 586 bp, Homo sapiens
aagttttaaaatataaagcttttttatttcatacaattttcatggtccatctcctctatttgccatgtgggtttttttwaatttgctatttaatgttgttctaagtaaagaaaatttaacattttacagtattagcattccaaaacccatatcttgggcctacttctaagtctgagattcccaggaatatctcaaggagctcatgcagagtcctctgcactcctctgtggcacctgcatcttcctctctcgcacttcccaccttttgacaagcccactgtcccaatcctggctgccctcctggcttcctagagggagcaggccccctgtcctcccaaacctgcaggcctttcagatgccaaaattaggctgagtgcccaggaatctcagcactgaagctacgtttgtatggaatggccccttcctattactgtctcatatttcattattaaaatcatggcaataatagcatgactgagcatttcttatactggaaacatagccacgtaaccatgcacagccagactgcttccagtcccgtgtctctcggcgtcctcagcgacaggagtttctcctgctctgtctgc

SEQ ID NO: 951096 - DNA, 586 bp, Homo sapiens
aagttttaaaatataaagcttttttatttcatacaattttcatggtccatctcctctatttgccatgtgggtttttttaaatttgctatttaatgttgttctargtaaagaaaatttaacattttacagtattagcattccaaaacccatatcttgggcctacttctaagtctgagattcccaggaatatctcaaggagctcatgcagagtcctctgcactcctctgtggcacctgcatcttcctctctcgcacttcccaccttttgacaagcccactgtcccaatcctggctgccctcctggcttcctagagggagcaggccccctgtcctcccaaacctgcaggcctttcagatgccaaaattaggctgagtgcccaggaatctcagcactgaagctacgtttgtatggaatggccccttcctattactgtctcatatttcattattaaaatcatggcaataatagcatgactgagcatttcttatactggaaacatagccacgtaaccatgcacagccagactgcttccagtcccgtgtctctcggcgtcctcagcgacaggagtttctcctgctctgtctgc

SEQ ID NO: 951097 - DNA, 591 bp, Homo sapiens
gggtaggaattcagcacagcagagctatattataggaatgttagctaaattctcgaaaytgggccaagatccattatcatcaacctgctctccagctgtagagctgagaaaattcaatcattacccaagtgtccaatcaacagaaccaaataaaatctacacaccctgtctgtgggtgaatccgagactagctcattctcttctcgttcaaacatgagtaatcaggaaaaaaaaaaaaaaaagaaagctggcattgggagcacaaatacaattatgcagaagacaagatgaaaaacattcctctgaaaatgatctcctacaggggaaccagaacacattttagaaaactgtgtaatatcctcagaagcatggaagaaacttctgtgaaagaggtacaaatagtcacaaagaaagaaaagaatcggttgcaaagacatgaagtaagatgaagagcaacaagagataggtgagcttaataagaatataaataaatattaactaaaatataatacacttattaaataatataaattacacattcagatgaagaaagagtggcattagcctttcagaaaagtatattagtattct

SEQ ID NO: 951098 - DNA, 810 bp, Homo sapiens
ttcctacttaatttataggagtggaaaacttctaggttgaatggacaaaagactaatttgaggctgggcgtggtggctcaagcctctaatcctagcactttgggaggctgaggccggtggatcgcctgaggtcaggggttcaagaccagcttggacaacatggtgaaaccccgtctctactaaaaatacaaaaaattagctgggtgtggggatgggcacctgtaatcctagctacttgggaggctgaggcaggagaatcgcttgaacctagaaggtggaggttatggtgagccaagatcacgccactgcactccagcctggatgacagagtgagactttgtctcaaaaaaaaaaaaaaaaaaaaagactaatttgaattataaaagcagagaatcacagccccttaaccgatttccagacttaagccagtatacagactcaggaccccttgaatgaaggtgaagccaggtcgccatgaggaaggaccccccactataccaacaatttatgcagttaatctttctcccatccttccccaaggagacctctggccttttaccagggcaactgtgcactggggagagggaaattattagacatttcggggactactggacactggctctgagctgatgttgattccaggggacccaaaaacatcatcgtggtcctccagttaaagtagacacttatggaggtcaggtaattaatggagttttagctcacrtctgacttacagtgggtccactgggtccccagactcatcctgtggtcatttccgcagtgccagaatgcatagttggcatagat

SEQ ID NO: 951099 - DNA, 513 bp, Homo sapiens
tggttatctcaaggctaaactgggactggtgaatctgctttcaagctcagttacctgatgattagcaggcttgaattcccrtctggctattgggcaagggctttagttcctcaccatgtgggcctctccatagaactgcacacaatctggcagctagcttcctccagagtaattgatctgagagaacaagaaagcatgaatgagagtgacccacacagaaggtgcagtcttttataacctaatctcagaagtgacataccatcatttccactatttgctagtgatcagagtgcaaccatgctacagtgtgggagagaaccacccaaggatgtgaataccagtagacagaaatcataaaggatcatcttggagactggctgccacaatgcataataagcccaactgagactagcagaagaaccaaatggctaagcccagccctggttgccaacccacagctttataaatggtgttgtcataaatttcagggtagccagttaaggagaaatagat

SEQ ID NO: 951100 - DNA, 622 bp, Homo sapiens
atcaatcccattttatagatgaggagactgacagctggggaaatcaagtaacttgaaatactgcgattcaaatccaggcagcttgattctagaatttctgatctaaacctccacagcatatactgacattgtcatataggactatgtaacaggacatgttctagttaactttaccccatttacacagataccatgtatacaccaaccccaaacacttaagacacataaattcattgggcactaaacaaatactatattttaagataatgattaaaatactatattttaatactaatggaacattaaaaatctggagtatatacacacatatatttttgagacagagtcttgctctgtcgcccaggctggagtgcagaggcatggtctcggctcactgcaacctctgcctcccaggctccaggatcctcccgcctcaaccccctgagtagctgggactacaggcactcaccaccatgcctggctaatttttgtattttttgtagggaggcagttttgccatgttgcctaggctggtctcaaactcctggayttaagcaattctccttcttcggcctcccagagtgctaggattacaggcatgagccgctgcacccagcctaga

SEQ ID NO: 951101 - DNA, 596 bp, Homo sapiens
tttgagatgtgcaaatcaaaaccataatgagatgccatctcacaccagtcagaatggctattagtaaaaagtcaaaaaataacagatgctggtgaggtcatgaataaaaaagratgcttatacactgttggtggaagtataaattagttcagccatcatggaagacagtgtggcgattcctcaaagacctaaagacagaactacctttcaacccagcaatcccattatttggtatatacccaaaggaatataaattgatctattatgaagaagacacatgcatgtgtgtgttcattgcagcactattcacagtagtaaagacatggaatcaacctaaattgatagactggaaaaagaaaatattctatatatataccatggaatactatacagccataaaaaagaaagatcatgacttttgcagggggggacatgaatggagctggaggctgttatcctcggcaaactaacacaggaccaaaaaaccaaatactgcatgttctcacttataagtgggagctaaatgatgagaacacatgggcacatagaggggaacaacacacacagaggcctattggagaatggaaggtgggaag

SEQ ID NO: 951102 - DNA, 700 bp, Homo sapiens
agattaggctctgtaaaatagtttcttctgagggagggctttgttgagaacagactactctgggccagtgcagtggctcagacctgtaatcccagccctytgggaggccgaggtgggcggtcacctatggtcaggagtttgagaccagcctggccaatatggcgaaaccccatctctactaaaaatacaaaaattagctgggtgtggtgtggtggcgcacacctgtaatcccagctactcgggaggctgaggcgggagaatcacttgaacccaggaggcggaggttgcattgagccgagattgcgccactgtactccagcctgggtgacagaattagactccatcttgaaggggaaaaaacaaaacaaaacaaaaaaaacagactactctggcttatttagaaatggttacttttaccctcctactcctggaaggactggggggtttttctccaatattcactgtgagaactttgaagaactcctggaactaaaactcacagaagtgtgaggacatcctctccatgcctgcaatgacagggttccctggagtttttgactctcagacttgcccacactgagccgccagcaattcgtcaattacagctcaggttctcccaccccagcactggttccagcacaggtttctcctctggttcccatggaggtttctgtttgtgggtttctgttccagtaagttg

SEQ ID NO: 951103 - DNA, 571 bp, Homo sapiens
gaaatgggttcctttaatcactctatgtctacctcaattcagatcagctagacctccatgaagggaaacagaaccaacattcctttaacccaaaggaragagagaggtggcagggtcttggaaaagagacggatccaacaattccacattttaactcaccctttgtcatatcctggatgagcccccgtattatgggatagttccctggaccttgaccccctttgtgggtgggaactggagtagatcctttcactcagcgcactgctggccactccttgcaagagggaacgaatgctggaaccagccagatgctcctctctggtgggagcaggctctgtgcaggccccgtagcagtgtcctagcccctgccctttcagcatgtgggttcttgtccagcgtcttagaaaattgaggttgcacaaaccgatagtgggtagtgtatgtggaggattttattgggtgatggctggcagcggatgggagttggaaaggggatgatgcgggaagaaggtgatctttccctgaagctgcaccatctgaagttagctgcatctgtctgtagtctctgatg

SEQ ID NO: 951104 - DNA, 727 bp, Homo sapiens
cttggaaaaattgcaagaaaagttgcaaaaatagcatagatttcctctgtgcccttcacccagcttcctccgtatgcaacgtagaacaaggactgaaaccaggaactttgtaggttgatactaagcgttggtacttagtgtcttagttttagtctattttgtgttgctataatggaatacctgagactgggtaatttataaagaaaagaagcttatttagctcatggttctgcaggctgggaagttcaagagcatggccctggcttctggtgaggcctttttgtgctgtgtcataacgtggtggagagggtcaaagggaaagcccatgtgtgcaaagaagggaaacccagggagtgtcctgcttttataacaacccaggctcgggaactaatcaagcctctccagagcaagaattcccttgctaccttgagaacagtatcaagccactcacgagggatcggcctccatgattcagatacctcaccccaggccccaccttccaacactgccacactggggaccaaatgtcaagatgagttttggtgggaacaaaccagtcacattctaaccgtagcactccagactgcactgaattttgtcagtcttccgactcatgtcsgttgtctggttcaggctccccctcaggatcccacgtggcatttagttgttgtgtctctcccgtttcctcccatctgaggtttcatgacctggatgtttttgaagagga

SEQ ID NO: 951105 - DNA, 652 bp, Homo sapiens
tttgcaaacccagtgcccaggctctgaaacccagatcaattattacagaatctcttggggatgaaacatgggcatcagtattttgtgtgtgtttgtgttttttgttttktttttttttttttttttttgagatggaatcttgttctgtcacccaggctggaatgctgtggtgcaatctcagctcactgcaacctctgcctcccgggttcaacccattttcctacctcagccttccgagtagctgggattataggcatgcaccgccacgcctggctaatttttgtatttttaatagaaatagggtttcaccatattgggcaggcaggtctcaaacacccagcctcacgtgatcctcccgccttggcctcctaaagtgctgggattacaggcatgagccattgctcctagcagtatttttttaatgaggcaaaattcacataacatacaaatccctgtatgaaaccatacacttcagtatcattaaatacattcataatgttaagcaatcatcatctctgtctagttccaaaacattttcattaacgccccccgccccccccaaaaaaaccctgtatccatcaagaaccccacatcccctcccctttcccccagctcctggcaaccacttacctgctttctgtctctatagatt

SEQ ID NO: 951106 - DNA, 600 bp, Homo sapiens
cgtaggaaagacagaagtagatgagatagaaacagtaaatcggattaaggtattgagttccaggctcarggcttggactttgtatcctggatgacaggaaggcattgggcgggggcccccttagaccctggataagagctggctgttgctcttcctctgcctgcaacattctccctttagatctactgtccatcattcaaggagggttactgacagaacaacatcttggaggaagtaggatgtgtgtgtctgtgtgtgcaaaagctcacgtggaagggaaaggttccaagctcaaagcaaaggaaaaagaaatggggggagatgtgaaggcattttgagatggggaggagggacatttgagggcaacagggacaagagaaaggagagagggtaaggaatatttgtgcttatctaccgggagtaatgaggaaaaggggagatagcttagtgagggactgtttagcttcaagggatagaaacccactcaaactggctcaagttaaagggtgcaagttggaaggctacaggggtttgtagcagatgttgttgcctcacttaaatcttcttagtcctcacctctctacccagagactgatcacg

SEQ ID NO: 951107 - DNA, 613 bp, Homo sapiens
actacaccagatgtggataccaggaggtgaagattgttggaggctggatacaatagatgggtagaggcacagaaaccaggaggataggtggcccctaggctcctcctccgaatgcttactggttcagagaagggcagccttcctgtgatctctaccccatctctctcttctccatgccctgatgggctgtagactctctgaggacagggactgtgtgactgtgtctgtcttattaactactgttcccctagggctggtccatgcctggtatatagtaaagccctcaatacatgttggttgattcgtgaggtgcgtaggaaagacagaagtagatgagatagaaacagtaaatcggattaaggtattgagttccaggctcaaggcttggactttgtatcctggatgacaggaaggcattgggcgggggcccccttagaccctggataagagctggctgttgctcttcctctgcctgcaacattctccctttagatctactgtccatcattcaaggagggttactgacagaacaacatyttggaggaagtaggatgtgtgtgtctgtgtgtgcaaaagctcacgtggaagggaaaggttccaagctcaaagcaaa

SEQ ID NO: 951108 - DNA, 419 bp, Homo sapiens
tctggaagagtctcatagagcagcactttctgaaacttgcctgggtaccagtatkcctgcttccagaccttgaagatattacatgtactgcttggtgatctgccctgtcccccacatgttgtgggcctggattgaatggactgaacagtgtggggaattagtccagcgtgacttgccttgtctcatgctgtttgctcacttgtgagagcactatactgaattatccattattgaaagttccaagtgtgcaaagaaccacacttcaaaaataaaatgtcaacattgccctttctctgttagagccttaaatgttcattattttctttagtttttttttataactatcaaacttatttttctccatgtggaagtatgccacaactccatttctaatggagcttgaaattagcatgtatttc

SEQ ID NO: 951109 - DNA, 419 bp, Homo sapiens
tctggaagagtctcatagagcagcactttctgaaacttgcctgggtaccagtatgcctgcttccagaccttgaagatattacatgtactgcttggtgatctgccctgtcccccacatgttgtgggcctggattgaatggactgaacagtgtggggaattagtccagcgtgacttgccttgtctcatgctgtttgctcacttgtgagagcactatactgaattatccattattgaaagttccaagtgtgcaaagaaccacacttcaaaaataaaatgtcaacattgccctttctctgttagagccttaaatgttcattattttctttagtttttttttataactatcaaacttatktttctccatgtggaagtatgccacaactccatttctaatggagcttgaaattagcatgtatttc

SEQ ID NO: 951110 - DNA, 602 bp, Homo sapiens
aataacagaccagaggaaagaggattaattctgtctaattccatttcaccaggatgtagaagtttgaaaagttgtctatgaggaagagaggaggaggtagcgaggcatcccttgctggggagggcagggtcacagtgggagcagagtgcagggcaggtccctggggagcacagagctgggaagggcaaggaagaagtgttaagtgcagagtctggaaagggaaactgagcccaagcgggacttgacttttatagaaagtatggatccatatgttgttacacagagaaatacttgctctttattttagaaagaaaatctgtaaatgtgcatcatatcactctgtctttttctctgtttatttttagccctgtgtgtccaaatgctgggagaacatcaccccttggatgaattgccaccacattaaataaaacatatccaaagctcatattgtttcctttccagtactttctctctgtctttccatatagacatatatatattaaaaatatatatgtatgaatttatatatatatatatatatatwtatttatttatttattttgagacagggtctcactctgttgctcaggctggagggcagt

SEQ ID NO: 951111 - DNA, 579 bp, Homo sapiens
aaagtcattgccatgtctctttgaagcccttatggatttaacaaattccctgttaggtgaatccttcrgaaggaatctttctaaagtcacctacaggtggcgaagtgaatgcatctctcccatagaagacattgcatctctgacactcagttatttaggactactagggggagttttataattttttctcttacatttaggtggatgatccattttgagttaattattgaatatgatgtgaggcaatgatccaacttcattctgttgcacgtggataatcagtagtcccagcattatttgttaaaaagaattttctttccccattgaattgtcttggaaactttgtcacaaatcaattgatataaatgtgagagggtttatttctggactctcaattttatccattactctatgtgtctgttcttatgtcgataccatgctgtctagatttctattgtttaatacttttatattgggaaatatgagtccttcaactttgttttatttttcaggattgtttgcttattcaaagtcctttgcatttctatatgaatttcaagatcactttgtcaattcaaa

SEQ ID NO: 951112 - DNA, 755 bp, Homo sapiens
tttctgctgggataatcccatctmtattcccggcatctattagatgactattatatccatggttcacaccaatactgaaatccttgtcaaggttgttacatcccacccttaaagacctcttctgagctagctgtcttcctcattttttatagtatgaccgggctgagaatttttcaaatctttaagttctggttcctttttgcttaacaattctatcttcagttcttttctgtcttcccacattcagaaagaatcaagccactccttctacgctttgcttagaaatcacctcagctaaatattgaatttcattgcactcaagttctacctcccacaaaacattagaagatgaacacaatttagttgagctctgtgtcactgtatattaagggtggcctttccttcagtttcctcatttctgtctgagacctcatcagaatggcctttggcatctacatttctctcaacattgtgttgatgattccttatgcattctccagaaacacagaagctttctctataactttttttttttctctctctgagtccttagcagagccacatctaaaaaccccttcacagcaatctgggccttttcttgcatatactttccaactgttccagcctctctatccattacccagttctaaagcagcttccacatttttaagtatttcttttacaatagcaccccaattcctggtaccaatttctgtattagtcaacttggactgctataacaaaaacatcataca

SEQ ID NO: 951113 - DNA, 607 bp, Homo sapiens
tggaaattgcattgaatttgtagattgctttcggcagtatggtcattttcacaatattgattctacccatccatgagcatgggatatgtttatgttttcatttgtttgtgtcatctatgatttatttcagcagtgttttgtagtttttcttgcagaggtcttttacctcctcagttaccaaacccaaacctagaagaaaggaaataaccaagatcagagtagaattaaatacaattgagaaaaaaaatacaaaagataaatgaaacaaaaagcaagctgtctctttgaaaagataaataaaattgataggccattagcaagattaaccaagaaaagaagagagaaaatcccaataagttcaattggaaatgaaacaggagatattacaactgacaccacagaaatacaaaaggtcattcaaggctactatgaacatctttacatgcataaactagaaaacctagaggagatggataaatacctggaaagatacaaccctcctatctgaaatcaggaagaattagatacactaaacagaccgatrataagcagcaagatagaaatggtaattaaaaagttaccaacaaaaaaaaatccaggaccagac

SEQ ID NO: 951114 - DNA, 485 bp, Homo sapiens
tggagggttcaccattcactacaactgtcggtaagaatcctaattactgcaggaataatccaagtaaaaattcaattttcccaaagacaacttgaaaacaaaaaataatccatttacaagtctgaatgtgatcgaatgtgttgggaacatgtcagcattcccttgctttctgtggtttctgctgtctctggctatcttgtagtttcaaagacaagctggagatttcccacagtaagaaaacaacctgacctgtatgtttctagactgctcgacaagtgagaaaagttaatagcctcacgggcagggctccatagaatggttctgagaaatgttgcagataaagtaactcctatttgagtgcacgtcctttctaaaaattgggaggrcatgcactgaaccagacataaccctgcgtttgtcagcggcagacagcagtgggatctcgacttattatagactgaagacactggagcatctccaagaca

SEQ ID NO: 951115 - DNA, 724 bp, Homo sapiens
gcattttctcataattcaatgttgattcaacagcttcataatggccatctacactgtgtctgtccctgtgctagggatccatggtgtgatgcggaacagggcagggcagggcaggmtctgctttcatggcagtgatggatagtagaaaggatggacaaaatcaatcaaagttgctctgcagtttagctttgtgggatgaaaacagaagaggagctgagacaaattacaagagaaatcacctcctttagatcaggtattccatgagaacctctcagaagaggtgccattgaaaatgaggcattaaaaaaaagcagtgatgggtaatgcagagaatagaggaaggaacattcaggacatgggaaccccaaggacattgtattaacccgaggagaacctggggaagaacctgggctgacgagcacagatgttagcctccatcccacctacctcaggtccccacctcagtgtgggcagtaacaagactggtcaggccaggtctggccatgagacaccaggctgcagagggaagataagcagaaggcctatggcaagcactagagttctaaacagaccagagagcaagtcctagaagcacaagttatgatcagataaaatctttgtaggtcagggagtggggagctgccaaaatccaagaagtcagagagtcaacaaaagcagcactctggaacaggctgtgcaaacttggttgtaggtgacccagacc

SEQ ID NO: 951116 - DNA, 569 bp, Homo sapiens
gcaaagacataaaaagatcttccaagaaacaacaaaaaacaaaaacaaaaacaactaaatgaaccactttaagccgtgattcagttgatctaaatctattagrtcagaataaaaccagaaacttcaaaatgttttccaaactaatgtagcacaattgtttcattaggatcagtccctgggagagaaatgagatggagaaaggagcaaagtcaaatgattcatttgttatgaataacaaactgctagtcccgtttcagtgtctccacttttcacattcctaagtgttgttctcagcctccacattttggcttttccattcagcatctgccatagccattctcactagggctatttttaccctttgctcaccttggatgacaatggctcagaggtgacagcagaaaatttgtgatcagaggagatgggacttgaaggccaaagcagttttcataaaccacttactggggatgaagatgtcaggccaggcttgttaagcaaaaccagaggtttctgatcagaagcaagaggattaaccaaatctaacacccacacagacaacaaagatcaga

SEQ ID NO: 951117 - DNA, 627 bp, Homo sapiens
gtggctcacgcctgtaatttcagcattttggkagaccgaggcagacagatcacaaggtcaggagttcgagaccaacctgaccaacatggtgaaaccctgtctctactaaaaatacaaaaattggctgggcgtggtggcaggcacctgtaatcctagctactcaggaggctgtggcaggagaatcacttgaacccaggaggtggaggttacatgagccgagatcggggtccttgcactccagcctgggtgacagagtgagacttcgtctcaaaaaaaaaaaaaaaaaaaaaagagagaaaaaagaaaacattggagaaaatctgcaggacatttgtctgggcaaaatttcttgagtgacactccgcaagtacaggcaaccaaacaaaaaatggacaaataggatcacatcaggttgaaaagcctctgcacagcaaaggaaacaatcaacaaagtgaagagcaacccacagaatgggagaaaatgtttgcaaactacccatctgacaagggattaataaccagaatatagaaggagctcaaataactccacaggaaactctagtaatccaattaaaaaatgggctaaatatttcaatagacatttctcagaagaagatgtacaaatggc

SEQ ID NO: 951118 - DNA, 589 bp, Homo sapiens
tctttttttttttttgtatatatatttattgtactttacgttctagggtacatgtgcayaacatgcaggtttgttacatatgtatacatgtgccgtgttggtgtgctgcacccattaactggtcatttacattaggtatatctcctaatgtcaagcgattctcttgcctcagactcctgaatagctgggattacaggcacctaccaccacacctggctaatttttgtaattttagtagagacggggtttcaccatgttggccaggctggtctagaactcctgacctcagatgatcggcctgcctcagcctcccaagttgttgagccaccgcgcccggcctattttggagatttttttcatatcaatacttaaaaagcttcttcattttgtttttacaactgcctacattttcacggcatgaacacatcatcatttaaccagttttctattgatggccacttaggttgtttctaatctttaattattacaagcaacactgcagtgaataaccttatacatgagaggtcagcaaactgtttctgtaaagggctaggtagcaaatattttaggcattgcaggccatttggtc

SEQ ID NO: 951119 - DNA, 589 bp, Homo sapiens
tctttttttttttttgtatatatatttattgtactttacgttctagggtacatgtgcacaacatgcaggtttgttacatatgtatacatgtgccgtgttggtgtgctgcacccattaactggtcatttacattaggtatatctcctaatgtcaagcgattctcttgcctcagactcctgaatagctgggattacaggcacctaccaccacacctggctaatttttgtaattttagtagagacggggtttcaccatgttggccaggctggtctagaactcctgacctcagatgatcggcctgcctcagcctcccaagttgttgagccaccgcgcccggcctattttggagatttttttcatatcaatacttaaaaagcttcttcattttgtttttacaactgcctacattttcacggcatgaacacatcatcatttaaccagttttctattgatggccacttaggttgtttctaatctttaattattacaagcaacactgcagtgaataaccttatacatgagrggtcagcaaactgtttctgtaaagggctaggtagcaaatattttaggcattgcaggccatttggtc

SEQ ID NO: 951120 - DNA, 614 bp, Homo sapiens
ttccattgcacgagcttccatgtcaccagggtagcaactgacttaggcctacatggactgcatctcgatttagtggggcctgaggcttatgcaaactgargggtccatattaagaaagagaattagaaaattatgaacacaaagccaggtattaaactgaatatttacttagaaacaaaaaataaaatataacaaattacaactttttttaaactgacaacacaaaatccaggttaaaaaaaaagtagcaaaatgttttaattaacttcctgaaagacttccatatcaaatatacagatgatatggacagataatacatatagatgatatagatatataggtgtgtttttggccacaaactttttgaccctctctttattcaacaacttggtaatattttccagagtgaatacaaaaataatttagtccttccttcagcagagttgactggaacttgacttttataatggagagatggaatgcaaaaaacacacagcttcacagagagatgcatggctctttgcagtacagtttacagatttgtaccctacaaacacaggaattctgataaagcctactatacagaattcctaccataaaggaagaaaggtatg

SEQ ID NO: 951121 - DNA, 604 bp, Homo sapiens
tgtctctctaaaacagtaattrgtcatagctggcaacagggaaaggcagtctcccaatagacagaaaaaatcctgaaactggtaatcagcagcttcccagtaagatctcagaagttgggtgagtgggctcagcatgcacactaagaggcaaaatggcggagtttaactggtctatgactttctaggaacgttccactggtaagggaataacgcctcaagtgagcatgcgtacaactccagtaaacacactgtacacgctcccctcccaagtactggcaggccgctgcacatgcggacagcctaccccaaggaaagaataaggggagaaggaacacaagaccctggaagcatgacaacatataaaaccccacgtcaggttaaactacacacttgatcttgcaagtcacccctttcaccctcttctaagtgtactttccttcctttcatccctgctctaaagctttttaataaactttcactcctgctctaaaacttgcctcactgtctcattctgacttatacctttctatcaaagtctttcttctgaggaggcaagagttgaggttgctgcaggaacttacacattcaccaccagtcactgtcc

SEQ ID NO: 951122 - DNA, 604 bp, Homo sapiens
tgtctctctaaaacagtaattggtcatagctggcaacagggaaaggcagtctcccaatagacagaaaaaatcctgaaactggtaatcagcagcttcccagtaagatctcagaagytgggtgagtgggctcagcatgcacactaagaggcaaaatggcggagtttaactggtctatgactttctaggaacgttccactggtaagggaataacgcctcaagtgagcatgcgtacaactccagtaaacacactgtacacgctcccctcccaagtactggcaggccgctgcacatgcggacagcctaccccaaggaaagaataaggggagaaggaacacaagaccctggaagcatgacaacatataaaaccccacgtcaggttaaactacacacttgatcttgcaagtcacccctttcaccctcttctaagtgtactttccttcctttcatccctgctctaaagctttttaataaactttcactcctgctctaaaacttgcctcactgtctcattctgacttatacctttctatcaaagtctttcttctgaggaggcaagagttgaggttgctgcaggaacttacacattcaccaccagtcactgtcc

SEQ ID NO: 951123 - DNA, 562 bp, Homo sapiens
tcgtaatgtaacacaggaacagaaagacaaatactgcatgttttcacttataagtagaagctaaaattgagcacatatggatataaatatgaaaacaatagaractacaaactactaaaggtttggggggagtgagttaaataactacctatcaggtactatgttcacatctgtgtgatcggaatcatactccaaatgttagcatcacactataatcccatataacaaacctgcatgggtaccccaagtaactaaaataaaaggcgaagcttaaaaaacagtaggcatataaaaagatactccacatcatatgtcattagggaaatggaatttaagacaacaatggaagaccaccacataccttttagaatggccagaattcaaaatactgacaacaaatcctggtgagaacttggagggagaggaactctcattgctaatatatggaatctacagaaatctcctactttggagaacagtttagtggcttcttacaaaactaaacatatcattatcacacaatccagtagtcatagtccttgatgtttgctcaaagagttga

SEQ ID NO: 951124 - DNA, 558 bp, Homo sapiens
aatgtaacacaggaacagaaagacaaatactgcatgttttcacttataagtagaagctaaaattgagcacatatggatataaatatgaaaacaatagagactacaaactactaaaggtttggggggagtgagttaaataactacctatcaggtactatgttcacatctgtgtgatcggaatcatactccaaatgttagcatcacactataatcccatataacaaacctgcatgggtaccccaagtaactaaaataaaaggcgaagcttaaaaaacagtaggcatataaaaagatactccacatcatatgtcattagggaaatggaatttaagacaacaatggaagaccaccacataccttttagaatggccagaattcaaaatactgacaacaaatcctggtgagaacttggagggagaggaactctcattgctaatatatggaatctacagaaatctcctactttggagaacagtttagtggcttcttacaaaactaaacatatcattakcacacaatccagtagtcatagtccttgatgtttgctcaaagagttga

SEQ ID NO: 951125 - DNA, 648 bp, Homo sapiens
aatcaaatcaagaactaaacccctttgccaaagctgtgaaagaaataaaatactgggaatacacctaaccaaggaggggaaagacctctaccaggaaaactacaaaacactgctaaaagaaatcataggtgacacatggaaacacatcccatgctcatggatgggtagaatcaatattgtgaaaataaaatgaccatactgccaaaagcaatctataaattcagtgcaacacccatcaaaatatcatcatcattcttgacagagctagaaaaaacaatcataaaattcatatggaaccaacaaagagcccacagagccaaagcaagactaagcaaaaagaacaaatctagaggcatcacattactcaacttcaaaccttactacaaggccatagttaccaaaacagcattctactggtataaaaacacacatgtagaccaatggaacagaatagagaacccagaaataaagccaaatatagccaacctataattgacaaagcaaacaaaaacataaagtgggaaaaagacaccctattcaacaaatggtgctgggataattggcaagtgacatgtagtagaatgaaactggattctcwtctctcgccttacacaaaaataaagtcaggatggatcaagtacttaaacc

SEQ ID NO: 951126 - DNA, 535 bp, Homo sapiens
atacagaaaggagctggtaccattccttctgaaactatttcaaacagttgaaaaggagggactcctcccaactcattttatgaagcaagcaacatcctgacaccaaaacctggcagaaacacaacagaaaaagaaaacttcaggccaatatccctgatgaacatccatgcaaaagtcctcaataaaatactggcaaactgaatccagcagcacatcaaaaaacttatcccccatgatcaagtcagcttcatccctgggatacaaggctgttcaacataaacaaatcaataaatgtaacataaacaaatcaataaacgtaatccatcatataagcagaaccaaagacaaaaatcacaagattttcccaatagatgcagaaaaggcctttgataaaattcaacatcccttcatgtttaatactctcaataaactaggtattgatggaacatatttccaaataataagagctatttatgacaaacccacagcaaatatcaaattcartgggcaaaagctgaaagcattctctttgaaa

SEQ ID NO: 951127 - DNA, 621 bp, Homo sapiens
atctcactgggactggttagacagtggttgcagcccatgaagggcaagcagaagtagggtggggtgtcgcctcatccaagaactgcaaggggctggggaactccctcccttaaccaagggaagtagtgagagactgtgccatgagggacagtgctatccaactcagatactacgcttttctcatggtttttgcaacccgcagaccaggagattctctcctgtgtctagaccacccaagccctgggtttcaagcacaaaactggatggctgtttggagagacactgagctagctgcaggagttttttttttgtcacacctcatttgggcctggaaacccagcgagacagaacctttcactcccctggaaagggagctgaaatcagggagccaaatgatctcgttgagtgggtcccattcccatggagcccaacaagctaagaacaactggattgaaattattgctgccagcacagcggtctgaagtcaacttargacaatcgagtttggtggggggaggggcgttcaccattatttaggcttgagaaagtggttttcctgtcacagaattaagggagccgctggaaagttcacactgtgtggaattcactgcagcacagcca

SEQ ID NO: 951128 - DNA, 788 bp, Homo sapiens
acttctccctcaaccataggcaatgcagcttgcagctccaggaaagacactttccttctgcttcaagagaggagaggaaataataaagaggctcttgcttgcaacttggataccagctcagtcaaagtacaataaagcaccaggaaaagtcctgaggccccaattccaggccctagcttccagatgacatttctagacacaccctgggccagaagggaacccagtgtcttgaagggaagaaaccagttacagcaggatccatcacctgctgactaaagagtctttgggccatgaataaacatcaaagatagccagacagtacatgggccttgggtgagactcggtaccatgctggcttcagatgtgatccagcacactctgagctgtggtagccacagggagagacagattcagcttgagcaaaggagtgggaagagcaaaggggactttgtcttgtagcctgggtaccagtgaacccacagtgaagtagagcaccaagtgggctactgttgtccccagttccaggccttagctcctggaaggcattttttgacgaacccaggttgagaaggaagcccattgccatgaagagagagatataggccagaagcatttgccattagctgattatagagcacttgggacttgagtgaacattagtggtagccgggaggaggtcaccatgggccttgggtgagacccagtgccatgatggcttcaggtcttacccagcacagccccagtggtggtggccacagtgytgcttttgtcacccttctcttagctcc

SEQ ID NO: 951129 - DNA, 788 bp, Homo sapiens
acttctccctcaaccataggcaatgcagcttgcagctccaggaaagacactttccttctgcttcaagagaggagaggaaataataaagaggctcttgcttgcaacttggataccagctcagtcaaagtacaataaagcaccaggaaaagtcctgaggccccaattccaggccctagcttccagatgacatttctagacacaccctgggccagaagggaacccagtgtcttgaagggaagaaaccagttacagcaggatccatcacctgctgactaaagagtctttgggccatgaataaacatcaaagatagccagacagtacatgggccttgggtgagactcggtaccatgctggcttcagatgtgatccagcacactctgagctgtggtagccacagggagagacagattcagcttgagcaaaggagtgggaagagcaaaggggactttgtcttgtagcctgggtaccagtgaacccacagtgaagtagagcaccaagtgggctactgttgtccccagttccaggccttagctcctggaaggcattttttgacgaacccaggttgagaaggaagcccattgccatgaagagagagatataggccagaagcatttgccattagctgattatagagcacttgggacttgagtgaacattagtggtagccgggaggaggtcaccatgggccttgggtgagacccagtgccatgatggcttcaggtcttacccagcacagccccagtggtggtggccacagtgctgcttktgtcacccttctcttagctcc

SEQ ID NO: 951130 - DNA, 609 bp, Homo sapiens
aatctggccaaaaatgtgtctagtgaayttctcttacagcaaggtatagatcaaaaaattcttgcacatctgcaagcccttgaggctgctttagaatatgtgggagagtgacaagatacagtagcattccgtcaacaattaaactgtgactgggaacataaacatatgtgtatcacttctctaccatggaatcaatcaatacatagctgagatgacgtgaaacaacacctctggagaacctttcataacaatttaacagcagaggtgaagcaacttaaaattaaaattttagaatcccttcacaccatatatctgcacacccaacaaacagccatatggaagggtgtacaagatcatctctccttgttagacattcgctcctggtggtcactctttgactggaaagtaatgttgctaattgtgcttatggttgttttatgttatttgctaatcctaggatgcaaagctggaataagagcagggaccccccccgccccgccttaactgacaaacccatggctaacaaacctgcgctccccagtaaaaaaaacaaaaaacaaaacaaaaaaaacttaatgttgaaaataaaaaaggggaagatgctggggt

SEQ ID NO: 951131 - DNA, 583 bp, Homo sapiens
aaggggcatgcccagaaggcatcttttcaatgtattactgtaaaccactgatgcttatatggaactttcctgagaatggtgtatgggctggggacaacaggattcatagtttgkactatatgattgatggctctgagatcttgtaccagtaagtatgactggtctgatttcttgactggcaatattggagtgttataaggggacatacagggttcaagaagcctatctttgataagactttcaattatggcctttaaccctattctttcctctaggggaatggggtattgtttcctccttaccacttccctgggggtttttagcttgatgtggattggaaggattcagagtatccctcagtttccttcccttgaacagacattggggttaatatgtttttcatttgcagtagtgagtaggtttaatgaagtaaggaatcatttagggctaacttatagacctataccaaattttaggatttaagtctcttcctaatagattaattcctgtttcaggaatcaacaaaaaatggatatgagttaatcaatcttgtgatttaaccgtactttctatgacttttgct

SEQ ID NO: 951132 - DNA, 649 bp, Homo sapiens
ctgacgtcttcttcccaaagcgctggagaacccactcccacagcggggtgctcagcacggctgagacctgtgagcagacagcatcgtcacgccagggccgtgctgccagcgcctttgcctgggaccccaaggccttggcttttagattggatgcctgaccttggccttgcccctggttcaaaccggtggctatgaatgttgtaatcctggccccaattctaccctctgctggaatgcaggtgaccaagaccaaagcaaagtccaaaatgttgaccaccagaactctggccatatgtgtcacatcaaggaccacacatgtccccagctcagggccccaagtgacctagcctccaccaccccaggccccctcaccaggacagttagtaccaggccctggacgtggtcgtgtagctgggaggcatgtgtacagaacaggaccaggtagctctgctccacctgaggagatggacaggaagtgggtatgtgcagggcatggcaggagctcagaagtcaagggcaaggacagggtctggagtctggcatctccattgggaccttggcttgctgctaccatcatacagtcccttccccyacaaaggacacttatccccaacacagatacaaacaccactcctaggccaccctcatc

SEQ ID NO: 951133 - DNA, 596 bp, Homo sapiens
attcaattacctccacctggtctctcccttgacacctgggaattttggggatcacaattcaagataagatttgggtgggcacacaaagcctaatcacaccaggtygtcaggtgatgaatggagttttggcagaggtttggatcacagtggttatttcctcagttcctaaatataatttgagtagctgtacttggtaactgacagaacccctgtactgactctctgaaccaaggagtgaagactgtcacagtagggagagaaaagtcaacggcatgaaatgactctgctctaagtattgtacacagagagcagtactgtggctctggacaaaccacagagactgtgaccacagtgaagggttaaaaatgcaagagaatggtgattcatctcagaattctatttaattttcctgctttcctttgcagtaaataatgatcttagagattctaactgcacatataattaaagtaaccagagattattccaatattagttgttgtttcagatgtggtatcttaatggagaaaatcagcataggtccttaaccttgcatttaatctggaaaatattcatcttccccctgactaatttacaag

SEQ ID NO: 951134 - DNA, 607 bp, Homo sapiens
ggttatcaagaaattattatcaagaataacaagcggccacgtgtggtggctcacgtctgtaatcccagcctgggtaatatggtgaaaccccatctttacacaaaaacaacaacaacaataayagtaacaacaaacaaaaattatcagggcacagtgattcatgcctgtaattctggcagtttggaaggctgaggcgaaaggatgacttaagcttagaagtgtgagaccagcttggccaacatggtaaaaccctgttggtacaaaaattacaaaaattagccggatgtggtggtatgtgcctgtggtcccagcttcttgggaggctgaagtgggaggattgcttgagcccagaagttcaaggctgcagtgagccatgattgtgccactgtactccagcctaggcaacagagtgagagaccctgtctcaaaaaaaaaaaaaaaaaaaaaaaaggaaaaataagaaataaaaaacattggtcagggtgaggagaaagggaacccttgtacactctgttgggaatgtagatgggtgtagccactgtggaaaacagtatggtggttcctaaacaaatcaaaaatagaacaaccatatgatccagtaatccct

SEQ ID NO: 951135 - DNA, 538 bp, Homo sapiens
gttggggatctcttgactgarcattcctttaacacttcaatcccttgattctccagtcagttgtccgtattcatttcatgctgctgtaatacatttgtttcaaaagcccaggatatgctgtgagtcactcacattggtatatgtgattcttccacaaaagaacaagctctctgagccgtctgcagattgacctctgaagtttagccctagagccttgtcttctaagaaatcccgggatctagtcctacaagaccaacttgacactgcgttgtctaaggtgactggctgtccttcaagatagtaaatcctagcctgttctccattctctgaagaggggggaatgtgaggacatttggccccctcattctgaggttaagaccacagttaaaagtggaagcaaagcaagccttcctctcccatctataccttcattttggagtccttcttcttggccaggtccccagtagctgcaattgttgcaaagtactggatgacccgtttggtgttcacagtctttcctgccccggattctccgctg

SEQ ID NO: 951136 - DNA, 567 bp, Homo sapiens
agggctttctctgttgtaaaagttataatatgtattggaagtatcctcacagctatcaagaatcagctccattaatcagaattgctgctgtgaccttaatgaataatggaacttaggcatatttctaataggcaaatccccttgtaataatttcagatacaaactgctgctgctatagatatttgaggactaaaatcaaggacagtcacaaacccaccacaacattaagtctagtatagttatcttaaaaaaattcaaactttataagaagattggatgtataaacatttaagttacaaacaaagtatgcttttgaacagctggttccatttcctgccattgcctccatgtaaaatcactataataaaaatgcttctctacttatgttggggctatgttccgataaacccattgtaagttgaaaatattataaatcaaaatgcatttattawacctaatcttctgagcatcgtatcttagtctggcccaccttaaacatgctcagaacacttacattagcctacagttggggagaattatctaacacaaagcctattttatagtgaa

SEQ ID NO: 951137 - DNA, 590 bp, Homo sapiens
tggagtgtcccagggctcagttcctccctgatttcatcaagtcttatggctttaaactccatcacatgtagacagctcccaaatgtacatctccaggccatccccagcctctctcctaactccacatttgcatctccgacagcctacttgacaactctacttgaatttgtaatgggcatctcgcacttaacatgtccaaaatcactccagaataccattccccagcccaaactgcaatctttcccatcttagtaaatagaaagtccttttttgtttttccaattgctcaggccaaaagcacttggactgggccaggagcagtggttcacacctgtaatcccagcactttgggaagccgaagtgggtgaataacttgaggtcaagaccagcctggccaacatggcaaaaccctgtctctactaaaaaatacaaaaattagccaggcgtggtggcacgtgcctgtaatctcaactacttgggaggctgaggcaggagaatcgcttgaacccgggaggcaggggttgcagtgagccaagatcaygccactgcactccagcctgggtgacagagtaagactccgtcttccccca

SEQ ID NO: 951138 - DNA, 590 bp, Homo sapiens
tggagtgtcccagggctcagttcctccctgatttcatcaagtcttatggctttaaactccatcacatgtagacagctcccaaatgtacatctccaggccatccccagcctctctcctaactccacatttgcatctccgacagcctacttgacaactctacttgaatttgtaatgggcatctcgcacttaacatgtccaaaatcactccagaataccattccccagcccaaactgcaatctttcccatcttagtaaatagaaagtccttttttgtttttccaattgctcaggccaaaagcacttggactgggccaggagcagtggttcacacctgtaatcccagcactttgggaagccgaagtgggtgaataacttgaggtcaagaccagcctggccaacatggcaaaaccctgtctctactaaaaaatacaaaaattagccaggcgtggtggcacgtgcctgtaatctcaactrcttgggaggctgaggcaggagaatcgcttgaacccgggaggcaggggttgcagtgagccaagatcatgccactgcactccagcctgggtgacagagtaagactccgtcttccccca

SEQ ID NO: 951139 - DNA, 579 bp, Homo sapiens
ctctcaagtttattcatgaacgtaattttaccaacatgttttataccataattttgtttttgmacattaaccatttttactttcagaaggaagaattccccttagcatttcttgtaagatgaatcaggtagtggtgaattctctcaggttttctttgcctggaaaacattttatatcatcttcataataagtttgctagatacactattcttgaatgacagctttgtttgtttttaacttttatttcacgtttgagaatacatgtgaaactcttgtcatcagagtttgttgtacagattatttcatcactcaggtatgaagcctagtacccaatagttattttttctgcccctttccctcctcccaccctccacactccaataggccccagagtctgttgttatcttctttgtgttcatgagttctcataatttagctcccacatataagtgagaacaagcaatattttgttttctgttcctgtgttagtttactaaggatagtagcttccagctccatccatcttcccacaaaagacatgatctcattgtttttatggctgcatagtatcccatggta

SEQ ID NO: 951140 - DNA, 555 bp, Homo sapiens; identical to SEQ ID NO: 945857

SEQ ID NO: 951141 - DNA, 891 bp, Homo sapiens
agtctcagctccttaggaggctgaagcaggagattcccctgaacccaggaggtggaggttgcagtaagcagagatcatgccactgcactccagcctgggtgacagagcaagactcagtctcaaaaaaattgtgcatatgtgtacaacatatttgaatatgtgttctaatacatcagaattagaaacactcagaagtgtgtgtgtatgtgagtgtgtgtgtgtgtgtgtgtgtgtgagagagagagagtatttagcgccacagaaaagaaacaatgacctgtctagagaaatgagctttcctagtgctggtattatgtattcaagttccacatcacacgacaaaggaccaggacttcttgcagaaatgactgaatgcaggtctggtcctggaacatcttgtcatatcagaaagcagcaatgttaaagacttctagcatcatgtccaaaggactcaagaactaacctaaagaggttcgcactagccaaagtcagaataatttgaagctacagtaaagataatgtttaaattcgtgagtacataataatattgaaacaataaaaaagaactagtcaccctcagaggatgacaggaaaccaattcattatcttggaaactgatgaataaaggaagaatctagcatctatccccgtttctatatgaactgtactgctgggtaaccagatagcagttggagaaggatctccttagaacagtattacaaccattaaataacaaaacaataaaaaagatagaatgtcaccattttgcatccccagtgaattattagatgtaggcactaagcatcaacaactgctaasatcaataaaagagacaacagggctttatatgcctcctattgtcttgccaaaccaagggatcaaatctgaatc

SEQ ID NO: 951142 - DNA, 627 bp, Homo sapiens
tttggatctgagaaccaaatataggttgagatacctggcctaccagtaacctttagtctagactatggaatttcccttctagaaacttaccctgcagttaaatttgcgcaagaacatgtatgagaaacagaatgcagggtataatgtacgtcatctgctggggactggttaaatataggaaggctttaagaatgaggttgggtacaggggctcacgcctgtaatcccagcactttgggagaccgaggtgggtggatcacctgaggtcagaagttcgagaccagcctggccaatgtggcgaaaccccatctctactaaaaatacaaaaatcaggggccgggagtggtggctcacgcctgtaatcccagcactttgggaggccaaggtgggtggatcacttgaggtcaggagtttgagaccagcctggccaacacggctgaaaccccatctccactaaaaatacaaaaaagtagctgggcatggcggcacatgcctgtaatcccasctactcgggaggctgaggcaggagaatcgctgaacctgggaggtacaggttgcagtgagccaagatcacaccactgcactccaccctaggcaacacagtgagactccgtgtgataaaaaaaaa

SEQ ID NO: 951143 - DNA, 721 bp, Homo sapiens
cacttggagaacttttgtgtctagctaagggattgtraatgtaccaatcatcactctgtgtctagctaaaggattataaacgcaccaatcagcactctgtaaaaacataccaatcagcactctataaagtggaccaatcagcactctgtaaaatggaccaatcaggatgtgggcagggccaaataagggaataaaacctggccacccgagccagcagtgccaagcaacctgctcgggtccctttcgaggctgtggaagctttgttcttttgctcttcatgataaatgttgctgctgctcactctttgggtccacactacctttacaagctgtaacactcactgcgaaggtctgcagcttcattcctgaagtcagtgagaccatgaacccactgggaggaacaaacacccaactccagatgcacgatctttaagagctgtatcactcactgcaaaggtctgcggcttcactcctgaagtcagcaagaccaagaacccaccagaaggaagaaagtccggaggcatctgaacatctgaaggaacaaactccagacacaccatttttaagagctgtaacactcaccacaagggtccccggcttcattcttgaagtcagcgagaccaagaacccaccagaaggaataaattctggacacaatgggaggggctgccatgaaggtctctgacatggcctgcagacatttccccatggtcttgggatta

SEQ ID NO: 951144 - DNA, 577 bp, Homo sapiens
agagtgaaaacagagctcccatacaatgggaggggacccaaagggggttgcccactcccgtctcgaatgcctagggtttatatcccgaatattgtccctcccccacgctctcaggcaatatatgatttgactatttctttacctcctgcttttagcctaattggtattttagtgagtcctctttactacctaattggttgggtgtgaggtgagttacaagccccgtgtttaaaggtaggtgcggtccccttccccagctaggcttaggaattcttagtcagcctaggaaatccagctagtactgcctctcagtccccactctcaacaggaaaactcaagtgatgttggggaggttggccaacgaccgctcttaactgcttcctgctgaattggggcgtagtaggggtcgtgcagttgagatttcctcaggaggggtgcctttgatgtcattaacatcagagcatgggctagcaggctggtccaggggtctgcagtagatcttagtcatggactgcatctggggctccatttgaagaacsatttgtagttttacaacttcgattctggaagagacata

SEQ ID NO: 951145 - DNA, 611 bp, Homo sapiens
atcgctggaagttttaggattgacatttttggctcaagaactcatttgcgactcataatggccaccacaagataggaacattttaaattatttgattcaatgtttttacattacaattaagtaaactgaatcctgacatatttagatggcacgtctgggacactacatccacagaatgaagtggaaaatccatctcttcagctctcttctcctgggcttctcattcaaacacctcctcctgtaaattagctactttttctatctgttgaatagggcccagtttaagagtttaatacctgtttgtccaatccattctctgacttaggtgttctccttagtgaatagagctgaggacattttaattaatttattatgtcccttcaattaggggacccaattaataattgaaatgggtttttaattggtttatatcctctagggtatcatattaataacataaataaactaacaggtttgcattgaattaggcttcatctatatgcatatctgctgcctcccaatacattatctattctyaacctccaaaattgagtgcaactttttaaacaaagacattctgatgaactagtttttgttgtggttgttgttcc

SEQ ID NO: 951146 - DNA, 633 bp, Homo sapiens
atcttttggtggcagctatatcactgtagcgcatctctgccatagtcctgaggctgctggagacatcctttgaaatccatgtcagggaagccatgccttcacagcttatcccctctgtatgcctgcacaatcagcaccatgtggttgctaccaaggctcaccgcttgcaccctttggggcacagtggcctgggatgcacctggactgcacttgggcacatttgaaccacaattggggtggtgctggaacgtggggagtaaagacccaaggcagcccttggcagtgatccctagagtcccacagatgccctgggctcatccatttaaaccattctgcctcaaggccctagcattgtggggctttgatagaagaggcaacctccttgaagatctccaaaatgcctttggggtcattctcctactgttttgatgaatagcagatgaatttctttgattcatactaatctctttatcaaataatactttggccacacccatggtattctctctccctaacataatttttaaattctttacatggccagggtgagaggttttcmatttttttcctctgtttcccttaagtttataaattccatctttaaatcatttctttcttcttacattttactaa

SEQ ID NO: 951147 - DNA, 626 bp, Homo sapiens
gctactatattcaatctgttacatttcattgttttgattgaaatatatgaagaaaatctgacctcccacaatatcacagatggaaaataaaggactatatttartagcttttccagataattgtgtatattctcctttatgtcaaaactcaataagtggtagtatttaaggttattggcaatatgaaatttaaacagtatcaattaattttttgtttcctattaaggcaaaatccattgatctatcttgcatttttcaatagctagattacccataaacaatttcgtaatatcatgcattagtcatttggaaaatattgtttcactcaacaatgcagttcttccaaatgttgatacattttattagagagtataaataaaccacattcattaatagtagtaccactctcatcagaaaaatctagtagtattgggaaggtaagaagatttggatatgagatttttaaatttttaacttgaacttcaaattcaaagtttttattgccaacaaatattgtcagtagtttttcttgaagtaatagttttactgcatatattttttgagatagtgtctgccaaatacccaaatttggataaacttaatttgtacagcagttgtttttaggt

SEQ ID NO: 951148 - DNA, 575 bp, Homo sapiens
gacttagctttatttctgggttctctactctgttccaytggtctatatgcctagttttatatcagtaccacgctgttttgaaaactacagccttgtagtataatttaaagtctggtaacgtgatgtctccagatttgtttcttttgcttataatttctttggctattcaggctcttttctagttccttatgaattttaggattttttttctaattttctgaaaactggtgttggtattttatgggaattgcattgaatctgtagattgctttggacagcatggtcgttttcactatattagttcttcaaatctgtgagcatgggatgtgtttccaatggtttgtgtcatctatgatctcattcagcagtattttgtagttcttcttgtagagatctttcacttcctcggttaggtatattcctaggtttttttggttttggttttgtagctgctgtaaaagggattgagttcttgatttgattctcagcttggttgttgttggtatatagcagtgctattgatttgtgtacattgattttgtaacctaagactttattgaattcatttttcaaat

SEQ ID NO: 951149 - DNA, 587 bp, Homo sapiens
gtcttcacaactggcagaccaggagatcccctcccgtgcctggctcagcaggtcccacacccacggagacttgctcrctgctagcacagcactctgagctcaatctgggacacaggagcttgttggggggaggggcatctgccattgctgaggcttgagtagctggttctacgctcacagtgtaaacaaagtggcagggaagctcgaactgcagctcagcaaggcctactgcctctctagattccacctgtgggggcagggcatatctgaacaaaaggcagcagacagcttttccagacttaaacttccctgcctgacagctctgaagagagcagtagttctcccaacacggtgttcgagctccaataatggacagactgcctcctcaagtgggtcccttaccctcgtgtagcctgactgggagacatctcccagtaggggccgacagacacctcataaaagcaagtgcccctctgggacgaagctttcagaggaaggatcaggccgtaatatttgctgttctgcagcctcttctggtgatacccaggcaaacaggatctggagtgggcctccagcaaactccaaca

SEQ ID NO: 951150 - DNA, 572 bp, Homo sapiens
aggaggatgttgtacaaatgrggatgaagctgaataaatactgtattgtgactattactaatgctagctattctgctttatacaccaggcacccagggctattgaagccttggaagcccctgttccatatttgcgccactcagcctgtcctcagtcattctatgtacagccatttatttccatagagctcctttaagatggaaagatgaaactgttaagtcgaaccatatgatttccaagaatcagcagtacataataggcttttccatttagtattactgcttccctctaacattttcatgttcacaactgtgattggttcatattgaaatttaaggagaatgaagaatcagcaaattcaaatagacaaataaatccagatcatctaaattcaaattgtattttgggtcatctgtgaaatgtctttgacttgtttttgtttctacggctgtaaaatggataatctacaatcaactctgtaattttaaggaatataaacaaaggactataaagtgcttttaaaattaaattcccgctttaatttccaggtttcagcacaatgttgacacaaa

SEQ ID NO: 951151 - DNA, 677 bp, Homo sapiens
gcatcgttcccgttgttcctgtaaggggtgttttattttatatatttactcattaatttttttaatgctgaacaactatttggagaccgctgctcttctggctttatctaaatcatctgcagctacatgaattgttttgttttgttttgttttgttttgttttttgctacatcttcctggtaacagaatatcactgatcttcatcacctttggctgtttttcttcgtgcatataattttgggttacatcctcatttagtttacgatagtgtttgtgtttgtctcttcatctttggagggtgctcttttagtggagaatatagcagaaacgtcatgacggcatcttaaaatatgagtgataatttacttctttggttcaccttagttattttctcaatatttctttcatctgcacaagaaagtacataccatgaatgtgaaaatgttttttaatatcaattaaaattaaatttaataagtggcttgaaaatataaagtttaactctgtaaaaatatattttgattgttgattattgcttttaaaacttgtatttcatgattgtaatagcagatcaaataattcaacaygagtagtacagaagaaatgattgttgctgttttgacattagggcattatgactttaggacatcatgtttattaaagtattaaaatgttga

SEQ ID NO: 951152 - DNA, 600 bp, Homo sapiens
caaatgcacatagtttcagggtagatatgataatttgatacatttgaataatttgtaaakatgaaaacagtgtccttgagatattcatcaccttaaatatttgcattttctttatggtagaaacattgaaatttttcttctctagctactgtgaaatgtacaatcgattattgtaaggtattgtctccctactaactaaacggtataattttacccaataatcaacttcttttcttccttctgtccgctagcctttctagactgtggacaccaccagtctacactctatcttcatgagatccacacttttagctcccacctatgtgggcaaacatatgatatctgtccttctgttcatagcttattatacttaatgacatccagttctattcttgttgtttcaaatgacaggattttattctttttatggctgaataatattccattgtgtatatattccacattttcttcatctattcatctgatgatagacacttaggtttattctgtattatgcctgttttgaatagtgcggcaataaacatgagagtgtatctacctctgtgatatgacatactgatttgctttcttttggatata

SEQ ID NO: 951153 - DNA, 600 bp, Homo sapiens
caaatgcacatagtttcagggtagatatgataatttgatacatttgaataatttgtaaagatgaaaacagtgtccttgagatattcatcmccttaaatatttgcattttctttatggtagaaacattgaaatttttcttctctagctactgtgaaatgtacaatcgattattgtaaggtattgtctccctactaactaaacggtataattttacccaataatcaacttcttttcttccttctgtccgctagcctttctagactgtggacaccaccagtctacactctatcttcatgagatccacacttttagctcccacctatgtgggcaaacatatgatatctgtccttctgttcatagcttattatacttaatgacatccagttctattcttgttgtttcaaatgacaggattttattctttttatggctgaataatattccattgtgtatatattccacattttcttcatctattcatctgatgatagacacttaggtttattctgtattatgcctgttttgaatagtgcggcaataaacatgagagtgtatctacctctgtgatatgacatactgatttgctttcttttggatata

SEQ ID NO: 951154 - DNA, 543 bp, Homo sapiens
acattattaagtgaaagaaaacctcacagaatgggagaaaacatttgcaagtcatatatctgaaagggacttatatccaaaatatataaagaactaatacaattcaataataaaaataaataacccaatttaaaatgggaaaagaatttgaatatacaatcctccaaagaaaatgtaagaatagttaaacaacacataaaaagatgttaaattcattagtcatttgagatatgaaaattaaaaatacaatatgtcacacataaaaatggctatattaaaaacaacagataataacaagtgttggtgagtacatacaaaaatcaaaacactcatatgttgttggtgagaatataagatggtgcaaccactttggaaaatactttggcagttcctcaatatgttaaatatagctatcacatgacttgtaattccagtcataggaattctaccatagagaaatgaaacaygtttgcacaaaaacttgtacacaaatgttcagagcagcattatttataatattcaaaaggtgaaaacaacccaaat

SEQ ID NO: 951155 - DNA, 619 bp, Homo sapiens
gatgaaaggggccgggcgcggtggctcacrcctgtaatcccagcactttcggcggccgagacgggcagatcacgaggtcgggagatcgagaccatcctggctaacatggtgaaaccccgtctctcctaaaattatacaaaattagccgggtgtggtggcaggtgcctgtagtcccagctactcaggaggctgaggcaggagaatggcgtgaacccagaaggtggagcttgcagtgagccgagatcgcgccactgtactccagcctgggcgactcagtgagactccgtctccaaaaaaaaaaaaaaaaaaacagaaaggaaaaaacaaaggttatctttgacaatgaaagtatacataggaattaaatgataaacatggtttttctattgttaaccatgttcttcctgatggagcatatgtaataaactcattcattcccaggagtatctgtattaaacaaatcttacttttaatttccttacaacataatcatttttaagtaattacagtgaatccatctctataaatttagagccagatttgtaactctcgctcaaaaatgagctggcagaaaaacactgttcccataaacatagacactaagttgcctacccttcct

SEQ ID NO: 951156 - DNA, 619 bp, Homo sapiens
gatgaaaggggccgggcgcggtggctcacgcctgtaatcccagcactttcggcggccgagacgggcagatcacgaggtcgggagatcgagaccatcctggctaacatggtgaaaccccgtctctcctaaaawtatacaaaattagccgggtgtggtggcaggtgcctgtagtcccagctactcaggaggctgaggcaggagaatggcgtgaacccagaaggtggagcttgcagtgagccgagatcgcgccactgtactccagcctgggcgactcagtgagactccgtctccaaaaaaaaaaaaaaaaaaacagaaaggaaaaaacaaaggttatctttgacaatgaaagtatacataggaattaaatgataaacatggtttttctattgttaaccatgttcttcctgatggagcatatgtaataaactcattcattcccaggagtatctgtattaaacaaatcttacttttaatttccttacaacataatcatttttaagtaattacagtgaatccatctctataaatttagagccagatttgtaactctcgctcaaaaatgagctggcagaaaaacactgttcccataaacatagacactaagttgcctacccttcct

SEQ ID NO: 951157 - DNA, 619 bp, Homo sapiens
gatgaaaggggccgggcgcggtggctcacgcctgtaatcccagcactttcggcggccgagacgggcagatcacgaggtcgggagatcgagaccatcctggctaacatggtgaaaccccgtctctcctaaaattatacaaaattagccgggtgtggtggcaggtgcctgtagtcccagctactcaggaggctgaggcaggagaatggcgtgaacccagaaggtggagcttgcagtgagccgagatcgcgccactgtactccagcctgggcgactcagtgagactccgtctccaaaaaaaaaaaaaaaaaaacagaaaggaaaaaacaaaggttatctttgacaatgaaagtatacataggaattaaatgataaacatggtttttctattgttaaccatgttcttcctgatggagcatatgtaataaactcattcattcccaggagtatctgtattaaacaaatcttacttttaatttccttacaacataatcatttttaagtaattacagtgaatccatctctataaatttagagccagatttgtaactctygctcaaaaatgagctggcagaaaaacactgttcccataaacatagacactaagttgcctacccttcct

SEQ ID NO: 951158 - DNA, 606 bp, Homo sapiens
gagtgcaatcactatcaaaattcttgctggctttgtttggcagaaattgataagctgatcctaaaatcatatggaaattcaaggatccagagtagccaaaacagtcttgaaaaagaagaggaaagttagaaggctcacactttccaacttcaaaacatactactttagagttacagtaataaaaatagagtggctgtgtcagaaggataaatatatagatcaatggaatagaattaagagtctagaaataaactcatacatctgtggcttactgattttctacaagagtgccaaaactatttcatgagagaatagtgtctcatggtacttggacaactgtatacccacatgcaaaagaatgaagttggccccttacatcatatacaaaaaaattaaagtggattaaagacctaaatataagagctataactgtaaaactcataaaagaaaacatagggccaggcgcacgcctgtaatcccagcactttggaatgccgaggcaggtggatcacctgaagtcgagttcaagaccagcctaacrtggtgaaaccccgtatctactaaataacaaaaaattagccgggtgtagtggcgtgtgcctgtaat

SEQ ID NO: 951159 - DNA, 476 bp, Homo sapiens
  misc_feature 455, 456, 457, 458, 459, 460, 461, 462, 463, 464, 465, 466,467, 468, 469, 470, 471, 472, 473, 474, 475, 476: n = A,T,C or G
gaatggaatggaatggaaattaatggaatggaatggaatggaatcaacccgagtggaatggaatggaatgcaatggaatggtttggaatggtgtggaatggaatggaatggaatgcaatggaatggaatcaaagcgagtggaatggaatggaatgaaatggaatggaatggaatcaacacgagtggaatggaatggaatggaatgggatgggatggaatggaatggaatgcaatgcaatgtaatcaacacgagtagaatggaaaggaatggaatggaatggaatggaatgcattggaatccacccgattagaatggaaaggaacggcatggaatggaatggaatggaatggaatggaatggaatggaatggaatggaawggaatgcaagggcatggaatggaatggagtcaacaggaatggaatggaatggaatggaaccaacacgagtggaatnnnnnnnnnnnnnnnnnnnnnn

SEQ ID NO: 951160 - DNA, 595 bp, Homo sapiens
gtgggaaggaacaagcaaggcagggtaagcacgtcaagaattttctagtttgaacaatttcagggctctggggcacaaagtttgccactagttgtcttgtacctggccttggagtgattaggaaakgggaatagtgagccagagtataagattccataaaggaggtggctagggggtatagactccagattggatggttggtgtattagtcacggttctttaaagggacagaactaacaggacagatgtatatatgaagggaagtttattaggagaattgactcacatgatcatgagatgaactcccacagtaggccctctgcaagacaaggagccaggaagccagttcaagtcccaaaacctcaaaagtagggaagctcatagtgcagccttcagtctgtggccaaaggcctgagaggccctggtaaatcactggtgtaagtctcagagtccaaaagctgaagaacttggagtcttcagcttttgctcgagggtacaatgttcgagggtatgatgcatccaacacaggagaaagatggaggccagaagacttagctagtctagtccttccacattcctctgcctgcttttatcc

SEQ ID NO: 951161 - DNA, 597 bp, Homo sapiens
ggcagaaagcaggggcaaacttcagatgctgcctggttccaccacgtggacttgtctcgccagccatccagatgggcagagtgacaggaggaaggcttcctgccarctcctagctgctcccatcctgagttcctatttgacatgttaaacaattactcagataaagacatagaaggcatggagagtatcaattctccccccgacctctctcatctgaaccttcttcttgtgtttggagaattgcttacataataagccctgatgggaagcagagcttacctccaaaaatagattctgaaagtgtcagacactggttgggcgcggtggctcacgcctgtaatcccaacactttgggaggccaaggggggcagatcacaacgtgaggagattgtgacgttgatgaaaccccgtctctactaaaaatacaaaaattagctgggcatggtggtgcgtgcctgtaatcccagatgctcgggaggctgaggcaggagaatcgcttgaaccagggagtcggaggttgcaatgagctgagatcgtgccactgcactccagcctggcaacagagtgacattccatctcaaaaaaaaaaaagtgcca

SEQ ID NO: 951162 - DNA, 714 bp, Homo sapiens
cttttttttttttttgtatttttggtagagacagggttttaccatggtgctcagggtggtctcaaatcctgagctcaagtgatttgccctccttggcctcccaaagtgctgggattayaggcctgatccaccacacctggcctataaagggaaagatttataaatttgcttgtattttagagatgacactaaaattaaaaacttaatttaaaattgaagttacaatacaagccacagaaccaagaaaaggtataacatgtataacaaagtattagttacaagggaaacattaataagcaaaaaaattttgtttaataagcaaaaaaaattttgtttaatgggcaaaaatgtgaacaggaagcggaaaaggaaaacaaaatcaccaaaatcacaaaagtgtgctcagcctcactgtaattagagaaaaaaattaaaatgagataccatggtatgtacatctgattatctacaatatttatccagacaatatgagatgttgaaaaggatgtagaaaataggaacttacatattctagtagtgggagtgaaaactagtacagccattttgatattgaattactgatacctaacaaaaatgtatgttatgacccagaaaatctttttctatagaaacttgcaaatatttgcacagatgacatctatagaaagttggaaacaatctacaagtctatcaatagggaaatgaaaaataaag

SEQ ID NO: 951163 - DNA, 722 bp, Homo sapiens
actctctaggagaatcctgacaaacaagttagggtcgagtgtatcagtcaggtgagacacgggaggcaactcaacaaaacacaagaaataacagcagtttattacttacagatgccagagagaagagggcagcatgcctcccagggccaacaggaagtggggagccatctaggacatgcacagtcaactagtgggtggggaacagggcaaagagtacaagtgacctgtgggctgaggcttttactggggtccagggcattttccaagcaggtttccctcagggagttgtaattggtgggtttagagcaagtaggcataaatttcatggagtcatgctgtgtctgagaaatcagtattagggttctctagggggacagaactaataggatagatatatatatgaaggggaatttagtaggagaattgactcacatgatcacaaagtgatgtcccactattggccatctgcaagctgcggagcaaggaagccagtcagagtcccaaaacctcaaaaataggaaagccaacaatgcagccttcagtctgtggctgaaggtacaagagcccctagcatatcactggtgtaagtccaagagtccaaaagctgaagaacttggagtctgatgttcgagggcaggaagcatccagcacragagaaagatgaaggccagaagactcagcaagtcaagtccttccacgttctgcctgctttattctagctg

SEQ ID NO: 951164 - DNA, 573 bp, Homo sapiens
ataactactcttttttttaaactaacccttagtattttgtgtgtaaaaaccctcatttgtaacaaacattgttggcagtttaaatttcagaaaagataatgatgaaaatttgaatcatttttagcagttttaagaaaagtgactattattgaaatctgaccttattggcgtcaggtttataaaatgcactttatacacctgcataaatacgtattactaatccacttatgagaaataatatttttgagatgagggtttccagattttacaaaaataattttaaacactttttttaagcctaaaaaagaaaatgaagaattaagaaaactttttgagttaatatcatcactgaaatataatgtgaatcgaataagaaagaaaaatgatgaattagaagaagaggcaactgggtatggttttcatattgtagaacatgttagccatttattaattgatttaactctaattttacttgactaaaaccyagatacaaattcattttatgtttgcattttcataattaaatgaattctattttaaaatgtatttcagaaactcacagcacaacttttt

SEQ ID NO: 951165 - DNA, 618 bp, Homo sapiens
tcagctgctaggtacctgggttagagaactagaagggtccattagtttttacccgctggagcctggagcctggagcctggggcrctgcctccctgttggttgtgttggtgacggagcggtaggagggaggctagcagcgggagcttctcctgccgggctggaagacgaggagaaggaagagacaccgctgcatgctggaggctggagccagagcctgcgcctccgtggcttacctcgctgcagctgttggtgacatcagagaccacagctcggctacagtggtagcaatgtggttgcagtgagccaagattgcatcactgctctgcagcctggcgacagagcaagacaccatcttaaaaaaaaaaaattgaacacagtgttttgcatctgtttcagaaaaacaaatgataccattatttaatatgctgcagtaactagaagcctacttataaagttggtggcaaataagtcattggtatatgttaacttcctataatcacttacatgttcctaagagtcactttgtgtatttatataagaaggtcagcatgtaaatgattatagagaaactttttgttgaaaagtaagaaagcttgtctcccttttcctagtgatgaa

SEQ ID NO: 951166 - DNA, 610 bp, Homo sapiens
ttgaacttgagggtgatgatttagggtatatctggtgaaatgaacttctaggcagcaaagctcaagaggtatcttgtctgtattgaacagcctgtggtgttctgtgtgaccaaataaatgacctcaagttgaaacttatatttaaatgagaagcagagctttgaagtttgatttgcagcctgcccaagaggtcaaaaagaaaagctgatttttagtgggaaaattcaagaaggcttcagaaatgtgcataaaatggagcccagtgctaatagctaagacaatgttaaaaaggccttgaaggcatttcagagacctttgcagcagagcttgctgtcaaaggccctgagttctaggaccaaagaatggtttcctgggtcagtcccatgatcgcgctgctgtgtccatcctcaggacagtgccgcctgcatccctgcagctccagctccagctccagccatggctgaaagatgcacaggtacagcttgggtcactgcttcagagggtgcaagctgcaagccttggtggcttcyacatagtgttaagccagcaggtgcacaggcttgggagcctttgtctagactcaagagtatgtaaggaaaaacctcagtgt

SEQ ID NO: 951167 - DNA, 568 bp, Homo sapiens
attatataaaatatatgaatatgtgatatgtgtatattatataaaatatatraatatgtgatatgtgtatattatataaaatatataaatatgtgatatgtgtatattatataaaatatataaatatataaaatttatatatgtatattatataaaatatataaaatttatatatattatatgaaatataaaatatataaaatttatatatgtatattatataaaatttatatatgtatattatataaaatatataaaatttatataagtatattatataaaatatataaatatataaaatttatatatgtatattatataaaatatataaaatttatatatgtatattatataaaatatataactatataaaacatatatttatattatataaaatatataactatatatgtttatatataatagcaattatgaaatatatttataattgttatatagaaatatattgatatgaaatactttttcctctaataagcacttagttctatgtgatgtcaggatccaattcaagaggagagagaatgcaggaatttacaggcctcagaaa

SEQ ID NO: 951168 - DNA, 672 bp, Homo sapiens
aggtctgcctcacaggtgatttgcagagatggcctcttgctgsaaaaatctcttcttagaccatattatgttccaccagtaaagctggaataagaggcagaatatttaattagctgcaattcctacagagggagacggaggccaaacctaaggctcaaacagaaatggaagggaaaagtggggaaacaagaaatccccaacttcctgctggttcttctcacccccacatccccaacttcctgccagttcttctcatccccaaatcatcccctgaacagtgctgtctccatctgcttccttctgattttatcactgggtagaaggagttggctcatttgtccccagtgaaaaatgactcagggtcacgctgctccttccctcagaatgcccaggtccccaagcacccaggcatctgctgcttttcctaggatccccagaagccccctagcaaaatggtagatggcaattatgagactcactgctggtgccaggtgagggctggtgctcctgcccatctctagagagaagcaggacttggagggtggcagcctgcaagggcaccagtcggtttgagggccatcctggggaccccaggcctttgaggtcctatctggtggtgggacacagggaagggccatagaggtgttttctggcctgacctggggtctgcaa

SEQ ID NO: 951169 - DNA, 593 bp, Homo sapiens
atcaggaaatgggttctctgcaaatgtaatcaagttaagataaagtcatactggattagggtggaccctaaacccaatgcctggtgtccttgtaagagcagaggactccctcacacaggraagaagacacagaatgccagaattgccagcaaccatcagaagctgggagggaggcatgggccagattataccccagagatatcagaaggaatcaaccctgcagacaccttgacttcagggtctggctttttagactgtgaaagaatacacttctgtgttctggggcacccaggttttggtaatttgttatggtagccctagaaaactcatacagatggtaaaattaatgtgtgaaagtttaagcagaaataagatattggcctaatctctaagtatctcccatctaatattcattaattacaaagggaaaatagtaactttaccaaaatgaaacctggcagacaccaccttgggcaatgatgaagattgacatcacgggtaatatgtaccatcacgttcctgacatgattcaatgggaagggcacatcacctgtatggtgtcccttcccttatgcaaaacctccgtctaatca

SEQ ID NO: 951170 - DNA, 584 bp, Homo sapiens
tagctgggattacaggcgcgtgccaccacacccagctaattttttgtatttttagtagagacggggtttcgccatgttggccaggctggtctcaaactcctgacctcaagtgatccacccacctcagcctyccaaagtgctgggattacaggcataagccgctgcgcccggcccctgcacctccttttgttatggcccccatgagtacccaactcacctctcacctctgctccaacttcttggccaacacaacacatcagagagaactggaccttggctcattcctttccagtggccaaccagccaagagaacacctgcttttcattctcttcagggaagtgtgaacttttcccttggggctataacctgcacctatgctataacacccttcccctccaccacaacacatcttgtagcctaactacagaaggtgcccaagaaacccccaaagtttgctcctcacagtctagggtcacccctcagctattaccaagccagggagtgagactccatggtggacaatttatctctataattttgttttcctttgtctacatttggtcagcataaacacttctgaaaa

SEQ ID NO: 951171 - DNA, 615 bp, Homo sapiens
gtcaacttgactggatcaggggtccctgggtgttaggctaagggtgtgtctgtgaggatgtttctagatgaggttaacatttgaatcagtgggctcagtaaagttgccctcaccagtgtgggtgggmcttatccaatctgttgagaacctaaacagaacaaaaggtggaggaagggagaatctgcttccttttttctttctttctttcctttctttctttctttcctttctttctttctctttctttctttctttcctttctttctttctttctttctttctttctttctttctttctttctttctttctttctctctctttctttctttcttttttttttttcctgcttgacttattgagctgggacatgggtcttttcctgtcctcagaccaagacacactataggctctcctggttctcaggcctttgaactcagaggcaattacattactggctttcctgggtctgcaacttgcagatggcggatcatgggacatcttagcctccacgatctcatgagccaattcttcgtaataaatacatgtattacttttattatatatatctcctattggttctgtttctctggagaatgctgacttatacagatgcc

SEQ ID NO: 951172 - DNA, 730 bp, Homo sapiens
atcatgccactgccctccagcctgggtgacagagcgagaccctatcttaaaaaaaaaaaaaaaatcaatctgaaacttaacagagytaccgtaaaaactaagtttttctggccttctcgtaactggaaatatctggtttactacacatctactttacatgaggatgatttgtttctagtgatggcctgagacctgaggcactgaaagattctgaagacctggtcatctcagaaagtctgagttccacagcagccaaaattgggcttgaagtgtgtttctgtacataaaagtcttcaaatggttgctttttattggcccaaataattgactaacctgaagatctcattccccagtcatgtcagaggataaatattgatcatatttggtggtcaggctcaactatgagagaaaatttcctccctccattgctcaaataaacgttcatgccaaataaatctctccagggccgacttcagatgaaggatgttcaagctgaaagaaagtgatgaacctacatgaaaacatatgtcccttctctgtatacatttatggatggatgtcttaggaactcaagaaaatgccttttttccccaaaaaaagtaccaactcccctacattttcttggcagttcacaattagagtgcactggagagattgaattattttacttcaaatgtgtagaagcacactgttctcagaaaactgctgaagtctatctgagtatcagcct

SEQ ID NO: 951173 - DNA, 668 bp, Homo sapiens
taactaaaatctgaaaaaaaaartcaatgcccaaagtgggatggttactgccattaccctgaaaaattatcagacttttactctttatgaaaactattataacactgtacttttcatcaatcttaaagtttcactcatcacttaaatgaccaaaaagagaaattaaaagaaaaaaaatgtttacatctgagtcatgtctagagctttgtttggctatgattttggattactataataaataatttaattcccaatattcccaaccttttccttgactacttgtccacttaataaagccatttccccccccccctcttttaaatatcttaagtgtacagtcttgcttacagtgaaagtccgtatttcttggtttatcaggaaaacagtgcaaggttttatatttactcgaaacctttcaaatactcctacctgttcttacattttctgagtctttattttcacagataactttagaagtgattgctttgagctcactataaagcaagcagatcatgttaaatatcaggtggggtttagtgagctcctataagacgatgtcatttcttgatgctctgtgctttgcaatgaagtgattaaagaatcttcttgacccagagttcctccacttaatcaagaagagaggattttggaagcagaggctttcctta

SEQ ID NO: 951174 - DNA, 570 bp, Homo sapiens
ttcaagccttgcttatgtggcctatgcaaggttgtcagccgctgcagagctgttccgctatagatacaagtccattgttagatatgtggtttgcaaatatkttctcactgtagctagttcattcttttaacagttgatttctcagaacaaaagttttttaattttgacgaatttcagtttaccacttttttattttgtgggtcatgcatttggtgtcatgtctaagaactctttacccaaacccaaatcataaggttttctatgttttcttctaagaaggttatattttatattgttcatttagatctatattccctttagtaatttttttataaagcatgaagtttcatgttaaggcttactttttttgcatctaaatatctaactgttccaacactacttattgaaaagagtatcttttcagactggataaagaaaatgtggtacatatacaccatggaatactatgcagccatataaaagatgagatgtccattgcatgtccattggagggacatggatggagctggaggccattatccttagctaactcaggaacagaaaaccaaa

SEQ ID NO: 951175 - DNA, 619 bp, Homo sapiens
caagataagatttgggtaggggcacagccagaccatatcagctatatacccagtagtggtattgctggatcatgcagtagttctatttttagttttcttgmaaaaccttcatactgttttccatagtggctagcctaatttacatttctaccaacagtgtacaagaattccactttccccacgtcttctctagcatccatcattccctgtctttttgataaaagctgttttaactggagtgagataaatctcattgtggttttgattttcatttctctgttaattagtgatgtcgaacatttttttcatataccttttgaccatttttatgtctttttttgagagatgtcgattcagctcatttgcccaatttaaaattggattataattataattaatattgctgttgagttctttgtatattttggatattaatctcttgtcagatgaatactttgcaaatattttctcccattctgcagcttgtctctttgttgatttttttttttttttgagacagagtcttcctcttgtccgccgggctggagtgcaatggcacgatctcagttcactgcaacttctgcttcctggcttcaagtgattctcctgcttcagcctg

SEQ ID NO: 951176 - DNA, 590 bp, Homo sapiens
gctggttaatgaagtgttatttcttcaccttcctcatgcctgtaacattgacctctgagccttcaccacagtcgrgagagcttaggtccatgctccatctgtctgcagggcgatcacttccaaaccaaaaaagactcatccaagaggcattatgttgtgttatggacataggaacttcagagtttggacatcggccaggcgcggtggctcacacctacaatcccagcactttgggaggccgaggtgggcagatcatgaggtcaggagatcgagaccatcctggctaacaaggtgaaaccccgtctctactaaaaatacaaaaaattagccggacgtggtggcgggcgcctgcagtcccagctactcgggaggctgaggcaggagaatggcgtgaacctgggaggcggagcgtgcattgagctgagatcgcaccactgcactccagcctgggcgacagagcgagactccgtctcaaaaaaaaaaaaaaaaagaaagaaagaaagagtttggacatcaagggggtggggagataatcctctggtaagtaaaataattctgtggaaacaatctctcattcccagcatgcaggt

SEQ ID NO: 951177 - DNA, 580 bp, Homo sapiens
acggtgaaacctctgtggtttctgttggtgacaaaatcacaggtcgtgatactactactgtggtttgttgcctacaatcaaaatggaaggaagttcattcagaatgaggctayggaaagtgaagatgtcagtttttggcccgatggccagtgcccacctcccgtcctgtctcctgtcagcgtcgtctgccatggtccatctgccctcctttttgggacatttgcttggcttggcttctgggaccccacacctccctgggatcctcttagctgtcctgctgctgcccccagtgccctggctggttcttctttatctccctgaactccagccctggagaacccagagatcacactttgatcccctccttttctttttttgtttgtttggtttttgtttgtttgttttgagacagagtctcactctgttacccaggctggagtgcagtggcacaatcacagctcactgcagccttgacctcctgggctcaagtgatcttcccgcctcagcctcccaagtagttgggagcacgggtgcccaccaccacacccagctaatttttttttaatttttggtagagatt

SEQ ID NO: 951178 - DNA, 580 bp, Homo sapiens
acggtgaaacctctgtggtttctgttggtgacaaaatcacaggtcgtgatactactactgtggtttgttgcctacaatcaaaatggaaggaagttcattcagaatgaggctacggaaagtgaagatgtcagtttttggcccgatggccagtgcccacctcccgtcctgtctcctgtcagcgtcgtctgccatggtccatctgccctcctttttgggacatttgcttggcttggcttctgggaccccacacctccctgggatcctcttagctgtcctgctgctgcccccagtgccctggctggttcttctttatctccctgaactccagccctggagaacccagagatcacactttgatcccctccttttctttttttgtttgtttggtttttgtttgtttgttttgagacagagtctcactctgttacccaggctggagtgcagtggcacaatcacagctcactgcagccttgacctcctgggctcaagtgatcttcccgcctcagcctcccaagtagttggragcacgggtgcccaccaccacacccagctaatttttttttaatttttggtagagatt

SEQ ID NO: 951179 - DNA, 582 bp, Homo sapiens
  misc_feature 1, 2, 3, 4, 5, 6, 7, 8, 9, 10, 11, 12, 13, 14, 15, 16, 17,18, 19, 20, 21, 22, 23, 24, 25, 26, 27, 28, 29, 30, 31,32, 33: n = A,T,C or G
nnnnnnnnnnnnnnnnnnnnnnnnnnnnnnnnncttaaaagcctcagtagtccctggagagacatagagctaaaaattccagaccatttggcaggaggcatccagccgcggacacatgttcctgggattgcaacaactttcttttctcctatccctactccccccacccgcctctctccttgacaaaaatcacaggaatgggatgtagaacaggcagttagggccacgggtctcaaaagcacaagtaatgtgtttctctgagtggcactgggcccgtgtctgcacattctgcctctatgtgagtcattgttcaccttgttcagagcaaatctactctgtatgaggatccagcaccttccctcctacactaccctgcagagggctggaattattcccatggggatttcctcctgggccccataagccccctggtcacaacagtgagtctgtagcctggtcagggagagaacaagctttcttcactttcccagccaacacgttgcatactagggccatacatcccggcctcctctcaaggggcctgtgttgggcctgaygcctctctctccaagaggttatgtg

SEQ ID NO: 951180 - DNA, 583 bp, Homo sapiens
gttcctcctgactaggtaagactcctcaacttgcctccagccacatcttataggtgtgktcagattggcaacaggttcgtacctcagtggtacagagctcccagagaaaggggcaggctatcatcttccctggaaaatatgaggcaattagggactggagggacccccagcataccacagcagccctacagaaaattggccggactctacttgatgggcaggtcctcctggcctgggtctctagccagcccaccaccggagctatcaagccagtagcaactcagcagttttttggacagagcttccaggagcaaatgaaatcctttctgccactgcctctgcagtagaattgcccttgctaccctcagaagatatatcaagggagcaaagaccctaagtgccatatcaacacctccaataagctgcagttgacccaaagaacaagccagtccatctcccatgggtaccacacaccctccactactcatcaccagacagggaaccctggcttgggcccacagcacagaccctccatcctgggccgattacactaagtgattgctaactcacatgtctctgggat

SEQ ID NO: 951181 - DNA, 435 bp, Homo sapiens
aatattcaaattttcagtgtccatgagggtaaaaagcaaacaaaagggatacaaaacttttaaacaaaataacagctaaaaatttcccaactctaacaagaggtttagatattcagacacaggaagctcagagatccccaaatggatacaattcagaaaggtctccatagcaccttatagtcagactgtcaaaggtcaaaggcaaaaacagaattctaaaaacagaaagagaaaagcatcttgtcacttataagggaaactccatcagactaacagcatatttctcagcagaaaccttacaggtcaggagataattggacaatatagtcactgtgctgaaagaaaaaatgttagtcaaggatactgtactcagcagagttayagttcatagatgaaggagaaataaagtctttcccagataaacaaaagcagaag

SEQ ID NO: 951182 - DNA, 546 bp, Homo sapiens
cccggagccacaccatgccatcttgcatttgcaattttctaagccccctagcccaggaggccaggcctattaggccttgtttgaaaaggagcatatatacatttttaacattcttattatttgcgtgaagatgaactctcaaatttagtttgtactgggtggagtggtccttagtaggcgccagtgtttaattctatttcgtgatgtttgcggccggtaggtttagcggtcaccgggcgagggaggcatgtgggaggggtgctgccctcctctctgggtgacggtatagttaggttagtatcgttaggttattatctggctcttcccactcggctgggggctcctgccaggcccagcccccgccctccctgtgcgtcccgcgccagggccccaggtccccccaggccttgggcacgggcgccaccccctcggttctccgggatcctggccggcatctcccaaagrcagttcagagcccctttcatcttaaaagctttgctgctcatcacttctgggaaactcaaaatgtacatttcatttttttaa

SEQ ID NO: 951183 - DNA, 848 bp, Homo sapiens
gaaataagacaaacgggtagaagctttaggatggcagattcacagcagtttaatacgagaaagaacttctaacagaactggttggaaagggaacaggttgtttttttgygtattaatggtggaaatcacagggaattttcaaaatggatgacctttgtggtaatggtggagtttgaattcagtaagggttgaattagatgactttcaagatccttccatttctaaaagttatgattctgtgacccagaaagcctaatagttctccgacaccagaaagcatgaaagctggaaaccagattaaaaaaagagcagtcagccaaacagtcagaaggtaggtcaggtgtacagtaacaaatttaagatctgattatctttcagtctacctatcatcatttaactctggtagaccatgaagtacaacactctcagtgacttaccacatccataggtgctctgacttattacagataaagatatccattatgcataattagcttctttatctgactcaaatctgaagctaaagattattctggacatgatttcctggatagatggccagctaagttgtgtttcagataggaggatcacttaattaactaggcaacacaggtattttagtatattaatcacttccctaggtaggcaagttctaaatcacccttttctcctatatgaggacacatggagctactgttttctgttcccgtgttactctttaatctctgtcagtgttgtacttttgaacttccactttgtaacactgcactacactaaacactatatgtagcaagcattctatacgtttgtagaagattttagtaaatatgtactttcaaatgctatat

SEQ ID NO: 951184 - DNA, 623 bp, Homo sapiens
cttccagagaatttaaagggctggtccaatttccctgccctccccctttattttatttccccttttggaagctagacattaaatactaggacattcaaaagccattgcatatatagtgaaaatyagaaagtgactgtgcaagtcaggaaaaggcacaggctcagaaaagacttgagaggaccctaagttctcccctcaggctaatcctgaagccagcctccaatcataacaaataaataaatacataatcaacccctggagaaggggaagaatttaatttccagagttcccacataattagattcaaatatccaatttccaattagaaaattacaaagtataccaaaaaaaaaaaaaaacaggaaagtgtggcctattcaaaggaaataattaatcagcagaaactcttgctgaaaaagaaccaatggcagaactactaaacactttatttaaaataactgtcttaacaatgctcaaagaactaaaggaagatgtgaagaaagttaagaaaacaatgtataaacatgatgtaaatatcaataaagagatagaaaacctaaaatgaaaccaaaaaataacctttctgggctgaaaaagacaacaattgaaacatttactagaga

SEQ ID NO: 951185 - DNA, 596 bp, Homo sapiens
cctttgctccagttctcaacaagttccttatctccatctgagaccacctcagcctggatttaattgtccatatcattatcagcattttggccaaagccattcaataagtctctggggagttccaaactttcccacatttttctgtctttttctgagccctccaaactgttccaacctctgccttttatccagttccaaagtcacttctaaatttttgggtatcttttcagcagcactgcactctactggtaccaatttactgtattagtccattttcacactgctgataaagaaataccagagactggacaatttacaaaataaagaggtttattgaacttacagttccatgtggctggcgaggcctcagaatgatggcagaaggtgaaaggcacatctcacatggcagcagacaagagaagcaagcttgtgcagggaaactcccatttttttaaatcatcagatcttgtgagacttattcactatcacaagaacarcatggaaaagacctgcccccatgattcagttccctcccaccgggtgcctcccacaacaggtgggaattcaagatgaaatttgcatggggatacagccaa

SEQ ID NO: 951186 - DNA, 596 bp, Homo sapiens
cctttgctccagttctcaacaagttccttatctccatctgagaccacctcagcctggatttaattgtccatatcattatcagcattttggccaaagccattcaataagtctctggggagttccaaactttcccacatttttctgtctttttctgagccctccaaactgttccaacctctgccttttatccagttccaaagtcacttctaaatttttgggtatcttttcagcagcactgcactctactggtaccaatttactgtattagtccattttcacactgctgataaagaaataccagagactggacaatttacaaaataaagaggtttattgaacttacagttccatgtggctggcgaggcctcagaatgatggcagaaggtgaaaggcacatctcacatggcagcagacaagagaagcaagcttgtgcagggaaactcccatttttttaaatcatcagatcttgtgagacttattcactatcacaagaacagcayggaaaagacctgcccccatgattcagttccctcccaccgggtgcctcccacaacaggtgggaattcaagatgaaatttgcatggggatacagccaa

SEQ ID NO: 951187 - DNA, 591 bp, Homo sapiens
agataaaatgactttgcaacaccatggcaacgcaagagatattgattcagtcctctccccaaggggcctatgtataactctacattgggggcagagggaatacccaagcatgtgattactgttggacrtagaatatgaggtgatattgatagctggagacctgaaatgtcatcttgatcctccctattacaagataatcatatgagaccagtttacaagtggactattgactgaggtctagctcacagtgggcctacctactgatcatttccaaatatataattggaatagacatagttgatagatggtgcagctcccacattgaatccttggcctgtcaggtaaaagcagcctatcatagcagagaaggccaagtagcagcctttgaaatttccatctactcccaccttgcccccagccaagctactaaatacaaaacaaattcatatcctgggagggatgacagaaattaatgctacccttaagcatctaaaggaggccagagtagagatcctcattttatctccacttaattcaccagtctggacccctccagaaattagatggatctcctggagcatgagagtagac

SEQ ID NO: 951188 - DNA, 492 bp, Homo sapiens
gacagaattcaatgagaaaaaatagacaaactatarggaaaattgattaaaacaaagctgttctttgaaaagagtattgaagttgacatatctagactgatcaagaacaaagacaaaaggtacagattatcaagaaaatgagcgggcaaagcaagatggccaaacagaagcctgcaacaattatccccccatcaaaggaacactaaattttaacaactaactacacacaaaaaagcactatcacaaaaaacaaaaatcaggtgagcaatcacagtacctgattttaacttcatattgctgaaagagacattgaagagggtaggaaagacagtcttgaattgcctatgccacttctcctccactccctggcagtggccacatggcatagagaaacaatctgtgcacttgaggcagggcaagcacagtgactaggggtcttggcattgaactcagtgctgccctgtcacagcagggagcaaaaccttgcttggt

SEQ ID NO: 951189 - DNA, 563 bp, Homo sapiens
gttgaaagaattattatctaaagacctggaatcagtagaaaggagtctctggtttaagatatgggattgtgaagaccaaggttcttattatgtagatgamgtctcataggtggccacccttagaaacaatagatggcaaatgcttcctattaaaaggtgctagactctcagttatctcttcaggactgggagggcctggaaggggaaagatttagttaattgatatcctttacaaacgcaaattttcctccacaaaagacagctttgtaggaccatttcaaaatatggcaaagaaacatattttggggtaaaatatttttatttccttctctatctgtcatgtgatgttatgccagagtcaggctggaaagtaaaccacattatagagggttaaataaaacccatctgatgagatgttacagtttagaaggtatgactccccaggccccttaaataggaatttgggcaagagagaaaaaaggtcatagtttagtccccgttttcgtaagtactactactatggttagtggggttaccatatatgtttaggtacccagcatagt

SEQ ID NO: 951190 - DNA, 586 bp, Homo sapiens; identical to SEQ ID NO: 945696

SEQ ID NO: 951191 - DNA, 659 bp, Homo sapiens
aatgcaaagaagtcacaaggagctgaatcagactgtaagatggattcctaacgtattcctatcaaagatcttgcaaaattgcccttgtttaatgagaagaatgatcaggagcattgttgtggtgaagaaggactccctggtgaagctttcctggaagttttactgtgaaagctttggctttctcaaaacactctaagaacaagtagttattatttttcttcagccctccagaaagtcaagaagcaaaatgcctcaagaatccccaaaacttttgccataaccttgactcctgattggtccactttggctttaaccagaccaccgtcacctcttggtaaccgttgctttgattgtgctttgtcttcaggatggtactggtagagccatgtttcatcttctgttacaattcttcaaagaaatgcttcaggatcttgatccaacttgcataaaattttcattgaaagctctgctgttgtcaggagctgatctggacacaacagttttggcacccattgggtggaaagcttgctcaactttaatttttcagtcagaattgtgtgagttgaaccaactgagatgtctgtggttctggctattttttgmactgttaatcgctagtcctctttaattagggcatgcacaagattaattttttcctc

SEQ ID NO: 951192 - DNA, 588 bp, Homo sapiens
ttgagccagagctgtcagctacacagagttccattagctgtgggaatcaatgttcagtcctaaaggagggtgctgcatggcatacygcagaatccactagaatcccatctaggcatcaggcactatataataactagtaggttgaattatacgaaattgctcgtgttcaactggttttacctccaaaataggcaatcgtatatgatttgatctaataacattactaaagtctgctatatcttacaaaatactttcatacaaatggctgtacttgatcctcatgtcaaccatgtaggatgggtgttcttatcaacagtttgttatatctgagaaacctaaggcccaaagaggcctgggccttgcccagtcatacatctggtaactttggagcttgttttagacacaaattctgacttcaaatccagcagcctttttctcacataatacatggaggaaaaaacgtctgtggccttgaatttctttctctcataagtcttactgccacatgacctcaaaatgaaccaaccatgcatcatatctccctttttcgtagttctaaccagaccctctcagccaaagaagattcca

SEQ ID NO: 951193 - DNA, 575 bp, Homo sapiens
ttctatatacaaccctatgttgtctgtgaactaaaacagctttacttttcgtttcaaaccttgatgtctttaatttctttatacaatgagcaaaagttaatgttgagcagaaatagagaagacagaaatcctcatcttattactgattacaagagaaaaacactgtctttcatcattaagtgtgatgttagatgtaggattctcaaagatgccccttatctcatggaggaaatccctctaattcctcttttcttaaaaggttttgtcaaaaatgggtgatgaattttgttaaatgttttgtctatatctattaagatgattgcgtggttttaatcttttagtctactaattgttaattgattttgagctgttaaaccactcttacattgctgggataaattccatatgccacaatgtttaatcttctttatatgttactggrtttatttggcttttttttttttttttttgagacagggtctcactctgttgtccaggctggaatgtagtggcatgtgatcacggctcactgcagtctcaacttactgggttcaaggaatcttcccacctcagcc

SEQ ID NO: 951194 - DNA, 761 bp, Homo sapiens
caggcatgcatcaccacacccagctatatgtatatatatactttttttttgtagagatgggggtctcactgtgttgcctggcatggtctcgaactcctagactcaagcaaaccttctgctgtggcctcccaaaattctgggattacaggtgtaagccactgtgcctggccaataatttttaaaggattttttttttttgtctaatttcataaagaatattggtctatagttttccttcttgagactttggtatcacagaaacgcaggccccataaaatgggtttggaggtgttccttcctgctttattttctggtagagcttgagtagggttgatattatttcatccttagtttatagatccaccagtgaaaccaacagggcttgggttattgtgggaaggttttttttttttttaatttatgaaactttgctttattcaatttgttaaacaagaactgatttaattattgcccccgccataacagtcatggaaaacatgtcacctgtttgaaagaacaatactattagttgcaaaatttaattgtaaggatcaagcagagattattggtctaaccaatccacattgacagctttgaagtgttcagatgctagttttaaaataaaggtgacaaatacyaatcacattctcatattactgttcaggatctacataagcttggttctggaaatagttcaatacacaaaggtatgagaataacactgtaatcaccggtgatcaaaccaaaggtgtaatttcaca

SEQ ID NO: 951195 - DNA, 593 bp, Homo sapiens
ggtggcggtgttagctcaagtgcaaggtgctggcaaatgcaggtctggttgccttctctgtgctctgcaaacaggagggatcgctcagtgttgcagaggatctgctgatctctcatagtgttagcacgagastgggcactggtgggggaagggctggctggctctgtgcccaccaaggctctctctgcaatggcagttggtggggatgggaggttggactgcactcctgcacactggtgggcaaggaaagcaaacctgcctctgcagacattgccagcaaagtgatgtggggagttgccatgggcctggggggatgctgcagtatggggagggagcaggtgggctggtgtgtggccataggggctgcccggctggagctgccagtcaggcatggtcttccaggcacagaagcaatggtgtgggccgccagggcactagagactgctctgcaagcaggtgtaaccaggctggggctcctagagagaccagcagaccaaggggtgctcaggttggaccagccccacctgatggggaagaccaccctgcagagatcatgtctgacagttcccctagggctaaagtcttctatggga

SEQ ID NO: 951196 - DNA, 687 bp, Homo sapiens
agtccctcccacctatgagcctgtaaaatcaaaagcaagttagctacttcctagataaaatggagatacaagcattgggtaaacacaccaactctaaatgggagaaattggccaaaacaaagaggctacaggccccatgcaaatccaaaatccaatagggaagccattaaaccataaagttcccaaatgttttcctttgactccctgtctcacatccaggtcacactgatgcaagaggtgggctcccacagctatgggatgctccacccctgtggctttgcagggtacagccccccttcctggctgcttccacaggctgacattgagtgtctgtggctttttcaggcacacagtgcaagttggtggatctaccattctgggggctggaggatggtggccctgttctcacagctccactaggcagtactccagtggggactctgtgtgaggtcttcaatcctacatttcccttccacactgccccagcagaggttctccatgagggcgccactcctgcaacaaacttctgcctggacatccaggcatttccatacatcctctgaaatctaggtgggggytcccaaactttatttcctgaattctgtgtgctcgcagacccaacagcacatgtaagctgccaagacttggggcttgcaacctctgaagcaatgaccagagctgcacttt

SEQ ID NO: 951197 - DNA, 609 bp, Homo sapiens
aaaaatcagtagcatttctatatgttaatagcaagccatatgaaaaataaagaaagtaatcccattaacaatagctacaaataaaataaaatacyttagaatgaacctaaccaaagaagtcaaagatttctaaaattaaagctataaaatattgatgcaagaaattcaagggaaaacaccagaaatagaaagatattttgtgtttatgtattagaagattctatgttgttaaaatgtccatacaacccaaagcaatttgtagattcaatgtgatccccaccaaaataccaatgacattcttcatggaaatacaaaaaaaatcctaaaattaatgtggaaccataaaagactgagaatatccaaagttattctgagcaaaaagaagaaaaccagaggaatcacattacctgacttctgattatactacaaagttattgtaatcaaaacagcatggtactagcataaaaacagacagactaatgaaacagaataaagaacgcagaaattacttccatacatctacagtgaactcatttttgacaaaagttccaagtacataccttaggaaaagggtggtctcttcaataaatggtgctggaaaaactatat

SEQ ID NO: 951198 - DNA, 743 bp, Homo sapiens
atccctccggtcctgggttttcctttattgggaaagtttttattactgattcaatctcactactcattttggtctttttagggtttctgtatttttagggttcaatcttggarggttctatgtgttcaggaatttattcatttcctctaggatttctagtttgtcagtgtagagatgttcatagtagtttctgattatcaattgtatttctgtggtttcagttgtaatgtctccttttttaaatttctgattgaattgtctctcttcttggtcaatctagctagtgttctatcacttttgtttacatttacagaaaacaaacttttcatttggttgattcttttttttggtctcaatttcatttaattctgctctgatcattgaattttttccttctgctagttgcagttttggttccctcttactcttctgggtccttgaggtgcaatgttaggttgttaatttgtgatctttctgtcctttggatgtataaatttattgctcaaaacttccctcttagtcttttcctatatcccagaggttttggtgtattgtgtctctttttattcatttccaaaagtttttaaatttacatcttaattttgtccttgacccaaagattattcaggagaagattgttgagttttcatgtgtttgtatatttttgagagttcttcttagaattgatttctagttgtattccactgtggtctgagaagtgacttgatatgataattaagatt

SEQ ID NO: 951199 - DNA, 544 bp, Homo sapiens
gctaacgggatgttgtgaagattaagtgcattatttcatgttacgtgtttagaaaggtacctgatgtgtaatgagtgttcaataatgtcagtgactagtataatttgtattatattatttcatttgttggtagcttgcttttcataaggtgatcatatatacacaatattcttcatcttactttattcatttataatagttttactttgtggaaattattccaaatcaactaatttaccttaagtcaatgtcttcatattattagatggcaaattattcagccattttccttgtcatgacattcacttatttctagtgtttattgtaaatgatgctacaataaacacctagctatgtatgtccttctgcatcggtttattttcccctttaaaataaaaaaaaaaaattggccgggcgcggtggctcatgactgtaatcccagcactttgggaggctgaggcrggcagattacctgaggtcaggagttcgagaccagcctgaccaacatggtgaaaccctgtctctactaaaattacaaaactta

SEQ ID NO: 951200 - DNA, 615 bp, Homo sapiens
ccaatgaaacaaaatagagaaaacaaaaataaagccaactgattttgacaaagcatacagaaacatcgactggggaaataacaccctattgaataaatggtgatgggaacattgaatagccrcacacagaagaaagaaactggatccctatctttcatcatacacaaaaatttacttaaggtgacttcaagacttaaatctaggtcctgaaacaataaaaactctagaagaaaaccggaaaaactcttctagacattggcctaggcaaagaacttataacaaagaccccaaaagcaaattcaaaaaaagcaaaaataaatcagtgggagctaatgaaaagaaaaagcttctccaaagcaaaataaatcatcagagtaaacaaacaacctacagaatgggagaaactatttgcaaattatgcctctggcaaaggactgatagatccagaatctacaagaaattgaaacaaatcaaagaaaacacaaataatcccattaaaaagtgagcaaacaacatgcatagacgtttctcaaaagaagacacacaaacaactaataaacagggaaaaatgctccacatctctaattatcagggaaatgcaaattaaagccacaa

SEQ ID NO: 951201 - DNA, 587 bp, Homo sapiens
gaaagaaaggagggaagaattttaaaaacctgtagctgtcccatattgtctaaagaggcagttattaccataaatccctctggtctctctcatgctcattcaggartgagatgttatgattaatcaatttttcagacagtaaattagacttaacaaattacttctataatgttcaaaaaaagaataataaaatagattgactgaatgttggttcccaagggaataaagatcatcagtatgcagttttatgatcatttgactgttggaggacaggagtaagattaaaacactcttcgtggtgataaaatgttactgcagttaacatctgaatgacaagacagggtgcaggcacgtacaccaataactactgttgtatgccaggcaccattttaagtgtgttgcattaattcactaatctaaacctcaaaaaaactttatatagccaggtctggtggtgggtgcttgtaatcccagctactcaggaggctgaagcaggagaatcgcttgaatccaggaggcggaggttgcagtgagccaaaatcgtgccactgtactccagcctgagcaacaaagggagactgtctcca

SEQ ID NO: 951202 - DNA, 592 bp, Homo sapiens
tgtggtagagtgcatatataatcccagctactgtggaggctgaggcaggaaaatcgcttgaacctgggaggcagaggttgtagtgagccaagatcaccctactgccctccagcctgggtgacaagagcaagactccatctcaaaacaaacaaaagacatttacacggccaacaaacatatgaaaaaaagtttattgtcattgatcattagagaaatgcaaatcaaaaccacaatgaggtaactatctcacaccagttagaatggagatcattaaaaagtctggaaacaacagatactggcaaggatgcagagaaataggtacacttttacactgttggtgggagtgtaaattagttcaaccattgtggaagacaatgtgccgattcctcaaggatctagaaccagaaataccatatgacccagcaatccctttactgggtatatacccataggattataaatcattctactgtaaagacacacgcacatgtatgtttattgcagcactatttacaatagcaaagacttggartcaacccaaatgcctgacaatgagagactggataaagaaaatgtggcatatatacgccat

SEQ ID NO: 951203 - DNA, 592 bp, Homo sapiens
tgtggtagagtgcatatataatcccagctactgtggaggctgaggcaggaaaatcgcttgaacctgggaggcagaggttgtagtgagccaagatcaccctactgccctccagcctgggtgacaagagcaagactccatctcaaaacaaacaaaagacatttacacggccaacaaacatatgaaaaaaagtttattgtcattgatcattagagaaatgcaaatcaaaaccacaatgaggtaactatctcacaccagttagaatggagatcattaaaaagtctggaaacaacagatactggcaaggatgcagagaaataggtacacttttacactgttggtgggagtgtaaattagttcaaccattgtggaagacaatgtgccgattcctcaaggatctagaaccagaaataccatatgacccagcaatccctttactgggtatatacccataggattataaatcattctactgtaaagacacacgcacatgtatgtttattgcagcactatttacaatagcaaagacttggaatcaacccaaatgcctgacaakgagagactggataaagaaaatgtggcatatatacgccat

SEQ ID NO: 951204 - DNA, 759 bp, Homo sapiens
ccctcctgtgctggggccccagcaccccccttctcagggcacacgctgccccatcttgcacctgcctctgtcatgtctcattctccccccagaccatgaatgttcatgggcagagacataatagggtccttggagatgatcaggttaagatgaggtcaccgggcacggtggttcacacctgtaatcccagcactttgggaggccgaggcgggtggatcaagaggtcaggagttcaagaccagcctggccaacatggtggaaccctgtctctactaaaaatacaaaaattagccgggtgtggtggagggtgcctgtaatcccagctactcgggaggctgaggcaggagaattgcttgaacccaggaggcggaggttgcagtgagccaagatcacaccattaactccaaaggttagtggttagtgcccactccagcctgggcaacagagcaagactctgtcttggaaaaaaaaaatgaggttatgaggtgggtcctgatcggacactgctgtgtccttatgaaagggggagtctggacacagacagcctcctaggagagcaccacacgatgataaaggcagaaaccagagtgatgcctctacaagccgagcaatgtcacagatcaccagaagccaggagactggcctaggacagagcaggagacagccagccctgccgaaccctcaatctcagagccccagcctcyagaactacaggacaataaccatctattgttacactgcccagtgtgcattgctttg

SEQ ID NO: 951205 - DNA, 597 bp, Homo sapiens
gtggataaagaaaatatggtgtatatatatataccatggaatactactcagctataaaaaggaacaaaataatgccattcaaagcaatctggatggaattggagaccattattctaagtgaagtaactcaggaatggaaaaccaaacatcgtatgttctcactcataaataggagctaagttctgaggacacaaagaatgatacaatggactttggggacttgggggaaagggtgggagtggggtgaggtataaaacactacacattgggctgggtgtggtggctcacacctgtaatcccagcactttgaaagaccgaggcgggtagattacctgaggtcgggagttcgagaccagcctgatccacatggagaaaccctgtctctactaaaaatacaaaattagccgggtgtggtggtgcatgcctgtaatcccatccactcaggaggctgaagtaggagaatcgcttgaacccgggaggcagaggttgcagtgagcagagatcgggccattgcactccagcttgggcaacaagagcgaaactccatctcaaaaaacaaacaaaaaaaaagamtacacactgggtacagtgtacact

SEQ ID NO: 951206 - DNA, 631 bp, Homo sapiens
agaattgcaacagagaaagagtaattcacacagagctggccactgttgtattattcaaatgagtctctctgagcattyggggatcagtttttaaacataatttggcccaggtgtggtggcgtacacctataattccagcactttgggaggctgaggtgggcagattccttgaggtcaggagttctacaccagcatgaacaagatggtgaaaccccatctttacatttcaacaacatggtgaaaccccatctctataaaatacaaaaaattagctgggtatggtggagtacacctgtagtcccagctagccactgcacctggccaacccattgatttagagtgaaataaatttatactatcacagttctgaaggtcagaggtccaaaatcaaggtgacagcagaaccatgcatctctatgaaggctgtaggggagaatctattccatgcctttatctgagctcctggtgctcccagcaatgcttggcacttattggcttgtagaggcatcacttgaatctctgcctgtgttgttgcacagtgttctcctgtgtatctcgcttcctgttgtcttccctgtgtgtctctgtgtttcttctccttttcttagaaaaggagaccaattagggctca

SEQ ID NO: 951207 - DNA, 595 bp, Homo sapiens
cagattggtccttgatttgatgagaggctgaagaccacatgtgactttgtcttgctatcctggtcttgtagaactcacyttttcacaatgaagactttttctcaaccgatgttgtacaatgtgaaatgtgtccaccctcttgcaggacaaatggcagacctgaagagacccatctggcaccacagccaattttcttcttttttttgagacggagtcttgctctgtcgcccaggctggagtgcagtggcgcgatctcggctcactgcaagctccacctcccgggttcacgccattctcctgcctcagcgtcccgagtagttgggactacaggtgcccgccaccacgcccggctaattttttttgtatttttagtagagacagggtttcaccctattagccgggatggtcttgatctcctgaccttgtgatccgcccttctcggcctcccaaagtgctgggattacagacttgagccaccgcgcccggccaccacaaccaattttcaacatgctgctgggtgtgagataatcagaaaagcatggagcataggtagacatttaatggtcttttgagtccaacctctacattttactga

SEQ ID NO: 951208 - DNA, 581 bp, Homo sapiens
taactagtgtattagtccattttcacactgctataaagaaatacttgagactgggtaatttataaagagaagaggttaattggctcacagttccacmggctgtacaggaagcatggctggggaggccttgggaaacttacaatcatggcagaaggtgaaggggaagcagacacaacttacatggctggagcaggaggaagagagagaagggagaggtgctacatacttaaaaaaatcagatctcatgagaactcactatcacaagaacaggaagggggaagtctgcccccatgatccagtcaaatcccagcaggtccctcttctaacattgaagattacaattcaacatgagatttgtgtggggacataaatccaaaccatatcaactggtatggtgcccttggtctggggctttttgcccagaagacagcggtgggaccatccatctcatgttcccttgacagtcttcctctgctgacttccccaggagcaggtctgttcagctagttttgtcccaagccatctgcacccaggttgctgggctactccaggtgttgtaagccatggggctccctcaggca

SEQ ID NO: 951209 - DNA, 556 bp, Homo sapiens
aacaccacctgtgcgtgtgcgccgctgaggacggcgggtggagcscatgccctgtgttcacgcgcacctatgactgctgagacccgggatgctacctccaccagtgcttcatttcatcttattcagatgaacacagcagggacccactcacgggttgggaacgggctcgattctgtgcctggacacaaagttagcaccgcagcaagcacgtgttccacctgcgagcggctcccgtgcggttctacaggggtgctgcgccccggcgggtcctgcacacactgctccagcgacacgttctgttctccaggcccctgcacacagccagtccatgtcgaagcttctgcgtcctgccccgtgccctctgatggaggaggaattaaacagggctcgagggcacatgggcatctaagagtcacagcacccggtgcaatgcaactgctcccagtcgacctgccactcgtgcccacaggctcagggcctgggactcagggccccacgtcaccctagggctgcccagccctcccgatccctccagcacctcacacaaacctcctgg

SEQ ID NO: 951210 - DNA, 565 bp, Homo sapiens
gacagtcatttttcttgtgtgttcttttttccattaggaagatgggtttcttcaaagcattatgctattttaaggcctcaaacatttccagcatttgcacagggttgctgtgagccttgacttatttgcagagagatgttgaactgagataaggctacttaataatacaccagttcttgctaaacacaatttctttccacatttcttagtgaaagccaagagcgagcactctctcatagaagccttagaagaatgttaccttatttttctagagaaggctacttgaaccttgagttatgcagaatggcttcaatgaatggattttaacattggtcaatggctagttttcaaaggctacaatttaagataaaacccacgaaaggggattaaaagaaattgtcaagtttccaacctgaaaataatcctgcaatataaatattttcatttcttcaattagtatgcaaaatagtatggagtttcctcaaaaaaaaaaaaaaaawaaactaaaaatagccaggtgtagtggctcacgcctgcaatcccatcactttgggaggccaaagca

SEQ ID NO: 951211 - DNA, 720 bp, Homo sapiens
ctggagcagctatgagaggtgtctgtcctgcctgcccagaggagagtgggactccgcagaggagtccgactgtggactctgccatttcgagtaaagaaagagaagagttatgactaggtcctctgaaaactctttccagtccctgaactccatggggatttgctctgctttttaagggagtattctggccgggcaaggtggctcatgccagtaatcccagcactttgggaggccgaggttggtggatcacctgaggtcaggagttcgagatcagcctggccacgatagtgaaaccccatctctactaaaaatacaaaaaattagccaggcatggtggcaggtgcctgtagtcccagctactcaggaggctgagtcaggagaattgcttgaacctgggaggcagagattgcagtgagccgagatcccgccattgcactccagcctgggcaacaagagtggaactccatctgaaagaaaaaagggagtattctctgtttccagaggtggactattaaagaattagtgcttcaaactaatgaaattcagacctttgttctgagataggaatcttgctcagtgactgtatttgtttgctagggctgccataacaaagcatcacagacagggtggcttgaacaatgcaactgtatttcctgcggttctggaggctgggagtctgagmtcaaggtgtcagcagggtttcttttgaggcctcttttc

SEQ ID NO: 951212 - DNA, 566 bp, Homo sapiens
ccatatgtgggtgtaagtgttgatgaaatcacatctttggccctctcagtcctactcactcgtgaaccctagacttgcataagcagccacctattaaatctctacctggatgccctggaagtacctacactccaacaggttcaagagagagctccttttcctgctgcatgagtgccagacctcatcatccctctaatgcctcgagctagcaacttggagccactgtggacattccccttctcagctcatatatccatccttattctcagcaccctggctggggtcctcatcgtctctcctgggctcttacaataacctcccaacgtcccttccagcttgtattaaactgtagcctccttgccaagcaagaacaaacagagataaagatgtcaatcaagaaagtaagtcaacagagagggggataactccagcraaggactgaaaacaaagattttccctcagactaccaataaaatggctatttgaaaactgaccagtgtatgagacagaagattcagaagatgtgaaagtttaaagcattgcccttcaggggctggaaagcctac

SEQ ID NO: 951213 - DNA, 636 bp, Homo sapiens
tccaagcttctgggccccaccacattcccctcatccagacactggtgcctgcagtggaagccacttgcagtacgtctgctccagtcacagcctcacacagagctggctgccctgccgcagcagccagcatgcttggctgtgtgcagcagccggaccccacgctcactcgctcacacacccctcgtcactgtgtgcctggcttgctcttggcaggcatgggatctgggccagtatcgcaagccgagtgcagcccgccaggtcaagtgaatggaacaagtccagcgggtgcgagcaaaactcaagcagaggcactgccagccacagagctttctggcttgtgaagtgacacccaaacgatcctgtgacactattatgatagttggaagtttaactttctcatacagctattatcccacagctcctcctctattcttccaacagagttatatcaaaattggcttaaattgatagtcagcatttacactgttatgactatgtaattattatgcaatattgagccacatrgtatgccatgattacatttttattctcatacaactttgtttttctgcagttagtaatcaaaaatattttaattcccatagctaattttaaaaaataatactgtctgtaccc

SEQ ID NO: 951214 - DNA, 592 bp, Homo sapiens
tacattgataatagtaattatatatagtgtgattacagcacatagataaataaaatgaattcagcaatgtcataaggaataagaaaagggaatttgaaatgctctaatataaggtacatgcactatacgtgaagtggtatagtgttatttgaaggtgaacttagattagttaaaaatgtatagtgcaaactctagggcaatcataaagatatttttaaaagaagtataactgatgctatagttcagatacttgaacctccaaacctcatgttgaaatttgatccccagtgttggaggtgggatctagtgggaggtatttgggtcataggggtgagtttctcatgaatatattaatgctctttattgttgggggtatgaatgaattcttattctgttagttcccataagagctggttgttttaaaaggcctggaaatcccctctcctggtttcttctctctcactctgtgatctctgtacatggtggcttccctccccttttgtcatgagtgcaagcagtctgagggcttcatcagaagcagatgctggtgmcttgcttcttatacagcctgcagggccatgagccagataaa

SEQ ID NO: 951215 - DNA, 618 bp, Homo sapiens
gctggtcagtttaattagtgagttaatcctataaattcttactgagtcgttattatattgaacactatgctagttgataatggtatacaggtggaaaaaaaagaccaaaaaactaatttcacttagttgagaagtgatagaagccagttgaaatatagttttgactaaaaagtaatgtatagaatattaaggcagatcaatgtaaatctgcttggaaaagagtctgcagtgtttctgaatacataagtataatagatgcattctccaatagacatcagcttccagaaggaaatggtccagttttactaataagtatgtatttttgacggccatgtagccacatggataaagatcgtggtaaaatcaagtatctgaaattgtgtcaccttttgcttaacatatttcagcctccccacccccccaacaaagtggtgccactcaccaatctttgtcattctatttaaggacactgcttttttttttttkcttttttttttgagacagagtctcactgtgtcgcccaggctggagtccaatggcgtgatctcggcccgctgcaacctccacctcccaggttcaagagattctcttgcctcagcctcccaagtaactgggatt

SEQ ID NO: 951216 - DNA, 554 bp, Homo sapiens
ctttttggactcagcccacctgcacccaggtgaaataaacagctttatygcccacacaaagcctgtttggtggtctcttcacaccgacgctcataaaatttggtgccctgactcggatcgggggacctcccttgggagatcaatctcctgtcctcttgtcctttgctccatcagaaagatccacctatgacctcaagtcctcagaccgaccagcccaagaaacatctcaccaatttcaaatccagtaagtggcctctttttactctcttctccaacctccctcactatccctcaacctctttctcctttcagtcttggtgccacacttcaatctctcccttctcttaatttcaattcctttcaattcctttggtagagacaaaggagacacgttttatccgtggacccaaaactccggcgctggtcacggactgggaaggcagccttcccttggtgtttaatcattgcagggaggcctgccttggtccttcacccttagcagcaagtcctgctttcctggggcaggggcaagtacccctcaaccccttctcctt

SEQ ID NO: 951217 - DNA, 628 bp, Homo sapiens
acagaagtaagcttcagaaggtgggtaataacaaactcctccgagctaaaggaatgtgttctaacccaatgcaaggaagctaagaaccttgaaaaaaggttagaggaattgctaactagaataaccagtttatagaagaacataaatgacctgatggagctgaaaaacacagcatgagaactttgtgaagcatacagaagtatcaatagctgaatcaatcaagcagaagaaaggatatcagagactgaagatcaacttaatgaaataaagcatgaagacaaggttagagaaaaaagaatgaaaagaaatgaacaaagcctccaagaaatatgggactatgtgaaaagaccaaacctatgttacattggtgtatctgaaagtgataggcagaatggaaccaagctggaaaacactcttcacgatattatccaggagaacttccccaacctagcaagacaggccaacattcatattcaggaaatacacagaacaccacaaagatactccttaagaagagcaaccccaagacacataatcatcagattcwccaaggttaaaatgaaggaaaaaatattaagggcaaccagagagaaaggtcaggttacccacaaagggaagcctatcagac

SEQ ID NO: 951218 - DNA, 590 bp, Homo sapiens
agagccctgtgaggcatgcagcattactgtctcatttttcagataaggaaactgaggtctagaaaggttagttgcccaacatcacatgcctgctaagagaaagagctttaaccggattcccmgttcattccatactgattcttttaatgacttcacttgcaaaggttgtggggaggatgaaattagacaactcatcttaacaccatagtatctgatacttaataaatactcaatcactgtgagttataatttgtagtcattgtcaaccactatgcttataataaccagtttctgttgagtttgctgcattgattaaggccaataatatcatagggtcaggtgatgtcatttttttctttaaaattttttttcattcataattaaaaaaaaatagagataggtcttgctatgttgcccaggctggtctcaaactcctgggctcaagtgattctcccgcctcagcctctcagagggctaggattacaggtgtgagccaccagtgcctggtctcattttcttttctatttagaatgagccaggctgggtgttaaccacccatgtcaggctgatgtacccttctctaatgattt

SEQ ID NO: 951219 - DNA, 713 bp, Homo sapiens
tgaacctgtaaaatgaaaaacaagtcagttacttccaagacaaaatgggggtacaggcattagatacatgctcccatttcagttgggagaaatgggccagaataaaggggctacaggtcacatgcaagcccaaactccagtggggcagtcatgaaatcttaaagcttcaaaataatctcctttgactccattcctcacattcagggcatgcttatgcaaagtgggggctcccacaaccttgggaagctctcaccctgtggctttgcagctctgatcccatggctgctctcatgggctttgcagagttcagccctcctggctgctctcattgagtgcctgcagcttttccaggtgcacagtgcaagctgttaatagatctaccattctggggtctgaaggatggtggccctcttctcacaaccccattagtcactgtctccggtggggactctgtgtgggggttccaaccccacatttcccttctgcactgccctagcagaggctctccatgagggctttgcccctggcacagacttctggctggacatccagtcatttctataaatcctctgagatctaggcagaggatcacaaagctgractcttctcttctgcacacccataggcccaacatcatgtagaagccaccaatgattggggctttctgaagcaatggcctgagctgtacattggacttttttagccacagctag

SEQ ID NO: 951220 - DNA, 607 bp, Homo sapiens
tggaaatgtacaacatgtacttttttctgtctggtttatttcactttgcctatgtttttaargtttattcatgtggtgcatataggaatttctacactatgttttgctgatgcattcattcatcgatgaacacttaggttgtatccacctttcgactattgcaaattatgctgctgtaataaacattagtgtacaaaatctgttgaagttattgttttcaattatttggtggtatatacctcaaagtgaaactgctgttcgtaaggtaattctgtgtttaatttttttgagaaactgccagattgttttccacaatgactgcacaattttacattctcattggcaatgcacacaggttccaatttctccacatcctcaccaatacttcttattttcatctttttaatattaatcatccaaatgggtagtatctcacagtttttatttgtatttccctgatgattagtgatgttgagcaacttttcatatacttatcggccatctgtctatcttctttggtgaaatgtcagttcaagtactttgtccatctttgaatcagctttttttgatttttttgttattgagttgtaggagtactttatttatt

SEQ ID NO: 951221 - DNA, 488 bp, Homo sapiens
attttcttttttaagaggtagggtcttgctgtgttgcccaggctggtcttgaactcctggactcaagtgagtctctggcctcagcctcccaaagtgctaggattacaggcatgarccactatgcccagccccttccttgtgtttgtttcccttcactgttattatttttagtagtttaatttacttatattagttataattaatttttatcattagtaaccttccttttatagagaaaactagacagtagtgaaaagtagacaattgtgaattgtctgtcatattccaacattccgtagcaggctagcagtttatgaatacatcatttcataattcgtatatgcctcttcataatacaatttttcagtgtgataaaaaaaatgtttatttacagatccaagtatctttagtctctttgtaaaaataagaaatcaagaccgggtgcagtggctcatgcctgtgatcccagcaccctgagagtccaagac

SEQ ID NO: 951222 - DNA, 634 bp, Homo sapiens
cagactatggtcagcatgaaggaggacagaatgaaggtggtgagcaaacttaaggagagttgcttattagactgagatatrtatttttgcctttgtgtggaaaggaaaagatttccacttatttgctattgaaaagtgaaatcagcacaggactataagcggtgtttcctggtgctgagatacctaagtactcacattgagatttttaagttagtctaaagtcttttattattattattattattattatactttaagttttagggtacatgtacacaatgtgcaggttagttagatatgtgtacatgtgccatgctggtgtgctgcacccattaactcgtcatttagcattaggtatatctcctaatgctatccctcccccctccccccaccccacaacagtccccagagtgtgatgttccccttcctgtgtccatgtgttctcattgttcaattcccacctatgaatgagaacatgtggtgtttgcttttttgtccttgcgatattttactgagaatgatgatttccaatttcatccatgtccctacaaaggacacgaactcatcattttttatggctgcatagtattccatggtgtatatgtgccacattttcttaatccagtctatcatt

SEQ ID NO: 951223 - DNA, 627 bp, Homo sapiens
cctgttcctttcaaaattctctctttgtctttgacttttgacagtttgattgtaatgtgtctcattgtaggtcttttgcaaattatccaacttggagttctttgagcctcttggatttgtatgtccatttccttctttaagtttgagaagtttttggtcattatttttttaactggctctctgcccctttatttttctcttctcgttcttgcactttcataatgcaatcattggactgcttcatggcatcctgtaagtctcttaggctgtcttcactcttcactccttttcccttttgctcctctgactccataatttcaaatgactagtcttccatttcactgattctttcttctgcttgatgttattgaaactgcctttgcaaaaattataactgaagaaattataacagcaaaagacatcagacttaatcaactccatcttgcttctagcatttaaactgtccttgttcattcctggcagtaggatgaactaattttgggatggtattcagttyatggttttgctctcaaacaaagttgatagtagccatttcccgaaaagatccccttcttgcctggaaccagtctgcctttgcaggataaacaaattagccataacattaga

SEQ ID NO: 951224 - DNA, 414 bp, Homo sapiens
cacacctgaagtgagtactgcactgggtcttacccaaggcccctggtgagtactgcctgggtatgtactgctgatgtttattcaaggcccaagggctctttagttagcaggtgatgaatcttgccargtatgggtccctcccttcaaggtattggattatcttctttcctggggtatgtctagaattgtcatctgagagctagggtctgaaatggggtcttcaggactctgcttggtgctttattttactgtggctgaaatgatattcaaattgcaagacaaggtcctctttactcttccctctcctttcctcaagtggaaagagtctctcctggagctatgagcaatgctgcctgggattggggtggaggtgacacaagcactcctttggccatcccagcaggtgtctcacaa

SEQ ID NO: 951225 - DNA, 752 bp, Homo sapiens
ataaagcaggcagaacgtggaaggacttgacttgctgagtcttctggccttcatctttctctygtgctggatgcttcctgccctcgaacatcagactccaagttcttcagcttttggactcttggacttacaccagtgatatgctaggggctcttgtaccttcagccacagactgaaggctgcattgttggctttcctatttttgaggttttgggactctgactggcttccttgctccgcagcttgcagatggccaatagtgggacatcactttgtgatcatgtgagtcaattctcctactaaattccccttcatatatatatctatcctattagttctgtccccctagagaaccctaatactgatttctcagacacagcatgactccatgaaatttatgcctacttgctctaaacccaccaattacaactccctgagggaaacctgcttggaaaatgccctggaccccagtaaaagcctcagcccacaggtcacttgtactctttgccctgttccccacccactagttgactgtgcatgtcctagatggctccccacttcctgttggccctgggaggcatgctgccctcttctctctggcatctgtaagtaataaactgctgttatttcttgtgttttgttgagttgcctcccgtgtctcacctgactgatacactcgaccctaacttgtttgtcaggattctcctagagagtggctatctgctattttggtaggaacaaactggacacag

SEQ ID NO: 951226 - DNA, 636 bp, Homo sapiens
ctacagaaagttagtatactcacccaaaggtaagttgtgcagagggagatggcaaatttataacttctcagaaacacagtaatgataagtaaccaaggacttccaccaaagtcagtcccacgatgacgatggtcagccagagtattgataacctggaataataatagttgaaataatgaaaaggtcaatgacactgacaatatttcactcagaaagaatcatccttagaaaccgtcaacctcctccaaaaggtaaccacatccctcagatatcaccgtgggattccactgctacaaaaaagaacagaagttagagaagtctcatgtttttcagatggctggtagtgtttttaggcattgcaaatgtggggtgttgtctttcttggtataaagcagggatatccaatcttttgacttccctgcctatattaaaagaagcaaagttgtcttgagccacacataacatacactaacactaacaatagctgatgatctaaaaaaaaaaaattttttttkttttttttttttttgagacagagttctgctccactcagtcgcccaggctggagtgcagtggtgcaatctcggctcgctgcaacctccagctcctgggctcaagccattctcctgcctcagc

SEQ ID NO: 951227 - DNA, 636 bp, Homo sapiens
acaagtatacctctacagaaagttagtatactcacccaaaggtaagttgtgcagagggagatggcaaatttataacttctcagaaacacagtaatgataagtaaccaaggacttccaccaaagtcagtcccacgatgacgatggtcagccagagtattgataacctggaataataatagttgaaataatgaaaaggtcaatgacactgacaatatttcactcagaaagaatcatccttagaaaccgtcaacctcctccaaaaggtaaccacatccctcagatatcaccgtgggattccactgctacaaaaaagaacagaagttagagaagtctcatgtttttcagatggctggtagtgtttttaggcattgcaaatgtggggtgttgtctttcttggtataaagcagggatatccaatcttttgacttccctgcctatattaaaagaagcaaagttgtcttgagccacacataacatacactaacactaacaatagctgatgatctaaaaaaaaaaaattttttttgttttttttttttttgagacagagttcygctccactcagtcgcccaggctggagtgcagtggtgcaatctcggctcgctgcaacctccagctcctgggctcaagccattc

SEQ ID NO: 951228 - DNA, 591 bp, Homo sapiens
cttcctgtcttcttctgagtcctccaaactgtttcagcttctccccattacccagttccaaagttacatccccattttcaggttatacttatagcaggacttcattctactggcaccaatttaatgtattagtctgttttcacactgctataagaaatacccaagatttgggtaatttataaacaaaagaggtttaattgactcacaattctgcatggctgaggaggccttaggaaacttatagtcatggtggaaggtgaaggggaagcaaggcacatcttacatggcagcaggagagagagaaaagagcacaataggggaagtgccaaacacttcacacttttaaaaccatcagatctcatgagaactcactcactatcatgagaagagcatgggggaaaccacccccatgattcaatcacctcccaccaggtcccttccttcatatgtggggattacaatyggagatgagatttgggtggggacacagagccaaaccatatcagttagtttggctcaaatccaggaatgattaagcacagtttggaggttaaaggcacgctgagtgttggttaaatcagatctctatca

SEQ ID NO: 951229 - DNA, 588 bp, Homo sapiens
ttttcttgccctttactgtcccttttcttgtccttcctgtgagggatggatgaacagaggccctcagagcgacatccagagtaggaggaaggcagttagaaggccctgaagtacaaggtrgagcaaaggaagcctcccaagcctcaatttctgcaaatcgggggtgatgctgggccaggattaaggtgagatgagtgaggtcagatcctgcaagtacagggaaggatggtgtctttattttaaacgttgataatctgttcaacatgaatttttttgcattaactttgatttttttaaattacaatgaaatactgtcctcattattgagttttggggtgcctctttagatttggggcttggggcaaatgtttcccttacctcgctccagtctcagccctagaaaatagtgccaatctcatggggattgtttcaaatatatatatatatatttttaagatagagtctcactctgttgcccaggctggagtgcagcagtgccatatcagctcactgcaacctccgcctcctggcttcaaaggttcaagcaattctcttgcctcagcctcttcagtagctgggattacaggt

SEQ ID NO: 951230 - DNA, 574 bp, Homo sapiens
tgaagatgatgtatgagctgtcaggtccattttctaggtggaaagagtttatctgtgaacacagccaagactgaagaaattagaacaaagaaaaggtgagatagtgtcctgatgatttatttcatatgttcccctagatccagccttgcctgaatgcagatgcaccattataccatgtcaaatgcagaacagtagattgaactcaggtgctcatccaagcaaagaggtggcttggggttagtgtgtgtgtgtgtgtgtgtgtgtgtgtgtgtgagatgtgcctggcggaaggcatgcatcttgcaaatgcatatttagcagatattatacagcagtgtcatagattcagactggggaactccagagggcagaaccagaattcaagggttggaggacccatgagggaaattttggctttttctaagaaagagatttctggcaaagtgcctcaaagtagaagggttacctcaagagagtgagtcccccatcagttccccaatccctggaggataccaagtggagatgtgagtcayggatgatgtatcagtcaaaactcttctggaaacttctagta

SEQ ID NO: 951231 - DNA, 577 bp, Homo sapiens
tccaggctggcatcaaactcctagattcaagtgatcttgtttcctcagcctcctgagtagttgggactacaggtgcacaccactgtggygggctccaaattatgctttttctttatgagaaaaatagaattctttattaaggtggctggtttagaatactaaagaaaatacgacaggactaaacaaaataatgccgatgcgcagtctctggagacaggctgcctgattgaatcctggccccaccacttactgagttgtgtgaccctaagcaaaatgcccccccactttttttttgagacaaggtctcgctgtgttacctaggctgaagtgcagtaacacaatcataactcactgcagcctcagactcccaggcttaagcaatcctcccacctcagcctaccgagctgggactacaggtgtgcattaccagacccatctaatttattttttgtaaagatgaggtttcataccctcttcacacctaagtgctatttctttgcaaattatagttctaacacaaatccaaagggattttgggaaactgatcggaagtactgtattcatgtttggctcaaag

SEQ ID NO: 951232 - DNA, 622 bp, Homo sapiens
agctatctattgccacattcactccatccgtctatccacccatccatgcatccatttctccactcatgcattcacctacccatttacacattcactcatttaattcagccattctctctttccctctctcccttatcatttgttttttcaacaattccgtttcaacagttgccacaatcttggctgcataaaaaaaccccgtacttattatatcacagtttctgtgggtcaggagtctgagcatagcttagctgggtcctctgctctgggtatcacatggctacaatcaaggtgttggtcagatggtattttcatctcaaggctgtactggggaaggatctgcttccaacctcatttagagtgttggcagaatccatttccttacggatgcatgattgagcatcatggctttttgctggctgttggtttgaggcagctctctggtcctagagtctgaagtttctggagtcctccttcatccctttgccatatggggttcctcaacgtgactttttatttcatcaagccagcaaggaggctctctcagctatgggaacccagtccctcttttaagagtttttacccgaatragtcaggatgatctccctttaaattaattcaa

SEQ ID NO: 951233 - DNA, 621 bp, Homo sapiens
tgagatttgaaggaaacatgcacaaatctgtaaaacatagaccttcgctttatttttgtaagtatcacctgccaccatgttttgtaatttgaggtcttgatttcaccattgtcggtgaagaaaattttcaataaatatgtattacccgtctgaagcttaaagatactgtgtaacggactctttccacttgtcccatttctctttgatgacggtctggaatgggttctgaatcaacctgctaattttgtgttcactgagacgtaattcacataacattctccactttatagtgtagagcgcagtggtttttggtgtattcacaaggctgtgcaggttccggaacatttccatcaccctagagcaaaaccccactcccaccagcagtcacccgcgttcatcacctgcccctaggctgctggcggccgggctgctctgtggatcggcctgttctggacatgtcctttcaatgggatcgcacagtacgagtgggtccttggcgtccaactcttttcactcagtgtcgtcttttcagggttcattgaccagcgctgtagcaggtatcaagactcattcctgcwtgtggctgagcagtgtcctgtggtgtggctagaccagttgtgt

SEQ ID NO: 951234 - DNA, 600 bp, Homo sapiens
agcctttcttgcctccactggcgtgggggccagggacagcctccgtgtcctgtctaggcaagctcgtgtgcccagcaccgaagacctcctcctccctttccagagagaaggaaggtgacaygctgcagtcaccagggaccacatggcctcttcatgctcagctccctacaagaccccaggctgcctgccttgagggggagatttcagggggacgctgccaccaattataatagtagtagtagttacaagaacaacaaagacagcatgtggctgacatttccatacttctgtggagtgggctgggtgccaggcatgatctcaacacttaatacacgttaacaaattgaatccttatttaatcgggttgttgtaagtactctgagggccagagcgtttctcaccgccctttatagtttgcaaggtggttgaaccagctcttgcaggctgggctggatcagagcccaggccgccctgctccagagccttctctgtgccccaagtgctgtgagaggtcctgctgagacccctctgccgggtggaacgtgcagtgtccgttccagggtcccccacttctctgtcgcagcgctagtggcaggcggg

SEQ ID NO: 951235 - DNA, 776 bp, Homo sapiens
gttctcattgttcaattcccacctatgagtgagaatatgaggtgtttggtgttttgtccttgcgatagtctgctgagaatgatggtttccagcttcatccatgtccctacaaggacatgaactcatccttttttatggctgcatagtattccatggtgtatatgtgccacattttcttaatccagtctatcactgatggacatttgggttggttccaagtctttgctattgtgaatagtgccgcaataaacatacgtgtgcatgtgtctttatagcagcatgatttataatcctttgggtatatacccagtaatgggatggctgggtcaaatggtatttctagttctagatccttgaggaatcaccacactgtcttccacaatggttgaactgttccatcactttttcattttctttttcatccatttcctcagggaagagtcaccagctcatctgctcttccccttctggtgggaatcacattaagagatgaccattcattgagccccactgagccaggaacagtgctgaggacatttcattcattctctctaattctcacaataattctttactgtacattctcattgtcatttgataggtaaggaaacaggcttacagccatgctcagacttgcccaacttctgcagctaaagtggtgagtctgagatttgaacccagatctgagcctctgaggctgagccygtctactactccaggttgcttatccagtaatattctgtggcaggaggaaaggtgaagagtcagaagatgga

SEQ ID NO: 951236 - DNA, 382 bp, Homo sapiens
cttctatgtctttctctcttcatatgcatctaaaagaagtgagttaggaactcgaacaatgaakaaatagccttggccaaatccacaagttcatggggtacctttcctgttctccacattaccactggcaaaggttttattcattgtactggtaggtcctcttttccctagtccccagtagtgacttcttcactgccttcatagcctctgctaatagtctcctcattgacctataggtcttcacctatcttctaatctcagagccaataccacgggtttaaaatttttgttacagttgcaccccacttctggtaacaatttctgtttcattatctaccactgcattacaaaccattttaaaacacagtggcttaaaacagca

SEQ ID NO: 951237 - DNA, 564 bp, Homo sapiens; identical to SEQ ID NO: 945916

SEQ ID NO: 951238 - DNA, 581 bp, Homo sapiens
tcttcctgtcttcttctgagtcctccaaactgtttcagcttctccccattacccagttccaaagttacatccccattttcaggtatacttatagcaggacttcattctactggcaccaatttaatgtattagtctgttttcacactgctataagaaatacccaagatttgggtaatttataaacaaaagaggtttaattgactcacaattctgcatggctgaggaggccttaggaaacttatagtcatggtggaaggtgaaggggaagcaaggcacatcttacatggcagcaggagagagagaaaagagcacaataggggaagtgccaaacacttcacacttttaaaaccatcagatctcatgagaactcactcactatcatgagaagagcatgggggaaaccacccccatgattcaatcacctcccaccaggtcccttccttcatatgtggggattacaatyggagatgagatttgggtggggacacagagccaaaccatatcagttagtttggctcaaatccaggaatgattaagcacagtttggaggttaaaggcacgctgagtgttggttaaatcag

SEQ ID NO: 951239 - DNA, 557 bp, Homo sapiens
gagcgccggccctccagcacctcagagtctgatgaggcagtgagcacaagatgagtagagggaaggcagctagacagataaaggaagccaagcccagccctgggtagaggcagcagtggggaaggtgtgtctggaattggtgtgtgtaaaggtacaaaacggaacagcctcatgagaaaagacaagtttttgttgttgttgttgttgttgttgttgttttgagacagagtctctaactgtcacccaggctggagtgcagtggtgcgatctcagcttactgcaagctccgcctcccgggttcacgccattctcctgcctcaacctccccggtagctgggactacaggcagccgccaccatgcctggctaattgtttttgtattttttttttttttttagtagagacggggtttcaccgtgttagccaggatggtctcgatctcctgacctcgtgatctgcccaccttggcctcccaaagtgctgggattacaggygtgagccaccgtgcccggccgaggaaagacaggtattttgaggaaaggaaaggaaacagcgca

SEQ ID NO: 951240 - DNA, 501 bp, Homo sapiens
acattgatattttgtgtatttttatgtcaatattacacttcaactttaataacttgagtgtatttcaacaagtgttaggatacctttttcttatagcttttattttttcaggtgaaatttaatataatcttgtcaacttatcttaaaaattctattgaaattttcactgaatgaataacttaattgagagattcatcaggttgagtcttttcatctacacatacagtatgtctttccttttcttttttttttttttttttttttttttggaaaaggagttttgctcttgttgcccaggctgaagtgcaatgtcatgaatcttggctcaccacaacctccgccccctgggttcaagggattctcctgcctcaacctcccgagtagcagggactacaggcgcatgccaccatgcctggctaattttgkatttctagtaaaaatgggatttctccatgttgatgaggctggtctcgaactcctaaccgcaggggatcgcccacc

SEQ ID NO: 951241 - DNA, 461 bp, Homo sapiens
ccctccaagcccccactgtggtggttgccattgtagctcccttgggggagggcctacagtatgacttgcttgtcattccttgggtgttcaatgcatagtmcccacggttgactgttcataggggaatggccagggaaggaaccctcctcaggggacatatgtactgtctgtgtggcatgttatgagctcccccgtgacttttgcatggagacgggactcaaaggaaccatggggagctgagaaagtatggtaccatctcccagggcaaaagctcatggtgaccacgttgttatccagggatgaaagtttagcttgtattttgcctgagggacgtgatttacctctgttagtacctgtgcctgctctatcattttggctgtaggttaacatgctccaactgcattgtggactgggcccacacctacgctgaagtgaccaatgtttccaactctttgatctgt

SEQ ID NO: 951242 - DNA, 547 bp, Homo sapiens
caggtatggggatgaacggtaacctgccgtgatgaatgttgcttgccccaacacccctgaaggcgagggaacagaaaacctggctgtggccatggaccctccaagcccccactgtggtggttgccattgtagctcccttgggggagggcctacagtatgacttgcttgtcattccttgggtgttcaatgcatagtccccacggttgactgttcataggggaatggccagggaaggaaccctcctcaggggacatatgtactgtctgtgtggcatgttatgagctcccccgtgacttttgcatggagacgggactcaaaggaaccatggggagctgagaaagtatggtaccatctcccagggcaaaagctcatggtgaccacgttgttatccagggatgaaagtttagcttgtattttgcctgagggacgtgatttacctctgttagtacctgtgcctgctctatcattttggctrtaggttaacatgctccaactgcattgtggactgggcccacacctacgctgaagtgaccaatgtttccaactc

SEQ ID NO: 951243 - DNA, 640 bp, Homo sapiens
aaatttattaagtactcaaaaactagatgtaactagaaatctgaaaacaaaattcagtttgggtttctgtttatactcatatttatattatctagggcagtttcattaaattaaaatgcggtgtgaaaatttagttggtaacaaattacatcttgctttttctttttatttttttcttttgagacggagtttcgctcttgttgctcaggctggagtgtaatggcacaatctcggctcactgcaacctctgcctcctgggttcaagcaattctcctgcctcagcctcccgagtagctgggattacaggcatgcgccaccacacctggctaattttgtatttttagtggagacggggtttctccatgttggtcaggctggtctggaactcccgacctcaggtgatccgcctgccttggcctcccagagtgctgggattacaggcgtgagccaccgtgcccggccttacatcttgtgttttaatgaacagaataaaatggtgagacctcacaagcaatggaagyaaatactatttcacgaaacatttattctagttacacacaaattggctctgggttgctaagtacaatgtattttgtattgttggctacagtttaaaaaaagaagtaaaaaagtcattgat

SEQ ID NO: 951244 - DNA, 548 bp, Homo sapiens
acttgagccattagaagggattctcaagctctctttagctctagtttatttcagacttagaactgaagagatccatttgagccactgggtgyagtttcttgacataagtaagaatctatctggacactttcatatattccaaacttgtgaatatcactataaccattcatttcctaaacttgaattgacaccaaccatctcaaaaaaaaggctgttttgcggactaaatacctcaaaacttcactaaaatgctgatgacaggtacctgggacaactcacttatcacctgaagtgctcccttctgccccacagcctcactgccttgaatctgtgctaagttgctaaatatcttacgaaatactaaattactgaactcgcgataaagtaccgaatatcttgaacctttgaaggcatttgggaatagtcagtactataaatgttaaaactttgggtctcaaaagtaaactgcatcggaatgggatattattaactgggaaatgaaggttcttttcttccaaataagaaaatataacaaaatctaaacaaag

SEQ ID NO: 951245 - DNA, 568 bp, Homo sapiens
atcaatgtggatactggtctcgtgccatttaggctacttggataaaaaagaaaaaagaatcttgtccaccttcagaaagggaaaagtggcccttcctgtaccagtkgtcagtgtaaccccttcgaactagtaataaccaatccccttgatccttgctggaaaaaaggggagcgtataacccttgaaatcaagggggttggactggatcctcgagtaaatatcatggtttgaggagtttataaacgctctcctgagccagtatttcaaaccttctatgatgaactgaatgcgccagtaccagaaattccaggaaaaacaagaaatttgtttttgcaattagctgaacatgtagccaattctctcaatgtcacgtcatgttatgtatgtggaagaactgtaatgggatatcaatggccatgggaagcctgagaattagtacctacagacccagttcccaataaattcctgactcaaaagaatcaccctgataacttctgggtcctaaaagcctcaatcattagacaatactgtattgcaagagtgggggaggacttcactcttcctgtgg

SEQ ID NO: 951246 - DNA, 568 bp, Homo sapiens
atcaatgtggatactggtctcgtgccatttaggctacttggataaaaaagaaaaaagaatcttgtccaccttcagaaagggaaaagtggcccttcctgtaccagttgtcagtgtaaccccttcgaactagtaataaccaatccccttgatccttgctggaaaaaaggggagcgtataacccttgaaatcaagggggttggactggatcctcgagtaaatatcatggtttgaggagtttataaacgctctcctgagccagtatttcaaaccttctatgatgaactgaatgcgccagtaccagaaattccaggaaaaacaagaaatttgtttttgcaattagctgaacatgtagccaattctctcaatgtcacgtcatgttatgtatgtggaagaactgtaatgggatatcaatggccatgggaagcctgagaattagtacctacagacccagttcccaataaattcctgactcaaaagaatcaccctgataacttctgggtcctaaaagcctcaatcattagacaatactgtatwgcaagagtgggggaggacttcactcttcctgtgg

SEQ ID NO: 951247 - DNA, 556 bp, Homo sapiens
aatgcaacacaatggggaaaaggcagtctcttcaacaaatggtgctggaaaaactgggcatcccatgccaaaaaawacatctagatacaggcctcacaccctctacaaaaattaacttgaaatggaagtaaatgttaaatgaaaacctataaaattcctagacaataacccacagaagaaaatctagattatcttgggtatggtgataactttttagatgcaatgttgaatgcatgataaatgaacaaaataattgataagctaaactttcactaaaataaaaaacttgtgtgctgtaaaagatgtcaacagaatgagaagacaagacatacattaggagaaaatgtttgcaacacacataactgataaagaactgttattcaaaatatacatagaactcaaactcaacaagaaagtgaaaaccccaccttaaaatggaaaaaaaagctgaacggatgccttaacagagaagatgtacagatggaaaataagaatggaaaaatatccttaaaatcataaatcatcagagaacagcaaattaaaaaagaatgaggcg

SEQ ID NO: 951248 - DNA, 414 bp, Homo sapiens
tactgaattggcaaaagctggaagcatttcccctcaaaacccgcaaaagacaaggataccctctctgaccactcctattcaacatagtgttggaagtcctggctggtgaaatcagacaacagaaagaaakaaagagagtaagtcaaactatccctctctgctgatgacatgatcctatatctagaaaaccctatagtctcagcccaaaggctccttaagctaataaacaactttgactaagtctcaggatacaaaatcaatgtacaaaaatcactagcattcctatacatcaacaatagtcaagctgaaagccaaaccaggaacacaatcacattcacaacagccacaacataaaataactgggaatacagctaaccagagaggtgacagatctttacagaaagaactataaaa

SEQ ID NO: 951249 - DNA, 691 bp, Homo sapiens
atcctgatgctgcacatagcaacaggactctggacccaaaycacgaaaccatttttttctcctaggctttgaggccacttgttacttttaggctgcaaggcctgtgatgggaggggatactgctaagatctctgacatgccctggagacattttccccattgtgttggcgattaacaattaaatcctcgttacttatgcaaatttctgcagctagcttcaatttctaccaagaaaatgggattttcttttctattgcatcatcaggctgcaaattttccaaacttttagctctgcttcctttttaaacataaattccaatttcagatcatctctctcaagttaaaagtgccacagatctctagggcagggcagaatgctgccagtctttttgctaaagcatagtaagagtgacctttgctccagtgccagataagttcctcagctccatctaagaccacctaagtctggatttcattgtccacatcagtatcagcattttggtcaaaaccactcaacaagtctctaggaagttccaaacttcccacatcctactttcttcttctgagccttccaaactgttccaacctttgcccattacccagttccaaagttgcttccatattttcaagtatctatttatagcagcacccaactctctgtggtacaactttactgtattagtctgttttc

SEQ ID NO: 951250 - DNA, 496 bp, Homo sapiens
acaaaatgggcaaattaggatgagacttaaaagaagcagaaggataagaaaagtacagaaggagagaacaggatgagttatggaaaagtgaaaaaaaataaccagatggtgtggaggttggcagaattcatttgttttaagtacaatgtatagcctgaactttcattggctttggtgagctccatattgccaatgcaatgtttgcttgcatttatgaagtttccttttctattgattccagaaatgaatatgagattaaataccaataatgttgtaaacttcaaaccataggtaagctgtagatttttataagtaatgtaattcactgaaagaatgcatattactaagaagcttcaatcttaaaataaaaagtaaacaataaagaaaaaatagaacctttttaaaaatcatttatgttcattwttatagaggatcacgagttttgcttcctttaagggtctaaatcattataatccttcctttactttagagcaga

SEQ ID NO: 951251 - DNA, 600 bp, Homo sapiens
attgccccagcactgccgccaactgtcctcccctgccaccccaaccaccactacagtctattcagcrcagagcactggaagaatctcatctcagtcaaagcacaaagtcttgacattaacctgaaagatcctacatgacccaactcccctacgtccttgacctcattccctacaactctgtctcacaaatggctgccctaattgtcttaattctaacatagtcctttttataaataatatttagatttttcagccaatggaaataaaaggctaaatctctgaaaaatgtcaaagattccatttctgatattagatgaagacaagagggggaagtaaatgagatcctttttggagtagaagagagaaacaatttccctataccttaaaagaaatagagcggtattctttgagctttatgctataataagctgtcactctttttaataatttagtgtattgacttattatgagagtggtatatataagaaaattttcaaaagtctcttttgcagtaaaaaatactatctttatttttaatattgtttaaatttggaggccctacttcaatattgcaccactacttagagtactttcatccta

SEQ ID NO: 951252 - DNA, 555 bp, Homo sapiens
tcacaacaggccaacaaaagtgtcatctggtaaggagcaragcttttaacaggcatagataactgaagaaaaaatatcatgagcacaaaagtcattgatggagaatatttgtaagggaacatcatacctctatacctatgatctctacaatccatctaacctagtgtttacagaacgcatagaacagttgtgaggctgaaatgacttcaattgaaacattatttcagtcggtcactgggtgatatatacatatacttattttactacttgcctgacttgcaggcaaaaatgtgtgagtgatgtattttgaaaatatcctggaaaatattttttaaagtgtctttaaataattcatcatcgtattattactgttgattgcctttctctttgtccattatggagtatattaaagcttcttaattaatgttttaaaaattctacatcaacaatgacaattagttctaaaattgtattagagtctgaagaaatgtgatgtatttgactatcctatctttttgtgcaaattttattttggtagttgtccccaactgtaat

SEQ ID NO: 951253 - DNA, 555 bp, Homo sapiens
tcacaacaggccaacaaaagtgtcatctggtaaggagcagagcttttaacaggcatagataactgaagaaaaaatatcatgagcacaaaagtcattgatggagaatrtttgtaagggaacatcatacctctatacctatgatctctacaatccatctaacctagtgtttacagaacgcatagaacagttgtgaggctgaaatgacttcaattgaaacattatttcagtcggtcactgggtgatatatacatatacttattttactacttgcctgacttgcaggcaaaaatgtgtgagtgatgtattttgaaaatatcctggaaaatattttttaaagtgtctttaaataattcatcatcgtattattactgttgattgcctttctctttgtccattatggagtatattaaagcttcttaattaatgttttaaaaattctacatcaacaatgacaattagttctaaaattgtattagagtctgaagaaatgtgatgtatttgactatcctatctttttgtgcaaattttattttggtagttgtccccaactgtaat

SEQ ID NO: 951254 - DNA, 555 bp, Homo sapiens
aaatctctggttctaaggaaagatgagatggagatacaaaatgcatggcttttcagtttatagataatatttaaaaccatggaactagatgcaatcaccaaataaatgwgtgttagtaacaaagaagaggttcagggactgaactttcgagtactcagaaattctgaaattagggaaacaaaggcaactagaaaatataattaaagagaaacagtcccagaagtgcaaagaaatccaagagtggcaccctggaaagcaagtgaaaaattgcattaaggagaaaatggtctgctatgttaaatgctgctgatacaggtcagtaagttaagaacttattggcctttgcctttagcaatttggggtcatttataatcataaaaaaaattaaaaaaaaaacagtttccatgaagtattggggaaaaaacctgattggaatggatttacaaaacagtagaagaaatattggtacataatatgtaaacattcctttcaagatgtttggctataaagcagtaggcagcaaatttcctttttaaatggctggttagtaaatat

SEQ ID NO: 951255 - DNA, 577 bp, Homo sapiens
tattcagccttaaaaaggacattttgacgtatgcaacaatatagatgaaccttgatgacattatggtaagtggaaaaaaacaaacacaaaaggacaaatattatatgattctacttatatgaggaataggcaaatagaaagcagaatagcggttaccaggtgctggggaaagggttgaatggggagtttttaatgggtacagatagtttctacttgggatgatgaaaaagttctggaaatggacagtagtgatggttatacaatattgtgaatgtactcaatggcactgaattgtacacttaaagatgtctgaaatgataaattttgttatatatagttaccacaactaaaaagtgaaaaaagatttatattgtacagtattgtgagtctttttacttttatataaggaaataaaattaccattttaaaaatttgtttcttatcttcaacatcatgttcttttttttttttttcttttytttttttgaaacaagagtttcactcttgttgcccaggctaaagcgcattggcacgatctcatttcactgcaacatctgcctcctgggctcaagtgatt

SEQ ID NO: 951256 - DNA, 577 bp, Homo sapiens
tattcagccttaaaaaggacattttgacgtatgcaacaatatagatgaaccttgatgacattatggtaagtggaaaaaaacaaacacaaaaggacaaatattatatgattctacttatatgaggaataggcaaatagaaagcagaatagcggttaccaggtgctggggaaagggttgaatggggagtttttaatgggtacagatagtttctacttgggatgatgaaaaagttctggaaatggacagtagtgatggttatacaatattgtgaatgtactcaatggcactgaattgtacacttaaagatgtctgaaatgataaattttgttatatatagttaccacaactaaaaagtgaaaaaagatttatattgtacagtattgtgagtctttttacttttatataaggaaataaaattaccattttaaaaatttgtttcttatcttcaacatcatgttcttttttttttttttcttttttttttttgaracaagagtttcactcttgttgcccaggctaaagcgcattggcacgatctcatttcactgcaacatctgcctcctgggctcaagtgatt

SEQ ID NO: 951257 - DNA, 577 bp, Homo sapiens
tattcagccttaaaaaggacattttgacgtatgcaacaatatagatgaaccttgatgacattatggtaagtggaaaaaaacaaacacaaaaggacaaatattatatgattctacttatatgaggaataggcaaatagaaagcagaatagcggttaccaggtgctggggaaagggttgaatggggagtttttaatgggtacagatagtttctacttgggatgatgaaaaagttctggaaatggacagtagtgatggttatacaatattgtgaatgtactcaatggcactgaattgtacacttaaagatgtctgaaatgataaattttgttatatatagttaccacaactaaaaagtgaaaaaagatttatattgtacagtattgtgagtctttttacttttatataaggaaataaaattaccattttaaaaatttgtttcttatcttcaacatcatgttcttttttttttttttcttttttttttttgaaacaagagtttcactcttgttgcccaggctaragcgcattggcacgatctcatttcactgcaacatctgcctcctgggctcaagtgatt

SEQ ID NO: 951258 - DNA, 623 bp, Homo sapiens
aaggctccagggtgtgagcaggcatgtctgagagtgcgtgtgcctaaagatagagaataaatgggacagtgcagggaaatgaggcccaaggagcatgaggggtcaaaatatataggatcttggaggattctggatttatattttgattgcagtgggaagatatttaaggtttttttttttctttgagacagaatctcaccctattgcccaggctggacttgacctctagggctcaagggatcctctcacttcagcctcccaagtagctagaactgcaagtgtgcaccatcaatcctggctaatttttgtattttttgtagagacgggcaaaacgatgttgtccaggctggtctcaaactcctggtttcaagtagtctgcctgccttggcctcccaaagtgttgagattataggtatgagccaccacatgtggtctggtattgaaggttttaaggaggagaaggaagggtttggatttaagatccagaaagattttctggttactgtgtgaaggataggctgctgtaaatagaacaagaggggaaactgcragtgtagatgacagactgttgcagttacccaggtaagagatggtggtggctggaataaaaattttagcagtag

SEQ ID NO: 951259 - DNA, 825 bp, Homo sapiens
ccagcaatataccttcactgtcgtacctcagaggtatatcagctctccggstttgtgtcataatcttgtttgcagagatcttgatcacttttcccttccgcaggatatcacaccagttcattagttcattacattgatgacagtatgtgaccggatctagtgagcaagaagtagccaacacactggacttattgatgagacatttgcatgccaggggatgggaaattaactaaaattcagggaccttctacctcagtaaaatttctagtggtccagtggtgtggggcctctcaagatattccttctaaggtgaaggataagttgctgcatttgccccctcctacaaccaagaaagagggacaacgcctagtgggtctatttggattttggaggcaatacattcctcattctggtgtgttactccagcccatttatcgagtgacctaaaaggctgccagttttgagtagggtccagaacaggagaaggctctgcaacaggtctaggctgttgtgaaagctgctgtgccacttgggccatattacctagcagattcaatggtgcttgagatgtcagtggcagatagggatgctatttggagcctttagcaggcccccataggtgaatcacagcagaggcctctaggattttggagcaaggacctatcttctgcagataactactctccttttgagagacagttcttggctggttactgggctttggtagaaactgaatgtttgactatgggccatcaagtcaccatgtaacctaaactgcctgtcataaactcgtgctttctgacccatctagccataaagtggggc

SEQ ID NO: 951260 - DNA, 817 bp, Homo sapiens
tacctcagtaaaatttctagtggtccagtggtgtggggcctctcaagatattccttctaaggtgaaggataagttgctgcatttgccccctcctacaaccaagaaagagggacaacgcctagtgggtctatttggattttggaggcaatacattcctcattctggtgtgttactccagcccatttatcgagtgacctaaaaggctgccagttttgagtagggtccagaacaggagaaggctctgcaacaggtctaggctgttgtgaaagctgctgtgccacttgggccatattacctagcagattcaatggtgcttgagatgtcagtggcagatagggatgctatttggagcctttagcaggcccccataggtgaatcacagcagaggcctctaggattttggagcaaggacctatcttctgcagataactactctccttttgagagacagttcttggctggttactgggctttggtagaaactgaatgtttgactatgggccatcaagtcaccatgtaacctaaactgcctgtcataaactcgtgctttctgacccatctagccataaagtggggcatgcacagcggcattccatcatcaaatcgaagtggtatatatgtgatcaggcttgagcaagtcctgagggcacaagtaagttatgtgagcaagtggctcaaatgcccatggtccctgctcctgccatctagctctctttcccccagcctgcacyagtggcctcatggggagctccctgtgaacagttgaaaaaggaagagaagacaagggcctggtttacagatggttctgcatgatacg

SEQ ID NO: 951261 - DNA, 592 bp, Homo sapiens
caaattcatgttgaagtatcctaacccttaatgtgactatatttggaaacaagactttcaggaggtaattaaagttgatgaggtcatagggtggcctcaaaagaacaggaagagaaaaagatctctccctctccacacgcatgcaagaaggaaaggctatgtgaagtcacaacaggcaggtggccatctgtatgctagggagagagcctcgccagaaactgaaccatgctggcaccttgatctcagagttccagccttcagatctctgagaaaataaatgtctgttgttaaaaccacccagactggtattttgttatggcagtctaagctgactaatacagacggtaggtctgctctaaccaggtaagcccttaaaagggactggcccttcctgaaagaagagatttgaagcatgagagggcctataaagtgggccacatggcaagaaactgcaggtggcctcaatggggctgacagcrgccctcagaccactatcagcaagagaacaagaggctgagtcctataaaccacaaggaagtgaactctgccaaaaaccatgggagcttaaacaaggaccctgagctccagaaaa

SEQ ID NO: 951262 - DNA, 545 bp, Homo sapiens
ccgattccttttcaggttttcatctctagctcacccaggccagacagtcctcacacacatgcaccactccaaaacttgtttcaggaagtcatttaattgcaaacactttgctctttggagttacacaaatgagtctatgtttttttctgttctgtggcatatttgcattttaatcctcatttaattttgtctagaagtactacattttttattgggggtttcggaaactgactgggaaatgtgtctcacctcccctcagggagggggctaacaagcactatttattatcaccatcatcatcatcctcatcatcaccagtagtttcaaagctcttacatgggaccatcctttccaataccctaaaatggcaactacaaactgtcaaccactgccctcattcataagattcatggtcactatccmcaatatcaaagacatggaatcaagccagatggtcattcacaatggataggattaaaaaaaatgtggaatgtgtacatgtacactgtggaatactatatagccataaagagaacaaaatcatg

SEQ ID NO: 951263 - DNA, 628 bp, Homo sapiens
tactgggaaagtagtaaacatttgttgaattaatatcttaactaataacttatgttccctcctactcttcacttacttctagaccactttacttcctctctcctcccacaaaattacaacttcttataagtacatgctttgtgactataccattagcttcccttccattttattcatatactggcctcttcatcactctcatcatattttgaataacatagcacttgacttgctgtcatccttgtttgcaatgtggatattgaatccaagcagaaagtccagccaacaccctagcctcacagctccttcctcccttggtcccaacaactttcaagtcttaattgtaggttttctactctgtgagcaccatttcttatctctccagcttgtatattctaatcactcactgcaacaattctttgatgccagtggtattaataattaattgtttacaccattttttttgcccttgataatagccttcctcttctttycttcttcccctgagtagatgccaaggtcttcctcacagagtttcaatttcttgcccctctcttcttccacatttcttgcctgtcaaaaccccaactctggttaaacctaattctctgcctgctttgcctacatc

SEQ ID NO: 951264 - DNA, 847 bp, Homo sapiens
ctaagcccatcactgcccggggccggtggtgctggctggccrctccaagtgcgggacccgccgagcccacacccacctggaactcacagtggcccgtgagccccacgtgcagccccagttcccactcccgcctctccctccacacctccctgcaagcagagggagccggctccgacctcagccagcccagaaaggggctcccatagtgcagcggcaggctgaagggctcctcaagtgcagccagagtgggcgccaaggctgaggaggtgccaagagtgagcgagggctgccagcacactgtcacctctcaatcccccctcaaacaggacaccccaactgctgttgggaatttggctgatgactgctctagctacttcctgctggataggggcgatgaaggggccctgcagttgtactgtcctccagaggggagctttctaggccagtaaaagtgccagcgggttggtccaggggtcctcagtagaagttgttagttgaactcatttagggctccatttgtaagaccatctgtagcttgatggcctcaattctagaggaatagcttaaggagactaaagagacaatttaaaagagatatgaatatacttagattggattaagatttagagatgaggggtgaagtaaattatctatcttgagttccttttttagaaaggtgatctaaaatactatctgagcataatcacttagtgacaccatggaggaggaactagccaggtggttcaatgaccataataaggactatgaagctgtatctgggtgaaatacaactgcattaattcagatttggatggatttactaatagctcctagtctatcaatacct

SEQ ID NO: 951265 - DNA, 847 bp, Homo sapiens
ctaagcccatcactgcccggggccggtggtgctggctggccgctccaagtgcgggacccgccgagcccacacccacctggaactcacagtggcccgtgagccccacgtgcagccccagttcccactcccgccyctccctccacacctccctgcaagcagagggagccggctccgacctcagccagcccagaaaggggctcccatagtgcagcggcaggctgaagggctcctcaagtgcagccagagtgggcgccaaggctgaggaggtgccaagagtgagcgagggctgccagcacactgtcacctctcaatcccccctcaaacaggacaccccaactgctgttgggaatttggctgatgactgctctagctacttcctgctggataggggcgatgaaggggccctgcagttgtactgtcctccagaggggagctttctaggccagtaaaagtgccagcgggttggtccaggggtcctcagtagaagttgttagttgaactcatttagggctccatttgtaagaccatctgtagcttgatggcctcaattctagaggaatagcttaaggagactaaagagacaatttaaaagagatatgaatatacttagattggattaagatttagagatgaggggtgaagtaaattatctatcttgagttccttttttagaaaggtgatctaaaatactatctgagcataatcacttagtgacaccatggaggaggaactagccaggtggttcaatgaccataataaggactatgaagctgtatctgggtgaaatacaactgcattaattcagatttggatggatttactaatagctcctagtctatcaatacct

SEQ ID NO: 951266 - DNA, 710 bp, Homo sapiens
agtcactatcagattgtgtttgtgataattcactgtcattctccaagatccatctgtcttctacaccagccaaatagacaagttgaataaagatgtggtaggtaggccaggtacagtggctcacgcctgtaatcccagcagtttgggaggccaaggcaggtggatcacgaggtcaggagatcgagaccatcctggctaacacagtgaaaccccgtctctactaaaagtacaaaaaattagctgggcgtggtggcgggcacctgtagtcccagctacttgggaggctgaggcaggagaatggcgtgaacccgggaggcggagcttgcagtgagccaagtttgcgccactgcactccagagcctgggtgacagagggagactccgtctcaaaaaaaaaaaaaaaaaaaaaaaaaaaaaaaaaagatgtggtagaactcacatcttacttccttcaggtctttggtagtggcaccaatctctgaaatttctccaggcatgcattgtgctttaaatcagcaagcagtatatggtgccgtttcttccttagccgtttcattccttatcctgagataagggttttgaaagtgggagtgatttctcctattgtcattcctagtattccayaagagaaagttttgatttaaccccaactttggccctctccattccaaagagaggactgcttccaccaataggtacaacaatgtttac

SEQ ID NO: 951267 - DNA, 645 bp, Homo sapiens
cacttggaaaattgggtgactctcaccctaatactgtgatttccaacggtcttagcaaacggcacaccaggatattgtatcccacacctggctcggagggtcccatgccgatggagcctcgctcattgatagcacagcagtctgagatcaatctgcaaggaggcagcaaggctgggggaggggtgcccaccattgctgaggcttgagtaggtgaacaaagaggccaggaaactcaaactgggtggagcccatcacagctcaaggaggcctacctgcctatgtagactccacctctgggggcagggcacagccgaacagaaggcagcagaaccctctgcaaacttaaatgtccctgtctgacagctttgaagagagtagtggttctcccagcacggagtttgagatctgagaacagacagactgccccctcaagtgggtccctgacccccgagtagcctaactgggaggcaccctccagtaggggcagactgacacctaacacagccgggtacccctctgacacaaagattccaaaggaaygatcaggcagcaacatttgctgttaagcaatattcgctgttcttcagcctctgctgctgatacccaggcaaacagggtctagagtggacctcctgcaaactccca

SEQ ID NO: 951268 - DNA, 585 bp, Homo sapiens
ccaggaaacaggccctcaccagacactgaatcttgatcttcaacttctcagcctgcagaactgtgagaaataaatttctgttgtttataaaccacccagttaatggtatcttgtcatagcagcccaaatggactagggatgctgctgaacatcccagagtacgcaggacggcccccgccacagagaagaatctaatttaaaatgctgatagtgccgagggtgagaaactctggcctaaatcatctctgatagagatccccaaattatgataaagcaataaccattttagtccaagtgtgtccttcacataagactaaggagtggaagagtggagctctgcaaattgcattgtttaaaaatgcagtcagaccctactttggaacattctgcccttactggtaatactaattatgaacatatagattaagtctccagataagaattaaaaggatgttctggccaggcgcggtagctcacgcctgtaatcccagcaccttgggaggccgaggcggktggatcacctgaggtcatgagttcgagaccagcccagccaacatggtgaaaccccgtctctactaaaaatac

SEQ ID NO: 951269 - DNA, 581 bp, Homo sapiens
ctcatatttttgcttttcagccattctttcttcttccttgatattccagtattcctttttamataatgtctttccattttaagaacttcctttacccatccttttaaagtaagcctgttggcataaaattctcttggtgttcctcatcaggtggcgttcctcctccatctgagaacgtcttgttttacccttcatttctgcaggatatttttgctggacatagaactctgagttgacagttctttttattcagctcttgaaaatactgtgctatttccttctggcttctattacttctgatgagaaatattctgtaatttgagttgtttccctcataagtaaggtgttgtttctctcttgccgctttcagtattttttgtctttagtttcagaagtttgattaaatgtgtcttggtgagaatttctttgggtttatcctgtttggtatttgtcagcttctcgaatctgtaagtttatcctttttactgaatttgcagaatttctgaccataatttctttgaataagtttacagctccacctggacatggattctaatgatatgaatgttatatttgttttt

SEQ ID NO: 951270 - DNA, 571 bp, Homo sapiens
atgattgatagcatatactcagacatattagaattttaggaattccatacaatttttgaacatatattaataacattcattaaaatataggctgaagaaagttaaacattatttsttatttggcaatgctttgcatgtaacttaacatgtcaaataatcctgtttacctctcttttggatgcttcaagggccctctgtagcatcccaaagttagaggtcaaaaaagacttatttttgaagtagaaatttgattttggtattggttacagctcagggtttgccttatttgaatatgatttgaacagttggccacagttgattggccaaaactcagtgattggcacaagagtaggctacagtctatgtacaacccatttaagttatacttcatgatgtacagagaaacttttaggctgaccttaaaatatgtaaggaggctgctttaggctaaatttgatttaataatacttggttttatagaaagaaacttctaatatttgtacatgtaaaagaaaataaaatttcaggactccctaaattaattatgccaagagggaatgcttttcattca

SEQ ID NO: 951271 - DNA, 584 bp, Homo sapiens
tgagggggaagtaaaaaaaaatcatacgactttgttgttttccttacaaagctcacaatgtaggkatttgtcagtttgttaagtcaaaatagcaacacggtgtggaaaatcaaagctgacctttgcttggagccacgagaagaaagggaaggagttggggtgaaggtctctgaggcttcaagaggatgggcatgctttttcaaaaatcatgaaaaacagaagggactgagcctgtgtgcagtatataactttttgcaaaaaaaatttgtccactgtctgttttttcttgtgtgtagccttaagtgttgtacataaccttttataattagaggtggacaaattcccagtacctaggacaaagtctgacacatagttggtgctcaataaatgttagttgaataaataaatacatcttattagccatcacttggacttgacacaagaaggtatggattgtttttctagataataagttccttttaaaggtatagatggggtgcttataacaccccttgaactcctaaattatgcttggtacattgtagtatatctaatttaatctcacagaagccacgcaaaggagt

SEQ ID NO: 951272 - DNA, 570 bp, Homo sapiens
cttaattccttcttcaaaatcctttcacagtagtagctaaattagtgtttgattaaataaccagaggataagaagcttgggrgaatttctgtagaatctattctgcctgctacagtgaataatagtttaatctccatagtaatgtaaacactgactattgatttggctatatattgtatatcaaaatcttgagaagataggaggaagggatgcctttgtataaaatcttaagggttttgaggggagttgggtaagtgtagaaaacctaaactactctcatatagaatttagaaacatggaaccatatttctaaatttctcttaggcagtactaagagtactaagtaatttctcttaggcaatactaagagaaattagctaagagtgtactaagagaaatactaagataaattagctaactgagttaacagtgcatgactctaaaaattgggacaataataatgagagtttagggacaggagaatacctttttataattataaaccatgtaataccattttatttttataaattaattacctttgttactttgataaaaattagaataaaa

SEQ ID NO: 951273 - DNA, 607 bp, Homo sapiens
agcatacctgtattttataatttttcacttgaccaccttctctggttcaagtcatcattttgtacaattttagcaaacttagcaaagtctggtgctgcaaccagagtmtgccctgtgcttttggaaataatggaaaaaataagcagttgtggcagaaatttgaaaagtaagggttttttgttccttttttttcttctttttttttcgtttcttcgagcctctgggcactttgaaatattctcaaaatagggaaaaattgtatacatatttggaatattcatgtttttagttagaccctcctttatagcaccatccattctgccttacgtatttggcattgatgtagttttaaaaataaatttgatgttgacttgtaagtattaaaatttaatctacttccttccggggccataattctctactttgttgtccttggttaccttggcaatcccattgctgtcataagcacagggttctaactgcaggggtggggtgagcatctgggcctgcaggctcccaggggccctgccgtccatgggaccagacccctcctagcagcaacagtgggaaccagggctacgtgctttttggcaagaatgtgattctg

SEQ ID NO: 951274 - DNA, 641 bp, Homo sapiens
gaattcctagcaggagtgtatyaggggttcattttctccaaattgtcctcaacacttgtcattatctgtctttgtgataaaagtcatcatcttactggaggtgtcgtgttatctcattgtggttttgatttgcattttcctgataagtagtgacattgagcatatttcttatgcttatttgcacactccatttgcatatattctttaaaaaactatctgttcaaatctgttgcccattttattttatttgagacggtgtttcactcttcttgcccaggctggagtgcaatggcacaatctcagctcacggcaacctctgcctcccgggttcaggtgattctcctgcccgagcctcccaagtagctgggattacaggcacctgccaccatacccggctaattttatattttaagtagagacagggtttctccatgttggtcaggctggtctggaactcccaacctcaggtgatctgcctgcctcggcctcccaaagtgctgggatttcaggcatgagccatggtgcccggcctctattgcccattttaaaaattattttttattgttcagttgtaaaagctctttatatatactggatactagaccctcattagatatatgacttgcaaatattttttctct

SEQ ID NO: 951275 - DNA, 592 bp, Homo sapiens
aagccattcttccacctcagcctcccgagtagctgggattgcagrtgcccgccaccgcgcccggctagttttttgtatttttggtaaagacaggatttcaccatgttggccagacttgtctcaaactcctgacctcaggtgatctgcctgccttggcctcccaaagttttaggattacaggcgtgagccaccatgcccagcccattttatgttatatgttacctttccccacccccagaagaatccctaggcttacacaggctgctaaagaactcatgacatccaggaaattaagaacccctgggtcatactctctgtccatggctccacttggtaggtcgaattcatagtctgtttctccttttctttctctggactggcttattttgcttgtcagtttgcacagtaaacataatctcttgagagctgtgctaagcattttctcacatgccattcctgcatcaccgctgcaaggttttactctaagtaggttccactctattccttggagggtctccatcaggactaagcccaggtgccacagtggtgaccttgtattagcacaccctctgttggcttctccatcatccct

SEQ ID NO: 951276 - DNA, 771 bp, Homo sapiens
tcgggaggctgaggcaggaggattgcttgaacccaggatgtcgaggctgcagtgagctgtgattgtgccaakgtactcaagcctgtgtgaaagagtgaaaccttgtctcaaaaaaaaaaaaaaaaaaatgaaatttttcaggatggcactgtagtttaaaagttctgaattcattgaattatttgtagagtcttaattgtatctaaatcttagaaataaacctgatgctttttatatgtctttcttggactatactaaattattcatgtgatcaatcatttgtgtctaaattaaaatgccagagacaaggaaaatgaaacgttggcaggtcagagttggaatattgtattttaaaattatgttgttattttgttttatagaaaaggttttattatttttgccttcttagtattctctgcactaatttttttaaaattttgcctcttttaaaatttgccttatagttttattagcacctaagagtttacaaatataaataattctaagctactattctctgtttcacaatttacttatttagaaacattatgctgctttgaggaactagaaccattttgtgtaagaatttttattttctgggctccttataccattcctttattgaagtgtttaaatttttaaacaaactcaaaactataatgaaacacttccccacaaagtacctacatcattagcatatatgtaattatatctacataataaacatgatcataaagaagaacacttctaaatgttttgtctaaatgtaac

SEQ ID NO: 951277 - DNA, 771 bp, Homo sapiens
tcgggaggctgaggcaggaggattgcttgaacccaggatgtcgaggctgcagtgagctgtgattgtgccaatgtactcaagcctrtgtgaaagagtgaaaccttgtctcaaaaaaaaaaaaaaaaaaatgaaatttttcaggatggcactgtagtttaaaagttctgaattcattgaattatttgtagagtcttaattgtatctaaatcttagaaataaacctgatgctttttatatgtctttcttggactatactaaattattcatgtgatcaatcatttgtgtctaaattaaaatgccagagacaaggaaaatgaaacgttggcaggtcagagttggaatattgtattttaaaattatgttgttattttgttttatagaaaaggttttattatttttgccttcttagtattctctgcactaatttttttaaaattttgcctcttttaaaatttgccttatagttttattagcacctaagagtttacaaatataaataattctaagctactattctctgtttcacaatttacttatttagaaacattatgctgctttgaggaactagaaccattttgtgtaagaatttttattttctgggctccttataccattcctttattgaagtgtttaaatttttaaacaaactcaaaactataatgaaacacttccccacaaagtacctacatcattagcatatatgtaattatatctacataataaacatgatcataaagaagaacacttctaaatgttttgtctaaatgtaac

SEQ ID NO: 951278 - DNA, 619 bp, Homo sapiens
cagacccttctcctatccctgttgtcctcctctttataaccctgcctcttgggaatcatcccaaaagctcactcactaccagcctaagtaccsagggggccaaaacctataaagaacacagaacccaactctccaggcaatataaagggtgaaagagtaaagccaggagacccataggaagaaaaaaaaaatcttagaagagagaaaaagagacagagagacaaagagggagtcaaagagacagagacagagagtcaaagagagagagagaaaaagagacagacagaagtagtaaagagaaagcaatgtaccctattcctttaaaagccagggtaaatttaaaacctataattgataattgaaagtcttctctgtgaccctataacactccaatactgcctgtaaagaagccagacgggtcacaccggtgagtgcaagaccttcgagctattaatcagatagtccaaactacccgccctgtcattatagtaatagacttaaaagatgccttctgggcttgtccgttagcagagaacaactgggacctatttgcctttgagtgtgaagaccctcactccagtcaaaaatagcaatactgatagacattctgaccccaagg

SEQ ID NO: 951279 - DNA, 560 bp, Homo sapiens
attgtttaaatatacaatttgaataaattccacggtctaagtcaaattrcctatgataacccattgtttatcagtgctatgcacttaatttggaaaaacaactggtattcaagaggatataagtctaatgttaattaagcatgggctcatggaaaaccaggatgactaccttgtttttcctgagtcctgaaacttttattattaaaagttctgcattccatgactcatcatggagaagataaagtaatccaaatagaatatattggtgtggtaacttacaaattactaaaatagtttataaccaatggttggccccatattcctgggaaaacagttaaagcttcaggtacatttggttacctggtgggacatttaaacattttataaaggaatttcattcaatggttattttcaatgcatgttttctgattgtataaaagctttcccatgcaagagggttgatgttataacagattattatactacagtgtattttcactagataaatagctttttatgatttagatcttctgagtacatcagagaaagactgtccttga

SEQ ID NO: 951280 - DNA, 649 bp, Homo sapiens
ttgatcttgggcaagacttaattctctgagcctcagttccctsaactgtaaaatgtgaaaaacaagagtatctaacatataagttgttgtgaagattaaatgaagtaaagcatcttaagtgtttaccatagagtctggcacataatgtgttcaagaaatgggaggcaccttcatcaaatgtatcatggttagtatactttttacttgcttagaaaatagggagaagaggttggcagagattggaaggagagagagagaataacctgcaaatccatcattttaactactaggcttctcaagaaggctaggtcctaaaaacaggtatgagtagatgttctttaggctcacagagcactgggtgtgatcaaagcatgtggtacccgggcacaacagtctcgcacgagaggctcttgtgcctcccacctgcctgttagtcaggatccttataggaaccagacaacacactcagactttctaatgaaggtactatttacagatgtataggtagaattaagaaaaccaacactgactcatctaggaaggtaccatcagtaatgtaatgtcacctttagacctaaaggagcaaagggaggaagtggtgttatggggaaccacccaacagaagcactagtcaaagctggatgtagcg

SEQ ID NO: 951281 - DNA, 521 bp, Homo sapiens
aaataaagggaaagagtacaaaagagaggaattttaaagctgggtgtccaggggagacagcacatgtcagcaggttccatgatgccccgagccgtaaaaccagcaagtttttattagtgattttcaaaaggggagggagtgtatgaatagggtgtgggtcacagagatcacgtgcttcacaaggtaataaaatatcacaaggcaaatggaggcagagcaagatcacaggaccacaggaccggggtgaaattaaaattgccaatcaagtttcagccatgaattgtcattgataacatcttatcaggagacagagtttgagagcagacaactgatctgaccaaaatttattaggcgggaatttcctcgtcctaataagcctgggagcactacgggacaccggggcttatttcatcccttatctacagycgtaaaagacagatgtccccaaagcggccatttcagaggtttccccttagggatgcattctctttctcagggatgttccttgctgagaaaaagaa

SEQ ID NO: 951282 - DNA, 480 bp, Homo sapiens
tgcagacttaaacatccctgtctgagagctctgaagagagcagtggttctcccagcacggtgtttgagctctgagaacagagasactgcctccttaagtgggtctctgacccctgagtagcctaactgggagaaacctcccagtaagggccaaatgacacctcataatccaggtgcccgcctgagacgaagcttccagaggaaggatcaggcagcaacatttgctgttctgcagcctccgctggtgatacccaggcaaacagggtctggagtgggcctacagcaaactccaacccacctgcagctgagggtcctgactgttagaaggaaaactaataaacataaaggacatccacaccaaaaccccatctctaggtcaccatcatcaaagaccaaaaggtagataaaaccacaaatatggggagaaacgagagcagaaaagctgaaaattccaaaaatcagagctcctcttctcctacaa

SEQ ID NO: 951283 - DNA, 433 bp, Homo sapiens
tggtgctggaacaactggacactcacatgaaaaaaaatcaaaacttagactttacacacaccttttttgaatgttmactcaaatggattctatgcttaaatataaaatggaatactataaaactcctagaagatgatgtaagagaaaatctagaagatctagggtatggcaatgactttttgcatgcaacaccgaggcacaacccacaaaagaagaaagctgatgagctgaactttattaagattaataacttctgtgaaaggccagttctcagtcaaagatcagtggttgccagtggttagggataaataagtggagaatagaggagttttaggtcagtgaaatgactctgcatgataccataatggtggatacatgtcactatatatttgtccaaatcaatagaaagtaaaacgccaagatctaaccctaa

SEQ ID NO: 951284 - DNA, 559 bp, Homo sapiens
cagacattcacagaattggtaccaatctgatcgacactatttcaaaagatagagaaagagggaatcctccctaaatcattctatgaagccagtatcaccctgataccaaaaccagggaagtacataaaaaaaaaaaaacaaaaactacagatcaatacccctgatgaaagcagatgcagaaatcctcaacaaaatactagcaaatcaaatccaacagcatatcaaaaagatgatctagtggatccaccatgatcaactggatgcagggatggtttaacatatgtaagtcaataaagtgtgacacaccacataaacagaattaaaaacaaaaatcaccatgattatctcaatagatgcagaaaaagcatttgacaaaatccagcatctctttatgactaaaaccctcagcaaaatcggcacagaagggacataccttaaggtaacaaaagccacctacaacaaaccgatagccaacattatwctgaacagggaaatgttgaaagcattcccccctgaaaactggaaaagacaaggatgcccactttcactacttctattc

SEQ ID NO: 951285 - DNA, 585 bp, Homo sapiens
tggaaggaagccagtggtctcccaagactttctgaaaatacatcccctggaacttctcaaggtcgtkctgtctccttcctgcctgccctgaattcttcttctctacttaatacactggtcaaatatttccttgattcatacacacatgcacacatacacacatacacacatggcagtgacagatttcactgagaaccttggagctatggtggggcttatagagagtcaaggcaaaacttttcctttgcatcatgtttgcagtacttcttttgccactggctatgttgctcagtcctttccattctgtgtcctctagttctctcctttctattttccttcaacccttatggaggtgatattgctaccccaatgggtccagaaggtgtgaacctccccccaacctgcagggggtgtggagggcagagcatggagccaaaacggattattctcaagccttgcctggttttggacttgcttgggacccttcacccctctttcttccctatttcttccttttggaatgggattgtctgtcctaggcctatcccgccattgcacattggaagcacataatttgtctggttt

SEQ ID NO: 951286 - DNA, 652 bp, Homo sapiens
ttctttctgtgtgcttgtgtgtgtgtgtgtgtgtgtgtgtgtgtgtgtgtgtgtgagtctcgttctgtagcccaggctggagtgcagtggtgcaatctcagctcaatcaatgcaacctctgcctcccgggttcaagcaattctcgtgcctcagcctgctgagtagctgggattacaggcatgcaccaccacacctggctaatattttgtatatttttagtaaagatggggtttcgccatgttgcccaggctggttttgaactcctgagctcaggcaatccgcccacctcaaccttccaaagtgctgggattacaggcatgagacaccacgcccagctgagcaaagcattttcaaggccctggagtccagtttccccttcaagggtgctgtggataccctggaattttctgccaaattgccataagaagctcactttctggaccttcatgggccccctccctggtccattctcctgagaatgggccacaccactggtgtgcttgcttctgggtccaaggggygggcaagaatttaggtggagtttggacacatggatgagaagttcccacagatgcacacttgtctgtcccatggtcaggaaagatctgagagttggagaggaaagtggctaggccagaaggggcctggagct

SEQ ID NO: 951287 - DNA, 546 bp, Homo sapiens
tcctgactagaacccattgggaagctgcaggaaagatttytttacagagaaggaactgactgagtgcctaatgtatttgatcttactgaaacaagaatttcaaaactaggagaaagtttaggattaagctggtaaaaagtactattcagagaaaattatgcaaatggaggaaaaagttaagtatggggtatgggagtgaaggtggggcagggaggaatgttccacagaagagggagaatattcacaggataccacttggcctagcagtggataatgtttacatagtcataacattgaaatgccgaatttttttctttttctttgagacagagtcttgctctataacccaggctgaagtgcaatggcacgatcttggctcactgcaacctctgcctcccaggtccaagcaattctcttgcctcagcctcccaagtaattgggattacaggcacacgccaccaagcccagctaatttttgcatttttggtagatatggggttttaccacgttggccaggctggtctcaaacttgtgacctcaagcagt

SEQ ID NO: 951288 - DNA, 586 bp, Homo sapiens
gccactttagtacctttagaggacctcaaaatcacaagctatgctccacttactctctacagttcccataactgtcaaaatctattttcctccttgcacttgatgcatatattttctgccctctggctcctttaactgtactcactatttgttaagtctcccacaattaccattgttcctggccagacttcagtctggcctctcatcttattcctgatactacacctgaaccccatgactatgtctctctaatccacatggcattctccccatttccccatatttccctctttcctgttcccacccagactgcgcttggtttattgacagtagttcttccagacccaatcgccaatcaccagcaaaggcaggctatgctatagtgtcttccatctatcattgaggctatttccctgtccccttccactacctctcaacaagctaaactcattgccttaacttgagccctcattcttacaaagggactacatgtcaatatygatactgattccaagtatgccttccacatccttcacctccatgctattacatggccagaaagaggtttcctcactacacaaaggtc

SEQ ID NO: 951289 - DNA, 656 bp, Homo sapiens
tttaagatttcaacatgatatttattcttgtgcagctccttttcatatttctcatgtttgttctcacacacaacttcctggaccattatccttaggaaatgataaagcagataaattgattggttctgtgtttcagcaagcgctactgcacgaaaatacttccgcccttactcacatgttccatttatctcgcagccaagctagggctataatacaagcctgtcctatttgccagcatgtccccggagccacacctgtagaaggctgtaacccatgatgtttggctccaaatgaaatttggcaaatggatgttacacacatagcaaactttggtaagcttagctatatttctgtgactatagacacttattctcatatgctgcatgatacatgccaaacaggtgagacaattggtcatgtacagtgacattgtcatcctttgttcatatggggatacataaacaattaaaaactgacaatggacctgcttatactagtcatgcttttcaaaatttcttacagctttgrgctataacccataaaacaagaattccttataatcctagaggacaaggcattataaagtgggcacatcaaacattacaacacatgttgaaaacacaaaaagggggtataggaggccaactaccacctca

SEQ ID NO: 951290 - DNA, 438 bp, Homo sapiens
gactttaagttgaagccaatgctaatttctcattacaaaaattctagggcctttgtgccaaatctactctgcttgtcctctataaataaaacaacaaagcctgggtgacagcactgtttacatctgtttacagcatggtttactgaatattttaagcccacttttgagacctactgctcaaaaagattcctttcaaaatatcactgcccactgacaatgcacttggtcacccatgaattttgatggagatgtaccaaggaaattaatgttttcatgtctgctaacacagcatccattctgtggctcatggatcagagtaatttcaacgtttgccttaytacttaagaaacacattttataaggctatagatagtgattcctctgatgaatctgggcaaagtaagttgaaaacctggagagaattcatcattctaggtg

SEQ ID NO: 951291 - DNA, 642 bp, Homo sapiens
gaaatatgccatctgattcttttcttattgcaataaaatatacataatatccacaattttgaccattttttagtgtacaattcagtggcattaggtacagtcacatcgctgtgcaaccatcaccgccatccatctctagaactgtttcatcttcccaaatggaaattctgtctctgttaaacgctcattcccctttccccctcccccaggtcttggcaaccagctttctactttctctctatgaattcagcaactccaggtacctcgtatcagcagaatcatacgatatttgattttttgtgtgtctggtttatgtcacttggcatagtgtcctcaaggttcctgactgacacaggagcctaatttctggccaatgtccttctccaggggaagatggccgctatcgggtctagagtagacaatggatgaagagaactagaatgacttaagattgatccagatggtgggagatgctcaaagcttttgtgagaacgagaaggaaagcacagggaggaggaatactgtaactgaagctggtgcaytctgaaaacaagagtcacaatgtgagcataacaccagccccgccaagtgccctcctgattcatgagtaaaatgcccaacgaagcccaagagctatgaacg

SEQ ID NO: 951292 - DNA, 620 bp, Homo sapiens
tgcattatcccctaacaagcaagtcggcctatattttgaagctctgaaacccaggcactgatttctctcttgctatcaaagtccttctaatagaagtctattttgtctacattaaaaacctactgtttagtrtagacacctgcatcaataatattagctagatattctggatagcttgatgcaacttctacatcagcacttgacgattcaccttgcacttttttgttaaagagatagcttctcaaacctcatgaaccaaccactgatagcttcaaacttttctcctgtagcttcatcacctctctcaatcttaacagaattgaagagagttagagccttgctgtagattaagctttgcctaagggaatgttatagctggtttgatcttctatccagaccactcaaattttctccctatcagcaataaggttattttcacttttttatcatttatgtgttcactggagtaacacttttaatttccttcaataaattttcttttgcattcacaacttggctatctagcttggtacaagaggcctagttttcagtctatctctgcttttgtcatgccttcctcaataagcttaatcatttctagcctttgatttaaagtaagt

SEQ ID NO: 951293 - DNA, 737 bp, Homo sapiens
aaccacccatgcccttgcccaattggcccatgaacaaagtgaccataaagacaaggataaaaattacacatgggttcagcaacatggattttcatttcccaaggctgatctgactacagtcactgctgagtacccaaaatgccaatagcagagaccaacatttaactccataccattccatgtctagatcagccagtcacttagtgccaggttgattatactggcatcacaggaagctcagtgttttgttctcattgaaacagacatttaccctggacagaaatttttcttctctgcctgcaatgcttctgccaaaacaaccatctgtggacttaagagaaacacatattcactactgtgatattccacacatcattgttactgaccaggaaacttcttttgtagcaaatgaaatctggcaatgggctcttgcttatggaactcactggtattaccacatttcccatcaccctgaagcagatggcttgataaaataatgaaaccttttgaaaattcagttacagcacagtgtaggataattgtatggctgagataatgtcctcccgaaggtggtacatgtcctgaatcagcaacaaaaatatggtaccatttctccaattgctaggatccatggctctgggaatcacaggggtagaagtggaaawggctcctccttaacccttaaccccaaagatcaactagcaaaatttttgtttcctgtccctgcaattctaggt

SEQ ID NO: 951294 - DNA, 586 bp, Homo sapiens
aaatgcattatttaatcaacctgaaataatgtttttttcttccccatgttaccttgaaaaagcaagcaggaatactgatcaatttctacatatattccatkctcaaacttaatttttaaactctgtttctaacattcatttttccttaatcctacctatgtaaaatataagggttcatgaaagttctacaacatagctaactggcctcgggtcccaggcctcttggaaaagacctcttctaggtcctgtagcactccaggatcagtatctattttaaaacataaagtcaaatatgaacatgagccacatttatttaagaaatacacatatataatattttgattttttttattgtttacatttttaacatacctaaaaatttgtaaaatattggatataaatcaacctgaaagaaaactaaccatttttcaaggatacatcatcaacaaaactgctaaatatttctggtttatcaagttcaatcaacttgttttttctttgatcttcccaaatgaaatttacattaatgacaaaagcaaaccacttttcttttgggaaacagagggtcaccattattaactatttc

SEQ ID NO: 951295 - DNA, 576 bp, Homo sapiens
cgatcttatatttttaaaaaccctaaaaacttgaccaaaaatgtattgaaattgataaacaaatttagttggatatacaaattcagaaggatataaaatcaacacacraaaattagtagcatttccatatgccagcagtgaacaatctgcaaaagtaatttaaaaacagtaatcttgtttacgatagctacaaataaaatacccaggaattaagctaaccaaagaagtgaaagatctttacaatgaaaactataaaacattgatgaaagaaattaaagagaacataaaaaatggaaatatattccatgttcatggattggaaaaatcaatattgttaaaatgtccatactacccaaaacaatctactgatttaatgcaattcctatcaacataccaatgacatggttcacagaaaaggaaaaaaaaatcctaaaatttatactgagccacaaatgacccaaaataaccaaagctagccaaaaaagactagttcttatttgttattctcagcaaaaagaattaaactggaggaatcacattacctgacttcaaattatactacagacctatagtaac

SEQ ID NO: 951296 - DNA, 725 bp, Homo sapiens
tgtcagaagtggctgcacagtgagagtttagctgggccttccaccagattcatctgaattttctaggaktctgccatgtgccaagcactgtgctaagtgctggagatatagcagtgagcaagatgggcatgatccttgccctgtcaggcttctgttctagggaggaacccaaccaatacccagtaaatagataaagtaattgcaattttaagtttccagtaaaaggaaacaagggccaagacagagacattcacagtcattggggaagtcttcttggggaggatgccatcaaagccaggaactaaataatcaagaagagctagtcaggtatgtgtggagggtaacagcacgtcaatcaagaggaccgcatgtgcccaggtgaggggtagcttttggggaggtggaagtagaccagtatggctaacacagggatggggtccagaggagcccaaaaggagatgtctgaaaggaggcaggcatgcagacctgcaggggcacaagccacatagagccttgtacaaatttgtgttttcctctaatgagatggaaagccacggaagagctttaagtacgagatgaaacagtggttggtgttttaagaagcatcactgttgatgctgggcagagaatggactgaaaggaggcaagagtgagagcgagaggccagttaaaagcaggcggggggaaagggaagctgtcagacaggggcagtcctcatgcttgga

SEQ ID NO: 951297 - DNA, 609 bp, Homo sapiens
cctttggtacttgccctaagttttaacaaaattagtagaaaatattaccatgtcatttgtatatatcatgaaaaatgaaaactacatgaaaatctgaaacaaaatataacaarttaaggttgaaaaatttccactgcgtgcaatggcacaagcctttaatcccagctactactctggaggctgaaacaggaggattgcttgagcccaggagtttaagatcagactgggcaacacagcaagacacctatctcagaaaaaaagaaaataattcactttccacttagagaaattttagattcacctttttaaaatgaaaggtttttaaaaactgttactataaattatataaattaccttcattaattatgttcttcatactgtttaagaaatttattctgatacagtgcttataataggatgttaccaaaaatatactaaaaaaggattattatagcattgaaaactaaccttaggttataagccaaaacattttataaagtaatctatgttagtcaggtaatacagagttaagaagtagattggtttcatatataattcaagttatataggtatgtgcttaatgctattaaaccagttactgtatgtttg

SEQ ID NO: 951298 - DNA, 609 bp, Homo sapiens
cctttggtacttgccctaagttttaacaaaattagtagaaaatattaccatgtcatttgtatatatcatgaaaaatgaaaactacatgaaaatctgaaacaaaatataacaagttaaggttgaaaawtttccactgcgtgcaatggcacaagcctttaatcccagctactactctggaggctgaaacaggaggattgcttgagcccaggagtttaagatcagactgggcaacacagcaagacacctatctcagaaaaaaagaaaataattcactttccacttagagaaattttagattcacctttttaaaatgaaaggtttttaaaaactgttactataaattatataaattaccttcattaattatgttcttcatactgtttaagaaatttattctgatacagtgcttataataggatgttaccaaaaatatactaaaaaaggattattatagcattgaaaactaaccttaggttataagccaaaacattttataaagtaatctatgttagtcaggtaatacagagttaagaagtagattggtttcatatataattcaagttatataggtatgtgcttaatgctattaaaccagttactgtatgtttg

SEQ ID NO: 951299 - DNA, 624 bp, Homo sapiens
cccttgatttcttctcctgcctgattaccctggccagaacttccaacagtatgttgaataggagtgttgagagagggcawccctgtcttgtgctagttttcaaagggaatgcttccagtttttgcccattccatacgatattggctgtgggtttgtcatagatagctcttattattttgaaatacatcccatcaatacttaatttatagagtttttagcatgaaggttgttgaattttgtggaaggccttttctgcatctattgagattatcatatggtttttgctcttggttctgcttatatgctggattatgtttattgatttacatatgttgaactagctttgcatcccatgaatgaagcccacgtgatcatggtggataagctttttgatgtgctgctggattcggtttgctagtattttattgaggatttttgcataggtgttcatcagggatattggtctaaaattctcttttttggttgtgtctctgccaggccttggtatcaggatgatgctggcctcataaaatgagttaggaaggattccctctttttctattgattgtaatagtttcagaaggaatggtaccagctcctccctgtacctctggtagaattcag

SEQ ID NO: 951300 - DNA, 626 bp, Homo sapiens
tgcttgttgtacttgtatatctgaatttctagcaaaatcagagaacttttccttaattattccctcaaagagattttgcaaacattttactttctatcttctctctcaggaatacctataactcataggtttggacattttacataatcccatatttctggaagattttgttcatttttaaaaattcctttttctttacttttgtctgactgggttaattcaaaagacctgtctccaagctctggaattctttcttctacttggcttagtgtttgttaaagcttttagctacattttgtaatttcttcaacatatttttcatttccagaaatttttcctttaaatatgtatccatttaggccgggagcagtagctcatgcctgtaatcccagcactttgggaggctgaggcaggcggatcacctgaggtcaggagttcaagaccagcctggctaacatggtgaaaccccgtctctactaaaaaaaaaaaaaaaaaaaaaaaaaaaatacaaaaattagccaggtgtgatggcaggcacctgtaatcccagctattygggaggctgaggcaggagaatcgcctgaacctaggaggcggaggttccagtgagctgcgatagcaccagt

SEQ ID NO: 951301 - DNA, 576 bp, Homo sapiens
cagaagtcgtcacgatccctygtgcacctgttgaagccacaggcgcctaccctttgtcactctccttgtgcctggtactccctactagtttgtttctctccctttgggtgacgtaccatttccttggtctggcctattttcatgtcctaggccagcaccttgaaggagcagttccttctcttgcttgaccctggctggccaaccacagagctctgatttcccactgctgtttgtttccctggttatgtgtggcaccatctctgtggtgaagtcacaggtgcaagcccacgtggatgcagatgtgcacatgtgtgtgacgtttcgggtttgtttccatcctctccagtatcggcagtggctgaaggaagaatatggagagagccctttgcaggatgcagaagaagccaaaaacattctgggtaaatataaggagcaagggcgcacagagccccagcccggcgccaggcggtggagcagttttccggcactggctccgctgacctacgataattatacgacggagacctaacgcaagcgacctgctgccttccttcccactgcttgtcttcagtgtgc

SEQ ID NO: 951302 - DNA, 576 bp, Homo sapiens
cagaagtcgtcacgatcccttgtgcacctgttgaagccacaggcgcctaccctttgtcaytctccttgtgcctggtactccctactagtttgtttctctccctttgggtgacgtaccatttccttggtctggcctattttcatgtcctaggccagcaccttgaaggagcagttccttctcttgcttgaccctggctggccaaccacagagctctgatttcccactgctgtttgtttccctggttatgtgtggcaccatctctgtggtgaagtcacaggtgcaagcccacgtggatgcagatgtgcacatgtgtgtgacgtttcgggtttgtttccatcctctccagtatcggcagtggctgaaggaagaatatggagagagccctttgcaggatgcagaagaagccaaaaacattctgggtaaatataaggagcaagggcgcacagagccccagcccggcgccaggcggtggagcagttttccggcactggctccgctgacctacgataattatacgacggagacctaacgcaagcgacctgctgccttccttcccactgcttgtcttcagtgtgc

SEQ ID NO: 951303 - DNA, 605 bp, Homo sapiens
gcaggtctctcaggttggggactaggtcttttatgcttcaggagaaatctgggtgrcaaagtacagcatttactacaaatatcactgctagatatgaacataatatattcagataaatgtaagcaattccttttaccaaaacagccgaagatgcatgtgaagaatgacaaggttagagaaatgtaggcatgggtgagatcataaggtttcttatatattagggcaaagaaaataagcttgaccatgaaatctttatgggaccattttttacatttccttttactgtgatcattgtgatcattgcaatagatgcaaataaatgccgctgaaaaatatttaacatcatttcaggctagtgactcctcaaacatgcaataggagatttcctaaacccaataaaggaatctcagttaaaactacagctaacatcttacttaaagacaaaagactgaatgctgtctctctaatatcaggaacaaggtaaggatgactgcacttaaccacttctattcaccatgataatggaagtcctagccagtgcaatagtcaagaaaaagaaaagaatatagaatgaaaaaacagaaataaaactgcaactatttgaa

SEQ ID NO: 951304 - DNA, 605 bp, Homo sapiens
gcaggtctctcaggttggggactaggtcttttatgcttcaggagaaatctgggtgacaaagtacagcatttactacaaatatcactgctagatatgaacataatatattcagataaatgyaagcaattccttttaccaaaacagccgaagatgcatgtgaagaatgacaaggttagagaaatgtaggcatgggtgagatcataaggtttcttatatattagggcaaagaaaataagcttgaccatgaaatctttatgggaccattttttacatttccttttactgtgatcattgtgatcattgcaatagatgcaaataaatgccgctgaaaaatatttaacatcatttcaggctagtgactcctcaaacatgcaataggagatttcctaaacccaataaaggaatctcagttaaaactacagctaacatcttacttaaagacaaaagactgaatgctgtctctctaatatcaggaacaaggtaaggatgactgcacttaaccacttctattcaccatgataatggaagtcctagccagtgcaatagtcaagaaaaagaaaagaatatagaatgaaaaaacagaaataaaactgcaactatttgaa

SEQ ID NO: 951305 - DNA, 778 bp, Homo sapiens
aatttgcggatcctgatgtcatgcctgtggaccacatagctctcgactctgctggctgttatattatttcccatttgattctcacagttacccttggagggtgttaatgtggccattccgttttacagatgaggaagctgaggtcactcatttgttcttgcatttgccctttattaagttctgtctgtgcaccaggctgaatgctgggtgagaaagagggaggattaaggcctgtgatcaactctcagagagcccagggcctagtgggtgtgcttttccccctagccccctgcctttcaggattctagaaggcagggactgagcagaggccagcgattcaggaagtggcttctctgtgcttcgcatcactcaagtcccagtcctaggagtccccatcaattcttccattttcctcactcccatggccagtccattagcaaggcttatcaagtctacccctgaacctggttgtgtgctggaattggcagctcacaccagcttcaagagttgcttgtataccattcttcccagttctgctttcagtgatgccatgttgctagcttaaagtctgccacagtaagagtgtttataccatggaaataggcaaacagggcttttcccctagagagccagtcattaagcacttaacaacacaccattgcccggatctctctccactgctctttatttccacttctaccatttkagtcaatgccactttcccctcttctcagcaggttctgctcagccttgccgctcacccttctgtgatccattc

SEQ ID NO: 951306 - DNA, 633 bp, Homo sapiens
ttaaaagaaaattgatgaaattcaacaatgaatcatgataaaactctgagcaaaccagaaagaaaagggtacttcctmaatttaataaagtatttgggaaaaacctatgagtagcacatacttaattgtaaaatatggaacacttttctcataagatcagggttaaggcaagaatgtctgctctcaccacttctgtttatattgtcctggaagtcctagccattataatgacaaaataaataaacaaatattaatattggaaaggaagaaatagtctctgcaaattaaaagtctgtttaaaatccatttacaatagaattttttaaaccataaaatacataagaataggtattacaaaaaacttttgaaacctcaatacttaaaactacagaacatgctgagacaattttttaaagacccaagtaaatggaggtatatatgttcatacgatctgatgactcaatattgttaagataccaaatcttccctaaattgatctaaatgttaaaaacattcccaatataaatcccagcggaattctttgtagaaattgaaaagttgattctaaaatttatatgaaaatttaaatgacctataatagccaaaacaatgtttacaagtagaacaaggttg

SEQ ID NO: 951307 - DNA, 600 bp, Homo sapiens
cgagatctctctcactgttatgagaatagcaccaagggggaaacctgccccatgatctaatcacctcccaccagggcctgcctacaaaattggggattacaatgtgacatgagctttgggcggggacacagatccaaaccatgtcattctgccactgccctcaccctccacgaaatctcatgacgttcttacattgcaaaatacaattatcccttcccaatggtccctcaaagtctgaactcattccagcattaagccaaaagtccaaagtccaaagtctcatctgagacaaggcaactctcttctgcctatgagcctgtaaaataaaaaacaagttagttactcccaagatacagtgcgggtacaggcattgggtaaatactcctgttccaaaagggaaaaaccagccaaaagaaagaattataggccccatgcaagtccgaaatccagtagggcagttattaaatcttaaagctccaaataatcttcattgactccatgtctcacatccagggcacactcgtgtgagggrtgggctcccaaggccttgggaagctccactcctgtggctttgtggggttcagttcctgcagctgctct

SEQ ID NO: 951308 - DNA, 598 bp, Homo sapiens
gaatgaaatttacacaaaacaatattaactttaaatgtaaatgggttaaatgccccaattaaaagacacagactggcaaattggataaagagtcaagatccatcagtgtgctgtattcagaagacccatctcacgtgcaaagacacacataggctcaaaataaagggatggagaggaatatttaccaagcaaatggaaagcaaaaaaaaaaaaaaaaaatggttgcaatcctagtctctgataaaacagactttaaaccaacaaagatcaaaagacaaagaagggcattacataatgttaaagggatcaatgtaacaagaagggctaactatcctaaatatatatgcacccaatacaggagcacccagattcataaaacacatccttagagacctacaaaaagacttagactcccacacaataatagtggaatactttaacatctcactgtcaatattacagagatcaatgaracaaaaaattaacaaggatattcaggacttgaactcagctctggaccaagtggacctaacagacatctacagaactgtccaccccaaatcaacagaatacacattcttctcagcaccacatagca

SEQ ID NO: 951309 - DNA, 595 bp, Homo sapiens
gtgactagatgacttcaggtgagactcagcacactcctagatgtggtggctatggagtgagaatctttctgcataagaaaagatgataaagtaacaggggctttgtcatgaatttgaagtaccagcttggccagagttgggtagagcaccaagtgggctcgtaaggccctaattctaggagttggctgttggacagcatttctggacctgccttgtgtccaagaggagcccactgccctgaaaggtgagttccaggccaggcagcattcactacaagctaactaaagagccctttgctttaaggggacattggcagtagtctggcaattctccctattggcctgcaagggcagtggctatgaagtgaggctccactgcctttggaaagagaagggaagaggaggaaggtctcctccttgtggtttgagtgccagctcagtcacattgcaatagaataccaagaagacatgtaagaatttttttcttccttgctctgtcgcccaggctggacagtggcacaamcttggctcacggcaacttctgcctctgggttcaagggattctcctgcctcagcctcccgagtagctgggacta

SEQ ID NO: 951310 - DNA, 554 bp, Homo sapiens
agcaacatttgctattcagcaatattcgctgttgtgcagcctctgctgctgatacccaggcaaagagggtctggagtggacctccagcaaactccaacagacctgcagttgagggtcctaactgttagaaggaaaactaacagacagaaaggatatccacaccaaaaccccatctgtacgtcaccatcatcaaagaccaaaggtagataaaactacaaagatggggaaaaaagcagagcagaaaagctgaaaattttaaaaatcagagcgcttctccccctccaaaggaacgcagctccttgccagcaacagaacaaagctggatggagaatgactttgacgagttgagagaagaaggcttcagacgatcaaacttctccgagctaaaggaagaagttcaaacccatcgcagagaagctaaaaaccttgaaaaaagattagacgaatggctaactagaataagcagtgtagrgaagtccttaaatgacctgatggagcagaaaaccatggcacaagaactacatgacaaatgcacaagcttcggtagctgattc

SEQ ID NO: 951311 - DNA, 572 bp, Homo sapiens
tgtgttgggaacattcaatgtcttccttctagctttttgaaactatatattattgttaactatagtcatcctacagcggtatagaatagcagtgcccaacctttttggcaycaggaacaggttttgtggaagacagtttttccatggacagggatggggctggggatggttttgggataaaactgttccacctcagatcaccaggcattagctagattctcataaggaacacacaacctagatccctggcatgcacagtttacaacaggttttgcactcctattattatgggatctttggggtgttgcttttctggctggaaacctctgtggccagtcgtgcctttgcccaaatttttgcttcagcccactgagctcattctgctcactcgacctggcaggctgtgttcagctcacactaatggcctggattccacacctgccaagggagactgcatggagcggcaaggggtgtgagagtgagtgtggggtctggccaatgcacagtcagatatgccggctgctgcagaagggtgggcagctccaggtgccagcacaggtgccagctctctg

SEQ ID NO: 951312 - DNA, 663 bp, Homo sapiens
tcccatgctgttctcgtgatagtgaataagtctcatgagatctgacagttttagaagagggaatttccctgcaaaagctcctttttatgcctgctgccatccatgtaagacatgacttgctcctcctttccttccgctatgattgtgaggcttctccagccattgtggaactgtaagtccattaaactctttttcctgtataaattacccagtctcaggtatgtctttatcagcagcgtgaaaacggactaatacaatttctttctctactctatgtttatactacataaaatgcagatttactttgtgagaggaatgtataattgactgttgctctttccccacctgcctgctctttctcctttaaaaactgaagtcctaaagactctttggaaaaaacacagtccacagattctagtgtaacttgtgtctctttttcctggtgtgtcctcagtctgagtaaaataagcctctaaattgatgagatttgtctcactttttggtttacatagcctattgctcctaggctacaaagctatacagcatgttactgtactgaatactayaggcaattgtaacacagttgtgtttgtatctctaaacatatctaaacatagaaaaggtaacacattgtgctacaaccttacaatgactatgatgtca

SEQ ID NO: 951313 - DNA, 550 bp, Homo sapiens
gctgatctcgaactcctgacctcaggagatttgcccacctcgacctccagaggtgctggaattatgcgcctggcttgttattccttaatgtattaagacgttactatgttatcactggcttctggttgagtgaaaaggatgccagtacttcctaaaattaattagctataaatgtatacaaaatgtatatatttgtatgtctatgtcaggctctgtggctcttgcctgtaatcccaacactttgggaggccagcaggattgcttgagaccaggaatttgagaccagcctgggcaacatagagagacaccagctctacaaacattttaaaaaaattagcaggcatagtggcacatgcttgtagtaccagctactggggaggctgaagtgggaggatctcttgagcctgggaggtcaaggctgtagtgagctgtgatcttatcactgtactccmgactgggcaaaagagcaagaccctgtctcaaaaaacaaaacaaaaaacccaaaatgtatgtctagatgcctctttgtaacataccttgcatgtgaata

SEQ ID NO: 951314 - DNA, 555 bp, Homo sapiens
acacactgtcttccacaatggttgaactaacttatactcccaccagcagtgtaaaagcgttcctatttctccacatcctctccagcatctgttgtttcctgggtttttaatgatcgcaactctaactggtrtaagatgatgtctcattgtggtatctcagtgatgatgagctttttttccatatgttttttggctgcttcaatgtcttcatttgagaagtgtgttcatatcctttgcccactttttgatggggttgtttgttttgggtgaaggatatatcctatagtttttactagaacaaaaaatttgattattttatgggaaagtatactgtaaacatttgctactcaacctagaaaaattcacagggtttactttcttttcttctaccaccaagcatgaatgcggtatgcatttcacagatgcttctcctattggaatattcaatgccaggatgtactcattgctgtcccataattatttcaacttttgtggcctccttgttgcgttgtccaaattgctgtttcataacttttctactttcttcaaatctct

SEQ ID NO: 951315 - DNA, 555 bp, Homo sapiens
acacactgtcttccacaatggttgaactaacttatactcccaccagcagtgtaaaagcgttcctatttctccacatcctctccagcatctgttgtttcctgggtttttaatgatcgcaactctaactggtatragatgatgtctcattgtggtatctcagtgatgatgagctttttttccatatgttttttggctgcttcaatgtcttcatttgagaagtgtgttcatatcctttgcccactttttgatggggttgtttgttttgggtgaaggatatatcctatagtttttactagaacaaaaaatttgattattttatgggaaagtatactgtaaacatttgctactcaacctagaaaaattcacagggtttactttcttttcttctaccaccaagcatgaatgcggtatgcatttcacagatgcttctcctattggaatattcaatgccaggatgtactcattgctgtcccataattatttcaacttttgtggcctccttgttgcgttgtccaaattgctgtttcataacttttctactttcttcaaatctct

SEQ ID NO: 951316 - DNA, 481 bp, Homo sapiens
caagtagcctaagtgacacaagaccagtatccacgttcatttccayacagccctaattcatcacaaatgtacttattttctgccatatagcctctttcctaattaagacaaccacatcctattcctaacttattactattaatgacagcacaggcatcaaatttcaaggtgacttgtttgggcacccctttttcttctgttttggctaacattttactcatatcatgtatgagcccccacaagtcctcagttcttaaccttatttcaaaaactatggtcatgggaggctcagatgggtcataacacacatcaggttggtcatttcctgggctacataccttgtatagaataacattatacaaacaatttctttttagagttccagtacacttataataaccataagataataggaccgtagcaaccttttgtcctacctcagtgacttgatgtatacactgcgaacagtcctcagtctggg

SEQ ID NO: 951317 - DNA, 622 bp, Homo sapiens
catggcacgcagactgagaggtgcaattcaagctaaacatccccttagggctccaattaataatgattctgtaggaatcrttgtgcagcacctctgcctgttctgcaatgcaatcttcctaaacaagtatgttcattttttctaactgggtccaatcctgtttacaaataggtttttgagggcagtatgcctcaattataggagcagatttattatggtaagtactgagatcagaaagcatgtgtaactgtgtcataaagtgattgcacccaggcattattgccagccaagattgataaatatacccaataagtatgattgttctctgtgtcagcccttattgaaagaatactcacggcagtggtgaaaattgctatcatagctaccattaaattactcgttgtgactggttgtccagctttcctcaggttttcttccgccatctgtgacagcttcttgatctgtccccaggtgggtggctgtgattgacaggtgttgcttatgacagttggggtcctcctcagcgtcagtcttgacatggctgaaactgaggggtccttgggatcctcccggaatctggctcataataagatttaaggtgtcttgatggtatccaaatcgg

SEQ ID NO: 951318 - DNA, 585 bp, Homo sapiens
aatgcgctctcctgactaagggtaccatggaacgtcctctgcctttgccccccagagccttgggaacagattcctggaaattctgagcaaggtgctagcaagyccattgcaacccactcaccagaaagccttcctccactgatgggggatgtacggtggctgtctttgtccctctgtgtcccttttctgatgatgtcattctcagccaccctgtggagttgttggaaagaacacagcctctgaaaccagaggaccaggatgagagggtgttcaggccctcccttgttcagggaccttgtgtcagacactcagactctttatgcttctgttcttgccaccctgcccaaatgcactgctgtggtttgaatgctcccctcaaaattcacgtggaaacttaatccccaatggggcagtattgagaggtgaggcctttaagagttgattgaatcatgagggctctgccctcaaaagtggattaatccattcatggattaatggttaaagggttatcacaggaggggaactggtggttttacaagaagaggaagagaacctcgccatgcgatgccttgtgctaccccagga

SEQ ID NO: 951319 - DNA, 726 bp, Homo sapiens
gaaaactcaaaaagccaaagtgtcctctttctcccaaatgaccacataacctctccagcaaaatttcagatgaggctgagatagctaaaatgacagaagtagaattcagaatatggaaagttcagaatatggaaagttcatggaactaaaggagtacattgtaactcaatgcaaggaagctaagaatcatgctaaaatattgcaggagctaacaaagtagccagtatagagaagactgtaactgacctgatagagctgaaagacacagtacaggaacttcataatgcaatcacaagtattaatagcagaatacaacaagcggaggaaagaatatcagagcttgaagactgcctttctgaaataagacaggcagacgagagagaaaaaatgaataaaatggaatgaacaaaacctgcaagaaaaagaatgagattatgtgaagagactgaatctacgattgatcagtgtacctgaaagagatggggagaatggaaccaacttgaaaaacatatttcagtatatccttgagaacttcctcaacctagctagagaggccagcattcaaattcaggaaatgcagaaaaccccagtgagatactcaatatgaatatcatcccctaagacacataatcatcagattctccaagrtggaaatgaaagaaaaaatgttaaaggcagctagagagaaaggctaggtcacctacaaagggaagcccataagactaa

SEQ ID NO: 951320 - DNA, 639 bp, Homo sapiens
atttctagtattctttcttctacttgattgattcagctattgatacctgtgtatgcttcaggtagttctcgtactgtgtttttcagctccatcaggtcatttatgttcttctttaaacttgttattctagttagcagttcctgtaaacttatttcaatgctcttagctttcttgcattgtgttaggacatgctcctttagctgggagaagtttgttattacccactttctgaagcctgcttctgtcagtttgtcaaactcattctccatccagttttgttcccttgctggggatagagttgtaatgctttggaggagaagaggcattccgggttttggaatgttcagcctttttgcgctggtttttcttcatcttcacggatttttctacctttggtttttgatgttggggatcttcggatggagttttcgggtggttgtcctttttgtttatgttggtgctatagctttctgtttgttagttttctttctaacagtaaggcccatcttctacaggtctgctggrgtttgctggagatcaactacagaacctgtttgcctggttatcaccagtggagcctgcagaacagtgaagattgctgcctgctccttcctttggattcttcctcccagaggggca

SEQ ID NO: 951321 - DNA, 460 bp, Homo sapiens
acctccgtggctgtaataaggacgaaattagatacagtgtgtaggttgcctagctggtgtctgacacaaaaaggtcctcagtaaacagtatgaatggattcaaagccatttaacctctaaacttccctccactctatgcagaaaggccttctctccagcccatgaaaccctaattgccttcttttctccccacacttgctattgtgggctccctactggaaggctctcctttcactcagcctaaccaaatcccccacaaaagcctgactcaggtccccactcagcagcctcaggcctggcatcacatggcctctcgatggtggacccagcattgcgggttgctctctcggcaggcatgtctggccatccacacctgggggcagagaacactccatcttccsctgtgccctccacaacacccaagacaaagctgggcacatgcagcatgctcgataggggc

SEQ ID NO: 951322 - DNA, 575 bp, Homo sapiens
aagtgtgtaactcatatatatatatacacacatatacacacacatacatgagtatatgtgtgaaactgtcactcaaatcaagacatagaacatttcagatgtattccagagatcatggtggatgggaggcaggactggattgcagctcccacttggacagacaaagcagcgtgtggaggcttgtatcatgaactttgactgcaggaataaatcaggaacactgagagaacccacagaccctcagaaagaagcggattgctcctgcaggtctcaggagacaccccaaatgctgtgggagcccaaactgcaaactgtggaagtgggaaaggggaatagtcagctcctgaacacacatcctcactggggaacctaaaggtctagatcacaggagaagattttgaccttacttggagctgagtcaatttagagagccaagtgacatacactgctagagaaagcagggcgtaaggccctgtgggctcactgggttccctagcyatccatttctgccttgcctcacgggggtccttgaggagggctaccagaggcactgggaaatggtcacaaagagaagg

SEQ ID NO: 951323 - DNA, 624 bp, Homo sapiens
gagcataatttatgaaagctattttaaaaacaaccatgtaaagtctccagaaattgtcgtaagggcatatagcaaatgaagacrtatttattcaagaaaatctactgaaacttggtagaaacaatgagagtctgtggcacttgaaccacaactcacttaattcctctcccccttccaggttgccagcatttctcatcccctccaactccaagttgaagagaccaaattcctgggaagtgttaccaagaggtcagaggctcccttctgaccattccccaatgacaggacagaagctctaccccaggcatagacctcagtaccataaaatattgaatccctgattgcccttaccccatcttgctcatagggcagaagttttatgcttgaaaagataagctgagaagaccagaggataccacctttgcccaaggcccagactagtggctcaaaggttttgcccaggaaagaaatgcggtctacgtgaatagagagcttcaaagccctccccaaagtgactagccttatatgaaacagtgtgggaaagttcaagcctaagtgtgctctcaagaccaatgggaaatttggtgataatgaaataagaggaagtaattgatagcacctctt

SEQ ID NO: 951324 - DNA, 583 bp, Homo sapiens
gagaattttcttatgtattagatgtgtgctgtgaaaggaaggcactaaaaagagatcatgctaagtttctaggcctgagaaactggaaggattctattgttatttaactgagataagagagacaatgggtggaacacgtgtttggggataggaaatcaggagtatagatttggacatgttaagttgaaggtgcctcacagatatatgtgagctgaactggaacatgggactctaatatattgggatgaatagtgtccccccaaaatgtatgtctacccagaacctttgaatgtgaccttatttggaaacaggttctttgtagatgtgaacaagttaaggcgaggtcatgatggattagaatgagccctaaatgcagtaagaatagcgttcttataggaagagggaaatttgaacacagacatgcagactctcagtgaggaaggccatgtgaaaacagaaacagagactgaaataacgcawctacaaaccaaggaatgccagtgtttgctggcaaccaagtgaaggttagaagtggcaaggaaaagtccccttctagactcttcagagaaagcttgttctttct

SEQ ID NO: 951325 - DNA, 461 bp, Homo sapiens
caatgcgagataagagtgctgctgtggccagtggcacaggatgtgcttctgtcctgctgactgtaatctggggaaggtgattcctggggcttccagtctctccacccttcaagtgatgaaggagaggacctgggcatcctgcagcttgggaccagctgcaggagtctgtgctctctgcatcattggaaattaggatgaagaccctcaatgctaatgtgcaaaggaatcactgagagacttatggaagacgcagacccattcaagggctcttgatgcagcctggatggggtgtggcttaggatgatctctctttcttttttttttttttttttttgagacagagtttcactcttgttgtccaggctggagtgcaatggtccgatcttggctcaccgcracctccacctcccaggttaaagcaattctcctgcctcagcctcccaagtagttgggattacagg

SEQ ID NO: 951326 - DNA, 588 bp, Homo sapiens
ggtctgaattctgctctcccctctgccttcaagtccctgggtgactttagatgaagcttatatctctgggcctcatgggcaacatgtatctctgccaacaaccctctagctttgtgccaagaggctmcaagagcaaacgtgcttcaaaaaccaaaaggaagcccagttgccagctaaacagtagggtaagctgttacctattcaagctacaagacaaaaaaccaaacaaacaaaaatggagagtttaacataaaccctgctctcaagcagttatcagttgaagttataatacaaacccccaaactgaggggttattagcacagtttcacacacgactgtaatagcagttggagaactgtgtctgtcataaaagcaatgcaaactcctgaggttaaagttggtgaagattacagtcaactttgagtatgaaaaatggttgtcgaaagtctgcagccaagtagggaagggaaaaccatgggctcaaagaatgcaggacaaatgttaatcacagaaggttattcctattgcttttaagatactgtatgttgttcctgactggcatttttgcatttgttctttgctgacatg

SEQ ID NO: 951327 - DNA, 732 bp, Homo sapiens
atctactcaagcctcggcaatggcaggcgcccctcccccagcctcgctgccgccttgcagtttaatctcagactgctgtgctagcaatgaacaaggctccatgcgcgtaggaccctcygagccaggcacgggatataatctcctggtgtgccgtttgctaagaccattggaaaagtgcagtattatggtgggagtgactcgattttccaggtgccgtgctaatacccctttctttgactagaaaagggaattacctgacctgcttcctgggtgaggtaatgcctctccctgcttcagctcacgcttggtgcactgcaccccctgtcctgtacccactgtccgacactccccagtgagatgaacccagtacctcagttggaaatgcagaaatcacccgtcttctgcatcgcttacgctgagagctgtagactggagctgctcctattcagccatcttggctccacccccaaaatatcaattttaacacttctcgagccccacgttgtgtgccacaaatgttgcaggactttcccttagtttagataaagacagggtccttgtctgtcccatggctgtaaaaattcaggctcacagatggtttgaagggtgagtaaagcagggttttattgggtgaaaagtaagaaaaggaggaaacagactttcactaggccagagtccctctagcttccttacttgccattgtgaaggctataatctgacactcctttaata

SEQ ID NO: 951328 - DNA, 719 bp, Homo sapiens
tgagactgttacaaaatcctattgttgtggcttcttgagtgccatagctcagtgagtgggagggaatgttactgctctttcactcccacagtttgcaagtttcaagttcttgtctcataaccaagaggagtgaggtatgtggacaccagagagtaagcaaggcagagtataattttatttagcaacagaaagaaagctctcagcagcaagtgggtacctgtaagtggattgccagttgtgaggctgagtcgggaaatgcatgctgattggtttataggtaggcttggaaaaagcaccattcagaaagaggtatgatagtgtaaagagccaatcgggggctgaagtgggggctgaagtggaggcttggcccaggaccagtcatgggctgagcacactgaaggggaatggaagttctcactcgggtcagtggactctatctggaactggtagtttggtgttaaggcttcagtctggccttggcttgaaggtcaagtttcaccagagaccaatccctgtctgccaaggaaagtgtctgcctcctattgctatcactatgatttaggtattatagttatttacattttacagatgaagaatgtagagtttaaataacttgttcaagtcacatagctgttaagttattgagtgggattcgaatttatgtaaacagaattgagagccctttcagtcsttaaccttcctgctgcaataatcacttc

SEQ ID NO: 951329 - DNA, 444 bp, Homo sapiens
actgagatgctggcaaatgcctaacagatcttcagagrgaaggcactgagattgaacagagggaagacacagaagctgagctgaagtgggaggaagctgggaatcctacacaggctacagcacacctggacttgttcctggcccccaacagctcctgggagacaggtaagttgaactggcaagtagcagcccactcttgccaggggcctctggaatcctggcaggaggagaccccttgaccaccacagacattcaaattggctgctcagagaagtggtggggcagcaagccagttgatatggagcccagagggattggtgtggatgtgtcagtactggagcatggccagggacagccatcccataggctcaacttgctcccacaggagactttagccttaagggagatgttggacctgaactctgcaaggttgtcttgaccatc

SEQ ID NO: 951330 - DNA, 736 bp, Homo sapiens
ttcagctggcaaagccagcaatgtatgtttacagtcctacctcaggggtatatcaactctctggctttgtgtaataatcttattcagagaraccttgatcacttttagcttccacaagatatcacactggtccattacactgatgacattatgctgactggatccactgagcaagaagcagcaaacacactggacttattggtgagacatttgcatgccagaagatgggaaataaaatcaactaaaattcagggaacttctacctcagtaaaatttccaggggtccagttgtgtgtggtctgtcaagacattccttctaagatgaaggataagttgctgcatttggcaccccctgcaaccaagaaaaaggcacaatgcctagtggacctatttgggttttggaggcaacacatccctcatttgggtatgttactctggcccatttatcaagtgactcaaaaggctgccagttttgagtggggtccagaacaggagaaggctctgctacaggtcaaggctgctgtgcaagctgctctgacagttgggccataagacccagcagatccaattgtgcctgaggtgtcagtggcagatagggatgctgtttggagcctttggtaggtccgtataggtgaatcacagcagaggcctctaggattttggagcaaggttctgccatcttctgcagataactactctccttttaagagacagcttttggcctgttactgggctt

SEQ ID NO: 951331 - DNA, 675 bp, Homo sapiens
ggcagctcctttatgcaggcaggttgtcccaatgagtgtccagctctcaacagagaggagacccacagtgggtagctcctttacacaggcaggtcattccaatgagcatccagctctcagcagagaggagacccgcactgggtagcccctttctgtaggcaggtcatccagactagtgtccagctctcagtggagaggagacccatggtgggtagcccatttccacaggcagatcatcccaatgagtgtgtgagcctagctgagtctggggtttttatatgctcagaatggaggaagtgtgtgctgattggtccatgggtggccacaggcaggcctggaaaaggcaccatctgattggacaaatggtcaccgatgaagttctcactctgggccactaacttcacctggaactggcagcccagcccccaggcttcaggccattcctggcttgaagaagaggtttcaccagggacctaccccttcctacctaggaatctgtctgcttcctgcagccatcaacatgccattgcagcacccaggctgtctgtcacaatgggtgcctgcaggtccacactgagctgccctcagtgccccagccccctcccatgctcattggtgcccaaagtctggaggtgactgagatggmagggggctagtgtgtcagtgccactctga

SEQ ID NO: 951332 - DNA, 665 bp, Homo sapiens
acagctgaattctaccagaggtacaaagaggagctggtatcatttcttttgaaactactctaaacaattaaaaagggtggactcctccctaacwttttgaggccagcattatcctaataccaaaacctggcagggatacaatgaaacttcaggccaatatccctaatgatcattgatgtgaaaatcctcaataaaatactggcaaacagaatccaccagcacatcaaaagctcatctaccacgatcaagttggcttcaacccgggctgccaggctggttcaacataagccaatcgataaatataaatcatcacatacatagaactaaagacaaaaaccatgtgattatctcaatagtcacagaaaggccttcaataaaattcaacatctcttcatgtttaaaactctcaataaaccaggtattgaaggaacatacttcaaaataatgaaagctatttatgacaaacccacagccaatatcatatcgaatgggcaaaagccaaaaacattccccttgaaaactggcacaagacaaggatgccctctctcactactcttattcaacatattattggaagttctggctagggcaatcaggcaagagaaagaaataaagggtattcaaataggaagagaggaagtcaaattgtctttgtttacagacga

SEQ ID NO: 951333 - DNA, 612 bp, Homo sapiens
gagtagcaccctgtgttctgttaaaatgctctgggaaaggagaagttgggattcctgctttcagggcactctgaactcactcaagcaggggatctgtgggagaaaatcctcagggtagaatgtaaggtaacaggtgcattccctgctgcctttgggggtttctgggaaggggagcgcacaggagttagagcctggaaaatctggctttgggggtctaggcacgtaagggggatgggggagcaggcaggaggaggccgagtccctcgcaaacccatcccctgctcactcttctctccctgtccctagcagatgccgcaccgagacttgggggtctctgtaggggagaagaggtagccaagctggaggcagccctggccctctccccagagtgttggagaacccaggcacaggtgagcagagagtaggtgtccccgatgcaggccccctcacccctcctgcccctgtgcccttggcaggcagggaaagctgccctgggctgagtcgctcctcactcctcgtaacaagcgtgctattgycttaatccccctcagagtctggcacaagcccaaggccagttcccaacaggcctggcctggcccagtccagggaaag

SEQ ID NO: 951334 - DNA, 637 bp, Homo sapiens
caggaaataggctgttttcactagcatagcaaaactcagagtgctcttggcattttgaagttggtgggacaacagcaagtctctaccagacagaatagtgccacgaaaatggatggtcaaagtccygactgcccagatggtatcaggagtagtggtcttggtcttaagtatttccatttcttaaagatttcataagtgcacagataaacaagtgtagatgacaacctattttagatgttgattgagagtcttaaggccaggcgtggtggctcacacctgtaatcccagcactttggaggtcgaggaggctgatcacttgagcccaggagtttgagaccagcctgggcaacatggtgaaaccccatctctacaaaagaatacaaaatcagccaggcatggtggcatgcacctgtgatcccagctactcgggaggctgaggcggcaggatggcttgagcctgggaaatggagattgcagtgagctgagatagtgccactgccctccaaagcctgggcaacagagtgagaccctgtctcaaaaaaaaaaaaggtttttgaaacaaaaggccctcctatataatgagtcaatgaaagttatgctcttagagtaaataattatattgtactactgaaatggt

SEQ ID NO: 951335 - DNA, 538 bp, Homo sapiens
ttatgttcttctctaaactggttattccagttagcaattcatctaaccttttttcaaggttcttagcttccttgcattgggttagaaagtgctcttttagmtcggaggagtttgttattacccaccttctgaagcgtacttctgtcaattcgtcaaactcattcttcgtccagttttgttcccttgctggcaaggagttgtgatcctttggaggagaagaggcgttcaggtttttggagttttcagcctttttgcactggtttttcctcatcttcgtggatttatctacttttggtctttgatgttggtgacctttggatggggttggtgtggatgtcctttatgttaatgttgatgctattcctttctgtttgctagttttccttctaacaggcccctctgctgcatatctgctggagcttgctggaggtccactccagaccctgttcgcctgggtatcaccagcagaggctgcagaacagcaaagattgctgcctgttccttcctctggaagctttgtcccagaggggcaccaaca

SEQ ID NO: 951336 - DNA, 538 bp, Homo sapiens
ttatgttcttctctaaactggttattccagttagcaattcatctaaccttttttcaaggttcttagcttccttgcattgggttagaaagtgctcttttagatcggaggagtttgttattacccaccttctgaagsgtacttctgtcaattcgtcaaactcattcttcgtccagttttgttcccttgctggcaaggagttgtgatcctttggaggagaagaggcgttcaggtttttggagttttcagcctttttgcactggtttttcctcatcttcgtggatttatctacttttggtctttgatgttggtgacctttggatggggttggtgtggatgtcctttatgttaatgttgatgctattcctttctgtttgctagttttccttctaacaggcccctctgctgcatatctgctggagcttgctggaggtccactccagaccctgttcgcctgggtatcaccagcagaggctgcagaacagcaaagattgctgcctgttccttcctctggaagctttgtcccagaggggcaccaaca

SEQ ID NO: 951337 - DNA, 576 bp, Homo sapiens
aaaattatcaaaagcagtcatttcagaactctgaaaataaccaaacacatagataaattgaaatacatttatttaagaaaaactactgaatcttggtaggaacaatgggatctgtgacatttcagtttggagctgttctcatccttcccccttggtcaatgatacagtagtcaatgaaggctagcagcctcactgtcgtggagggggttgaactgatttgaaactccccagaaaagccccatgcctgggacatggtcaaatctgatagcaagtagtgacaaacaattgggaaacccaacattgggaaagccaactgcctaagcctgcagtgctggtagggataagtgaaagaccgatcagaatttaagaggcataagggggaaaatgagacagccatgaggattttgaaaagctctgatatattcctggggatctggaagattgtacacatgcacaggattgcawttacactcaggaaagactaaagagggccccagggcctttggctgaccatgagactctgtgcaagcagaaagtgaaagtcaaagtagaattgtgaactgtctaaactttgaa

SEQ ID NO: 951338 - DNA, 619 bp, Homo sapiens
tctgttcaagtacctgctttcaattcttttgggtatatgcccagaagtagaattgctgaatcttgggtaattctatttttttttttttaaagatggagtcttgctctgttgcccaggctggagtgcagtggcacaatctccgctcactgcaagctctgactcccgggttcacgccattctcctgtctcagcctcccgagtagctgggactacaggcacctgccaccaggcctggctaattttttgtatttttaatagagacagggtttcaccgtgttagccaggatggtctcgatctcctgacctcgcgatccgcccgcctcggcctcccaaagtgctgggattataggcatgagccactgtacccggctgggtaattctatttttaattctttgagaaaccaccatattgttttccatagtggctgcatcatttcacattcccaccaacagtctacagggtcccacttttcccacatccttgccaacccttgctattttctgtttttttttttttgtttgtttgtttaatrgtagctatcctaatgggtatgaattttgatttgcatttccctaataattagtgatgctcagcatcttttcatgtacttttctgtcaa

SEQ ID NO: 951339 - DNA, 451 bp, Homo sapiens
actgagtgtttttgttctgtctcatattcagcaaaggttccttaaggaacttcatgggcagagtactcagctgttcaactctgaatccttcagtcactactctgccatctgactccttcgaygtgtgaagcttttcatataaaaagataagctgtaaaaagacctttctgctgaaccctttcttaaaccctcaccttgccttcccatttctgcatactgtgtcttcaaacactcaacatactccaaatatatatgcatgtgtgcatcaccactaaagttaacaactcaaaccaacagtggcctattgagcatctactatgtttcagggttaggtcctggagatctctggcatgactcctgctcccctggagtttaaaatctagcagagaaaacagatattaaatatttgcacttgcgatgcctgctatattgagagaagcaggccatgcat

SEQ ID NO: 951340 - DNA, 488 bp, Homo sapiens
cagtagctttttgaaaggggaagtaaatttttgagacattgcatgtctgaaaatgtcttctatctagtatcagactcgactgatagcttggctgagtagaattttagattgaaaataatgtttctggccaggtgcagtggctcatgcctgtaatcccagcactttgggaggctgaggtgggcggatcccctgaggtcaggagtttgagaccagcctggccaacatggcaaaaccctgtctctactaaaaatacaaaaattagccaggcgcagtggtgggtgcctgtaatcccagctacttgggaggctgaggcaagagaatcacttgaacccaggaggcagaggttacagtgagccgagatcgcgcyactgcaccccagcttgggcaacagagcgagactccgtctcaaaaaaaaaaaaagaaaaagaaagaaaagaaaagaaaagaatttttctttggcttttgaaggcattgctttcctacgattc

SEQ ID NO: 951341 - DNA, 474 bp, Homo sapiens
tgaaggtgaaagagctggtgtcaaaactgactcagakatgtcaggttgggtgcaggccctcggctataatatgaaggcagaaaatagaactggttttatattccttacttatatcttataatacctgggttgaataacataaggatatatttcagaatactgtttggataatgttcttaggacagcatttcccaaaccatcttttggatacacaaaaaactcttacagttaacatacacataccacgaaatagtccatcatgatcacacaaactctctttctgagttacaatgtccattaacatattaaagatcctgagcagtcctgaaacaaatgaacctttttccttaatttaattcagcatttcccatatgtttttcagcctagcatagtgtcttcacagcacacttgttaaaggcttgggaaaaggggttctgcagacttcatttgggaaatgtgtcttatacaagacct

SEQ ID NO: 951342 - DNA, 610 bp, Homo sapiens
ctcatagacatttatagctactctgtttgctttaggtgggtgaccagttgatattgcaaagtcaggcaatagacccagcagttgacttcagcaatccaactccatagtccttacttcagaatatgttgtgaattgtatagtgtcttctttaggaatttcaatacaaaatttctatacaggatcttttacctcacaagtggactttagaacctaaccaacaaggtggtggatgtcctcttagatttttttcctgtggacattaaatatatatacatatatatggattgtgtacatatattaggttggtgcaaaagtaattggcaaaaaccgcaattacttttgcaacagcctaatttaaatatgtatatataattttttcaatcagcaattcttgattgtttgattaagaatgtccaaatatacaaatctctctttttaacccactcataatgtgtcactttgttctaacttaaagaactaacccctaatgaggacatctagattgtctctactataagtcatgctagcgggaacatccttrtgcccctgtgcagtgtatttaaagaacaaatttcaagaagtggaattccaatgcaagattgcatctttg

SEQ ID NO: 951343 - DNA, 402 bp, Homo sapiens
agtgtggctgtggctcgcagactgagaggtgcaattcaagctaaacatccccttaggggaccaattagtaatgattccataggaatcrttgtgcagcacctctgcctgttctgcaatgcaatcttactaaacaagtatgttcattttttctaactgggtccaatcctgtttacaaaaaggtttttgagggtggtatgcctcaattatagtagcagatttattatggtaaatactgagatcagaaagcatgtgtaactgtgttatagagtgattgcatctaggcattattgccagccaagattgataaatatgcccaataagtataattgttctctgtgtcagcccttgctgaaggaatactcatggcagtggtgatcactgctatcatagctaccattaaat

SEQ ID NO: 951344 - DNA, 487 bp, Homo sapiens
cttagccacatatacacttgaaataaatcatatatatacgatttatatataaataaaacagaatatatatttgtacatatattctactccagtttaaatgagagcctgtgaaacttkaagtattggttccagttttggatataataatactttaaaaaatagtgttttagttactatatctaaaaatccattttatcagtactttgatatcaagcatgattaattggctcaatatattacatttgaatttgtttttggcaccatactgactcaccgtttcttaagaattttgtcctaaaactgaagatttttttttttttttaaagagaagattcttttggggtatagaaatttcttaaattgtatacaaaatattgtgtgcatttatttttttctggggaaaggtccatgattttcaatggattctcaaagaaatcggagacattttccaagttaaagtccttgctttaaactgctctcccttgaa

SEQ ID NO: 951345 - DNA, 616 bp, Homo sapiens
ggatcagctggagtacaaattctctgatcctccccagctatagatgtgcaaggtgggatcagggagggaaactcaagactcttcatctttaacaggtgttccaagccattctgrttctccttccacctactgcgaaaatgtaaagtggctcgcttcctatgacaggacctcttgtttctcacatttggggtaaatctataactaaagcgatggtatctacattaatttgaaggtcaaaagtttgctgtgatggaagaaaagaccattctttcgtgcatcctgaggcacttttggatagaatccaaccagaaaagagaagagcttggtctagaaggacagttgattcttcgtccaagtaatggcatctggatcaagttgaagaggagaaatgcagatgaacgctaactatattattgggttgtgcctttatcatgagaaaggtctttattttaagagatccttgtcatttacaatttacagatcatgagttcaatatgcttgaatcccctagacctaatttttccttgatcccactgatcttgacatcaagtctaacaaagaaaaagttttgagttttgtattttcttttttcttttttctttattttttttttttg

SEQ ID NO: 951346 - DNA, 403 bp, Homo sapiens
ttcaggatgacgggaaacaatgttgtacattagatcctccaacttattcacactgcataattggaactttggaccttttgaccaaaaccaccccatagctggcactccccatactctggctaccaccattctactctctgttagcatgactttgacttttttagattctgcatgtagttgtaagtgcctctcttcagatgatcatatgatttttatccttcattttgtgaatgtggtatatagcatttattgagttgcatatgttgaaccatccttgcatcctaggctcagttgatcatgatccttttaatgtgttgttgaatttagtytggctaatattttcttcaggatttctggatctatgttcatcaggaatattgatctataattttaattttatttt

SEQ ID NO: 951347 - DNA, 599 bp, Homo sapiens
aagttggagtgcctgttaaatgggtattctctgtctctgttttgactgaggcccaaagatagtaactgtcaatgctactcatattgcagaacaatctgtgaatccatcaaagcagaccttgccaaggaggcggctgggaataatttggggaccctcggaagaccacttgcctccattcttttagaaatattggacacgaaattagaaaggttttttgtgggaaagatattggtatgctgctgttccactacttggcctccaggacttttctgagggacaaagatgcctgctagggattcactttatatctgtgtcaggagatgatgggtctgtgttagtctgttttatgctgctgtaacagagtaccacagactgggtaatttatgatgaacagaagtttatgtggttcatggttctggaggctggaagtccaagagcatgatgccgacatctgacaagggccttcatgctgcattatgtcatgacagaaagtggaacggcaaaagaggtcaagagcaagagcaagaggrggctgaacttgcttttataacaagcctactctcttaataatgaacccacttccacgataatggtgttag

SEQ ID NO: 951348 - DNA, 774 bp, Homo sapiens
tgggataataatagtgcctccctcataaggttttgtgaggattaaattgatttaagttttagagtataagagtgggattctcctgtttagaaccttaacacactagcaatccactagtgatcttcctaagcaaggtagaacaaccatcctttctcctctgatatgctctgccctgcatcacacctgttctaagggtttcattgtagggctggccattgagaatcctttctatgtcccttttcatggtgagtttggccatttaaaaatgtatataatcaggtaaaaacttaagcaatagaaaattctatttttaatgcaatgaacttgtttatttccataagatggataattatctattgctggccctatttttagaaggaggaaactgaagcatctacagtatatgtgatttgtctcctactactcaccaagtcagagataaaggtgacattaatcctatgaaatcaatttttttaaaaaacccattaaattgtgttaaattttgataagtatttatcgagcaccttctgggtgcaaggcacaaaaatatggggcaggaggtacaaaggctaataagatgtgtaccctggttgaagaagtctacaatcttgtagggaaaaggagacactgctacataaacacacacacamacacacacacacacacacacggcaatatagaatgtgaaccaggttttaacaggtacaaataaagtatgagaaagttcagaaggagaccaaaacaggggaaagaaactaatatttattaaatttt

SEQ ID NO: 951349 - DNA, 602 bp, Homo sapiens
ctaagtgttattacaaaagagtaaaaaaagtttaaacattaaaaagtttataaagtaaaaaagtcmcagtaagctaaccttaatttattactgaagaaatacatttaaaaaataaatttagtgaagcctaagtgtacagttgtacagggggttttttttttttttttttttttttttgcgacagagtttcactcttgtcacccaggctggagggcaatggtgcgatctctgctcactgcaacctccgcctcccgggttcaagcaattcttctgtctcagcctcccaagtagctgggattacaagtgcctgccactatgcccggctaatttttgtattttttagtagagatggggtttcaccatattggccaggctggtcctggaactcctgacctcaagtaatccacccgccttggcctcccaaagtgctggaattacaggtgtgagcctccgtgccaggccgtgtacagtgtttataaagcctatgttagtgtacagtaatgtcttatgccctcacgttcactcaccactcactcattcactcacccagagaaacttccagttctgcaagctccattcttgttaagtgccctacacaggtg

SEQ ID NO: 951350 - DNA, 752 bp, Homo sapiens
tgctgtcttagtcagctatrtagtccttagagactgcttatacaatattaaatgattgatcagtccatgcaacagaataaaccccagaatcttcttttcttcttgcgacaactttgaagtttgatcccatttccagagcttcttggtgggatgtgctgaggtctgtgaccgggtttcagttcaaacttcccttttgctggatcctgttttcttcattcctttgcaggtgttgatcctgaaaacacttcccagtttaccacctgctcactactctccgtctcagagaactccgactgtattagtgcattttcacactgctgataaagacataccttagactgggaagaaaaagaggtttaatgggactcacagttccacatggctggggaggcctcacaatcatggcagaaggcaaggaggagcaagtcacttcttacatgggtagtggcaggcaaaaaaaaaagagagctggtgcagggcaactcccgtttctaaaactatcagatcttgtgagacccattcactatcgcaagaacatcacaggaaagactcagccccataattcaatgatcttccaccaggtccctcccacaacaagtgggaattatgggagctacaagatgagatttgagtgatgagatttgagtgtggacacagagccaagccatatttttccaccctgggcccctcccaaatctcatgtcttcccattgcaaaaccaatcatgtcttcccaacactgcccaaaagtct

SEQ ID NO: 951351 - DNA, 550 bp, Homo sapiens
gtagatccactgacagcttgcaccatgcccctggaaaagccacaaacactcaacaacaacccgtgaaattagccaggagtgggggctataccttgcaaatccacaggggcagaactgcccaagaccatgggaacccacctcttgtatcagcgttacctggatgtgcgacatggagtcaaaggagatcattttggagctttaagatttgactgccccactggattttggacttgcagggggcctgtagcccctttgttttggccaatttctcccatttgagatagctgtatttacccaattcctgtaccctcattgtatctaggaagtaactaacctgcttttgatttatacgctcataggcagaagggaattgccttgtcttggatgagactttggactttggactgtggacttttgagttaatgctgaaatgagttaagactttggggaactgttgggaaggcatgattggttttgaaatgtgaggacatgagatttgagaggggccaygggtgaaattatatggttttcccccacccaaatctcatct

SEQ ID NO: 951352 - DNA, 554 bp, Homo sapiens
acagtgcaatcaaattagaactcagggttaagaaactcgctaaaaactgcacaactacatggaaactgaacaactgctcctgaatgactactgggtacatagagaaattaaggcaaaaataaataagttmtttgaaaccaatgagaacaaagacacaacgtaccagaatctctgggacacagccaaagcaatgtttagagggaaatttatagcactaaatgctcacaggagaaagtgaaaaagatctaaaatcggcaccctatcttcacagttaaaagaactagagaaccaagagcaagcaaattcaaaagctagcagaagacaagaaataactaagatcagagcagaactgaaggagacagagacacaaaaaacctttcaaaaaatcaatgaatccaggaggtggttttttgaaaagattaacaaaatacatagaccacttgccaggctaataaagaagaaaagagagaagaaacaaatagacacagtagaaaatgataaaggggatatcaccactgatcccacagaaatacaaactaccatcacagaatact

SEQ ID NO: 951353 - DNA, 566 bp, Homo sapiens
ctggtcctgggcttttcttggatggtaggctatttattactgcctcaatttcagaacttgttttattggtctattcagggattcaacttcttcccgattcaktcttgggagggtgtatgtgtccaggaatttatccatttcttctagattttctagtttacttgtgtagaggtgtttagagtattctcttatggttgcttgcatttctgtggtatcagtggtgatatcccctttatcatttcttattgtgtctatttgattcttctcttttcttctttattaacctagctagtggtctatattttataaattttttcaaaaaatgggcttctggatttattgattttttgaagggttttttgtgtctctgttgttgtgtctttgttctcactggtttcaaagaacttgatatctgccttaattttattattgacccaggagaaattcaggagcaggttgttcaatttccatgtagttgtgtggttttgagtgagttttttgatcttgagttctaatttgattgcaatgttgtctgtgagactgtttatgatatcagtgtttttttt

SEQ ID NO: 951354 - DNA, 625 bp, Homo sapiens
tgtagagaatctccattaatgcagctaggtctttcccagatctaagagagattaactaattaactaaragagattaactaagagtctgaacccttttaagatagaaaaaatatatttatcgtctattttgtctgaagcctgtgacctggacgcttcatctacacaacaaaaccattgttggcggggcgtggtggttcacacctgtaatcctagtactttgggaggctgaggtgggcagatcatgaggtcaggagatcaaaactatcctggctaacagggtgaaaccccatctctactaaaaatacaaaaaattagccaggcatggtggtgggcgcctgtggtcccagctactcaggaggctgaggcaggagaatggcttgaacccaggaggcggaggttgcagtgagcagagattgcaccactgcactccagcttgggtgacagagtgagactgtcaaaaaaaaaagaaagaaagaaagaaagaaagaaagaaagaaagaaagaaagaaagaaagaaagaacgttggcttccacaatccccctttgatggttaatattgagtgtcaacttgactggattgaaggatgcaaagtattgtttctgggtgtgtctttgagggtggact

SEQ ID NO: 951355 - DNA, 601 bp, Homo sapiens
caaatcactatttaatatgaagttaggctggacgcggtggctcatgcctgtaatcccaacactttggcaggccgaggtgggtggatcacaaggtcaggagatccagaccatcctggctaacacatggtgaaaccctgtctctactaaaatataaaaaaaatagccagtcatggtggtgggcacctgtagtcccagctacttgggaggctgaggcaggagaatggcgtgaacctgggaggcggagcttgcagtgagccaagatcatgtcactgcactccagcctgggcaacagagcgagactccatatcaaaaaaaaaaaaaaaaaagttaaagctccccaactgaccaacatttaactagagagaaaaaaatgcataaataaaagtaggtaaaacttatggttggaaaaggccagatatccctgaccagaagtggggattgggtcaggggaggacaactgaggaaggcatggggtctaacttctcagacatcctcaacaggaaaacccagcatcacgcgttcggrctggtttgtgcaaagtgagcaaggttgtacattctataaggtggtatatttcagccatccctgcccctcccagaaa

SEQ ID NO: 951356 - DNA, 633 bp, Homo sapiens
gaacaattcagagaaactgggtcactcatacattgctgttgggaatgcaaaatggtgcagccattctggagagtagttttgcaggttctttaaaagctaaacatgtaattaccattcatcctagcrattgcactcctagatatttatctcagaaaaaaattaaatcacattcacactcctagatatttatccaagaaaaaaattaaaacatattcacactcctatttatcccagaaaaaaattaaaacatattcacacaaaaagctgtgttcatagaagctttattataatagtacaaaacaagaaacatcccataagtccttcaatgagtgaatggttgaacaaactgtggtgcatctatactatagaataccactgagcaataaaaaggaaagaacctgttgatacatgcagcagcttggaggaatctccagagaacaatgctgagagaaaaaagccaattccaaaaggttacattctgtatgattccatctatataccatcctggaaatgataaaatttaaaaaccagagagaagtacactagttgggtcaaggagggatgggagggaaagcgagatggcatggctataaaaggacaacatgaagaatgcggggagtgatgtaaatgttc

SEQ ID NO: 951357 - DNA, 681 bp, Homo sapiens
cctgagggacttgtcctgggatcagacattttgaggactttcttgacccttggctgatatccttgcaggcaggacctgcagctaagcaagacgtaggactgcaagctgggttggcaccctmcccctagggagttctccaggccttgccccctctgtccccagcctggaagccctccctggtaccataccccagccgatgagtatgtacccccagaagtacttccgctcagagaagaaggagacggcaagcagggtgtacaggtagaggccctccaccagcagccagaagaagttagccatgacacaatattggaaaaagaccatggctgccttacagcccacctgcagggggaggagaaaagacggggttcactggggctgtcaagggtccttgactgcccacactcgtgtctggggggacaaacacagttgcagtgcagccaacttaatctctttgttgttttgcattatccccttaaaaatgtactcattggttttcccattttccctaattttagatcctctgatacttcgggataaactggtgattttaattatccatccatcaattcatctattcaccttcccatctatatatctacccatctgcccattcaatcatctacccacctatccatgtatccatttatttacccactcacccactagacattcactatc

SEQ ID NO: 951358 - DNA, 549 bp, Homo sapiens
agggatctaggaaatgagaaggcaaagcagtatgggaagtaggcccatctgctggacagacatttgcagagcacttactctgtgttctagtccctagagacagcagtgagtaagctgctgtaacttggaacaatgctctgctggaactcaccttctccttggagaaatagatgataaacaagtacagaagtaagtaaacatggcccggtgcagtggctcatgcctgtaatcccagcactttgagaggccgaggcgggcagatcacctgaggtcaggagttcgagaccagcctggctaacatggtgaaaccccgtctctactaaaaatacaaaaaattagccaggcgtggtggcacacgcctgtagtcccagctacttgggaggctgcagcaggagaatcacctgaacccaggaggtggaggttgcagtgagccaagatcgcgccmctgcactccagcctgggcaacagagtgagactccctctcaaaaaaaaaaaaaaaaaaaaaaaaaaaaaagaagaagaagaagtaagtaaacatactaacaagca

SEQ ID NO: 951359 - DNA, 566 bp, Homo sapiens
agcatggccttgggagaggactttktttgtttgttttttgagacggagtctcactctgtcacccagagtggagtgcagtggcgcgatctcagttcactgcaacctctgtctcccaggttcaagagattctcccacctcaacctcctgagtagctgggattacaggcacctgccaccacgcctggctaatttttgtatttttagtagagacagagtttcaccatgttggccaggctggtctcaaactcctgacctcaggtgatctgcccgccttggcctcccaaagtgctgggattacaggtgtcagccaccgcgcccaaccttaaaagagcctttttcttttgagacaggatctgactctgtggctctggctggagtgtggtggcaaaattctagctcactgcagcctcagactctccagtagctgggaccacaggcacgcaccatcacgccctgctaatttttaaatttttttgtagagacaggttctcgctatgttgcctaggctggtcttgaaatcctagcctcgagtgatccgcttgccttgtcctcccatggtgctggaaa

SEQ ID NO: 951360 - DNA, 668 bp, Homo sapiens
gctggaagcagtcttaaaatagatttttcttttctgaaaagagttttgactgataaatttcctgaggtttggtatatatatatatatatatatatatatatatmtatctatctatctatctatctatctatcttcagcatctaataattatctactaactccagattttttctattcatcttactactcaaagaggttttgcattttttgttactttctatagccatttaatacaagggacagcttgtctggaaaatgatttgagtcaccctttttttccatcagaaattaatcttttttgtttcatgtagaattaccaagacgttaaaggtttccctgctctattttaagtgtgtgtgtgttttctttgtaggtaagcaattttttgagtgtttgtatgccttttatatagcccctttatttaaggttcctgtgtactcatatttaaacagagtttaacattccaattgggcctaatatttgccagaaaaaaatagcatagatagaatcttccttacctaatccctcttttcctgaccaatgtttgaatgccatctttaacttattctaaagggctggaagctacttcaaggatgtggaaggaaggcaggagccatagaaaattgcaatgagggaattttgtgggtgtgtgcttttcctctacattg

SEQ ID NO: 951361 - DNA, 558 bp, Homo sapiens
tgaaagctaagcctcttatgccaaacaaccaagttgtaaatgcaaaggaaaagttcttgaaggaaattaaaagtgctactttgtgaatgcatgaatgataaaaaagtaaaacagccttaytgctgatatggagaaactttgagtcatctgaatagaagatcaagccagccacaaaattcccttaagccaaagcctagttcagagcaaggccctaactctcttcaattctatgaaagctaaagggaggtgaggaagcttcagaaaaaaagtttgaaggtagcagagtctggttcatgagtttgaagaaaagaagccttgtgcatccataaaagtgcaaagtaaagcagcaaatgttgatgtagaagctgcagtaagttatccagaagatctagttaagataattaatgaaagtggctacactaaacaatagattttcaaaagagatgaaacagccttatattggaagaagatgccatctcagacttacgtatctagagaggagtagtcaatgcctcacttcaaagcttcaaccaacaggcttactccttgttagaagtt

SEQ ID NO: 951362 - DNA, 558 bp, Homo sapiens
tgaaagctaagcctcttatgccaaacaaccaagttgtaaatgcaaaggaaaagttcttgaaggaaattaaaagtgctactttgtgaatgcatgaatgataaaaaagtaaaacagccttactgctgatatggagaaactttgagtcatctgaatagaagatcaagccagccacaaaattcccttaagccaaagcctagttcagagcaaggccctaactctcttcaattctatgaaagctaaagggaggtgaggaagcttcagaaaaaaagtttgaaggtagcagagtctggttcatgagtttgaagaaaagaagccttgtgcatccataaaagtgcaaagtaaagcagcaaatgttgatgtagaagctgcagtaagttatccagaagatctagttaagataattaatgaaagtggctacactaaacaatagattttcaaaagagatgaaacagccttatattggaagaagatgccatctcagacttacgtatctagagaggagtagtcaatgcctyacttcaaagcttcaaccaacaggcttactccttgttagaagtt

SEQ ID NO: 951363 - DNA, 657 bp, Homo sapiens
ctttgtgaatcgggcgccgcgtgtcagtccgggccccaaaggcgcttctcagtcacagttagctggtggcgggtctctatccagttagcacctgccttctttcgtgttacggattaatgctggaacgtggcacggaaacttttccaaaaaattgattaaaatcgattgaggattaaaaacctattgagtgctaggcatactttcgcgttgtgtttatttttcatagaagcaaccttaaggttctactctttacgcctccagctacctcgtttagtctcttctgccaaggagagatggggagttgggtcatgcgttttaggagtaagcagtgcagtgaagtatcaggagaagacaggagtttaagaaaccagcagtccctaaatctccactcatgttttgtaaaccaaaagaatgatgtgttgctagtttttattttaattcacctgctagcatgattaattgggtctaaggagtttccatttgacagtgtactcagtagggctgggcacaagttacacaatacaagtgaaatccaaaaataaggggataacggaagggrgagactcttacacttagctaagaatttagcgatcaactattacagtctcgaagttatgcaagtgacatgcactttgaaagagcgactgacttgatcac

SEQ ID NO: 951364 - DNA, 659 bp, Homo sapiens
cagttcctcttcaaacttacaaaaggagcatacgtttcctgtaacagtcaaataatacaaaaatatataaagaaaagttaaccaggtgcggtggctcatgcctgtaatcccagcactttgggagactgaggtgggaggattgcttgagcccaggcattcgcgacgagcctaggcaacatagtgaggcctcgtctctataaagaaaataataataatttaaaaaattaaaaataataaaattttttaaaaagaaaaattaactttctctcccacttccataacttccttgccactcattgaaacataattatatgttatcaagctgctaggtgtcgaggtggtcagttaggacaatgaaccaaacagaaagtaacaaccaaacctttcttctcttactgcagtagtcctggcaagaggcaaagaggaaagtgctcttccatttttccccataggacggcaccaggtgaaggtctggcagatgacatgcagcgctggcaggagggagtctcactgcccagagctctgaactaaaggctttgccattttgtggaccgagggttgtagggccagggagagaaggggaaggactataagaagactgagtcagagcagagaagtgtctcagtggagwctcctaggctagtggggtatgagtcctg

SEQ ID NO: 951365 - DNA, 623 bp, Homo sapiens
ctcatggcaacctctgcctccccggttcaagcgattctcctgcctcagcctcccgagtagctgggtttacaggcatacaccaccacgccaggctaatttctcgtatttttagtagagacagggtttctccatattggtcaggttggtctcaaactcccgacctcaggtgatctacccgcctcggcctcccaaagtgatgggattacatatatatatatacacgtatatatatatgtgtatatatatattatatacgtatatatatacacgtatatatacacatatatatacatatatacacatatacatatatacacatatatacatatatatacatatatacatatatacatatatatacacatatatatacatatatacatatatatacatatatacatatatatacacatatatatatatagcgaaaaacaatctttaaaaaatcaccagaaaatgtagtgcttatagacagacgacttatcttttgttaatcacacctcatcctcctttttcacacatacatacagtctaagtascagatttgcacattcagtttcagcaagaagaattcatttaattcccccactctctgctcacaagacctattctcaggatccatt

SEQ ID NO: 951366 - DNA, 623 bp, Homo sapiens
ctcatggcaacctctgcctccccggttcaagcgattctcctgcctcagcctcccgagtagctgggtttacaggcatacaccaccacgccaggctaatttctcgtatttttagtagagacagggtttctccatattggtcaggttggtctcaaactcccgacctcaggtgatctacccgcctcggcctcccaaagtgatgggattacatatatatatatacacgtatatatatatgtgtatatatatattatatacgtatatatatacacgtatatatacacatatatatacatatatacacatatacatatatacacatatatacatatatatacatatatacatatatacatatatatacacatatatatacatatatacatatatatacatatatacatatatatacacatatatatatatagcgaaaaacaatctttaaaaaatcaccagaaaatgtagtgcttatagacagacgacttatcttttgttaatcacacctcatcctcctttttcacacatacatacagtctaagtaccagatttgcacattcrgtttcagcaagaagaattcatttaattcccccactctctgctcacaagacctattctcaggatccatt

SEQ ID NO: 951367 - DNA, 630 bp, Homo sapiens
cagctgcagaagttcaaccccaatcaggagtatctcaaaaaatagtagtcaagagagaccctcctagaccattgagcagcacattttgtcayctactttgtctggataagattatcaggaactcgggtctacaatgattcacaggcagtggctaatggtttggctacacagatggtgtttgaaaagaacaagaaaaatatgtctttccccagggaggtctgcagggagagtatgtgggtgtacccctacaaatggggatgagttgtgtacatttgtgtcctatgtgattgctcactcatcccactcaggaatggaggctatgtatgaactcaaaaagggcctccacccatcaatcctaatctgcctaccacctctgctgagtagtaacttgccagcagcagggatcaatgctgaaagcccaatgtggtgccattttctggaaaaccatctagtcacatggtggcacattaattacagtggatctcttccatcacagaggagcaacagtttctctccactattaaataggcctttctacagaatgcaaatcagcctactctgccctttgccatctgcggatgtatgaaatgcttattcactgtcttaccactcacaatattgcttctgacc

SEQ ID NO: 951368 - DNA, 463 bp, Homo sapiens
atcatttgctgtgtttgctattatttctcagacaggcaaagggttgtttcttctttgttttgtaatctttcttttactctgagcttatctctagtagtaattgtctaacacatgccctaagctgtaaatacatctgtattgagaggttttgagtttgtctttgctcagtgccctaaagacttcaaggatgcatttttaggtttgtttctcagttcaggatttctacggcatgtgaactgtgtgcatttggacttgatgcccatgcacagagcaggcctgggcgtctaacttctcggaggtgacttattccaaagtggttgtctggcttactccctgcatccctcgggcagtggcagtgtttattctgggaccygaattcagacagtcctttgaagcttcaggctttatgcagacatcccatctcaagttttctttgtgtagagaacttaggtttccattcttg

SEQ ID NO: 951369 - DNA, 551 bp, Homo sapiens
tgcaagtctgaaatccaatagggcagtcattaaacctgaaagtttcaaaatgatttctttagactccatgtctctcatccaagtaacaytgatgtaagaggtggactttcatggccttgggcagctctacccctgttgctttgcatggtacaggcttcctctcaactgctttcatgggctggcattgactgtagcttttccaggtgcatggtgcaagctatcagtggatctaccattctggggtctggaggacagtggccctcttctcacagctccaataggcagtgctccagtgggaactctacgtggggactctgaccctacctttcccttgcacactgccatagcagaggttctccatgagggtcctacctctgtagcaaacttctgcctggacattcaggcatttccacacaccctctgaaatctaggtcacccaaatctcaattcttgacttctgtgtacctgcaggcccagcaccacatgtatgccaccaaagtctgggacttgcacctgctgaagcaatggcctgagctgtatattggcccctt

SEQ ID NO: 951370 - DNA, 570 bp, Homo sapiens
tgagcacccagtgaatgtgagttttaattcttatcacagcaatcctttttctttttcttttctttttttttttttttttttttttccttgagatggagtcttgctctgtcgcctaggctggagtgcagtggctccatctgggctcactgcaagctccgcctcccgggttcacaccattctcctgcctcagcctcccgagtagctggaactacaggcgcccacgaccatgcccggctaattttttgtatttttagtagagacggggtttcactgtgttagccaggatggtctcaatctcctgacctcgtgatctacctgcctcagcctcccaaagtgctgggattacaggcgtgagccactgcgcccggccagcaatcctttttctcattggccttgtacagtcagcctggccacagctttcccagcatagctgtctttgttagggcatgattagcactgaagggcctgaattctggggascctcaggttcccccaaagcttgcactggaaccattcctgcagccgtccaggagatcctgtgtgtgcagcagggctcttattgatgtccta

SEQ ID NO: 951371 - DNA, 638 bp, Homo sapiens
cagaatacattctagccagtttaaaggagaaagggattaaggggtattcagtgacttaccaaattactggggaggttgtttmtaggaccagctagcaaaggcatactacaaaacagcgacaccaaggcagccacagaatctcccataaacatgatgctactcacaaaatttgaaagctcctgcaaaagctgcgtgctctagaaataccccatccgagccacaatcaggaaggcagtagaaatgggatacacagacaacaacatgaccaggtgatatgccatgataaggaagtccctgctatttggcagcttcagaattttgacatatctgctacaatccacacttgtaaaatagatggctgaggcctgggtactgagactatactaattctgccgtagtggtgtttgcctccagaaataacagaagcagaagtgaggcattcatctcactaaccatctcaaagctttcactagtgattccaattagtagaatccaaatatctagaactctattgcaagatagcctggaaaatactgtttgactttctgaccctctgctgtacaggcagacacacaaaaaggcgggaagggatgttatgtttgaatgaattgtgtttactacagtgggttatctctgct

SEQ ID NO: 951372 - DNA, 521 bp, Homo sapiens
aagcaagggggaggagaaggaagagaaattgtagtcgagggcggggtctgggggccggctctggtgctygacctcaggggagctggctcctgtccccgatccgccccagacaggtctaagctacctctttgcacctgggaactctgtgccttttgagagttgaaggcttaaaacaacaacaaccaccacaacaaaactattcacctttttatccaatagaaactaaggtaggtgtggctattcctttattatttaaaagaaaaaaagggaggtaacaaaaccttttacactcaggtgtttcaggaaaaggtttcacgccactagtttgataattgagaaacatcactcacacaaaggcccccctcttcacgcggacagggtgtcccctgggcaagggggaggggagggagagcccgccaacctgatgaatcatctagaaggccacgccttcagcggtcttgcctttggcgaagggcaggatccaacttgggaggggatcacaggcttcggttcaaggcctt

SEQ ID NO: 951373 - DNA, 641 bp, Homo sapiens
tcgggtgggagtgacctgattttcccggtgctgtctgtcaccccttctttgattaggaaagggaactaactccctgactccttgcgcttcccaagtgaggcaatgcctcgccctgcttcggctggcgcagggtgcgcgcacccactgacctgcgcccactgtctggcactccctagtgagatgaacccggtacctcagatggaaatgcagaaatcacccgtcttctgtgtcgctcaggctgggagctgtagaccagagctgttcctattcggccatcttggctcctccccaaaagattcttaattacatctgcaaagtcccttttgccatatgaagtgacatactcagaggttctgaggattaggagctggacatctctggggaataattattctgcccaccccaggagtaagagtggggagacagaagacagcactggagtcatcctctggggagaaagtgaaaacccagccactcctcctcatcccctcatccaggactgtttggggtctgagagtttttctaaaaatagggagaagatggtgtgtggatctgagggtgaagccagaagggatgtggggaaggggaagggctagcaggtgrctgttggaactctgtgaggtcttcaggagaaagatgac

SEQ ID NO: 951374 - DNA, 567 bp, Homo sapiens
ctcaagactatggggaaaatatctccaggccatgtcrgagagcttcacggccattcctcacaccacaggcccagaggcccaggaggaaaaagtggtttcatgggccaggcccagggtctctgtgttgtgtgcagcctagggacttggtgctctgtgtcccagccactccaggtgtggctgaaaaggccaatgtacagctcaggctgtggcttcagagggtggaagccccaagccttggcagtgtccacgtggtcttgagcctgaaggtacacagaagtcaagaattgaggtttgggaacctttgcctagatttcagaagatatatggaaactcttggatgcacaggcaaaagtttgctgcagggacagggacctcacgagaatctcttctagggcagtacagatggaaatgtggggttggagccccttcacaaagtccctactggggcactgcctagtagagttgtgagaagagggccaccatcttccagaccccacaacagtagatccactgatggcttgcaccatgcacctggaaaagccacagacactcaaacgcagcccgtga

SEQ ID NO: 951375 - DNA, 567 bp, Homo sapiens
ctcaagactatggggaaaatatctccaggccatgtcggagagcttcacggccattcctcacaccacaggcccagaggcccaggaggaaaaagtggtttcatgggccaggcccagggtctctgtgttgtgtgcagcctagggacttggtgctctgtgtcccagccactccaggtgtggctgaaaaggccaatgtacagctcaggctgtggcttcagagggtggaagccccaagccttggcagtgtccacgtggtcttgagcctgaaggtacacagaagtcaagaattgaggtttgggaacctttgcctagatttcagaagatatatggaaactcttggatgcacaggcaaaagtttgctgcagggacagggacctcacgagaatctcttctagggcagtacagatggaaatgtggggttggagccccttcacaaagtccctactggggcactgcctagtagagttgtgagaagagggccaccatcttccagaccccasaacagtagatccactgatggcttgcaccatgcacctggaaaagccacagacactcaaacgcagcccgtga

SEQ ID NO: 951376 - DNA, 691 bp, Homo sapiens
atctagaatcaggaggatgggtgggccaacccattaatcactgtctttagaccacagatagtcttcaagtaagccactgtggagatctaagtcattacacatacatagtcacacattgtagaggatatgaagcatataatgcaaattttgactatatttattttaaagtctttcccaatgattaaatggtataatcctatgtccttcacaaccaaatttgatcttcttgaccttggatgtgccatttgcacacagcatgtggatcatgctgaaaaaggagttactaaatcagaatgaacttagccaatggaatgagctcaaccaaccatttactgtaatggcaattgctgtagtcaggaagtatgtttcagggagcccatggaagattatcaattctcttcccatctttggaaattcagcagaatggttttattctgattaagtagtactttgaagtgtttagaatattccatgatagcactagtataatgagtctcatcactttgcaaaaaaaaaaaaaaaaaagaaaagaaaactctatcaactcactataacacaaaaattatgtatatatatatatatatgtgtgtgtgtgtgtgtatgtgtgtgtgtgwgtgtgtctccaaaactggaatacgtggacctacagcaatcctggcattgaggagtgttagtagctacatgagacagt

SEQ ID NO: 951377 - DNA, 620 bp, Homo sapiens
agggcttgatggaggcctgtaaattgacttcctatgaaagagagtgtaagaagtgaaaatgtaaagcatgactggagagccagagtgatgaagccagggtccctttctccagatcctttgtaacagtgttatgtgatctcttctagaagatcgttctgaaagataatgccaacttggaacctaggaaaccatccagtgggtttctgcagcttaggtggttcaaatcctcatcagcacctttgttttctctgcctcagtttgctaacaatgatgttctcagtagctgtaattgctgtctttgaatacgtaagcatttttttttagatgacagggatatatgtgcatttttattttaccaagtgttagaatttttactctgcttttgtgggctctgggttagctacttggttgtttagatgtaaaatgattagcagggaaaactctgtgtgtgtgtgtgtgtgtgtgtgtgtgtgtgtgtgtgtgtgtgtgttataagtttcttttgttgtcagaggacttagaattttattttatatggtaattctgtcaatttactttattctccaccccacatttattgaacagcaaaktatgaaagtaacgtgtcccataaccagcct

SEQ ID NO: 951378 - DNA, 620 bp, Homo sapiens
agggcttgatggaggcctgtaaattgacttcctatgaaagagagtgtaagaagtgaaaatgtaaagcatgactggagagccagagtgatgaagccagggtccctttctccagatcctttgtaacagtgttatgtgatctcttctagaagatcgttctgaaagataatgccaacttggaacctaggaaaccatccagtgggtttctgcagcttaggtggttcaaatcctcatcagcacctttgttttctctgcctcagtttgctaacaatgatgttctcagtagctgtaattgctgtctttgaatacgtaagcatttttttttagatgacagggatatatgtgcatttttattttaccaagtgttagaatttttactctgcttttgtgggctctgggttagctacttggttgtttagatgtaaaatgattagcagggaaaactctgtgtgtgtgtgtgtgtgtgtgtgtgtgtgtgtgtgtgtgtgtgtgttataagtttcttttgttgtcagaggacttagaattttattttatatggtaattctgtcaatttactttattctccaccccacatttattgaacagcaaagtatgaaagtaaygtgtcccataaccagcct

SEQ ID NO: 951379 - DNA, 404 bp, Homo sapiens
atccctgatgaaactgatacaaaaatcctcaacaaaatagtagcaaacttaattcaacaatacattacaaagatcattcatcatgaccaaagtgagatttaccccagagataccaggatagttcaatttacatgtatcaatcagcaagatagatcataccaacagaatgaaggacaaaaaccattgaccacttcaaatgatgctgaaaaatcatttgataaaattcaacatcccttaatggtcaaaaccctcaagaaagtaggcattgaaggaacatacctcaaaacaataagagctawatatgaaagatcaacagctagtagcatactgaatagggaaaaaactgaaagtatttcccgtaagttctggaatgtaataaggatacccacttttacctctattat

SEQ ID NO: 951380 - DNA, 593 bp, Homo sapiens
tgaagccagcaatagtttgccattctgagaatcctagggtccttaagtatcatgctaagtcttttctgtctgtgttctataaatagaataacaaaggctgggcgacagcatatccatttactggtttactaatagtaatggtttaccgaatagtataagcgcactgttgagacctactgctcagaaagtaaaattccttttcaaatattgctgcttattgtcaatgcacctagtcacccaagagctctgatagagatgtacaaggaggttcatgttgtgtttatgcctgctaatacaacatgcatttttcagcctataggtcaaggaataacttcaatttttaagtcttattatttaagaaatacgttttataaggctatagctgacatagatagtaattcttctggtatatctgggaaaagtaaattgaaaacccctagaaaggattcaccattctagatgccatcaagaacattcatgattcatgagaggaggtcaaaatatcaatattaacaaaattttggaagaagttaattccagctttctttgtgttataaacataccwattatactcttctggttacttttaaatg

SEQ ID NO: 951381 - DNA, 625 bp, Homo sapiens
gggtgcagtgtggcatgttatactcatactcaccctggcagtggcaggttgtcagggtttacacacacacaccagtggggcccatgcagttgcagtgaggcctctgcatatgtgcacactgrcgaaacagtgagtaaagactgtgcacagtgcatgccggcaatgcagtgaggggggactgtaagtaggtgtgcactattggaggtatatttgcagaagctctgcaatgagagcagagtagtgtctgctgctatggtgatggccactgagaagcaccctcgttgggcatccaaagctgccctccaacagggtatggactggcggggaccccaggagaggccagtcaacaggagagcatctaatcacactgggatgtcccacgggcaagacagcccttctctgtgcaggtctgacaatcaataatgaccaaagtcactcagaggcatgcggtaagccttaggaaatgggtgtccctggctgtgcttcactggaaccattcttatgtcaaactatctgggctctacacatactggaatcctgtctttgctacttctccaagcaactctccttgctagctcgaatgtccatggggattgtgaagtctcctaaagctaggattctggag

SEQ ID NO: 951382 - DNA, 581 bp, Homo sapiens
ccatctggtcctggactttttttggttggtaggctattaattgctgcctcagtttcagaacttgttattggtctattcacggattcaacttcttcctggtttagacttgggagggtgtatgtgtccaggaatgtatccatttcttctagattttctagtttatttgcatagaatgtttatggtattctctgatagtagcttgtatttctgtgggatcattggtgatatcccctttatcatttttttattgtatctatttgattcttctttcttttcttctttattagtcttgctagcagtctatgtattttagatctcaaaaaaccagctcctggattcattgcttttgaagggtttttttgtgtctctatctccttcagttctgctctgatcttagttatttcttgtcttctgctagcttttgaatttgtttgcactgtgggatcagtggtgatataccytttatcattttttattgcatctatttgattcttctctcttttcttctttattagtctggctagtggtgtacctattttgttgatattttccaaaaccagctcctggattcattgattttt

SEQ ID NO: 951383 - DNA, 586 bp, Homo sapiens
aataaggctttcagtcaacagtaggatattaatagttaagttttttgggagtcaaaagttttatgcagatttttgactgtgtaggggcattgttaaagggttaactatattagtccctaagatatgatttcctaatattttcttccattctgtggttatctcttattttcttaatggattcttcaaagcacacaaatttttaatattgaagaagtctgttttatcattttctttctttttcttgtttgtttttagtgtgatatctaagaaactatatagtctatttcaagatcacgaagaaatgcactggttttcttctaagagttttgtagttgtagctcttatagtcaggtcttcgatacacttttagttaatttttatatataggttgaggtgaatatccaattattccagcatcaatggttgagaagactgttccctcccctatttcattgttttggcactgttttcaaaaatgaattgacaataaacgtgaggatttacttctgggcrctcagttggattctattaatctgtgtgtctctcctttcaccagtgctgactgccagtgccatgcttttctgat

SEQ ID NO: 951384 - DNA, 479 bp, Homo sapiens
cagcaggtgtagaatgatgaggacagaatgatactacgtatgctgtcccatagggtttctatggattttacgtttatgcctctatctagaagtagagatgatagatagatggatagatgatagatgacagataagatgatagatatgggggcaaacatagaagaatacagaagttagctaacatggataaggggtcatcagtggagactttagcattatctaaaacattttgtaaaggggaatatattcatgtattaatcgacaaacagaaattaaagaaaaagaaaatatattaataatgaagtacaatgtaattaaagggccaggcacggtggctcacgcctgtaatcccagcactttgggaggcctaggtgggtggatcacaaggtcaggaaataaagaccatcctggytaacacgtgaaagcccatctctactaaaaatacaaaaacttagccaggcgtggtggcacacgcctgc

SEQ ID NO: 951385 - DNA, 596 bp, Homo sapiens
ctagagacttattgacaattgtgaccaaaaatgctgatagtgatatgaacagagatggccaggctattgaggtctcagatagaaatgaggaactaattggaaactggagtaaagtcacacttgctataatttagcagagagactggcagcattgtgcccctgctctaaagatctgtggaatgttgagagagatgattagggatctcgtggaataaatttctatgcagcaaaatgttcaaggtgtaaacttgctgcttctaacagtatatattcatatctgttcacaaagtgatgatctaaaattgcaatatatttaaaagggaagaagagcataaaatattggaaaatttgcagcttgaccatgcaatagaaaagaaaaacccattttctgggaaggaattcaaggctgcagaaatttgcatcattgaaaaaaagtgaaatgttaatagccaagacaatggagaaaatgcctccagggcatttcagagaccttcatgggagcccctcccatcacaggcctggagacctaggagggaraaatgtttttttgagccaggcccagggccacgctgctctgtgtagccttgggacatggc

SEQ ID NO: 951386 - DNA, 475 bp, Homo sapiens
acgtggaagagaaaggaaaagctttttggggagagatattcaagyaggctatggagcaatcacttagtagagaaatttgcataactaacagggagccatatgctgatagctaagacaatgggcaaaaggccatgaaggcatttcagagacctttgaggcagcccctgtgtattagttctttctcagtctgctaatacatacccaagactgggtaatttatgaagaaaaaaggtttaattgactcacttttcaacatggctgggaagacctcaggaaacttacaatcatggcagaagaagtaaacacgttcttcttcacatggcagcagcaagaagaagtgccgagcaaaaggggggaaagttcttcataaaaccatcagatgtcttgaaaactcaatcactaccatgagaataacagcatgggggtaactgcctccatgattcaattacctcccactgagtccatcccacgacat

SEQ ID NO: 951387 - DNA, 615 bp, Homo sapiens
gtggaaggaatgaagactcartataggtaattgtttctgtaattgaaaagaaagcctatttgaaaaatcctgatgagaattatgatgtgtattcagatttttgaatgattgaacttagttgaccacaaggtgtcaaggaaggtactagaacattaacagtatactgaagaaatgtttaaagttaataacaaataggaataggggcatattagtgcttttaaattggtaaattaaatgttaaacttaacaatttaatgttaattagatggccaggcacagtagctcatgcctgtaatcccagcactttgggaggccaaggcaggcagatcacctgaggtcaggagtttgaggccagactggccaacatggtgaaaccctgtctctactaaaaatacaaaaatcagccgggcgtggtggtgcacgtctgtagtctcaactactagagaggctaaggcgggaagatcacttgaactgggtggcggaggttgcagtgagccacgattgcaccattgcactccagcctggaccacaaagtgagacttcatctgaaaaacatttaatgttaaattagagaagattaaaaaaccatatacaatagtcactggttttatatca

SEQ ID NO: 951388 - DNA, 600 bp, Homo sapiens
gaaaaatgtcttaatgggattgcaaagagaaaaaacaaactttgactgggagcagtggctcatgcctgtaatcccagcacttygggaggctgaagcaggtggatcacctaaggtcaggagttcaagaccagcctggccaacatggtgaaaccctgtctctactgaaaatacaaaaaactagcacggggcatggtggcacgcacctgtaatcccagctactcaggaggctgaggcaggagaatcgcttgaacccgagaggcagaggttgcagtgagctgagatcgcaccactgcactccagcctgggcaaaaaaagctaaactctgtctcaaaaaaagaaaaaaacaaactttttttcactctactctcacacttaacacacttctgtgaccccacacatttctgtgtgaggcagctccccacacaccaagcaattctccagcagacatgaactggacatcctgtaattcaatttgattctgaccctttctactgggacagtgtcagatcacacaggttaaggactcagtcccacagaactgcccccacttcagatgccaataccaagtcataggttgtcacctatattatgacccactag

SEQ ID NO: 951389 - DNA, 554 bp, Homo sapiens
tgatgttgagtgcctgtggcttttctcggtacagggtgcaagctgccagtggatcttctggggcctagaggacagtggccctcttcttacagctccactaggcagtgcsccagtggggactctgtggggggggctccaactccacattttccctctgcgctgccttagcagaggttctccatgagggctctgcccctgcagcagcttctgctggacacccaggcttttccatacatactctaaagtctaggcctcaactcttgtactctgaacacccacagccttactacaatatggaagccaccaaggcatacagtttgcaccctctgaagcagcagcctgagctgcacctgggcccctttgagccatggctagagctagagtgactgagatgcggggagcagtgtcccaaggctgcacagggcagcaggaccctaggcctggcccatgaaaccattcttccttcctagacctctgggcctgtgatgggaggagctgctgtgaaggtctctgaagtggcttccaggtcttttccccattgtcttggctattag

SEQ ID NO: 951390 - DNA, 613 bp, Homo sapiens
ctagggagaaattgaaggctgcagaaatttrcataagtaaagaagagctgaatgttagttgccaagataatggagaaaacgtctccagggaatttcagatacattcacagcagtccctcccatcacaggcccagaggctgggagggaaaaatggttttgtgggtcaccactgctctgtgcaaccttgaggcatggcaccctgcatccctgctcctccagctaaaaggggccatggtacagcttaggccactgcttcagaggttgcaagcctcaagccttggcagcctccatgtggtgttaggcttgcaggtgtgcagaagacaagagttaagctttgggaacctctgcctagatttcaggggatatatggaaatgccaggatgttcaggcagaagtctgctgcagaggcacagtcctcatggagaccctctgctagaacagtgtggaggagaagtgtggggttggagcccccacacagggtccccactgcaacactgcctagtggagctgtgagtagagggccatcatcctccagcctccagaatggtagatccactgacagcttgcaccgtgcacctggaaaagccactgtcagtcgacaacagcctgtgaa

SEQ ID NO: 951391 - DNA, 784 bp, Homo sapiens
tgtttttttaatgtgcatccccttgacctagcaattcaatcttagaaattaatcctaaggaaataatcatgactgtgtatgagtaattcactccaaggatattcatgttagcattgtttgttttaaaaattggaagcaatgggccgggcacggtggctcacgcctgtaatcccagcactttggactttgggaggccgaggtaggaggatcacttgaggtcaggagttcaagaccagcctggccaacatggtgaaatcccgtctctactaaaaatacaaaaattatccgggtgtggtggcatgtgcctgtaatcccaactacttggaaggctgaggcaggagaatcacttgaactcgggaggcggaggttgcagtgagccgagatcacgtcatcgcactccagcctgggacacaggagagaaacgccgtctcaaaaataaataaataaataaataaataaataaataaataaaaatagaaaacaatggaagcgtttctaatgaggggctgtttactaggtggccgttcattttcattcattcaggtatttattgagcaggcatcatgtgccaggcagtgtattagacattaggcatacagcagccggtgaatgaatgaacaaaatctctgtcctctgggaggggagacaaccagggaaccagtaagcaagtgcaatatccgttgtgggtcagcrggtggtgggggtaagaggagaaggcagcaaaggcaatgctggaggtgagtgccgatggagactagagggaaggtgaggaagtgagtgagct

SEQ ID NO: 951392 - DNA, 577 bp, Homo sapiens
atgccaccccttagttattcaggtagaataagtcaaaatatgttttttttaaaaaatgtaatttgaatcagcttctgatatggtttgaatttgtgtccccrcccaaatcttgtatccaactgtaatccccagtgttacaggagtagcctggcaggaggtggttagatcacgggggcagacttccccttgctgttcttttgacagtgagtgagttctctcgagatctggttgtttaaaagtgtgtagcagctccccctttgctcccttcctacttctccagccatgtaagatgtgcctgtttccccttcaccttcttctataattgtaagttttctgaggcttccccagccatgcttcttgtacagttgcagaactgtgagtcaattaaactccttttctttattaattacccagtcttaggtagttatagcagtgcaagaacagactaatacagcttctctctaaggcaaagagcactgtctcatttccatttaaactatgtccttttatatttttctgaagatttcatactctttcttctccactttttttgtatgctctttctgcattgttagtc

SEQ ID NO: 951393 - DNA, 602 bp, Homo sapiens
ctaccaccattgaagacggatggggaccatgagccaagaaatgcaaacrgcctctagaaactgcaaaaggcaagaaaacaggttctccactagactccccagaaaggaattcccaggccctttagccaaatgaagcctatcggaagcacacgagggagaacatagtaacagttcagtagagaaatctggcagaacgctaagtgtgttagtcttttgtgttgctataaaggaatacctgaggcagggtaatttgtaaagcaaagaagtttatttggccaggcgtggtggctcacgcctgtaatcccagtactttgggagactgaggcgagtggatcacctgagatcaggagttcgagaccaggctggccaaaatggtgaaacctcacctttactaaaaatacaaaaattatccaggtgtggtgatggatgcctgtaatcccagctactcgggaagctgaggcagaaggatcacttgaacttgggaggtggaggttgcagtgagatgagatcacaccactgcactccagcctgggtgacagacacttgaacctgggaggtggaggttgcagtgagatgagatcacgccactgcactccagcctg

SEQ ID NO: 951394 - DNA, 444 bp, Homo sapiens
tgatggactcattagtagactagacatggctgaggaaaagaatctctgggcttgaggatatgtcaatagaagcttccaaaatggaaggtcaaagggaaaaaagccaagaaaacaagacaaaacagaacaaaaaagccagaacagactatccaagacctgtggggcaactataaaaggtataacttatgccttatgggaataccagaataagaagaaagagaaaaaggaacagaagaaatatttgaagcaataataactgagaatttactccaaattaagtcagataccaaactgcacatccaggaagctcagagaactctaagcaggataaatagaacagaacagagagcccagaaatagacccacataaatayagtcaactgatctttgaaaaaggagcaaaggcaattcaatggagcaaagattgtccttttaataaattct

SEQ ID NO: 951395 - DNA, 843 bp, Homo sapiens
gtaggatatgtgcaattgtgtataaaaatatatccaacaaaaattcaggggccttctacctcagtgaaatttgtaagggtctagtaatatgggacatgtagagatattcttcttaagataaaaaataacccgttctacaatcaaatggaacacaatgcctattgggcctttttgctttggaaggcaacatattcctcatttgggtgtgttactctcacccatatgctgagttacctgaaaagctagtagctttgagtgggccccagaacaaaaaccatctgtttatcaggtccatgcttccatgtaaactgctctgcaacttggactagatgttccgtaagttctaaagtgtcagtggaagacagagatgctatttggagcccccatagatgaatcatagcctagtctcttgggattttggaacaaaaccttgccatcttctactgataactacttcccttttaagaaacagctcttggcctgctgctgggccttagtagagactaaacacttaaccatgggccaccaagttaacatgtgacctgagttgctcatcattaaacgggtattgtctggcccacctagtcataaagttgggtatgcacagcagcatttcatcattaaatggaagagatctgtgactggactagagaggccctaaaagcacaagtaaattccctgaagaagtggcccaaatagctatggttcctgctgctactgcgttgccttgtttctctcygcctgcagctatggcctcgtgagaaattacctataatcagttgataaaggaagagacaactcaggcctggcttatagatggttctgcacaatatgcaggcacca

SEQ ID NO: 951396 - DNA, 757 bp, Homo sapiens
actatagctcctttctgggatatatctgaaggtcagcaataaagggaaatcctcccagtgggcagaacttcaagcaatgcacctggttgttcacrttgcttgaaaggagaaatggctggacacgtgattatataccaattcatgatctgtgaccaatgatatggctggatgatcagggatttggagggaccatgattagaaaaattgatgacaaggtaattttgagaatagatatgtaaatggacctctctgaataaacagaaagataccgatatttgtatgccatgtgaatgcttaccaaaggatgaattgtgcagagggggattttaataatcaactggatggataatctcttctgtggatatcagtcaacgcctctcctcagccactcctgtcatctcccagtgagctcataaacaaagtggttgtggtggcaggaatggaaattatgctgggctcagcaacactgacttgactacactcaagttccgctcaccaacactgacttgactacaaccactcctgagtacccaatgtgccaacaacagagacaaacactaaatcttcaatgtggttctattctccaagggtaatgagcaagctaccctggttgcaggccaattacattgaactgcttccatcttggaaagtccaattttttttttttttttgagacagagtagtgctctgttgtccagatttgaatgcagtggtgcgaacacagctcactgcagcctggacctcttgggctcaactg

SEQ ID NO: 951397 - DNA, 754 bp, Homo sapiens
atagctcctttctgggatatatctgaaggtcagcaataaagggaaatcctcccagtgggcagaacttcaagcaatgcacctggttgttcacgttgcttgaaaggagaaatggctggacacgtgmttatataccaattcatgatctgtgaccaatgatatggctggatgatcagggatttggagggaccatgattagaaaaattgatgacaaggtaattttgagaatagatatgtaaatggacctctctgaataaacagaaagataccgatatttgtatgccatgtgaatgcttaccaaaggatgaattgtgcagagggggattttaataatcaactggatggataatctcttctgtggatatcagtcaacgcctctcctcagccactcctgtcatctcccagtgagctcataaacaaagtggttgtggtggcaggaatggaaattatgctgggctcagcaacactgacttgactacactcaagttccgctcaccaacactgacttgactacaaccactcctgagtacccaatgtgccaacaacagagacaaacactaaatcttcaatgtggttctattctccaagggtaatgagcaagctaccctggttgcaggccaattacattgaactgcttccatcttggaaagtccaattttttttttttttttgagacagagtagtgctctgttgtccagatttgaatgcagtggtgcgaacacagctcactgcagcctggacctcttgggctcaactg

SEQ ID NO: 951398 - DNA, 554 bp, Homo sapiens
ccccctctgctgagagctgaacacttgtcaagatgccctgcctgcagagaggagctaccctctctgctaagagctgaacactcaytgggacaccctggctatggagaggggctgcccactttgggtctcctccgagctgctctattgctcaataaagctcctcttcatcttgctcaccctccacttgtctgtgtacctcattcttcctggacacaggacaagaacttgggaccccctgaatggtggggctaaaagagctgtaacacaaacagggctgaaacacaccccttactcaccacattgagggcaaccagaagagaggagagaagagctgcaacccttcagggagcccagacctaggaaatccccaagccagggctatgacaccctctttagggctctgcagttcctggtgtctccaagcttttaggcaccaccacattccccaatgtgagctgtggaagctgcttatggtacacctgttctagctgcagcctggcagggagcctacacccatgctagcacctggagctgctcgccccaacgcagccagc

SEQ ID NO: 951399 - DNA, 587 bp, Homo sapiens
ttcttaagaagagtttactgattcttctttcartacgggccttttaataagatattgtattttacttcagctatgggtgcagacaattaaaggattctagaaatctgaaagtgttttgccttgtcctcttggttaaatttctggatatattgtctagcaactcaatttgcttaaacaaaattgttgtgtcaaaaaagcccaagtcatcttttatgtgtgtggtctggggagaagaaaaaaatgctaagtttaaaagatttttggaatatctgaagaaaatacagatagcttgtaatggagatgaagcctctggatggtttccagggtgttattttccgacattgagtcttgtatatatcttgaatgtctataagcaaagaatggctatactgtttttaaaaagatatattttatacttattaaccaatgtcctctctattcctctgcctttgaaaatagagctttgggggaaaataagtacctttggaaatatgttttcaaaaataatattcatcctgcttagatttagaagcacagattactctgccttagtttacttcattatttaccagagagattaactcaaa

SEQ ID NO: 951400 - DNA, 482 bp, Homo sapiens
tgttgtatgatcttgcttctcaccagcatctttggactccatgtggtcaccctgtcttttgatcactgattcacagctctgctctttcagcatttggactgctgtgctgctcatctgctcccctccctccagctcatgagagcacatggcttctgcagcacttggatattcatgcctggtatcctcgtgctgatgcatgtgtgcccttctctgccagtttacagggctgagtttttccagaagcccttctgccagtccacccatggccatgcacaccacgttccctaagcccatatccctgagcctgtttctttctcttctcctttactcctccccagcccctcctcttcagctccttccctccttctttcctcctctctctccttccttattcctctccccagtgaatatattgagccctaggtttggccwgaattttggggtaaaatctacataccctgcctgctctctgccttcgtctt

SEQ ID NO: 951401 - DNA, 580 bp, Homo sapiens
tctggtcctgggctttttttggttggtagacaatttattactgcttcaatttgagaattcwttattggtctattcagggattcagtttctccctggttcagtcttgggggtggtgtgtgtgtccagaaatgtatccatttcttctagattttccagtttatgtgcataaaagtgtttatagtattctctaatgtttgtttgcatttctgtgggatcagtggcgatatcccccttatcatttctgattgtgtctatttgattcttctctcttttcttctttgttagtctagctagtggtctattaatttttaaaaaagaaagctcctggatttgttgaatttttgaagggtttttcgtgtctctatctccttcagttctgctctgatcttggttatttcttgtcttctgctagccttggggtttgtttgctcttggttctctagttcttttagtagtaatgttaggttgttgatttgagatctttctagctttttcacatgggcatttagtgctataaattaccttcttaacactgctttagctgggtcccagagatcctggaatgttgtctttttgttct

SEQ ID NO: 951402 - DNA, 592 bp, Homo sapiens
ttacaatgttctatccatacttaggttcaaagaaataatttctgatgcatcttcctaatttatcaaaagaaacattttaacagccttaaagtgacaacactaaaatcctctaacacattaatcatagaaaatgacataaaatatgttctaaaagagctataagtgcaaattcaattttctatagacattttaaaatggatcaaggtagcttcatttcatcttgaatttatattacagtagataggaatctttgacttttatcattttcagttggcatacacaatcaaagcaatacatggaaatggatttctcatgcttgagtaaccagacgttctcctttcttagaactgttttccctacttgctgttttgaaattctaggctattattttagataagtttatggtagctgttgtaacagaaagacccctgaagctcaatggctttatacaacagaagcttattttgggcccacatgaattccaaytggtgacaggtgtgaggatgggcttctgctccatttagtcatccaagaatctctactaaacggattctgacatatttaactcttggtttctaagatatccatattg

SEQ ID NO: 951403 - DNA, 540 bp, Homo sapiens
tgtctcccttactgttattgacaasttgttttgggcatgctttgctcacacctactatgatctcttctgccaacccttctaagatcattctgtgatcattacaatccggttttgctcccggctccctactttacaccctccgaaggtcaacttagatatttctccttcagctacatactgccagtttatatcagtgccatagaagagacactggtaatgcatcttttgatgctttatttgaacaactctgtccccaaatcccagacaggttatcatattttgcaataacttctctgtccacattattcaatggccgagttcaataaatgcttggaggttttcaaactccttattctcattcaacacatccttgtatctcctgaaaaatagtgggtttgcagatatttacctgggcctttagtgtatcagctagcatgccagttgttacttggtccgtttattctttaacccatccaaggattcatctatgcctcaatgttccttcaaggacaatcaccacccaattctattatctgactc

SEQ ID NO: 951404 - DNA, 580 bp, Homo sapiens
gttttatttcttccttcccaatctgtatacctttaatttccttttcttgtcatattgtattaactaagacttccttccagtacaatgttgaaaagcagtgcttagagggaacttctttgccttattcctgattttagcggaaaagcttcaagtttcccattaaattatattagtttaagtataatgttagctgtaggttttcaaaatatattttgcttatgaatttgaggaagttttcttctattcctaatttgctgagagtttttatcatgaatggtgttgaattttgtcaaatgctttttctgcatcttctgatattttcgtgtgatttttcttctttggcttgttgatggaatggattgcataaattattttcaaatgttgaaccagccttacatatctgggataaatcctacttggtcatggtgtataattatttttatacattgttgcattctatttcattctccttctattttctggaagagattgtagasaattggcataatttcttccttaaatgtttggaagaattcatccgtgaatgcatctgggcctggtgttttctgttttggaaggt

SEQ ID NO: 951405 - DNA, 614 bp, Homo sapiens
tctaaaatccagactctataaagaacttacaaaaatcaacaagcaraaaaccaaataaccccattaggaagtgggcaaagaacatgaaaagacacttctcaaaataagacatataagcggccaaaaaaatgaatgaaaacatgctcatatcattaatcagaaagaaatgcaaatcaaaattgtgatataccatctcacactagtcagaatggcttttgttaaaaagtgaaaatttaacaggtgttggagaggctgcagagacaaaggaacacttatacactattggtgggaatgtaaattagttcagccaatgtggaaagcagtttggagatttctcaaagaactaaaaatagaactactagtttacccagcaatctaattactgggtctatacctaaagaaaaaaattatgttaccaaaaagatatatatacctgtatgtttgttgtagcactattcataatagcaaagacatggactcaacctaggtatctgtcaatagtggcttgtataaagaaaatgtggtacgtatacaccatgggatactatgcagtcataaaaaagaacaaaatcatttcctctgcagcaacatggatgcagttggaggtcattatc

SEQ ID NO: 951406 - DNA, 461 bp, Homo sapiens
ctcagtaaatgttggctgttaaaatcatgttctcaggccgggtgcagtggctcatgcctgtaatcccagcattttgggaggccgaggcgagtggatcacctgaggtcaggagtttgagaccagcctggccaacatggaaaccccgcctctactaaaaatctaaaaattagctgggtgtggtggcgtgcacctgtaatcccagctactcaggaggctgaggcaggagaatcacttgaactcaggaagtggaggttgcagtgagccacgatggcgccattgcactcccagcctgggtgacgagcaaaactctatctcaaaaaaaaaaaawtaattaaaaaatcatgttctcaatgtagtccaacattttagtagctttttaggagacactgtagcattgcagacttgttgcctgcttattttccacaagtgctgttgttaagcagttttgtatttgagcagct

SEQ ID NO: 951407 - DNA, 461 bp, Homo sapiens
ctcagtaaatgttggctgttaaaatcatgttctcaggccgggtgcagtggctcatgcctgtaatcccagcattttgggaggccgaggcgagtggatcacctgaggtcaggagtttgagaccagcctggccaacatggaaaccccgcctctactaaaaatctaaaaattagctgggtgtggtggcgtgcacctgtaatcccagctactcaggaggctgaggcaggagaatcacttgaactcaggaagtggaggttgcagtgagccacgatggcgccattgcactcccagcctgggtgacgagcaaaactctatctcaaaaaaaaaaaattaawtaaaaaatcatgttctcaatgtagtccaacattttagtagctttttaggagacactgtagcattgcagacttgttgcctgcttattttccacaagtgctgttgttaagcagttttgtatttgagcagct

SEQ ID NO: 951408 - DNA, 657 bp, Homo sapiens
ctcctgggtcgagtgggaagttggagaacttttctgtgtctagctaaaggattgtaaatgcaccaatcagcattctgtaaaaacgcaccaatcagtgctctgtgtctagctaaaggattgtaaacrcaccaatcagcactctgtaaaaatgcacgaatcagtgctctgtgtctagctaaaggactgtaagcacaacaatcagcaggatgtgggtggggccaaataagggaataaaagctggccacctgagccagcagcagcaacccactcgggtccccttccacagcatggaagctttgttctttcgctcttcataataaatcttgctgctcgctcactctttgggtctgtaccacctttaagagctgtaacactcgccgtgaaggtccgtggcttcattcctgaagtcagcaagaccacaaacccactggaaggaagaaactccggacacatctgaacatctgaaggaacaaactctggacacgccacctttaagagctgtaacactcaccgcgaaggtccgcggcttcattcttgaaagtcagcgagatcaagaacccactggaaggaataaattccagacacagtactgcctgatcattacctagtgcagacccaagagtaagctctgccatgagcaaaagtcccatgattctt

SEQ ID NO: 951409 - DNA, 480 bp, Homo sapiens
agagactggtggcattttgcccctgacctacaaaactgtggaactttaaacttgagagaaatgatttagggtatcaggtggaagaaatttctaagcagcaaagcattcatgatgtaacttgactgctgttaaaagcattcagttttatatattcacaaagacatggtttataattaaaacttacatccaaaagggaaacaaagcataaaagtttagaaaacttgccacctgagatgtgataaaaaacaataaaggagaaattcaacctggctgcagaaagttgcataagtaacaaaagccaaggcaatggagaaaatctctccttcaaggcagatcctcgcatcacaggcccagaggcctaggaggaaaaactggtygtgcaggctggacccaggcttccctgctctatgcagccttgggacatggtaccctgagttccagatgtggctcaaaagggccaatacagagctcaggtcattg

SEQ ID NO: 951410 - DNA, 431 bp, Homo sapiens
ttagaatgactattatccaaaaataaaacaaacagaaaataacaagcattggcaaggatgtggagaaattgaaacccccatgcattgttggtgggaatrtaaaatggtgcagccgctgtggaaaacagtttgatggctcctcagaaaaccatacacagaattaacatatgatccagcattgccactttcaggtatatacccaaaacaatagcatgaaacacataaagagacatgttcatagcagtattattcagaataactaaaaggtggaagccatgttaagtgttcattgacagatgaatggataagcaaaatgtggtatatccatacaatgaaatattattcagcttttaaaaggaaggaaatttgatacatgcaacaacatggatgaatcttcaggacattgcgttcagtgaaataaaccagtcaca

SEQ ID NO: 951411 - DNA, 431 bp, Homo sapiens
ttagaatgactattatccaaaaataaaacaaacagaaaataacaagcattggcaaggatgtggagaaattgaaacccccatgcattgttggtgggaatgtaaaatggtgcagccgctgtggaaaacagtttgatggctcctcagaaaaccatacacagaattaacatatgatccagcattgccactttcaggtatatacccaaaacaatagcatgaaacacataaagagacatgttcatagcagtattattcagaataactaaaaggtggaagccatgttaagtgttcattgacagatgaatggataagcaraatgtggtatatccatacaatgaaatattattcagcttttaaaaggaaggaaatttgatacatgcaacaacatggatgaatcttcaggacattgcgttcagtgaaataaaccagtcaca

SEQ ID NO: 951412 - DNA, 431 bp, Homo sapiens
ttagaatgactattatccaaaaataaaacaaacagaaaataacaagcattggcaaggatgtggagaaattgaaacccccatgcattgttggtgggaatgtaaaatggtgcagccgctgtggaaaacagtttgatggctcctcagaaaaccatacacagaattaacatatgatccagcattgccactttcaggtatatacccaaaacaatagcatgaaacacataaagagacatgttcatagcagtattattcagaataactaaaaggtggaagccatgttaagtgttcattgacagatgaatggataagcaaaatgtggtatatccatacaatgaaatattattcagcttttaaaaggaaggaaatttgatacatgcaacaacatgratgaatcttcaggacattgcgttcagtgaaataaaccagtcaca

SEQ ID NO: 951413 - DNA, 665 bp, Homo sapiens
cattcctgattttttaaaatttttatttcaaatgtaaggggtacatgtgcaggtttattatctaggtatattgtgtgatgctgaggtttggggtacaaataatcccatcaccagggtactgagcatagtacccaataggtagtttccaatctttgtacttccctttctactctagtaatccccagtttctattattgccatctttatgtccatgagtatccaatattagctcccacttacaagtgaaaatattcagaattttggttttattttcctgcgttaattcacttaaagtgatggcctctaggtgcatccatgttgctgcaaaggatattatttcatacatttttatggctgtatagtattccatgatgtatatgtaccacattttctttattccatacaccattgatgagcacctaggttggattccaatattcacaatattgctattgtaaatactgctgcaataaacatatgagtgcatttgtctttttggtagaacaatttattttcttttgaacatatacccagtaytgagatagctaggttaaatggtagttctgttttaaggtctttgagaaacctccatagtgctttccacagtgactgaactaatttacattcccaccaacagcacataagcattcccttttctctgtagc

SEQ ID NO: 951414 - DNA, 530 bp, Homo sapiens
taaaaattctgtgttcgtcaactagctaataaaaatactttttaaaataaaagagatcaggacggtgggaactcagagatcatgagaggaaagacacataccttaacttaaaaagcaatgtatatgaaagcataaaacatataaccaacaagtttcttttgtttttaagtagtaaattcttaatgaattaccccaatttccatgttaacatatcacatcctcatcttctgtttacagtggtaatttagtgcaaatctaatactagaattaataattagcaattaataaacacattatttctgaggcatgacattttgagactctaaaaagcaattttgtataaaaataaatataacaacaccaagagtctacaaggacacaattatgtcagaagttaaatggatactaaagaagcatcctattttagatagtcctcaaattgaaaccaagaaaataatggcacttttttctccagtggcaaaggtgaaggtaaacyttaaatctttcacagaaagatagtgaggctctgg

SEQ ID NO: 951415 - DNA, 610 bp, Homo sapiens
gctacttcctggctggaggccaacagacacagtccattatagcatctccaggtagaataacactgcacccaagaaggagaaaacttgtttgtgacctcagccatcactattgcctgtagcatcctggctaacaaggaggtcctgagtctatccacaagaccagtttactactactaaaaccaacatttgacaaagccagcacaataaggttatttactaccaaggaatttctcaaaatctacgtcactctcctgtcacccacatcagaactggcacctgctgctgggagtcttgaggacaggtcacatcactggatctcttgcaggcattccctagcaccagcctggagtgtggcagtcccactggtagttgccagtgggactcagaggagcggcagcattcacaataatctgactctcaggcactcttactcctagaggaagggggagtgcactgcatcaaaggactgccccatgagacaaagatctggacggcaggccttgagttcaaggactttcttctggtgggaagtttccttcagaagagtcacaagtgcyatgctgggctcagtagagaaagtctgcagttctaccccaatcatcaggcagcc

SEQ ID NO: 951416 - DNA, 553 bp, Homo sapiens
gagggtcctacacccacagagcctcgctcattggtagcacagcagtctgagatcaaactgcaaggcagtagtgaggctgggggasgggtgcccgccgttgctcaggcttgagtaggtaaacaaagaagccaggaagctcgaacttggtgtactccaccacagctcaaggaggcctgcctgcctctgtaggctccacctctgggggcaggggacagacaaacaaaagacagcaataacctctgcagatttaaatgtccctgtctgacagctttgaagagagtagtggttctcccagcaagcagcttgagatctgagaacaggcagactgctgcctcaagtgggtccctgacccccgagtggcctaactgggaggcaaccccagtaggagcagactgacacctcacacagccgggtactcctctgagacaaaacttccagaggaatgatcagacagcagcatttgctgtacaccaatatccgctgttctgcagccaccactgatgatacacaggcaaacagggtctggagtggacctccagcaaactccaacaga

SEQ ID NO: 951417 - DNA, 581 bp, Homo sapiens
ccctgtctccactgtccccacactccacactgaatccccatcaatctgtgattggtgcagctcctctctgggtcacctgagaaagtgggtcatgtgtactgatgcttcaaaagcagctaccaggttaggcttttttttttttgagacagagtctcactctgttgccatctggagtgcagtggcattgagaggttacagcgtgctggcagccctcacagccctcgcagcccttgcttgctctggacacctcctgggccccacgcccactctggtcgtgcttgaggagcccttcggccctctgctgcactgtgggagcccctttctgggctggccgaggccagagccggctccctcaggtgtggaggaagaggcgtgggcaggaacaagggctgcccggggtgcttgcgtgccagtgcgagttccaggtgggcgtgggctcgacgggccctgtgctcagagctgcctgccggtgccgccggaccgggcagtgaggggcttagcacccaggccagcggctgcggagggtacaccaggtcccccarcagtgctgtcctgccggcgctgcgctcaaattctcgctg

SEQ ID NO: 951418 - DNA, 557 bp, Homo sapiens
tcccacagtgctgggattacaggcgtgagccaacgcgtctgkcccacccagttaatttttgtatttttagtagagatggggtttcaccatgttggtcaggctggtctcgaactcctgagctcaggtgatccacccacctcagtctcccaatatgcttgaattataggcatgagccgctgcgcctgtttcttttctttcttttttttttttttgaggcagagtcttgctctattgcccaggctggagtgcaatggcgcgatctcggctcactgcaagctccgcctcccaggttcacaccattctgcctcagcctcccaagtagctgggactacaggtgcccaccaccacgcccggctaattttttgcatttttagtagagacggggtttcaccgtgttagccaggatggtctcgatctcctgacctcgtgatctgcccgcctcggcctcccaaagtgctgggattacaggcgtgacgaccgtgcccggcctgtttctttactttcttaataaacttgctttcactttatggacttgccctgaattttcccttgctcga

SEQ ID NO: 951419 - DNA, 608 bp, Homo sapiens
tgaaggcaaagagaataaagaatgggcaatagaaggtagttataagtaccatctagcatcacaaaagcgcttacagaaatgagaactataattgtgatragtattttcttgttattttattatgaatattattgtgtgtatatataaatacatatattaagcaaatatattcattcccttttatgttttattcccttatcatgtaacataagatgtattgactttgtatcattattttaagtagtgttaattttactgcatagtatttaagttttggaataccagaggaagagtaaacattaatcaaggactttacctcctctgtgggggaagagattcatgcctttctggtcttagttccttcaagctgctataataacattccttaaagtagttaggttaaacaatgaaaatttacttctcatacttctggagactgggaaatccaagatcaaactgttgacatattattcagtgtctggtgagggccacttcctggcatgttgaaagggtcttttctctgtgtgtttacaaggtagatagggtgaatgggctctcttgggcctattttataaggccccatttatcccatttgtgatggctcccca

SEQ ID NO: 951420 - DNA, 602 bp, Homo sapiens
gtagctgaaaggggccacagtaaagcttgggctattgcttcagtrggtgtaaaccccaagcagcttccacatggtgttgggcctgcagttgcacagaattcaacagttaaggtttggaaaccactgactagatttcagaggatgtatggaaatgcctggatgtccaggcagaagtctgctgcagggggagaggcctcatggagagccactgctatggcagtgtggaaggcaaacgtggggttggagccacagcacagtccccactggggcactgcctagtgaagctgagagaagagggctactgtcccccagatcccagaatagtagatccaccaacagcttgcactgtgtgcctggaaaagccatgggcactgaatgctaccctgtgacggagctgccaaaggccatgggcaccccttgcatcagcagatgcgagacatggtgtcaaaggagatcatttcagccctttaggatttgactaccccactggattctgcacttgcatggggcctgtagccccctttgttttggtcaatttctcccatttggaacaggagcatttacccaacaccagtacccccattgtatcttggaagtaacta

SEQ ID NO: 951421 - DNA, 589 bp, Homo sapiens
aagccttgttagaagggtgcatggcggacacccatggaggatcagcacagcgggtgaacaccaggaaggaaccagagcttggagtccggacatctggaacacagtaggaccagtcctgggaacttgcccactccrtttgagtggaagtgtggcctcatcacacacggtgtgcccgtatcagcactttggtctcagttttgattttgatttggcttgacttgtttgcagaaaggaaagtgaaagtgagtgagtgcttgtgtttgagatgggcgaggtgagtgagtgacccctttaccctttccttcttgcagtgtgagtgtcattttgtctcaggaggaagatgggtgggacgcaaagtaagcccactccattaggaactatgttaaagaatttcaaggaaggatttcatggagactatggagttactatgactccaggaaaacttagaactttgtatgaaatagactggctggcattcgaggtggggtggccatcagagggaaactagacaggtcccttgtttccaaagtatggcacaaggtatcagacaagctggggcacccagacaagtttccatacatagacacct

SEQ ID NO: 951422 - DNA, 581 bp, Homo sapiens
aacgtgagtcctttcctatttgccctaagtgttggccagtctgagaaataragggagagagtacaaaagagagaaattttaaagctgggtgtccaagggagacatcacatgtcagcaggttctgtgatgccccctgagctgtaaaaccagcaagtttttattagcaattttcagaggggagggagtgtacaaatagggtgtgggtcacagagatcacatgctttaagggcaacaaaagatcacaaggcagatgagcagggcaagatcacaagttcagggcaactagaatcactaatgaacttccatgtcccactgtgcacgcattgtcattgataaacatcttaaaagagttcaagagcagagaaccagtctgactagaatttgccaggctggaatttcctaatcctagcaagcctgggggtgctgcaggagagtagggtgtgtttcatccctatctacatctgcataaaagcagacactcccagggtggccatttcagaggcctcccctgggaatgcattcttttcccagggctgctaattattagtattccttactggggaaagaattcagcaatactt

SEQ ID NO: 951423 - DNA, 597 bp, Homo sapiens
tccacaggggatgggcaggtctttgctccaaaatcctaagggcttgtgctgcaggtgcttgcaaaaggctttaaacagcattcctatctgtcactgacacttcaagcacaatttgatctgctggatcttatggttaaagtgccagagcagcttgcatggcagcctggacctgttgtagagctttctcttgttctgagcccttttcaaactggctgcttttttgggtcactcagcaaatgagccagagtaacacagtcaaaagaaaaatatgttgccttcgaattcaaagaggctcactagttgttttgtcacctttccggtcatacaagggtccagttgcaacaacatacccttcaccttagaagggctatctcaacttgccacacaccactggaaccctagaaacttcactgaggtagatacctgaatttttcttggatttatttccctccctctgacactcaaatgtcttaccaagatatctagagttgtagctacttcttggtcgctagamcccattagcataaagtcatcaatgtgtttggtcagtgaaatagaagggaagggaagagtggaagagaagagtgattaagaatc

SEQ ID NO: 951424 - DNA, 630 bp, Homo sapiens
aggttttcactttcctccattgctttgtattcctgattagagatgctagtaaccccatcctcaaaatcttccagccctccctgcttttcctcaagtcctgcattcaaccagtcaccaaattctgcgttttctatcattttgtcatttttttttaatttttttaatttacatgtaaatataatcattttacttccttcctagaaccctatcatcttcaggacaaagtccatgtatcttatgattcctattgaacttcccaaaatgtccagaatgcccacacattatctctctccctccctttgcacatgctgttccttattctggaatttatccttctcccttgcaacactgtcttcttgggaaattcccagtcattcatcaagactcatcccaaacataatttccattttgaattttgatcttaccttccagaaacgctaatactgtccaggtggtcatttctctatgctcccacagcaccaggtatacacacttctatgkcagcagtcagcatatggatttatagcggggttggccacttttcaatctcccatatgaagccataagctctttgaagactaagacactgggtttcaatgggccacttaagtctccaggggccactggctg

SEQ ID NO: 951425 - DNA, 642 bp, Homo sapiens
tcttctgcatatggctagccagttatctgagcaccatttatttagggagttctttctctatttgcttttttggccttgtcaaagatccaatagttgtaggtgtgtagctttatttatggggtttctattctkttctattggtctatgtgtctgtttttgtaccagtgccatgaaaaaatgctcaacatcactaattatcagggaaatgcaaattaaaactacaatgaaatatcaccttactcctgcaagaatgaccataatttaaaagcaaaaaaaaaaaaaaaaaaaattagatgttggcatggctgtggtgaaaagggaacactttacactgctggcgggaatgtaaactagtacaaccactatggaaaacagtacagagagtcattaaagaattaaaagtggaactaccattttgcccagcaatcccactactgggtatctaccccaaagaaagaagtcattatatgaaaaaaacacatgcacacgcatgtttatagcagcacaactcacaattggaaagtatggaaccaaccttagtgaacatcaaccaatgagtggataaaaaatattatatatatatatatgaaataatgtcttttgcagcagcttggatggagctggtggccattattctaaatg

SEQ ID NO: 951426 - DNA, 559 bp, Homo sapiens
acttcttcctctttttttttcttgagatggcatttcatcctgttacccaggctctgggatctcagctcactgcaacctctgcctcccaggctcaaaggattctcatgccttggcctctcaagtagctgggattataggcatgtaccaccatgcccagctaattttgtatttttagtaaagatggcgttttaccatgttggacaggctggtctcaaactcctgacctcaggtaatcacccacctcggcctctcaaagtgtagacttccttttatagctggaaaattgaatgtttggaatagctagagaacactataaaattattattctttatcctgaggaggattccatctcatataatatttatgcagcagtttctgtcaatgctctgttcatatgcccttggaacagctcaccatgttggtgcatgccaaccttgcttctgatggttagcacctgygtctttgtcagagggctgcccttggctttacagaatccacttcatccaggtgataatgtctgcaattcttgtaccatttgtgggcattctttaaccggtaa

SEQ ID NO: 951427 - DNA, 570 bp, Homo sapiens
tattcattctgtttgtggttacagaacacttggatcaatgaatcattaaaccctttaatcagttttgtcatatttttagccatatcttttcaaatatttcttctatcatattctttttttaaacaattatttcaataggggtacaagtggttttttgttacatggatgaattttatagtggagaattctgagattttagtgcactcatcatccaagtagtgtacatttacctaatgtgtagttttttatccctacccctcctctcaccctcccatttctgggtctctaaagtctatcatatcattctgtaagcctttgagtattcatagcttagttcctacttataaatgaaaacatagggcatttggttttccacttgtgtgttactttacttagaataatggcctccagcagtccattccaaaatggctgaataggaacagctctggtctgcagctcctagcatgatcawtgcagaagacaggtgatttctgcatttccaactgagcctcccctggtgatacccaagcaaacagggtctggagtggacctcctgcaaactctaacagg

SEQ ID NO: 951428 - DNA, 573 bp, Homo sapiens
atgtttacatgcagatcaaagggtaaagtttttctttacaccttatatatccttctcttccaaggtggaagtccattcacaaccaattcactgctaggcagacctctttcctaacaagtacagatgsatggcatagtggggattagaacacctcagcactcacaggggcatcctatgggagccaggctggcttctaggacctcttatggatggaagttatttagtggatcttcctggatttgattttatttctttgatctcttaagtacatcaatctttgggtttgctacctgtaatttttgtcttaggaaggcagcatctctattctctccaggaagaaatcttgatgcaggaagaagaaaaagcctggtatcctgccctgtttttgttctcatggagattcaacagatttttacgtaatctctttttactataattcaccctgcgtttcttgaattctttgtgaacatccctttctcctgtagctgacagcttctgttctttctcttggggcttatgagctttctgagtcagatcttttagcaaagccttagttttctgctcatggagatc

SEQ ID NO: 951429 - DNA, 627 bp, Homo sapiens
gaaggaaccagtcttgctactcgattttagccccataaaactattttcagatttcctacctccaaaatggtaagggaataaatttatrttgttttaaaccagtaactgcataatgtgttacaatagcaatgggaaacctatacaaatgccatagtaaattacgttggcttcatcttcaaaatgtagccagaatccgaccatttttccccagtgctgctgttagcattcggggccaagccagttccattccttgcctgggctgttgcaatggcctgcatatgggtctccttgtttaccctgaccacccagccttttctgctccctggaggcagtatttgagtctctcagtatttgagtctcttgatatgctgtctaggaggccctctggctttcacacctgacactttctccagtgcttcagtagctcccagcaatggccatccaattccattgtctttataatgactactcaatagttcacacaggcctggtacattccacccaccagggcatcccttgcctccatataccatcctagttcaccatgcatgacagatttgacaattgcactgcctcagtttgttggggctatttgtacttcacctataatcagcagtagggctctcc

SEQ ID NO: 951430 - DNA, 600 bp, Homo sapiens
tttgacgtctgacacaatcacatgcatataatgtgacagttaccaattctgtacttttccagacatcagtccgtactcccttgcyttcacctcagttttagtacagcaggaagcccacagccatgctgttaatggctgacgttgtggttgttgtccctcggcaccccagtgtgtggtttcctagcttgatttgcccagtaatgtgtcagagactgagttgtagctgatgtacagggtccaactcacatcagactgatttggatgaaaacccaaataggcaatcacactttctagtagaaaatcttgttggggcatcaacattaagatctgaaaatatggccgggtgcggtggctcacacctgtaatccgagcactttgggaggccgagacggggggatcacgaggtcaggagtttgagatcagcccggccaacatggtgaaaaaccgtttctactaaaaatgcaaaaattagctgggcatggtagtgggcacctgtaatcccagctacttgggaggctaaggcgggagaatcatttgaacttgggaggtggagattgcagtgagccgagatcgtgccactgcactccagcctgggtgaca

SEQ ID NO: 951431 - DNA, 772 bp, Homo sapiens
ggctgggagcccctgcagttgtggctggcatctgaagtgagagagatcttgtgggggaacatgcccttcatctgtgaagtctctcagaattgccttgcaaccacccgactgtcatgggtcttgcctaagctggagggaacttgttgaacaacaacagaaaattaattgtggccttgcctgtagcctagagtatgttcctttgttattccatctcagagataacatttcttcccttgtagcacctgcttcagtttattacacttgattaggtgaccgctaattgaagttaacttccctccctagtgaagcagccatgtgtctgctttgctttccattttactcctggcacctcccagtgcctggaacttaatatttgcctagttatttacagttacttagtgaaattaattagaacgagacttactcctaccccaatacactcatattcagattaaaagattcatggctaatatctacaattgattttcctaacagtgaaaaaagttatctacattttttttttgacacagagtttcgctcttgtcacccaggttggagtgcagtggtgcaatttcagctcattgcaaactctatctcccaggttcaagcgattcacctgcctcagcctcccgagtagctggaattacaggtgtctgccaccacatccagctaatttttgtakttttagtagaggtggagtttcaccatgttggccaggctggtctcaatctcttcacctcaggtgatccacctacctctgcctcccaaggtg

SEQ ID NO: 951432 - DNA, 456 bp, Homo sapiens
tcatgcctcgctaatttttggatttttagcagagacagggtttcaccatgttggccaggctggtctcaaacccctaagctcaagtgatctacctgcctcggcctcccaaagtgctgggattacaggtgtgagmcaccatgcccggcccatgcattattattaatgttgaagtagataatttaacaaacatcaatgaagtataagatttttcactcatagttgcaaaatatcatgccaattgccttctatgagctgtcataagccacagcctagagattcaattccatttcaagattcaaccaaagccaactcatcaacaagaacatgtaaaagacagaaaaacccactaccggcaggctgaaacagatgctgtgacgtggccctggcctgtcatggcgtgtcacagcatggcacaggcctatatcatgttccctagattgctgactaccaactagt

SEQ ID NO: 951433 - DNA, 448 bp, Homo sapiens
aagcatgtgtttagtatgcactgacactataactatgctaaaacaacagaatatatgtcaacattgccagactaagcactcatcacaatatgtccaattcacaggaaagcaacaggcagaacaattaggaaatttaaaatagaatatcttattatagtggaatttcttcacaagaattacaaatgtaaatgaggctgcaaccaaacttagtttccaagtggttcatttgttagcaagcaaggaaacccatttatcaatggtaagctaattaaactgtgtttttattagctgaagaaatgtgtccgcagaaaataaacttgttcaaractgtgagtcttttggtaacaaaagttgattgaaaagttgaggacattgggagcaacatcaatagttaaaaacaaagttaattgttctgagtatctttccttgtctcttgatgaatagacag

SEQ ID NO: 951434 - DNA, 448 bp, Homo sapiens
aagcatgtgtttagtatgcactgacactataactatgctaaaacaacagaatatatgtcaacattgccagactaagcactcatcacaatatgtccaattcacaggaaagcaacaggcagaacaattaggaaatttaaaatagaatatcttattatagtggaatttcttcacaagaattacaaatgtaaatgaggctgcaaccaaacttagtttccaagtggttcatttgttagcaagcaaggaaacccatttatcaatggtaagctaattaaactgtgtttttattagctgaagaaatgtgtccgcagaaaataaacttgttcaagwctgtgagtcttttggtaacaaaagttgattgaaaagttgaggacattgggagcaacatcaatagttaaaaacaaagttaattgttctgagtatctttccttgtctcttgatgaatagacag

SEQ ID NO: 951435 - DNA, 482 bp, Homo sapiens
ttgtaaatgcaccagtcagcactctgtaaaattgaccaatcagcactctgtaaaatggaccaatcagcaggatgtgggaggggccaaataagggaataaaagctggccacccaagccagcagcrgcaacccgctcgagtccccttccacactgtagaagctttgttctttcgctcttcacagtgaatcttgctgctgctcactctttgggtctgcaccacctttaagagctgtaaaacttgccactaaggtctgtggcttcattcttgaagtcagcgagaccacgaacccaccagaagtatatatatcctacataacacaggtacgtgttatataggaagataaagatatgtactcttataatatactttaactatatataattgatatatatgacctatactcaaatattaaatttaaaatacatcttgagttcacttaatatttctatttattttttcagttttcttcttttgttgagat

SEQ ID NO: 951436 - DNA, 587 bp, Homo sapiens
ttttgtagaattaataaacacatatataagcacaaaaactctacatgtaaaatgcagaagccgtaattgatgaaattcaatatgaacaaaagaccttgatctttcaattattcattgtacaacatacacagaaaaaaaatcattgatcacagtaaagacaattttagcaaagcaaaaatgaaaatggaaaagatggaaatgggtcaaaaggatcatatagcatattgatccaagaatgaaattggtaaatagagttttgttcagaaaatactatctttacaaaaagccaacaatgttgatacaattttgattaaaatatttgtatgtgtaacaaggatttaaaatatccttgctgtcaaaatctcactgtccttaacatgttctcaagataatgtttatggcaagatcactttttatacataaataatgagctatgaaggcacagctacaaaagtactagagtatgtggattaattcaatacatggcattgaagttcaccataagctagaagttgtgtcaaattgagtcargattgtggctttctcagctctctgatcccattttgagagagacatagcttgggata

SEQ ID NO: 951437 - DNA, 596 bp, Homo sapiens
ggtcaagcttttagactcacatattcagatttcctgtttcaccctaacattacctaagatctacaaaaaaggccttgaagttagattaagattatgcaaacaacatgctgatagaattcamgagaaaagaaatttgacagcttataaaaatatttatgaccttcctcctctaattgttgatgacttccaacagtgcaataattcaataatagaaccctggataattactgttgacacctccctacaagtaactgttaatgcacaaggtactccatctacgtggaattacctgttgtgacacatcgagatacattttcatctgtgggggagcctacagtcagctttattcatgggcaacatcatgtctcaataaatggaaaataaagcaccagtgtggtctgggatatttctacattcagtttaaacttgcaaaatctgaacattggttgacatctactaacttgcaccatcatatcaaaaaagacactctacctagaggcataaactcagcaggatgggcctcagttgttagatccttcttcctctggattggggttagtaccttagaaatattggttagaaattatccctactat

SEQ ID NO: 951438 - DNA, 630 bp, Homo sapiens
gggggactacggtcaataataattgtacatttaaaaataactaaaagagtataattggattgtttctaatacaaaggataaatgcttaagggaaggaatactccattttccatgatgtggttattacgcattgcataagtgtagcaaaatatttcatgtactgcataaatatatacacctggctgggcgaggtggctcacacctgtaatcccagcactttgggaggccgaggcaggcggatcatctgaggtcgagagtttgagaccagcctgaccaacatggagaaaccctgtctctactaaaaatacaaaattagctgggcgtggtggcgcatgcctatagacccagctactcaggaggctgaggcaggagaatcgcttaaacccgagggggcggaggttgcaatgagccaagatcgcgccattgcactccagcccaggtgacacagcaagactccatctggaaaaaaaaaaaaaaatgcatacacacacacacacacacacacacacacacacaccccttgtacccacaaaaaacgaaaaacaaagatcatcctactttcaccattttagctctaattagtctcttgagaaactttgttagtacratattctcaataattgttctatt

SEQ ID NO: 951439 - DNA, 543 bp, Homo sapiens
agaatagatctgggttaggtggatcaggagtgcctacatcgggggagcacagaaacggtttacaatattaaatagatggtccaggtgaagcaggacagttccctgaccccttcgtgggtgggaactggagtgcactggcactggcaggggcgaactccactcactctctgctccaccccacgtgggagtgggagcacaggtgagcaggtgcaggagccaaggtgtgtgcttttaggtgccggcaagagcgaactccgtactggcccatggcagcatctaatggagggtgccggaagtccctgaagccacagaggaagtgttacagtgccctttacctttgctgtctgtagacagcttaacagctcagcagagggtcagtgtgacagccttttgtgcccacacttgaggcacackagtttttgtctggagtccaggaggaataaggtctcacaaacgaattgaaggtggtaaatgtgggggatttcattgccaatgaaagtggctctcagtgagaaagggagctggaaaggggacggaacaaga

SEQ ID NO: 951440 - DNA, 615 bp, Homo sapiens
actttatgaggtaagtactatttacatccccattttgcagatgaggaaactgagtcacaggctgactagcttgtcccagggcacacctctttgtaagygatggggccagattcaaacccagacgatctggctccagagtctgtgctgtaatcacagtcctctgcttgcttccctctacctctattgaaaagtaaagacctttctttcctgggagaatagcttaatcttaataagacttccctggcaaataagggaactgctgtcctgtgagtcactgttatttgtaattaattgtaacctgctgagacaacaggcaaagaaacatctaggcagaatgggcggtgtgagctctgcagcccagagaaggtgactccaggaggggctgtagacttgaatccaaccaggctgaggtccaggttactcacccactggcagaacccaagtgactctgcctcccctgaagctactgtaattgcctcacacccacctgagatggtctttcctttgcattctactacaggagctgcttcatctgacccaagctggcctggagaaaggaggaagaggcaaggtaggaagtggcctggccccctgctgctctgccccagagtgcag

SEQ ID NO: 951441 - DNA, 552 bp, Homo sapiens
taaaatagtccctttaagattcagatagagtcttatctactggctgtattttgcagggctggaccagtgtctcagtcagcatccaatatatggtgccarttctcctatagccaggattcacaggcccagggatcaaggagtaaaatgggagtaacatgaccccctttactaccgctattactactagtggcacactagcaaaatttttcccttctatccccatgactttatgctctgctggtttagaagtcttagttccaaagagtggaactcttctgctaagagacacaacaatgattctattgaagcagaagtcaagacgatcacgtggccactttggactccgcatgcgtctgaatcaacaagctaagaagaatgttgcttgctgacttggctgattaatcttgattaccaaggacactggatttctataatacaaggatagtaagaaagcgtatgtctggaatacagaagaccattcggtgtgtgtcttagtactaccatgccctgagacaagagtcaatagaaaactatggcatccccattaaagcg

SEQ ID NO: 951442 - DNA, 614 bp, Homo sapiens
ttgagcatctcaaatacataaaattatatctttcatcaaatttgaggccattatttcttcaggtattttttctggcccattctctttcctctccttcttgatctcaaagtacatgtacataaaacyttgtgatattttctaacaggtccttggactactattattttaatcttttcctctctgttaccttcaataacttctggcttatttaacttcaagtctttactttgtcatctccactaggctgttaattttttgcagtgaaaattttcatttcagattttgtatttttcatttctagaatttccatttgatttgtttctagttctgtgctgagatttcctattttttcatatattgtgaacacattttatttacctttactgagaatagttgttaacagccacttaaaaatcctagtctgctattaataatttctacatctgggtcatttcagggatactcttttctcttgtaaaggagttacatactcctttttctttatacattgggtaattctgaatgttccctgaacataataaatgttaaatttctgaaactctggattctttaatttttctccagttagcatttttttctttctttttttaatc

SEQ ID NO: 951443 - DNA, 596 bp, Homo sapiens
gggggggctgacccccccacctccctcccagacggggcagccggccaggcagaggrgttcctcagttcccagtaggggtggccgggcagaggtgcccctcgcctcccggacagggcggctggccgggcggggggctgacccccccacctccctcccggacggggcggctggcctggtggggggctgacccccacctccctcccggacggggtggctgccgggcggagatgctcctcacttcccagacggggtggctgccggacggcggggctcctcacttctcagacagggcggctgccgggcggaggggctcctcacctctcagtcggggcggttgccaggcagagggtctccttacttctcagacggggcggccgggcagagacgctcctcacctcccagacggggttgcggccgggcagaggcgctcctcacatcccagacggggcggcggggcagaggcgctctccacatcccagacgatgggcgggcgggcagagacgctcctcacttcctagatgggatggtggtggggaagaggcgctcctcacttcctagatgggatggcggccgggcagagacgatcctcactttcc

SEQ ID NO: 951444 - DNA, 596 bp, Homo sapiens
gggggggctgacccccccacctccctcccagacggggcagccggccaggcagaggggttcctcarttcccagtaggggtggccgggcagaggtgcccctcgcctcccggacagggcggctggccgggcggggggctgacccccccacctccctcccggacggggcggctggcctggtggggggctgacccccacctccctcccggacggggtggctgccgggcggagatgctcctcacttcccagacggggtggctgccggacggcggggctcctcacttctcagacagggcggctgccgggcggaggggctcctcacctctcagtcggggcggttgccaggcagagggtctccttacttctcagacggggcggccgggcagagacgctcctcacctcccagacggggttgcggccgggcagaggcgctcctcacatcccagacggggcggcggggcagaggcgctctccacatcccagacgatgggcgggcgggcagagacgctcctcacttcctagatgggatggtggtggggaagaggcgctcctcacttcctagatgggatggcggccgggcagagacgatcctcactttcc

SEQ ID NO: 951445 - DNA, 605 bp, Homo sapiens
ttaagctcttgaatgtaatgtgtatgttttcccttctggctgctttcagtattatgtccttaacttcaatttcaratagttggactgtgattcacgtacgtgtcgctttctttatgtgaacagaaaatcctggttgagattcattgagcttttgcaattttctttgatgtcttttatcagttttgcaaaattctaagccataatctctgtagatattattttgcctcatgcactttctcctctccttctgggactgtaattgtgtatatgttagatggtatctcacatttcctttatgctctgttctgttccttccgttctttctgttttttgtgtgcttcattaagatattttctattgatctgccttcaggttcactagttctggcttctgctttatccattttgctgttaagtccatctaattagtcttaatttcagatattgtcttttttagttaaggattattcatttgattctctcagtttcagttttctgttgaaatttccccatatttttatgtatttttttctctgttttctttaacattttaatattttgaggtccttatctgttactttcaacaactgaatcttctgcgagcct

SEQ ID NO: 951446 - DNA, 585 bp, Homo sapiens
ctcccactcatttaaaatacctatatctgagcccatttctgcttcattgttctattggttcaggggtcagcagactgacacacaagacaaatctggcctactgccttgtttttgtaaatacagatttattggaacatagccccacctatttgtttacatactgtttttgttttgattatgcaagggctgagttgaatagttggcacagagactaaagagctcacaaagcctgcaatatttactgtggcctttacagaaaaggtttgccaacccctgaattagtctcttttctaataccagacttttttttaaataaaaatatgaatatgggctgagcccagtggctcgtgcctgtaatcccagcactttgggaggccaaggtagatggattgcttgagcccaggagtttgagaccagcctgggcaacatggcaaaaccctgtctctacaaaaaatacaaaaattasccaggcgtagtagcatgtgcctgtagtcgcagctacttgggaggctgaggtgggaggattgtttcagcccgggaggttgaggctgcagtgaaccgggatcacgccagtacactccagcc

SEQ ID NO: 951447 - DNA, 585 bp, Homo sapiens
ctcccactcatttaaaatacctatatctgagcccatttctgcttcattgttctattggttcaggggtcagcagactgacacacaagacaaatctggcctactgccttgtttttgtaaatacagatttattggaacatagccccacctatttgtttacatactgtttttgttttgattatgcaagggctgagttgaatagttggcacagagactaaagagctcacaaagcctgcaatatttactgtggcctttacagaaaaggtttgccaacccctgaattagtctcttttctaataccagacttttttttaaataaaaatatgaatatgggctgagcccagtggctcgtgcctgtaatcccagcactttgggaggccaaggtagatggattgcttgagcccaggagtttgagaccagcctgggcaacatggcaaaaccctgtctctacaaaaaatacaaaaattacccaggcgtagtagcatgtgcctgtagtcgcagctacttgggaggctgaggtggraggattgtttcagcccgggaggttgaggctgcagtgaaccgggatcacgccagtacactccagcc

SEQ ID NO: 951448 - DNA, 585 bp, Homo sapiens
ctcccactcatttaaaatacctatatctgagcccatttctgcttcattgttctattggttcaggggtcagcagactgacacacaagacaaatctggcctactgccttgtttttgtaaatacagatttattggaacatagccccacctatttgtttacatactgtttttgttttgattatgcaagggctgagttgaatagttggcacagagactaaagagctcacaaagcctgcaatatttactgtggcctttacagaaaaggtttgccaacccctgaattagtctcttttctaataccagacttttttttaaataaaaatatgaatatgggctgagcccagtggctcgtgcctgtaatcccagcactttgggaggccaaggtagatggattgcttgagcccaggagtttgagaccagcctgggcaacatggcaaaaccctgtctctacaaaaaatacaaaaattacccaggcgtagtagcatgtgcctgtagtcgcagctacttgggaggctgaggtgggaggattgtttcagcccrggaggttgaggctgcagtgaaccgggatcacgccagtacactccagcc

SEQ ID NO: 951449 - DNA, 585 bp, Homo sapiens
ctcccactcatttaaaatacctatatctgagcccatttctgcttcattgttctattggttcaggggtcagcagactgacacacaagacaaatctggcctactgccttgtttttgtaaatacagatttattggaacatagccccacctatttgtttacatactgtttttgttttgattatgcaagggctgagttgaatagttggcacagagactaaagagctcacaaagcctgcaatatttactgtggcctttacagaaaaggtttgccaacccctgaattagtctcttttctaataccagacttttttttaaataaaaatatgaatatgggctgagcccagtggctcgtgcctgtaatcccagcactttgggaggccaaggtagatggattgcttgagcccaggagtttgagaccagcctgggcaacatggcaaaaccctgtctctacaaaaaatacaaaaattacccaggcgtagtagcatgtgcctgtagtcgcagctacttgggaggctgaggtgggaggattgtttcagcccgggaggttgaggctgcagtgaaccggsatcacgccagtacactccagcc

SEQ ID NO: 951450 - DNA, 570 bp, Homo sapiens
aggctccatgggcgtgggaccctccgagccaggtgcgggatatgatgtcctggtgtgccatgtgctcagttggaaatgcagaaatcacctgtcttctgcgtcactcacgctgggagctgcagactggagctgttcctattcggccatcttagaaccgctatttttttatttttatttttattttagtagagatgttacagaatttcaccacgttggccaggatggtctcaatctcctgaccttgtgatccgcccaccttggcctcccaaagtgctaggattacaggcatgagccaccacgcccggcctctatttcttttcttaatggactatctaggacctccagtaacatataaagctgtaatagtgttaaccatctttgtcctgttcctgatcttagacagaatgcatctaaagtttctccataaaaggtttgctttaggttattggcataaatcctttatcaagttaaggatattcccctttattcctattttctgagttcttgtaacatayacctatcaaagttatgtttttcctttattgaaataatcatgtgattttcctccca

SEQ ID NO: 951451 - DNA, 630 bp, Homo sapiens
ccccttcaatttaagtcacttataagtcaatataatatgtcaaggcaaacttcaaaamctattgctagagataaagagataaaatgaaaaaaaggtcaattcatcaagacataaaaatcctatttgtgtatactcttaataaaagagcatcagaataccttcagaaaaaaatggacagcactaaagagagaaatagacaaattcaaaatcatagttatatatgtttatactcatctgtgaataattaatagaaaaaagacaaaaaatttaaataacaatgtcaacatttaattggcatttatagaacacaatgtctgactccatacacattcatttcaggcacacatgaagcattcactaagatggatgatatatggggccatttaaaaaagtcttgatacattttaaagtgttgaaatcataaggatcatcttccttgactacaacagaatgaaattgaagagtaatattaaaataatgtcctaaatctccaaatatttggaagtgaagctacatatttctaaatattctatatgtcaaagaagaagtcacaagggaaattagaaatattttaaaataaataataaaatattaaatattaaaatttgtggcatgcagctaaaggaatgc

SEQ ID NO: 951452 - DNA, 693 bp, Homo sapiens
aaagaaagaaaacaggaaactgtattgtgtcgggggaggcgggagggagatgaggaaacggtttggattttgtgtgtgggagggtattttttgggggtagttgtctgtaactttcctaagtgctttttttccttttcttttttaaagtaagttgcaggctttggcttggaaaaccccagggggatggggggcagaaacctgaggctgctgcccctttatctgccttcacggtactgtccccttcccccagctcctccctgaccccatgggccaggcctcagaccttccagctaaccgcttcccatgagccactactctgatgtcagcctataaccaaaggagctgggggggtccaggcctggtgaccaacctttctcagcccactcaatcagggtgctccccacctgcaggcaggaggcaacaccctatctgctaccatcagccccttccagagcccatctgccccgcccagccctgccctgcccagccataccctgctctgccccatctgggggtgccctgctcagggatgggctggcagggctgtacccagcctccctggtaagcagagactcaagaaacctctggggtcctgttttctggtcgtgtgatcccagkggtgcacatgggccccttgggtgtctgaacagaagggcatgggagggagggctgcacccctgcagtcttactctg

SEQ ID NO: 951453 - DNA, 629 bp, Homo sapiens
cctgcaccatttgttgaacagacttttgtttccccattgaatggtcttgtcatccttgtcaaaaattaactgaccataaatgtatgagtttatttttggactctcaattctattccactgatctatatactatccttattccaggaccacacgattttgattactgcagctttgtagtaggttttgaaattgggaagtgtcagttctccaactctgtttttctttttcaagattgttttgactattctgggtttcctgcatttctttctttctttctttttttttttttttttgagacggggtctcactctgtcacccaggttggagtgcagtggtgtgatctttgctcactacaacctctgcctctcgggttcaagccatcctcccatctcagcctcctgtgtagctgggactacaggctcaggcttgcaccaccatgcctggctagtttttgtatttttaatagagacagggtttcaccatgttacccaggctggtctcaaattcctgggctcaagtgatccgcccacctcggcttcccaaagtgctgggattagaggtrtgagtcaccacacccggctccctgtatttctgtgtgaattttaggatcagtttctcagtttctacaa

SEQ ID NO: 951454 - DNA, 324 bp, Homo sapiens
ccccttggcctcccaaagtgctgggattacagacatgagccaccgtgcccggcctggtatttctttatagcagtgtaagaatggactaatacagtgggacagacataagatagacattyccattccaagggggagaaataggcaagaagaaaggggtcccaagtaagtccaaaacccaacaaagaaaaccacattaagtcttaaaggtatagaataatctcctttgattccatgtcctgcatcttgggcacaccaagacacgggctgagcccccaaggcctcaggcagccctgcccctatctatggctttgttgggctcagcac

SEQ ID NO: 951455 - DNA, 474 bp, Homo sapiens
cagaaaccaactaaacagttattttatgttaactggtatccagatgtttccaaagaatattagtgaaatgcagacatctgcaactatacacagcacaaagcactgatctgatttttaacttaattaccacagatattccttagtatgctcaagtctaatgagcagtgcatgctaagtttctctaggagaaataaaaatcaaaagcagaaactagcttaagttgctacagtgatgaagaaaacaaaccagctcattactttaaaaaagattcagtgaaaaccacaattgactaagcttgaatttttcttccttttcctagctgactcaaaagcaaacacacaaaagcctccagctagagtcactgttttttttttataattaatcattaacaaaacatttatgaaaatycaaatggttttaaaattacttcaacctggttctcttaatagggtttgatttattcatcagaaatct

SEQ ID NO: 951456 - DNA, 474 bp, Homo sapiens
cagaaaccaactaaacagttattttatgttaactggtatccagatgtttccaaagaatattagtgaaatgcagacatctgcaactatacacagcacaaagcactgatctgatttttaacttaattaccacagatattccttagtatgctcaagtctaatgagcagtgcatgctaagtttctctaggagaaataaaaatcaaaagcagaaactagcttaagttgctacagtgatgaagaaaacaaaccagctcattactttaaaaaagattcagtgaaaaccacaattgactaagcttgaatttttcttccttttcctagctgactcaaaagcaaacacacaaaagcctccagctagagtcactgttttttttttataattaatcattaacaaaacatttatgaaaatccaaatggttttaaaattacttsaacctggttctcttaatagggtttgatttattcatcagaaatct

SEQ ID NO: 951457 - DNA, 710 bp, Homo sapiens
agcagacctcaggatgggccctggggctcatcatacagaaatatgacaagatgatgaagtcacaacttcagatgtcatcggagctatctgtatatgacacacacattataaacaaataacctggaacatttcacagtgtacgacacctgttctacctgggaatgcaaaccctgagctgcaaataagaacacagacgtgggagacaccacggcctgaagctgctctcctcttccccgctctcctctcctccggtcccgtgatgggttacgctgagccagcaatgtgcacgcactaactccacaggtgttaaaggtaaggtcacttctaaacacacaacaaaattaccttaacattaggacattaaaagttaaaagcccggccgggcatggcggctcacacctgtaatcccagcactttgggaggcggaagtggtggatcacttgaggtcaggagtttgagaccagcctaaccaacatggtgaaaccctgtctctactaaaaataccaaaaaaaaaatcagccaggtgttgtggcaggcacctgtaatcccagctactcgggaggctgaggcaggacaatcgtttgaacccaggaggcagaggatgcagtgagccgaggttgygccactgcactccagcctgggccacagagtgagactccatctcaaaaaagataaataaataaataaataaaataaaaaaagttaaaagc

SEQ ID NO: 951458 - DNA, 573 bp, Homo sapiens
caaccaaaggtctgactgcctgcagggttgggaagaatacagccatatttttctktttacagaggcctataaatggacgtgcaagtaggagagatattgctgaattcttttcccagcgaggaatattaataattaataccctggggaaggaatgcattcctgggggggggggggggtctataaatggctgctctgggagtgtcggtcttatgcggttgagataaggactgaaatacgccctggtctcctgcagtaccctcaggcttattagagaggggaaaagatcccaccctggtgaatttgaggtcagactggttctctgctcttgaaccctgttttctgttgtttaagatgtttatcaagaccatatgtgcacagccgaacatagaccctcatcagtaattctaattttgccctttgccttgtgatatttattgccctttaaagcatgtgatctttgtaacctactccctgttcatacactccctccccttttaaagtccttaataaaaacctgctggttttgcggctcaggggacatcacggacctactgatatgtgatgtcacccccg

SEQ ID NO: 951459 - DNA, 597 bp, Homo sapiens
gaaaagttgttttcttgaacarataaacaaagtcaactaacctttaatctgactgaaaaaaggagagtgactcaaataaaacaagagacaaaaagggagacattacaactgataccacagaaattcagatgatcattagagactgttatgagaaactgtatgacaatacattagaagtcctagaagaaatggataaattcctagacacctataacctatcaagatagaaccatgaagaaatccaaaagccgaatagaccagcaacaaataatgagacaaaagcagtaataaaagtctttcatcaaagaaaagtctaggacctgatggctttactgctgaattctaccaaacacttaaagaagaactaataccaattctactcaaattgttacaaaaaaatcaaagcggaaggaatacttccagactcataccacaaagtcagtataaccccaaaacaaaaaccaggcaaagacacaacgaaaaaagaaaaactacaggccaatatccttgattagcatagatgcaaaaacctctaacaaaatactagaaaaccaaattcaacaacacattaaaaagatgatttattatgatcaagtg

SEQ ID NO: 951460 - DNA, 725 bp, Homo sapiens
acctgtttcatctacattatgaaatttattggcataaaggtatttaaaatattcacttatccttttttttttttgagatggagttgtgctctgtcacccaggctggagtgcagtggtgtgatttccactcactgcaacctctgcctcctgggttcaagcgattctcctgcctcagcctcccatgtagctgggattacaggcctacactatcacacctggctaatttttgtatttttagtagagatgggattttaccatgttggccaggctggtctcaaactcctgacctcaagtgatccacctgcctcagcctcccaaagtgctggcattaccggcgtaagccaccatgcccggccctcacttacccttttgatgtctgtaggatctatagtggtatcctctctcatttctgatattgataatttatgacttttctcttttattcttgatctgtctgactagaggcttatcaattttaacaatcatgtcaaacaccagcttttgatttcattggtttttctctattgtttttcatttccctgatctttcttgtttcttctcttctgcttgttgtggctttaatttgttcttctttttctagtttcttttttttctgagacagggtttttgttgcctatscaggagtgtgtagtgacacgaacatagatcaccataaccttgaactcttgggatccagtgatccccttcagctgcttctattttct

SEQ ID NO: 951461 - DNA, 599 bp, Homo sapiens
aatgtatgtatgtgtatatttgtgtatatattataygtaatgaaaaagagagacagagactaaaagaagcaaaaagatagaaaatgataaaccaaatgtgttaaaatgttaaaatttggaaaattcgaagggtatacaggaattatctgcaccgttattcttttatatatgtctgaaattgtttctaaataaaaacattaaaaaatcaataaaaataaagttgtgggcctaaaactggctatataaatgatggtataatagcatatacgattaagcagtcatgggggaggtgcagaattgagctaaagctgtaggtgtagatatcaaatgatctacaaggaatattaagctgaaaaaggcaatatgcagacttttgtgttcaaaaatgtatatgattgagtggtaataggttcataaaaggtacagagatgactcaattaaaggggcaccaactttgacagaggtggaagggactgtcttagcacagatgcattgtgtctcagcacatatgcaggagtcctggaatattagaaatgaaaaatatcttctcaaaaatttacaggtacggaggtgcagactcagaaagatgaagcaatttt

SEQ ID NO: 951462 - DNA, 585 bp, Homo sapiens
tgccagtgtggccagaagaaaagcaggcagaacgtggaaagaccagactggtttagtcttctggtctacatctttctcccatgctggatgttttctgcccttgaatattggactccaaagttcttcarctttgggattcaactggcttccttgctcctcagcttgcagagagcctattgtgcgacctcaccttgtgatcgtgtgagttaatacaccttaaaaaactcccctttatatatacatctatcctattttttctgtccctctagagaaccccaactaatacgcccgtagactggacatgtctaataggatacttgcatccagaatatgttaaaaaaattctgaaaacccaacaatataaaaacaaacagccaacttaaaaaatgggcaaacatttgaacaaacactttattagaaaagatctataaaagacaaataaggataaagtaatatgctcaacaatcattagttttcaggagaatgcaatataagataacaatgagatgccattacactaagatagttaaaacaaagcaaaacaaaacaaaactgacaatcccaaatgctgatgatgatgcagag

SEQ ID NO: 951463 - DNA, 585 bp, Homo sapiens
tgccagtgtggccagaagaaaagcaggcagaacgtggaaagaccagactggtttagtcttctggtctacatctttctcccatgctggatgttttctgcccttgaatattggactccaaagttcttcaactttgggattcaactggcttccttgctcctcagcttgcagagagcctattgtgcgacctcaccttgtgatcgtgtgagttaatacaccttaaaaaactcccctttatatatacatctatcctattttttctgtccctctagagaaccccaactaatacgcccgtagactggacatgtctaataggatacttgcatccagaatatgttaaaaaaattctgaaaacccaacaatataaaaacaaacagccaacttaaaaaatgggcaaacatttgaacaaacactttattagaaaagatctataaaagacaaataaggataaagtaatatgctcaacaatcattagttttcaggagaatgcaatrtaagataacaatgagatgccattacactaagatagttaaaacaaagcaaaacaaaacaaaactgacaatcccaaatgctgatgatgatgcagag

SEQ ID NO: 951464 - DNA, 599 bp, Homo sapiens
ggttggtgccccttgaggtcagaggtcccagaagaaggagcaagtacccatctttgctgctstccagcctccttgagtgacatctccaggcatgggagtgaatccgatgaataaggcctgaagcaaacccccagcaaactgcagcagccctacagaagagggacctgactactgaaagaaaaacaagcagaaagcaacaacaacagcatcaacaacaacaaaaaggccccacaaaaaccccatccaagggtcagcagcctcaaagactgaaactagacaaactcacaatgataagaaagaatgaacaaaaaaatgctgaaaacccaaaaggccagagtgcctcttctcctccagatgatcacgtctctccgtcaagggtgcagaactggatagaggatgagacggacaaattgacagaagtaggcttcagaagatgagtaataaaaaactatggtgaggtaaaggagcgtgttctaacccaatgcaaagaagctaagaacctcgataaaaggttacaggaattggtaattagaataaccagtttagagaggaacataaatgacctaatggagctgaaaaaaacagcatgagtacttcgt

SEQ ID NO: 951465 - DNA, 596 bp, Homo sapiens
caccgcgcccagccaccacattttttttatccagtctatcattgatgggcatttgagttggtcccaagactttgctattgtgagcagtgctgcaataaacatacgtgtgcwtatgtctttatagtagaatgatttataatcctttgggtatatacccagcaatgggatttttgggtcaaatcacacttctagttctaaatccttgaagaatcacactatcttccgcaatggttgaaataatttacactcccatcaatggtgtaaaagcattcttatttctccacgtcctctccagcatctattgtttctgattttttttcatgatcaccattctaactggtgtgagatggtatctcattgtggttttgatttgcatttctctaatgactagtagttatgagctttaatagttttgttgaatgcataaatgtcttcttctgagaagtgtctgttcatatccttcacccactttttgatagggtttttttttcttgtaaatttgattaagttctttgtagattctggatattagcccttcgtcagatggagagattgcaaaaagtttctcccattctctaggttgcctgttcactcta

SEQ ID NO: 951466 - DNA, 629 bp, Homo sapiens
atagaaacggttgaagttctaactcactgggcactygcagctcacctctgttgaacaactggccttgagaactttgtcagttacgttttattccacaagtttgttgtttctgaatcctcattttcacttttatagatggtcagacaaggcttaaatagtgcatcgatttattgctatatatcaatttctaaaacaacttaaccaaatcgcacttattgtcctttaattaatatgtgctctttaaactttatttttttctttaaatatagtcattgcagttacaaatctgcccagatctccaaattcacctacagagtgcccagaaagtccaccgttccctttctgatctctgccactaggaggcactgcagcctgctttatgaaggggatgaaatctggcgaagtgaatattccacacaactatggctccggtgtcattccctatttaatggctgtcagtgagggggaaagacaacgcggcgggtaattaaaaccaaattgcaggcaggagatgactgcacaagaatgatattgtcattaatactgatttaacatgcacctgggtaaggtgagggagtgcggcaagggaattcacactgaagccagggttgcctgatttaaagatgtag

SEQ ID NO: 951467 - DNA, 628 bp, Homo sapiens
aaggtttaaacaaatgatggaaggattctaaaaactaatcttgcaaaaactgtatgtgtgaacatatttactaaattcaaaggggtattataggatttttctgtaaattgagcattgaaataaaagtacaataaatgttaaaaaaaaaagagggtgtacaaattgataattattgttatcactcccagacaagtttttttttaatttaacttctatttttaattcaggggtacatgtacaagtttattacacaggtaaacttgtgtcatgggggtttgttgtacagattattttgtcacccaggtattaagcctagtacccattggttttttttttttcctgagtctcttcgtccttactccctctaccctctgataggccccagtacgtgtcgttcccctctatctcatcattagctcccacatataaatagtaacatgtagtattgggtttcctgttcctgcattagtttgctgcagataatggcctccagctccatccatgttccrtcaaaggacatgagctcattctttcttatggctacatagtattccatggtgtatatctaccacattttctttattcatctaccattgatgggtatttagattgattccatgtctttgct

SEQ ID NO: 951468 - DNA, 611 bp, Homo sapiens
agcactaagcttgatattttattttgcccaaattcctacctaagggttctagggagtcatgccctayaaaccataaattctcatcatatgggttttatttgaccatgtatatcatatatatatcactagattagaaaaattaggctaccaaatcaaagaaaatgaatgagaatcatagtttagctggcatctagaatcatcaaaaagagagaacgataaactcgcctccctccaggaagttagtaaaaaaaaaaattgaaattgtctcagagttaaagaaatcagtagaaccacttctgaaatcaggaaggctccagaaactgtctcctctgctgcttctcctgaccctctgctctctgaacttccttgtctggacaatttcattttttcctcctccttcccctactccctttcctcaagccacagggggatcagaaatagctggagaaaataaaatagtagttggtcctttttagagtaaaaaccaaaggcacagaggatcctaacataatatataccccctataccaagtcagagttgaagaccctggtatctagattcctcaatccgacttaagatccctttgggtttgctaaggaattccaattaac

SEQ ID NO: 951469 - DNA, 651 bp, Homo sapiens
tggcatatggtggtaaaggaaatatcttcacataaaaactagacagaaacatgcggacaaacttctttgtgttgwttgcattcatctcacagaattgaacctttctttccattgagcagctttgaaacactttttttgtagaatctgcaagtggacatttggagcactttgaggagtgtgatggaaaacgaaatatcttcatgtattaactacgcagaagtattctgagaaacttctttgtgacgagtgcattcatcacacagagttgaaactttcttttgattttctagtttggaaacactctttttgtagaatctgctagtggatatttggagcgctttgtggcctatggtaaaaaaggaaataccttcacataaaaactagacagaagcattctaacaaacttctttgtgatatgtgcattcatctctcagagttgaactttacttttgattgagctgttttgaaacaccctttttgtactttctgcaagtggacatttggagtgctttgaggcctatggtggaaaaggaaatatcttcacataaaaactagaccgaagcattctgacaaatttctttgtgatgtgtgcattcatttcacagagttgaacctttcttttgattggttagtttgcaaaatcactttttg

SEQ ID NO: 951470 - DNA, 605 bp, Homo sapiens
aagacagctgaatagacatttctccaaacaagacaaaaaaaatcaccaacaggtaaatgaaaaaatgctcatcatcactaatagtcagagaaatggaagtcaaatccacagtgagatatcatctcaccctgcttagaatggtttttatgaaaaagtcaaaaaataacaaatgctggcaaggatgtgaagaaaggggaattttcatacactgttggtggaaatgtaaattagagcaattgttatggaaaacaatataacttccaaaaacattaaaaatagacttatcacaaaatccaacaatcccactactgggtatatattcaaagaatattaaatcagtatgtcaaagagatttctggactctcatgttaattacagcactattcacaatagcctagaatcaacctaagtgtccatcaatgaatgaatggagaaagaaaatgtggcatatatgctgtatttggtcattcttgcattactataaagaaatacctgagattggataatttaaaagaaaagagacataattggctcctggttccatgggctgtacaggaagcataatgccaacatctgyttgactagtcaggaagcttgggaactcg

SEQ ID NO: 951471 - DNA, 605 bp, Homo sapiens
aagacagctgaatagacatttctccaaacaagacaaaaaaaatcaccaacaggtaaatgaaaaaatgctcatcatcactaatagtcagagaaatggaagtcaaatccacagtgagatatcatctcaccctgcttagaatggtttttatgaaaaagtcaaaaaataacaaatgctggcaaggatgtgaagaaaggggaattttcatacactgttggtggaaatgtaaattagagcaattgttatggaaaacaatataacttccaaaaacattaaaaatagacttatcacaaaatccaacaatcccactactgggtatatattcaaagaatattaaatcagtatgtcaaagagatttctggactctcatgttaattacagcactattcacaatagcctagaatcaacctaagtgtccatcaatgaatgaatggagaaagaaaatgtggcatatatgctgtatttggtcattcttgcattactataaagaaatacctgagattggataatttaaaagaaaagagacataattggctcctggttccatgggctgtacaggaagcataatgccaacatctgtttgaytagtcaggaagcttgggaactcg

SEQ ID NO: 951472 - DNA, 552 bp, Homo sapiens
caccatgccaggctaatttttgtatttttagtagagatggggatttgccatgttggccaggctggtctcaractcctgacctcaagtgatctgcctgccttggcctcccaaagtgctgggattacaggctgagccaccgcacccagcccttttgcctcttcccaaccataacttctagctgcttcagtgttccgaacttatgaaaggcaggaacacgtagtcagcaaatagttactgagctccttctttgtgccaggcactggactaggcccttgggatacagcaatgaatcagacaggaggagtcccataccttgtgatgctgacattctaggctctctcctccataggcttaaagtttagtcgtagaacagaggcaaatacacaacaatgtctgaagaagtcctgaaatgggacaatataatagggaattctgaacctcccctctagtggttcaaggctccaaggtgaaagatttgacgctgttggctgtgagatttggagattctgtgggcttgcatgaccccagctcctggttgccaggggtaaccca

SEQ ID NO: 951473 - DNA, 628 bp, Homo sapiens
cacacctggctaattttttgtatttttagtaaagacagggtttcacagtgctagccaggatggtctcaaactcctgacctcgtgatccacccacctcagcgtcccaaagtgctggaattttcatcagaaacrttacccagctccatgccactcacccagattgacttccttctttgcagcattcatttcaccaaaactgctgagcgcctactgtgtgccagcattggccaggcgctggggcacgatagtgagcaaacactgacggggggctgaggacgaggatgatgatggtgattcggccaggctctcctctcccccatctcagcacattctttcctagctgtgcgtgtcccttgcttctggcctccccgccacccggcctctgcagcatctttgtcaacacaagtccacgcttctgaccaaaggcaactcgtgagtccaaggtcgtcggggccagccagggcaggtcatctgacttctgccttctctgcccttgcccagggcctgccatcctagcctcctctctgcctggccagtgcatctcacctgggctatctgcctgtggcttctgctccagctaccttgtgtgcctcacccacacctctgccatggccctcctcaatcttcc

SEQ ID NO: 951474 - DNA, 656 bp, Homo sapiens
gagagttgtaggtgagagaaaagatcacctaattaaagtgtgaagagagagtttagataagatgaaaatctgggaacactttgcatttaagggttaagcacagtagatttagaaagggagacagacagagaatgttgagtatgacttgatctaaggggaaagcatcattagaacgagagacattaaagactcaggagagacaaatgactgacaaagtgcaagaggatttgtgggggtgggaaggattaaaaatataatggaggccaggcaaggtggctcatgcctgtaatcccagtactttgggaagccaaggtgggaggatcacttgaggtcaggagtttgagaccagcctggccaacatgatgtctctacaaaaaaatacaaaaaatagctgggcgtgatggtgcacacctgtaatctcagttacccaggaagctgaagcaggagagttgcttgaaaagggaggcaaaggtttcagtgagctatagatgatagatagatagatagatagatagatagatagatagatagatagcatatatatatatatatatatatgagtttggaggagctgatggctttygtgtccagtaacctcacattcctgaaagcattagtacaggcggccatctgttgaacaagaaaggcaggggagg

SEQ ID NO: 951475 - DNA, 621 bp, Homo sapiens
gctttcatttgtaaatcaactgttaactctagaggagagctctctcttgcagcacgtacttayatgaacttgccctgtacaaagtgtctggtgaatggggtaaaaggctatatttgcatttctaaagggctgagtaggaagtggggaaccagggaaacaagaaaagaaaataaagatagaaaaaaaatgattaatctatcttttagaaaatacgcatacttggttacacagtcagtaaatgatagagccagaattcaaatctcatctgatttcaaatactgtgcattctctctactctgttaagctgcttgccactgatgaagttgctttgtctcctaaaagagtatattatcttaaagttaattcaaactacttgacaaaatattatcaacttgatgaactataataatgataagtaggagaaccacaaaatgttcaaagaagaaagtctataaaaataaactcaaaattaatggcagcttttaacttgtttttgtttgtttgttttttaattcaaattattgttctgacctgggggccttgtagcttattttaagcaaaagctttcccttatcttaggctaaaaaggctagttcaaaagaaccacatgccctgcaaacc

SEQ ID NO: 951476 - DNA, 604 bp, Homo sapiens
ttggctctatcttcctttgcaaacggagaaacaggcttcaagagttttgaaactgccataatagatccaaaaactgtgtatgcttttcacatctgtacaattttgttacgtatttataaacatctgctgaatggatgactctatgtattggcccacatcacttcagaactaggtcttgaacttagggattgtggcaagaaggaaaaaggcagcttccggtggctcacagggcaggccaggtggctcacacctgtgagcattttgggaggccaaggcgggtggatcactagagtccaggagttcgagaccggcctgggcaatatggcaagatcctatctctactaaaaatacaaaaatagcctggggtggtggcacgcgcctgtagtcccaggtactccggaggctgaggcaggaggcacttgaacctgaaggtcgaggctgcagtgagacctgatctcaacacacacaaaagaatgactctcaggcttctttttttctaatggatggaagtgaaacctcgaaakcacatggtcaagtgcctgactcttccaaaacaaaaacaaaaacaaaaaaactagcctcagcaaggaggtccgtagcctcc

SEQ ID NO: 951477 - DNA, 699 bp, Homo sapiens
ggtctgttggagtttgctggaggtccactccagaccctgtttgcctggatatcagcagcrgaggctgcagaacagcgaatattgctgaacagcaaatgttgctgcccagttgttcctctggaagctttgtctcagagaggtacctggccatgagaggtgtcaatctgcccctaagggataaagaaaatgtggcacatatacatcatggaatactatgcagccataaaaagagattaattcatgtcctttgctgggacatggatgaagctggaaaccatcattttcagcaaactaacacaggaacagataaccagacaccacatattctcactcataagtgggagttgaacaatgagaacacatggacacaggtagggaaacatcacacactggggcctgtcatgtggtttgggactagaggagagatagcattaggagaaatacctgatgtagctgacaggttgataggtgaagcaaaccaccatagcacgtgtatacctgtgtaataaatgtgcacgttctgcacatgtatcccagaacatgaagtataataattcaaaaaagaaagaaaacaaaaagaaatttgaacaaaattagaaaataagattgttgcaggaagtcagggaccctgaatggaaggactgttgaagccgcagcagaagaacagaaatcatgaagatttcatggacatttaatagt

SEQ ID NO: 951478 - DNA, 788 bp, Homo sapiens
ctcatttttactacagattccagttattctcctatagccatttgattgtgtttattggtgggaatgacactcatcctatttaattttttttaaaataatatagcccaaaaactgatttcataaaaataaaaaaacctctttttttttttttttgagatggagtttcgctcttgttgcccaggctggagtgcaatggcacaatctcaactcactgcaacctctgcctcccgggttcaagtgattcttctacctcagcctcccaagtagctgggattacaagtgcccaccaccatgcctagctaattttttgtatttagtagagactgggtttcaccatgttggtcaggctgatctcatactcctgacctcaggtgatccacccgtcttcgccgcccaaagtgctgtgattacaggcatgagcaactgagcgtgaccagatacttttcttttcttaaagaaggtctgctaatgggcaggtaggtcatgtacggacaggcataacttctcctcacctaggccgcagcagcacctgtcttacacaagctccaggcctacctgcgcctctgctcctgagatgtatttcctttttaacttctcgcctccacccagcaacccctgccctggagtttctttagttgtactggctacagttttgagggaytgttctccatacaaattggagctctcctctgccaccaagtgaaagtgtgctagaaaagagttcactgaatgaccctcttgttgccattgaatttcatacagggtctcaccaatccacgtgcaaacag

SEQ ID NO: 951479 - DNA, 788 bp, Homo sapiens
ctcatttttactacagattccagttattctcctatagccatttgattgtgtttattggtgggaatgacactcatcctatttaattttttttaaaataatatagcccaaaaactgatttcataaaaataaaaaaacctctttttttttttttttgagatggagtttcgctcttgttgcccaggctggagtgcaatggcacaatctcaactcactgcaacctctgcctcccgggttcaagtgattcttctacctcagcctcccaagtagctgggattacaagtgcccaccaccatgcctagctaattttttgtatttagtagagactgggtttcaccatgttggtcaggctgatctcatactcctgacctcaggtgatccacccgtcttcgccgcccaaagtgctgtgattacaggcatgagcaactgagcgtgaccagatacttttcttttcttaaagaaggtctgctaatgggcaggtaggtcatgtacggacaggcataacttctcctcacctaggccgcagcagcacctgtcttacacaagctccaggcctacctgcgcctctgctcctgagatgtatttcctttttaacttctcgcctccacccagcaacccctgccctggagtttctttagttgtactggctacagttttgagggactgttctccatacaaattggagctctcctctgccaccaagtsaaagtgtgctagaaaagagttcactgaatgaccctcttgttgccattgaatttcatacagggtctcaccaatccacgtgcaaacag

SEQ ID NO: 951480 - DNA, 824 bp, Homo sapiens
ccaactgcacccatagaaggcagcaaacttaataaatgtgtgtgttctgastgttccagcaatagactgttttcctgtctgtctcccacttcttgggtctctctgttctctcagacacaacaagatagaaatgaggacagttaataaccctacaatggctctaagtgttcaagtgaagagtcacagaccttttaaataaaacactagaaatgaataagattagtgaagaagtcatgttgaaagccaaaataggctgaaagctaggccttttgtgccagttagccacattgtgaatgtgaagaaaacggtcccgaagaaaattaaaagtgctactctggtgaacacaaaaatgaaaacaagtgaaaaagacttattgctgatatggagaaagtttcagtggcatagatagaagattaaactagtcagaacattcccttatgccaaagcctaattcagagaaagactctatctctctttaattttatgaaggctggagagaggtaagaaggctgtagaagaaaagtttgcagatagcagagcttggttcatgaggtttaaggaaacaagccatctccataacataaaagtgcaaggcgaagcagcaagtgctgatgtagacacttaagtaagttatctagaagatctagctaagactactgatctgggacttcattagctacagaagagaagtcaattcctggcttcaaagcttcaaaagacaggctgactctcatgtgaggagcgaatgcagctagtgactttaagttgaaaccgatgctcatttaccatgcagaaaatgctagagccatgaataattatgctaa

SEQ ID NO: 951481 - DNA, 797 bp, Homo sapiens
caccaactgcacccatagaaggcagcaaacttaataaatgtgtgtgttctgagtgttccagcaatagactgttttcctgtctgtctcccactycttgggtctctctgttctctcagacacaacaagatagaaatgaggacagttaataaccctacaatggctctaagtgttcaagtgaagagtcacagaccttttaaataaaacactagaaatgaataagattagtgaagaagtcatgttgaaagccaaaataggctgaaagctaggccttttgtgccagttagccacattgtgaatgtgaagaaaacggtcccgaagaaaattaaaagtgctactctggtgaacacaaaaatgaaaacaagtgaaaaagacttattgctgatatggagaaagtttcagtggcatagatagaagattaaactagtcagaacattcccttatgccaaagcctaattcagagaaagactctatctctctttaattttatgaaggctggagagaggtaagaaggctgtagaagaaaagtttgcagatagcagagcttggttcatgaggtttaaggaaacaagccatctccataacataaaagtgcaaggcgaagcagcaagtgctgatgtagacacttaagtaagttatctagaagatctagctaagactactgatctgggacttcattagctacagaagagaagtcaattcctggcttcaaagcttcaaaagacaggctgactctcatgtgaggagcgaatgcagctagtgactttaagttgaaaccgatgctcatttaccatgcagaa

SEQ ID NO: 951482 - DNA, 214 bp, Homo sapiens
agttacttctagcaaaggctgaactgaagtttctttcttytctgaccttgattatgataattgaatgaggtaattggatgaaaatatccttactttcatttcaaccttaattttttccttaaaaattttataggcaaatacatttgccactttcctcacctttcagcaattttttcagaaaataacacacttttcatttggccattatcctatt

SEQ ID NO: 951483 - DNA, 166 bp, Homo sapiens
agttacttctagcaaaggctgaactgaagtttctttcttttctgaccttgattatgataattgaatgaggtaattggatgaaaatatccttactttcatttcaaccttaattttttccttaaaaattttatargcaaatacatttgccactttcctcacctttcag

SEQ ID NO: 951484 - DNA, 214 bp, Homo sapiens
agttacttctagcaaaggctgaactgaagtttctttcttttctgaccttgattatgataattgaatgaggtaattggatgaaaatatccttactttcatttcaaccttaattttttccttaaaaattttataggcaaatacatttgccactttcctsacctttcagcaattttttcagaaaataacacacttttcatttggccattatcctatt

SEQ ID NO: 951485 - DNA, 638 bp, Homo sapiens
gcaaagggtttgtgggttgtcttgggaatttccttctcagagaaatgcagagccaccactgactgaagtgttcaggcaggggcagggtggttgtgctgggggcccakgttgacaggcactgcccagtgaagagtagtgggggtggggaccccgtgagaaacagtctggcagcttctccataaggcagttgtgcagtgctgagggcccatgtcagttcccaaccactgcaccttcggttgaggctgagggcaacaggaatgatggctgtagaacagtcaaaatggcagcctgctacctctgggagctccgtcccaggaagtccagagctgtcatcagcccaagagcccatgtgggggatggctagagtcccaggttgggtggccctgcccagtgagaagtagtggggatggggacttgcttgcaaagtggtctggccatttttctgtaaggtggctgctctgtgctgggggatccacattagttcctaatcactgtgcaccctcccaagcctgagggcaataggagtgatggctgcagagcagcaaaaatggcagcttgcctctccttccggaagctctgtcccagggtaatgcagagctgctcctagcccaagacctcaggaggggctggggtggcct

SEQ ID NO: 951486 - DNA, 638 bp, Homo sapiens
gcaaagggtttgtgggttgtcttgggaatttccttctcagagaaatgcagagccaccactgactgaagtgttcaggcaggggcagggtggttgtgctgggggcccaggttgayaggcactgcccagtgaagagtagtgggggtggggaccccgtgagaaacagtctggcagcttctccataaggcagttgtgcagtgctgagggcccatgtcagttcccaaccactgcaccttcggttgaggctgagggcaacaggaatgatggctgtagaacagtcaaaatggcagcctgctacctctgggagctccgtcccaggaagtccagagctgtcatcagcccaagagcccatgtgggggatggctagagtcccaggttgggtggccctgcccagtgagaagtagtggggatggggacttgcttgcaaagtggtctggccatttttctgtaaggtggctgctctgtgctgggggatccacattagttcctaatcactgtgcaccctcccaagcctgagggcaataggagtgatggctgcagagcagcaaaaatggcagcttgcctctccttccggaagctctgtcccagggtaatgcagagctgctcctagcccaagacctcaggaggggctggggtggcct

SEQ ID NO: 951487 - DNA, 557 bp, Homo sapiens
actttttcattcacagaagggaaaaaaggtgaataccaaatrtaatttttaccacattttaaagtttataaaaggaccttttttttttttttttttttttttttttttagcagagtcttgctctgtcacccaggccggagttcagtggcacaatcttggctcactgcaacctctgcctccggggttcaagcgattcttgtgcctcagcctcctgagtagctgggactacaggcatgtaccaccacacccagctctaatttttgtatttttagtggagaaggggtttcacctgttggccaggctggtctcaaactcctcaccttaagtgatctgccagcctcagcctcccaaagtgctgggattacaggcatgagccaacacacccagctatatatgtacttttatacacatacaaccagaggaaaaaacaaaagttaattcacttaaaatgttaagaatgatgatctattttatgggtaacactttcctgtattttcaatacacacacacacacacacacacacacgaagctattttttaagtccccatttctagct

SEQ ID NO: 951488 - DNA, 579 bp, Homo sapiens
ggtgcggtggctctcgcctgtaatcccagcactttgggaggcaaaggtgggcggatcacgaggtcaggagatcgagaccatcctggttaacaaggtgaaaccctatctctactaaaaatataaaaaattagccgggcatggtgtcaggcgcccgtagtcccagctacttgagaggctgaggcagaagaatggcatgaactcaggaggcggagcttgcagtgagccgagatcgcaccactgcactccagcctgggcaacagagactctgtctcaaaaaaacagacagacagacatacactgacagatattttgcctgtcagtgcggctaaggggctctgcagcctgagtctgcagtgtagtcctcaatgccaggcgaagttcgcatttatttagtacagactaaatgacaaaggtctcgagtaaacaccactagagggtaattaacattgccgaccccctgaatagcgagcaatcatgcaccagtggatgatcaaaggttggtcttaggaccacatgagkaaacaagctatttaggtaaactcccccacattcctatgtatctgcaccctaagcttttaa

SEQ ID NO: 951489 - DNA, 651 bp, Homo sapiens
atcccaacacaatgggaggccgaggcgggtgggtcacctgaggtcaggagttcaagatcagcctggccaataccccatctctactaaaagtacaaaaattagccaggcgtagtggcgcttgcctgtggtcccagctactcgggaggctgaggcaggagaattgattagacccaggaggcggtgaggttgcagtgagccgagatcgagccactgcactccagcctgggtgacagagtgagacttcatctcaaaaaaaaaaggaaaagttaataggaaggcagcctatatggtctggtgtcgtcttttagcaattccgtgaagtacaatggagtttccaggttttctctgtgacaaagggatgctgctttgtcacttttttttctttcgaggcagggtcttaccctgtagcccagactggagagcagtgatgcgatcacagctcactgcagcctcgaactcttaggctcaggggatcctcccacctactgagtagctgagaccacaggtacatgccactgtacctggctaatttttgttttttgtagagacagagtctcactgatgttgcctaggcyggtctggaactcctgggctcaaataatcctcccgccttggtcacccaaaatgttgggattacaggcgtgagccacg

SEQ ID NO: 951490 - DNA, 560 bp, Homo sapiens
gttctcataggtttagaaaaactattctaaacttcatatggaaccaaaaatgagtccaaatagccaaagcaattctaagcaaaaagaacaaaggcagaggcatcttactacccaacttaaaactatactgacacaaggctacagtaaccaaaacagcatggtactgatataaaaacagacacatagactaatggaacagattagagcacccagaaataaagctgtacacctgcaaccacctgctctttgacaaacttgacaaaaataagcattagggaaaagactccctgttcattaaatggttctgggagaaccgtcccagaaccagcatatggccctccatatgcaggggaaagaaactgaacccctacctgtcacaagaagaattaaagacttaaattaaagacctcaaactatgaaaatcctaggaaaaatctaggaaatacccttttcaatattagycttggcaaagaatttttagctaagtcctcaaaagcaatggcaacaaaaacaaaaattgacaagtgtgacttaattatactaaacagcttcttcgcagc

SEQ ID NO: 951491 - DNA, 668 bp, Homo sapiens
aaactacttcaggcatgttgcaggatacaaaatcaatgtacaaaaaacactagcattctatacaccaacaacagccaaacccagagccaaatcaggaagtcaatcccattcacaactgccatgaaagagtaaaatacctcagaatgcaactaacagtgaggtgaaagatctgtacaataagaattatacaatagcactcaaagaaaaaagagaagacacacaatgaagaaacatcccatgttcatgcctaggaaaaatcgatatcagatttccaagagaaaaacgaacaacaccattaagaagtgggcaaaggacatgaatagagacttctcaacagaagacatacatgcagccaacaagcatatgaaacaaagctcaacatcatgaaaaccacgataagataccttctcacaccagtcagaatgcttattactaaaaagccaaaaaataacagatgctggtgagattgtgggaaaaaaaggaatgtgcatatactcagagaaatataaatcattctacctaaagccacatgcaygtgaatgttcattgcagcactattcatcatagcaaagacatggaatcaacctaaatgcccatcaacaacagcttggataaagaaaatgtggtacatatacaccatggatactatgcagccatgaaaaagaaac

SEQ ID NO: 951492 - DNA, 574 bp, Homo sapiens
ttaaagcccctcccacccctcctgccgcagccgaagtgaccattctggggcatgggatgggcatggggtgaaatggggagcaggggtggccctggaggcttctggcaccagcaccctctccagccaccaacctggctgttcccggttgctctgcgctgggacctgggcctccacctccccacaggtctctgcatgggagcagggctgaggcctgcagagggagcgctgggggatgggctggtttcctgtgtccgccacctcggtcagcacgttggccagcaccctccccactggaagctgggcccactcctgggtgctagctgggatggttaggcgtcggccagcgctgatagggagttatgggggtgcagaggcagagttgagcagggctaggcagccggtgggtctgctaccagcaaggcacagcccacttctcaggctgcgcatgtgggagggtttggtaagccacatttttcagggtgtagcygggtgaggggtagcatggggagtggtgtactctttgggcaggcgaccacggagccatcaccccccagggcccaacgggcaagaaggg

SEQ ID NO: 951493 - DNA, 574 bp, Homo sapiens
ttaaagcccctcccacccctcctgccgcagccgaagtgaccattctggggcatgggatgggcatggggtgaaatggggagcaggggtggccctggaggcttctggcaccagcaccctctccagccaccaacctggctgttcccggttgctctgcgctgggacctgggcctccacctccccacaggtctctgcatgggagcagggctgaggcctgcagagggagcgctgggggatgggctggtttcctgtgtccgccacctcggtcagcacgttggccagcaccctccccactggaagctgggcccactcctgggtgctagctgggatggttaggcgtcggccagcgctgatagggagttatgggggtgcagaggcagagttgagcagggctaggcagccggtgggtctgctaccagcaaggcacagcccacttctcaggctgcgcatgtgggagggtttggtaagccacatttttcagggtgtagccgggtgaggggtagcatggggagtggtgtactctttgggcaggcgaccacggagccatcaccccscagggcccaacgggcaagaaggg

SEQ ID NO: 951494 - DNA, 806 bp, Homo sapiens
atctcttagccacatctctgtttataatgtgcttattgaaaactaatgtattacktttattatcatagctaccatttactgaatatttacattgtgctaacactggttcagatggcttcatcatatttacctgatttaatcctcacaacaaccttatgtgctaggtccagttattaccatcttttttttttttttttgagacggagtctcactctgtcgccaggctggagtgcagtggcgcgatttcgtctcactgctgcaacctccgcctcccaggttcaagtgattctcctgcctcagcctcccaggtagctgggactacaggcacatgccaccacgcccagctaatttttgtatttttatagagatgagacttcaccatgttggccaggatgatctcaatctcttgacctcgtgatccgcccatcacagcctccaaaagtgctgggattacaggcgtgagccaccgcacccggcctattaccctcattttacagatgaggagactgaggcacagagagttaaagtgatttgtgcagggttgtgtgaggagctggtggcagagcttggcattctggctctggggtctgcatttggccatctcaccgtacagtgtcatagaaacaggaaactcgagaagataaactgccaggctgtattttggagtcagtattttaacactgtcaccatctcaagcatgatctgtgggactcatcgctgtgctctttgacttgaacttctttaaggttagtgggaaaatgaagctttagagaagatgggactggcctaaggtcacactgcatgtc

SEQ ID NO: 951495 - DNA, 442 bp, Homo sapiens
gcaggacattcacagaaaatgccaagtgctgatttgcctccacaaagaaccttaagcagtgtcttccaaatgtcagtagcttagggaaagacaatatccagccgcacaaattcaaggcccacctccatgaatagtaattattcaaaagtgtctcttaataaaaacgagaggtaaaatggattttcttatttttttactttttgtttccagaggtgcttgccatgtttatccaggcctgagtcagctaaagattggtttcactatgctccacagagtcaagcccctcactgttagacattgctgttggtctactgtattcaagagagtttgcyactatttgtcatcctagaaattggctagagctagtagggagtcattgtcttgaaaactgccccaggaaacccctaacttttggacttgataataagacgcaattttctga

SEQ ID NO: 951496 - DNA, 639 bp, Homo sapiens
aggggccaagttgtggaactcaactgcagaaaacaaggtgggcatagttactgtaacgaatagcagagacaaagcaacagtgagaatagtctgactcatgtagactcatggcattgggtaattagtcatgcgttcctagaagtaaagtagataggaagcccactacattcttccttcatatatataaacaaaaaacttccaggttaaatgaatggaagtctaactcaaatcctaaaaacagagattcacagcccctcaataaattcccagacttgagcagttttcagactcagaatcccttgaatgaaggagaagctagatcctcttgaggaagaagcctggcacattactgacaacttatacttttaatctttctgttatccttcccaaagggtcctgggaccttctggcagggtaactgtgcatttccaataaagaaataatcagaactttcagggactgctgcatactgtcctttaactgacatttattccaggagacctgaaatatcactggccctccaggtagagttgaggcttatggaggtcaggtaatcagtagatwtttagctcatgtccaactcacagtgggtccaatgagttgttgaacccatcttgcggttatttcccaattggaata

SEQ ID NO: 951497 - DNA, 618 bp, Homo sapiens
gctgattatattcatgtgagtcttatttctgggttctctgttgtgttttgtcgatctctttgtctattctttcatcaataacacagtcttgattactatagctttatcctaagtcttgaagtttggtagtatcagtcctccaactttgtcgttcctcaacattgtgttggctattctgggtcttttgcgtctctctataaactttataattgctttatcgatacccacaaaataaccttctgggatttgattgaatctgtagatcaagttgggaagaactgacatattgacaatactgaatttttctattcatgaacatagaacagctctttagttagttcttcctttattttgtttgtaagaattttgtagttttactcatatagatcttgtaaatactttacttgatttttacctaagtgcttaatttttgaggggttaaatggtattatgatttcaatgtcaaattctacttgttaattgccraaatataggaaagcgatttacttttacatgttaaccttgtcttctgcaaagttgctgtaattgtttattagctcctggagattttttttttggtcagttattttgggttttctacatgaacgatcatgtcat

SEQ ID NO: 951498 - DNA, 589 bp, Homo sapiens
tcaggggcacacaccctgtgtcaccgggkgggtggacagagcccaagaagagcctggaagcacagctcattctttgagtggaaagggtagcaggcaggttgaagggcagttcagagcatgagctttggcggcaggactgggattcagtttcaggtctggctgctcctaacccggtggtctctggccagtcctgccacattcccgagctccaggccccccttttataaaatagggcaagttatgtgctccctgggctgccttggaggtcaaatggagtcaaggggttgccctgtgccccagcctcagagcagtgtctgcagggccccagaaaaataatcccttccccaccaatcgctggctgatggcccctgcccgccttttccttggatgaggacctggaaactggaaagggccaggtttttgtcagccctttggttttgggcagtgcctggcaccagaaagacattcttgggacaggcgacaggccaaggctctgaggagtgaccctcactgtggggtgagccctagggatgggtgcccaggaaggggcagagccgaggaaggaaggcaaggcagcagggccaaggga

SEQ ID NO: 951499 - DNA, 563 bp, Homo sapiens
tcttggaaggtgaagatagctactacctctggaacaaggagcaagaatgctcactgtctgttataaaagattcaggttctgtaaacttagaattcatctccwgtaatgcaacctactgtatgtgctggtgtcatctggccctctgctcatcacctgtggaattgggacttaggagactgacataaatatgccagtgctgtggctacttttattgttataaataataaagtcctgacccaggtctttagtggttttgttttgtcatgagagtctttctttctctctccctttctttctttctttctttctttctttctttctttctttctttctttctttctttctttctttctttcttctttctttctctttctttctttctttctttctttctttctttctttctttctttcttttctttctcccttccttcctttctttttttttttttttttgagacagtttcactgtgtcacccaggctggagtgcagtggcatgatcctggctcactgaaacctctgactcctgtgggttcaaatgattctcctgcctcagcctccca

SEQ ID NO: 951500 - DNA, 438 bp, Homo sapiens
tggtgctggaacaactggacactcacatgaaaaaaaatcaaaacttagactttacacacaccttttttgaatgttmactcaaatggattctatgcttaaatataaaatggaatactataaaactcctagaagatgatgtaagagaaaatctagaagatctagggtatggcaatgactttttgcatgcaacaccgaggcacaacccacaaaagaagaaagctgatgagctgaactttattaagattaataacttctgtgaaaggccagttctcagtcaaagatcagtggttgccagtggttagggataaataagtggagaatagaggagttttaggtcagtgaaatgactctgcatgataccataatggtggatacatgtcactatatatttgtccaaatcaatagaaagtaaaacgccaagatctaaccctaatgtaa

SEQ ID NO: 951501 - DNA, 538 bp, Homo sapiens
gggatttgtctggtctgagccatcagtggagcttggtcaaggttagttacagactccaacctcaaccttcctattcactcgtagagtcccttctatcaagttggaagaagagacctcacagagaactaacagaacaataactcaatagagccagttttactaagtccagcattggtcccaggaatgctggtcaacgttataaagtcccaattttactaaacactgtttttgcctcctgtcaatctgacgacttgaatttttttaaatattatgattctcttttttaatgagtcaagagtaaagctcaagctacccaatcaactaattaaaatttatcctccctatcaccactacatacacatatagtggcactatttatacaacttccatcctttatttttttycatgacaccaccatctgctacacggtactcataattacatgttttactaatgtattcctttattatctgtctctccccactaaaatataagctccaagagggcagaaacttttctctattttgttcactgctat

SEQ ID NO: 951502 - DNA, 558 bp, Homo sapiens
taggctataaaaaattggttgcttatatttcctgcctttcgagacttttaatcttagaagccagttaccatgctgtggagcccaaactgtctttggagaggcccatgtggagatgaacagagacccccagctctcagccggcaccaacttgctaaccatgagtgagctgtgtgaaggagacaagctttctctaccaagccctagtaaatttcacacttttaagctaaaaataaatgatttttaaaaaacattattttaagccagtaagttttggtgagatttgttctgcagcaagacaaccgataatgattttgatacaccagaggcagggtgctgccttaacaaaatcctcaatcatatggcattggacttgagactaggtgatgggctgaagctggagggatctttaggagaatgtaagtgaaaactkaaaaggacttctagaagaatactagaggaagcctatggagctttgaggacttaaaaaaaaaaaaaaaggaaggaaaaatctcagacaaccctctgttaaacaatagggcttcaataaatcttaagggt

SEQ ID NO: 951503 - DNA, 537 bp, Homo sapiens
tgtctgaagctgggtaatatataaagaaaaggggcttatttgactcattgttttgcaggctgtacaagaatcatggtgccagcatctgcttctgacaaggacctcaggctgcttgcacttatggcaaaaggtgaaggagagccaacttgtcacatgacaagaaagagagaggccagagacaagagagggaagatgccaggctgtgttaaacaagctcttgcatgaaatgatagagcaagaactcactcattaggaggagagggcaccaagccattcatgagggatctggccccataaccctaacacctcccagtcagccctacctgtcacactggagattaaatttcaatgtaagatttggaggggacagatagccaaactgtgttagaagtcccaaataaagaaaamagtcttcgtatatttggaactttaaaatacacttcctaagtattcttgggtcaaaagaagaaataaaaatgaaaacaaaaatgcctagagctgaacgacaaaatactacattttaagcactgtggagta

SEQ ID NO: 951504 - DNA, 537 bp, Homo sapiens
tgtctgaagctgggtaatatataaagaaaaggggcttatttgactcattgttttgcaggctgtacaagaatcatggtgccagcatctgcttctgacaaggacctcaggctgcttgcacttatggcaaaaggtgaaggagagccaacttgtcacatgacaagaaagagagaggccagagacaagagagggaagatgccaggctgtgttaaacaagctcttgcatgaaatgatagagcaagaactcactcattaggaggagagggcaccaagccattcatgagggatctggccccataaccctaacacctcccagtcagccctacctgtcacactggagattaaatttcaatgtaagatttggaggggacagatagccaaactgtgttagaagtcccaaataaagaaaacartcttcgtatatttggaactttaaaatacacttcctaagtattcttgggtcaaaagaagaaataaaaatgaaaacaaaaatgcctagagctgaacgacaaaatactacattttaagcactgtggagta

SEQ ID NO: 951505 - DNA, 537 bp, Homo sapiens
tgtctgaagctgggtaatatataaagaaaaggggcttatttgactcattgttttgcaggctgtacaagaatcatggtgccagcatctgcttctgacaaggacctcaggctgcttgcacttatggcaaaaggtgaaggagagccaacttgtcacatgacaagaaagagagaggccagagacaagagagggaagatgccaggctgtgttaaacaagctcttgcatgaaatgatagagcaagaactcactcattaggaggagagggcaccaagccattcatgagggatctggccccataaccctaacacctcccagtcagccctacctgtcacactggagattaaatttcaatgtaagatttggaggggacagatagccaaactgtgttagaagtcccaaataaagaaaacagtcttcgtatatttggaactttaaaatacacttcctaagtattcttgggtcaaaagaagaaataaaaatgaaaacaaaaatgcctagagctgaacracaaaatactacattttaagcactgtggagta

SEQ ID NO: 951506 - DNA, 471 bp, Homo sapiens
ttcttttcaacatagtactgagagttgaagctagagaaatcacactagaaaaagaaatattaggcatccaagtttatagagaagaagtaatattatttgttcgyagatgatatgctcatatatatagaaaactctaaagattcaacaacaaaacaacaacctgttagaaatagagccctatctcatagatattctggttcaactttagatcaccacaataaagcaaatatcccaaaaaagcaaatcacacaagttattttattttctagtgtatataaaagttatgtttatatggtactgtctattatgggtgcacaatttagctttatgtttaaataacaatgtacctgcctttatttagaatttttattcccaaaaaatgttaatgatcatctatttctttagtactgacagtaaaacttctttcaaaatttgagccaatcttctaaaaccctgctactgttttatcaa

SEQ ID NO: 951507 - DNA, 575 bp, Homo sapiens
aaagatgatataatgattgtaagtaaatacgctcccaacactagagcacccagatrtataaagcaactattattaaagatatatagaaaaataggcctcaatataataatagtcacagaattcaacaccctctttcagcattggactgatctcccagacagaaaatcaacaaagaaacattgaatttaatctgcactatggacctaatggacctgatagatatttacagaaaatttcatctaagagctgcagaaaacacattcttttcctcagcacatgaattattctcaatgtttgaccctatgttagttcacaaatcaagtcttaaaacattccaaaaaattggaaagagtatcaagcatcttatctgatcacaatggaataaaattaggaatccataacaagagaatttcataaaccatacaaatacaaaaaattaaacaatatgtacctgaatatctactgggttaatgaagaaattaagaagataatagaaaaatttcttgaaaccaaagataatggaaacataacatatcaaaacctatgggatacagcaaaagcagtactaagaggga

SEQ ID NO: 951508 - DNA, 608 bp, Homo sapiens
ctcctgagaagcttggattacaggctcctgctaccacgcccagataattttatgtatttttagtacagacagggtttcatcatgttgaccagactgatctcaatctcctgaccttaggtgatgcacccaccgcagcttcccgaagtgctgggattagacatgagccgccactcccggtcaaataagtaaatatttttggaaatttagtggcagtttatttgaagctcccaactgatgaaatgcctatggagacagactaactgggaaacataaatttggctatgaaaattatccatgaaaataaatgtctccatcagcatggatacattgattcaaataatcacgaatggtagaggaaaaagagtacataatctggacaaagattatcataaatatggtcacaaataattgaacaaatatcaaagaatatggtcacaagtaacatgcttaacagagagaatttacatccctattcatggttcaaatcctattattcatctagtagttaattggcatattattttatatgttgcagaaaattgtggaatatctataaaatgcaatgargagataatatccaaggtcagatgtgtagcaggcaagaaaaa

SEQ ID NO: 951509 - DNA, 620 bp, Homo sapiens
tgcacatgaattttgaaattttatttcatttttctatttttttttcatgggyatctagtgttgttatattcttatgtcctgccttgcctctaagagcataacatgagcaaattggagttggggtaacccaatggtggaggtgtgaaaggggagatggtctggaaaagatggtagaatccactgattgagagaaggagactccaaacaggcacccgagtgaaagatttttggcttgcctggaacaggataagaaaattgagtggcagaaatgcttttatatatgtattgtggaacattaatttcactgtggaatcaatagtttcacttgaaaatgtgaaaggttctcactgttaaagttaatggagtagaaataaatttgaagtacttcatattgctagcattgtgatgttatatggcatacatcacatgacctttacacagtgagcttggatagacaaatgccttcgcattaatcaagatgggagctagaagattaaaattttgttctagagctttgtgttcttggagaaaactaacgattgtcttctaactttcgatttctgagtcatctgtggctaaaacatatatgccattgtttgaagtaaaaatgcatgttacat

SEQ ID NO: 951510 - DNA, 620 bp, Homo sapiens
tgcacatgaattttgaaattttatttcatttttctatttttttttcatgggcrtctagtgttgttatattcttatgtcctgccttgcctctaagagcataacatgagcaaattggagttggggtaacccaatggtggaggtgtgaaaggggagatggtctggaaaagatggtagaatccactgattgagagaaggagactccaaacaggcacccgagtgaaagatttttggcttgcctggaacaggataagaaaattgagtggcagaaatgcttttatatatgtattgtggaacattaatttcactgtggaatcaatagtttcacttgaaaatgtgaaaggttctcactgttaaagttaatggagtagaaataaatttgaagtacttcatattgctagcattgtgatgttatatggcatacatcacatgacctttacacagtgagcttggatagacaaatgccttcgcattaatcaagatgggagctagaagattaaaattttgttctagagctttgtgttcttggagaaaactaacgattgtcttctaactttcgatttctgagtcatctgtggctaaaacatatatgccattgtttgaagtaaaaatgcatgttacat

SEQ ID NO: 951511 - DNA, 608 bp, Homo sapiens
tctcccctacttggagattacctcatgacagacatctataamctgactgcaactgagatggcaccagccagcactccaagtggacaacaactcaaaataacccttggaagaagacatgcaggcctgtatcttgtgttactctggcatggttctcatactaagtatcccctttttattttttatttatttttaacatattttttgaaacagagtctctctctgttgctcaggctggagtgcagtggtgtgaacgtggctcactgcagcctcaactcccaggctcaagcagtcctcccaactcttagcctccagagtagctgggactacaggtgtgcaccaccacatctggctaattttttttgtatcttttgtagagatgggttttcactatgttgcccaggctagtttcaaactcctcggttcaagcaatcggacagcctcggcctcacaaagtgctgggattacaggcatgagccactgcgcctggccaagtctccccctttaaaatcccttccttcagtctaacacttgaaatggtcttttggaggcacaagcctggccatttcccaattgctagcatttgaataaagttgctttccttttactcg

SEQ ID NO: 951512 - DNA, 645 bp, Homo sapiens
ataaccaagtattctagctgctcctcgggaagcaggtcccctcgattcccctcgctgctctccagttttgccttctagctaccctgtgattgtcccatccagttccagagttggacatgaaacctaccgtcttttgacatggtcccatgagctggcccagctttcccaaggccataagtggagtccattggagcatctgcccccatctcaccctgccttctcccaaaaatgagagggtctgagggcaaagggagttgtggccacaacagaagtagcaagacagcaggcctggggctggttacacctgttcatcctgacttcacaagctgaagcacccaagggctacagtcaaactaacacccaaccttgttctaaacccaggcagaatcaccccagatctgggcaagatgtacagaagtaaactctgagctgagtaacactcattcagcggttcccgtaccaggccctgtcctaacgacttttcaaacacgagctgatttaatcctcactaccttgaggtaggttctgttattatacctgttttacagatgaagaaatcaagacccagaaactttaagtagcctgctcaaggtcacatggttactaagtggctgaggyagcatttgaacccaggtcatctgcagt

SEQ ID NO: 951513 - DNA, 452 bp, Homo sapiens
ggatggcaagtcttctctgggggactaaaggcagtgcaagtttgcacaggtcatataaatgaccttgggtcaaatatttggatcttccttaaacatggcctttcccatagtgctgttctctgtccctaaaaatccatttccctttctcctgctctggaagcagacagcctccatccacagggtcacagatgcataggcttccaggggctatgcagtttaggtgaatggccaggtggggatctaatccagtagagagacatatcctgtccaaagggggccccacccacatgctcttctcctgaaatgtagagtccctggkttccagatctcctcattttaaaagaaaagccagagaaatggatttttatgcaaaatcacttacattttaaatgtttaaagctattcattttttctccttttcttcttccttttttttttttttaaaaaatacc

SEQ ID NO: 951514 - DNA, 622 bp, Homo sapiens
aaggggtttctaggtttttggtgattttttgtttgtttttttctttgttttttaggktttttttttcttctttaattttttgattaaaacatacacacagctgttagcataaagtcgtggggggcattttctggaatgctcagcagttctgattaactgccaagcccaggttgcctctcatgaggcaactgaaaaaatcctgtgtcttgatagcatgggtgctgtgtgtgtgcatgtgtgtgtctgcattcatgccttaactcgggttactgcacaactttagttcttgacttagtctgcaccgtcatctagattgtattgtacatctcggtctgaacttcatcctggcaaaaacaaagttgcaggcacaacagtttaagaatgcattcctccagaagagtatctggtcaggttgacccctgagccttctttggacttgatttggaacttagcctggaaagcgaaagtggactgtccaacagaaagatgtcaacaaggaaaagaggagagccaagcgctagcatgccttttgcctctgcatatctgtgcacactgtatgttgttcatgatagcttgtctacaacttgactaggttggagttctggtaatagtggcaatcttg

SEQ ID NO: 951515 - DNA, 495 bp, Homo sapiens
agttacagaggtgagtcagacaggtatatgttgataaatgtttaacagttctgctttctgagagaatagctctgatttatttatttatttatttatttatttatttakttatttatttatagattatttttgagactgagtctcacactctgtcgcccaggctggagtgcagtggcacaatctctgctcactgcaacctctgccacctgggttcaagcgattctcctgcctcagcttccagagtagctgggattacaggcacctgccaccgcgcctggctaatttttgtatttttagtagagacggggtttaaccatcttgctcaggctggtctcaaactcctgacttcgtgatccacccacctcagcctcccaaatgctgggattattggcgtgagccaccacacctggcagaatagctctgatttttattgcttgctggtttttgtagtgtaaataccccccaccatggctgattttgatccaccgatgtgaa

SEQ ID NO: 951516 - DNA, 633 bp, Homo sapiens
ctgccttgggcaaaaactgtataatagcactacaaaaacagttacgtggtagagttcaaaccacacgaagaagaatccattcagtaaatgttgggaacaagccccccaaaatctggccataaactggccccaaawctggccataaacaaaatctctgcagcactgtgacatgttcatgatggccataacgcctacgctggaaggttgtgggtttaccggaatgagggcaaggaacacctggaccgcccagggtggaaaatcgcataaaggcattcttaagccacatagcgtagcatgagcgatctgtgccttaaggacatgttcctgctgcagttaactagcccaacctattcctttaattcgacgtgagccactgcacctggcccacaaatctttctaaactaaagctgactgcatcttggctggggcgcagtggctcaggcctgtaatcccagcactttgggaggccgaggtgggcagatcacgagatcaggagatcgagacaatcctggctaacatggtgaaaccccatctctactaaaaatacaaaaaattagccaggcgtgatggcgggcgcctgtagtcccagctacttgggaggctgaggcaggagaatggcgtgaacctgggagg

SEQ ID NO: 951517 - DNA, 639 bp, Homo sapiens
cacagaggctgtgagtgccaagggtcaggttgtttctgcccccaaaccctgtgttccatctgccattctgcagctctctctgaagccacttttcttttgttgccayatttcatgctggggatgtaaggagaaacaaaatgacatgcagaagcagccccacctgaggaagagactgggctgaggtttcaaggtagaagacagaaaaatcctagaggaaagggctccttgcccagggaagctatcatactaggtctgcgtgctcggacttccctgggcacagcctcacttcttccagggaaaaacaaactagatcttaagacagagaggcaacatgaatgaaaaccaaggccaacctgctcaagatggtagagaaaacagaccgaggagcctagtgtctgccgcctcaatgaaccactggattggccctgggtctacccagggtctccaggtttaagtgactgagagttgaaattcaccccatgctcagctctcccaagacattctgtggggcaagagttgttcccaccatgatgggaagctcttctataatatgtctattaagataggtgcctttttgtaatctacctaaaggtgccatatagatgggcagtggccctggactatgcccagatatcttgt

SEQ ID NO: 951518 - DNA, 639 bp, Homo sapiens
cacagaggctgtgagtgccaagggtcaggttgtttctgcccccaaaccctgtgttccatctgccattctgcagctctctctgaagccacttttcttttgttgccacatttcatgctggggatgtaaggagaaacaaaatgacatgcagaagcagccccacctgaggaagagactgggctgaggtttcaaggtagaagacagaaaaatcctagaggaaagggctccttgcccagggaagctatcatactaggtctgcgtgctcggacttccctgggcacagcctcacttcttccagggaaaaacaaactagatcttaagacagagaggcaacatgaatgaaaaccaaggccaacctgctcaagatggtagagaaaacagaccgaggagcctagtgtctgccgcctcaatgaaccactggattggccctgggtctacccagggtctccaggtttaagtgactgagagttgaaattcaccccatgctcagctctcccaagacattctgtggggcaagagttgttcccaccatgatgggaagctcttctataayatgtctattaagataggtgcctttttgtaatctacctaaaggtgccatatagatgggcagtggccctggactatgcccagatatcttgt

SEQ ID NO: 951519 - DNA, 594 bp, Homo sapiens
ttataaatttagtgtgtcctaagtgtgcgatgtttataaagcctgcagtagtgtacaggaatgtcctaggcctttacattcactcaccactcactcactgattcacccagcgcaacttccagtcctgtgagctccatttatggtatgtgtcttataaaggtgaatcatgttttatattgtatgttaactgcacttttgaaatgtttggatatgtttagctacataggtactgatatggtttggctctgtgtccccacccaaatctcatccaaattgtagttgccataatccccaggtgtacagggagaaacctgaagagagatgattagataatgggggtgtttcccccatgctcttctcatgatagtaagtgagttcccacaagatctaatgcttttataagtgactcttccccctttgctcatttcataactcttgcctgctgccatgtaagatgtgcctcttcccttttcccatgattgtaattttcctgaggcttccccaaccatgtggaactttgagtgaattaaccytctcttctttataaattacccagtctcgggtatgtctttagagccgcaggtaaatggacta

SEQ ID NO: 951520 - DNA, 696 bp, Homo sapiens
tgaacagctgtacgttgaaatcttggtcaccattgctattgcctctttgcctaacaycactacaacatacctgtcctagtctttcaatggcaagaatcaggcttcagtataactttcacttttataattaaatcaggttacaaatactccagcacccatgtctgactcaacctaattcacagagagtagatctttacagaagttctgaataacataatcctgaatctgaggaactctgtctgctaggaagggctgcttgagagtctaggtgtatggtgaagttaaatgccatagggtgaacacttagcattgagagaaaggagactggaagaggccagaaaattattttctcattcttttggaccagatgaatggttcttgagtctccagggattactaatgtgactaagaaaccaaataagtttctcatgaggctgggacaagcttagtaatgtatcaccttctactttgtctacctcctagcttattgtacttccttttgtctgtcattcttgctttagtggattggaagcaacaaaaagtagtaaagtacaccagtgtttaaggaagccgtgttgagaagaaagttttcactgtattctaaattatagtaataaccatatatttgactactaaatataagagtagtgctataacttgctatgccttattaatgatatatatttagtgttattt

SEQ ID NO: 951521 - DNA, 596 bp, Homo sapiens
acaaacattcaaaccatagcagtcatggttctgacatatacacaagagtaaccctgtgatttcttttctttgtatagaatattataattttttctcttttttataggatattataattgctcaaggcattgattaccaggtcagggtcaccaagtgtattagtttgctagagctgctgtaacaaagtactgcagactgggtggcttaaatatattgcctcaaagttctggaggctaagtccaaggtcaagatgttggcaaggttggttccttctgaaagctgtgaggtagaatctgttccaggcctctctggaagcttctggtggtttagctggcaatctttgctgttccttggcttgtagacaacataacatcccaatttctgccttcatcttcacatggtattcctcctatgtgtctctgtgtctaaatttatctttttattttattttttaaagggatggagtctctcactctgtcacccaggctyctaggctggagtgcagtagcaaaatcatagctcactgcagtcttgaactcctgggctcaagagatcctcccgacccagcttcctaagtagctgggactacaggtgca

SEQ ID NO: 951522 - DNA, 595 bp, Homo sapiens
cacaggggatgggcaggtctttgctccaaaatcctaagggcttgtgctgcaggtgcttgcaaaaggctttaaacagcattcctatctgtcactgacacttcaagcacaatttgatctgctggatcttatggttaaagtgccagagcagcttgcatggcagcctggacctgttgtagagctttctcttgttctgagcccttttcaaactggctgcttttttgggtcactcagcaaatgagccagagtaacacagtcaaaagaaaaatatgttgccttcgaattcaaagaggctcactagttgttttgtcacctttccggtcatacaagggtccagttgcaacaacatacccttcaccttagaagggctatctcaacttgccacacaccactggaaccctagaaacttcactgaggtagatacctgaatttttcttggatttatttccctccctctgacactcaaatgtcttaccaagatatctagagttgtagctacttcttggtcgctagamcccattagcataaagtcatcaatgtgtttggtcagtgaaataaaagggaagggaagagtggaagagaagagtgattaagaatc

SEQ ID NO: 951523 - DNA, 579 bp, Homo sapiens
ttataatatcatataaagattctataggatatttactttcctcatatgtatcataacatacwacaaaggaatataaccagtttagagggaagaattttccgtaggaaaaaaaagagctagaaatctgacatttcatgcagtccctttcatatcactccttcccattacctctgttattcgtcactttcctgtaacttggatgcagtcatcctctttttacgtttaaagtccagtctattagaagacaatagttgctgaagtttatttggaaaaaaggaagaacgtgctcacaacaggagagcaaaagtcaaattgtacaattaattattttgccaaatacttgaatgggttatcatttcaaattggtgacatgtcaaaaatcttgcattgagaaccactataccatcttttaattcattcagaatggtgggttaatatacctccacactgatgagctttttttttttttttttttttttttttgaggcaaaatctttctctgtcacccaggccaaagtgcaggggcatgaccacgggtcactctatccaccacctcccagggtcaagcaatttttttta

SEQ ID NO: 951524 - DNA, 567 bp, Homo sapiens
ataaagattctataggatatttactttcctcatatgtatcataacatactacaaaggaatataaccagtttagagggaagaattttccgtaggaaaaaaaagagctagaaatctgacatttcatgcagtccctttcatatcactccttcccattacctctgttattcgtcactttcctgtaacttggatgcagtcatcctctttttacgtttaaagtccagtctattagaagacaatagttgctgaagtttatttggaaaaaaggaagaacgtgctcacaacaggagagcaaaagtcaaattgtacaattaattattttgccaaatacttgaatgggttatcatttcaaattggtgacatgtcaaaaatcttgcattgagaaccactataccatcttttaattcattcagaatggtgggttaatatacctccacactgatgagctttttttttttttttttttttttttttgaggcaaaatctttctctgtcacccaggccaaagtgcaggggcatgaccacggktcactctatccaccacctcccagggtcaagcaatttttttta

SEQ ID NO: 951525 - DNA, 650 bp, Homo sapiens
gaagcagagaccacggcgtatatccaaggggcctgagagcagaggaaacctgtgccttacatctcagacagagaacggaggtgataacaggatctcaaagagaaataaacgcatgaagcatccaggcgatgcagtcagggagcctcgcagagattcctgtgcctgagcataatttctaagaagcggaattacttctatggctgcaagagaagcaaagagatggcagagtgtgccactggacaagcaggggtctcgcggataggaacgaaggcgacccccgcaatatcaggaggattaggaaaagacagagagcatgaaaactagatgtcttagtggagaagagtgtaacaccagaagctccctgctgtgctcagagcatcatggaagagctggggtaagggagggagggacccaaactgcctgaagagaagattctaggaatgaggcttaaaataaaacaggccgggtgcggtggctcacacctgtaatcccagcactttggaaggccgcagcgggtggatcacaagctcaggagtcragaccagcccggccaacacactgaaaccctgtctccagtaaaaacaaacaaacaaacaaacaaacaaacaaaatacaaaaaattagccagatgtgatggcgggggcctgtaa

SEQ ID NO: 951526 - DNA, 669 bp, Homo sapiens
ttttttgaacaggaactgtgtcttttcaggagggaagtctactatgaaggccacatgaagataaaaaagctgtttakgttgggcagggtggctcatgcttgtaatctcagtgctttgggaggctgaggcaggaggatcgcttgaactcagcaggtgggggcagcagtgaggtatgactgtacctctgcactccagaccaggcaacagaaggggaccccacagcttttttaaaaaaagctgcttggagaatggatggaaaaacatgaagacaccatagaaattggctccaagtccctagtcctctacacgtcatcctctggtgtgaaggcctctgccctcctgactgctggagaccggtgtccccttctctccacatcccagccgtggctgccctctcagaccctccattctgatgatgggcaacatgaaaatgttaaggacccttggcaaactctagggtttctttatgattagtaatcctttctgatgatctgaaaatgtattagctcacttctcccaatgctcaacagcatgaaagcctgtgttctctcctgccccgaacaacaggatctcctttcccccccttaacacccctccatcatcattcttcccagtgtgctgatgggcaatgagcactcttgatagagcggcccccagggagaaatgttc

SEQ ID NO: 951527 - DNA, 553 bp, Homo sapiens
accttcagaccaagaaattccttcgggtgcctacaccaccatggccctggatttcaagcacaaaaccaggcagccatttgggcagacattgagctagctgcaggagtttttttcataccccagtggcacctggaacccagcaagatagaaccattcacttccctggaaagggggctgaagccagggagccaaggggtctagctcagcagatcccaccccccatggagcccagcaagctaagatccactgccttgaaattctctctgccagcacagcagtctaaagttgacctgggatgtgtgagcttggtggggggaggggggtccaccactactcaggtttaagtaggtggttttcccctcacagtgtaaacaaagcctctgggaaattgaacttggtggagcccactgcagctcagcaaagctaccgtagctagactgcctctctagattcctcrtctctgggcagggcatctctgaaagaaaggcagcagccccagtcagggccttatagataaaactcccttctccctgggacagagcacatgggggaa

SEQ ID NO: 951528 - DNA, 673 bp, Homo sapiens
tggtttctctcttccacacagtgattcttcctttgttgaatcctgtcatttatacccttcataaccaggaagtgaaagcttccatgaaaaaggtgtttaataaacacatagcctgaaaaagggcaaaaaaaaaaaaaagaataaaaatagactgtagaattttatctgaaattgatttgtttatttccaagtactgcaatcattgaatacctcccatttgtcaggactattctaggaactgaagaaagaaagtattgaggcagataaggtctatctgctctccaagagatacaacctagtaaaaatagaccgccgttaaggtagaaaataaacagcatagtttcaggaagagatactgctctgtaaaaactaaaacgaaaagtgaaatgataaactgtgactctggattgggagtaaccaatttgtgtttaataataaaaaaaggccttgaagagctgacattttggatcatatctggataaactgaagaagccaaacatgcaaacatttgtggctatagtatggtagacagagggcacaggcagtgcaaaaactcaaagatgatgatgaacttggyatatttgaagaatacaataaagtccatgttaccaagaatatagtaatttaatgtgaaaatgattaaacttaaagttagagatactggtagtgtcaa

SEQ ID NO: 951529 - DNA, 590 bp, Homo sapiens
caaaaaagagcctgtatagccaagacaatcctaagcaaaaagaaagaggcatcacactacctgacttcgaactatactacaaggccgcagtaaccaaaacagcatggtactggtaccaaaacagatatatagaccaatggaacagaaaagaggccttagaaataatgccacacatctacaaccatctggtctttaacaagcctgacaaaagcaagcaatgggaaaaggattccctatttaataaatggtgttgtgaaaactggctagacatatgcagaaaactgaaactgaaccccttccttacaccttatacaaaattaactcaagatggattaaaggagtaaatggaaaacctaaaaccataaaaaccctagaagaaaacctaggcaataccattcaggacataggcatgggcaaagacttcatgactaaaacaccaaaaccaatggcaacaaaagccaaaattgacaaatgagatctaattaaactaaagagcttctgcacagcaaaaaaacaaacaaacaaacaaacaaamaaaaaaaaacctctcatcagagtggacagtcaacctacagaatgagaggaaattt

SEQ ID NO: 951530 - DNA, 605 bp, Homo sapiens
accttggtccccaaaatcttccagaaataaagccagttgactgaacccactttataacacaatcaaactctcaaagtcatctaataagataaaaaaaaatccaaaggacaagarcttcaaagattgaaaaaacactagcccacaaaaatgagaaaaaaacagtgcaagaactctgacaagtcaaaaagccagcatgctgtctttcctccgaatgcctccaccagctctccaccaaaagtttttaactgaactgggttggctgaagtgacacaaatagaatttggagtatggatagaaatgaagagcaacaaggtacaggagtatgttgaaacccaatccaaggaagctaagaatcacaataaaacaatgcaggagctgacagacaaaatagacagtatagaaaagaacataactgacctgatagaactgaaaaacacactgcaaaaatttcatgatgcaatcacaactattaacagcagaatagaccaagcagaagaaatgatattagtgctttaagactggcattctgaaacaagacaggcagacaagaatagagaaaaaagaatgaaaaggaagaaacaaaacctctgataaatatgtttatg

SEQ ID NO: 951531 - DNA, 576 bp, Homo sapiens
gctcaggaagatcaagaaagctggaataaacagagaagggtgccagaaggaagagaaaagagggarggagaaaagagagagagagagagagagagaatctagccatctgcagaggtgcccctcaagacttagctgtgtattaatcattgcatatgtgtgaataatctactgaggctggtaaaaggatgaccagaaaggatatagtagaaaagttctagccaacatggcaaaccttataattatggaatattagggaaagtattcagaagggttttccctcaatagtaggaaaaattaggtttacattaaatattattcttgccttgcctaacaaagtttaaaagtgagaactgggcctggtgcagtgccttacacctgtaatcctaacaccctgtgaggctgaggcatgaggattgcttgaccccaggaatttgagaccagtctgggcaacgtggagagattctgtctctataaaacttaaaaaaaaataaaaaaaataaaaagccgagagtggtggcatgcacctgtggtcccagcttcactgaatgtagaggagggaagggcatgtgagctggg

SEQ ID NO: 951532 - DNA, 797 bp, Homo sapiens
taaaaatgtacatatgcagctgacccttgaacaacacaggttcaaaactgcatgggtccacttatacacagatttttttttcaataaatatagcaaatatttttggagatttgcaacratttgaaactcactgattaaccatgtagcctagaaatatcaaaaacagatttgtcataactgcataaaatatacatagatactagtctatttttattatttaataccataaaatatacataaatcccttataataagttaaaatttatcaaaacttacttacacacacagattgtacttggtgccattcacagtggggagaaatataagcaaatgtaaacgtgcagtgttgaatcacaaatgcataaaattaactgagtgcatactgtaccactgcaataatttcatagccacctcctgttgctattgcagtaagctgaagtgttgtatctgcttaaaatcctgtgtgacacttatcatctccatgtaagcagttcaactctccagtaaattgtgtaccacaaacagtaatatctcttggttcttgcgtcttttcatcatgctaagtgtaatactgtaagccataaataataccatgggagccaacaaagtgccgctaatgacgttggaagtgctcccaagaagcagagaaaagccgcggcattacaataaaaagttgaactgcttaatatgtaccatagattgagatctgcagcagcagttgcccatgatttcagatggacaatttatttcgtaaacagatgatgtaaatttacagtgttgataaatacagcacaata

SEQ ID NO: 951533 - DNA, 796 bp, Homo sapiens
atgtcagttttacgtataaaagcttgccatgacttcccattgcctaccgaattaaccatgcattatgggttaaatttttgtgaccccaaactgctctggagaacaaaggtggcaggacccctgcccagcaggtccattggatggggatactgccctgtgggaccaagtgtaagtgtagagcatcccactagaggggattattcttgagcctaaagatctaattaagtttctcttgctagattttggactctggagatttgtttccccttcctcttttctagttcacccttttggaatggaatgtctaccctatgcctgtctcactgttgtatttcagatgtgcataacttatctggtttcacaggttcatagctacagaggaatcatatcttcattcctcatgatgtctcaagatgaatcatgcattgagtctcacccatacctgatttagatgatattcatatgataccctgcactttagactttagagttgaagctgaaattagttaaaacttttggggcagttggaatggaatgaatgcattttgcatgagaaaaatatataaatttgggaaagccaacagtggagtgttgtggaatgaatgtttaaatttccacaagctctaaaccccagtgtcactgagtttgaagatggggcctataaggaagtaattaaggttaaatgaggctctaaagggtgagtctctgacccaacaggattagtgtacatataagaagagacaccagasaactcattccctctcaatgcacacatgatgcagaaaggccatgggag

SEQ ID NO: 951534 - DNA, 796 bp, Homo sapiens
atgtcagttttacgtataaaagcttgccatgacttcccattgcctaccgaattaaccatgcattatgggttaaatttttgtgaccccaaactgctctggagaacaaaggtggcaggacccctgcccagcaggtccattggatggggatactgccctgtgggaccaagtgtaagtgtagagcatcccactagaggggattattcttgagcctaaagatctaattaagtttctcttgctagattttggactctggagatttgtttccccttcctcttttctagttcacccttttggaatggaatgtctaccctatgcctgtctcactgttgtatttcagatgtgcataacttatctggtttcacaggttcatagctacagaggaatcatatcttcattcctcatgatgtctcaagatgaatcatgcattgagtctcacccatacctgatttagatgatattcatatgataccctgcactttagactttagagttgaagctgaaattagttaaaacttttggggcagttggaatggaatgaatgcattttgcatgagaaaaatatataaatttgggaaagccaacagtggagtgttgtggaatgaatgtttaaatttccacaagctctaaaccccagtgtcactgagtttgaagatggggcctataaggaagtaattaaggttaaatgaggctctaaagggtgagtctctgacccaacaggattagtgtacatataagaagagacaccagagaactcattccctctcratgcacacatgatgcagaaaggccatgggag

SEQ ID NO: 951535 - DNA, 633 bp, Homo sapiens
gattgggcaggtgcaggtccacagtggtactcacagtaggacaggtcaggtgtgtgtttcaggtgggctaatcaccatagatgggagcgtgcatctccaatgtccgcttggattgtcagctttctttggaataattaagagaaggtaaaggaagaggaaaaggactaaagaaatcatctttgtacattttaatctgagctgttttcgagcagtgtgataaggtaggttgtcaaaatgtcagcttctccttatctctaattgacttaagtagaggcagctctaatccttgtgtgcacaggagcctggaatggagagatgaggccaattgattcctactttttaattaacaggtgagctgcttaaaaacaatagtatattgggggcaggttgggaacaggaaggaatgtgagggagggtcatctccaccacagtggcatttagagaaatattaacaagtgtcagcatttgatttgaatcaggggctggagcagagggaaaagttatgtcttatgcatggrtgtggtctcaaaagactgctgccaaagtgacaaaaaaaatttatacttctctccatacacaaatggaaagacccttcgatttttgaagtatcatgagggagacctcgaggtattc

SEQ ID NO: 951536 - DNA, 582 bp, Homo sapiens
gctggtaattgagacagtatgtgattggcatgagaataaacatgtggacgaaaaaaatagagatatcagaaatagatccacaagtgtacataaactcatttttggcaaatgtttcaaggtaattcaatgaagagaagttagttctttcaacaaatgatgctaaaacaattgatatccatacggagagagagagagaaactgtgtcctttatatcacaaaatactcagatgttaactaaaaataggtcatagacttaaatgtaaaagctaaaactattaaagttctagggaaaaaaacagaagaacatcttttgatcttagggtagcaaatatttcttagtgcataaaaaaggataaaccttaaataaaaagaaaactgataatttggacttcactaaaagtaaaaacttttgctctttttcaaattacacttaatgaaaggcaagctattgattgaaagaaagccattttcaaaatacatatctgataaaagacatattccagaatgtatacagaatcttacaattcagtaatatgatgacatggcartgggcaaaagatttgaacagacacttttccaaag

SEQ ID NO: 951537 - DNA, 629 bp, Homo sapiens
ctgcagtgagccatgattgcaccactgagctccagcctgggcaacagagtgagagtctgtctctaaaaattaaaaaaaaaaaattgtgaggaagaagaggagggaagaagaggtctacaaagagaaatacttcccagaatagggaagagaatgtaacttcaggaaagtcataacagaggcatagtggtacccagggaacaattaaaagagctccttctacattaaataagaaattggaggtgaaaagtttttgcatattaattttcaaatttcaacatctattttaaagtatagattcactctctgatcacattctgtagatttttcatcgcattgggtcataatggtgtatgtataatcattaaatttggatcatggataataatatttagggtaattttttatgtttcatttttattggctttcactgcagtggaagtataaatatgattcttatggaaataaagaaaacttactctgtttgttctaaccaaagggattaagggaatatatgaggtctcatttgagttggacctcaacctyctgaattgaaaaaataaagcaaaacaaacttattattaaggaaaattacaaataaacataaatgtgaagagaatagtaaaataatt

SEQ ID NO: 951538 - DNA, 494 bp, Homo sapiens
caattttcctaactctgcttctgtaagagtttccttatcacttactgaatatccattgtgtctttttccttaatcgcctgggaggaaccatctatcatcctgtcctgaagggagctcctcctatgtctggttggaccttaagatttaggtcccttgttaggaaacctgcttggttaaggatttttgataggaaggctactggttgtcagtggcctcagtgctttcgggctatgcccttgtttacactgtcaacaaggtggtattggagtgttacagggtcacagagaagaccttcagttatcaattataggttttaaacttaccatggcttttaaaggaataggatacacggtgtttttctttactacttccatctctctttctctttgacttcttctttrtctctctctttctgactccctctttgtctctgtctcttcctctctctgtctgactttctctttctctctttcctttctgctggtctttccctg

SEQ ID NO: 951539 - DNA, 410 bp, Homo sapiens
tggaacacaacaacaaagaacacctttacagtacagcaggaaaactggcaaacagcacttcagacaagtgatcaacgttagcatcaaaactcaaaaatcatggagatcctcaggcctgcaatcccagcactttgggaggccgaagcgggaggatcacgaggtcaggagatcgagaccatcctggcttacatggtgaaaccccgtctctactaaaaatgcaaaaaattagccaggtgttgtggcgggagcctgtagtcccagctactcgggagtctgaggcaggagaatggcktgaacccgggaggcggagcttgcagagaacggagatcgcgccactgcgctccagcctgggcgacagagggagactccctctcaaaaaaaataaataaaataaaaaataatggagatcg

SEQ ID NO: 951540 - DNA, 807 bp, Homo sapiens
cttggactggtgattatctctgaggggcgtgggagggtgattttgctctctgatttgaacacttctcagctatttgagttttttcatcattattttaaatgatgraaattaaacatttttactttatttaaaaattatttttcaatgccaagtttctcagaaagcctaaaagagcaataaagatcgatatgaggacttggtttgaatattggctctgtaacttactagccatgtgacctttagctatcaatttaatctctcttgaaatcacatccattacttgacaaggaggcaggcagcatatgactcccacctggttgtacaatggggaacctttttggacactgaaccacactaaggaatagtagataactgaatagatgagcttttggagaggaggttagcttaatgctgtttcatgtcatttgatattgacattaataggctccataaagcttcttccctttttatccaggatgtgaaccagacatctttaagattgcagcagttaattttatccattcaagcttcccaatcaatgcttttacttggaaaatatttatgcttaggatgctgaaaagctttctcctcagtcaggtccctaaggcattctaatatcactttttagagttgagtgctgagaccttgggcccttgaagtgagaaacaataaataataatgactacagaacttggcaaatataaagctctaggcaaagttgtagaaagagtactcaagtgtgcagaataaacaagataatatatataactttctcagtttttgatcctaaaaattagaagtaaaaac

SEQ ID NO: 951541 - DNA, 599 bp, Homo sapiens
acctctgtctcctgggctcaagccatcctcccccttcaacctcctgagtagctaaractacaggggcatgccaccacacctggttaatttttgtatttttttttgcaaaaatggggttttgccatattgcccaggctggtctcaaactcctgagctcgagtgatctgcctgcctcagcatcccaaagtgctgggattacaggcatgagccactgcacccagcccaaaagttgaaggtctctaaaaactttctaaagtgtcaacatttgtctgctgaccttaagagatattttcacatatatgaaaatatacattgctatgttcacatataaaattggcatgatgtttcccaactatgtaaaattaccctggaattttcatagttgtacatgctatttgaatccaaattccagagtggtgcagattgtcagtgttgtgtcttcataggcagtgaagcgtttagggaattgtctggataatttaagttaaaaaatggaggaagtgataagtttctttggttggcattatccagattttctagtgaattccaatttagtttgtgtaattatttttatgttcttcatttaattttgtttatga

SEQ ID NO: 951542 - DNA, 599 bp, Homo sapiens
acctctgtctcctgggctcaagccatcctcccccttcaacctcctgagtagctaaaactacaggkgcatgccaccacacctggttaatttttgtatttttttttgcaaaaatggggttttgccatattgcccaggctggtctcaaactcctgagctcgagtgatctgcctgcctcagcatcccaaagtgctgggattacaggcatgagccactgcacccagcccaaaagttgaaggtctctaaaaactttctaaagtgtcaacatttgtctgctgaccttaagagatattttcacatatatgaaaatatacattgctatgttcacatataaaattggcatgatgtttcccaactatgtaaaattaccctggaattttcatagttgtacatgctatttgaatccaaattccagagtggtgcagattgtcagtgttgtgtcttcataggcagtgaagcgtttagggaattgtctggataatttaagttaaaaaatggaggaagtgataagtttctttggttggcattatccagattttctagtgaattccaatttagtttgtgtaattatttttatgttcttcatttaattttgtttatga

SEQ ID NO: 951543 - DNA, 599 bp, Homo sapiens
acctctgtctcctgggctcaagccatcctcccccttcaacctcctgagtagctaaaactacaggggcatgccaccacacctggttaatttttgtatttttttttgcaraaatggggttttgccatattgcccaggctggtctcaaactcctgagctcgagtgatctgcctgcctcagcatcccaaagtgctgggattacaggcatgagccactgcacccagcccaaaagttgaaggtctctaaaaactttctaaagtgtcaacatttgtctgctgaccttaagagatattttcacatatatgaaaatatacattgctatgttcacatataaaattggcatgatgtttcccaactatgtaaaattaccctggaattttcatagttgtacatgctatttgaatccaaattccagagtggtgcagattgtcagtgttgtgtcttcataggcagtgaagcgtttagggaattgtctggataatttaagttaaaaaatggaggaagtgataagtttctttggttggcattatccagattttctagtgaattccaatttagtttgtgtaattatttttatgttcttcatttaattttgtttatga

SEQ ID NO: 951544 - DNA, 599 bp, Homo sapiens
acctctgtctcctgggctcaagccatcctcccccttcaacctcctgagtagctaaaactacaggggcatgccaccacacctggttaatttttgtatttttttttgcaaaratggggttttgccatattgcccaggctggtctcaaactcctgagctcgagtgatctgcctgcctcagcatcccaaagtgctgggattacaggcatgagccactgcacccagcccaaaagttgaaggtctctaaaaactttctaaagtgtcaacatttgtctgctgaccttaagagatattttcacatatatgaaaatatacattgctatgttcacatataaaattggcatgatgtttcccaactatgtaaaattaccctggaattttcatagttgtacatgctatttgaatccaaattccagagtggtgcagattgtcagtgttgtgtcttcataggcagtgaagcgtttagggaattgtctggataatttaagttaaaaaatggaggaagtgataagtttctttggttggcattatccagattttctagtgaattccaatttagtttgtgtaattatttttatgttcttcatttaattttgtttatga

SEQ ID NO: 951545 - DNA, 753 bp, Homo sapiens
ccttcacagtgagtgttacagatcttaaaggtggcgcgtccggagttgttcgttcctcccggtgggttcgtggtytcactgacttcaggagtaaagccgtagacctttgtggtgagtgttacagctcataaaggcagtgtggacccaaagagtgagcagcagcaagatttgttgcgaagagcgaaagaacaaaacttccacgacatggaagcagacccgagcaggttgccgctgctggctggggtggcctgcttttattcccttatttggctccacccatatcctgctgattggtccattttacagagagctgattggtccactttacaaagtgctgattggtccattttacagagtgctgattggtccattttacagagtgctgattggtccattttgacagagtgctgattggtgcgtttacaaacttttagctacacacagagtgctgattggtgcgtttacaatcctttagctagacagaaaagttctctgagtccccacctgacccagaagcccagccagcttcacctttcaatcccccctctaaacaggacaccccaattgctgatgggaatttggctgatgactgctctagctactttctgctggataggggcgaagaaggggccctgtaggtgtagtgtcctccagaggggaactctttaggccagtggaagggccagcaggtcagtccaggggtcctcggtagaagttgttagttgaactcatttggggttccatttgtaagac

SEQ ID NO: 951546 - DNA, 618 bp, Homo sapiens
ttgtggctttaatttgcatttccctgataattagagatgtggagcatttttccctgtttattagttgtttgtgtgtcttcttttgagaaacgtctatgcatgttgtttgctcactttttaatgggattatttgtgttttctttgatttgtttcaatttcttgtagattctggatctatcagtcctttgccagaggcataatttgcaaatagtttctcccattctgtaggttgtttgtttactctgatgatttattttgctttggagaagctttttcttttcattagctcccactgatttatttttgctttttttgaatttgcttttggggtctttgttataagttctttgcctaggccaatgtctagaagagtttttccggttttcttctagagtttttattgtttcaggacctagatttaagtcttgaagtcaccttaagtaaatttttgtgtatgatgaaagatagggatccagtttctttcttctgtgtgyggctattcaatgttcccatcaccatttattcaatagggtgttatttccccagtcgatgtttctgtatgctttgtcaaaatcagttggctttatttttgttttctctattttgtttcattggtct

SEQ ID NO: 951547 - DNA, 532 bp, Homo sapiens
gctaacgggatgttgtgaagattaagtgcattatttcatgttacgtgtttagaaaggtacctgatgtgtaatgagtgttcaataatgtcagtgactagtataatttgtattatattatttcatttgttggtagcttgcttttcataaggtgatcatatatacacaatattcttcatcttactttattcatttataatagttttactttgtggaaattattccaaatcaactaatttaccttaagtcaatgtcttcatattattagatggcaaattattcagccattttccttgtcatgacattcacttatttctagtgtttattgtaaatgatgctacaataaacacctagctatgtatgtccttctgcatcggtttattttcccctttaaaataaaaaaaaaaaattggccgggcgcggtggctcatgactgtaatcccagcactttgggaggctgaggcrggcagattacctgaggtcaggagttcgagaccagcctgaccaacatggtgaaaccctgtctctactaaaa

SEQ ID NO: 951548 - DNA, 621 bp, Homo sapiens
tcccaggcagcactaggggaggagatcaggctcccagctcccccagcatgacacagagctggygggaatttcaacaggactttctgaacggtgagggacaacaggggccccatgtcactgtggaggctggcactcttatatattcatgggtcaaacccactgtagtctctgaagtctggcacatgctgttgtacctgagtgtcacagtcacaggctaaataagcccttttcttttacaaccttcccttcagtgagggctgagggaaattcacatcttcttgctttcccctccttcccttgatttccccaggacagccagctcttcttggcttttactgccccggagaagatgcttagacatacaggcctgcatgtgtgcaccgccccccacacagtcacacattcacacacgcatgcatgtgctcacacgctcatgctcattagcgcacacatgcacactcacattcacacatgcacctcccacacattcacacactcatgaacacacatgcacgttcattcacatgtgtgcccacacgtgcacaaatacatatgctcgctaacacacactgtaatgcatacatgcacgctcatacgcatgcactcacacacatacacctg

SEQ ID NO: 951549 - DNA, 620 bp, Homo sapiens
cccaaagtctgactagactaattggctgaatcacagrcccacaaatgaaaacaaatgagtggcacaaccaccagtgtttcagcaggcttgccttattcaggcagtacaaacccagggaggcaggagcctggggcagggaggaagagagtctttgctgaactggcaggtgttgcaccatctggactgatgactccgccttctaaatctagcttccgagaggttgtgggaaggagagagtctcagagggtccatggtgaaggggaaaggaagaagaatttaccccggtccccacctcccactcatcaaaggttcaccccttgtgtgttacccctggaacttcccaatgtgcatatgtgagtgttaagcagtcttaactcctgcagtgtcttgaacctcaggccaacaggggtgccctggtgcaggtgtcaggggacacccctgatgacccttctgaaagatgtgccagctcatgcccacatggcacagccagaggttccacccaggagaagccagcagagcctacactgagctggtcacccaggtggaatgcagtgagtggtcaaagcgctagggaaaagggatacccagggatgtggggcagaacgcaaagattatctgac

SEQ ID NO: 951550 - DNA, 607 bp, Homo sapiens
tttagaaattgaccaaccaattttaaaaattcatatggaattacatagggtccagaatagacaaaagaatcttgaasaagtaggagctctcacatgacccagtttcaaaacttactaccaagcaatgttaatcaacactggcaaaaggacagacatacacatgaatggaatcgaaacgggagttcagaataaaatcatgcatctatggtcaactgattttcaacaaggatgccaagaccatttaatgtgagtattttcaaaagagagtgctggatttaccagacagctacacagaaaagaatcaggctggaccctttcctcacaccatatgcaaaaactaactcaaaataaagacctcaaaataagagctaaaactacaaagccattagaagaaaccaaagagtaaacctcatgaccttggatttggcaaagattcttggaatatgacatcaaaagcataagcaacaaaaggaaaaataaagtggacttcattaaaattagaaacatttgtgcttcaaaggataccattgagaaaatgaaaagacaaaccacaggatgtgaaaaattatttgcaaatcatatacccgataaggaacttgtataccaa

SEQ ID NO: 951551 - DNA, 625 bp, Homo sapiens
tattactacaaaagacatgatatgatttgtatttatgtccccacccaaatctcaggtccagttgtaatccccaatgttagaggagtgaccagaytgaatcatggggtggactttccccttgctgttcttgtgatagtgagtgagttctcatgagacctggttgcttgaaagtgtgtagcacttccccctctttgctctcttcttccttctctggctgtgtaaactgttactgcttccccttcatcttctgccatgattgtaagtgtcctgaggccttcccagccatgcttcctgtacagcctgtggaactgtgagtcaactaaacctgttttctttataaattactcagtcaggtagttctttatagcaatgtgaaaaaaagactaatgcaggacatgatttcattacttttcatgactgcatagtattccatgatgtatatgtaccacattttctatatttaatccattgttgataagcatttaggttgacttcttgtctttgctattgtgactagtgctctgatgaacatacaggtgcatgtgttctttcagtagaatgattaattttcttgtggatatacatccagtaatgggattgcagggttgaatggcagttctaagtt

SEQ ID NO: 951552 - DNA, 565 bp, Homo sapiens
ccaacatacagctcaggccattgctttagagggtgaaagccccaagccatggtgtcttacatgtggttttgggcctgcagatgcacagatgtcaagaattgaggtttgagaacctccacctagatttcagaggatgtatggaaactcttggatgtccaggcagaagagtactacaggggcagagctctccatggagaacatctgctagggcagtgcagagtccccactggggcgctgactagtggagctgtgagaagaaggccaccaacctccagaccccagaatggtagatccaccaacatcttgcatcgtacacctagaaaagtcacagacgctcaacaacacctcatgaaagtagccaggagaggcgctgtatcctgcaaagccacagaggcagagctgcccaaggctgtggtatcccacctcctacatcagtgtgattggatgtgaracatgtagtcaaatgaggtcattttggaacttttaagacttaatgactgctttattgtattttggacttgcatgaggcttgtagcccctttgttttagccagtttatctcattt

SEQ ID NO: 951553 - DNA, 627 bp, Homo sapiens
caaaggatgcattttctttataatatattagtggaaaaaaaaaaaaaactgtttctcctactatcctctcaccacacagaacacttctgtgactctagatgtgtagggcttttttccaccaacaactaactctgcagatgattctgcagcggacagcaactggctgtcctctaattcaattcaactatgacaccatctacctgaagatagcattagatcccacaggtcaaaggctcagtccccaagatcacccccatttttgatgccagtcacaaacacaagattgtcacttgtacttctgaccaatcggctataaatccggagctcccacaactttctcctcaggtttgattaatttgctagagtggttcacagaactcggggaacactcagactcactgatttattataaaggatattacaaaggatacagatgaagagatgcatagggcaccattatggaggaatgggagtgaagtttctatgccttctctgggcatgcmccaccctctagaaacctccatgtgttcagctatccagaagctctctaaacccagcccttttgaggtttttatgaaaacttcattataaatatgattgattaaatcattggccattggtgattaa

SEQ ID NO: 951554 - DNA, 653 bp, Homo sapiens
atcagcactctgtaaagtggaccaatcagcaggacatgggcggggacaaataacggaataaaagcccgcacccccccccccccccccaccagccagcggcagcaacctgcgtgggtccctcaccttgtgggakctttgttcttttgctcttcacaataaatctccttgctgctcactgtttgtgtcagtgtcatctttaagagctgtaacactcaccaggaaggtaggcggctccattctttttttttttttttttctttttttatttgagacggagtctctctgtcacccaggctggagtgcagtggcgcaatctcggctcactgcaagctccgcctgctggtttcacgccattctcctgcctcagcctctggggtaagctgggactacaggcgcccgccaccacgcccggctaattttttgtatttttagtggaggcgaggtttcaccatgttagccaggatggtctcgatctcctgacctcgtgatccgccggcctcggcgtcccaaagtatgagtgagcgagccactgtgcccggcccgcggctccattctttttttttttttttttctttttttgagatggagtctcgctctggcatccaggctggagtgcggtgtcgcgatctcggctcactgcaacctccgcctct

SEQ ID NO: 951555 - DNA, 630 bp, Homo sapiens
ccaattctgtgaagaaagtaattggtagcttgatggggatggcattgaatctataaattaccttgggcagtatagccattttcactatrttgatttttcctatccatgagcatggaacgttcttccatttgcttgtgtcctcttttattttgttgagcagtggtttgtagttctccttgaagaggtccttcacataccttgcaaattggattcctaggtattttattctctttgtagcaattgtggatgggagttcactcatgatttggctctccgtttttctgttattggcatataggaatgcttgtgatttttgcacattgattttgtatcctgagactttgctgaagttgcttttcagcttaagaagattttgggctgagatgatggggttttctaaatatacagtcatgtcatctgcagacagggacaatttgacttcctcttttcctaatcgaataacctttatttctttctcttgcctgactgccctggccagaactttcaacactatgttgaatagaaacggtaagagagggcatccttgtcttgtgctggttttcaaagggaatgcttccagcttttgcccattcagtatgatattggctgtgggtttgtcacaaatagctc

SEQ ID NO: 951556 - DNA, 642 bp, Homo sapiens
aaggtttggggcttatgccctctgaagctacagtctgatcataccttggtgccttttaaccatggtttgagtagctgagatgcagggcaccaagttcctaggctgcacagagctgggaggtggggaggtggctgggcttgggccacaaaaacatttttcctcctaggccctgtgatgggaggggctgccatgaaggcctctgacatgccctggagacattgccctcattatcttggtgattaacatttgattccttgttacttatgcaaaattctgcagcaggctggaatttctccttaggaattttttttttcctattacatcatctggctgcaaattttccaaacttttatgctctgcctcccttttaaacataaattctaattccaaatcatatctttgtcaatacataaaactgaatacccttaatagcatgctagtcaccacttgaacactttgctgctaagaaatttcttccaccagatgcctaaataatctctctctggttcaaagtgtcacaaatctctaggacagagcaaaatgctgtcagtctctttaccaaagaatacaaagagccacctttgctccaattcccaacaatgtctcatcttcacctgagaycactgcaacctggacttcatt

SEQ ID NO: 951557 - DNA, 799 bp, Homo sapiens
gtcagtcgccagggcagtacgcagatgcgtgcccaggtgtgagtttaaaaaagaaaaaggaaaaaaattcaagcgcataatgtttcttctgccggttgaaggtgaaaccccaaagccacccaggccatcggcaacagcagggcgagttctagctgtgtggctggtggagcccacaggtgtgcccagtggccagcggtgacggcacgggggcccaccctgtgcaccccactggaggagccctgcccttcaccactcctggcctggttcttcttcagtcttcatccctgatgtccgtcaaacccaaccatggggacacagtgacacccggcagaagggtgccagggaccaggaggaggccagggcggtgcttccctgccccagcctagcaattaagggcatcgccgctgtgattctacatgaacacagttcactccgctgtacctgggctgggccggaggccctggctgctggcagtggctgcaccagtgaccgctacagtggccgggtgccgctggctgctctcttctagtccagacctgcggttactgccacaggcctcagcagggcctggtgacgagctctgcacagccggccgggaagtgtcactttcccggatgaggagaggaaacatgtttcttgcaaatgggctgtgcgcttgtggaagagctcctytgcactgcgcttcctccgctcccaagggccccatcaaaatggggctggggtaacagcagccccaggtaaggcaggtgagattttctcttacagcaagacactgtgagggaggggccgggatcccctt

SEQ ID NO: 951558 - DNA, 605 bp, Homo sapiens
cacttcctggggctgccatgacaaaggaccacaaaccaggaggcttaaaacagcagatctagccgggggtgcggtggctcatgcctgtaatcccagcactttgggaggctgaggcaggcggatcatctgagttcaggagtttgagaccagcctgtctgacttggtgaaaccccgtctctactaaaaatacaaaaattagctgcacgtggtggtacgtgcctgtagtcccagctacttgggaggctgaggcaggagaatcgcttgaacccgggaggtggaggttccagtgagccaagatgcactccagcccaggtgacaaagcgagactctgtctcaaaagaaagaaagaaaacagacctgtgttttctcacagtgctggagggcaggactctgaaatcagggtgtcagcaggctgcactccttctagaggctccgggggagggtccttcctgcctcctccagcttctgggggctccaggcattccttggcctgtggcygcatcatgcctgtctctgccttggtctctacgaggccctctttcctgtgtgcctcagatctccctctccttcctgtcatgaggacacttggccctggatttatgtct

SEQ ID NO: 951559 - DNA, 488 bp, Homo sapiens
acattttttttgtcttaaaatcttatagacagagactctgtggtcctcagggtggctgataacagattcacggctgtggacacctctgcctcctggttagccctggacacctgtgcctcagtttcctactgagagttaggcaaaacacctcaccacgtcacaatgtaatttccaaaactcactgaggtcattatcgctgtgtccagggttaaggcccctgcatggtctgcagtgggaaatgtactcaccttgaaagcccagcaccaggaggcagacgagcagggccaggaagcgcatcttggagggtccaggaaaactgctgcttctggatctaagggcgaggagaatgtggttgggctggtcattcaagtctgggtttctccagaagcggggcccaataagcacaggtttccytggagtcgatttgcatgtctgatgacctgaactcagctactcgggaggctgaggcaggagaatggcgtgaaccc

SEQ ID NO: 951560 - DNA, 768 bp, Homo sapiens
attatcctaggtcctgaaaagtggaagagggagacagcagaagagagggaaccagggagatagtagcataagaaggacttagcccaacgttgctggtttttttttttttttttttttttttttttgacaracagggtcttgctgtggcccaggctaaagtttgggggggcaattagggctcacggcagccccttgacctcccaggctcaagtgatactcctgcctcagccttctgagtagctgggaccacaggtgtgcaccaccatagtcagctagttttgttatgtattatttatttatttatttctatatttattgcagagatgaggtattactctgttgcccaggctggtctcagactcctcagtgcaagtgaatcctcctcccttggcctccccaaatgctgggattacagaggtgagacatcatgcctggccatggttgctggttttgaagatgtgggaaggggaccatgagccaaggagtgcaggtggcctgtagaatctgggaaaggaaaggaagtggattcccccagagcttccagaaaggaacacagccctgatgacaccttggctttagcccagtgagactcctgttggacttctgacctctaggatcttaagtcaatgcatttgtgatattagtccaatcaattttcagtaatttgttacggcagcaaaggtaaacaaaacaggagtaggcagattcccgttcaattcaatttatacacactgaacacctgctatgtgccagatcctgtgctaagag

SEQ ID NO: 951561 - DNA, 673 bp, Homo sapiens
tttatgtatttcactattatctctgttcttgaggtcactgacatctattgtatatgcctggtggaaatgctatctaatggaagacaatggcacctctcttcccaactctgcagtcagtgacgtcaagccagtagcttgagactggtgactgtgggaatatttataccacagaaattggcaaatactacaaattacagcttctatttttccagagagcctgttgttaaacatttcccaaaacaaaccagagatgattctgaaagatggtggagaaggtaaatatttttagtagacataacttcaagggttctctcattgtctactttgcctaggggaagaaatagctagaccagaacataggcagtgactattggtttgactgggcagccagggtcttggaagaagcacagttggatgattggcgtcaataaattcagaaagaagacccttaggaatgagcgctgggtgtgcgaatacctgtggtccacgcaaatgctcaccaataagtctttactgcggagaagggtcccgatcatttgtattaaggccctkctacctatgactgtcaatcaccaacctccccaaccatcattgtgcttgcttgggaacccagcaacaaagggaccatggtttcaggatggatcctattcatgagctcaaaaatacagacagc

SEQ ID NO: 951562 - DNA, 673 bp, Homo sapiens
tttatgtatttcactattatctctgttcttgaggtcactgacatctattgtatatgcctggtggaaatgctatctaatggaagacaatggcacctctcttcccaactctgcagtcagtgacgtcaagccagtagcttgagactggtgactgtgggaatatttataccacagaaattggcaaatactacaaattacagcttctatttttccagagagcctgttgttaaacatttcccaaaacaaaccagagatgattctgaaagatggtggagaaggtaaatatttttagtagacataacttcaagggttctctcattgtctactttgcctaggggaagaaatagctagaccagaacataggcagtgactattggtttgactgggcagccagggtcttggaagaagcacagttggatgattggcgtcaataaattcagaaagaagacccttaggaatgagcgctgggtgtgcgaatacctgtggtccacgcaaatgctcaccaataagtctttactgcggagaagggtcccgatcatttgtattaaggccctgctacctakgactgtcaatcaccaacctccccaaccatcattgtgcttgcttgggaacccagcaacaaagggaccatggtttcaggatggatcctattcatgagctcaaaaatacagacagc

SEQ ID NO: 951563 - DNA, 760 bp, Homo sapiens
cactgagtacttaattttccaatgcagtaaccacgtgtgaacactcaattctagaccaatatggcagctacctggcaaccagttgtttcactgggactccatcaccccagcaatayattctcactggaagagactcttactctgatttcggcttgctttttccaacaccctcacttataccaacaccatcgcacatggccctactggtcacctttcttactgtcgcagtatcagacatgacactgcttctgaacaaggattcactttatcacattattggtatcacaccagcagaagaactaaggcaatgaccaggtgcctatggaattcacaagcctgaccatgtacccattattcacaatcagctaggctcatgaagaggcctactgaagactcagttacaccatcaactgggaggctacaccctgcaagattgagggccatctcacaggatacagtgtgcatgctgagccagtgacctgtgtgatatgagactatttctcccattacgggaagacatgggaatgggaagaaggagaggaagtggagatggggcatctcaggactacatctaagacccatttgcaaaatgtttgcatcttatcctacaacctatagggtctgcttgtttagagatcttggtacccaagggaatagcacttccaacagaggacatgacaatgagtatatgcagttcaaaatgtagagtttacttcccaaccagagttcaagctttcttatttgcatccaaaatccttga

SEQ ID NO: 951564 - DNA, 687 bp, Homo sapiens
aactcctcctgcctgggtttttgggttttttcctggagattccttgagggcattttaaatataatccaagagatttttcttctgtggccagatgaccggcgcgggtcttcatgccacccattactaggctgtatgtatttgtattttagacaaataacccccatctctgagcctcagtggcagcatctgtaaaagagggatatgtaataacagaaccgtcctcatcagttatcaggaggaataaatgagttagcccaggggaaatgctgaaagcattgccagacttgagcatgcctcacaatcatgcaggactcatcaaaacgcagattgtggctgggggcggtggctcacacctgtaatcccagcactttgggaggccgaggcgggtggatcacctgaggtcaggagttcgagaccagcctgaccaatatggtgaaactctgtctctactaaaattacaaaaattagctaggcatggtggggtgcgcctgtaatcccaactactcaggaagctgagccaggagaatcacttgaatccgggaggcggaggttgcattgagccaagatcgtgccattgcactccagcctgggtgacaagagcaagactttgtctaaaaaaaaaaaaacagatcacytgggccctaaccccagagtttctgaatccattaaactttgcttctctaacag

SEQ ID NO: 951565 - DNA, 567 bp, Homo sapiens
gtggcagctcaagatccaaggctgcttcaatcttgtggcacctacttctcaacacaagtgctctacagtttaccaagcaggagagggtagtatagaggacactgcatcagaaattaaatgcatcagcctggaagtgacatcagtcccttctgctcacatcctttgaccgcaaactaagtcatagagtaagaaaggatattccttgtaggtggcaagaagtagaagagcatgagatatgagtaaatgctgataatatctgctatataatttcaactctattattttgtatcttcaaatatacagtatagttgatttaatgcccacctttgtatcttcaaatatatagcccttcttgtattaattcatttatcacttcaatagctcacttgattatgaaatgattactgattataaaaaattacctcagtgtcttttgaaatgccaagtctgtattttaatcccataacctcttcacagacatactkgtaatataaaatgatattaatattttaatattttgctcttccaatatagaaaaaagtacaattaaaacacaatggaactgat

SEQ ID NO: 951566 - DNA, 554 bp, Homo sapiens
aggtaataatgaaagctgccatctytccttctagggagctaggtgtcctcattcagttttgctaacaggtaggttagtgccttaacagagactctttggaggccagggtagaaggagagtgagaagtccagggagaggaagccagctatgttgccctatgcaagaggacctgtggcttctctctgaagaaagaagaatgcacggaatgagtatattaactcagactgaggactgactggcatattttctagctcagctaaaaacaacttggaggagaggagtctttcctgtcaaaaataatttattctcttacaaagttggttatcaaagaatgtgtttccttcttccaacctgtagctgctttttgtgttgttaagccatatttgtttttcatgactgtgtgctttgccactagtatgagcagtttctactgtataaaactcaccccttcagcatgtctttgctttttttgtgtgtagaaagcaaaacttctattggtctgctatgatgatttaaagtagtaattgctctggtcttctatcctgccaacaacg

SEQ ID NO: 951567 - DNA, 444 bp, Homo sapiens
atctgaaacaactataggtgagaatttttgcatgrgaaatattttattccgaccctacagggtaaaagaagggctataaactaaagccgaagatattcagcagatttctgacgtggacatcagaagtgtggacatgagtgtgctttgagcgcactgtggaagagcagtggttgtccagcaaggtcctaggtgcctccgtggcctttcgtacagtgggcaagttgggtaggactcatcttaaaaatcgtgtatgttacaaataacaaaatttatttatttatttttttgagacagagtcttgctctgttgcccaggctggagtgcagtggcgctatctcggctcactgcaacctccacctcccggagggttcaagtgattctcctgcctcagcctcccaggtggctgggattacaggtgcccaccaccatgcccagctaattttt

SEQ ID NO: 951568 - DNA, 444 bp, Homo sapiens
atctgaaacaactataggtgagaatttttgcatgggaaatattttattccgaccctacagggtaaaagaagggctataaactaaagccgaagatattcagcagmtttctgacgtggacatcagaagtgtggacatgagtgtgctttgagcgcactgtggaagagcagtggttgtccagcaaggtcctaggtgcctccgtggcctttcgtacagtgggcaagttgggtaggactcatcttaaaaatcgtgtatgttacaaataacaaaatttatttatttatttttttgagacagagtcttgctctgttgcccaggctggagtgcagtggcgctatctcggctcactgcaacctccacctcccggagggttcaagtgattctcctgcctcagcctcccaggtggctgggattacaggtgcccaccaccatgcccagctaattttt

SEQ ID NO: 951569 - DNA, 607 bp, Homo sapiens
aatagaatagactaaatcctaaactcttcatttcctccaatttaattttcttccacagaattaacaaaaatgaaaactgctctgtttctgaagccctrtaagctgaaactagatgcatttttcgaaacaattctcaagcctgatgtccagggtcacacaaatattcacaaacccacccaatgccataaccagagacatcaaactacaaacctggaaaataagttgaagttttcacccattagacagcttttcccaagatgtttcccagcacatgttataatgagactcttaaccatcttagtgcccacttttccacttggcaagctgaaggccctttaatttattcatttggctgcctttcagcctcagttcatatctcaaaactattataaaactaggactgtcatattactattaatttttcttttcatttttccttttaaaactctgtatctgtaacttttaaagtttttgcagacaccaactcctaagagaataatgctggcccagcactttatgaaactatggaacagatataattgaacttaataacagactcccggtagaattagtctccgagtcactcctttcaatcctcccatgttgc

SEQ ID NO: 951570 - DNA, 664 bp, Homo sapiens
caggaacccttgaatgaaggggaggccaagtccctttgaggaacccccactacactacccacaattatactgttaatctttctcccatctttccccaaggagacctccgcccttttaccagggtaactrtgcattggggaaagggaaataatcagacctttcagggactactgaacactacttctgaggtgacattgattccaggggacccaaaatgtcactgtggccctcaagttagaggaggggcttgtgaatgtcaggtaattaatggagttgtagctcaagtctgacctacagtgggtccagtgggtccctggactcatcctgtggtcatttctccagtgccagaatgcataattggcatggatatacttagtagttagcagaatccccacataggctccctgaccagtacggtgagggctattattgtggcaaaggccaaatggaagctattagagctgcctctacctagaaaaatagtaaatcaaaaccaatatctcatccctggagggattgctgagatcagtgccaccatcaaggacttaaaggacgcaaaggtggtgattcccaccacatcttaattcagctctcccatttggcctgtgcagaagacagatggaccttggagaatgacaatggattatcataagcttaaccaagt

SEQ ID NO: 951571 - DNA, 804 bp, Homo sapiens
agcctactacactgttacttaatttgtataagcagaaaacttccaggtccagtggacaaaagactaatttgaattataaacatagagcatcaccgcccctcaatcaatttccagatttgagccagtttacagatccaggaacccttgaatgaaggggaggccaagtccctttgaggaacccccactacactacccacaattatactgttaatctttctcccatctttccccaaggagacctccgcccttttaccagggtaactgtgcattggggaaagggaaataatcagacctttcagggactactgaacactacttctgaggtgacattgattccaggggacccaaaatgtcactgtggccctcaagttagaggaggggcttgtgaatgtcaggtaattaatggagttgtagctcaagtctgacctacagtgggtccagtgggtccctggactcatcctgtggtcatttctccagtgccagaatgcataattggcatggatatacttagtagttagcagaatccccacataggctccctgaccagtacggtgagggctattattgtggcaaaggccaaatggaagctattagagctgcctctacctagaaaaatagtaaatcaaaaccaatatctcatccctggagggattgctgagatcagtgccaccatcaaggacttaaaggacgcaaaggtggtgattcccaccacatcttaattcagctctcccatttggcctgtgcagaagacagatggaccttggagaatgacaatkgattatcataagcttaaccaagtggtga

SEQ ID NO: 951572 - DNA, 693 bp, Homo sapiens
ggaaaggagaacaagccaatacctgsagtgtctcatggaccaggcctggaagggagacctagggtttttgctcccattccactggccatggctctgtcacatgctccacccaaaccaagggaaaccacagcctggcagagcacccaggaagaagaggagaatgcggatgtttgaaagaatgaatccatttgtgttttaaccaacaaagaggaactaagccttttctgcatttttttgcttaaatataaaggttgtgatataatcacaagggtccttaaaaggtggaggaagtgaaaccagatgcctgtaatcccagtgctttgggaggccaaggtgggaggatcatttgagcccaaaagttcaagaccagcctggtcaacatagtgagaccctatctctacataaaattttaaaaattagccaggcatggccgggcgcagtggctcacacctgtaatcccagcactttgggaggctgaggcaggcggatcacctgaagttgggagtttcagaccagcctgaccaacatggagaaaccccatctctactaaaaatacaaaaaattagccaggcatggcggcacatgcctgtaattccagctactcaggaggcagaagcaggagaattgcctggacctaggaggcggaggttgcggtgagccaagatcacactgttgcactccagcctaggcgac

SEQ ID NO: 951573 - DNA, 581 bp, Homo sapiens
gagcattcgtacaaagtgaagccacctcccctccgccatgcagtctcccagaccgggtcaaaggacccaggctccaggtcgctgaggcctggagggctgaggcccttgctgtgcgccctggtcctctgatcccaaggcccaagctgccccggtacccacttagggtcagggtggaaagcctacgtgggaaagggggacctggaggactacccccacgcccatggcagggtggagtcccgaccttggcatattggacctactcacttggcatctccctgccccgaccccgtctgggatccgtattggcagcgacgaggaagggaggaatggtaagggagttgggtcggtacaggacggaagtgaagatggaaagagagaagaaaaataaacaaaactgggtagggacatggagatgggtgaggcaggggtaggggtggagttggggctgcctcggggagcagcggcttttcaccctgctatagggaggtgcgtttggctgagctgtccccccmccaaataaagctaatgatgtagtaatttaggagggggagaggggctgggcaaaaggagagaggggagag

SEQ ID NO: 951574 - DNA, 564 bp, Homo sapiens
gccatttttattgagtgaatcrtccttagattgttgcatggttttggttaactttcagagttctgaaaaaaagttgattttgacaacttgtgctagtgttctcattgcttttataaaataatagtttgatggaagtctatattttgcaattctggaaattgcttttgggtcagcgcttccttaaaactcactaaaacttgacaagtggtaggttgttaataattagttgcatgtaatttctgaaactgtagtagtagatttttttgtactctgtttaacattaaatcataaaatttatttttttctagatagatcacattaaattttattcattcaacaaatacatattgagtcactgagttgcattagtcactgtcccaggcaccagaaatatggcatggatgaggaaatgacatttgccaagaggtcctaatgacctgagggaataggtcacaggctacctgaggaaagataattccaggctgtctacaacagatatgctttagattcaagacaaaaatatatcgaaagtaaaaagttataaaacagtataccatgcaaata

SEQ ID NO: 951575 - DNA, 799 bp, Homo sapiens
tgcactgggctctggccccaagtgatctgtgcctatcatgtggcaagggcctggaggcctccctgtgcacaagtagaacattactgtcagacacctactatgtttttatttagtagtagcaggccccagttcttcactgtggctcaaagggtacattgtccccagtgtcatcttatgtagccaatgggccacgtcttctgtgggaacttcctcaagaagacatatgcaggctagctcatctgcctgttgatttccaggtggtgtagatgcagtgtgggcatcctcatggtagactgttatatgcatgccctggatataatggggaatgtccttccatgtgtcagcaccccaaagggggtgccctactaccattcagttttacaatcctgagcttcctattgcagtggccacctggtgagtcccttaaaggaggcctataccttacccataatggcagacagaacaacattagtcttactgaccaagtgaaacagcaaggtgggggctgcagtttgtaagctggaaaaagactcagaagttagcatgatgtcatcagtgtaacagaaacacatacccgctcagggtggttcatccgctgagatctgtggccactaggctaagacagatagtagggactatgtaaatattcctggggcaagatgataaaggttcattgttctccttcccaggtgaatgcaaattggtcttcackctctggggcaagggggatgctgaagaaggcattggctaaatctacaacaaaatggtatgtgccaaacgcctctcttatcatcagatg

SEQ ID NO: 951576 - DNA, 670 bp, Homo sapiens
ctagcagtatacatttattgtcctacctctggagtatattaactctctggctttgtgtcataatcctattcaaagagaccttgayccctttttgcttctgcaggatatcacactagtctattacattaatgacattatgctgattggatccactgagcaagaagtcaccacagtgatcttatcgatgagacatttgtttgccagagtatgggaaaaaaattcaatctaaattcaggaaataaatccagctaaatttctatctcagtaaatttcctaggggcccagttgtgtggggcctatcaagatattccttctaaggtgaaggataagttgctgcattgggcccctcctacatccaagaaagagccacaatacctagtgggcctatttggattttggaggaaacacattcttcatttggatgtgttactctggcccatttattgagttaccaaaaaggctgcagttttgaatggggtccagaacaagagaaggctctacaacaggaccaggttgttgtgcaagctgctctgcctcttgggccatatgacccagcagatccaatggtgcttgaggtgtcagtggcagatagggatgctgtttggagcctttggtaggcccccataggtgaatcacaatgaaggcctctaggagtttgaagcaagaccct

SEQ ID NO: 951577 - DNA, 670 bp, Homo sapiens
ctagcagtatacatttattgtcctacctctggagtatattaactctctggctttgtgtcataatcctattcaaagagaccttgatccctttttgcttctgcargatatcacactagtctattacattaatgacattatgctgattggatccactgagcaagaagtcaccacagtgatcttatcgatgagacatttgtttgccagagtatgggaaaaaaattcaatctaaattcaggaaataaatccagctaaatttctatctcagtaaatttcctaggggcccagttgtgtggggcctatcaagatattccttctaaggtgaaggataagttgctgcattgggcccctcctacatccaagaaagagccacaatacctagtgggcctatttggattttggaggaaacacattcttcatttggatgtgttactctggcccatttattgagttaccaaaaaggctgcagttttgaatggggtccagaacaagagaaggctctacaacaggaccaggttgttgtgcaagctgctctgcctcttgggccatatgacccagcagatccaatggtgcttgaggtgtcagtggcagatagggatgctgtttggagcctttggtaggcccccataggtgaatcacaatgaaggcctctaggagtttgaagcaagaccct

SEQ ID NO: 951578 - DNA, 590 bp, Homo sapiens
agaaggctctacaacaggaccaggttgttgtgcaagctgctctgcctcttgggccatatgacccagcagatccaatggtgcttgaggtgtcagtggcagatagggatgctgtttggagcctttggtaggcccccataggtgaatcacaatgaaggcctctaggagtttgaagcaagaccctgccatcttctgcagataactactctccttttgagagacaactcttggcctgttactaggctttggtggaaactgaatgtttgactgtgggtcattaagtgaccatgcgacctgaactgcctatcatgaactgggtgctttctgacccatctagccataaagtgggtcatgcacagcagcattccatcatcatatggaagtggtatatatgtgatcgggctcaagcaggtcctgaaggcacatgtaattcacaggagaaagaggctcaaatactcatggtctccactcctgccaccctgccttccctcccctgcactaattgcctcatggggagttccttatgatcagttggcagaggaagagaagwctggggcctggttcacagatgattctgcatgatatgcaggcac

SEQ ID NO: 951579 - DNA, 632 bp, Homo sapiens
atcctagctagtacaatatagtaagaaaaagaaaaaaaaaagagtcttacagattggaaataaggaagttaaattgccttttcttcacagacaacacaattatatttgtagaacatttgaatcttccaaaaagttacttgaatgaataagcttctttagcaatgtcttggaatataattgtcaattaaacaaaattttaattttatatgttagcattcaacaatcagagggttaaactttagaaaatgcagaatatcatataataaatacttaggtagaaagttaaacatacatttcttagaactttatatgaagaagtataaagcattataataataggtaaaaaaagaggtatatgatgttcatggatcagaagggttaatcctaagatatcaattctttaccaattaattttcttgttcattgctatctcaatcaaaatgccagcagatattttgacaaaattgacaaaacaattctaatgattttagagaaatgtgaataacctagaatagcaaaaaccattttgaaatataaaaagaataagctggaagtctgttttcaasacttaccactactataaagacatagtaaacaattaagtctggtattgtcataagggtaggtttaca

SEQ ID NO: 951580 - DNA, 566 bp, Homo sapiens
ttagtatggaagaaattaaaaaattaatatgtttaaaactctaaaaagtcagtaaaaacttattgtttaacagttttcactactgctttyagttttctagtgtattgcggtctgatttaaaatgtcacttagtcttctacaaaactcaaatataatccatttatatttgtctatgaagacagcattatggaatgaaattataactgttcaagacattctctctctaaaataatcagtattatttaatgacacaaggtatacaaacaatattatcttccagaattctccatgttaaatagtatcatagtaaaacaggtagtatgttagtcgtaaatgggttattatgtttcttcaagtcataattaccattttatagtaagtattacaaaagtattacaaacataaagagattactggtgacttgtccccgcttatcaacagaagatatgttccaagactcccagttgacgtctgaaaccgtgtatagtatcaactatacacgtttctgttcaagtcttctacccacaaatttaatgtcttttccatcttaactaagtacttttctt

SEQ ID NO: 951581 - DNA, 595 bp, Homo sapiens
gaatatttcctccaatcctgtgcattttctcttcactctgtttattatttcctttgttgtgctagttttcaatttgatttagtcttacttgcttgtttttgcttttgttgtctgtgattttagtgtcatatccaaaaattattgcaatgaaaaatgtcatggatcttttcccctatgtttacttttaaaggttttatggtttcatattctatgtttcagtctttaacacattttgagatggtttttgtttatggtgtaagatacaaatacaaatttttttgttttggtttcttttttacctatgtggatatctagttttttttttttaacagtaattattaaagagactaacttttccccatggtgcactctacattgctttgtcaaaggttacttaactctatatatgtgtcagtttatttctgtgctttctcttctgttcattggtctatgtgtctgtttatacacccatamcatactgctttgattactgtagctttataatataatttaaaaatcaagcactgtgatgtttccaactttgctactcttgatcaagattactttagctattctcgatttttggtagtttcta

SEQ ID NO: 951582 - DNA, 630 bp, Homo sapiens
ggaaggaccccactatgttactgacaattttttcaacgaatctttctcccatccttccctcaaaagaccttcagccttttaccagggtaactgtgcgttgttgaaaagaaaatgatcagacatttcagggagtactggacactggctctgagctgatattgatttcagaagacccaaaacatcactgcggtcttacagttaaagtaggggcttttggaggtcaggtaattagtagcgttttagctcaggtcttacttacagtgggtccagaggtttccctgactcatcctatgttcagttccccagtgtctgaatgcataattggcatagacatacttagcatcttgcagaacccccacactggctctctgactggtagggttagggctattatggagggaaaggcaaaatagaagccattagaactgtctctacctagaaaaaatagaaaatcaaaaacaatatcacatccttggagggattgcagagattagtgcaaccatcaaggacttgaaagacgcatgggtggtgatttccaccacatcctctttcaatgctcccatttggcctattgagaagacagatgaatgttggggaataatagyggaatatcatacacttaaccaagtg

SEQ ID NO: 951583 - DNA, 631 bp, Homo sapiens
ccctctggatgaaccagcaagggcggagggggacaccggagagcgagacggcctcgctaaagaaggccccctggcctttcaggatgaggggctcagtcagcccagtgatgsggactccgtgagaactgagctgtgaaaacgtgttggaggcacagtacccacctctgccgcgtctgaacccagatttgccaggaaggctcttgctttctcaatctctgttccccggtcatcacgaataccctgtgctggtcactttgtgcatccccattttttttttcttccaaggatacggtcacgtgggcagagctgcagagacaggatcctagacaggcaggccttgaatgccagggcaggagattgctgaggattcagaagatctcgggaagcttcttaaaggccctcgacccctctcgctacctatgagggcaggactggagaggagaagggagaaggccggagaccaggggcagcccccataggaagcagactccagccgcctggcctctcccttccccagggacgcctcagtgcggggtaggcgctacgggagaccagggaaggggctgctgcaatattcgaggtgagagtgtcctgcactgaagcatggtacaaagaggtgggctggagaggg

SEQ ID NO: 951584 - DNA, 575 bp, Homo sapiens
ttcatttagctgattgttccctttgctgtacagaagcttttttttttttttttttttttttttttgagacgaatttcactcttgtagcccaggctggagttcaatggtgtgatcttggttcactgcaacctccgcctcacgggttcaagtgattctcctgcctcagcctcctaagtagcgggattacaggtgaccaccacaatgcctgactaatttttgtattttttttttcttttttaagtagagacagggtttcatcatgttggccaggctggtctcgaactcctgactcaggtgatccacctgccctggcctcccgaagtgttgggattacaggcgtgagccactggacccagcccagaagctttttaaattgatgtgatcccatttgtccaatatgcttgtggcttatcactcaagaaatctttgaccagttccgtttcctggacagtttccctgatgctttcctcttagtagtttcatastttgaggtcttgtatttaaatatttaattcattttgatttgatttttgtatatggcaattagtagaggtctagtttcattcttctggaca

SEQ ID NO: 951585 - DNA, 586 bp, Homo sapiens
actggttccaggacctcccttgataccaaaatctgcatatgttcccatcttctatataaattggcatagtaactgcatataacctacctacaycctcctgtatactttgaatcatctctagattacttaaaatacctagtacaatgtaaatgctatgtaaatagttgttatattgtgtttttaaattttgttttttttttattgttgtactggttttttttttttttgagatggagtcttgctctgtcacccaggctggggtgcagtggcgcaatctcggctcactgcaacctccacctcccaggttcaagcaattctcctgcctcagcctccatagtagctgggactataagcgctcgccaccacgccttgctaatttttatattttttagtagagacggggtctcaaactcctggcctcaaatgatccacctgcctcagcctcccaaagtgctgggattacaggcatgaatcaccacactgggcctattttttatttttaaaaaatattttccatttgtgattggttgaatccatgggtttggaacccataaatacagagaaccgattgtatacactcctattc

SEQ ID NO: 951586 - DNA, 482 bp, Homo sapiens
aggagcagggcacaggagcaaggatctacagaacagctctgcatttccttctgctgtgtttctcaagagaaaaacaaccttttctgcagattaaaataatcatttcccccatatatgtayacgaacacccaccaggagtgtatagcttctcatttatccaggttgtcttcagcatttagttagattattatgttggccaaggctcatgcctctaatcccagcactttgggaggccaaggcaggaaaattgcttgagcccaggagttcaagaccagcctgggcaacatggtgaaaccctgtctctacaaaaaatacaaaaaactagcctggcatggtggcacgtgcctgtagtcccagctacttgggaggctgaggtgggaggatcacctgagcctgggaggtcgaggccatgattgcaccactgcactccagcctggcaacagtgagaccatgtctcaaaaataaaataaaatgttggtcaa

SEQ ID NO: 951587 - DNA, 661 bp, Homo sapiens
caccttgtattcacaatttatccaaacccaactctctagggaaaaataacgtaatcmccgtggcagcttttacctgccattgtgcctgagaagacaaggtgagattagaaacaaaacgtgcagtgccttcaaatggggctggttcccacgggcccctcgagatgcaaacaccgcgctctctcatgatggtaatgcttcaaaatacgtatgttctagaaaaatataggtcaaaaaaatgttgactcaaaaaacccagctcccatactggaaggaaaactggctgcgccagggataggagaggccacgcctctccccaacacactccttcctaggaggttgccggggacagtgtggcccatgagcaacgcctgccctcacatactgactgcagcgcctcactctgtgtcagaggtgcctccccatacagggcgcgagtccctttgtggcctgccccagccacaggctggaggagccctgggtgaaagtgcaggtgagtgacagcacatccacccgggaccccttctctgtcttgcggccagccctgcaccttccaccatcctctctctcaggtcagtgtgggaagatctgcggcagatgaacaggtaaaaaatacagatttgaacacaatgggatgttatccggcctcaggaaaggaggacac

SEQ ID NO: 951588 - DNA, 760 bp, Homo sapiens
agcatagagaacttatttttaaaaaactactactgttgtgtagaaaaatacgattaattttatgtttcatctccacaggccgaacttacattttgcacaggagatattattacagtttttggtgaaattgatgaagatggattttattatgtaagtttttgaaatatcaagaagtaccatttgatttttgtattttcatttattttgtgtgttttgttttgctagtccgttccttctcttaaaattgggcatgaacgtcatacgcctgctgatagctttgcttaattggctgagttatagaactttgctgagttatagataatctagaaagttgggactgtgaacttcattgtttcttccttgctaatactagtgttttcaatgtatatgcactgtaaacaaaacaaatacattcatattcttattttttaaattgctgccacccaaacatttacaaaacaatttaagtttctagattacttaactgtataggtcaaaaataaattttaggaaaaggaagaaatacaaataagcaaaaacaaaacaaaacaaaaacctaaaaccccacagattttaggacttctcccttaccttttttctagagccaactgctgttagcagcttggaaccccccacyccgcccccaccccttgctgctggtgattcctggcagggacctcagagccaccctccctccttttctgttcccctggagcatgtcttgaatactccctggggcaaagggagggaatggggtggg

SEQ ID NO: 951589 - DNA, 599 bp, Homo sapiens
cccatctacagttggatgtttaatgggtatttcaaatttgccatgtacaaactgaatsttggccttctcccttcatgaaaattgatcttttaaaacccccaattcagtccgtggcaacctcgtttttctacttgcagctaaaaatcttaattttgttacttcttgtttttatactccccatcaatctgtcatcaaaccctgttcacttaacttcaaatatattcagaatctgcaattttttacgacctccattgctactaccctagtgcaaagctaccatcattcctcccctgagtttttacagcactcttaacttgtcacttgcttccagccttgaacctccacagcttattcttaacctaagcaacatcatatttcttctctggtcaaaaccctagaagagtttcccatctcacatgtaccattcagggttctccagaacattgaaccagtaggagatgatagatagatagatagatagatagatagatagatagatagatagatagatgatagatagatagatagatagatagatagatagatagatagatagataatacagagagagagactttaaggaattggctcatgtgatt

SEQ ID NO: 951590 - DNA, 699 bp, Homo sapiens
aagctgacaaggatgtagagcaaaaggaacgatcattcattcctggtgggaatgcaaaatggtgyagctcagcctgataacttcagtcagtggcagctctgcttttctctcgggagaaagtcccagagatgacccacaggctttctttcattgccactgcagtggtcccacctttgctgcccttggcctggggaaaaaaacaaaggccctgattgctttgctggtaactctagcatgccacagccaccatttagtgaagagtccagtccctcttttcctgtgagaccccgagtccctgctcttcaccaggcagggcctccagtttggaaattaaacaatctgttcttgaatgactttgggataaaaaataaaattaaagcagaaatcaagaaattatttgaaactaatgagaacaaagatacaacataccagaatctctgggatgcagctaaagcagtgttaagaggaaagttgatactaaaaatttttactaaacacccacatcaaaaagttagaaagatctaaagttaacaaactaacatcatactagtggaactagaaaacaagagcgaagcaacttctaagctagcaaggaaaagaagtaaccaaagtcaggactaaactgaataaaaaggagatgagaaaaaacatacaaaaaatcaacaacaccaaaaattggatctttgaaagcataaataa

SEQ ID NO: 951591 - DNA, 477 bp, Homo sapiens
acctgcagtgtaaacaagagcagggcatgtatgagtagttgagaatggtgaataggagtatgactagacaaaagatagtagggatgacaagtttttttggggcacagtctaagttggtctggtgtcaaatgagactggggcctaataaaaaggagcatctatacaggagcttaaatgggctgtaccttgtagcattctgaggacaggcctgaattctgagaagcgaaagtggtaaaagtattgtccagtcctttttaagttggtggctgagcttggtgaggtgtgtttttaaaagacctttagtccgttctacttttcttgaagacggaggaccgtaagggatataaaggtttcactgaatactaagagcctgaaaaactgcttgastaataaaggcggtctgttatcagactgtatagaggtgggaaggctaaactgaggaattatgtttgacaggagggaagaaatgactgtggt

SEQ ID NO: 951592 - DNA, 565 bp, Homo sapiens
gagacaaaaaagcccaaatagcaaagataatcctaaacaaaaagaacaaagctggaggtatcacactaccagacttcaaactatactacagggatatggtaaccaaaacagctcagtactggtacaaatacagacacatagacaaagggaacagaattgagagcccagaaataaggccataacctacatctatctgatcttcaacaaagctgacaaaaacaagcaatggggaaaaattctctattcaataaatggtgctgggataactggctagacatatgcagaagattgaaactggactcctttcttatgccatatacaaaattcaactcaagatggatgtattaggattctctagaggaacagaactaataagtatatgcatatataaaggggagtttattaaggagtattgactcacacaatcacaagatgaggttacacaacaggccatctgcaakctgaggagcaaggaggccagtcggagtcccaaagctgaagaacttggagtccaatgtttgagggcagaaagcatccagcgtgggagaaagatgcaaactgagag

SEQ ID NO: 951593 - DNA, 628 bp, Homo sapiens
accaaagccagccctggcctctggtcagtggcccacctctagacattccactccaaattcagaaatctgagcctcactgtgcccacctccacacacaaccctgacaacccaaggaaacctagattggaatgagtgcaaggaacacagggcagggagccttctccggagaccttctgggtattaactcgcaaatgattcagcaataggtctgcctgtcttgggatctaaagtaaagtcttgtttgttcaggcaattgcccagacctctttaaccatactggagagtaaagataattaacagtcactacctctgatcagttttgagttaatgattacatgccattttgagtctttaaccatactggagaataaagataatactacctctgatcagttttgagttaatgattacatgccatttggagtcccctggaggaaatgctgttgctcaccacagttctcaaaaagtgaaactgattttttaaagttctttgaacccaccaatgccaaaactactcggtttatatgcataatattgccctccaggctgatttggcttcatgggtaaaacttataacactatayatcatcttttcttgcaagtatctacatattctagccagcttggg

SEQ ID NO: 951594 - DNA, 519 bp, Homo sapiens
  misc_feature 241: n = A,T,C or G
tttagaataatttttgtcacatagtaagagcccctgtatagctgtatttattattattgttactacttaatttttttttttttttttttttttttttttttgctgttgactagagagacacatggggcatgctagtcgaggtcccaagaacctcagcagagagaaaaacagaactactaagcttaaggctgatgagagaggccaagtgtgtcaggttttgtccttgagaagcagataccanaatggaattcaaagtgcaagagatttacttgggggaagcacctatgaaggataaagctaaatgggttggaagaccttctgatcacaatgcaagtgtgatgtctgtgaagggagggagagaggggataaaacaaaacaaggttgaaacagcctcagtctgcagtgcagctctgagtaaggctcagyccagagcaaagattgcctgtttgaggagccacacattaggtagagaggcccagctccagagccttcattggccacagcctcagtgagaacact

SEQ ID NO: 951595 - DNA, 589 bp, Homo sapiens
aagaggatcctaaaaaagaattaattaatacaaaagaaggcaaacaaagagggcaaaaggaacaaagaacagatagaacaaacaaaataaatagcaagatgatggatgtaaacctaacgcattaaatataaatggtttaaacaaccttaattaaaagacatgggctgtcatattagttgaaagggcaataactaactatatgttgcctacaagagaccctaactatatgctgcctacaaaattgtatattttaaatatacaattatgttaaaggtaaaggagagaaaaaagcacactaacattagtcaaaagaaagctgaagtagctcatattaatattagatgaagtagatttcaaattaacatatttttaccaggtataaagaagttcatttcataatgttaatggaatcaattcatcaacagaacataaatcataaatatgtattgacctaataagagattttcaaagtacatgaaacraaaactcattgaactgcaaggagaaataggtaaatatacagttagagtagagatttcagtacctctctctcaataatcaatagaacaagtagtcttaaaattattaa

SEQ ID NO: 951596 - DNA, 471 bp, Homo sapiens
gcaaggatgccaaacaactggactcctcatacattgttgatagaaatgaaaaataatrtagatactttggaaaacagtttggcagtttctaataaagttgaacatatttttactctacaatccaggacacccgctcccaggtatttaccaaaatgaagtgaaaacttacattcaccccaaaacctgtgtgtgattgtccgtggtggctttattcttaattgccccaaactggaaacaaacccagatgtctttcagttagtgaatagctaaacaaactgtgtctagccacagaatggagtactgcaaaggattataaaggaaagaaactactgatacaggtaatgacatggatgcatctcggattcattatgccaagggaaagaaacaagacttaaaaaggtacatactggttacatactgtatgattccaattatatgacataaaggcaaaattatagacacagaaaacag

SEQ ID NO: 951597 - DNA, 471 bp, Homo sapiens
gcaaggatgccaaacaactggactcctcatacattgttgatagaaatgaaaaataatatagatactttggaaaacagtttggcagtttctaataaagttgaacatatttttactctacaatccaggacacccgctcccaggtatttaccaaaatgaagtgaaaacttacattcaccccaaaacctgtgtgtgattgtccgtggtggctttattcttaattgccccaaactggaaacaaacccagatgtctttcagttagtgaatagctaaacaaactgtgtctagccacagaatggagtactgcaaaggattataaaggaaagaaactactgatacaggtaatgacatggatgyatctcggattcattatgccaagggaaagaaacaagacttaaaaaggtacatactggttacatactgtatgattccaattatatgacataaaggcaaaattatagacacagaaaacag

SEQ ID NO: 951598 - DNA, 602 bp, Homo sapiens
tctcccctacttggagattacctcatgacagacatctataamctgactgcaactgagatggcaccagccagcactccaagtggacaacaactcaaaataacccttggaagaagacatgcaggcctgtatcttgtgttactctggcatggttctcatactaagtatcccctttttattttttatttatttttaacatattttttgaaacagagtctctctctgttgctcaggctggagtgcagtggtgtgaacgtggctcactgcagcctcaactcccaggctcaagcagtcctcccaactcttagcctccagagtagctgggactacaggtgtgcaccaccacatctggctaattttttttgtatcttttgtagagatgggttttcactatgttgcccaggctagtttcaaactcctcggttcaagcaatcggacagcctcggcctcacaaagtgctgggattacaggcatgagccactgcgcctggccaagtctccccctttaaaatcccttccttcagtctaacacttgaaatggtcttttggaggcacaagcctggccatttcccaattgctagcatttgaataaagttgctttccttt

SEQ ID NO: 951599 - DNA, 634 bp, Homo sapiens
tcatcaagattcaggaagatggcaaaacccaatccaaggaaaataagaattacaataaagtaatacaggtgctgaaggatgaaatagccagtatgaaaaagaacctaattggtctgacagagctgaataacacaatacaagaatttcacaatgtgggccaggtgcagtggctcacgcctgtaatcccagcattttgggaggctgaggtgggcagatcacctgaggtcaggagttcgagaccagactggctaatatggtgaaaccccatccctactaaaaatacaaaaattaaccaggtgtggtggtgagaggtgacagcatgctggcaaccctcacagccctcgctcgctctcggagcctcctcggccttggttcccactctggctgtgcttgaggagcccttcagcctgccgctgcactgtgggagcccctttctggactggccaaggccagagccagctccctcagcttgcggggaggtgtggagggagaggcacaggcgggaactggggctggcccccatggcacttgcgtgccagcgcaagttccaggtgggcgtgggctctgcagccccrcactcggagcagccagccggccggccccactggccccaggcagtgaggggctcagcacc

SEQ ID NO: 951600 - DNA, 578 bp, Homo sapiens
  misc_feature 1, 2, 3, 4, 5, 6, 7, 8, 9, 10, 11, 12, 13, 14, 15, 16, 17,18, 19, 20, 21, 22, 23, 24, 25, 26, 27, 28: n = A,T,C or G
nnnnnnnnnnnnnnnnnnnnnnnnnnnngagaatttccagaagctttccctaccacagtctccacctttctgcatctatgyccatatactttatcttacctccttgtacataatcttacctaaggcaaaccttgtacttgtgcattagaccctatccttctgcctcctgaaagtcattgctcagcaattcttccccttcttgtgtagcatcaagtttaccctctccgtctgtccattatcatactatttatcccatctaaaagaaaatgaaaaatgacacactataacttctccagttaatacacatttctgtgctgcccctctttgaagcaaactgtcctcggtgttagcattccagtgatctgttctcagtgcccaaaagttgcctacattccttcaatcaaatgatctattctcagtcttcatcttacttggcccatcagtagtcttcaacacagtcaaacactccttcctccctgaaatgctttcttcatttgctttcaggtcatgacacttctcctagtttttcttctactttactgtcaactccttattcttcttcactggtttctgtttgc

SEQ ID NO: 951601 - DNA, 633 bp, Homo sapiens
ttctagtgcatggaattatggtggaaacatgtaggatattctattagttacataagagtagaatttcaggttccaacacccttctgtaagtgamctgattgttctcccaaaagaaaaacatacaaatatgcatagatgagtaaagaatatgtcatggcagggggaggagccaagatggccgaataggaacagctccagtctacagctcccagcgtgagcgaggcagaagacgggtgatttctgcatttccatctgaggtaccgggttcatctcactagggagtgccagacagtgggcacaggtcagtgggtgcagcgcaccatgcgcaaggtgaagcagggcgaggcattgcctcactcgggaagctcaaggggtcaaggagttccctttcctagtcaaagaaaggggtgacagacggcacctggaaaatcgggtcactcccacctgaatactgcacttttccgacgggcttaaaaaacggcacaccaggagattatatcgcacacctggctcagagggtcctatgcccacggagtcttgctgatcactagcacagaagtctgacatcaaactgcaaggcggcagcgaggctgggggaggggcgcctgccattgcccaggcttgcttaggtaa

SEQ ID NO: 951602 - DNA, 595 bp, Homo sapiens
atcagacagaggctggactgacctgtgatcctgagtgacaggtgaaraggcccagttcccgcctctctagttcttctcctgcaggatttggttgtgtttggtttacccatttctgcctatatccctgcaataacctcttcccctctttttactttaagtggattcctgtttcctgtgactgacaggactttgaggggactgacatttctggatgtgacttgcttagaggcatgtttcacaacattgaatcttatgtccagaattttgccttatatagtggtgagcagaatatgaaactaaacacgaatggcttctagtgaacatctcatggtgatgagcaacacacagtgggtgcactgggactgtagattttgatgttgatatttaaaggtttctgtaattagaaacaatttttttatcattttgatgtgtggatgaaacaggaaataatagcaatatcatgccctttatttgctttgttatggatggacattttaaacattgcaacatggctttctagagagtcagggcaacaaccacagtaggctcctgagttgagtcagaaaatcatgaccacttattcatcctattatat

SEQ ID NO: 951603 - DNA, 598 bp, Homo sapiens
tctaacattagaatcataaggcttctattttttttgagacaaggtcttgctctgttgcccaggctggagtgtagaggcataatcttggctcactgcaacytccacctccaaggcttgagtgatcctcccacctgagcctcccgagtagctgggaccacagacatgcaccactatgcctggctaatttttgagtttttgtagaggtgggaggctcactatattgcctaggctggtctttaactcatgtgctcaagcaatcctcccaccaaagtgttgggatcacaggtgtgagccactgtgcccagcctcataaggcttttgtttaaggatctcttaagacatttttttcaggccatgaattccagcaactagtttgaagacccccacagaggatcgagatcagcatgagaacccggcttcttcatctccctgtcccatgacttcaccccacactttttaaccaaccagtgatctccgctcttcaacccactccaaaacccttaaaaaccctatcctggctaatttttgtaaatttagtagagatggggttgtatgtatgttggccaggctggtcttgaactcccaacctcaggtgatc

SEQ ID NO: 951604 - DNA, 477 bp, Homo sapiens
aaagcaggcagaagaacacggggggactagacttgctgagtcttctggcctccatctttctcctgtgctggattcttcctgcccttgaacatcagattycaagttcttcagtgtttggactcttggacccacaccagtgctttgccaggggctatcaggcctttggccacagactgaaggctgcactgtcaacctccctacttttgaggtttttggacttgggctggcttctttgcccctcagcttgcagatggcctattgtggaacttcaccttgtgactgtgtgagtcaattctcctagtaaactccctttcatatattcatctatcctattagtcctgtccctctagagaaccctgactaatgcacaccttaataaaaaatgtcatcatcctggccaattccatctgcaaagaccctattccaagtaaggtcatattctgaggtttcaagtggatgtgtgttttttggggacac

SEQ ID NO: 951605 - DNA, 721 bp, Homo sapiens
catgagaacagcatgggggaaactgtctccgtgatccaatcacctcccaccaggtccctccctcaatacatggggattataattygagatgagatttggatggggacacagagccaaactatatcactgtcctaggtcagtttcctagaaccagagctaagatgggaattcttgcgaaccttattgactggggaagcattgccctttgaaggagagtgagggaacaggatagggcaagggaagcaagttaagcaagggtctggtcctcaatggagactggctccagcccagtcccatggggcgctccagaacacagaccgcacctcgtagttgtcccatcttgacacaaggggagtggcattttgtgccctgtcattgtacccaagcaaaggttatcctctgctcacaaactgctacctgcagaagcaggctgttaatatgtgtcaggagtagccccccaggcaagataatccccctatgccaggacagttgagtggagcagctctcagcccctagcagccaacactcacagcagaccctcagcaatcaattcacatccccaggagattcaagctagagcaagatggcttggccaataaagctgaagaaagcctcaaatcgacatacttttccttcttctcccatggggaactagactaactcagcagccaaccaagacaaaagggttctttatggagtggtgtcctcataatcacatttg

SEQ ID NO: 951606 - DNA, 760 bp, Homo sapiens
caatgttgcctcctgttaaagctctcagatttgtccatctctctatctccttctctgccaacctagcccaagctaccatcgtctgtcaatagcctcccaggtggtctgcccacgttcactcttagtttttcgccactgtgcagccagaatggtatttttgcaaacaaatctgatcttgccactccccctgtaagaaacattaacagcctcccagggctcttacaactcctctactggacctcagtttggcccctgctgacctcccaagcctcaagccataataacctcccacttaatccccaaggggcaaccacaaagattttggttcctcagacagaacacattcccttgattacagtgactgttcacacactgtttcctgggcctaaaatgctcctttcctctctttgcttggttaactcatactcttcctccaaatctcaaataaattatcattcattcaactcaacaaatatttactggacacctactacatgccaaataccgtgctaggtgctggaatgcagcaacaaacaaatcaagcttctgtcctcaggaagcttacattctcctagggggagggggagaggagaaaataaacacatataaaatgtaccaggtggtcataagtgccccgaagacaaaaagggtagagggagtgaggggaggcaaatgctattgtattaatatctwtagagaaggtatctatgataaagtgttatcttattttaacagagacctgaaagaagggtgggagcca

SEQ ID NO: 951607 - DNA, 587 bp, Homo sapiens
aaagaggtgggaccaggtgcagttgctcacacctgtaatcccagcactttaggaggccaaagcgggtggatcacttgaggtcaggagtttgaggccagcgtgaccaatgtggtgaaaccctgtctctactaaaaatacaaaagaattgctgggcatggtggcgggtgcctgtaagcccagctactcgggaggctgaggcaggagaatcacttgaacccaagaggcagaggttgcagtgagccaagatcctgatactgcactccagcctgggtgacagagcaaggctccatctcaaaaacagacaaacaaacgagatggaatttggttctttacatcaaaaggtgaactacaagacacagggacagtttgtgtgcactttctataagctgctgaaactagcttaaggtctgcagttgcttgtcagaaaagagtatttgtaaggtcagtactctgtccagagttgcagtgatctgagttataaatcaaagttaggaggaatgtgataatttgtktaatagctcctattcttagcaaatttagcaagaccgtggtttttcttgtagctgtagaaatttagggagttgcca

SEQ ID NO: 951608 - DNA, 552 bp, Homo sapiens
gtgcccctgcctgtaccatcctaagagaggtttctgcttcctgtgtcctgctctgtgggctccccaggtacccctgyagtttttgcctaatactttggaaccaacaataataacttatgaaatctttatttcaaacacagcttgaatttcatccattttcatcttacccaaagagatagattctctagtctgcaatctggatggtcagaatggagaaatccccttacctgcaaacacaggtcttttattttgtaaccactgtctgtctggttttctgttttggagtctcccagggtgatggtgccgccagataaaagttctaatgagagagggagggtgggagggaggttccggtggcaaggcagggcggaaggtaagcggagaccttctccaatcagaagtctagaaggcagggcacgcagtaggtctgcagaatgactcagaacccgcgtatgaatgctgtctattcatgggtccaggcttttgttaaagcctgggcctgcattttaaagagggagtcagggaactggctggactggtctgacaactaag

SEQ ID NO: 951609 - DNA, 533 bp, Homo sapiens
gggactacaggtgtgtgccaccacgcctggctaatttttgtatttttagtagagatggggttttgccatgttggcyagggtgttctcgaactcccagcttcaagtgatccttctgccttggcgtcccagagtgctgggattacaggcattagccgccatgcctggccgaaatgtatttcttaaacagtaagacttaaaaattgaaattactcattgatgcatgggctgcaggatagatgttgtattgtacctgcaggcatgaaagtaacattcttctttctgaacatatccatcaaagccctcgaatgacatggtccattgttagtgagtgctaatattttgaaatgaatgttttttccttagcagtaggtcttgacagtggactgaaaatattcagtaagccaacctctaaacagatgtgctgtcatccaggagactgttgttccatatgtagacagcaagcagattagatatagcataattcttaagagctctaggactttttgagtggcaaatgagcattagcttcaacg

SEQ ID NO: 951610 - DNA, 398 bp, Homo sapiens
ctgaacttgagtgaaagctgtccatcaggcatacagggaatgatggaaaaagtgacaacagaagatgaatgctatgtcactaaccttcaaatatgaccttccttgtcttttaaattcttgatatcttaagacttcattaattcatctctctttgccctgggttcaacattgtgctataccaaaactcatgtaaaacaatgatctaaggtaataaaaatggcatttttctttcatgtggatgcaagctaactggcatttttacaatcaacatatttcctttgtcaatttttsattctgtattggaagtaattcatgggtatttctgaagggaagatggtgtttctgtgttcattgtgatccaaactgtttttagacctagtggcgtttgtaaaacaatt

SEQ ID NO: 951611 - DNA, 398 bp, Homo sapiens
ctgaacttgagtgaaagctgtccatcaggcatacagggaatgatggaaaaagtgacaacagaagatgaatgctatgtcactaaccttcaaatatgaccttccttgtcttttaaattcttgatatcttaagacttcattaattcatctctctttgccctgggttcaacattgtgctataccaaaactcatgtaaaacaatgatctaaggtaataaaaatggcatttttctttcatgtggatgcaagctaactggcatttttacaatcaacatatttcctttgtcaatttttgattctgtattggaagtaattcatgggtatttctgaagggaagakggtgtttctgtgttcattgtgatccaaactgtttttagacctagtggcgtttgtaaaacaatt

SEQ ID NO: 951612 - DNA, 596 bp, Homo sapiens
cacttagatttcagaggatgtatggaaaagcctagatgtccagagagaagcctgctacatagcagagcccttgtggagaacctctgctaggacagtgtggaggggaagtatggtgttagagctccaacaaagagtccccatagtggcactgcctagtggagctgtgagaaaagggccactgtcctccagaccccagaatgataggtccactgacagcttgcactttgtgcctggaaaagctgcagatacttaatgcccagcttatgagagcagccaccaaggctgaaccctggaaaactacaggagtggagttgcccaaggccttgggagcccaccccttacatcagtgtggcctggatatgagacatggagtcaaaggagattattttggagttttaaaatttagtgactgtcctgctgagtttcgttcggatttcatggggcctgtaacccctgtcttttggcttattcctcccatttggaatggktatatttacccaatgcctgtaccccaattgtatcttggaagtaactaactttttattttagtttcataggtggaaatgactggctttgtctcagatgaggctttagac

SEQ ID NO: 951613 - DNA, 629 bp, Homo sapiens
attttagcattcagtattcgtttttatgacctgattcttccaagtgctcaaataaatatccattgagctaagttctgttttctttcccttctctgtacttggaacactttctaggtagactgtcttccttttgtatttttagacttattatgagtgtctgaccctcagtcagggttcaataaatctttagaacatgaatcaattactgaatattctagacatcataccaatattctatcttgaatcaagccaataatttattttcttcatttctgttgagctttgctagagataaatcatatgattatgcttatcaacactgctaccaatgtgttgatcccttcacattctcaaaaattactaagcaccccaaagaacttttgtgtatgtagatatgttggtatttaccataggagaacttaaaactgagaaatttaaaaagtatgtgttaatgaattcatttaaaaataataatagaacgggttcagtggctcacacctgtaatcccagaactttcagagcytaaggcgagtggatcacttgatgtcacaagtttgagaccagcctgggcagcatggtgaagccctgtctctaccaaaaaattcaaaaaaatttagctgcatataatc

SEQ ID NO: 951614 - DNA, 564 bp, Homo sapiens
ttgtggtgatggaacagcttcgtatgttgattgtggtagaggttacatctatctatacatgggataaaaatgcatagaatggaggcagggcatggtggctcatgcctgtaatcccagcactttgggtggtcagctaaggcaggaggattacttgaggccaggagttcaagaccagcctgggtaacatagtgagacccccatctctattaaaaaaatacaaaaaaaaaaaaaagccagacatagtacctggctatgtagtcccagctacttggaaggctgaggtggaaggatcatctgaacccaggaggttgtggctgcagtgagctgtgattgcaccacagcactccagtctggatgacagagtgagactatgtctcaaaaaagttttttttaatgcatagaactgcacacacacacacatacacacacacacacacagcaacacacagagcccamatcttatcagtattctttttttttttctttccaacttttattttaggttcaaggggtatatgtgcagggttgtttcatgggtaaattgtgtgttacaggtttggtgta

SEQ ID NO: 951615 - DNA, 622 bp, Homo sapiens
tttttcaatcctcccattcctccaccttacctgatagatattttttgtcacygaataggtagttttcgatcatcccactctccaccctcaactaggcctcagtgtctgttgttcccttctttgtagtccatgtgtatgaatgtttagctcccacttgtaagaacttgcagtatttagttttctgttcctgcattagttcacttaggataatggcctctagctctattcatgttgctgcaaaggccattatctcattttttatagctgcatattattgcatggtgtatatgtactacattttctttatacagtccaccactggtaggcacataggttgattccatgtctttgctattgtgaatagtgctgcaatgaacatacatgtgcatgtgtctctatggtagaacgatttatattccattggttatatactgagtaataggattgctgggatgaatgatagttctgttttaagttctttgagaaatgtccagactgctttccacagtggctgaactaatttacattcccaccagcaatgtataagcattccccttcctctgcaacctcaccagcttctgttattttttgactttttagtaatagccattctgactggtgt

SEQ ID NO: 951616 - DNA, 648 bp, Homo sapiens
agaatgcgttgaagaatgggcaaataaaatcgggaatatttagaggtaggaaggtggtgaaaaggttcacaaagaagtttcaatttcaacaaaaagcttttaattcaaagatttttctttctttttctgagagtgatcagaacatgaagatggctgttgggagacaaatctccatgtatcctttatgttcccaaacatcttttgggcaaaggcactaagtgcctttgtgcctgtctgtctttacaagtatgtttatatcgtgaacacactaggaagatatagatagtgtctctctctggagcaaagggtaggttttttatctttatacagtaaagataatgtctccttatggggcaacaatcagtgaggattattgtccattatgaaagacttgagttccttaccttggttctcccctgtcacatatcccgctacatgtgcagcatctcctggccctttgcacacccttctgtgggagttggggctcagaatgcaacacaaatgatgatactctaggtactactattctgtgcataataaaccatcttttgtctctgactcaagagtctcatggcttttgctrgcatccataaaactggcagggcaaatcctgatacccttcacaattcttggcagttttggcagtga

SEQ ID NO: 951617 - DNA, 671 bp, Homo sapiens
cttcaatgcctcactttcagcattgagcagatctcccagaaagaaaatcaacaaagaaatattggacttaatctgcactatagaataaatggacctagtagatatttacrgaacattttatcaaagggctgcagaatacacattattttcttcaaaacatggttcattctcaaggatagattagatggtaggtcacaaaacaagtctcaaaacattctaaaattaaaataatatcaagcatcttctctgtccacaatggagtaaaagtagaaatccacacagctacagttaacctatttttgacaaagatgctctattagttcattttcacactgctgataaaaacataccagagactgggtaatttatacaggaaagggtttaatggacttacagttccacatggccggggagcgtcataatcatggcagaaggcaaggagaagcaagtcacatcttacatgggtggtggccagcaaaaagagagagcttgtgcagggaaattcccatttttaaaaccatcagatcttgtgacattcattcaccatcacagctctagtagttggtgtcccagtagggatctgtgtgagggctccaaccccacatttccctttcacactgccctagcagaggttctctatgagggtcctacctgcagcaaacttctacctg

SEQ ID NO: 951618 - DNA, 662 bp, Homo sapiens
gtttaatggacttacagttccacatggccggggagcgtcataatcatggcagaaggcaaggagaagcaagtcacatcttacatgggtggtggccagcaaaaagagagagcttgtgcagggaaattcccatttttaaaaccatcagatcttgtgacattcattcaccatcacagctctagtagttggtgtcccagtagggatctgtgtgagggctccaaccccacatttccctttcacactgccctagcagaggttctctatgagggtcctacctgcagcaaacttctacctggacatccaggtgtttccatacatcttctgaaatctaggcagaggttcccaaaccccaattcttgacttctgtgcacctgcaggctcaatagcatgtgaaagctgccaaggcttggggatcgcacttgcaccctctgaagctatgacctgagctatgccttgacccctttagtcatggctggagcatctggaatacagagtatgaagtccctagagtgcacacagtagggaggccctgggcccagcccatgaaacaattttttcctcctaggcctttgggctgtgatgggaggagstacctcaaaggtctctgacatgcccttgagacattttccccatttttttttggagattaacatttgactcctcat

SEQ ID NO: 951619 - DNA, 502 bp, Homo sapiens
gtcagggtcagtccaagtgaaagcgaagagaggctgggatgaagggtgcaaaggaacagtaaagaaagcatgtttgagatctagaacagaataatgggttgtagaggcacgtattgaggataggagagtrtatgggtttggcaccatggggtgcataggcaaaacaatttggttgataaggcgcagatcctgaactaatctgtaagacttgtccagtttttgggcaggaaaaatgggggaattgtaaggagagttataggttttagaagcccatgctgtagcaggcgagcgataataggctttaatccttttaaagcgtgctgtgggatgggatattggcgttgagtggggtgagggtgattaggttttaatgggatggtaacaggcatgtgatcggttgccagggaaggagtggagatgtcccatacttgtgggttaaggtgggggaataggagaggaagatacacaggaggctttgggttggggagaagggcagcaatga

SEQ ID NO: 951620 - DNA, 695 bp, Homo sapiens
ctgtgttgaaacacatgctctcgtgtyttttattttatttcctaactgctctggctaggacttccagtcattactatattgaatgagagtgacgaaattagacattctaatcttccagtacttagaggaaaagctttctgcttctctccattctgtatgatgttagctctggagatgtcatatatggcttttattatgctgaaatgtgttccttcagttcctaatttgttgcggttttatcatgagagggatgtttaatattattaagtacttttctgcatctattgagatgatcatatagttttcgttttttattctgttgatgtgatgtatcacaatcattgatttgcatatgttgaatcatccttgcatctctgggacaaatcccacatgattatggtgtgttacctttttgatgagtttttgaattcagtgtacaaatattttgttaaagacttgtctatgttcatcagggatagttttcgtgtagtttgtttttgttgttttttgtgctcctgtgtggttttcgaatgtgagtaatgcaagccttatagaatgacttagtaggaattccctcatcaatgttttttgaaatactgtgagaattccttttatttctttataacagtgtgaaaaaattgttttttatttattaattgctataagttgacctctctttgcactgcttttgctat

SEQ ID NO: 951621 - DNA, 582 bp, Homo sapiens
gctagaacagtgccaggcactaggatactcaataaatattgtctgaatgaatacactgcaatagaacagagtcatcctcattgtttagtcatgggaagaaacagttgctttgcctcgggttgtatcamtagccagccattctttgactggctttttggggctggttgctgcagctccttctgcatccagacacctttttctggaatcagctaatccaactgtgcaacttcatgggaaaatgtgtaatgagtaatggggcctcttaaccgggaaaacaaatagaagaaaaataacctgtgaatttatcatcttgccccaaaccttggtacgttaaaagaaatctacacaattgagagccatatttgctggaattcctgaaacagttttgattttaagtgtcttgtctccctgtcccttaagtcattggctgaccatgtgctcatcacagttagactggaaggtagggagagggaaaactaagatagcaggaaagaggtaagaggctctacccaagcttaatttgaactaaattatctcctctagatatgtcattctgttaattattaaaaactccatcaagta

SEQ ID NO: 951622 - DNA, 605 bp, Homo sapiens
ggacaacctgcctgcagaaagragctacccattttgggtctcctgagagctgttctgtcgctcaatgaaactcctctctactttgctcaccctgcagtggtctgtgtagctcattcttcttgtacgtgggacaagaactcaggaaccgccgaatggcaggactgaaagagctgtaacaccaacagggctgaaacatgtgccccacctccctgtttgccacaccgtgggcaatgagaaggggaaaaaagctgtggcccttcagggatcccagacctaggggatccccaagccagagctgtgacaccctctttggggctgtgtggttcctggcatctccaagcttctgggtaccaccacattcccctcatccagacgtggatgcctgcagcagaagctgtgtgtggtgcatctgttccagccacagcttcacatggagctggcacctgtgccagagcctggagctgcctgccctgccacagcagccagcatccctggctgtgcacagtgacctcacctcgcactcgctcacccacacacccctcgccactccctgcctggcttgcctttggcaggtgtcagatccaggccggtagtgcaagccaagc

SEQ ID NO: 951623 - DNA, 605 bp, Homo sapiens
ggacaacctgcctgcagaaagaagctacccattttgggtctcctgagagctgttctgtcgctcaatgaarctcctctctactttgctcaccctgcagtggtctgtgtagctcattcttcttgtacgtgggacaagaactcaggaaccgccgaatggcaggactgaaagagctgtaacaccaacagggctgaaacatgtgccccacctccctgtttgccacaccgtgggcaatgagaaggggaaaaaagctgtggcccttcagggatcccagacctaggggatccccaagccagagctgtgacaccctctttggggctgtgtggttcctggcatctccaagcttctgggtaccaccacattcccctcatccagacgtggatgcctgcagcagaagctgtgtgtggtgcatctgttccagccacagcttcacatggagctggcacctgtgccagagcctggagctgcctgccctgccacagcagccagcatccctggctgtgcacagtgacctcacctcgcactcgctcacccacacacccctcgccactccctgcctggcttgcctttggcaggtgtcagatccaggccggtagtgcaagccaagc

SEQ ID NO: 951624 - DNA, 621 bp, Homo sapiens
attataccaaaggcaggaaaggggatagaatatggggatcatcacaccaagaataaggtgcagcccatttagcccctgggtcttaaagagacccatagctctggataatggcagatctatgcgtgacacagttatcatctttgtgcatcttcagagaattgtttttccttttactcctaggaacaatgtcttaagtttgttagtaaattctattgaatttattaaagattcttctgataaattctttttatattcatttcaaaaaagaagaaatttcacactgacagagacattgttattatagcactaaatacttttacactcttcaaattcctttgaggctaactgaaatttctgacagccccacattctacaactttattgtaaattttctgccaaaagtgatgcttccctatacactcctaatacaggtataaatatattatttaatctaggcttaggttgatttaaaattttgaaaattcactccaaaaatatgttctgtaaccgtatggccaccaatgagaartgtattctttcaaggtaaatctgtgctgccctggtctgacctgggactctggggatactgcgcccctgtgctgagttactgaaatgagccag

SEQ ID NO: 951625 - DNA, 621 bp, Homo sapiens
attataccaaaggcaggaaaggggatagaatatggggatcatcacaccaagaataaggtgcagcccatttagcccctgggtcttaaagagacccatagctctggataatggcagatctatgcgtgacacagttatcatctttgtgcatcttcagagaattgtttttccttttactcctaggaacaatgtcttaagtttgttagtaaattctattgaatttattaaagattcttctgataaattctttttatattcatttcaaaaaagaagaaatttcacactgacagagacattgttattatagcactaaatacttttacactcttcaaattcctttgaggctaactgaaatttctgacagccccacattctacaactttattgtaaattttctgccaaaagtgatgcttccctatacactcctaatacaggtataaatatattatttaatctaggcttaggttgatttaaaattttgaaaattcactccaaaaatatgttctgtaaccgtatggccaccaatgagaaatgtattstttcaaggtaaatctgtgctgccctggtctgacctgggactctggggatactgcgcccctgtgctgagttactgaaatgagccag

SEQ ID NO: 951626 - DNA, 575 bp, Homo sapiens
gtaaggtgtttaaattagtaatcaaaaatcttccaacaaagaaaatctcaggtgcagatgactttactagagaattctgccaacatttaaggaagaattaatgccaatatttctcaaacattcctaaaaagttaaagaagaaagaactattctaaactctttttgtgaagctagtataaccctaatatcaaagccagacaatggtgctacaagaaaaaaaattaaatattcctaatgaatgtagatgcaaaatcctcaacaaataccagtaaattgaattcaacagcactataaagtatcatccaccataattatgatggatttgttcctggaatgcaagaagggttcaacatgtgcaaatcaatataatatgccacattaacaaaataactcaaataacgtgttcatctccgtagatggagaaagatcatttgatgaaattcaacattctctcrttagaaaaacacttgaaaaaataggaatagaaagaaattattccaacagaataaaggccatatgtaaaaacccacatttcacaccatattaatgaagaaaaactgaaatctcttcttcta
